United States Patent Application Publication US 2022/0090207 A1 - sequence listing, part 5

SEQ ID NO: 49171 - DNA, 769 bp, Homo sapiens
  chr11:133826702-133827471
  hyper
cgcacgcgcctcgcgcccgagcgcccgcctcgcgcccgcctcgcgccgcctacgccccgcgccggtgctcctgcagcccgggtggccagctctccatccctcctaggctccgctcggctcggcgcgcgcctccccggccccggcgcagcggcacctgcactactcgcccgggcggagcgcagccaggtccacggtgaagcctagccgggccgggcctccggaaccgcccccgccgcccgcctattgggcgccgcccgcaagccgggggtccgattggctcagccttccgcccgtcgcggcgcgaaggaggcgagcccatttcaaggtgcgttgaagtgtggcgagcacagagccgcagaatcatgcgcattgccggggagaaggtggtatagcgtctctgcccgcttctctctcggctcacactgcgtggcaagtttctggtgagggaaatggtagcttctaacgggaccctggcgggtctcaattaccccggacaggtctgagggaagtggagcccccgcccactcatggaacccaacatccggtttccatccggcaaaaagcagttcccgagaggaccatgctgattctatgatggggaaacccaggagccggcggcccgggagagccggggaacgtccttcgccggagatcttttcaaagaggtcacgcgccgcctccccaccccgtctccctccgcacccagacacgtccccagagcagcgcaccaccccctccaaacgtgatgcagaccgggggatgactaaaa

SEQ ID NO: 49172 - DNA, 30 bp, Homo sapiens
  chr11:133907214-133907244
  hyper
tatgaagccgtaaccggccagcgccgcggc

SEQ ID NO: 49173 - DNA, 30 bp, Homo sapiens
  chr11:133907735-133907765
  hyper
gccgtcagcacaggcggcagctgcctccca

SEQ ID NO: 49174 - DNA, 280 bp, Homo sapiens
  chr11:133920425-133920705
  hyper
aaaaaatactgggatgctatacacaaaattgccttgaaaacttgagcacggaacaccaaacagctaagcgtgccggtttggggagggcgggggaggaataaggagctgcaacggtaagaggccgccacacggtggcgcagtgaggctgggaaacggtgcaccccgcgcaggagggggcactccccgtcgcggccacccggggtgggcaggaggcggcgcgggctggctggtctctcccgagaaggttctctcccgagaagggtgcgtctcagggcttgtc

SEQ ID NO: 49175 - DNA, 877 bp, Homo sapiens
  chr11:133938735-133939612
  hyper
catacttctttactctcctcccgccaagttcattgaaagagaacccatgtgccggtccagagcatcgctgcatccgtaagcagctagacctcagcttcctctgtcaccatggtgccggctcggctgggcccggcggtcgccatggtaactggggcgggtcgcagggtcctggcaggctgggcgcatgcgcgcggggactacaagccgcgccgcgctgccgctggcccctcagcaaccctcgacatggcgctgaggcggccaccgcgactccggctctgcgctcggctgcctgacttcttcctgctgctgcttttcaggggtgagtttgcgcgtttccgctgttgggagactagggtctgggggcgacggaagcagagcgggccgaagctgctggagccggtccgggcgaggatagcggtcctggctccgagggctcccggggtcccgggccggaggggcggcgcgcgcccgcgtccccgcagccagggctgggactcgggcctggctagggcgggggccctgggacgcccggcagttggaccggggcggggagctaatttgggatggggggcccgtcccaggcagtgagtcggtcccggacagccgtcggaccccgggggcgggctcttctcgggcggggtcctgtgctgggcggtgggctcatcccccgggtgggctcctcccaggcggggtcctgtgctgggcggtgggctcatcccccgggtgggctcctcccaggcggggtcctgtgctgggcggtgggctcgtccccggggtggacccctcccgggcggtgggcacggccctctggagggagcgcggcagctgcggcgtgggcgctggaacttgctggaagaccctgcgcagcagtgctgtg

SEQ ID NO: 49176 - DNA, 30 bp, Homo sapiens
  chr11:134094354-134094384
  hyper
gggactgcgcggcacgcgtgggcccagagc

SEQ ID NO: 49177 - DNA, 61 bp, Homo sapiens
  chr11:134094605-134094666
  hyper
tgggcagctcgcagcgctgctcggcgctggaccccacccggcaggcgcaggccacccacac

SEQ ID NO: 49178 - DNA, 30 bp, Homo sapiens
  chr11:134123398-134123428
  hyper
gggacaggcgttgccgggtcgcaggtcccg

SEQ ID NO: 49179 - DNA, 958 bp, Homo sapiens; identical to SEQ ID NO: 8498
  chr11:134145468-134146426
  hyper

SEQ ID NO: 49180 - DNA, 155 bp, Homo sapiens; identical to SEQ ID NO: 8499
  chr11:134146444-134146599
  hyper

SEQ ID NO: 49181 - DNA, 304 bp, Homo sapiens
  chr11:134146621-134146925
  hyper
cggcctggccgcgatgaagtccccgcccctcctcaggtgacggatcgccgctgccgtcccgggctgcccaccaccccggcgcgtgcccgggagcctccaccctccccgggttctgtggccggccacgcgccccaggcacgcgccgcgccgggccgcgccaccaagcccgctgtccccagctttcctcggcagatcccctggctacccccaccctgcggaggggccgttcaccagatgccagaaaatcagggtggggcacgcaggccaggggctccagcggctgggcaccgtgtccttcccgaac

SEQ ID NO: 49182 - DNA, 966 bp, Homo sapiens
  chr11:134201432-134202398
  hyper
ttgcccctgctttgcggacgccttttgtacgttcttcctgatgtagcgctgcgaggggcgactttacctcggcgtttgacaggtacgcagcattcccgcacccgcctgcgcctcgcgagcagaaagacggcggactctgcaccgctccacgacactggggacccgccccggccagacccgtcccctaccgagaccttgtccccgccccgcccccggccggggccccgccccgccagccccgcccccgccagccccctctcctaccgagacctcgtccccgcccaccagccccgccccgccccccccccgacagaggccccgccccggccccggccagccccgcccccgcttgcgcgaggcctagggctgcaggcgcggagccgcgagccccagccaatgagcgccggcgggccggttgcccaggcgaccagtgcgcggctccgccccccgcggcgaggctcccgcgcgcggctgagtgcggactggagtgggaacccgggtccccgcgcttagagaacacgcgatgaccacgtggagcctccggcggaggccggcccgcacgctgggactcctgctgctggtcgtcttgggcttcctggtgctccgcaggtgagagagagcttcgcgcagcacctgccggaccccacattccccagccctccgcacctcgggttctctcctcccgcgacccgcgaatcccgagttcccggggggagcagccccagctgcttctttctgggagctccccaatacccccgagttcccctgcggctgcaggcactctactcctgccgcgcgatccaggcctctgggcgacacccggcgtgccctcgggagccggcgtctgtgccccgagccgcccaccccgccgcgcctgtgacgccgggctctgccccccgtggacgcccgcagccctccagccgtcagagccctctcagacgcaccccatcgcggccccgtccccac

SEQ ID NO: 49183 - DNA, 140 bp, Homo sapiens
  chr11:134230254-134230394
  hyper
gtcagtcaaggacccagacctcgtgtctccggcatggggaggaccagcagtgatccccacggcttccacgcggtggcgccgtctccccacggctgcttccaaggcctgctccgggctccgcagggctgtggctgtgttgg

SEQ ID NO: 49184 - DNA, 163 bp, Homo sapiens
  chr11:134281376-134281539
  hyper
gggccgggaactgacgactgagagcccgggccgattgttagaagctgctgagaaccagctcttcccctaatcccggtcgacgagggcaggctgtgccgggttttgtttcgcagcccctcggcagcagcgcctcccagcccgagctcggttctcggcccccttt

SEQ ID NO: 49185 - DNA, 47 bp, Homo sapiens
  chr11:134281595-134281642
  hyper
acaccccagcgcgcgcccgggaggacatggcgtgggcaccgatgggg

SEQ ID NO: 49186 - DNA, 174 bp, Homo sapiens
  chr11:134281706-134281880
  hyper
cgacgagtccggagcgtctccggtgcggtccatcgcgggcaacggcccctacgccccggccccggcgcccctagaccgctgccctgggccgcgtgcggctccctccccggggactgtcgggctccgggcccccgggggccacttcatagccgcggggtccgcgcgcccgcccgc

SEQ ID NO: 49187 - DNA, 170 bp, Homo sapiens
  chr11:134282249-134282419
  hyper
cagcctaggcgggggcgcgaggagggaggccggcgaggggacccccccccgggattggtatcacctccccaccgccccccaccctcccccggcaccgtcccccgcggaggcggctcccgcttcaggcggcggagcaggggtggcgggcaggggccgagcgcacccccaga

SEQ ID NO: 49188 - DNA, 30 bp, Homo sapiens
  chr11:134282903-134282933
  hyper
ggcgcgcacttggacgtatgtgggtgcact

SEQ ID NO: 49189 - DNA, 31 bp, Homo sapiens; identical to SEQ ID NO: 8504
  chr11:134738700-134738731
  hyper

SEQ ID NO: 49190 - DNA, 177 bp, Homo sapiens
  chr12:298328-298505
  hyper
cgggaagtactggactagctgcgggcaggggccggctgaggcgcgcgcccgcgtgctaggggccccgggggagggcggcggggacgcggcgctactcccctctgccacccggcggccgcagacagcgctgcgccggcctcgcgtttttcgttttccgccagacccggcctcgtaact

SEQ ID NO: 49191 - DNA, 30 bp, Homo sapiens
  chr12:511347-511377
  hyper
ccctagctgaaacccgttaatttacctata

SEQ ID NO: 49192 - DNA, 73 bp, Homo sapiens
  chr12:568902-568975
  hyper
tcggtcacccagagtccgcatcatcactcgccccctcctcatcccacccgttcccagtcgggggaggcaccag

SEQ ID NO: 49193 - DNA, 110 bp, Homo sapiens
  chr12:570023-570133
  hyper
cggagaccgggcccctccagccgctccgggcttgcggttcccggggaggaggtccgtggggtccacgcgcgagctagggattcgggtgcgggatgccctcggccgtccac

SEQ ID NO: 49194 - DNA, 210 bp, Homo sapiens; identical to SEQ ID NO: 8506
  chr12:694939-695149
  hyper

SEQ ID NO: 49195 - DNA, 381 bp, Homo sapiens
  chr12:708873-709254
  hyper
gtcccagcaagtctggaagtgcggaggccctcccagccccacgactgcgcttggcctactgcctctcctcctcagcttggttggacctgcaccccagcacgcccggggggctcacattcctccccgagatgccgccactgattcaccatggtgccagtgtcccattgcccgtctcgggcacaggagtagccgtgcactcaggatacctctgatgccaaggtttgagcagctctggcccagcccgcctccttctgcccagctgccagggccccgatactcagccctcccctgcctggtttctgagtctgaggaatgtgcccagaagcaaattggcgctgagattcacatttactcctttactccttccgaacgcctgagcca

SEQ ID NO: 49196 - DNA, 83 bp, Homo sapiens
  chr12:1059278-1059361
  hyper
agaccttcccagattccgcccgggccgaggcagcggtggacctggtggttctcgcggcctctcaccaccgccgcgcacatcca

SEQ ID NO: 49197 - DNA, 30 bp, Homo sapiens
  chr12:1099808-1099838
  hyper
taatttcgcggccgcgttccacgaagctaa

SEQ ID NO: 49198 - DNA, 31 bp, Homo sapiens; identical to SEQ ID NO: 8508
  chr12:1639826-1639857
  hyper

SEQ ID NO: 49199 - DNA, 373 bp, Homo sapiens; identical to SEQ ID NO: 8509
  chr12:1640390-1640763
  hyper

SEQ ID NO: 49200 - DNA, 31 bp, Homo sapiens; identical to SEQ ID NO: 8510
  chr12:1714947-1714978
  hyper

SEQ ID NO: 49201 - DNA, 79 bp, Homo sapiens
  chr12:1762155-1762234
  hyper
ctgcatgtgaccacacagtgtcgctatcttctcagttctagccgaatagctctggcccgcaccttggttcaaaaaaaca

SEQ ID NO: 49202 - DNA, 30 bp, Homo sapiens; identical to SEQ ID NO: 8511
  chr12:1799955-1799985
  hyper

SEQ ID NO: 49203 - DNA, 815 bp, Homo sapiens
  chr12:1905620-1906435
  hyper
gcccacggtcataagcgggggagcgcagagccagttttcaattcaggagtgtctactctgaagccctcgcttcactccggagcccgctggctctatcctcgcaccgagcctttgcgacaagtgcacagggaacgctaaccccagccctcaacgctgcacagaacccggggtgaaacccgcgcagcacgacgcgcagggagtgggggagaagggagccccgatgccagcgccgcaggtgccgcactgttaaatggtgtgccacgggcccgggggtctagggaccgcctggcgagcggcacgtctggctgaggcgaccctcgaggaggccgccgcattcccagcgtgggggtcctcccgggcttgggtgcggggggtcagcaggagagacccttccgcgcggcctccctgcctccccggggccagggcgggttataactagcggcttccacacagcaggaagcctgacagaggctgcccgcggggctcccagcgacccgaggacatcgcacacttccggccttctcttctcacactccctctgccttccaagttctccccacgcagctcaggcgcgggcactggcaccgccctgggcaccgcctgagcagggctgggggagacccgccgaagggcccactcgcccagagacgccgtggggtcacggctgcggcctcggcggggtgggctcgacacacagggtcaggcctcgggaccacctctccccatcccggctgtcccggtccccagccgtcctgcccgcctcagaccgtccgcctcctgcgtgtctcctccactgaggacggcgggggaagacc

SEQ ID NO: 49204 - DNA, 71 bp, Homo sapiens
  chr12:1906476-1906547
  hyper
cggctgtggagccgtttcccgggggttccggggccctgcccgcacttccgccttgccgagggcgggaggag

SEQ ID NO: 49205 - DNA, 30 bp, Homo sapiens
  chr12:2113104-2113134
  hyper
ctgctctactttctcgagcacatcggtctt

SEQ ID NO: 49206 - DNA, 330 bp, Homo sapiens
  chr12:2144045-2144375
  hyper
gtacaggatgctatgggacaccgaatccaactttgcgggacaggggaagaagccttaggagctggcgaggcgagggggtgaagaggagaaggaggtctgggcactggaagcggcacacgtggaaacggtaaaggccgacgccggttcagagccgcaaccgcgacagccccgtcgtccacctcaggtgccggcgccccctgctggtgcgcggagatgcgcggagaccgcaaggcccgggggcgtggcctcccctgcgccggcgcgtgtgcccgggccctccgcggggcgccggcgtctgcgccaaggcacgttctcctgctgctccagaac

SEQ ID NO: 49207 - DNA, 697 bp, Homo sapiens
  chr12:2161356-2162053
  hyper
atcctagtagaacacgtgctcggctgcctccaaggaattattaaacctgggtctaggaatctgttcagacatctgggcaccgctgcctcgcctaccaggctccgcctcgctgcccctcccgcttcccctcccctcctctatctgtcacttctacaaccgctctgattataattgatcaaacagaatcacggaatcacggctcatcttgccgttttgttcagtggcccgatccgaaacgagactctggtagtcgggcaaattgtattcctcctccttggaattccgctcacagaggccttcccggcgtggccggcccagcagggacgcgccgccgcagcggaggagagaacgcgggcggggggctgcaggccggcgcggggggcgcgacgccgccggcggggcgcgagggggtgtgtccgcgccgcggccaccgcggccaccgcggctggcgcccgggtgcgccgcgcgccccggcctccccgggggctcctcacgccgcccctcgcccgccggcggccggggcccgctccctttgacgtcatgcgggcggagggctcgctcgggcggcgctgccgcgggcgccgggagggggcccgacttcgggctccagtccgccgccgtgcgccccgcgccgtgcgcccggctccctgcgcgccgccgcagccacatctggaagcgttcagcgcgtctgcctccg

SEQ ID NO: 49208 - DNA, 1199 bp, Homo sapiens; identical to SEQ ID NO: 8516
  chr12:2162067-2163266
  hyper

SEQ ID NO: 49209 - DNA, 231 bp, Homo sapiens
  chr12:2163279-2163510
  hyper
cgtccactctcgtccaggcgcccctgccctgggcggcgcgctccaggtggcgggtgggggcggcggtgcagatgtgaagcccagcgcgcccctctggttccccctctgtaggtccccttcttcctctctccctccctcctccgccgctcacctacacccacccacctctccactgctgttgaccccgagcgcgcccacgccgcgtgtgttctcattcgcacccacatgtgg

SEQ ID NO: 49210 - DNA, 228 bp, Homo sapiens; identical to SEQ ID NO: 8518
  chr12:2692286-2692514
  hyper

SEQ ID NO: 49211 - DNA, 278 bp, Homo sapiens
  chr12:2800166-2800444
  hyper
gatggagagcgcggccgacaacatcctcagcgggggcgccccacagagccccaatggcgccctcttaccctttgtgaactgcagggacgcggggcaggaccgagccgggggcgaagaggacgcgggctgtgtgcgcgcgcggggtcgaccgagtgaggaggagctccaggacagcagggtctacgtcagcagcctgtagtgggcgctgccagatgcgggcttttttttatttgtttcaatgttcctaatgggttcgtttcagaagtgcctcactgttc

SEQ ID NO: 49212 - DNA, 237 bp, Homo sapiens; identical to SEQ ID NO: 8520
  chr12:2800603-2800840
  hyper

SEQ ID NO: 49213 - DNA, 259 bp, Homo sapiens
  chr12:2801019-2801278
  hyper
gccggctccgcccaaccaggtggtgctgagcttccgctgagcgctcttttgttttgtggtttgacacttttcttgacagcatgttgcagtttcttttcggttttggttttttttaaatgttttattttgctttcccagcgggaggggaggaagaagagtgtttacaaagtcctgtagccccctcacctttctgttttcacttttgccaatgtacatcgggtttggttttcttgtattatttaaacggttgtggtttcct

SEQ ID NO: 49214 - DNA, 30 bp, Homo sapiens
  chr12:2862069-2862099
  hyper
gccagtaccgggaacgacgatggcgggcac

SEQ ID NO: 49215 - DNA, 30 bp, Homo sapiens
  chr12:2904081-2904111
  hyper
cccctccctcgcggcggggcgggaccaatc

SEQ ID NO: 49216 - DNA, 30 bp, Homo sapiens
  chr12:2999767-2999797
  hyper
gcctgctggccgcgcggcgggcgaggccca

SEQ ID NO: 49217 - DNA, 258 bp, Homo sapiens
  chr12:3067871-3068129
  hyper
cacatggacttcaaaccgagtgccctttctcccatgtggtttactcgtagtggcggttttacagatgcccaaggggcaggagagaaaaacggaaagagctaaagccggggagggcaagcgagggggcactggcagcggatctgggaatggagcccgcgagttcctgcttcctggttccccggagcaagtgtcctttggtgggagccgcaggaagggagcagcccttcctgcgcgccgggagcccgccccttccccggc

SEQ ID NO: 49218 - DNA, 53 bp, Homo sapiens
  chr12:3068384-3068437
  hyper
cctcggccccctcccccgccgcccgccccggcccggcccggccccgccccgcc

SEQ ID NO: 49219 - DNA, 679 bp, Homo sapiens
  chr12:3068769-3069448
  hyper
ccgccttggacctctgcgctccgacgcgctccgtcccgacctctggcttccctccgcgctccggcgctgctcgctgcccctctcccgcttccctcctgtccgccccgcgctcccctcctcgctcccggttgactcactcctccaggaatagggatccccgtgttttcccgtcagtcccattctgggaaaactcctccctccgcgcgctccgctccgctccgctgggcgcaccggggccggtcggcgcggggtgggcttggccccgcggccccgccttcactgcgccgcccgtcggccccggccggagcccggctctgcgcgctgacgccctgtcgtccccgcagaacgatcgccgcggccggaagagttggcgctcggggcggactccttggaactggcttagcgcacccatcccaccttcccgcaccctgggaccggtaaggctggggcgcggggacttggtaggactttgccggagggcaggagtctgcgcggtgcgtgcggagctccctcccgggacgagactgggaagagcgaggcacgtggaggcggcgcgactgaggctgctggaggcgaagcggctccaggggcgggtaaggggggtggacactcgggactttgggggaaagggaggccggtgtggaaaggaccggagaggcagaaccgagagcatcggcaa

SEQ ID NO: 49220 - DNA, 225 bp, Homo sapiens
  chr12:3129380-3129605
  hyper
aacgtccccgtctctccgggatgatgccatattgtaatagtggattcatctggttatttccccgactggaacagaagttgcttgagggcaggaacttaacagtgcctgttctggaagcctctcggtcctgcagggccccagctgccctccagaatccagtcttgctcggcggttccatgcagagtgctgagtggcccgagttgtaccaggcgagcccctccccac

SEQ ID NO: 49221 - DNA, 106 bp, Homo sapiens
  chr12:3186011-3186117
  hyper
cgcgctgtcagcatctcgcacagtccgcccgaaacaccagggaaggggttcgtaggtgtgggggtggggtggcgaggccaggcagcctggcgcgagggagagagcc

SEQ ID NO: 49222 - DNA, 530 bp, Homo sapiens
  chr12:3186500-3187030
  hyper
ccccgccccgcaggctcgccattcccgggcaggccccgccccctgtttccgctggcggcggcggcggcggcggtgccggagcgcgagcagagcggagacccccaggtcctgcgggcgcggtgagtgcggcccgggcggcgggcggcgaggcgggtctcgagagcgtgcggagtcgcgcggccttgagccggcgccgggcgggctgggcacccccaggccgagacccgagaagggggagcggccgggggcgcccacgggaggcagtgtgggcagggcggcggtgggacgagaggacgaggaacagagtaggcgccgtgcgggaagcgggccgggaaggggagggtgggtgcggggcccgggcaccgagcgaagtggggtcctccaggggatggctccgaggaagaccgtttcagaaagggagtaacccggggccggcaagggtttccgactgtgtgaccccgtgcaccgcttgggacagtccatacaaggaccccagagagggccagggggccttcgggcagggctgggat

SEQ ID NO: 49223 - DNA, 31 bp, Homo sapiens; identical to SEQ ID NO: 8527
  chr12:3474950-3474981
  hyper

SEQ ID NO: 49224 - DNA, 621 bp, Homo sapiens
  chr12:3474997-3475618
  hyper
ctgcacacaccaacgcgtgctcccacgcgccgcgactcccccgggatgcctgccccacccctatccgcagccagcgtccccctgcccgccggccccgccacggtccatcagggactgcgggcggcggaggtggcggcgccttgccgggacccccagcctccctcccccgcccccggcgccccaccccacgcgggcgcgcttctcccgccgcagccgcccgcgctcacctggcccggacacgggctccgccacgcggtgatggaagctgagcctagagaggcggagagcggcggctcgcagggccacccagcggcacacggcccgcgcctcggcccgccccttccttgccggccgggggagtgtccgcgcgcctccagcccgccccgcgccccgctgcggtgcccagtgcccgccgtcctcacctggccagcgggacgcgcccgggaaccccgcacgcgggcgggccgcctctttgttagcaagtttgcctttctgtgattcagagcacgcggagcgaattaagtggagtgaggggtactgtgcgactgtctgcgggaaacctgcggggagcgcgggaagggatggacttgatgagccgcggcgcagcggctttcaaacctc

SEQ ID NO: 49225 - DNA, 662 bp, Homo sapiens
  chr12:3600120-3600782
  hyper
aacctgcaagagcctcgcccggcgccggctttctctgggccccccgcgcgggcctggcctccacgtaagttgtgtgcagcgccagggagtggaggcggccgagaccctcggagactaggggagggggcgggcccgggggcgctgggggccctcggtctgcgcccagccgccgccggctccagcgaacctcctaccccgcccccactcacccggctcagcccctaggagagacgcgcaggaagcgtgttgcttcgcccagcggatcggcagaagttgagaggagttggcggctgcctccggccggccggactttgcgagcagcctggagaggatccgcgaccgccgccgccgccgccgcggaggcttcggggctgcttccctcgagcttagcccgcagcgcgggtggagaggggcggggagggggtcgggggcacgagaagaacttgaaaccgtgtgaaggaatccggagcagatgagaagggaggaaaataaaagaaagtggagactgcagaacagactccgctgtggctgactgtgccggccgacgctccagctgaggggctgggttggatttttttttttctcccatcctctcgctctctcttttaaagcgacaccagctctctctcctcctctactatctcggtatcaccaaacccttg

SEQ ID NO: 49226 - DNA, 52 bp, Homo sapiens
  chr12:3600974-3601026
  hyper
cgctcgcttctgccggcctcctcctgtgtgtgtgtgtgtgtgtgtgtgtgtg

SEQ ID NO: 49227 - DNA, 279 bp, Homo sapiens
  chr12:3601062-3601341
  hyper
gggtgggggggaagttcatgtctcaggtcccctccctcttgaaaatgcaaaacagtcactctcaccccatcaccctctcctgccacccgctgctcccttctcccgcccccaagtcccaaaccccgggcagccgcgctcccctgccctctcctctgggctccgtgagggctcccgggtcccggctttgtgcagagctggggtgggtaatcctggggccaggtctgccccctgcagtgccttgaccgtctcctgccgctgcctcagctttacccttcaagc

SEQ ID NO: 49228 - DNA, 1339 bp, Homo sapiens
  chr12:3601377-3602716
  hyper
cgcggagagcccccggccgcgggggccgagccggcaggaggactcgggcacctcctacagaccctccggcccagatctgggccagagagaagtctgcaatcctcagatatcagagccgcctctgggtagctaaacccggcagggcacacgggccgcggccaccttcagcaccagggacagcgtccgcccctgcagcagccgagcctgcgcggactgtgggggctgcgcgccgccggctgcagtgagaaatgggtctgcagccacccgtcccgcaagggcttttgaggaggtcgctctagctccgcaaattgtgttctcggcccccgccttcggcagcctttttctctactctccagctggccctgagccgcagagagccctgctgggctttgcgtcccgagactcgaggctgtgatccctcgcctccctctgaccccgctgtcattacaacaaccggactattccgtaggctctgggcacctgtagtcacgaaggggatcagcgtgggcagcccccttaccttcctggagaaacggtgcgccgagatgggggcggagtggggcatgtgtgtgaagatcatcccttactcagtggcaggaaaaagacacagagagcaaactcccaggctctattaatagctgggtgtctggtggggctgccgcacatttcacatatggttacccatatgcagcggggggcggggatgggggtgtggcgcggggattgtccctctgtcttgccggaatgcaaaaaggtagagagacccttcctggtcttcttccctcgagttcttaactctgcgctaaaacccctaccccacggcgtaggcagcaaagctttataaatcccccttctctgagagactagaagcagcatgcatctgacaattgtcaatttcaaaacaaacacgctccgggacttgaacgcagcggggcattcagtagcgaatgctgtctccttgagttagggcaaagcctgcgtgcccgccgtcccctcaccacttcctcttccccagcccccacctgagagcagacattcggaatgatgtgtagtgcgaggcggctagcctcccagcagaaagccatccttaccattcccctcaccctccgccctctgatcgcccacccgccgaaagggtttctaaaaatagcccagggcttcaaggccgcgcttctgtgaagtgtggagcgagcgggcacgtagcggtctctgccaggtggctggagccctggaagcgagaaggcgcttcctccctgcatttccacctcaccccacccccggctcatttttctaagaaaaagtttttgcggttccctttgcctcctacccccgctgccgc

SEQ ID NO: 49229 - DNA, 139 bp, Homo sapiens
  chr12:3602864-3603003
  hyper
cgctcccccttctcagcagttgcacatgccagctctgctgaaggcatcaatgaaaacagcagtaggggcggccgggctcctgcgaacaacaacaaaacaaacaaacaaaaaaccacgtcgcgtgcggggcaccaaggcg

SEQ ID NO: 49230 - DNA, 486 bp, Homo sapiens
  chr12:4140248-4140734
  hyper
agatgcgcagcaatgcgcctccaagccgggcccaggccgagcgcctctcgccgccgcgcacattccggagggggaccgcggggctcaaagggcctgcggcgtaggtggctcagccctttccttggctttccctccagggccatacttgccgaaacccactgcctgagcctcccgcccgcccgccgcgcccccgcccggggccgggaaacgagcagggacaactccccgcccgcgcctccccgcgcccggcggcccggctagcaacccagaggcgcggcgctgcgattggctgcgcgggggagaaggggcgctgcgctgctccaatcgccggccgcgcccggaggccgcgccgccaggaggccgcggacgcgtgctcgcatgcctgtggtatttgctcagaggggcatgaccacttcgggcaagcctttaaatgtgagtcagctttcggccgatccctgggaaaaattccttcggtgttgtcaggca

SEQ ID NO: 49231 - DNA, 160 bp, Homo sapiens
  chr12:4273725-4273885
  hyper
tgcagggaatgggcctggagccgtgagccgtccccttcgctaacccccaaccccgccttctcctgctcctcctctcttcactcttcctgcctctcggctccggggtctcctcgcttccccgcagtccccgccccccagttcccaaagcggcacccgggcc

SEQ ID NO: 49232 - DNA, 418 bp, Homo sapiens; identical to SEQ ID NO: 8537
  chr12:4274001-4274419
  hyper

SEQ ID NO: 49233 - DNA, 30 bp, Homo sapiens
  chr12:4368336-4368366
  hyper
gagtttgatgagctttttgtatgtgtaatg

SEQ ID NO: 49234 - DNA, 3126 bp, Homo sapiens
  chr12:4377788-4380914
  hyper
aatttaggggaaatgaaggtgcgtgggctcactctgcagctgcagttttcagcccttgcagtttagaagattctgcatgagcacggatgccacgagggtatccagcgagtgggaagggagtcgccctacatgttttcacatcgatttgtaaaactgttttgaaagggtatttctagatccatttgttccaaatgcagcaaaattcatccgatatcgctcacaatgcatgcacgggttatcttacatgtaatagccatcgtattaaccaacccagctgatactgagatggtgaatggggcgggggagcagggaggaatatgtcgcgcatgaaaaactccgggtgtaaaagtcaatgcagaactcactccccgaggaaccgaaaaagacattcacgactctcaagtggagagaggatagaaagtcaagtggcgggggtcgcgaccagtgatcgggatttcagtctgatctcagtacccagcggaacaggaccataacctaaagaaatgagctttttccggagcaaagagcggccccgatttcaaagtagaaaaaataaactgcttgggggtggaagatggcgaggggcggggggcggggagggaggcgggtcgcggcgctggctccggggtccgcggcacggcctcctctgccgcgctgcccagggcccggaccctgcccggcgctgcgcccaccgcgagggtgccagacccgccgcgccgccgccgcgctctcccagccgcggccccctcccccgccgcttcctcttgctctcccagccccttcccccacgtgtggatgacgtcaaaattccgcgaaaaagccgcgtggtggctccccgagcggaggcgcgattccgccgcccagcggccccctcccgggggcgcctggagggggagaagggcggaggcggccggttccttctcctcccgggaggcaggaccccccgacgccgaccgccggacgccccccgccccaaagcttattggaaaattcacttttgtaaagcaaatgtatttccagagctattttcggccgcgtgaggcgtgtcctaagctgaatcagacaggaagagggggaagttcgggtcttttaattttttttttttccgaagggaggggagtgagatgctaggtgggtgacagacggcaggcgctcgccttcttaactcacgcctgtcgcatctgccgcctcagtaatccagccccgtccaagccgaaattcgccgaagggagtgcggatgcacaggcctggcggactctgcccccctccagaacgcagcggcccagcgccccggcgggcgcggctgcgaccagagggtcccggaagcgagtgaacacctgcaatcgcactgcccgtccccacccaccctgctcccccgtgctctccgcttcccgacgttttcctcttctccttgtccgcatttttctactttgcctgcactccctccttcctcttgatgtgcctcctatgtgtcccctcggatttatgtgtcccctcgcattttgccagtcgggttttcggttttgattgaccgtccatccctccacggagaaacacaaacacagctccactctttgggggagccgaggggaaggcagtggctcccatttctgagcctgaactcagtcactacccgctccccacctggcctaggcgcccctgcgcggagaaggcgggactcgaactcgcgctgctcccgggccttgagccgaccgcggaatcacctggctgggaggcatcctccaggtaagcttgggagtatgtgtgcttagtgctgcaggctcctgcagaaaagtgcctataaacacccaacaccctgctgcaccctccacctccaggctttgtacactttccaaccgaaactccaaaacgctagcgtagagggtggggagccggccggaaaaagaataaaagtccaataaaactggcgttcgctaaagtttatcaccagtcctacatgggatatatatatatgtatttttttttccgtgaagggtgaaaaggagataaggaagaaccaacaatctaccccctcccgccgccccccacccccgcgccacggtgatcagtttggacttcaaagccagagcacaggctcttgcgctttttcttgaaaccgaagtctacactgaaagaaagtgtgcacttttgcctagaaggcaacatgcgttttcccgcgtgctaggtggagtgcattttaacaagacattagggttttaacacatggctggagtggcgaccaaaagggaaaactcagtttccagtccaagcctcctagagacattcctgccaacctccgcaccctctcacgccccaccccacgtgtgagagtctgcaaaaccaccggggattggattcgatggcgagcttcacgctcgggaacagtcagtaatcggaaggggaagtggacaggggaacttcaagaggcgagcctgccacgcgggaagcgcccgaacttgcgggtctccatgaatgcagagggcgccgggaagggggggcatccggccgcgaccctctctgcccctcccattcgctgcccccctccccgctggaatttctctgtaaagcaagacggagtagggggagggggagagggaaggggcgagagggccctcggctcactcccgagacgtgaggactcgccacccaggcattctcctcggggtgggctgggccccgggacgaccacccgcttcttcctcgcccccgctgcccccacttcgggagacccagagctctggatgcctttccccggagaagggggggtgtgcggagtcggggtggaagagaccttgctcgcagagctatatcaagtgatgtccagaggctgggagccccggcggcctctgtcccttgcctgtcgggttagatttatactttaaaaatacctcccgccctccctccttctctcgcctctccccgctgcaactttctttgatccgctcaaaggtggcttaggtgaaattggagtaattcccttatgggggtcttaaaatgtaagtgaatgtccttatccggggtgactcaaaagcttaagtcgggaagcccaacgtgactaaaaccaataggtgattgttcggggccgactgtgtgcgggtgtacacggtattcggcccgggtgtcatc

SEQ ID NO: 49235 - DNA, 973 bp, Homo sapiens
  chr12:4381420-4382393
  hyper
acctctagtttattcgctcccctcctccgccttgcagggaacctagtgtacggctcacccagcccgcgccccaccccgccttgctggctctccgcgcccctgcccgggccccctctctcggtgagggaggcactcagtcggcctcggtgtgcccagagagctcgagccacgccatgcccgctgcacgtgccagcttggccagcacatcagggcgctggtctctccccttcctcctggagtgaaatacaccaaagggcgcggtgggggtggggggtgacgggaggaaggaggtgaagaaacgccaccagatcgtatctcctgtaaagacagccttgactcaagcatgcgttagagcacgtgtcagggccgaccgtgctggcggcgacttcaccgcagtcggctcccagggagaaagcctggcgagtgaggcgcgaaaccggaggggtcggcgaggatgcgggcgaaggaccgagcgtggaggcctcatgcctccggggaaaggaaggggtggtggtgtttgcgcagggggagcgagggggagccggacctaatccctcactcgccccctccccctcccgggccatttcctagaaagctgcatcggtgtggccacgctcagcgcagacacctcgggcggcttgtcagcagatgcaggggcgaggaagcgggtttttcctgcgtggccgctggccgcgggggaaccgctgggagccctgcccccggcctgcggcggccctagacgctgcaccgcgtcgccccacggcgcccgaagagcccccagaaacacgatggtttctgctcgaggatcacattctatccctccagagaagcaccccccttccttcctaatacccacctctccctccctcttcttcctctgcacacactctgcaggggggggcagaagggacgttgttctggtccctttaatcggggctttcgaaacagcttcgaagttatcaggaacacagac

SEQ ID NO: 49236 - DNA, 1734 bp, Homo sapiens
  chr12:4382899-4384633
  hyper
ctgcccagccagcttgcgtcaccgcttcagagcggagaagagcgagcaggggagagcgagaccagttttaaggggaggaccggtgcgagtgaggcagccccgaggctctgctcgcccaccacccaatcctcgcctcccttctgctccaccttctctctctgccctcacctctcccccgaaaaccccctatttagccaaaggaaggaggtcaggggaacgctctcccctccccttccaaaaaacaaaaacagaaaaacctttttccaggccggggaaagcaggagggagaggggccgccgggctggccatggagctgctgtgccacgaggtggacccggtccgcagggccgtgcgggaccgcaacctgctccgagacgaccgcgtcctgcagaacctgctcaccatcgaggagcgctaccttccgcagtgctcctacttcaagtgcgtgcagaaggacatccaaccctacatgcgcagaatggtggccacctggatgctggaggtaggtcggggggtggcgctcgccaggagccaggacccctccggatgctcgggtccccggccggagccctaaacctgggagagggcaatccccgcgccggcctcccggctcctgtgcgggagtttaccgcgcgccttctggcgagacgcgtggctttatttctgttcctctccagataaactggggaggcagaggggggaggaaaatctgggagaagcgaggctgtcctgggcgggggtaggggagcatcccgcgcgcgtgttcctgcatgtggctgcctcttcttcccacccccctcgcgacctgtcttttgcgaagccgccgcggctgcttgcgctgcggccaggaagagagtcggggcctgaaatcgggaccccgagtagaaaggcaaccccccccaaaaggccagagcaaattcgtcttggcctcaggtccccgcctgtggtcgcgactccgcgctggcacttcaccggggaggtggagggaggagggagaaggagagaaacggggaattcgggagccccggaagtcccattgaagaaacgcgtgtttcaggggaacccaaaagaaccgcttcttgcccctcactccaagtctttgcccagcgagccgtgtgcccacgtatgcacagctctggacctgccgtggtttcgccatgttgctttgcaaactccctttggaaaggctgggaaacgtcgcccgcttaccctcgcaccccattatcccggccaccccacttctaatcgtgccctctcccccaccccccacctcacgaagattacttacagtttggttttccagcttcctcggtgcggagatttgggtggggtaggaagggggggagggggtgtgtgtaggggggataccgggtcacccctgaaggagaggtgggagccccccgtgcctctttccagggctctctgctcccgtctttcccctcgctcgtcaccgcgttccctagtttctgtccttgtgggccgcagccggacactcccgccgcggcgctcaccccttcaagtttcctcccgggatccaaagccccaggggtcggaatacagacctttctggcacccgaaacctctgtttcgggaagcctggctcttctttggggttttcacgccaaaagggcttttctaggatatttcctcgatttttaattattttttgaaaccatccccccctgctccgactccagctgccgaggctgcggcgctcttcctcctctcctccct

SEQ ID NO: 49237 - DNA, 30 bp, Homo sapiens; identical to SEQ ID NO: 8543
  chr12:4429984-4430014
  hyper

SEQ ID NO: 49238 - DNA, 30 bp, Homo sapiens
  chr12:4492593-4492623
  hyper
gaggccaggacatgtcggttcctgtccttt

SEQ ID NO: 49239 - DNA, 30 bp, Homo sapiens; identical to SEQ ID NO: 8544
  chr12:4647830-4647860
  hyper

SEQ ID NO: 49240 - DNA, 30 bp, Homo sapiens
  chr12:4758257-4758287
  hyper
gccgggagtgctgtcgtgggggattgtggg

SEQ ID NO: 49241 - DNA, 30 bp, Homo sapiens
  chr12:4918321-4918351
  hyper
cgtgccaggagagcgcgggaaagcttactg

SEQ ID NO: 49242 - DNA, 125 bp, Homo sapiens; identical to SEQ ID NO: 8545
  chr12:4918557-4918682
  hyper

SEQ ID NO: 49243 - DNA, 175 bp, Homo sapiens; identical to SEQ ID NO: 8546
  chr12:4918713-4918888
  hyper

SEQ ID NO: 49244 - DNA, 468 bp, Homo sapiens; identical to SEQ ID NO: 8547
  chr12:4920340-4920808
  hyper

SEQ ID NO: 49245 - DNA, 1017 bp, Homo sapiens; identical to SEQ ID NO: 8548
  chr12:5018017-5019034
  hyper

SEQ ID NO: 49246 - DNA, 658 bp, Homo sapiens; identical to SEQ ID NO: 8549
  chr12:5019084-5019742
  hyper

SEQ ID NO: 49247 - DNA, 520 bp, Homo sapiens
  chr12:5019793-5020313
  hyper
cggctgttgggcattggggaaagtgggatggaagagccccaaacttggatttccgggtgtctgcgtgtcgtctgtccgtgtgtgtgtgatagccctagcaaacgtccagtgctttctcaagctagaggtctgtgttcttcggtgtctgtaggtccgtcccatctgaatgcttctgattttctacccccgtatcactttctatttctctgcagcgtgcatcgatcgccctggtgggagcttagaaggcggcaggcgaagaggggtaggaggggggagagccgaggagaagcagagagggtggcaggcgtggggatctgccgagccggcactgcaccgggtcctaggaaggctctcggaggggaggggaggccagggcgacccccgaagcaatggcccagtccgctagaacggcactgcgttaaggcacctgggatcaggaagaaatatctaaacaacaacaacagaaaaccaacaaacccccaaacccaaacccaaccctctgcaaaaagctgcacccggc

SEQ ID NO: 49248 - DNA, 211 bp, Homo sapiens
  chr12:5020440-5020651
  hyper
cgctccggtgggggggccgcttgggtcccccccacccctggtccctggctgcttcccaccccgggctctctcctggcctcccacccccgcgcccggcttccaccatgacggtgatgtctggggagaacgtggacgaggcttcggccgccccgggccacccccaggatggcagctacccccggcaggccgaccacgacgaccacgagtgctg

SEQ ID NO: 49249 - DNA, 55 bp, Homo sapiens; identical to SEQ ID NO: 8551
  chr12:5131853-5131908
  hyper

SEQ ID NO: 49250 - DNA, 247 bp, Homo sapiens
  chr12:5153039-5153286
  hyper
cagccagagaggggcggctgaaggttgcatctgctggaaggaggcttttcggctgcttggtaacgggctgccagaagagagagaggcagagagcagggcagcggcttcttgacgtcagggccaagcgaggggatcgcgccagcaaccccagctctccccagagaggggccggccgaccgctggagcggagcctgacgccaggcgcccgcggagcgtgagtagggggcgcgggagccggtcagctggg

SEQ ID NO: 49251 - DNA, 30 bp, Homo sapiens
  chr12:5540614-5540644
  hyper
acctcccttgaccgccgacacagcgtcctg

SEQ ID NO: 49252 - DNA, 2100 bp, Homo sapiens
  chr12:5540931-5543031
  hyper
aacatgtaacctgttacgatacatttaacgtttcgttttttcctggatctctaaaagggaactcaagggtgggggttactgaagaatactacagatttggaagtttttgttgctgttgttgtttggtttggttttgtttttcaagaggggccaggagaaatgaccccttccccgccacgggtcccgaagtgagggcggggggggggctctggggcgcgggcgcgcgcggcgcggcgcgggccggcgggggagggcggcgcggcgcggaaggggttaaggcgctgagcgcggagccatctggccgggttggctggttataaccgcgcagattctgttcacgggactcagagttgaagctcctctcccttccgaacagctccgcgcaccgccccgcgacgcagcccggcgcaactactttcttctctctcctttctttcttcctctcctttttcccctgctgggtagtggctgcggcggggtgggggagactttgaatgaccgagctcgcgtccacctttctcttcatgtcgacgtccctggaaacggccacacggatgccatggttacttttgccacggtaaggggaggcggcgggcaccttgggtgggcaggtttggggatgggggtccacgtggggagggattttccagtggactggtgcggggggccccagatccgcatcccgccccacccccatcgcgccgcgctcactcactttcccgggcttgtgtcttccccaaagtttgcgctgggatctgctcaggccgaagcgcaaccgcagccaccccgctacacacacacacacacacacacacacacacacacacacacacacacacacagacacggacacccttctccacctcctcccctcttgtccctcggctgcccaagaagcttccctcaatctgggaaagtgatcaggtttaagggacctggattggaaagggtgggggcagaagaggggaaatggggacgacgaaagagcaggaaagagattcaacagaatcaaccacccaccactcccaaccgacccgcctgctcctccgagaaagctcctagcgcatcctataacaaaagggggtggcagacagaactccgggcggggaggtgccgcggcagctcccctgcacacgccctgcactctgccggccgctgagcctgattctcagctcgccccagcaccactctggcccgggcgtgggctggggggaggggacgcgcagctcaggacccggaacctcgcgttccagttttgggagttgggactcactgccacgcgccgcgtacctgcgttggagttccccgaaagggttttttcagaaaagacctcgcgccccgggctcctcttggccagcgcccacccggtggccaccccaccctgggcctttgcgcagatgttggagctccgtacgcagcccgcacatctgggacccctccggggagcggcgggcacccgggcccggccatcccaggggatctccttgcggtatcgtccagcctgttctcggactttgagcggtggcgtgggaggccgggagacctgggcacccgcgcagccagccaggtcggagtttaaaggtcccacgacggaccgaactgtcccattgccccagagctttactcagtggtggatgctcctgatgaaatttgggacgcttgggagttgaaggttagggacaggaggggcgagggccgagggcatgggatgggggagtaggattctgcttgttgctctccgcgggagtgggtgcgcgtccaggaggcgctgcttctttgcgggagtttggctgctgcgttcattcgtcgtctgcgcttcagatgcacggcactgagacccttgcgtccgacggtgtcggggctgtggactagaaaggatcccttttgctggaatcgaggctggggtgggattgccggtgggggaaacaccgaaaagatcgtctggcctcggcctctggcggcgggcggcaggttctgagtccgaatggaggttgctcccgggagcgccgggctcagagctagagagctcgggagactgtgcgcctgtggacttgtttatgtgtgtgaagaggcgggggcgagggcctgctgagaggggag

SEQ ID NO: 49253 - DNA, 31 bp, Homo sapiens; identical to SEQ ID NO: 8557
  chr12:6189830-6189861
  hyper

SEQ ID NO: 49254 - DNA, 824 bp, Homo sapiens
  chr12:6309397-6310221
  hyper
gggcgggggcggggggcggggggggtgcggcccgggcggggccggtggggcgggaggcgtggccggcggggggagtgggggcggcttttcccggcacatgcgcaccgcagcgggtcgcgcgccctaaggagtggcactttttaaaagtgcagccggagaccagcctacagccgcctgcatctgtatccagcgccaggtcccgccagtcccagctgcgcgcgccccccagtcccgcacccgttcggcccaggctaagttagccctcaccatgccggtcaaaggaggcaccaagtgcatcaaatacctgctgttcggatttaacttcatcttctgggtgagtgagcgcgactgccgcgcgctcctctcagggcccacctgttcgcgggccccggacactggccgcggccgcgagtgccggcagctggcactgcccgcaccgggcaggcaccgggcgggaagagagagcgccctgcggctgccagctggctccaaggccgggtccagagccgggcgggacggccgcgacgggcgcattcgggtgggggctcatcaccgcccagccggcgtggggagccgggccctcttgagatgaggcgtgcgggagggtcctgagcactttagctcgcctaggatttgagctggggtgtgtgtctgctcccagctcaagtccctccgagtgccagagaggaaggcagggagaagcggagcacccctctttgggccaaggccaaggaggactgtggtgagcagtatggcttgtgaccgggtggggtctcccaggtagtagggggcgccaggaagggagggtgcgggcacggcgagag

SEQ ID NO: 49255 - DNA, 30 bp, Homo sapiens
  chr12:6385711-6385741
  hyper
aaggccgggggaatccgtgtgttgaacgtg

SEQ ID NO: 49256 - DNA, 30 bp, Homo sapiens
  chr12:6387593-6387623
  hyper
ggtacacccaagaacggagagggctttctc

SEQ ID NO: 49257 - DNA, 185 bp, Homo sapiens; identical to SEQ ID NO: 8559
  chr12:6387949-6388134
  hyper

SEQ ID NO: 49258 - DNA, 180 bp, Homo sapiens
  chr12:6419603-6419783
  hyper
cgcctcgcgggggtctggcccggagtggagggcgcgcggtcccagccctcccgctcggccggcgggtgtcgagttcaggtgcgaccgaaaaggggaaaggagggcaccgccacgtgagctgtcctctccggggaaggcggtggctgcgtgagggcgggggctgctcggtccccagggccc

SEQ ID NO: 49259 - DNA, 205 bp, Homo sapiens
  chr12:6444949-6445154
  hyper
ccagtcaccctgagtcagccacggggagacgctgcagctgtaagctgtgcaggcccggaagttcaagcctcagccgcaaacaggggaagccacacacagaaacacaacagcagcccccgcaggtggaggcgtgtgcccctgctcagaggacaacaaccttcccctgcccgcaccagccaacaccgtgccacctctgctgagaaca

SEQ ID NO: 49260 - DNA, 404 bp, Homo sapiens; identical to SEQ ID NO: 8561
  chr12:6449619-6450023
  hyper

SEQ ID NO: 49261 - DNA, 51 bp, Homo sapiens
  chr12:6450523-6450574
  hyper
ggccagccagctgaccggagggacagaattcagaaccgtctggactccccg

SEQ ID NO: 49262 - DNA, 316 bp, Homo sapiens
  chr12:6450829-6451145
  hyper
cgccaggaccaggcccgggcaggagaggctcggccccctcccggagagggcccacgccagccggaaggtgcctcgcccaccagcccactcttccctttgtccctggtctcaccagtggcagcagcaggtcaggcacggtggagaggcccatgccagacagctatggcctctcactcccccatttgggctcagggcagtgtggcagcggcagtgctggggcttcccgggactcggtctgtccaggacgtcccaagtgccttggggtgacagttgagggttgagactcgggcatagagatcacggcctggtcccagtg

SEQ ID NO: 49263 - DNA, 494 bp, Homo sapiens; identical to SEQ ID NO: 8563
  chr12:6472499-6472993
  hyper

SEQ ID NO: 49264 - DNA, 14 bp, Homo sapiens
  chr12:6473162-6473176
  hyper
gcccggacctagaa

SEQ ID NO: 49265 - DNA, 44 bp, Homo sapiens; identical to SEQ ID NO: 8565
  chr12:6493249-6493293
  hyper

SEQ ID NO: 49266 - DNA, 31 bp, Homo sapiens; identical to SEQ ID NO: 8566
  chr12:6493330-6493361
  hyper

SEQ ID NO: 49267 - DNA, 31 bp, Homo sapiens
  chr12:6493590-6493621
  hyper
gggctcctggcagcatcgcagccccaggcgg

SEQ ID NO: 49268 - DNA, 31 bp, Homo sapiens; identical to SEQ ID NO: 8567
  chr12:6532774-6532805
  hyper

SEQ ID NO: 49269 - DNA, 31 bp, Homo sapiens; identical to SEQ ID NO: 8568
  chr12:6560919-6560950
  hyper

SEQ ID NO: 49270 - DNA, 234 bp, Homo sapiens
  chr12:6579633-6579867
  hyper
tcgggagcttggggcgagagttgtcaaggaggtgccgagcccccacaccagagtcaactcacatttttctgacagagagagtgagggtctgttcctctccggaggctgcggcgagacacccggtgagggacgctgcggctgaagtggacggaactgccaagctccgcctcgcgccgactaccccgcggtctagctgcgctggaacttactgcagctgccgcgccggcctccgcc

SEQ ID NO: 49271 - DNA, 103 bp, Homo sapiens; identical to SEQ ID NO: 8570
  chr12:6664242-6664345
  hyper

SEQ ID NO: 49272 - DNA, 152 bp, Homo sapiens; identical to SEQ ID NO: 8571
  chr12:6664370-6664522
  hyper

SEQ ID NO: 49273 - DNA, 30 bp, Homo sapiens
  chr12:6676794-6676824
  hyper
tcttcacatctctacgacctaaacagttcc

SEQ ID NO: 49274 - DNA, 30 bp, Homo sapiens
  chr12:6677610-6677640
  hyper
gcgcagcttacacccgcggcgggtggaggg

SEQ ID NO: 49275 - DNA, 161 bp, Homo sapiens
  chr12:6798811-6798972
  hyper
tagcttctgcccagcgactgggaagaggggatgtgacgctatagcggaagtgaaggcgggttccgctaggggcaaaagctgaaaccggaggactccggccctgagcttccggaagggacatctggggaaggtgggggggtggaaacgcgacaggttcatga

SEQ ID NO: 49276 - DNA, 30 bp, Homo sapiens
  chr12:6832997-6833027
  hyper
tagttaatagctggcgctcttccactaata

SEQ ID NO: 49277 - DNA, 55 bp, Homo sapiens
  chr12:6862686-6862741
  hyper
gcgacgaggcggggcggatccctggggggagctttaagccgactctactggagaa

SEQ ID NO: 49278 - DNA, 30 bp, Homo sapiens; identical to SEQ ID NO: 8572
  chr12:6863000-6863030
  hyper

SEQ ID NO: 49279 - DNA, 30 bp, Homo sapiens
  chr12:6874949-6874979
  hyper
acagaaggctgggccgccctttctgccctc

SEQ ID NO: 49280 - DNA, 550 bp, Homo sapiens
  chr12:7260778-7261328
  hyper
cacttcccacaaccccgggaatctccctggccacagtcctggcgggaccccccccatccccagctcactgtgacagagtcccctgcacagtcctgggacggctccaggtcgaagtcctggaagacgagcctcacagcaaagccctctggagccttgatgtccgtgctgctctcttggcctttgccatacggctctgggtacccgggggatgtcagctgctggggtagctcttgggccaagaggacggagccccgggttgggcaagcctggaggactccccagagaagcagccaccacctgtgagttggggggagggcaaggtggggccgcgcagctatggccggaagcctgtgggtgtgggaggagcgggggagccgcgctaggactcagaggcctcgcgaggcagggctagaagctgtggcctcacccttgaggcccgggcacttcccgtctcctcccttgctccccttcctcaccccaatccctacagcctcccgcgcagcctgagctctaggattgtgggttttccatcctccgaagacatcacctt

SEQ ID NO: 49281 - DNA, 30 bp, Homo sapiens
  chr12:7282660-7282690
  hyper
ccacccctcctggccgccctcaggtcccgc

SEQ ID NO: 49282 - DNA, 30 bp, Homo sapiens
  chr12:7342756-7342786
  hyper
gcctttgaggggggcggcaggagagagtac

SEQ ID NO: 49283 - DNA, 226 bp, Homo sapiens; identical to SEQ ID NO: 8574
  chr12:8088726-8088952
  hyper

SEQ ID NO: 49284 - DNA, 146 bp, Homo sapiens
  chr12:8113444-8113590
  hyper
atctaccctgtaggttagccccgcctgctggcgtcttgcttttgtaaaaggctgcgtaagcaagtgcagacgtgagttgcagatcatcttgaatctccggagcgacaagctccatcactcaaagcggatcaaatactctggtccct

SEQ ID NO: 49285 - DNA, 447 bp, Homo sapiens
  chr12:8123150-8123597
  hyper
tccctttcttgcactcgtctttatcttctaagccctccacatgcttttaaactgtcagtcttttcatttttatttcttcctcttggacgcatttacccaaattggcccgagggaggctgagacagcagatacgaaagaaaaatgtgtgtatgcgtgagtctttgggtggcgaagaaggaggaggaggaatgtagctcggggctcggcccccgtgctgggattccgagggcgggggacaggatgcgcgcgcggcgggtagcgtgccacacggcacgtcccggccgctgcaggaaggcggggctcaggtcccgccgactcccacatgctgggggacaccgggagcgcctcccactcccagcccgccggagagccttgcaattttcaggaatcggcgtcttctctggaaagccgccaaaggttttaagagggtttcgccttaagggcaga

SEQ ID NO: 49286 - DNA, 522 bp, Homo sapiens; identical to SEQ ID NO: 8575
  chr12:8171288-8171810
  hyper

SEQ ID NO: 49287 - DNA, 30 bp, Homo sapiens; identical to SEQ ID NO: 8576
  chr12:8185009-8185039
  hyper

SEQ ID NO: 49288 - DNA, 30 bp, Homo sapiens; identical to SEQ ID NO: 8577
  chr12:8332866-8332896
  hyper

SEQ ID NO: 49289 - DNA, 1623 bp, Homo sapiens
  chr12:8849729-8851352
  hyper
acaacaaaggctcagaggaagcgtagcaactaacttgtccaaggtttacgccggtttctagggggcagagctggcgctatccaccccgcctgtatctccaaacccgcttcagccaggaaatttatcatgtggttttaaatttgcctctcaatatacagaggtactgtctttactccagtcccggataaagaccttctaggtatgaatgatctttgtctccatatctttgcctaccggagggaggaaccaccgtaagcggagactccgggcggcggccggcggaagggctgggcgggaggcgtcgggatgccggcaggaccctgcgcccgagggggtagggggctcgtgtcggggttccaggcgcagattgatggggcctaagcagggaatgtgagggcggggagggcgtacaacggaagggactaatctcgcggtttcgagttgggagcaaacctcgccccccaccccccccatccgtttccctttctcagtgaagacggtttgggggcgggtggggaggcgcgtcctcggagcgccctcgcgctcccttttcgctccccgcgcgcgatccatcgcctctcttcccccgaggccagcgatggctcgggtgcgggcgaggagctgggagggcggctctcgacgcaggtgtcagatccgctcggcagtgctcggcgcgctggcccggcccccagctcctccggccgccgccccccgcccgccgcgccgcggcgccaggagggcggggccggggcgcgcgccgctcctcagcaagcgggcgggcggcgttcggtctgagggagcggggcggtctccgccggcgtcgcgcgcgctgtgtgtgagcggggtcgcgcgcgcgcgcggcaggcgagtgagggaacgaggagcggccgggtgtgagtgtgtgggagtgagagtgtgtgggagtggggtgagggagaagctgacgggacgcgaggctgtgagaaactgggcgagtgtgcgaggacgcccggccagcctgcgggagccgcagtcggcggaggagaaaggaggcggctcccggtatcccgaccccctccccctcctctccttcccccacttccagccgcccggcggcccgcgcttcctcgaaggccccagcccggctcagtcggccgagagcgagggaggagccccccgacccaggtgagcggtacgaccgctgttgccctcgggtgtagagcagtgaggcgaaggcgcgccctcccgagtgggcgagttcagcggaatggatcccccgattagcgggggctgggccggggaggggaccggcccgagcgcgcccggggtccggggctagttgaggccggtggtcgccgctccgcggagtcggtggggagcgaggcggggcccggccttcgcgcgtgtgccgggaggcgccggcccgtggcgtgtgcgtgcgaccgggcgagccgtgtcgagggggcggcgacttcgggcgtgtaaggagtatggtttccccgccggcgagggggtgtggtaaccccgggaacgccggctggagtcggacccgcgggctgctgacctgtcctcgggattgcggcgacactccccctccccccccttcccacaaattctatggagcgaccgcgggaggaggatcac

SEQ ID NO: 49290 - DNA, 30 bp, Homo sapiens; identical to SEQ ID NO: 8579
  chr12:9620959-9620989
  hyper

SEQ ID NO: 49291 - DNA, 30 bp, Homo sapiens
  chr12:9903439-9903469
  hyper
tctcagcagctccacgctccacatagatgt

SEQ ID NO: 49292 - DNA, 326 bp, Homo sapiens
  chr12:10306209-10306535
  hyper
ggctggcagaccttccgcgcctgcccctaatctgggcatatcactccctcggttttctgagactcgggactccttgcccgctggagcgcaggccatgaatctgggtcccgcactgcggcgctgcacgccgcagcccagggctttggccccagccagcacatccgccatcctgcaccccaggttccggcacgggctgcgacggggcctcggaactgctcccaagcggctgggaaagaactcagtcaggcatgtcggcctgcaaagcacccaggatgggcagtggagtctgcaccgttgacaggctcctagagcggccaggcagagga

SEQ ID NO: 49293 - DNA, 30 bp, Homo sapiens
  chr12:10365015-10365045
  hyper
cccaaacactgtgacgccagcgcgggagga

SEQ ID NO: 49294 - DNA, 30 bp, Homo sapiens
  chr12:10365962-10365992
  hyper
ccagagccaatggacgtccagactgtagag

SEQ ID NO: 49295 - DNA, 66 bp, Homo sapiens
  chr12:10516945-10517011
  hyper
gggagcctaactagactcacccgggacatgagagaggctcatttcgtccaatgaggaatcctgggg

SEQ ID NO: 49296 - DNA, 182 bp, Homo sapiens
  chr12:10766315-10766497
  hyper
agcgccgtgactttcgctttactaggaatggaggcacattgttttcaaaataaagattacattatactagcaaagattagaaatgtgagcatatgatagtcttttttatggacttagagctaaaggtttgcaagtcacttttacttttctggtctcccaatccttgcggcgtttgtgaggtg

SEQ ID NO: 49297 - DNA, 259 bp, Homo sapiens
  chr12:10826770-10827029
  hyper
ggactcgccacactcgagccacaggaaacctctgctgcaactgtaaaggctggacttgttgctgatctatactcatttcctactctagtgattgctagatgtcaggtatcacggtgactccagtccaggtgaaaacggagtcacgatacagggcaacagcgccacctcacggccggccccgtagcagcggcctccattggcgcctaaaaatggtcaggattcacattcaggtggattattccgcgccaggaacattctc

SEQ ID NO: 49298 - DNA, 30 bp, Homo sapiens
  chr12:10874719-10874749
  hyper
cgggaagagggaagcgtgtagccattggtg

SEQ ID NO: 49299 - DNA, 600 bp, Homo sapiens
  chr12:10875353-10875953
  hyper
gggtgggagatgtagcgcgagctgcccacacgtgctccgcggccggctgggcccgccccactacggcagcccctgccctccctggcctgactcaccgagaacttttttctccgcgtcttcgctgccggcggcggtggctaaagaggcggcggccgcggtgcccgtggctgcgggggccgcgtccccaccggggtttcctgcgacgtgggcggcgggcgccggggccgcggcctggggcgcaccgctgcccaccgggctcttgggcgcggggtcctggggagccgcggcggccgcctccgtcggagcctgcgggagggtggtggtggtggtggtggtggcctcgcccgcctcactcatgcctcctcctcctctgctctcgctcaggcgcctcggtggcggttggtcggcggttagcgcggctggtggtcgcggcggccggggctcgctctcggggaggccggggcggatctcgcggcgcaggcggcggcggccgaggtggggtcgcgcggcggaggcggctcgagcttcgtgctgcgcgctctctcttgggctcctcgctcgatcttactgccccaaaaatggccccgcacaagtttttct

SEQ ID NO: 49300 - DNA, 30 bp, Homo sapiens; identical to SEQ ID NO: 8581
  chr12:11053581-11053611
  hyper

SEQ ID NO: 49301 - DNA, 31 bp, Homo sapiens; identical to SEQ ID NO: 8582
  chr12:11653356-11653387
  hyper

SEQ ID NO: 49302 - DNA, 45 bp, Homo sapiens; identical to SEQ ID NO: 8583
  chr12:11801642-11801687
  hyper

SEQ ID NO: 49303 - DNA, 30 bp, Homo sapiens
  chr12:11802139-11802169
  hyper
cctccttcggattccgcgtcctaaccggaa

SEQ ID NO: 49304 - DNA, 308 bp, Homo sapiens; identical to SEQ ID NO: 8584
  chr12:11802786-11803094
  hyper

SEQ ID NO: 49305 - DNA, 199 bp, Homo sapiens
  chr12:11905382-11905581
  hyper
gcaggaacgaatttcatatacacctccagagagcccagtgccgagttacgcttcctcgacgccacttcatgttccagtgcctcgagcgctcaggatggaggaagactcgatccgcctgcctgcgcacctgcgtgagtgttcgtgacccgagagggacagaggattgatggcgtggggcgggggtggcaggcagtgggct

SEQ ID NO: 49306 - DNA, 166 bp, Homo sapiens; identical to SEQ ID NO: 8586
  chr12:11992072-11992238
  hyper

SEQ ID NO: 49307 - DNA, 383 bp, Homo sapiens; identical to SEQ ID NO: 8587
  chr12:12006112-12006495
  hyper

SEQ ID NO: 49308 - DNA, 30 bp, Homo sapiens
  chr12:12009725-12009755
  hyper
ttaacatacagaaagatctggttctgaaaa

SEQ ID NO: 49309 - DNA, 547 bp, Homo sapiens; identical to SEQ ID NO: 8588
  chr12:12022356-12022903
  hyper

SEQ ID NO: 49310 - DNA, 148 bp, Homo sapiens; identical to SEQ ID NO: 8589
  chr12:12037377-12037525
  hyper

SEQ ID NO: 49311 - DNA, 102 bp, Homo sapiens; identical to SEQ ID NO: 8590
  chr12:12038858-12038960
  hyper

SEQ ID NO: 49312 - DNA, 2802 bp, Homo sapiens; identical to SEQ ID NO: 8591
  chr12:12043873-12046675
  hyper

SEQ ID NO: 49313 - DNA, 1482 bp, Homo sapiens; identical to SEQ ID NO: 8592
  chr12:12046854-12048336
  hyper

SEQ ID NO: 49314 - DNA, 224 bp, Homo sapiens
  chr12:12419471-12419695
  hyper
tctctccccctccccacgaccaggcctctccccgctcctctccccttctcccttcctccgtccctcccctccccctagacacatacaacaaggccacctccccccgaaccccaccaactttccagtgcccccactcttcccacctctcaggagcacacagaagctgcaggccaggaggctcctcaggacggcccccatcttcccttctcgcgttctcttctctc

SEQ ID NO: 49315 - DNA, 49 bp, Homo sapiens; identical to SEQ ID NO: 8594
  chr12:12420197-12420246
  hyper

SEQ ID NO: 49316 - DNA, 30 bp, Homo sapiens
  chr12:12503015-12503045
  hyper
cgtcgagaggaccccggcgcccctgctgcc

SEQ ID NO: 49317 - DNA, 30 bp, Homo sapiens
  chr12:12715423-12715453
  hyper
gaggtggtaataatcgtttaaaaactgatt

SEQ ID NO: 49318 - DNA, 30 bp, Homo sapiens
  chr12:12764737-12764767
  hyper
aattcccagaatgccgcggtgctacggcag

SEQ ID NO: 49319 - DNA, 370 bp, Homo sapiens
  chr12:12871789-12872159
  hyper
aacagaagaaaatgtttcagacggttccccaaatgccggttctgtggagcagacgcccaagaagcctggcctcagaagacgtcaaacgtaaacagctcggtgggttgatcactaaaggagcacgcactggaacccggggccttcagacctcacgatacctgatcttactggttgctggcaaattaaaagcttatggggttttgttttgtttatacttcgtgaggtcaaaaaagtagcaatggggaaggctggggatacggtaattcctcagagtttctatgcccagagatactttctcttcaaactgttgaccagagcagctacttgtaacccaggccccatcgggtaggaaggtcgtttccctgtgagt

SEQ ID NO: 49320 - DNA, 79 bp, Homo sapiens; identical to SEQ ID NO: 8596
  chr12:12877457-12877536
  hyper

SEQ ID NO: 49321 - DNA, 411 bp, Homo sapiens
  chr12:12939504-12939915
  hyper
gccttctaataccacgcccctcccagtttaaatcttatttaacacatagctgatgaagcccatcgttaacgttccctgggagagaagcagaagatagcattattcctatttccatatgcagagataaggtcctgagaacttgtgtggctccccccggattccagaacaggtctttgagaactcgtctcatgatccactggaaacagacccgttcccctagcgtggcagtggctgctccgctgaactcgtgccaagttcccgctggcgtccgggcagcagggcgggagcggcggctggcacggagactccaggctgaccgcgtgtctatgtccccgcagggaatggagaggccggcggcccgggagccgcatgggcccgacgcgctgcggcgcttccagggactgctgctgg

SEQ ID NO: 49322 - DNA, 6 bp, Homo sapiens
  chr12:13069316-13069322
  hyper
cggcca

SEQ ID NO: 49323 - DNA, 395 bp, Homo sapiens
  chr12:13152997-13153392
  hyper
aggccacgtctctacgcttccgaacagcgagttcttgatcatgcccaacatgttgtagccgagacgctcccgacgcacgggaggacgtgaggtggcgggggcgacggagcaccacgggcagcgaccaccggcggcagggcggcagggcggcagggcggcagggcggcagggtggcagggcggcaaggcggcgggacggcgaggcggcgaggcgagaggcggggctagaggcaggggccagagggcgtggctagagggcggggcggcaattcagcccggcggtgaggcaagggggcgggacggcgaggtgaaggggcggagagagagggcggggcggcgaggcgagggggcggagagagggcgggtcagtgatgcgaagggcgggcagcagggcag

SEQ ID NO: 49324 - DNA, 94 bp, Homo sapiens
  chr12:13154240-13154334
  hyper
ggggatctgggacaggcggggccccgaggccgagcctggcgctgcccagcggccggtgcaggcctcaagctgggccgggcggaggggaaccggc

SEQ ID NO: 49325 - DNA, 32 bp, Homo sapiens
  chr12:13197533-13197565
  hyper
ctgtgccaccagagggcgagaggggcgcccag

SEQ ID NO: 49326 - DNA, 30 bp, Homo sapiens
  chr12:13254605-13254635
  hyper
ggtgggccagggctcgggatgtgtcgagct

SEQ ID NO: 49327 - DNA, 1952 bp, Homo sapiens
  chr12:14133266-14135218
  hyper
ggtcattcccaaagcgtccccttcctaagggggaaaaagaggcggtcagggcttgattcgcgtgtcccccggagggtgagaaaaatgcattccgaaaaagatatcaattcgttttaaggaaaggggggaggaaaccccgcatttcccacagagtgcacacgagaggaattgaaaacagctggtaccggtctataaataattcagaaaaggtctggctataccattcctgggacaggcacggatgagaggtgggaaagccaacctgaatggaagaggagagagggagggagcgagcgaaggagggaagtgggaaggaaggaggaagggggggagaagcggcaccatacagcaacacacactcacacacacgcagaaacacaattcccacttaactcgccagcgagtgcggcccccagccccatctgcattgctgctgacttgtctcgctcgctctccccatcgcctccagcagcagcgccgcctcccaccccgggcttgtgctgaatgggttctgattgtgcacggggtgcacactgggcatttcttggaaggggcacactgacgcgcgcacacacgcccccgacgcgcacgcgccccgcgcgcactcacactcacccccgcgcacactcacccccgcgcacactcacgctgccgccgcgctgaggtgcagcgcacggggcttcacctgcaacgtgtcgattggacggatgggctcggcgcgtgggtccggcccggggcgccgctgccctgcccctctgctaggtgaagggatgaaaccccccaaaagaccagagacagccctacccagtcacagcaccccctcccccacaaaaaaaaaaaacctttaaaaaagccacgtccaaattagcaagtgccgggttctgctggatttcagagctttacctcatgccagattcgttcacgatttcacggcttcgaccctttatctgcctgacacccccaaacccctacattcaaaggagagactccaaagcccatctttacgtaccggctccgagcgcctccgcggttgcagtctgcggagaggggtggccggtggctgggaatggagggttttcctttcctgcaaagcaggattaatgatccgtctcgggggttttgaagttcatgactcttctttgcaaggcaaaaggatatgcattcggacgccagcactactggatggtggtgatcaagaatcacccttgacgagcactctcgatagagcgaagccccgagatttcctagaggtgaagaagccggaggaagtggtttttgaaagggggtggggggaaccttcctttctcaaaaagaggtggggggtggagaggcaggagcccagattccagttggtgaggatcggagccgggggaagggaagcgggcgggggcaggctgtgcaagtcaaccgcgcggcagccggagagggagagcaggaggggaggaggggagcgtcagaaaaatgggtattaatcaccggggacggggggaggcgcggggaacgcaggttgcctggtctggatttgggtctcacactcaaaaacgtgccgcgcacacacacacagacacacacacaccccctacctcgcacaccctgactccggggggaggagaaacccacgaagctggggaagatactgcttctgctcccaggggcgggtgtgagcgcgcgtgtcctctttctccacaccccccaccccaccccacccccaagcccctgcaccccctcactcctcttgctaagactctggcggaggcagcttcccacgtcatgtgctggggaagtggggtggtaaggtggatggaagggggacggaagggggaagaagcttagcccgagtccgtggcgcctcctcccggccgcagcggggaacagcaccgacggagagcggctgaggggcgaggggagctagacagtgccccccgtgggcggcccgcgggctgcggaaagca

SEQ ID NO: 49328 - DNA, 44 bp, Homo sapiens
  chr12:14518511-14518555
  hyper
gatagcacagtgggcggggtacatagcacgaccccccggagccc

SEQ ID NO: 49329 - DNA, 426 bp, Homo sapiens
  chr12:14720394-14720820
  hyper
tgagttcacccaggaaccagacgcccgctggacgtcaactcggccggacgcggggcacgggcgctaacaggctcctaggagcctccccgggcgccccccgcccagggcgcgctctgctcacctgcaggtttcggcggctccgcggtgactaacaacagcggcagcagcagcagcagcagcagaagcggtggcggctgtggcagccccgggcgcccgcccggaccgccgcgggtcatcgctccacggccgcgaccttcctctgcgggatcaggcggccgcggtggcccgcggtggcagaagttgcaagagaggctcctggcctactcaggggcgccgcctctccgaggtggggcgtcctcaactttcctctttcttgagcccggcctgctccgggctctgaggggcgaggacgcttcacgtggtggc

SEQ ID NO: 49330 - DNA, 56 bp, Homo sapiens; identical to SEQ ID NO: 8604
  chr12:14923204-14923260
  hyper

SEQ ID NO: 49331 - DNA, 122 bp, Homo sapiens
  chr12:14924090-14924212
  hyper
atagtctctcgatgcggacctgtttgaaaacatcaaaaaagtgggcggagctctaggccccacctctggagacatgctatagttgttaagtccaggaagcagtcagcgaaaccagcctgatt

SEQ ID NO: 49332 - DNA, 1216 bp, Homo sapiens
  chr12:14927116-14928332
  hyper
ccccaaagactgagccggctggcctcgttatttatgtgagcggctatgtaaatgaggattcggagattgctctattgattggagagagctggaggaggcggtctctcttccagagcgctagttgggagcggagcctgcctgtcattggtcaccagagccaatggaaaggggctgccgcgcggccgtaaagagtttgtagaggcagttcgggtgcggtacgttgcattccggtaccggacgccgagagcggtttgtctccgtctctggagttgtaggcgagaggtgatcatgtccggtcgcgggaaacagggcggcaaagtgcgagcaaaggccaaatcccgctcctcccgcgcgggcctgcagttcccggtgggccgagtgcacagactgctgcgcaaagggaactacgcggagcgagtgggcgccggggcgccggtgtacctggcggcggtgttggagtaccttacggcggagatcctggagctggctggcaacgccgcgcgtgacaacaagaagaccaggataattccccgccacctgcagctcgccatccgcaacgacgaggagttaaacaagctgctgggcaaagtgaccatcgctcagggcggcgtcctgcccaacatccaggccgtgctgctgcccaagaagacggagagtcagaagacgaagagcaaatgaccctgacgccgccctcagggagctggctcccccagcaaaggcccttttcatggtcgtcccgcaatgcttttgaatgtgctggatgtcatggagggccggtgacatctagcggggaggtgggcggcgagggtcccggcgggagccaataaagttggtgaaaatcgtttggtcgagagagctgtgtagtcgcggggacatgtcggatggccccaggggaggggggcgaccgggaaacccctggagcaggcactggtgggtgggcttgagccactctggacggctttagtccgcaggtcaccctcgaggcgtcaggggagggtggcctggaggtgggcagggtggaagccacctcgctgtcagtagggcaaaggggaggcagagtcggtgcggtgaggcctccttcggaattatttttacttccctttcacagagccttcgctctcctgccagtttgtgagcactcaggaccaagttctgggaagataccgtcggatcgagctgagctcggggcaggaagtgtctgcggccatatttttca

SEQ ID NO: 49333 - DNA, 539 bp, Homo sapiens; identical to SEQ ID NO: 8606
  chr12:15374052-15374591
  hyper

SEQ ID NO: 49334 - DNA, 828 bp, Homo sapiens
  chr12:15475221-15476049
  hyper
agcaagcagcgggccgatcctggtggagggttgggaggctgctgtcattttatgggtcggcagccagagtgagagtgtccctgctgccagaggactacggcgggctgggcgcggggtccccgcctctcgctcaccacacagaccccgcgcctcctctggcagccgcggtggtggcggcggcagagcctcgcccactccaatccccaccctctccatccttagtcattaaagaacagcagcgcctggcacgttcttggaggaccccgggcgcagaggaggaaagggagcaggcgcagggggactggaaaggcagcatgcgctcgccaggagcaacctcggcgcccagggtctgaggctgcagccccagttcgccattgtgagccgccgccgggggagtccgctagcgcagccgtgcccccgagtccccgtccgcgcagcgatggggcacctgcccacggggatacacggcgcccgccgcctcctgcctctgctctggctctttgtgctgttcaaggtaggggagctcctccacccctttttcccagcggtccgggcggcagccgcgctccggcgccctcgctctgccgttgggagcggcgcgccccagggcacgatggcccagccgcgggaagcgcctgccgtgcagcctgggcgcacgctttgttgtcctcgcgtgtgcgtgttcctggtggtcttgagaggtagggggcggggggaagaataagggaagtttgctccctccggctttcgccctttgtgctcttttatcgctgctgaaatccacatcaaaggtgggcttgttggatcgtgctttctcaggcaaaatga

SEQ ID NO: 49335 - DNA, 1019 bp, Homo sapiens; identical to SEQ ID NO: 8609
  chr12:15941608-15942627
  hyper

SEQ ID NO: 49336 - DNA, 30 bp, Homo sapiens
  chr12:16064014-16064044
  hyper
gaatatttttattacgtgcaattggcaact

SEQ ID NO: 49337 - DNA, 30 bp, Homo sapiens
  chr12:16064518-16064548
  hyper
cggcacgttcgcgccgcttgtctttgcacc

SEQ ID NO: 49338 - DNA, 647 bp, Homo sapiens; identical to SEQ ID NO: 8610
  chr12:16500381-16501028
  hyper

SEQ ID NO: 49339 - DNA, 30 bp, Homo sapiens; identical to SEQ ID NO: 8611
  chr12:16758252-16758282
  hyper

SEQ ID NO: 49340 - DNA, 30 bp, Homo sapiens; identical to SEQ ID NO: 8612
  chr12:16758928-16758958
  hyper

SEQ ID NO: 49341 - DNA, 1777 bp, Homo sapiens
  chr12:19282246-19284023
  hyper
aaacaaagctcagacgctgtgtttttgttgtttgaaagagagaaatcaggggcttgggcattattaggctccctttgatcgcgccctgggatgggaagccttcgggcaaagccctgggggcaggacgcgtttttttttttttttttttttttttttaatcgatcccggaaccttcgcgcggcggagggggcgggcgcgccgcaggggcccgagggaggggtctggggcgcggcgccgcttgcccatcccccgagcgcgcggcggggcggccggccggcggccgccgggatgcggaggggcggcgacgggggccggaccctgccggggcggcggggcgggcaccgcccgagggggtagggcgcgcgcgggggcgcgccgggccggggaggcgcgctcgctccgcgctcccttcgctcgctcgttccctcctccctcggcagccgcggcggcagcaggagaaggcggcggcggcggctagggatcagacatggcggcggatctgaacctggagtggatctccctgccccggtcctggacttacgggatcaccaggggcggccgagtcttcttcatcaagtaaagagccggggacggcacgggggcccgcgggggcgggagggcaggaggcgggcggctggcgacacgggggagagcccgggtctgtgctcctgcagcccctcggctcgcccccgcgtcccctctcacgctccgtgtctgccccttctctcacccctgcagcgaggaggccaagagcaccacctggctgcaccccgtcaccggcgaggcggtggtcaccggacaccggcggcagagcacaggtaacgccgggcccaaacggagttgggctccgcctggaggaggcggcagagcccgggccgcccggctccccgcaacctgccccgcgccgcgggccccgggaggcggcgaggcggggcggaggccgggcgggagcggccgcaggtagaggggccacggggactccgccgccgggagttctctccagtctcggggcgcctctttctcctcagcctttcatcagcacttggagacggcgccctcttcctgcgccttctccccccatcccagcctagacgaccctcgcgaccctagagtggcgacgctcccctccctgaaacctggagtcctgagtttttcctccgcggccgctactcactccccggtgacccccagctgccgtcttgccccccagcaatcttcaggcagtccttacccactcccctccctgcagccccggaccccgatcgcccgccgggataacgtaaccacatcctccccctcctcccaggagcgctgcctcctgccgtgcagcttcctcctcctaggtgggacttgtgggtaggtggctgatgaaggaggaggaggaggaggagaggagttcgggggtgctgcgatcctctctgtgacagggaacggctcgggaaacgcttggcgcgttccctcctgccacgggaggagcagccggagccggaggaggcgttcgcagcctcagttgctggcgatccggatctaaagtccccgccagccgcacggaggttgcacagactgccaggaggcggtgggcgtgcgagggggtgtcccgtatgggggcacccgggccctgtttggagggagtccgtggggaagcggctctctcgggtggctttgggagcttgtttgaatgctaagtgtgagtggagctggaaaaggctcctcgtagtttctgtactggtctgggtttcttttatcattctttgtttacattcgtgacttgtttgtc

SEQ ID NO: 49342 - DNA, 30 bp, Homo sapiens
  chr12:19593441-19593471
  hyper
aaatctctcgccgtcgccgccgcgcccctc

SEQ ID NO: 49343 - DNA, 30 bp, Homo sapiens; identical to SEQ ID NO: 8614
  chr12:20183925-20183955
  hyper

SEQ ID NO: 49344 - DNA, 1159 bp, Homo sapiens
  chr12:20521072-20522231
  hyper
tgcggtgggctgcgcggtggatcagcctcagcagcccctgctccagcctgtagggtgaaccggccgctttcccagcaaaggagcaatcgagctgagggtagcgcctcctccgcaggagggggcgggagctcggctgagaaagctttcctagggagttgccttaaagaaagaaagcggaattgtcgatcactccagttgccagttttatacaattttaagcagtcgtcgccactcgtttcccctttgcaaaactgcaaatcaccaccaaccttgcatcaaatagaagtggggagggaaaaaaaaagcaaatctccttctcccttctcaccctccctttcttctcaccctcccttcctctcttactcgctccttctccctccctcccttctgcggctgccgctagtctctcggtctggctctctctccgacgggacttagcaacttcttatttctcagccccttgtccatttttttttttccatcctttgccatgaattggattgacagaggcgggggaggctttgctttctgccccagggaatggcgattcgcgtcctggggccgtgccggggagaatcggccgaggagaaagaaagagtgatagaaaaagagctgcaggaaggaggagaagggagacctccatctgccgcgggcccggcgcgctgcagcgcagcgcagcgccgagctgcgcctcggaatggcccggagcccgccctgcgcccccggctcctccagcgtcagcggctcctgcgcgcgggatgcattgggcaatttttgaaatcctgaagtaggaagagaccccggaggatataagtcgggggtgggggtggagcagagaatctgtgaaagatattcaaagagagaaaaggggaatcctgatcgtttctgcccgtgcttgttttcaacttgagcgtgctagcctttaacttgaagaagtctcattggagcatctagcattctccaggagttattcgaaagctgaaactttcagtggattgtgggcctggggagaagaaggattccgagggtggaattgggaagagcgtgcgtgcgtgtgtgtgtgtgtgtgtgtgcgcgcgcgcgcgtgggtcggggcgggggcgtcggggggccactgggaattcagtgaagagggcaccctataccatggcagtgcccg

SEQ ID NO: 49345 - DNA, 835 bp, Homo sapiens
  chr12:20522347-20523182
  hyper
cgtggctgctggggagacctggtgctgcagccgctccggagctctcggaaactttcctccgcgctgtgcgcgggctccctgtcctttctgctggcgctgctggtgaggctggtccgcggggaggtcggctgtgacctggagcagtgtaaggaggcggcggcggcggaggaggaggaagcagccccgggagcagaagggggcgtcttcccggggcctcggggaggtgctcccgggggcggtgcgcggctcagcccctggctgcagccctcggcgctgctcttcagtctcctgtgtgccttcttctggatgggcttgtacctcctgcgcgccggggtgcgcctgcctctggctgtcgcgctgctggccgcctgctgcgggggggaagcgctcgtccagattgggctgggcgtcggggaggatcacttactctcactccccgccgcgggggtggtgctcagctgcttggccgccgcgacatggctggtgctgaggctgaggctgggcgtcctcatgatcgccttgactagcgcggtcaggaccgtgtccctcatttccttagagaggttcaaggtcgcctggagaccttacctggcgtacctggccggcgtgctggggatcctcttggccaggtacgtggaacaaatcttgccgcagtccgcggaggcggctccaagggagcatttggggtcccagctgattgctgggaccaaggaagatatcccggtgtttaagaggaggaggcggtccagctccgtcgtgtccgccgagatgtccggctgcagcagcaagtcccatcggaggacctccctgccctgtataccgagggaacaggtaa

SEQ ID NO: 49346 - DNA, 404 bp, Homo sapiens; identical to SEQ ID NO: 8619
  chr12:21590453-21590857
  hyper

SEQ ID NO: 49347 - DNA, 30 bp, Homo sapiens
  chr12:21654272-21654302
  hyper
gaaaggaagtgatccgctacagaccggcct

SEQ ID NO: 49348 - DNA, 30 bp, Homo sapiens; identical to SEQ ID NO: 8620
  chr12:21654649-21654679
  hyper

SEQ ID NO: 49349 - DNA, 793 bp, Homo sapiens; identical to SEQ ID NO: 8621
  chr12:21680358-21681151
  hyper

SEQ ID NO: 49350 - DNA, 466 bp, Homo sapiens
  chr12:21810428-21810894
  hyper
tgcaaatgcaacaagtctctccgctgagccgcagctgctaccctctgccttctgctcctccgccagggcacggccccccctgcgccccaaactgagcggcaaagtcagggcccgcggccggatgctcagagctaaaggccgcggaggacagatgtgcttcttcctccttcccgcgtctccccatacaagtactaccccgcacgtcccatcaggcttgcctgtgggccaggattcagggtcctgagccgaaacctaccaggagagagaaggctctggagacctctgtaacagtcgtgcggagaagacaaagtcagctgcgtgcgtctcctccggcgccggctctgcaaggagggaggagggggcggggccccacaaccaccgcagcctcttaggtttctccattgtgattggaaatccgagtaccgcctacccctcccctcggctcgctcaatccccttcaaggaca

SEQ ID NO: 49351 - DNA, 571 bp, Homo sapiens
  chr12:21927267-21927838
  hyper
tttttttttttttttttacaacgaaggaatcaaatatacaaggtgcgggggggaaaaaacccaagacaacagcctgcgggttgcagtagggagtgtgccccgaaaagtccatccatcactgcaagcctctgcggtgttttgcattttaaatcatttacgggaacacggacagcctcccccctccgctcccccggagcagctttgaaacttacagactccgggtagcgggcgcggcggctggacctccttgcacacgccggcgggccgcgggcaggtccctcgctctcccatgctggcgcgcgggaccaggggccgcccaggccggagggacaaattgggggctgcgtgtcctaaggagaagagttaaaataataaaaggtgcaactgaatctaaacgcagggagggctagaggaagggggatgggtgtagatcttcccctccccctgctcagctcaactcccttggccacttcagtggaaggaggagggactgggggggcgggggcgggggggcgatgctccacaaatcagcctcccagttagggctttgacgcacgccagacctcggaag

SEQ ID NO: 49352 - DNA, 128 bp, Homo sapiens; identical to SEQ ID NO: 8624
  chr12:21927877-21928005
  hyper

SEQ ID NO: 49353 - DNA, 329 bp, Homo sapiens
  chr12:22093939-22094268
  hyper
caccccttcacttctcgagccgggcctcgtcccttaattctagaaatagcgatcgcgaaagctaagtgccgagaagtgcgagagagtgcgagggcgtttttggatagcagaaatgttagctcaaaatcgacaacttacagttattcctaaaaatgtttaaatggcattcatgtaaaagacacggattcacttactccgatgacagttttcctcccctaggcgaagcacgcagtgcgccggaacggattatttttagggtggtgggagaccagctgctgcctcctatcgagtttctaaattgcacagactgctctgggccggggcagaca

SEQ ID NO: 49354 - DNA, 470 bp, Homo sapiens; identical to SEQ ID NO: 8626
  chr12:22094577-22095047
  hyper

SEQ ID NO: 49355 - DNA, 93 bp, Homo sapiens
  chr12:22095181-22095274
  hyper
cgactccagccctgccagtcccaggggatttctccgccggcgccccactcttgggaaggtcgctgcgcttccgggtgagtgcctgacctgcgt

SEQ ID NO: 49356 - DNA, 31 bp, Homo sapiens; identical to SEQ ID NO: 8628
  chr12:22198510-22198541
  hyper

SEQ ID NO: 49357 - DNA, 88 bp, Homo sapiens; identical to SEQ ID NO: 8629
  chr12:22486793-22486881
  hyper

SEQ ID NO: 49358 - DNA, 1133 bp, Homo sapiens; identical to SEQ ID NO: 8630
  chr12:22487133-22488266
  hyper

SEQ ID NO: 49359 - DNA, 505 bp, Homo sapiens
  chr12:22488339-22488844
  hyper
cgaggaggtgcgtgcactccggggtcctccgcctcgcctcctccctgaaaggaagtgctgcatccagatgtgcaggcagctggtgcccaaacactagacctcaagatgtcacattgccttggaggcgcgcggccttttagattaaaggaccgttggttcttagacgtccttcttgcccttcttgcttgtgataagcgataagcttatcgcaaccccgaccttggaaaagcaccacccgccttgacccaccgagccgagagagtcgctgttagccatttctgctcgccccggcggccgacgcatagctcgggtacctcctagcggtcgcctattctatttgcttaagcatctcgtcaagcataaagtgtgcaaggacaaagaagaaacctggtcagcttagtcatcacgaaaacaaaatctaaggctataactccatttgttcagccgaccaggctgcggtgtctggtacctttgtctagcatccgtctccactgagaggtggaac

SEQ ID NO: 49360 - DNA, 30 bp, Homo sapiens
  chr12:22777805-22777835
  hyper
cagaaaaattcagtcgttaactcaagtcca

SEQ ID NO: 49361 - DNA, 204 bp, Homo sapiens
  chr12:22778928-22779132
  hyper
ccttcctctcccctccccctgcgatgtgctttcattgatgcctcacactgcgttttgtcttcccaaaccctagcgtactcaattcccaaagtaatgaccacgaccatgcatcgctaggtcggttcttaggcagcaccacacacattgttttgtttgagtcgatatttctgaattattaaagtcgtcttactgaaattaatacct

SEQ ID NO: 49362 - DNA, 142 bp, Homo sapiens
  chr12:24103310-24103452
  hyper
acaacttgtcactcactctgtcggtctcactgttagctcgtgctttccgcaaagtggtgcgaacgtcctggcaacccgaccaaagtttcctcagctctaaactccataaaacacgatgtgcgatgtggaggggaataggtat

SEQ ID NO: 49363 - DNA, 1938 bp, Homo sapiens
  chr12:24714475-24716413
  hyper
gccccaaagtgcaagcgagatttcccaaacccgcgcttaaagtgacacaacacgtgagtggtcttcacttggtacactgagtgaggtggggggaaaaagtagttgcaattagaattaaagcttccggtctctgaaatccctagaatcctgaaggatgagacttgtttcagaaattccgggcgggagggagggggagtggtagggagaaggattgcagaaagcgaaacaaaaagacgaaagagtcgggaggtgggggtgactaaggttagggggtgggccaggggtcgctctgatatcctagaagggttaaggggctttgtccaacttttagggtctggccttggacattggccgcgatgcccagcacagcccagggttctccccgcactctcctctcgcatcaaccacctccaccgccaccacttacaaaacaataccagcaacagtacgcaggcttcccaacaaaaatagaaagttatcccgtctccgggtcggggtccaagccggcgctccagggtcccccggccagccgcccccggggatgacagggccactccgcgcctcgggccgcctcccacctctccgccacccccagcccagtccccctccctctgtacttgaggaaactccggcggcggccccctccctcctccgcggctctccagctggagccgggaaggagtgctgagtggcgggcccggcgagcggcagaggggagctctgcgccttggaggtctgcccacaacaacatcgggacgaacaacaaagttaaaacgcagcgattcacgcaccttacccggtctcgttaatgcctcctccggcgtgggatgcaaagtggcacagaggcgggctgggggcccccgggaggagactggagatgggttttggtggctcgcctttttcactctgtgtgtgtgtgtctgtgtgtgtgcgtgtgtgccggtgtgtgtgtgtgtgcgcgcgcgtgtccctctctctccccccgtctctcgctcgcccgctcgctcgcgctccccgtgttgctctcaaggacgaggtgaaatccctttgctggtcatgaggcggcttcagagacaaacaacacaatgcgagtgcaaataacaaaaggcaaaaagacagtaggaacaatgggggaggcgagggcagcgcaccagccggcggtcaccgcggcccggcgcccgccccggggggtgcggcgggggcggggggggggcgcgggggcggtgccgggggctcccgctccctccaggtcgcccccgagctcccgcaagcccaccctgacctccttcttgcagctcgccgcccggccgccctctctatccatccgaagggaaggagccccagagttttcttccccgtctgctgcagagtaactagattgtaaataacgcggcgattacccacaccgtgcaggaattttttttttatctgccctccacttaaaggagcgataaaaatgaaatggcaggagtggaaggagccagggagagcgggatatctctagatctcgatggagctcgcatctataaatacgcattcatgtttagtcaagtccctttgtcaacttcttcccggcgcctgagcctcagccgctgctctgcgcccaggacctggcccctcccggccccctagtccagtggtcaggcggtcgggccggcagggagggcgcgcgcggggggctgcggggtccgtggaacctttccgggaggcgagccgcgggctgctgggcgcggaggctggagccgcgagaggttcggctgctgaagcggccactgcctcccagagccaggctccgcgccgcgcgtccccgccgccgccggcactgtgcacccacctactcctcggagattggggtaggggaaaaaagttttgaggcgctctcatctctgcctccggggtggttgaactggtttggttttgtgttaagcgaagccaaaa

SEQ ID NO: 49364 - DNA, 257 bp, Homo sapiens
  chr12:24716472-24716729
  hyper
acacacacaccccaacccaatgcccaagaaccagggaatgaaatttagtgatatttagggagaaataaggctgggcgctgggctccgactctttctgccgcgacacttgagtgggcgcgtggagccgagagagaccctcagagtcccatccccatcagaagaaactccgtcggtgatgccctgagcagaagctgtggggctgatttaagtgtgtgctctgacagctcccgggctgctccggcgcttatctcttctaa

SEQ ID NO: 49365 - DNA, 92 bp, Homo sapiens; identical to SEQ ID NO: 8634
  chr12:25056242-25056334
  hyper

SEQ ID NO: 49366 - DNA, 623 bp, Homo sapiens
  chr12:25101374-25101997
  hyper
ttaacagtgaaaagatcgttctccctcccctctccacccgggtcaactcttccagccgctccctcctgcatcacgaacacacgctgcaggaaagcgcatttacagcccgggacatccccagacctcctctccaaaattccccacctcctgtgcataggagaaactgagagaagccctcacttcctttccaaacttcacaagcaggggagggagctgtagcagactttcacctccgttcccaaaagcgaatgtgaaaaagtccgagaaggcacgtcctgcgagtggaggttaaaccgaaatctgaacagaatgcacggtccccgcaaactacgattgataaagaagatactgagacgtttgcgggggatataagccatggttgtctcgccttcctcccctccctgccaactatgtttcttggagaaatcgccggttcgattcacgcacacatttttgtaaaacacggacaaaaccataagtagttaccttcattgttccgtcggccacgagggaagctcgagctgagcggagggcagatcccaagggtcgtagcccctggccgtgtggaccgggtctgcggctgcagagcgcggtcccggctgcagcaagacctggggcagtgc

SEQ ID NO: 49367 - DNA, 323 bp, Homo sapiens; identical to SEQ ID NO: 8636
  chr12:25102009-25102332
  hyper

SEQ ID NO: 49368 - DNA, 62 bp, Homo sapiens
  chr12:25347648-25347710
  hyper
tactaaaacatttccgccaagttgcaataagaaaatttagtgggaacgtctatcactactga

SEQ ID NO: 49369 - DNA, 181 bp, Homo sapiens
  chr12:25348086-25348267
  hyper
cggacgacaggccccgcccacttgagctccaggaaaagagcgcagccgcgcggaggctcttccggccggcgccccgccccctttactgacaggttgcccacctcccccaacgccaccccgcttcgcagtagacggacagaggagtcgtagcggtcgaggcttttgcggctccggcgtgccg

SEQ ID NO: 49370 - DNA, 30 bp, Homo sapiens; identical to SEQ ID NO: 8639
  chr12:25368388-25368418
  hyper

SEQ ID NO: 49371 - DNA, 136 bp, Homo sapiens; identical to SEQ ID NO: 8640
  chr12:25378545-25378681
  hyper

SEQ ID NO: 49372 - DNA, 95 bp, Homo sapiens; identical to SEQ ID NO: 8641
  chr12:25380228-25380323
  hyper

SEQ ID NO: 49373 - DNA, 87 bp, Homo sapiens; identical to SEQ ID NO: 8642
  chr12:25398213-25398300
  hyper

SEQ ID NO: 49374 - DNA, 260 bp, Homo sapiens
  chr12:25404338-25404598
  hyper
tgcgaagagcaccccgccaccctcagggtcggcctatactggcgcgcatccatttactatcattgactgcatgtaaataaacaagcagtcaccaaaagtgggaggcgacttcggggacttagggagaccgggcggacgatttcccacaccggggctgtctgatcgccgccccgattattatcagcctcagcacttgggctgggaatttagccccaggcccaaacaaacacgacagaccctttcaacgctaatcttctcgg

SEQ ID NO: 49375 - DNA, 45 bp, Homo sapiens; identical to SEQ ID NO: 8644
  chr12:26111917-26111962
  hyper

SEQ ID NO: 49376 - DNA, 30 bp, Homo sapiens
  chr12:26267574-26267604
  hyper
ccaggcggggaggccggcctcggggagaat

SEQ ID NO: 49377 - DNA, 30 bp, Homo sapiens
  chr12:26275035-26275065
  hyper
tgagcagagctctccgggttccccggctcg

SEQ ID NO: 49378 - DNA, 30 bp, Homo sapiens
  chr12:26348102-26348132
  hyper
tctggaaatgacttcgcagcttagagccca

SEQ ID NO: 49379 - DNA, 449 bp, Homo sapiens
  chr12:26379637-26380086
  hyper
ggttcggaaacgtgtcgggggcatgtgcctgcggaaacattccagggcacgttccctcctgcccacatccaggaggcccctgggctgcttgcggcagcctcctcccgagcagtgcgctgcagaagggcccttcccgttcaggccaccggggaaggtaattaaattggagcagaaacaccctcctcccgaggtcaccgaacgtgaaagctgcaggccgggtaccaattaaaggcagcgagcgagcggagacgcgcccgggcgctgctgttacataagcgcccggggccaccgcgcctccgcccgctgcgcagcgccgggctgatgggctgacacccgcaagacagatgcctcccgcgccgggcttttatcaagatatatttgctcggattctcaaggtcatcgtaaacactcttccttatagtgtattcgtgccatgtaggtaaaacaag

SEQ ID NO: 49380 - DNA, 31 bp, Homo sapiens
  chr12:26808252-26808283
  hyper
aaatggcagagaaggccgggggtggtggctc

SEQ ID NO: 49381 - DNA, 30 bp, Homo sapiens
  chr12:26986104-26986134
  hyper
tcacagccgcccggcgggagctggaagtgg

SEQ ID NO: 49382 - DNA, 89 bp, Homo sapiens
  chr12:26986790-26986879
  hyper
tgtccaggtggacgcgagcctccaaggaggtaaacgtcacttggccaagccagtttttgtagccaaccttcagcggtgagggctcagtg

SEQ ID NO: 49383 - DNA, 47 bp, Homo sapiens; identical to SEQ ID NO: 8647
  chr12:27038032-27038079
  hyper

SEQ ID NO: 49384 - DNA, 30 bp, Homo sapiens
  chr12:27090790-27090820
  hyper
ggctgctggctgggcggggagagtcagcgc

SEQ ID NO: 49385 - DNA, 30 bp, Homo sapiens
  chr12:27091341-27091371
  hyper
aagcggagagtggtcggttctgccccacag

SEQ ID NO: 49386 - DNA, 30 bp, Homo sapiens
  chr12:27166928-27166958
  hyper
tgacagacccctggcggattttgacctcgc

SEQ ID NO: 49387 - DNA, 30 bp, Homo sapiens
  chr12:27167561-27167591
  hyper
ttgcggactaacgtcgccaggctcctgttt

SEQ ID NO: 49388 - DNA, 199 bp, Homo sapiens
  chr12:27175265-27175464
  hyper
actgtatttcaaagcgattggaccccagaccattcccccagttactcaaaagatccagcctctcctcaggtgtagcccgctctagaaaggccgcctcgggagtaccacccactcctgacggggcggggagttctctccgaccccacccgttccaaggacgcagccctgtgattggccatgacgcgtgccagagctgccc

SEQ ID NO: 49389 - DNA, 30 bp, Homo sapiens
  chr12:27397037-27397067
  hyper
tgtggtgcgtatgacgtcagggcgagtcgg

SEQ ID NO: 49390 - DNA, 31 bp, Homo sapiens; identical to SEQ ID NO: 8648
  chr12:27485803-27485834
  hyper

SEQ ID NO: 49391 - DNA, 30 bp, Homo sapiens
  chr12:27486765-27486795
  hyper
tgctttttccttctcgctagtattcactgg

SEQ ID NO: 49392 - DNA, 309 bp, Homo sapiens
  chr12:28122217-28122526
  hyper
cgggcaaggagcatcggtgaccgctgcaagccctcggcagcatcccagcttggcagcccctccccctggcctccccaacccggcgccctggggaggatggggcacttacaggcggcggctgagaccctccaccgagcgcccgcaggagggcaccgcgtagctcagcaggaacaccgcgacgctccactgctgaaccagtctccgctgcatcgtctccgctcgcgctcgggacctgcaacagaagggaatgggacccgagtgtcagtctggactctccatctccccgcactactccgctcccccttttta

SEQ ID NO: 49393 - DNA, 515 bp, Homo sapiens
  chr12:28122886-28123401
  hyper
cgaaccaggccctttcgttccagagccacttgtagcgaaacccacatatatatacatagctgtctgtctacctcctctggtgggctggttgcttccggaaagttgattccacacaccctgagaacaagtttcaagtgcgtgtgtcgtcgatcaggagggccaggtggcggcgagggcgggtcgttagtggcagccggagcggcagggaggcggcagccccgcttcacgggcggggagacatgctggccgggcggcgcaggttggaggcgagttgaaaaccgagcggaggaatgttcacacgctccgaggcaaacctgccggagaagtgagctagtcgcaaagaggtggcgccctaggaacgcgcgcggggcgagcgagggcgcaggcgggctggcgggcgggcgcgcggggggcgggggcggcgacgggcggcccgaacgggccccgcgccgcccgagcgagtggaggggagccccgagccgggaatgagcggcgagcggcggagctcccccctc

SEQ ID NO: 49394 - DNA, 1414 bp, Homo sapiens
  chr12:28127761-28129175
  hyper
ccctcccctcctcccacccagcgtcctcatccccaccgcctgcgatagacttgggtcgcccattaggaagctgatccgcagggacggggcaggcttggctcctggggatcttaggctccatgggaacttcgggggtctcggggcccgtgagcggatctagctactacttcccctaggttctcctcgggcttcagtccctaagagtctggactccggactgccgcacagaatccttcttgcccggagcggtattattgaggtctttgcgttctgccccgccctgtcccgccggcttgggtgcttggtttctaacccgagtatactcggagtctctggtcctgcgcgcccccctcctcccgggagagccccgtatctggctgcgggtaagggaaaacttcgggaaccccgagacccaaggacagggtcggagggagcgcgcgaacttcctctgagcagggctcttcctcccctcccctctccctccaggtcaatttatgactcaaacatgagataagccctaggcagacggtgacgctgacttccccgtgggggcgcggggagagaaggatgaggcagacgtaccccctccctggcctggccctgtccggggccgcgtcggggtgtggaggggcgactcccttcctccgggagccccgactcgctctctcccagcgcgcctcccctgcgcccgtaaagctcggccctgccggagccccgggacccgtctgttttatttcacttaaagcgatctgcaaagtcaaggccgggtgaggtgcggcgcgggagaggagaggatatgaacggacgtggaacgaagttctgtctgccaactccctccgtctgattcttggaatccggtggcatcttaaaggacggaattgagggcaaggagaagattattaatccccgaagcccgctctgtctatatataactgctcagtggttacagttggcgatcgcagggtgggggttgggggtgtagaccgtgggccatggaacacgtggcatctctccagggcataaaaatcaatctagctggtggctcctatggagtttgtaaattgcgcagagctggctgggggaagccagtgagctgtccatggtggttaaggctcgttgatgtgcgtcctcgggctgtcctggtgaggcacagacccccctaccccaggggccgcaacgccccagagccccagcctgccagcgatccagccggtgtgcgcccgacacgaggctggacgtgtgtttgcacaactccaggacgcgctcttgcacagaggccgaattccagagatagacggaaaaatctcccgattccaaattgtgggtttccttttagttccttcctgaacgtgtctttccccactcaggcaacgtttcacatgctttaagaaacgtccatccattttagtagcct

SEQ ID NO: 49395 - DNA, 30 bp, Homo sapiens
  chr12:28155064-28155094
  hyper
tcctgaacttgttgcattctgatagataat

SEQ ID NO: 49396 - DNA, 30 bp, Homo sapiens
  chr12:28174801-28174831
  hyper
tgcagcttgttgagacagatgaaaccacac

SEQ ID NO: 49397 - DNA, 704 bp, Homo sapiens
  chr12:29302068-29302772
  hyper
gctggcccctcaccctcctcccgccccgggctgaggctgccgccggtttcgcgcccagtgccgaggcagcggcggagccggggaaggtcggagggagggtggtttcctcccgccccacacccagtctccgagccggatatatagagtgtcacgtttgggagccgaaagactggagccgtttccttgtggctggagcgcttcccgtagcctcggggaaggagcaggatttagaggaccactagttggaccccatcctcgtgctggaggaacaggtattccagggtccccagccctggcgctcgcagagcccacgcgctccaaaagcagagaccggactgggggtggcccaggagggagggctcggctgggttcgcagggcggggcggttcccggcgggacctcgaggagggtgggtgtgaggccgggtgggaggagagaagcatttgcggaggctctgccccctgaagctgcccccggctgcaccccaatcgtcaccggccgtttacgcgcggttggcgtcggcggagcccgccaaggtggggcgcgcgggggttgcaaagggcagaaagccgggaaggacccagcaaggttaatgtggggggccgcgccttggggactggggacccgggaagagaggcgcggggccgagtcccacccaggcctcctgggcccttggggctattcctggagagagcgcgaaaatg

SEQ ID NO: 49398 - DNA, 122 bp, Homo sapiens
  chr12:29534143-29534265
  hyper
atcacagctgaaaacgtcagaaaagagacaatgtacagatctcgcgatattccctttgcttacgacgtgcttagggaatgaagaggcgtggttaagataaaagaggcgtgcctacagggaaa

SEQ ID NO: 49399 - DNA, 36 bp, Homo sapiens
  chr12:29935802-29935838
  hyper
ggagcagccaagggtgcaaggcgggggctggggggc

SEQ ID NO: 49400 - DNA, 420 bp, Homo sapiens; identical to SEQ ID NO: 8652
  chr12:29935902-29936322
  hyper

SEQ ID NO: 49401 - DNA, 120 bp, Homo sapiens; identical to SEQ ID NO: 8653
  chr12:29936395-29936515
  hyper

SEQ ID NO: 49402 - DNA, 100 bp, Homo sapiens; identical to SEQ ID NO: 8654
  chr12:29936542-29936642
  hyper

SEQ ID NO: 49403 - DNA, 170 bp, Homo sapiens; identical to SEQ ID NO: 8655
  chr12:29936661-29936831
  hyper

SEQ ID NO: 49404 - DNA, 425 bp, Homo sapiens; identical to SEQ ID NO: 8656
  chr12:29936976-29937401
  hyper

SEQ ID NO: 49405 - DNA, 52 bp, Homo sapiens
  chr12:30322872-30322924
  hyper
cctggccccagaagtcgttggtgaagatgccccagcagagcgaggcgctggg

SEQ ID NO: 49406 - DNA, 425 bp, Homo sapiens; identical to SEQ ID NO: 8658
  chr12:30323014-30323439
  hyper

SEQ ID NO: 49407 - DNA, 30 bp, Homo sapiens
  chr12:30908295-30908325
  hyper
gtgaaatgcagatgcgcctttgcccctcag

SEQ ID NO: 49408 - DNA, 357 bp, Homo sapiens
  chr12:30948619-30948976
  hyper
cgtggctgaagtcagtcgggccgcccgcttgctgcacggcagccgtgggactggcacaggctcctcggcagcattatgggcagctggtagagcggccacttctgagagccggatgggccttccgaggtcgggccgtgccccgctgggcagcgcagagggggtgtgtagggcacgcgacttggagccaggtccagacccatcctggctcctctcagggctccttcccctgcccccattccaccccagccctgctggctgtcccgcaggacccagcgccgcggtagccttctctgaactgcggctcaggcggaggtgtcactcctgcctccagcccaggagggcaggtcaggttatgca

SEQ ID NO: 49409 - DNA, 429 bp, Homo sapiens
  chr12:30948988-30949417
  hyper
cgatctccccccacctccaacccccttttctcccgggtccacaccgcagttcccaccgctccgggtgtcctccccagtgcgccgcgatttttgtgtccaagccccagagtccctctgagaccaacccccagccagcacagacttcctgccttcccagctcgggtgagtagccctgaaacgcccgcccccgccgccccgcggccgcagcatcctctcgatggccgcgcctccgggacgacgtggtcccctcgagtagtacaggagctgcaagagaggcgcgccggggccagcaagctctagaacagcaggagcggccccagttgggaccccgggacgacgagtggccggcaacgcggcgcccgcatggcccaagcagtgtccgggaggggtcggggccccggactaggggcgcagcgaggaccgcccgga

SEQ ID NO: 49410 - DNA, 30 bp, Homo sapiens
  chr12:30949920-30949950
  hyper
agacagctccgggccgggggtggaggatgg

SEQ ID NO: 49411 - DNA, 20 bp, Homo sapiens
  chr12:30975304-30975324
  hyper
tcaaaccacaaaacaaaaga

SEQ ID NO: 49412 - DNA, 451 bp, Homo sapiens
  chr12:30975388-30975839
  hyper
cgccagctcctttctcggctgcctgcccagctgctgggctggagctccgcgtgctgggtgtaggtcaagtgatcccgtcgcgggcgggcggaggtggccgggcagccgccgctgtgcccgggtctggggtgagctgcactgctgccctgggccccggctcccacgcctgtttcccggagctccgcggctccggctgcttcgccctccctctgtgggctgggctggggtcctcgcgagaagtcctgccccgctcccttctccaaatccacaggccctgtttctctggagacagggaggctcatacaggatatgtgcaaatgcttttattacaagctgagttgaaagacacccgtttgctctcgggtccttttggtgagcgccgcaggaagccgggctcctctctccccagaggcggccgcaggttcgcggcgcagggcctgcagtgccagga

SEQ ID NO: 49413 - DNA, 145 bp, Homo sapiens
  chr12:31079222-31079367
  hyper
aggccaacctctcccaggggccgacaaacgtaaagggcagggagacctaagcggggagctgcggagcgcggggagtttgaaagccgctccaccgccctactagtccgtccttttgccccgccccccttagggatccccccggcaa

SEQ ID NO: 49414 - DNA, 246 bp, Homo sapiens; identical to SEQ ID NO: 8663
  chr12:31079417-31079663
  hyper

SEQ ID NO: 49415 - DNA, 141 bp, Homo sapiens; identical to SEQ ID NO: 8664
  chr12:31079693-31079834
  hyper

SEQ ID NO: 49416 - DNA, 30 bp, Homo sapiens; identical to SEQ ID NO: 8665
  chr12:31479303-31479333
  hyper

SEQ ID NO: 49417 - DNA, 30 bp, Homo sapiens
  chr12:31742964-31742994
  hyper
cagtgtcaacaaagcgcggtgctgggtccc

SEQ ID NO: 49418 - DNA, 30 bp, Homo sapiens; identical to SEQ ID NO: 8666
  chr12:31743352-31743382
  hyper

SEQ ID NO: 49419 - DNA, 30 bp, Homo sapiens
  chr12:31744421-31744451
  hyper
ctctgagatcatttcgcataacggtctgaa

SEQ ID NO: 49420 - DNA, 30 bp, Homo sapiens
  chr12:32260427-32260457
  hyper
ctggaggctgagtacgacagcctcaaacag

SEQ ID NO: 49421 - DNA, 30 bp, Homo sapiens; identical to SEQ ID NO: 8667
  chr12:32552264-32552294
  hyper

SEQ ID NO: 49422 - DNA, 30 bp, Homo sapiens; identical to SEQ ID NO: 8668
  chr12:32553018-32553048
  hyper

SEQ ID NO: 49423 - DNA, 30 bp, Homo sapiens; identical to SEQ ID NO: 8669
  chr12:32908756-32908786
  hyper

SEQ ID NO: 49424 - DNA, 34 bp, Homo sapiens
  chr12:33048898-33048932
  hyper
cacacagggtggagcgccccgaagtacttgcata

SEQ ID NO: 49425 - DNA, 486 bp, Homo sapiens
  chr12:33049137-33049623
  hyper
caccagtgaggggcgcggaccggcggagtagaaaaagaaaggggtgaaatcttgaagtgagttagttaacattgatagatatgtacaatatttaatatacataggtacctatatgacaaagctgagtaataggttatggaaaagagtgctttccacaagcaagtcggtcataccgaagacggcgagcaacaggtgggcagaacacggggtcccgcactcccagcacgcggggtgagggcgggataggaggaggtgaccgggtgtggggcagggggcggcgccggggagcggcgggctccactcaccgttgcccacggagctgcggcccttccgggcgagggtctgctgcacctgctcctggatccgcaggctcttgactgtctggccgccgcggccgctgctccccgccagcttcagcttggcctcggagggcagcgccaggctggagctgtccagttgtcccaggatctgctggcccaggacggt

SEQ ID NO: 49426 - DNA, 683 bp, Homo sapiens; identical to SEQ ID NO: 8672
  chr12:33049652-33050335
  hyper

SEQ ID NO: 49427 - DNA, 438 bp, Homo sapiens
  chr12:33591574-33592012
  hyper
ttggatgtctgagagcgtgcgtgtgctagggattttaaacgtctcccctctcttccacttcttcgatatgtgctctgagctttaggtgtcgcctcacaaatgggatcaataatccttgttttaccaactttgtcatgaaaccctagaaaatcatatatattaaaagggctttagaaattgtcaggtgcccgacaggttgcagccgcgggttacctcggaggccaaggcagccacctctgcaagggagttctgcgtccaagcatggcttgtccgtcccgcctggcccccatcaacaaggccgggaccagcggccggtggaacgagcgagagcagccctagtcccacaggtgagccgcccccacaagcagccaagccgcgagccgtcccggcgccgtcaccgcccgcactcacttctccactccgggagggagatgggag

SEQ ID NO: 49428 - DNA, 196 bp, Homo sapiens; identical to SEQ ID NO: 8674
  chr12:33592057-33592253
  hyper

SEQ ID NO: 49429 - DNA, 563 bp, Homo sapiens; identical to SEQ ID NO: 8675
  chr12:33592284-33592847
  hyper

SEQ ID NO: 49430 - DNA, 101 bp, Homo sapiens; identical to SEQ ID NO: 8676
  chr12:33592932-33593033
  hyper

SEQ ID NO: 49431 - DNA, 71 bp, Homo sapiens; identical to SEQ ID NO: 8677
  chr12:34260769-34260840
  hyper

SEQ ID NO: 49432 - DNA, 157 bp, Homo sapiens; identical to SEQ ID NO: 8678
  chr12:34260905-34261062
  hyper

SEQ ID NO: 49433 - DNA, 30 bp, Homo sapiens
  chr12:38710418-38710448
  hyper
agacccgccctttccggaagttttgacact

SEQ ID NO: 49434 - DNA, 1452 bp, Homo sapiens
  chr12:39298556-39300008
  hyper
tgtactgagccactgcgcccggccgagagtcagtttttacaagcactcagatgtgggcccgaaaacaaatcaaaacaaaagtcgtgacttcccagatcttaggtaaggcatagattcgtctgcaaggagggccgaaatctctacctatcaggcaaaaggcaaaaagcccggaagggtcggggagaagcaagctggaaggctccaggaagtgggtggggaggaagctgccggggttggagccaaccctagcaacagcaggtttgcacacgcctagcagaggaagtcccgggcctaagcgtgcagcggtcacaagagcttttggcagtgctgtccccttcgattccggtcatcacccaaccatccagcccgggtttggggcggaaaaccggcttgtaaagtgggcggcggccggtgttcccacagctgagtcacagcccagccaacttttacagcgtttcccagaaagaaaatacaaagtctcagtcccggagcccaccgcttctaattcccgctcccctgtgtcacctgacccggggtaactccagccccactactgagatatttcccactcatggcgcaacttcttgcctgcgcaaagcctcgtggtaccccgagcgctctccaagtgctaccaaccccacagatgagagggcaggagagaggggaagggctgcgtcctcacctgcaggacacggacacctccacccgcgtggccgggatggcagcgctcagctggttcaagtccccgatgcccgcagtgctgttgtagcggctgtccatattgggaggaggcgccttggacttgtccggcgcccacaaccacagctcgggcggactgagggctagctcccgtcaggcggggatgggggttgagggtggaggcagaagaaggaggcggaggcagcgcgcgggatgggggagggaagggaggaggcggacctccgcgcagagccacgagggaaccgctagccagtcctgggtgaaactgacgctgccaggcaagtggcgcgcggggatcccggtttcccagcccccttccggcaggcagcagcccgggcgggggacacactccgtgatcccctcctggctggaggggtcaggcttggtggacccagcaagcagcctgatggagaaggtggcaccagacgcagacccctaccgtccaggaccgcaagccctcgccggctctgcgtgcttttaggttttgtctccacctctgcacacccacactcgcctcctgggccgcgacagcttccttctgtcaatcaggtgtggacgggaaggtctcgaagtttcctcgcctgagttgaaagctggaggtgggggcacctctgcccgttcctaactgccccgttataaggtccccctccccacaattggttctcacctcgccctcggagctcttgggagatccctccgtccctcctactgtgccctcgggcagatgagtct

SEQ ID NO: 49435 - DNA, 126 bp, Homo sapiens
  chr12:39539283-39539409
  hyper
cgccgccccggaaggtcgcgaactcgccgcctccagcgccggcgccttaaccccgccggtcccggcgccaaagtcccgacagtggcggacgccggcaccaggggcgatggagagcaggcgacaccg

SEQ ID NO: 49436 - DNA, 30 bp, Homo sapiens
  chr12:39836270-39836300
  hyper
ctgcctgggaaggccggagctgcatggaca

SEQ ID NO: 49437 - DNA, 30 bp, Homo sapiens; identical to SEQ ID NO: 8680
  chr12:39837347-39837377
  hyper

SEQ ID NO: 49438 - DNA, 30 bp, Homo sapiens; identical to SEQ ID NO: 8681
  chr12:39837645-39837675
  hyper

SEQ ID NO: 49439 - DNA, 781 bp, Homo sapiens
  chr12:40618267-40619048
  hyper
tgtcctcttttcccagcgccctgatttctattcttagatctggagataggcggctttcatttttcctgctcccagttcccagaccttccgtggggccgcaggatccccggctggcgggtcgcggagggtggccggccgggctgcgcactgcgcgcctccgctgcggggctccgggcctgtggactcagcggagtccgctgagtcagtttcttcccgcgcgactcccggccgcgccgccgctgcggtggaatctggtcccaggaggcggcgtccgcccggggtccggtctaggcgtgcgtgggggccacggtcacggtcatcccagccaggcccggctccagcagccccacggccgccgccagagttctgcgcggcccgtcgcctcggcggagcctctggcaggcccctgagctcgtttttggggcctgagtgggggaggaggaagccgagcaggagggctccggagagggagggcaacgcggggcggggagctgcctccttcctcataaacaggcgggcgtgggcgccgatggggcccgcggggagcgctggctgcgggcggtgagctgagctcgcccccggggagctgtggccggcgcccctgccggttccctgagcagcggacgttcatgctgggagggcggcgggttggaagcaggtgccaccatggctagtggcagctgtcaggggtgcgaagaggacgaggaaactctgaagaagttgatagtcaggctgaacaatgtccaggaaggaaaacagatagaaacgctggtccaaatcc

SEQ ID NO: 49440 - DNA, 451 bp, Homo sapiens
  chr12:41086212-41086663
  hyper
gctgccccaataaccgccctaaaaggccgggcttctgctgtcaagtagccagggtgggctccgccgaggcgaggaggggcgccggtggggagatgcgctcccaggtgtttgcagcggaagtgggaaacctgtagggtatggtccagctgtgccgcaccgaggcgagcaggagcagggaacaggtaggaagctggacttttccttctttgcagataaaataaagaatgcgcatttccatgctgttgcttcccttcccccagccccgcccagccctcgtcacccccaaatctcctgtggtccctgcagctctcgccgtgcggcgcgggaaggactggggcggaggtggctggggtgcggggaagcaggggtgcgggatgccggagccctggggtgccgggcaaggcaggacggcagtgccctagaagagggctccgagctcggggtctgtgtc

SEQ ID NO: 49441 - DNA, 424 bp, Homo sapiens; identical to SEQ ID NO: 8684
  chr12:41086692-41087116
  hyper

SEQ ID NO: 49442 - DNA, 44 bp, Homo sapiens
  chr12:41582162-41582206
  hyper
gcgagacggctgccccgggggtggcccggggaaggcaggggggc

SEQ ID NO: 49443 - DNA, 597 bp, Homo sapiens
  chr12:41582398-41582995
  hyper
cggaggcgccggtgcccgctgcagtgccagcccttggcgcccggcgagctgtaccgggtgctgccgctgcgcagcctcatccagaagctgcgagtccagtgcgactaccgcgcccgcggctgcggccactcggtcaggctgcacgagctggaggcgcacgtcgagcactgcgacttcggccctgcccgccggctccgcagccgcgggggctgcgcttcggggctgggcggtggtgaggtgcccgcgcgggggggctgcggtccgacacccagggctggccggggcgggggcgcgcgcggggggccgccgggcggccgctggggccgcgggcggggacccgggcctcgggtcctcgcctggaggcggcgcgagaaggcgctgctggcgcagctctgggcgctgcagggcgaggtgcagctcacggcgcgcaggtaccaggagaagttcacccaatacatggctcacgtccgcaacttcgtcggcgacctcggtggcggccaccgcagggtaagcaaaggggggtgggcaccgcgggcatggtcgattggggtgggaaaaggagcggttctttctgacgcttcaggattcctttggaat

SEQ ID NO: 49444 - DNA, 169 bp, Homo sapiens
  chr12:41583213-41583382
  hyper
caccctcctgcccaccgtctctgcctattttttgagcacttgtcccgtgcctgaagcaaatccgagaaggaaagacagaaagcgaagactttcccggcccagcctttcctctcccgcggccaccagcatccccgcggccctggcagccgcgcacgcacacctgggactg

SEQ ID NO: 49445 - DNA, 30 bp, Homo sapiens
  chr12:41583705-41583735
  hyper
gctggccccgaactgcgctcctggtcctcc

SEQ ID NO: 49446 - DNA, 30 bp, Homo sapiens; identical to SEQ ID NO: 8688
  chr12:41699787-41699817
  hyper

SEQ ID NO: 49447 - DNA, 30 bp, Homo sapiens
  chr12:42326665-42326695
  hyper
gcaccgggcccagccggcccagtccctcaa

SEQ ID NO: 49448 - DNA, 30 bp, Homo sapiens
  chr12:42719888-42719918
  hyper
gactgtttgagatccgggccccgaaggcgg

SEQ ID NO: 49449 - DNA, 30 bp, Homo sapiens
  chr12:42876640-42876670
  hyper
ggggtcccctgggtcgtccccatccccgcc

SEQ ID NO: 49450 - DNA, 121 bp, Homo sapiens
  chr12:42982744-42982865
  hyper
cagcaaacaccatcgcggggcagggggttggggagagtggtgggagttgattcgcctctgccaaaaagccaccagcccctttccccagcgctagaggagagaatcggtaccctccctccgg

SEQ ID NO: 49451 - DNA, 834 bp, Homo sapiens
  chr12:42982950-42983784
  hyper
cgggctacagaacctgtttccacgccggagaaaaccaagggaagagttggttgtgatgcagcaaacaggagccatgcggagagcctctgcggagccctggcgatgctgcagccaatatctgctttccctgtctacacagcccaacaaaccgattatgaccttctccctgatcttctgcgacaccgacccagtctgggtgtcacagactccggcggtgccagcgaaggtgcccggccctacccctgcggcgctcgccccccaccaccgcgccgcagccccctctgcggaatccgccgggatccaggctgccactcacctcgcgcgagggagacgcaactcggctgcactgtcctcggcgccgctgcggggctgctgggctgcggggctgcggggctgaggagctgcggtccgcggcgtcaggggtgggcgagggtgagcagcgcacgaaccatccagagcccagaaagtctccgtgccgaccgcggcgcgtctcggggaagtcagcgcaggctgcgcgaggctggcatgttccgggcgcgctgtcgggcggcggcggccgcgggagacggcgctggcagctgggctgcaggcggagtgcgctcgggctccggagccgcgcgctgcggcgccgccgcgcaccccgccctcggccgcggggcccggcgcgagcgaaaacgcggagcgcggacgccgccgcgggatcgaggccgctgggcgcgcgcccacgcgtaccccggctcggccctgaaagcgaggtcgggcccggctcgggccgcgcccgggggcagggctgcgagcaggcctgggaccggctccacgcgcagccagtggggc

SEQ ID NO: 49452 - DNA, 30 bp, Homo sapiens
  chr12:42984078-42984108
  hyper
gattccttccggcgcgccttgccgagctgg

SEQ ID NO: 49453 - DNA, 128 bp, Homo sapiens
  chr12:43944752-43944880
  hyper
gtgagttgacctggccgcggtagaagcagtggcgcaggtccgagggccctgcgtcgctctcccaggccccgcgctccggggttcccaagtgcacctcggtgtagccggcggccagaaaggatgcatcg

SEQ ID NO: 49454 - DNA, 53 bp, Homo sapiens
  chr12:43945109-43945162
  hyper
cgttcctcattgtccaactctaaacttcttccaccaaacgtccccgctaaagg

SEQ ID NO: 49455 - DNA, 30 bp, Homo sapiens
  chr12:43945496-43945526
  hyper
ctggtccgggagtcccgggagctccagcag

SEQ ID NO: 49456 - DNA, 97 bp, Homo sapiens
  chr12:43946202-43946299
  hyper
cgacttgctgagtagccccaaggcccggctgggcaccaattccggacctatgaaaccgagcgagatgcaagcacccgcgtacgtgaaaggtgcctag

SEQ ID NO: 49457 - DNA, 30 bp, Homo sapiens
  chr12:44200509-44200539
  hyper
cctataatcgataccgtttagtgtagaaaa

SEQ ID NO: 49458 - DNA, 470 bp, Homo sapiens
  chr12:45268916-45269386
  hyper
gcaatacaaagttaggacaagcggcaagagcaactcctgccggggttatcggaactgaaatcacagtggggatgcagcacgccgggcataccttgaaagagaaaggctttcgtcccattatgcagccccgggacctgacgcactccggtcgtggactccccaagttctaactctgttaagacgtcaatctgtagggaagggtccacaccaagcccccaaactggtgaggggtatgaggtgggagagagaaaaaggaaaagctccatcaaaatgcaagtctcttcctccagggcagcaaagaaccgcgttttcgcgacaatattgggaactgaagatgagaggcgactgcctcctcctccgccgagagccttacctgagatcagcagccaagctttaaatagcggagcacccagtcccgtttccatgacctcctttaaacccttctctctgcaaagttccccctcagccct

SEQ ID NO: 49459 - DNA, 1495 bp, Homo sapiens
  chr12:45269416-45270911
  hyper
cgcggtctccaaggcaagcacagaaaaaaaaaaaatccatatccaaacccgcccccttactccaagcttcccactccagacctactttgggtccgggaaaagcgaggcttccccagccagcccatgctgccccgaggcgggagccatccctttccccagccccagctctgcggccactcacctgctccgagaccgaagatcaaacagaatgttctcagtaagacccgagactccatggtgcggatcagctcagtccatcgtctccctctttaaaaataaaaataaaaatcgaagaggttcttggaatcaagcgggaaaataacgtttgtctctcctgctgctgcctcggatttactgatcagtaggattaatacgctttggttgcctaagaaagaaaagggaggcctccccaggcgcgtgaagaacttagaccctccaatgcgcacatcattcccacacgcagggccgaggcggcagcgcggcccggagggggcccggagggaggggtcggactcgccccggcgcggctccgtcggggaattagctcccgagccgaataaaagcagccaaagactcgcacacccggtagaaggggggcggccccaagaaagcccgggctggggcggccccgcacccccccgtcttccccgccgcccgaacctgttgtaaaggcagagacaatggagaaagctccgggagacgcgcggagagactgctcctccggggagggaggggcgggccgggggaggcggggtaaggaggagggaggggccgccgagggcgaggccggcgctcagcgtcggtctcccgcacggtctcctggatgccaaacccggtctagggagcccaggagccgttgcagcctcagctcttctccctccctctctcgatgacccgggcaatgccaacctcctttcgggattgaaagctctaaatccaaggtgctaagttgatgggcggtctttgctctcacccctcgatttcgggcgcgtgtcttgaaagacaggagagaaaaaagaccacccagctgcaggaggcaaggctggagcgagtagcgctcgcctgccctttaagcaaaggagggaagcccatgtgcactcgtgcactgggctccggagcagccccggggtgcagggcactccccctccagggcgtgcggaggaaggccaccaaaacacgctgcactgccgaggtggagctgggcaaagtaggtagagactggtggggacggatggcgagcctgggaagccccgggtgtcctggtggagaggttccctgccgggggcggggcgctggagagcttccccggcgcggagagcttcccgggcgcggagagcgcagagaacttggccaggaggtgctggacagctccggaacccgcgcgccccctgccaaataaagcgtggagacccggactcgggctctctgggaccagcatacagcagaaggcaaggggaactgagccagggcgtctgttcacgccgaaatatctacc

SEQ ID NO: 49460 - DNA, 569 bp, Homo sapiens; identical to SEQ ID NO: 8692
  chr12:45444112-45444681
  hyper

SEQ ID NO: 49461 - DNA, 692 bp, Homo sapiens; identical to SEQ ID NO: 8693
  chr12:45444714-45445406
  hyper

SEQ ID NO: 49462 - DNA, 30 bp, Homo sapiens; identical to SEQ ID NO: 8694
  chr12:46124283-46124313
  hyper

SEQ ID NO: 49463 - DNA, 30 bp, Homo sapiens
  chr12:46383586-46383616
  hyper
tcgagaggtcacggcgtagtaaagtttggt

SEQ ID NO: 49464 - DNA, 30 bp, Homo sapiens
  chr12:46384554-46384584
  hyper
ctgctgtttgagaccgagaagcgtggtggg

SEQ ID NO: 49465 - DNA, 30 bp, Homo sapiens; identical to SEQ ID NO: 8695
  chr12:46385510-46385540
  hyper

SEQ ID NO: 49466 - DNA, 30 bp, Homo sapiens
  chr12:46386000-46386030
  hyper
gaacacatgaatggcggtcttgtcgctgtc

SEQ ID NO: 49467 - DNA, 30 bp, Homo sapiens
  chr12:46661290-46661320
  hyper
gcacaaacctcaggcgggcgatttggcagg

SEQ ID NO: 49468 - DNA, 76 bp, Homo sapiens
  chr12:46663346-46663422
  hyper
gcctgcagatggcccgggttggcgggaaggggaccgaagtggcaggggcggcggggagctcgggcacctttaaaaa

SEQ ID NO: 49469 - DNA, 30 bp, Homo sapiens
  chr12:46765120-46765150
  hyper
ccttttgtccttggcggtgggtgcagcggc

SEQ ID NO: 49470 - DNA, 473 bp, Homo sapiens
  chr12:46766924-46767397
  hyper
agcagtccttgctttcgggggacacatcaaggcttttgggggacaccaccctcccaccaaacactttcttgattgttatttttgtgatttacagtgaagttttgtctcacaaacttgggccaaggcagcaaggttgtcctgatggtttgttgttctttcttttccacctagacctgctttcactcttcaaaactagccggaggtcggcgagcagctccttttcgggatgtgctttttgtacggccatggaaactggactagcggaaaggctaccttttggccagcaagccaggccccttagaaagaggccccagtggggagcccggcgctcctaaggccgtttgggagtccccagttttccactcgctgacacgttgcttctcttatcccaccaccgccgccccgggcaaaggcactgccttgtctgaatgcgggtctgaggcgctttctgcggagcctggtcctttcccttc

SEQ ID NO: 49471 - DNA, 30 bp, Homo sapiens
  chr12:46776820-46776850
  hyper
ggtctcactcaatgcggaacggaggtggcg

SEQ ID NO: 49472 - DNA, 57 bp, Homo sapiens
  chr12:47224916-47224973
  hyper
gttttcccccacaaccggcacctgccctggcccagagcgcagcgtccacctgtacca

SEQ ID NO: 49473 - DNA, 275 bp, Homo sapiens; identical to SEQ ID NO: 8699
  chr12:47225027-47225302
  hyper

SEQ ID NO: 49474 - DNA, 157 bp, Homo sapiens; identical to SEQ ID NO: 8700
  chr12:47225319-47225476
  hyper

SEQ ID NO: 49475 - DNA, 80 bp, Homo sapiens
  chr12:47225550-47225630
  hyper
cgggtccagggactcgggtaacaccttgccagcaggatcccgggcggtcgcggagccagctcccgcgggggaagtcgggc

SEQ ID NO: 49476 - DNA, 212 bp, Homo sapiens
  chr12:47473960-47474172
  hyper
agtcaagatgcccaacccactcgcctaccaattacgtcccttcgtccagctccaagccgggcggtaatggggtccaggaaggctaaaggggacacgcccagccaccgagggaggggtctcacccttggagacccacttcgcggcggccgcacaggtcacgtctctctccccacccaggccaaggaatccccggacctcttagagctttgctt

SEQ ID NO: 49477 - DNA, 31 bp, Homo sapiens
  chr12:47500470-47500501
  hyper
tgttttccctcctccccgcttctctatcttt

SEQ ID NO: 49478 - DNA, 30 bp, Homo sapiens; identical to SEQ ID NO: 8702
  chr12:48099379-48099409
  hyper

SEQ ID NO: 49479 - DNA, 60 bp, Homo sapiens
  chr12:48099730-48099790
  hyper
tcacctgaccaggccgtaacccgccgcactgccaccccgtcagccccgcagcgactcacg

SEQ ID NO: 49480 - DNA, 75 bp, Homo sapiens
  chr12:48099829-48099904
  hyper
cgcttccccacaagcccccgcggcctcgccccgccccctttagcctgggcttgagcgcgcgcagaagtcagcttc

SEQ ID NO: 49481 - DNA, 30 bp, Homo sapiens
  chr12:48153373-48153403
  hyper
gttgaggcggagaccgggcattccagcgcc

SEQ ID NO: 49482 - DNA, 92 bp, Homo sapiens
  chr12:48206705-48206797
  hyper
gtcacacctccttcagcgctggaatctggggggcgaggcctgcgctcagcccctcgcccggtgggggtggggtgctgcgccagcacctcctc

SEQ ID NO: 49483 - DNA, 127 bp, Homo sapiens
  chr12:48299274-48299401
  hyper
tcccgggctccgctcgccaacctgttactgctgcagaacgccaggaagctcagcctgatcccacagattagggtaaaatatcccggggggccgaagtggaaaccggagttgcgtcattgctcccacc

SEQ ID NO: 49484 - DNA, 31 bp, Homo sapiens
  chr12:48395456-48395487
  hyper
agtgactctgtggctgcggctctggacacgg

SEQ ID NO: 49485 - DNA, 393 bp, Homo sapiens
  chr12:48396847-48397240
  hyper
ggaatcccagccgtcggaaacgtgcccaaacacgtggaaaaaaaaatcctctctacctaatacactttccaggcttcgtttgtcctgaatataatcccagacagtggaccttaccaaaggaggggtagaaaggtgcagtccgaacagcatttggacccgactacaagagccatctctaactataccggttgaaatagttgtagcaaccgtagcaatcgaccagcctgctccccttccctgacacacacatacacacacacacacgcacacacacacacaccacgcagcctggctcggtgagttccagaatttagaaaagtaactcattgtagtacctcggggcggcggggaatggggtaagaccgcggggaagggggcgctattttcgggggc

SEQ ID NO: 49486 - DNA, 1199 bp, Homo sapiens
  chr12:48397546-48398745
  hyper
gctgtgaagtcaaccctttggcgtttgcttgctccctcgctcgcgctctctctttcctacttcacctaagttcgatgagttgagatctgtttttgctgaactcgaagtgcttcgaagaggcgagctgtgtgcatgtgcgcctaattatcaaagctggtggaaaagagcccatttatatctgtgcgcaaacttctccgagccaacactttgcaagttcagtattctagcgcaacgtagggacctgcaaatacttgcaactgcgatgggcaccgaggaccctgggacagagtccttgattggcagaactcttcttggtgaacttctgcgtgtcctgtgcctaagtcggcgcgctacgaccccgggagccgttttagcccggagccgcgggctccagagctggagcgggccggggagaaggatgctgagggacgcatggaaagcaggcaggcaggcaggggcgggggaagacttacggacatcctggccctgacaccgaaggacagcggcgacgagcagcgtcagcagcaccagcgtctggggagccccgaggcgaatcatggctcaccgcggggcctggctgagccgggcccgggcggagcgcagcgaaacggcaggagcacggcgcgggtccgggtctctaccgcgccctcatgcaggaggcccttggagcaggagggggaagcgggagacccggcagcccagcagcgctctgcgtcttctccccgccgcggcgcccgttatatgcgcccggcccctttcgaggctggcgaactcgcccaaaccgcgggccgccccctgccccccgctgggctgtaacctgaaccgcccgcccccggagcccgcctgggccctgccagtgcccgcacctgcccaagccggacccccctctctgggagtcacgcttcccgccctccacccctagtgcgccgagtggcctgatcgggcggggcgcagagatggcccctgccccccaaacccggggctgcggcgctgcccccctctgaccacaggcgggaagggtggcctccggcccctcccctcggagttctgccggagttggaggggagggggtgtttgcagaggcgcaggccgagagccctagaccaaggacggaaaagacatgggagggaggagggaaagcggtagaaaggagcagcggagggcgagggggcaccgcgtcaggcgtttgggagtgggga

SEQ ID NO: 49487 - DNA, 30 bp, Homo sapiens
  chr12:48513152-48513182
  hyper
caagaaagcagcggcggaggagagctaaga

SEQ ID NO: 49488 - DNA, 268 bp, Homo sapiens
  chr12:48551341-48551609
  hyper
ccaactaagatgggcgcctgcgcactgatgagtgttcgtcagcggggcgcgcctgcgcagacttgtgcagcagctttcgccctccagaggcctagttagggggttactttctccttttactcagaggctttgcgcgcaggctcagtgcagcgttctcggccacagccgcagggttcgggtcttggtcctgcagcggggataaaaaagctcaggaaccctgagtgttgggccgattctatatggttgcacctgcgtggaccaggccagc

SEQ ID NO: 49489 - DNA, 1397 bp, Homo sapiens
  chr12:48576841-48578238
  hyper
tccttcccccgctccggtgatttctatagctagagggctgatttactgcagaaacctccgtagcgccctcctcctgcctctgcaccgtcaggcccggtgggtccggctccagagcgccaccgtgccccagctcaactctgggatcattagcaacagcctctctaccctctccgctttcctgcgcatcgctggaggacagggaggcaggactcgactttagcgccatcctctgagaaaggaatgcgggctggaaaaatctttccagggcagtctcgctgggtctcataccccggctaggggagggacgatctctcccggacttggaggtttctgcagcagacggctctctcatacttccctattaaacattgcgaccacacgctctttccagccttggccgaagccactgtagcgtcccctctcctccccccaccccgctagtccagactccagagccccactgcagcttccagccatcctccctttttcttcgccacttcctggttaccatggagacacacgtcatttacgtgccgtgcgtcgccttggaaacagaggagcatccgcgacacccccgggagacccaccccagctgctgctgccacactcgcgggcgctgcccggtaatggcctgggggagtcccgagtccgacgcgccgctggcctcagcctggacgcggacccctccgcgagcgcgtctgtgacccacggaaccggcaggcgctctctgcttgtggcgcccagagggcggcgctgacacgggcgcgatccgggaggcgaggcagggcagggcactttcgtcccggggcgatcccaagagacgccggctctgggaccctcgccgggtcctcgtcccgcagcctcttctcggcctcccgcgatcctgcctgcgccctctgcccaggactcgtctctcacgtcggctccccgccagtctcgggagcctccgcttccctcggctcccgctagcccctcccgggacctctccccctccaccccctcccccaccccggaggccgggctggacgcgacccagagcctccgccacccgcttctgccactcaatggaggacggtctgctggagatcatgaccaaggacggcggcgacatgccggcgcccctggaggtgtccaccgtgccggcagtgggggacgtgatctccggggagtacaacggcggcatgaaggaactgatggagcacctgaaagcccagctgcaagccctgtttgaggacgtgagggccatgaggggggccctggacgagcaggcctcgcacatccaggtgctctcggacgacgtgtgcgccaaccagcgagccatcgtctccatgtgccagattatgaccactgcgccccgccagggcggcttgggcgtggtcggcggcaaggggagcttc

SEQ ID NO: 49490 - DNA, 724 bp, Homo sapiens
  chr12:48591658-48592382
  hyper
tcaacggagggaagcggattcaacaattatacaattcgctgagtcggggctttcactgcgaaagaacttggcttcggatccgtgatcaaggctgggagctatggaggtggatgtgattggcaaagacctctgctcaggtctgcgtcaaaccttgcttcgctcccatcccattctgcgccaatagggcgcagtatcccaaccattccactcggctaggaggggatcctaagcctcaaggtccgcatctcccgctggagggactgagcagccgcactggtgtcccagaatagatcgtgttccccagaggttgtcaggttcccgcaattcggcgcgggcgaggcggccaaagagagggcgctcattggctgccacagccccggtccgagaggccgaagaaggctgattcgtcacaggccgtcagcgcgggccacgcctatttcctctccaggttctaattaggtcaggggccctacagcctcttgggtagtttgcaagtgcgtcgcggagccggcctcggaaatatggcgacagcttcagctttcagtgtgagggagccgagggcccagccaaaccctgcgggaggcaattcctgggtacccttcccatattttcggtctttgggctgcgccgtggtaacctcagagcctggttgcgtgctcaccagcgacaagtgtctttcattgggacatgaaaggggactgggaagtgccgtgcagtttcaggg

SEQ ID NO: 49491 - DNA, 196 bp, Homo sapiens
  chr12:48690562-48690758
  hyper
agcacacggctggtgcgctcggtgcaggctatcggagcccgggacagggccgatccagccaggcttcagggtgcgggaaacgggtgcgccatgagatagaagctttctgcttccacccactccaggcgcccagtctttctccagcacctcttaagctagccccaggactctgcaaggtacccgaggacaggagtca

SEQ ID NO: 49492 - DNA, 30 bp, Homo sapiens; identical to SEQ ID NO: 8710
  chr12:48744932-48744962
  hyper

SEQ ID NO: 49493 - DNA, 336 bp, Homo sapiens; identical to SEQ ID NO: 8711
  chr12:49182446-49182782
  hyper

SEQ ID NO: 49494 - DNA, 327 bp, Homo sapiens
  chr12:49183003-49183330
  hyper
cagcggggtaggggcggaggaggccaaataatgggacccctccctccgcgcgccccctcctctcctccggccgcttcctcccccagtcctgggaagacaagcagctactgttctgggatcaagaccccgcggggaggggacctcgcagcccggtccccttcccttcaccccggccgcctcctccggcattcctctcccgccctcaccccgggggtccccgagcgcgcccgcaaacccacccctcacggctacatcccccgccccgcccaccgagggtcgccttccttcctgtcagggtcccaggggttgggccggcgccccgcgccc

SEQ ID NO: 49495 - DNA, 30 bp, Homo sapiens; identical to SEQ ID NO: 8713
  chr12:49259400-49259430
  hyper

SEQ ID NO: 49496 - DNA, 59 bp, Homo sapiens
  chr12:49297957-49298016
  hyper
ggggatctctcctgttcgagggctgagatctccggtcccacaaccgcccacaaccaggg

SEQ ID NO: 49497 - DNA, 482 bp, Homo sapiens
  chr12:49351241-49351723
  hyper
ggaagccgcgacggcgactggagctgtgcggcgtacccccacccccagcccgggatacttcccacctccccgatcgcgcgatagctgcgcggtagctagcggcagttctcgcgagacccatcaccatggcagcggctgcagcaccggcggccgggcgctggagctggagtcagggcgggggcaggtgtgggggctgtgggcggcggaggcgggagccgtgaatggggatgagacagtgaggactgaggtgacaatcccaagctccagggttgtgcctggaatttaaggactgaggcggcaagttggctgcgtaggagacgggctgggctgcggggcccaggggctccttgggcaaagccagcatcgggatatgggtgaacagtcgttgctgtggcatgccttacccagccagacttcatctttatttcttaatctgggctagctgccatcccctgaaagccctcaccgcaccattgttgttg

SEQ ID NO: 49498 - DNA, 473 bp, Homo sapiens
  chr12:49363693-49364166
  hyper
gcgcaggggcccagacgagtggccagacctggctcagagcggctccggggggggcggggaattccaggagaggcccctcccggagccgcgaaaccatcccttcccgcctccgcgcgcctcgccctgccgcccaccccctagcctccgcggcagcgccgacccgcccagccaggctcaccgcgcttgaggatggcgctgtggtgcggcaggcggccgccgccctcaagcgcggagcagttccagcgctggtcgcgcagctggtgctgacactcgtggaccgcgatgtgcagaccctgaagcgcggacgccgtcacgtcggggttgcgcaggcacaggcctagctgccgcttgctcaggccggacagcgtcaagcacacggtgttggccgtcagcggcggctcgccaggcaacttcaggcccagaatctcattgcttagagccctgggaaccaagaaggcgtctggggtctgcgg

SEQ ID NO: 49499 - DNA, 30 bp, Homo sapiens; identical to SEQ ID NO: 8717
  chr12:49366523-49366553
  hyper

SEQ ID NO: 49500 - DNA, 201 bp, Homo sapiens
  chr12:49371613-49371814
  hyper
aggtttctctccaccgctaggctccttttggttagctcacccccacaactcatccccgggatttccctgaccacagccgcactcacgcccccgtctcccctttttccttctctgtccagccatcgggggttcctgggcggttaagcatctccccggagtcgctgcccagaaccacagctttccttccgacactcaggatgg

SEQ ID NO: 49501 - DNA, 965 bp, Homo sapiens
  chr12:49374061-49375026
  hyper
agaccagctttccagcactgccggccctggctctcaggactcaaagtgcggagtcgggggtgggattccggtcccaagcccttcatgagggtgctggccgcgccccgcgtaccccctcgctgatccccgctcccttctcccacaggctgtcgagaaacggcgtttatcttcgctatcacctccgccggggtcacccattcggtggcgcgctcctgctcagaaggttccatcgaatcctgcacgtgtgactaccggcggcgcggccccgggggccccgactggcactgggggggctgcagcgacaacattgacttcggccgcctcttcggccgggagttcgtggactccggggagaaggggcgggacctgcgcttcctcatgaaccttcacaacaacgaggcaggccgtacggtgagctttgagaggctccgcaccctaagcggagcggcaggggccaacctcgggctggggaagtgacggtcggtgagataaggcaaggggcaccaggagagggcgtcctgggagagccggaggcttggaacgaagacggagaatagaggagacagtggctgagggcaaaggtatgtctggcccgcggacaggtagaagaggttgcaaatcaagcacagtctcttcgctgtacagattcgaaaaataagcctgagaggccgagactgactcgccgcggcggagcagggttgggcagggtttccaaatctcagcggaacatttcgcgcctcccttcccctgggctcagctaggcctgggcctttgctgaggtccggcccccgtggcgtccgggagagggcagtgtctgggagggtgactctggcccggtgccctgggacactctttcttcccctatccccgcagaccgtattctccgagatgcgccaggagtgcaagtgccacgggatgtccggctcatgcacggtgcgcacgtgctggatgcggctgcccacgct

SEQ ID NO: 49502 - DNA, 455 bp, Homo sapiens; identical to SEQ ID NO: 8720
  chr12:49375115-49375570
  hyper

SEQ ID NO: 49503 - DNA, 281 bp, Homo sapiens
  chr12:49390823-49391104
  hyper
cgcagggccccggcgtagggccctggggtccgcgcccagccccggccggcgcgccgctggaccaccgccacttccgacccctcggctctgccctgggctcccgaagctgctgggcctaaggcttggtgctctgggctacctggctgcgtgggggcgtcccgcaggtttacttcgggggccgggagccccaagatgcggaaagtgcgctcctccagtgtggagtcccccggcctcccgccctcagcttcgcccccgcggcccccgccgggctggtgtaaaag

SEQ ID NO: 49504 - DNA, 1440 bp, Homo sapiens; identical to SEQ ID NO: 8722
  chr12:49391146-49392586
  hyper

SEQ ID NO: 49505 - DNA, 30 bp, Homo sapiens; identical to SEQ ID NO: 8723
  chr12:49392792-49392822
  hyper

SEQ ID NO: 49506 - DNA, 90 bp, Homo sapiens
  chr12:49393333-49393423
  hyper
aagcctgatgggatcgcacgagtgggcgggggagggacttatgattcttgccaagctgacagtgccccctcccccgcccctatttcttca

SEQ ID NO: 49507 - DNA, 30 bp, Homo sapiens; identical to SEQ ID NO: 8725
  chr12:49412407-49412437
  hyper

SEQ ID NO: 49508 - DNA, 30 bp, Homo sapiens
  chr12:49454746-49454776
  hyper
taccgcccaggccgcgaaactaggactctg

SEQ ID NO: 49509 - DNA, 30 bp, Homo sapiens
  chr12:49463973-49464003
  hyper
cctaaaggcgtttgcgcatttacagcctag

SEQ ID NO: 49510 - DNA, 476 bp, Homo sapiens
  chr12:49483799-49484275
  hyper
cgtagcaagaggccaggacatcgttcaccagcagcgtcccgtgcgcggtgagcggcgcgaacacgcccacggcttcctcccgcgccacacgggccacgcgcgctggccgaagcgcatccccgccgggcgccagcaccgagtccccagcgcgtagccggcgcgcgaacaccggtgcaaagtcgcctggcgcgggcgccggccctcgagcggcaaacaccaggtgccagggcgtgagcaacagtttgcgtggaggccactcggtctccacagccacaaatgaagcccggcgctgcaagtcccggtccaggaagagcagcaccggcgtgggcaccacccggcctgacgcatcggccgccaaaacccagtctccgcggtgcagttcccgcagccctttccgctcgccgctccacaggcgcacagttgcatttcccggaaagcagccgcccgcccggaccgccagtgagttatctgcaggg

SEQ ID NO: 49511 - DNA, 228 bp, Homo sapiens
  chr12:49485763-49485991
  hyper
tggcgggggttgcgcgaagtacaatggccattatccgggatgacttaaccgagcgagaatcctgagcccaggccgggaacgcgctgggagaagcggactcagcagctccggccacaaaggcgcttttcagccgccccggctcagggagaggaaagggcagaaagccgcgcccccaatccctgctccgtccgggtaggtcccctccccccgcgcgtccagtcttcccag

SEQ ID NO: 49512 - DNA, 30 bp, Homo sapiens
  chr12:49504036-49504066
  hyper
gtgtgggggaggaacggaaacgacggcctt

SEQ ID NO: 49513 - DNA, 30 bp, Homo sapiens
  chr12:49504293-49504323
  hyper
tagctgttctcgcacggatagcacttcgta

SEQ ID NO: 49514 - DNA, 30 bp, Homo sapiens
  chr12:49504676-49504706
  hyper
acacaagggatgggcgggttccttccaggg

SEQ ID NO: 49515 - DNA, 30 bp, Homo sapiens; identical to SEQ ID NO: 8726
  chr12:49524763-49524793
  hyper

SEQ ID NO: 49516 - DNA, 30 bp, Homo sapiens
  chr12:49525527-49525557
  hyper
gaaagacgaagcaccgtgaaatgcagaaag

SEQ ID NO: 49517 - DNA, 366 bp, Homo sapiens
  chr12:49582692-49583058
  hyper
tttccaagtagagcctgggggcgctgactccacccaacggccacaaagagccgaagccgattctcaccatggttgctgcttcgcgactgccgagctgatggcggagacgaagaggagaggttgttgcttcttacagcgcgactcttaggcggtcgatgtaagagaacctgcggcacataggcggatgcggctccctatatacaactcggtcaccatggggatgggccggggccttttcctgttggtccagacccccaatctgcccagagaagccatgacaggagactggtgattggtgcaagcgacgtgggatgaggtaatctctcccccacccctttttctctagcatccgtagactgtttgcat

SEQ ID NO: 49518 - DNA, 560 bp, Homo sapiens
  chr12:49658688-49659248
  hyper
tgaacttttgaatccgccaatcagcgccgcgcgcccccactccgcgggtgcggccgggcgcaggccagggctcgaaggtggggccgcagcggcacggggcggggtctggggcccgccctcccgacacgtggccggggaccgggtatataaggcccttcggggccggccaccctttcactacttctcccccggactccttggtagtctgttagtgggagatccttgttgccgtcccttcgcctccttcaccgccgcagaccccttcaagttctagtcatggtgagtggggttccctcggggctggggaagagtgcgcgtcccaggggacggcgggcccggaaactactgcctgcacctcgggccgcgcccaggacagctccagactaccccgggcccctccggttaacctggcttgtggcggccgggctggaaggtcgagttcacttggcagacaccagttcgggccggaaaacctggcccgggtgcggccatcagtggaaatggaaagccctcttgatcctagtgagggctttccccgcagggcccgctactgccctagg

SEQ ID NO: 49519 - DNA, 874 bp, Homo sapiens
  chr12:49690462-49691336
  hyper
ccttgcgccacctggcggcgggcagcggggctgtacctccgaaacctggcctctggtctcgcgcccgcgggggcgcagggctgtacgccctgccctccctggcgcccacttctgttcgttcaagcgtttcttctcttttctgtgcacgaactgcgtggcccgcgtggaatttgcgccgctgtccatcctctgcctgctcccggccgtaggagctgcgagacctgcaggtgagtgtggagagccagcaggtgcagcaggtggaggtggaagccacggtgaagcccgagctgacggcagcgctgagggacatccgcgcgcagtacgagagcatcgccgcgaagaacctgcaggaggcggaggagtggtacaagtccaaggtgcaagagccgggagggcctgcgaggcgggacgctggggtggtgtcgcgcgtcccagccgactaaagcctgggttacccccacttctcagtacgcggacctgtccgacgctgccaaccggaaccacgaggccctgcgccaggccaagcaggagatgaacgagtcccgacgccagatccagagtctaacgtgcgaggtggacgggctgcgcggcacggtgagtacgaagctgcgcgctcgggcccggggagcggacgatgaaatgttctgcaactggccccttccactctcctaccccagaacgaggcgctgctcaggcagttgagagagctggaggagcagttcgccctggaggcggggggctaccaggcgggcgctgcgcggctcgaggaggagctgcgacagctaaaagaggagatggcgcggcacctgagggagtaccaggagctcctcaacgtcaagatggccctggacatcgagatcgccacctaccgcaa

SEQ ID NO: 49520 - DNA, 30 bp, Homo sapiens
  chr12:49716996-49717026
  hyper
ggcctccgcgggagcgcgaccgggccaatc

SEQ ID NO: 49521 - DNA, 426 bp, Homo sapiens
  chr12:49729860-49730286
  hyper
tggtcaccacgtcgtcgaagcgcagcacctcgtaaccctcgtggggccgccgcaggcccgcgtagaaagcaatgcgaggcacgtagccggcagcgggcgccaccccgcccggacctggaccgggagggcccggggggcctggcctgccgggttctcctgggggccctcttggacctggtggtccagggggcccccgcaggcctgctttcccgcgccggcccacctctcccttggcgcctggcgggaaggggggcacggaagcaggcgcgccgtcgggaccagggccacggggcccatgcgggtcgcacaccatgcggcagcgacccagcatctcgtagtgcgctggcccgcgggagctgtgcaccagcagcgggatggccaccagcagcagcagcaccatggccactccgacggccgcgcccgcca

SEQ ID NO: 49522 - DNA, 30 bp, Homo sapiens
  chr12:49731174-49731204
  hyper
ttttaccctttacccggagtttggcattct

SEQ ID NO: 49523 - DNA, 800 bp, Homo sapiens
  chr12:49735822-49736622
  hyper
cggagccagagaccgctgcccggtgcttcctcccatcttcttccatcccttccctcttgctccccctccctcctgcactccctccccggcggccgcggcctttattagggattccgcggctgtcggtcccgccatccatcctgtccgccggcaattaggcggccagacaaagagcagcttcggatggatgagggtcccagcggatcggaaatgtgaagggtcagcgctgccgcccgcggcgcaccccgctcccccttccgcataatcaccggccgcccgtcactcagccggccgcccagggagctcctgggcccggcccgggagagggcggggtgcggctgcagcctaggcgcccaggacagggcgagggcggacctgcggcaggagcgcctcctgcggggcagtggaggactgtggcctgaggcattggccgaagggtgggggattatggccccgggcactccccgaagggaaactggggctagcggcttggggcctcccagtggggaagagggaacaaaagctgcggagaccggaggcccggggtccagggcgccccctgctgggaagctgggaaccaagccttagaggtccggcaggtacagatggaaccaggcccagggcgacccctcctagggaaaccaagggtttctagcctggcgcgcctcctgccggctttgaatgacactgcgcttctatgcccgctccgttcagtgaaatccaaccaatccgcatccgctcaaaaaaggctccaagtcctggcgaacccgaggggagccgagagggagttcaaggagtcc

SEQ ID NO: 49524 - DNA, 1005 bp, Homo sapiens
  chr12:49738835-49739840
  hyper
gagccttagagggatcgatgcggcccgggggccccgcccggggtcgatattcctgattgggaagcggccgcttcgcggagcccgcgtgtaaatcacctgggctgggggagggggcgtggggagcctaccacgtcccaggctcgcgaagccaggaggggtcgggacccgggcggtaccggagggcgacggaatgagaacgacaggccttagagaaccagagagaagcccgcccagggcctccccctcccccgctcagccctgccaactcccccagcaggctccagtctcgcttcagcggccgccacccttcgttgcccctggagccgccggggaggccagtgtcggagccagccatgcggcggctcctctctggccgctcccgcggggccggggcttcggcggctgctgtcacggagccgacaggccgggccggccgggaaggggcgggtggcgggggggagaggcggcggggtgaggctggctcagcgctggcactcagtgggcgcgcaacgtatgtttgccgaattgaaaggctgggacaccgagcggcgcagggcagagggtcggagggcacaggcggggtaggagatggcccagaccgggtgagggcagaagcctcactcacgggggaagaaggcactcgaggtcgctctgaggaccgctgggctgggatagaccacccatcccccgccggggagacccgggtagtaaagaacaagacagaatgggacaggcaggacggtttggaccccacctacaagcgcctccaccaccccagcctccgatccttgtcacgctctgctggggaaaccgaggcagccgatgctgagaatagccaaaaagttaaaagcggggtcagcgacgaagctggggcagcaaccagaattcctgcgtgggttttttggattcctccgcccacgcggggccagtttgcgggtaaatgcaccaccgcgccccgcaccacagctcagaccctttcctctcgctgcagtttgtcagatcccc

SEQ ID NO: 49525 - DNA, 504 bp, Homo sapiens
  chr12:49740156-49740660
  hyper
cccgtcgcccctcccccggtgcgctttttcctcgctcacttctcccctctcctctgccctccactcgtttcttcagcttttcctcgcgcttacattgcccttgggcccctggctctccccgcacaatccgcttctctccctccccactcctcccttcctgagatcgaaccctgagccccttcccgacccccactctctgggccgccagcgcagccccgcatttctgggttcctcgggaagtaaacctgggggcgcgctgcggccccgggtgccccggcggccagccccttccctctcccttgtatggctgccgcccccgccccaccacctgagccgggagatagtttgtttgtccagcggcggccgccgccgcccacgctgtttgcaaagcttagcgcgccgtcgcgcagtgcgggcccaattaagtctcattcattattcagcgctcctgtccgcccccgccccccagcagtctgaggcgtcgctttggggcccctcccagcc

SEQ ID NO: 49526 - DNA, 198 bp, Homo sapiens
  chr12:49740981-49741179
  hyper
aaggcagactaccacgagcctcgggctgcggcctcgccctcctggtcgagcctcctgccctccaaccctctgctcccgtttctccctctggttcatagcccgcgggacagagcagccctggattgggaggctcctcaggtctcaggctcaggtgcagaagcagagcccctaactggaaggctcggaggtgggccggtg

SEQ ID NO: 49527 - DNA, 30 bp, Homo sapiens
  chr12:49741512-49741542
  hyper
aggtgtctggggaccgcccggaccccccct

SEQ ID NO: 49528 - DNA, 302 bp, Homo sapiens; identical to SEQ ID NO: 8732
  chr12:49761540-49761842
  hyper

SEQ ID NO: 49529 - DNA, 461 bp, Homo sapiens
  chr12:49931602-49932063
  hyper
tgatgctggtgactgtgagtgcgtctcgagggatgggggtgctgagcctaccgcttcgctcgttagggaacaaattgctgttttggccccggcggctcctctgggcgcgggcggcagccgcgctcgctggcaaatcgtgggagggaggaggagcggcgctggcaggcaagtccgggggaccgtcgcagcgcgggaggccaagaaaagacggccgccccgggcccggctccgccccgccgggaaggggctccctgcagccgccccagggcagcaccccgcgcggcgccgcgcggagctctccaggacgagctgcgtgaggcgcggggctcggccttcctcgctctcctggtgccaggacccgcacgcacaaggttcggaagttttttcgcagtgtctgacccctgccggtcccctgtatttaccacctgaccctctagcgcgcttaggagaggcaagaggtg

SEQ ID NO: 49530 - DNA, 94 bp, Homo sapiens
  chr12:49933164-49933258
  hyper
cggagggatggggcgggcagccgcgggcgcctaagatgccggccatgcggggcctcctggcgccgcagaacaccttcctggacaccatcgctac

SEQ ID NO: 49531 - DNA, 215 bp, Homo sapiens
  chr12:49933289-49933504
  hyper
cgcccacttgcacccgggccgccggaccctcgccagggctcccgccttccccgaacccccagcagcccagcttggcgccagcctattctcaccctctcctccctacccgcccctcttgaggctggggccatcgtctcctgctaggcgctgtttccccgaaggttcgaaggttcggggtcaacactgcttcaggcgaggcaacagggccagaagtc

SEQ ID NO: 49532 - DNA, 31 bp, Homo sapiens; identical to SEQ ID NO: 8733
  chr12:49961129-49961160
  hyper

SEQ ID NO: 49533 - DNA, 336 bp, Homo sapiens
  chr12:49961429-49961765
  hyper
cggaccctccgcccctcgttctcccaagagtgcacacccaaggtaggggatcggtccaggtctgtctcaagaactcggggtaggagcattgatgaagtcacctctgcaactcaaagcagagcaccaagtagccttggtttgagacccacaggctggtggctggggaggtgggggtaaactcgcaagcccattctcaccccacggtctccatgcctttgcgcatgcgtaacacttcgagccagattctaacccggtccggcccacgcatgcgcagcttttcggggcgccactggggcggggccccaaacttggggggtggtcgtccccggcggcact

SEQ ID NO: 49534 - DNA, 30 bp, Homo sapiens
  chr12:49962287-49962317
  hyper
acttctatcaggcccgcctgctaggcacta

SEQ ID NO: 49535 - DNA, 110 bp, Homo sapiens
  chr12:50016478-50016588
  hyper
tcaggaacctagcacggcatcacgcgagtcccggctcaggtgaggggggaataaagggaacaggaagcgccttttgcggggctttgcaggctggcggtcagcgcctttct

SEQ ID NO: 49536 - DNA, 30 bp, Homo sapiens
  chr12:50100794-50100824
  hyper
tgaggggcggtacgcgggggaaggggctgg

SEQ ID NO: 49537 - DNA, 105 bp, Homo sapiens; identical to SEQ ID NO: 8736
  chr12:50202841-50202946
  hyper

SEQ ID NO: 49538 - DNA, 30 bp, Homo sapiens; identical to SEQ ID NO: 8737
  chr12:50221544-50221574
  hyper

SEQ ID NO: 49539 - DNA, 30 bp, Homo sapiens
  chr12:50222795-50222825
  hyper
tcctcactggtttgcggggaaggctgggca

SEQ ID NO: 49540 - DNA, 21 bp, Homo sapiens
  chr12:50297533-50297554
  hyper
tggtgcaggctggggagatgc

SEQ ID NO: 49541 - DNA, 122 bp, Homo sapiens
  chr12:50297973-50298095
  hyper
gtgaaaccagagccgggcatcagggcctcatctccactgtctctgcacctctctgcagctccagctgcgcctctgccttttcctcctccctctttggatgcggccctgatttctgtctccat

SEQ ID NO: 49542 - DNA, 279 bp, Homo sapiens
  chr12:50339292-50339571
  hyper
ctgctctcttcacttcgtcccgcttcgccccgactgtggatctacccgctcccttctccctcagtccccaaagcaccagactcacaggcctgctgtgtgacccacttttaccgacctttcggggagagtagagggcatttgtgactcagctcagagcaggaaacacatctcacgtcaactgtcagacagcgctgctccgaatcccatcacagtgctccagcagggggcgtcctcaccggccgcggccacagccacggctcaacccggcctagctcccag

SEQ ID NO: 49543 - DNA, 181 bp, Homo sapiens; identical to SEQ ID NO: 8740
  chr12:50355598-50355779
  hyper

SEQ ID NO: 49544 - DNA, 30 bp, Homo sapiens
  chr12:50361386-50361416
  hyper
tggccagcaggggtcgctgtgtctgcgtgt

SEQ ID NO: 49545 - DNA, 30 bp, Homo sapiens; identical to SEQ ID NO: 8741
  chr12:50419369-50419399
  hyper

SEQ ID NO: 49546 - DNA, 158 bp, Homo sapiens
  chr12:50426641-50426799
  hyper
ggcgcccccctcccacgcgctcccccgcgcccaggcaccaatgatggggttggtgctgataggtggttgcgggtgacctcccgagcgcgcccgtaccccaccggccctcacctccccaggggcggccgcctgatccgatgtcccgacaggcgaactgt

SEQ ID NO: 49547 - DNA, 30 bp, Homo sapiens; identical to SEQ ID NO: 8742
  chr12:50444507-50444537
  hyper

SEQ ID NO: 49548 - DNA, 30 bp, Homo sapiens; identical to SEQ ID NO: 8743
  chr12:50450985-50451015
  hyper

SEQ ID NO: 49549 - DNA, 30 bp, Homo sapiens
  chr12:50506219-50506249
  hyper
tgcgttgcggaccgcgagctgcactgcttc

SEQ ID NO: 49550 - DNA, 31 bp, Homo sapiens
  chr12:50677033-50677064
  hyper
agaagtgaggaaagaacggaggatcagcgtc

SEQ ID NO: 49551 - DNA, 43 bp, Homo sapiens
  chr12:50677370-50677413
  hyper
gcggcctcgggctgagcgtgcgcgccaccggctacgtgcccag

SEQ ID NO: 49552 - DNA, 30 bp, Homo sapiens
  chr12:50899533-50899563
  hyper
gagtgagacacaagcgggtgagccatttag

SEQ ID NO: 49553 - DNA, 30 bp, Homo sapiens
  chr12:51045433-51045463
  hyper
atttccgggctctctattgttccgttggtc

SEQ ID NO: 49554 - DNA, 30 bp, Homo sapiens
  chr12:51155647-51155677
  hyper
gccaccaggactggtcgagcgtaacatttg

SEQ ID NO: 49555 - DNA, 208 bp, Homo sapiens; identical to SEQ ID NO: 8744
  chr12:51157761-51157969
  hyper

SEQ ID NO: 49556 - DNA, 30 bp, Homo sapiens; identical to SEQ ID NO: 8745
  chr12:51318472-51318502
  hyper

SEQ ID NO: 49557 - DNA, 30 bp, Homo sapiens
  chr12:51419806-51419836
  hyper
catgtgtcctaggccgcggcggggaagggg

SEQ ID NO: 49558 - DNA, 30 bp, Homo sapiens
  chr12:51441682-51441712
  hyper
ccattagagggcgccgcgggtcctcctagc

SEQ ID NO: 49559 - DNA, 30 bp, Homo sapiens
  chr12:51442041-51442071
  hyper
gcgctcagaaaagacgcatgcgtcttcgaa

SEQ ID NO: 49560 - DNA, 30 bp, Homo sapiens
  chr12:51610961-51610991
  hyper
gctggccctaaccgccgggaacccaggcgt

SEQ ID NO: 49561 - DNA, 30 bp, Homo sapiens
  chr12:51611341-51611371
  hyper
atattaaccaaacccgaaacctcccctgcc

SEQ ID NO: 49562 - DNA, 30 bp, Homo sapiens; identical to SEQ ID NO: 8746
  chr12:51611856-51611886
  hyper

SEQ ID NO: 49563 - DNA, 245 bp, Homo sapiens
  chr12:51785148-51785393
  hyper
gctacaggccaccgcgaccagcagagagcgaaggcaggagggaccagcctggcccagccccttcattttactgtcgggggtagtgaggaggaagaggaagaggcgaaggctggcggaggaggaggtgagagcgaggactcggcagaagcgagatccgccgaagggaagtccgagcagtcggggagctcaggggggccctcccggggagagggtcgcgggctccttctgccgcttacctgtcgcgc

SEQ ID NO: 49564 - DNA, 30 bp, Homo sapiens
  chr12:51785641-51785671
  hyper
ccaggctttcagcgcggaaaaagattggag

SEQ ID NO: 49565 - DNA, 470 bp, Homo sapiens
  chr12:51818411-51818881
  hyper
aagcagttggaaggaccttcacgcccagaggcccctgaagggagggaggcggtttccaaggcaaccgggcccgggagcggttggctccccggctcctccccctccccgcggtagcccagggtaccgccggacagcgtcctcccgtgctccgcgccctgattggctgcgcaggcctctcgctgattggttgcggcggatgcctcgcgggccggtggctatggaggcggcggcggttgatggttgaccgttggctccggggtgggggtcgccgttcgagtgatctgctcagacccgaccagagggcgcgggctgctgatgcttggcttggagcccgtgggggagacctagttcggctccgccatgccggccgccgggagtaacgagccggacggcgtcctcagctatcaggtagggccccgcctcccgcgcctcccgctcctccccggggcgcagcctcctcatcctctgcc

SEQ ID NO: 49566 - DNA, 41 bp, Homo sapiens
  chr12:52207923-52207964
  hyper
cccggtcgccgtcgccgccagtgatccatagcgtgagcagg

SEQ ID NO: 49567 - DNA, 747 bp, Homo sapiens
  chr12:52208001-52208748
  hyper
cggtgaggaggccgagcgccagcggccccgcccaacccatggggctccgctcgtacaggggctgcggcaggcgctccacgatcagctgcagggcgtcccagtccggcgcggggaccgcggcgcgccgggggcgcggggccggggcaaagggcacgcgggcggcggcgccgggccgcggcaggaagcgctgcccgaacttgcgcagctgcagcgtcgcctgctggtggaggttcttgcccagctccctggccacgtccgggcggccgctgcgccgcagggcccgagccaggcggtcccaggacagggacgcggcctggggggccagccaggccgccagcgcctcccggcagccgtcggacacctctccaggcccggctaccctgcccgccgggtcctcggccgcctctcgccgccgccgccggctcggagaccccgacgtggtgttgagcggctcaggccgcgccagccggtcttcagaaagccgggacaactcggcctccacgtcgggctcgggcgcctccaggagcgaccggaaatggccgcactcctccggggtcagcagctcggccagacggacggctgcgtgagggcccatagcgtccacggcccccgccggagccagcgcccaaacccagagcgtgaggaccaaggcgctcgccagagtccgcgccgccatccctggcgggaaccagggaccgaggactgtgcggggacggggacgtggacgggctccgcgccggtgatggg

SEQ ID NO: 49568 - DNA, 30 bp, Homo sapiens
  chr12:52242151-52242181
  hyper
ctagggtctctcgccggccctgccctccga

SEQ ID NO: 49569 - DNA, 30 bp, Homo sapiens; identical to SEQ ID NO: 8749
  chr12:52262950-52262980
  hyper

SEQ ID NO: 49570 - DNA, 30 bp, Homo sapiens; identical to SEQ ID NO: 8750
  chr12:52294236-52294266
  hyper

SEQ ID NO: 49571 - DNA, 31 bp, Homo sapiens; identical to SEQ ID NO: 8751
  chr12:52300898-52300929
  hyper

SEQ ID NO: 49572 - DNA, 157 bp, Homo sapiens; identical to SEQ ID NO: 8752
  chr12:52301148-52301305
  hyper

SEQ ID NO: 49573 - DNA, 38 bp, Homo sapiens
  chr12:52345763-52345801
  hyper
ccccagtcagcttccccgatctccgaggcgcagccgcc

SEQ ID NO: 49574 - DNA, 105 bp, Homo sapiens
  chr12:52400383-52400488
  hyper
ccccactccatgaatcgccagagctattcgtccctaaatttcaaaccttgcgcaatgtcccttcacagacccctccaggtatcacgcagccccgagccccgagcc

SEQ ID NO: 49575 - DNA, 1009 bp, Homo sapiens
  chr12:52400516-52401525
  hyper
cgcgtccgcggctcgttttcccccactgagcgcccagctcccgcagtttccccggccgtcgagcgccgtgggcggggctccagggcggcggcgcctcgcggggagggtcctccgtgctgggggcgaggccacccgaggcagctccccgcccgcccccaaccccgccccgctctcggagcctataaagggaggcgacccgcggcccgcccggctggcatcccccagccgccgccagccccgccgaggggagccagcgccgtctctgaggggcgtccggcgccggagccatgaccctccgccgactcaggaagctgcagcagaaggaggaggcggcggccaccccggaccccgccgcccggactcccgactcggaagtcgcgcccgccgctccggtcccgaccccgggaccccctgccgcagccgccacccctgggcccccagcggacgagctgtacgcggcgctggaggactatcaccctgccgagctgtaccgcgcgctcgccgtgtccgggggcaccctgccccgccgaaaggtgcgtcccccgcccgccttcaggatctgctcagcccctctccgactccctacagggcctgctgactccgcagtgccctctcctcggcgtccgcggagtcccccaccttcttccccggcccgctgggtgcctcgactccccgcgttccccgctgctgcgaaggccgtggccctcgcctgcacaccgcgcccaggctcggtggctcttaactccgcgccccatgcacgccccctctctccctccttgactcctcccagcaccccccttctcctacccgctccatctggctttctgccccccatgccccgcctccccgtggccaggtgtcctgggtccccaggagcccctcgcccgagggacagagacagccccaggcaagttgaaggtccgagagcccccggtgggagaagcgggccggtggctgcgccgcgtgcgttctcactctgaggaagtgcgtggggagccgctgactccgg

SEQ ID NO: 49576 - DNA, 30 bp, Homo sapiens
  chr12:52444539-52444569
  hyper
cctgctggggaagccgcgtcctgtgcacta

SEQ ID NO: 49577 - DNA, 59 bp, Homo sapiens
  chr12:52463633-52463692
  hyper
tgcttctgtgactacgcggatgttgtgggcggctacatgcgtgcgggggcccggcgagc

SEQ ID NO: 49578 - DNA, 20 bp, Homo sapiens
  chr12:52626726-52626746
  hyper
ccctctccaagcatcctcct

SEQ ID NO: 49579 - DNA, 216 bp, Homo sapiens; identical to SEQ ID NO: 8756
  chr12:52626830-52627046
  hyper

SEQ ID NO: 49580 - DNA, 105 bp, Homo sapiens; identical to SEQ ID NO: 8757
  chr12:52627272-52627377
  hyper

SEQ ID NO: 49581 - DNA, 5 bp, Homo sapiens
  chr12:52652599-52652604
  hyper
gagtg

SEQ ID NO: 49582 - DNA, 538 bp, Homo sapiens
  chr12:52702042-52702580
  hyper
atgtctgtaagtagtggggtccgtcccctcctcccgctgggcgggtctgggagcctctgggcaaagggcgcgtgggctcgcagcaaagccactcacccaggtcgcggctgcgcctgacgcgcgcctccgtctctttcccctgcaggcgtcagcagctcccgcggtggcgttgtctgtggcgatctctgcgcctccactactgcccctgttgtctccaccagagtcagtagcgtccccagcaacagcaacgtggtggtgggcactactaacgcctgcgccccctccgcccgggttggcgtctgcggcggcagctgtaagaggtgctaggaggctgccgcctccgccagcgcctgtcgccgtcactctccacccagccagtacctcgcgccaccagaacgcgccgcccgcgccggcctcccaatagccgccgcccgctgcctgcactctaagcgccctccccaccgctccgctccgggagccatccccggtcgcaggagtccggggagggccgggaggcgccatggtctctctctgtagc

SEQ ID NO: 49583 - DNA, 262 bp, Homo sapiens
  chr12:53084980-53085242
  hyper
tggaggtctggatgatctgcacgcgcgaggatccgcggccgcttctgccgctccctccgtagctcccgccaccgccgccgcagccgctgccataaccgcctccactcctgcctcgtgccccgcctccgcggtagcttcttccgccgccatagcccccaccgctgccgccgccgtagcctcctgagccgtagctgccgccgcctcccgcgccgccgttgacgctcacctggctgttctgcacggctgtgggtaggggacagtg

SEQ ID NO: 49584 - DNA, 483 bp, Homo sapiens
  chr12:53108000-53108483
  hyper
caggtcagaagcagcggagggaaggggccccgcgggggtgcgggggagctcagagcggggcgtgccggagggcgaaggggactggggtccgaggacgcccctggcgcggggttcagaatttgtggcgggaccgccagctctaggaggagctttgttctctctggcggcgctgctgccgccgccgccgccaccccggctgacggcgcaggagtcccggagccagagaagccccccgagcaccgcggagctcccgcccaagccccagccgctgcggccccggctaccgccgcgggcccgggctccgactcctcctcccagggcgcagccgccgccagtgctgctgtggccagtctctgcaaagacggtcggggtcagggagcctggcagtgtccgcccggcacgccagcccctcccacagtcccgagccgcaggtcttcccggggtgacgccccgccgagatccggcaaggcgtggggaggacag

SEQ ID NO: 49585 - DNA, 314 bp, Homo sapiens
  chr12:53135225-53135539
  hyper
atgcccaaatgcaaatcgtcagagctgaagcagggaatggggagagttgagtttggaggaagtgactacagtgtcagcctcctgaaatagaaaaggccaccggatacctgggccagatttcagcaccaaggacagagcaccgcttcctggacggcgtctaaagactcaaaggcctctcactaaagtaacgctgtgccgttgaagaccagaaacacaccccacacacacacacactgtcttgaagaaacaaaactacacctatgttattaatatagcgtgggagtgacaagcatggactccggggctcaattgcc

SEQ ID NO: 49586 - DNA, 326 bp, Homo sapiens
  chr12:53267966-53268292
  hyper
ctggctgggtgccgcgtcaggggtctctcggggcggctagaggccctgggaacctggaagcccgcggggcgcggcggggcggggcagagcgctagagccgggtggcggccgccgattggctgggcccgagcgctcccacggcggccgggggccccagggcggcgccggccgcgcccgctccgcggtgactcatccagcaccccacctctggagctggacgggcgcccggcctcttcccaccccagacccgcccgctaagccgggagagcctgactcagcagggggagcctggcctgccttccgcccccttcgcgtcctcccccggg

SEQ ID NO: 49587 - DNA, 186 bp, Homo sapiens
  chr12:53272442-53272628
  hyper
tgtctgtacctgtctgcgcctatgcacatacaatctcccataggaattattccttgtctctggtgcctgaggccctccatatgtgcacctgacagtacacacacgcgcacacgcatgcacacacccacagccccctgcctgcgtgtcttccctccatgatggcaaggctgccgctgcagagggtgg

SEQ ID NO: 49588 - DNA, 118 bp, Homo sapiens
  chr12:53273394-53273512
  hyper
acagagagtggaacccgccacctgctggaaaggccggagccggcgcagagctagcgcggggcaatgtggcgccctctgcggggagcccctgctgcctcgcgccggcactcaaacctcc

SEQ ID NO: 49589 - DNA, 89 bp, Homo sapiens
  chr12:53297369-53297458
  hyper
ggcccctcaggcagcggagtcccagggctgcaaaacccggcctggctcctgctgtgtgaaagtggagccaggccgctggggcggagcag

SEQ ID NO: 49590 - DNA, 30 bp, Homo sapiens
  chr12:53297804-53297834
  hyper
cgcactcaggcctccgggcgccaaaggcct

SEQ ID NO: 49591 - DNA, 278 bp, Homo sapiens
  chr12:53342669-53342947
  hyper
aacaacacctgctgtccgtgtccatgcccggttggccaccccgtttctggggggtgagcggggcttggcagggctgcgcggagggcgcgggggtggggcccggggcggagcggcccggggcggagggcgcgggctccgagccgtccacctgtggctccggcttccgaagcggctccggggcgggggcggggcctcactctgcgatataactcgggtcgcgcggctcgcgcaggccgccaccgtcgtccgcaaagcctgagtcctgtcctttctctctc

SEQ ID NO: 49592 - DNA, 78 bp, Homo sapiens
  chr12:53359385-53359463
  hyper
cgcgctcccattgggtggtgcctgggtgtccccggctcggcagctgcggctgcttcccagccccggggtctcagggcc

SEQ ID NO: 49593 - DNA, 30 bp, Homo sapiens
  chr12:53440477-53440507
  hyper
gcctgggtaggggacgctagcaccaccagg

SEQ ID NO: 49594 - DNA, 223 bp, Homo sapiens
  chr12:53472777-53473000
  hyper
gtagatgctggttgcgcagaccccacagtcttggcaccggcgagtggcggccctactgggccctgtctcctccccgggcacggcctgatcactgagatgagacccgggagcagccgggccccagcccatccgtgtgcctacgcccagtctccccaggccctgcactgggccgagggtgcagcaacagaagaagcccagtgaccagagcgcagggccccgcccc

SEQ ID NO: 49595 - DNA, 30 bp, Homo sapiens
  chr12:53491618-53491648
  hyper
tgtccagggggctgcgtggaggaggaggat

SEQ ID NO: 49596 - DNA, 67 bp, Homo sapiens
  chr12:53607266-53607333
  hyper
ggcgcccccgcacctccgcagatgaggcagatggcgctgagcagccctgtctcggtgtcatccatct

SEQ ID NO: 49597 - DNA, 455 bp, Homo sapiens
  chr12:53614060-53614515
  hyper
ggaaagggactgggcggggcgcgaagctggggctgccgctttagcctccgtccagctcttatctgggtgcttcggcagctagcactggggagaccttttttaaaagcgaagcctggaggggtggggggtggggcttggagagcgaagggggccgggcaccgagatgagcaaagctgagagtggagcgcacacatacacatacgtacactcgctccgcggcgcgcgcgcttgcttagacacacatccgtgcatgcatttatcttatcaggcaccaagaatttgcaaatatgcaagagtgaacatacatgtgagcacgcatataaaatcataggtgcacacacgtttgtgcaaacacaccttgctcgggagaatgcttgcaggcatactctccacagctcataggctttgcatgcatttgcactgaggcgcgtgcccaggtcggggttggaagaagg

SEQ ID NO: 49598 - DNA, 30 bp, Homo sapiens; identical to SEQ ID NO: 8765
  chr12:53645462-53645492
  hyper

SEQ ID NO: 49599 - DNA, 151 bp, Homo sapiens
  chr12:53662269-53662420
  hyper
ccttgggactgccccgggccgctgaagggctgggccgaggcctctggggtagcgcggcgagtggtgtggtagtgcggtcggggatctgcccggaggaaggaagagcggaatcgtccttttataacgggagcacggcgtcctggcgtgggtt

SEQ ID NO: 49600 - DNA, 30 bp, Homo sapiens
  chr12:53689075-53689105
  hyper
tatcgtggttgtgtcgtgagaactttaaga

SEQ ID NO: 49601 - DNA, 30 bp, Homo sapiens
  chr12:53689359-53689389
  hyper
gtctattaacatcacggagctgaatctgcc

SEQ ID NO: 49602 - DNA, 177 bp, Homo sapiens
  chr12:53714986-53715163
  hyper
ttctagcctcctgccggggccaagctgtttccactccgccagactctgtgaccctgcccctgtcacactgcctcctttccccagtagtccccgactccgcccccatgcctgtaggtcccctccctcctcgccctggccacctggccccggaagtcggggggcgggctctcatagcta

SEQ ID NO: 49603 - DNA, 238 bp, Homo sapiens; identical to SEQ ID NO: 8767
  chr12:53719554-53719792
  hyper

SEQ ID NO: 49604 - DNA, 31 bp, Homo sapiens; identical to SEQ ID NO: 8768
  chr12:53765076-53765107
  hyper

SEQ ID NO: 49605 - DNA, 30 bp, Homo sapiens
  chr12:53773227-53773257
  hyper
gagggccaatatggcgacggtctcctcttg

SEQ ID NO: 49606 - DNA, 146 bp, Homo sapiens
  chr12:53835281-53835427
  hyper
ccagcagctggccccgccccctccagcgctctccgcctagccccgcccccaggagatttccggcttctcggtactggcctagccgtaaagggctccgctccgcccctagagcaaccgtttcctcctcagtcggaccagagtgattg

SEQ ID NO: 49607 - DNA, 30 bp, Homo sapiens
  chr12:53845759-53845789
  hyper
ggccgtctgcattgcgtggggaaggcttgg

SEQ ID NO: 49608 - DNA, 30 bp, Homo sapiens
  chr12:53887314-53887344
  hyper
agacaccggagcagcgtcaagcggagtcaa

SEQ ID NO: 49609 - DNA, 134 bp, Homo sapiens
  chr12:53892935-53893069
  hyper
atcctccaccccaccccaatacggtcctttccagctctggaggcccttcgtctccaagctgggccgcggcatccctccgctccattcccttccttcccagccccacaggcgtcgggtccaggtccccagttcct

SEQ ID NO: 49610 - DNA, 30 bp, Homo sapiens
  chr12:53894403-53894433
  hyper
gggactgtctgagacggacttaaacctgca

SEQ ID NO: 49611 - DNA, 30 bp, Homo sapiens; identical to SEQ ID NO: 8769
  chr12:53894745-53894775
  hyper

SEQ ID NO: 49612 - DNA, 30 bp, Homo sapiens
  chr12:54020696-54020726
  hyper
atattttcacaaaacgtagggcatactaca

SEQ ID NO: 49613 - DNA, 584 bp, Homo sapiens
  chr12:54088960-54089544
  hyper
cagggcccggccggacgagatttactgggcctcgaacacggcgacagttcaaacctttgattaatcatgtttttctgcctaccccataatttagttgctctttttccctccctgcctttttttttttttttatcagcggaaacagagacggagtcctcatcagcttcaattacaaatattaaggtcccggacagcactttgacagagaggcggccagccccccacttcgtaccacccccctaaatcatctccgaattaacatcacatcggcggctggcgcgtgttcagatttaaatggtggcatattgttcgcggacggtctagctcagaaccgcgagctcgcagctcccgcggcgggccccgcctctgcccacaccggcccctgcggcctcccgggaggctgtgactcaggagtcgcgggaggctccgactcaggagtcgcgggaggctccgggccctgtctccagcagggggctgcaggcgagggcgcgctggggcgggggcgggcgggctgcacagaggggtcggatgtggggcgagttgggcagaggaagaggaaccgcagatgccgggtggcgggagag

SEQ ID NO: 49614 - DNA, 354 bp, Homo sapiens
  chr12:54090239-54090593
  hyper
tgggattggctactcgcagtatgcttatcccaagttttcattggctgacggccacctgtatggaaataagaattacccgggactctcaggcccttctcagccgtaccgacctgtggcttagtgcgctgaaacctgcaaggtcggagccgaaactcctgggcttgcttgttgtcctgccttctcttcctcaaaggagatctcttgaatattgccttttccctctgcgccctgcctaaggcctagtctgaaagaagtccgaccaaataacctgaaataatgcggatttgcatgctttctgtatcttctttgcattctctaggttcaaggtcaagattttgccccttccctccaatg

SEQ ID NO: 49615 - DNA, 25 bp, Homo sapiens
  chr12:54090662-54090687
  hyper
cgtcccgccccgggtttgccaaaac

SEQ ID NO: 49616 - DNA, 183 bp, Homo sapiens
  chr12:54091027-54091210
  hyper
tggtgtatttctgcttgtctccgcgccatcactcatctttactgcccgtccctttgctctcgcgctgctacaacgaggagagactgcagcctgagtcggggctggggatggggggagatgggggccagagatccgcgccccccacgccgctgtgcccttcacgccaaatcctcaccctccctg

SEQ ID NO: 49617 - DNA, 57 bp, Homo sapiens
  chr12:54120861-54120918
  hyper
ggagagagggaagacgtgtaggggacacgtcttgcctgggagcgaataagcagattt

SEQ ID NO: 49618 - DNA, 154 bp, Homo sapiens
  chr12:54132429-54132583
  hyper
cctcccaaggtccccgggctgccaaggaggacccttcggccttagggcggagcctcccccgccgctcaggggaggtggagctcgttgtggtgggcggggctttctccaggtgggacccatcgcctaggcaggtttccccggccaccctcttcct

SEQ ID NO: 49619 - DNA, 30 bp, Homo sapiens; identical to SEQ ID NO: 8775
  chr12:54133603-54133633
  hyper

SEQ ID NO: 49620 - DNA, 951 bp, Homo sapiens
  chr12:54144906-54145857
  hyper
agcaggtgtgcccacgcgcaataccctcctggcccacaggcctccgcacgcacaggacacacacacacactctctcctggcctccctcccgccgcccctcctctgagccctgcggcccggccttccgcacctcccaacgcctgcaggggttgggggcgctggggctcggggcgctcactcggacctcggagccaatcgccagagatctaatggctcctttggcagtgggaaggggtgtgcgtgggtgtcctctccttcactctttccccagccctgtcgcctcccaccccccttccggccgcggcagtttccgaaatcgcccggcggccgcgaattcattagtggggggcggatgtaaacgcagcgcggtggaacgttttaattaggcctgaacaataaacaagctaaacgaggcgcgcaggactccctggtgggccctcagcctcctccgcgcggcgcggactcattacggctgcagccaatttcatgccagcgccgagcactggctgggccgggagtggggtcgggggtgcgtgcgggtgcgatccgggcctgcagggtgcggagcgggggcgtcccggggcgagggcagcgggccggttcccgcccgcccggggccgcggcttccgcatttctgcaccatccacctgcctttttcagtgtccttgagatgacgctccctccccacaccagagcggccggctggagagtctagcttgctttttagggtctctctcccgcctcttttcctcccccgctccctctctccttgcggctgactccagctccccctcggtgcccgtaaccctcctttcctctttttgccgcagtctccgtctctcttccacagggtctctccctccccctctccccgtggttgtcagactttctcctggactttctccgccccgcaccgcccgccccggatgccgagcgtggtagactctgcag

SEQ ID NO: 49621 - DNA, 86 bp, Homo sapiens
  chr12:54145880-54145966
  hyper
cgctgcctacacccccttgggctcccctccaaggtcccctccgctcgcccctctctgcccgctgccgccgccgccgccgccttcca

SEQ ID NO: 49622 - DNA, 31 bp, Homo sapiens
  chr12:54150999-54151030
  hyper
gacgtgctgtctgtctcgggctcagcccggt

SEQ ID NO: 49623 - DNA, 30 bp, Homo sapiens; identical to SEQ ID NO: 8778
  chr12:54320917-54320947
  hyper

SEQ ID NO: 49624 - DNA, 674 bp, Homo sapiens
  chr12:54321244-54321918
  hyper
aagttgaaatttctgccctgtcgttccaatgccatgatggagaaggacccctaaaatcgcctttggcgtgtgcagctcgagcgttacaacgatgcaaagtgcggtctttggaggatgcgggagtcggtaacccctcaattcactctcgccgttccttctctccagtctgcgcgaaagccaggtccgagggcttcgaagatctgggggacccgagctgcgcacagtggcgggaaacgagcgggctcagctggccgggccgcgtcccctagccaccgcccgcccgcccgctgctttggcctccggagaagcctggagaggggcctgcgcctcttgaaaaatggcttttgggggcggtaggtctcgggagggcgactggggaaagtgacttgccgcggcttcgagtagagacgttggtgcgggacccaactcctggggaaggcggggagcgctgggcggatgcctggccctagtgcggcgccaacacatacaagttccgctgtgaatgtttgaaagtgtaagtttctctcggattgatttttttttcctttaaatgtatccccttcaaaaaaaaaaaaaaacaaacaaacaaaaaaaaaaaaaacaaagacgtggacaggcaggcgccacccggtctgggagctgaggttcgtgactgctgccgatttcgtttggtt

SEQ ID NO: 49625 - DNA, 38 bp, Homo sapiens
  chr12:54322140-54322178
  hyper
cccccacgcgccagtcgagcctacgcagctgtggggtg

SEQ ID NO: 49626 - DNA, 30 bp, Homo sapiens
  chr12:54322381-54322411
  hyper
gtaaagatctagagcgagattaagaccctc

SEQ ID NO: 49627 - DNA, 440 bp, Homo sapiens
  chr12:54324532-54324972
  hyper
aggtagtgtcgcgggcgcttcctagtgcgggcactcatcctgccgctctccggtcggccatttattgtcttgtggggaagggctttcgccaagaaacttggtctgggttagtgaaataaaatactaaacaattactatatgtaaaattttaaaaccagcatattaaaataaactaaggaactctctgtcgtgggagaaatccacaggaaaaggaagagaaggagttagatgctggcgccgagttcctggcggagccaggcggcggtgactcctcaggctgagcggaatcgccatccaggcgccggaaacgacccgaatcccaaaatccgtggaagaaaattgcgctgaaagaacagagccaacgcccccgtcctgccaagtttggcgagacggcaagttggcttcaggagcacaatgccgctaaatgatgcctaagagaa

SEQ ID NO: 49628 - DNA, 292 bp, Homo sapiens
  chr12:54329186-54329478
  hyper
tttgggctgtgtccacaaggccgtgtgctgaaacggtgcaggcagcctgcacccatccctaaactcacaggcacgcaagcgcacgcgcacacgcacatacacagacgcttcccgtgaaaaagcatattaaatatctcctttctgtgttggatcatttaaaagaaaacatttcagagttgaacttagccgagagcttggttcatgagctgtagctgagggcagagtggcttctgccgctccgcggttgtagaagtccctttgaaaaagcagccgagagcagagccggggcttc

SEQ ID NO: 49629 - DNA, 308 bp, Homo sapiens; identical to SEQ ID NO: 8783
  chr12:54329604-54329912
  hyper

SEQ ID NO: 49630 - DNA, 37 bp, Homo sapiens
  chr12:54330360-54330397
  hyper
ttgagtcctggcccgcggaaaacgggtccggcgttgg

SEQ ID NO: 49631 - DNA, 30 bp, Homo sapiens
  chr12:54331067-54331097
  hyper
tctggctgagcgaggcgctgctctgtggcc

SEQ ID NO: 49632 - DNA, 460 bp, Homo sapiens
  chr12:54332486-54332946
  hyper
agagcgggagccggcggatttcttaatgaagtgtctccgcatgcgtagagggaatgtagggagggaggtggaagcactaggaggaggggaggggtggagagaaaagaggggagggatggggggaggggaaacaggagcgaggtgtctccctagctcgctgcctctggcaagtggagtttttaaaaagctccagcagatcatgtcatgacgacttcgctgctcctgcatccacgctggccggagagccttatgtacgtctatgaggacagcgcggcggagagcggcatcggcggcggcggcggaggaggaggcggcggcacgggcggagcggggggtggctgcagcggagcgagccccggcaaagccccgagcatggatggtctgggcagcagctgcccggccagccactgccgcgacctgcttccgcaccccgtgctgggccgcccgccggctcccctgg

SEQ ID NO: 49633 - DNA, 875 bp, Homo sapiens
  chr12:54332963-54333838
  hyper
gtctatacggacatcccggccccggaggcggcgcgccagtgtgccccgccgcccgcaccccccacctcgtccagcgccaccctgggctacggctaccccttcgggggcagctactacggctgccgcctgtcgcacaacgtgaacctgcagcagaagccttgcgcctaccacccgggcgataaatacccggagccgtcgggcgccctgcccggtgacgacctgtcctctagggccaaggagttcgccttctaccccagcttcgccagctcctaccaggcgatgcccggctacctggacgtgtcggtggtgcccgggatcagcgggcacccggagccgcgtcacgacgccctcatccccgtcgaaggctaccagcactgggctctctccaatggctgggacagtcaggtgtactgctccaaggagcagtcgcagtccgcccacctctggaagtctcccttcccaggtaaggaagggacccgagcgccgccgccgccggggacccctccccgccctgcctgccccggggctccgcgccccaaccacccccgccgtctggccccggcgcgcccgctcggctgggctgcctatggagccggccgggcgagctgcactgaggaatgcgccggggaagaaatctgctccgacacgttctctgtagctgcccggccgagaatgaagcaatcacaggcgcccgaaagccgggccgccggctctgctctgtccggtagctcgcctccgcctccccttgcaggctccagcctcccgccgggctcttggcccctaaacctgcttccggcaagggatgggggcggggtgggcctatagtgccttggaatccaggacaaaacccccaacccaccgaataactggggagg

SEQ ID NO: 49634 - DNA, 247 bp, Homo sapiens
  chr12:54338570-54338817
  hyper
cccctcccttaaacttcgagcccagtggcctcatcatagttgtggtcttgctaaaataacagaaatgaaaagcattagggagcttcactatgcagtgcaatcctctggccccgttgagcccctgccagaactctgtgcctaggcagcctcgggtcctctatctcagtccagccgcttgcctcacttcttcccgcttgccttatctccccgcagacgtggttcccctgcagcccgaggtgagcagcta

SEQ ID NO: 49635 - DNA, 325 bp, Homo sapiens; identical to SEQ ID NO: 8786
  chr12:54338978-54339303
  hyper

SEQ ID NO: 49636 - DNA, 71 bp, Homo sapiens
  chr12:54339504-54339575
  hyper
cttcgctgtccctcccgcactccttaggcaagatttcccagtaaagattttctgtgcgtattttaaaagtc

SEQ ID NO: 49637 - DNA, 338 bp, Homo sapiens; identical to SEQ ID NO: 8787
  chr12:54343491-54343829
  hyper

SEQ ID NO: 49638 - DNA, 186 bp, Homo sapiens
  chr12:54345041-54345227
  hyper
gcctaatttgcatacgaggcagaaccgctttctgcaaactagacagtgaccttgaactgggccgctgcggcctctggacagaccaggggtaaggcagcactgcgcggaatcactcccgaccacgggtcggcgggggagccaaaacgcagtcactcacagccgattccccgcggtctaagccgccag

SEQ ID NO: 49639 - DNA, 139 bp, Homo sapiens
  chr12:54345519-54345658
  hyper
cagcaggcaggccaccgctctagccttgtgatctgataaatgtacgggagagttcgcaccaatcgctccacggtttgggtgcctcggcctgaccacctatagttttgcgcatggtcagcgaagtgccggcgggttaagc

SEQ ID NO: 49640 - DNA, 221 bp, Homo sapiens
  chr12:54345965-54346186
  hyper
ggtgggtctcagggagcaggacaccggggatgcgaattttgctagtggttgtcgacagctctccctgagaggaatcagggtcagctgcaaagaagaaagaggggtttgtgcgtgcttctttgcccgccgaatccaaaacctggggaaaacggccctctttgatgaggctaaatcaggctagaagaaatgcgtgcctggaagaaggacgccttcacccaatc

SEQ ID NO: 49641 - DNA, 337 bp, Homo sapiens; identical to SEQ ID NO: 8788
  chr12:54346834-54347171
  hyper

SEQ ID NO: 49642 - DNA, 30 bp, Homo sapiens
  chr12:54347923-54347953
  hyper
ctctacctcccttccgcatccttcctctag

SEQ ID NO: 49643 - DNA, 341 bp, Homo sapiens
  chr12:54348738-54349079
  hyper
ccgggtttgtggggccgctggtaaacatccacacgggagacaccttctacttccccaacttccgcgcgtccggggcgcagcttcccgggctgccttcgctgtcctacccacgccgcgacaacgtgtgctccctgtcctggccgtcggcggagccgtgcaatggctacccgcagccctacctcggcagcccagtgtctctcaaccctcccttcggccgcacgtgcgagctggcgcgcgtggaggacggcaagggttactaccgcgagccgtgcgccgagggtggcggcgggggcctgaagcgtgaggagcgcgggcgcgacccgggagccgggcccggggca

SEQ ID NO: 49644 - DNA, 21 bp, Homo sapiens
  chr12:54349255-54349276
  hyper
cgccggcgcaggcgaccccgg

SEQ ID NO: 49645 - DNA, 152 bp, Homo sapiens
  chr12:54354541-54354693
  hyper
ggcaggtgatgggtccggccgtctgggttctgtgggtgctaatgtagccggaaatccggcgcgatcgatggctgagacccagagcagagcagggaccgctggccccggtccgcgaacaaagcaaactccggggacttggggttccggccagg

SEQ ID NO: 49646 - DNA, 272 bp, Homo sapiens; identical to SEQ ID NO: 8789
  chr12:54354814-54355086
  hyper

SEQ ID NO: 49647 - DNA, 91 bp, Homo sapiens
  chr12:54357476-54357567
  hyper
ataagaagagcaaggaagccccggtggccgcgaggggcggggcttggtgggcccggtgtggggcagtggctgacccgagccgggtgctgcc

SEQ ID NO: 49648 - DNA, 272 bp, Homo sapiens
  chr12:54357603-54357875
  hyper
cgttcatgtggcgagctaggacccggattattctctctgtactcccgttccctagattttcccttttcctcatggaacaccaaatcagattttaaaaaataaaaatacataaacctctgtctgtgagtgcccgtcttgccctctgccacgtttgttccgggaactgccgccttgctcccttgcctgcatttctctgcgtggttcgctttcaccttcgtctggcgctctcttccctcctctggctctctctctagcttcgtggttgctttttc

SEQ ID NO: 49649 - DNA, 22 bp, Homo sapiens
  chr12:54359660-54359682
  hyper
gctgttgctctccctcgcccgg

SEQ ID NO: 49650 - DNA, 174 bp, Homo sapiens
  chr12:54359742-54359916
  hyper
cgtaccttataaggaaggcgccggtcctccatttcagccttttctctgccaggacgcggccgtggcatttctggtcttgtaaacatcagactctttggggccttaaaaaaataaagacgcccctccttcctttaccgggggtgagccggccggggaaagcggcggacagggaaa

SEQ ID NO: 49651 - DNA, 147 bp, Homo sapiens
  chr12:54360130-54360277
  hyper
cgttccattccactgcgaagcggagcaggacctaagaattggagagaaaattaaacgtcataaagaaaagttcatttacagcttaaatgtctgaatgttacggtttccttcagaaaacaaggcggtacactcggtaaggagaagtga

SEQ ID NO: 49652 - DNA, 727 bp, Homo sapiens
  chr12:54366647-54367374
  hyper
ccccttcccagccaccaccctcgcccatcccaccgcccaccccaccccaaccctctctctcctcctttgctcgtgctgtggtatggagagaaggggagtgacgagagaaaaacgaatacaaatctgcaattgattttcataatgtttctgcggtgtttgcaaaccaatcgcctgaacgtccccgatcttacctaagagagaacccctcctacgtctgcgaagtgctccgaactgatatatgacaatatctactttggatcacgtgctcagagagagagagactaagacggataacgcgtcatctcgccttcccaaattttcccccctcgctagaccgggtccaaaacctccatccggagccggcaggagaggagaacgatgtttaactcggtcaacctgggcaacttctgctctccgtcgcgcaaggagaggggcgcagatttcggcgagcgagggagctgcgcctccaacctctatctgcccagttgcacttactacatgcccgagttctccacggtctcctccttcctgccccaggccccctctcgtcagatctcctatccctactcggcccaagtgcccccggtccgggaggtctcctacggcctggagccatccggcaagtggcaccatcggaacagctactcctcctgctatgcggcggccgacgagcttatgcaccgggagtgcctgcctccttccaccgtcaccgagatcctcatgaaaa

SEQ ID NO: 49653 - DNA, 414 bp, Homo sapiens; identical to SEQ ID NO: 8793
  chr12:54367429-54367843
  hyper

SEQ ID NO: 49654 - DNA, 1428 bp, Homo sapiens
  chr12:54368250-54369678
  hyper
aaaatgttcaaactatgtgttcgcgggtcctcgagcagaaacccaagcaactctggggtcagcggcgacaggggaatggggcgaggcggcgcaggactccactgcgttccaggcgggggtctgggcgtttctcccgggtccgcggccttagtgcttgcctagaactgcggtgtggaaggcgctgccccgcgggcttcccggggcgccagggccccggaagcggctctctggtgtctcggtgcctgctggccggcttcctccccgcctcccgactgctctcgccagatttcactgcttcgcgcctgttctcagctttccccccagatttctgggggaggggttgggctttccgaaccactaggagggcggcccaggaagggcccgagggcggagggggagcagacagggggcccgaggggacgcacgtgtacctggagggctttccttctgtcccagaccctgtcagccgcggctctcgcctgagaactggggacggggtggcgcagtggcgggggggtggggacccgctagacctggcagggggtcgaggcttgcccgggtgctgcggctgcaggagagccagccgcctggcgggagggctgcccgcggtgggctaggagaagggccgctgagcgctcagcgggctggggtcgcccgggtctcacgtgtctctctcccccctctcctcgcacttgccccctcccctccctccagacgccccccgcacccgcaagaagcgctgcccttattcgaaattccagatccgggaactggagcgagagtttttcttcaacgtgtatatcaacaaagagaagcggctgcagctgtcccggatgctgaacctgacggaccgacaagtgaaaatttggtttcagaacagaaggatgaaagaaaagaaactgagcagagaccggctgcagtatttctcgggaaatcctctgctgtaacctgcagaccgggcccttttgggggcggggggaggggaaaattattttattttatttttattttttattttctaactcgtcttctttccgccggtggaaaactggactgtggccagggctggcccccaccgctgtggccggcactccattccggaacctcctggaccctctatctgactctcgctgtgggacagggaccgggcctggaaagggggtgaagggaagtgtctgatgcacggcgagtgaacaccgttggcgccgaggccaagactttgatttaaaagaaaacacacctcggcgacaatgtcttgctgctcggattaggtgggggaggggcgacagtagtgagcgcctgagccgaacaatcctcgaactaaaagccttcccttgcccatgtgaaaagatccgctaagacagcatgtctgccagcggaaacttctcgagctcccccctctaccccgccccaccttgcagctaaatg

SEQ ID NO: 49655 - DNA, 168 bp, Homo sapiens
  chr12:54371955-54372123
  hyper
cttggggtaatcccctctagccgcagcactgcccgggaacaaaagatcctcgtctagacgctgccataaagcaccccctcacgtttctaaacccagtttcatttcgaccttaacgacccagtctggcctgtattagaaaccacttccgccctaaatagtaaacaaacc

SEQ ID NO: 49656 - DNA, 581 bp, Homo sapiens
  chr12:54377365-54377946
  hyper
ccacatttccttccagttttccggaggttcaggaacccctgcgtcttctctctccacccctggatggggaaattcggcggatttctttctgcggtcttctagccgcagcgggcttgggcctccttagaaacggtctagcctcctcactcctccactccagggcgctgggctccagtcctttccccgccaaactccagcccttcggaaagtctgaaccctaggctctgtccaaggaaaaatgtggggcgacaggaaagacaagttgttctccagattccgtttcctgaggaaggggtggagagtttagttcgctttggaagaaggcgatggagaaacggaaataactgtttgaaacatacggttccccttatttcttccttttatttaaaaacaaccacaaaaatagactggtctgtcttctttcaaacatgctcccagcccgtgcgctctgtaaaggacgcttctctgggtcgggttttgttgcgtcttgtgtgctggtttcccgtgtgatacgtgactcctccaaactgaccgaggctccgcaggttccctctttctttcccggaatattccctgtttta

SEQ ID NO: 49657 - DNA, 179 bp, Homo sapiens
  chr12:54377977-54378156
  hyper
cgccagggcctgaagtaaagcagcagaaccggctccaaggccaaagccttgtgggcccctgagatggtgacccaggagccgcccaccctgccaggcccaggccacagctctcgggtcggggatcgggtgcctctggtctctggcttcctctttcccctaccccgcgtccattcggaacc

SEQ ID NO: 49658 - DNA, 30 bp, Homo sapiens; identical to SEQ ID NO: 8794
  chr12:54378485-54378515
  hyper

SEQ ID NO: 49659 - DNA, 1216 bp, Homo sapiens
  chr12:54378714-54379930
  hyper
tttgttcgcggggaagggctccggtgcccctaccccgaggcagctgctagatggcgctgttactccactctgcgcgctccgcctgccgacaacttgaccccgctgacgtcacggccgtctgaatcatcaaggccattttcaaatcccattggtctagccgtcacatggtgagaaccgaatgcgcggataattacggagctgatatttccccccctccccttctttttcctccctcccctccaaccgcgccccccctcccggatggggaaaaaaaaagatgtcagctcctccgctgtagtattgctccttaaaaacccctctctctgaaaatgacatgccctcgcaatgtaactccgaactcgtacgcggagcccttggctgcgcccggcggaggagagcgctatagccggagcgcaggcatgtatatgcagtctgggagtgacttcaattgcggggtgatgaggggctgcgggctcgcgccctcgctctccaagagggacgagggcagcagccccagcctcgccctcaacacctatccgtcctacctctcgcagctggactcctggggcgaccccaaagccgcctatcgcctggaacaacctgttggcaggccgctgtcctcctgctcctacccacctagtgtcaaggaggagaatgtctgctgcatgtacagcgcagagaagcgggcgaaaagtggccccgaggcagctctctactcccaccccttgccggagtcctgccttggggagcacgaggtacccgtgcccagctactaccgcgccagcccgagctactccgcgctggacaagacgccccactgttctggggccaacgacttcgaagcccctttcgagcagcgggccagtctcaacccgcgcgccgaacatctggaatcgcctcagctggggggcaaagtgagtttccctgagacccccaagtccgacagccagacccccagccccaatgaaatcaagacggagcagagcctggcgggccctaaagggagcccctcggagagcgaaaaggagagggccaaagctgccgactccagcccagacacctcggataacgaagcgaaaggtaaggccgcctgggccgcgggcgccactgggacgttccggcacttggtcttcgcggccggggaggggggcaggggagagggttgggcccaggaggccccagaccatttcgggaatgcgaccctggctttcgacta

SEQ ID NO: 49660 - DNA, 508 bp, Homo sapiens; identical to SEQ ID NO: 8796
  chr12:54379958-54380466
  hyper

SEQ ID NO: 49661 - DNA, 137 bp, Homo sapiens
  chr12:54383598-54383735
  hyper
accagagagggtctgtaatctcgcagagcacaggcagaatcgttccttccttgctgcatttcctccttagactaatagacgttttggaaagttcggctagtgttcgtgtgtttgtcgtagcacccagagcctccacc

SEQ ID NO: 49662 - DNA, 877 bp, Homo sapiens
  chr12:54387780-54388657
  hyper
tgtatgaatgtttgagacttgcgggaggaagaaaaggcaagagctcgccaaggcgagccttggtctctgagatctctcgtcggctgctggggctccggctcagcctggcagatccgctgtggcctctctgggacctcgccccggcccacggcctgacttcggctcggagatgcagcccttcccgagaacaggtgaagaagacggcggcagcggggactgggggcttcgggtgggaacgccagggctcagggctttgtgtgggtcgtgcagggggcgaggttcgaagtcctgggctggaccgcagcacgagtgtggcccggacggctgcgtggccagaaggggtgttcgggcagggtgcgagagcaccggcaaggtggattgtgtatggactttggccgcagacagagcagagcgggctcccgggctgtggccggcggcgaggcgggcaaccgcatgttgagtctatagaaaggaccttgaggtctgctgggtgtttgggctgccctgggggcggcggcccagagtgtggagcaagcggcgcgcggggcgcggcggtcagcgtgggagaggctgcaggccctgcacgcctctgcagctgccgggccgtgtccgggacgtctgaactgaggccgaccaatggtcacagcatgaaaaataaatgcaatggaaggtctttctgtcttttcttttccgcgtaaaaggtcctttcttttttctctctttcggatatacctggatttggtccagaccaggttgcccgcgggagggccccgcgagcggcagcgcgcgagggagggagagagagggagggcgagaaggagggagggagggaaggagggcgggcggcggcggccgtggtggccggggcttccctccc

SEQ ID NO: 49663 - DNA, 744 bp, Homo sapiens; identical to SEQ ID NO: 8798
  chr12:54388896-54389640
  hyper

SEQ ID NO: 49664 - DNA, 132 bp, Homo sapiens
  chr12:54391191-54391323
  hyper
ctgaggcctagagtacccatccgagcaagtctcctgggaggggcaggagaggagccctcttccgcctttgtgtccagacagaagtggccgccgcgcccggagccggtcccgcggcaaaggcccggcaagcca

SEQ ID NO: 49665 - DNA, 51 bp, Homo sapiens
  chr12:54391399-54391450
  hyper
cgcctccctctctgcacgcctgcctttcccggctctcctatctcttttcat

SEQ ID NO: 49666 - DNA, 135 bp, Homo sapiens
  chr12:54392868-54393003
  hyper
ctcttttgccttgcccgctctcaccctggctctctgcagacagagcccgggagcgactttttggggggagtgggggtggggaagtgtcgcagagatggagttgggggcaaaggagggtgcgcaggaagatgggat

SEQ ID NO: 49667 - DNA, 481 bp, Homo sapiens
  chr12:54393242-54393723
  hyper
cagtggcagaagaacgctccccttccctccttccctccctgtatctcagcttccccagtcccctcccaccctccctccctcaccgcccctgctgctcctgaaagaaatacatacatacacactatttaaaaacgcatttttaaaagccacgttccgaactgacaatcgctgatctcggctcgcgcagagactgcgggagcgtcggggccgacagagacggattacgtcaagaaatagttcctccacctacctcggtcggcctccccgcccctgcggggctcccgcgcccagctcggccctgggggtccgagaaccctggcttcggggactggcattttcaccccattaaaaaatcctcatggttggggggaggccatctgcttatgggtggacatgggcacaggggcttctcagatgagctaggagccgtcctgagggggtgaccggtgccttgggtccagagttccggacccccaggaaa

SEQ ID NO: 49668 - DNA, 620 bp, Homo sapiens; identical to SEQ ID NO: 8801
  chr12:54393798-54394418
  hyper

SEQ ID NO: 49669 - DNA, 170 bp, Homo sapiens
  chr12:54394466-54394636
  hyper
cgccggcagcaagcacaaagaggagaaggccgacctggaccccagtaagttgggagcaattttcctttacaaccggcgcgggaggggaggggaggacgggcgggggcagccgaattacagccctcccgaaccgtgcagggagcgcgggagaggggcgagggggcgaggac

SEQ ID NO: 49670 - DNA, 82 bp, Homo sapiens; identical to SEQ ID NO: 8803
  chr12:54398703-54398785
  hyper

SEQ ID NO: 49671 - DNA, 71 bp, Homo sapiens
  chr12:54398888-54398959
  hyper
cgcgggcttggaggaccctgaggaaagcatgggatgcagaacaggcccacccggcccggcccactgttcaa

SEQ ID NO: 49672 - DNA, 405 bp, Homo sapiens
  chr12:54399269-54399674
  hyper
gcggagctggctagacgtctgggcttaattgttttatggtttaaataaggtggacactttcctttgaaatcggattataggaatgttttgtctatggcccacggagaacaggacctcactggctgagagggagaggtggagagcgcgcgcgcgagagggatgggctacaaaccaggggtcaaacagcctggagaagtccgagtcccaccccaaagtcctgcaggcggcggcggaatagtcggtgcggggccagcatcagggtaagaggagggaggactttagggtgcgcgccgcgggcaagccgtcgtgggagcctcggagcgtgcatccgcgttcgcggagatgttccaagcccagaaatgcgcctgaatggggggagatcgcggcagttgctttgcttagagt

SEQ ID NO: 49673 - DNA, 330 bp, Homo sapiens
  chr12:54400110-54400440
  hyper
tctggcagcgggctcggaaggctcaggagggcaggcattaaaaataatcgctttgtggaggagataagtgcaaagcaggcagcgcgtaattaacacaaaaaggcagaatgacccggacaaacgaacataaatccgtggtacctatgagggcggtgcaggcctcggggagagggacagagacggcctcggcgaggatggctgctttcggttcctttatttccaggctcggggagcgaaataaaccagataacgtgtaaaagaaagcaaacaaacaaatgaaagaacggtgagggatccccaaaaggggaaaccaagtccggccaggggttg

SEQ ID NO: 49674 - DNA, 915 bp, Homo sapiens
  chr12:54402727-54403642
  hyper
ggagtctgaggaattcgcctgggctgttagaggaaagagctaagtgagagagcgcgagctctacctaccgacagtgaggagcgccgccgccgccgccgccgcccgctcgccgcccgccgccgccgccgcccgcgccccagccccgggagctctgctgatccggccgagctcagcaccgaggcgccccccaacctgcccagcccccagcccaccagcccagcccagtcccggggagccagctggcctggggttcggtcccggggggaggggagtttcgggggtactgggcggggtactcgtgagccagaggggagggggccgcgggttttcatgtacccagcatgagctcctacttcgtcaaccccctgttctccaaatacaaagccggcgagtccctggaaccggcctattacgactgccggttccctcagagcgtgggcaggagccatgcgctggtgtacgggcccggcggctcggcgcccggcttccagcacgcttcgcaccacgttcaagacttcttccaccacggcacctccggcatctccaactcaggctaccagcagaacccgtgctcgcttagctgccacggagacgcctccaaattctatggctacgaggcgctccccagacagtccctttatggggctcagcaagaggcgagcgtggtgcaatatcccgactgtaaatcctccgccaacactaacagtagcgaaggacaaggccacttaaatcaaaactcgtctcccagcctcatgtttccatggatgagaccccacggtgagaagccttttctctttcccccttggtctcccgcgctccagggtttccccccctccctcgcctcctttttgtctgccctcgctttttctcctggctttggggtctctcccgccccacccccgtgcctgtgcctgg

SEQ ID NO: 49675 - DNA, 33 bp, Homo sapiens
  chr12:54404952-54404985
  hyper
tatttgacacgaaaacgtcggattgaagtctct

SEQ ID NO: 49676 - DNA, 432 bp, Homo sapiens
  chr12:54408252-54408684
  hyper
ggatggctgaggtcccgtttcgtttttaaacgtggaattatgattgctattaataaaaatatctggcccagtagcctagcggaatgaacccagcattaaatggctccgaagggcctcgccgccttttccccacaccaaatgtgccatttatcccttgtcctgttcagcaatgtccgtggccccaagcccggcgcgtcggagggcggggtgcgtctggcgcccggctttactcgagatgccaggcatggagagggctaagccgagggagccccagccaccccctcatgcagtacccgctcccccacccctcctgcccaccgcctctgttttctcgtttggaaagaaatggaggtaaaaacccgttttatgggggaacgtaattgtgagcgggatgcgctctctttagaatcgcgtcctcccaaatgctcccgc

SEQ ID NO: 49677 - DNA, 411 bp, Homo sapiens
  chr12:54410236-54410647
  hyper
aaagctttgaattccgcctgatccaaccttaatgcccccatttattaaggacaatatttaaaactcggcaagccaggagaggcaaccgaccctcagtgcttgaagctttctttcgcctgggcgtccgccctcagctctttctgcgctcgcctgcagcagcctggcccgtggggagtgggcggtgggtgggggtaggggtggggtgggggtccggggatgctccctctatgagagaattgggtaaacatggcgaccgcggcgcccatttgcacacgctacacaaatgcatcgcattcccggttgtttgcagaaaatttacagctgagtaataaaagtttacgatcgactcacaagttggattggccacaagaagtcatgtggattccatccatgaacgtgaactttttattg

SEQ ID NO: 49678 - DNA, 30 bp, Homo sapiens; identical to SEQ ID NO: 8809
  chr12:54411738-54411768
  hyper

SEQ ID NO: 49679 - DNA, 233 bp, Homo sapiens
  chr12:54422112-54422345
  hyper
aacagaagcagaagcgatttttttcccccttcctgacatctggcttgcgattggctgggagggggtcagctgactttgtcattttgtctgtcctggattggagccgtccctataaccatctagttccgagtacaaactggagacagaaataaatattaaagaaatcatagaccgaccaggtaaaggcaaagggatgaattcctacttcactaacccttccttatcctgccacc

SEQ ID NO: 49680 - DNA, 574 bp, Homo sapiens; identical to SEQ ID NO: 8811
  chr12:54422376-54422950
  hyper

SEQ ID NO: 49681 - DNA, 30 bp, Homo sapiens
  chr12:54423427-54423457
  hyper
cggatctttaggggtcggctacggagcgga

SEQ ID NO: 49682 - DNA, 79 bp, Homo sapiens
  chr12:54423615-54423694
  hyper
ggatgaagtggaaaaaagaatctaatctcacatccactctctcggggggcggcggaggggccaccgccgacagcctggg

SEQ ID NO: 49683 - DNA, 584 bp, Homo sapiens
  chr12:54426522-54427106
  hyper
taggcaccaggtgtcgctgtgggcttgttgtcccggctacccccaattccaagaacctttttttttttttccctcccccttccctctttctctctctcactccctctcccccttggttgggctttgccaacatatcgagatgcttttcgccggcttccatcactaacctcccggaggtcatcaagccaaatttatgagtggccgctcgagtcacgtgactctatttaaggctcccttatttgggaagagcgcataggataaagaaagagatatctccacctataaattgtccactttggagaacaaaaaacccctcaacttcaaagagtcacaaatcacccttaatcaaaaagggtgcagaaatttttttgggccctccccgccatgagctcctacgtagccaattcattctataagcagagccccaatatccctgcctataacatgcaaacttgtgggaactatggatcggcctcagaggtgcaggcatccaggtactgctacggcggattggacttaagcatcactttcccaccgcctgcgccttccaactctctccacggggtagacatggctgccaaccc

SEQ ID NO: 49684 - DNA, 342 bp, Homo sapiens
  chr12:54427293-54427635
  hyper
ggactgagccagccaccggccccgccacagatttacccgtggatgaccaaactgcacatgagccacggtaaactttaggacttcattttgcgctctcgggtccgcctgggttttataggccatgcggggcaaataaagaaaaaaaacctgcggccataaattttacgatccaggcatcaatggctcgtaaaactgtccactaaaaggcttagaggctgtgtgcgcccaaatttacgacgacataattggatcataggaacaaaacgtgtataaaaggcaatattcaatttttgggggagagggagggagttaaaaaaatagagggatctgaagggtgaggag

SEQ ID NO: 49685 - DNA, 218 bp, Homo sapiens
  chr12:54427974-54428192
  hyper
cgggtgggggcctgggctggggtggggacgggggaacgctgcaagctattcaccccttcctggcttggggtggggtttatgttccagagacggacggcaagcggtcccgaaccagttacacgcgctaccagactctggaactcgagaaagaattccactttaaccgctacctcactcgccgcaggcgcatagagatcgccaacaacttgtgtctcaat

SEQ ID NO: 49686 - DNA, 31 bp, Homo sapiens
  chr12:54441121-54441152
  hyper
gagagtcccgcgccgcggggccgctgcagag

SEQ ID NO: 49687 - DNA, 37 bp, Homo sapiens
  chr12:54441391-54441428
  hyper
cgaagcccaaggctgggggtcccgggttcggaggagg

SEQ ID NO: 49688 - DNA, 225 bp, Homo sapiens
  chr12:54446873-54447098
  hyper
tcagtgggtagcaggggaaggcgagacttctgaactctgcttttgccaaccacttcctgtctctcttcagcgggggctcaacccccagacctccagaaatgacgtcagaatcatttgcatcccgctgcctctacctgcctggtccagctgggaccctgcctcgccggccgcatggccagagggttgggtgagtgtgtatggggaagaggggctggactctggtat

SEQ ID NO: 49689 - DNA, 233 bp, Homo sapiens; identical to SEQ ID NO: 8819
  chr12:54447599-54447832
  hyper

SEQ ID NO: 49690 - DNA, 418 bp, Homo sapiens
  chr12:54447898-54448316
  hyper
cgccagtatagctgcaccagtctccaggggcccggcaattcgcgaggccacgggccggcccaggcgggccaccaccaccccgagaaatcacagtcgctctgcgagccggcgcctctctcaggcgcctccgcctccccgtccccagccccgccagcctgcagccagccagcccccgaccatccctccagcgccgccagcaagcaacccatagtctacccatggatgaaaaaaattcacgttagcacgggtaggcaactttgctttttgctccccccctccctcccttcttccctagcgctccccaccctcctcggccccctctggcccccgtcctcctttctctccttccccctctctctccaggagcgactctgggttagcacaattgaactggatttacgagcgagaatgggtaatt

SEQ ID NO: 49691 - DNA, 406 bp, Homo sapiens
  chr12:54519787-54520193
  hyper
ccagcccctggccacgtggtccctcgtaccaatcgatcgaattctagtcgcaattctctgtctgtccctcggctctggggagaaagggggggctgtggcgtgggggctgaggaggggctaaggcgggaggggcgcctcatcccttcaccctcccttttcgccatgtgggggccctgagcgccgccccagaagaggtcgagggaatgttgtgggctggggcacaccagcacggcagaaactggagaaagcgagagacgtcgccagggacccagggacctctccctccagttccccgggcccgcccggccctgatggccactcacgctatagcgcccactctgtcctgggccatcccgcgccagcagtgtagcccccagcccgggcgcctgaatgctctccctccgga

SEQ ID NO: 49692 - DNA, 841 bp, Homo sapiens
  chr12:54520221-54521062
  hyper
cgtgcccccgagtcctgcttccccggggcctgctctgtatcaggcgcctgcgccttcaagggtacccggcccgcctgccctccccaagagccgagtttgcgctcctcccggaatcgtttgagagaaggacaaacttttggcaggatggaaatctagatgagcctgtccggagcaggtaagctgggcccgggacgggtgcgattcagcccgagaacaatctgtctctccccgtcccggtctctccctccccttacccctgtttcccctgcaggctgacatattaatctgccttcccccgggagaaatttgggctggggttgggcttctgtcagatgcatggggtcagagcagctttcctccccgagtttagggactaaggtggtagctggcaggggagggggagggttgcttccgaaactgaggattgaggggagggttaggggccgagaaacccagagtctgagggagacgacttctttcctcaaacgcaacttgggggaacttcggaaaagttttttgaggggagatggagaagggagcggagttggggtttcgagggctaaagtgggagagagggtgctccgcttcccgtactgaaggaaggatgtgtgtgcttattccccagtcgggaccgattaccagcctagaaaaacccagccgcgtcccaaacccgctcaccccagcaggcccttagagacgcttggagatccccagacacgccccgcggaaagggaaggaaatgccagcccgagttgccgactctgccgggacggggcgggggatccgcccagagcggtcccctgctgtcctgggcccttacgttgattctaagttaggagtg

SEQ ID NO: 49693 - DNA, 30 bp, Homo sapiens; identical to SEQ ID NO: 8823
  chr12:54608667-54608697
  hyper

SEQ ID NO: 49694 - DNA, 30 bp, Homo sapiens
  chr12:54611428-54611458
  hyper
atctacccaccctgcggctccttcccgctc

SEQ ID NO: 49695 - DNA, 45 bp, Homo sapiens
  chr12:54674338-54674383
  hyper
gagacggcgtagaacgaccgaaggaatgacgttacacagcaatgt

SEQ ID NO: 49696 - DNA, 42 bp, Homo sapiens; identical to SEQ ID NO: 8824
  chr12:54686413-54686455
  hyper

SEQ ID NO: 49697 - DNA, 30 bp, Homo sapiens
  chr12:54753475-54753505
  hyper
acacgcatgagcaacgcaccacgagggacc

SEQ ID NO: 49698 - DNA, 743 bp, Homo sapiens
  chr12:54811879-54812622
  hyper
cgaccccagccccagaagtcccggtctcagcacagctccagccgaccagctacaggaaaccagcttttctcttcctcccaagagccagaggaagagggaaaccgcccaccccccttcacgcgcgcacacacccctcccgacacatcccagcacccgcccttggctgagttcgcccccagccccagggccccagtgccagggtccccgcactcgcccccagttctcggatcccctcgcctgaacagagattgggggcggagggaggagtaggagacagaggagaaaggagagggagccgccgtcctctctcgggtctttccccggtctgagttgaggggggaggggaggatgaggctggcccccatttaaccttccgaccccctcagtctttgactttcctcctactacacgtagctcattcggcttctacccgttctctcgccgcacaatggcccctacggatcccgaggtctcctggagcccccaaaagcccttcccggcctctgcgccccctctgcgcccccacccgccccaggtcccagcagcccacagacttcagccagagaccctcagctctccattcacgcgctctcctctcccttggcccggagacccctgcccagacttctccagctccgtgtcctctccccaccggacacatgtctccccactgatctcaaacgccagggcccctcctcacccgccacggtgccctccctactccagcgcgggcccccaactct

SEQ ID NO: 49699 - DNA, 230 bp, Homo sapiens
  chr12:54812831-54813061
  hyper
ctgctggggcctccgcgtctaagttgaagcccccgaccctgggtggcggcggcagcagcagcaacagcagcggcagcagcgggggtcggcgccgggggccccagcgcagctgcacggcgtggagaggggactctggcgtccggctccccatagcgcccgctcttccctgtcctggggccaccgacccggagccgcttcctaaacctcccagaggcgaatgactcaacgcg

SEQ ID NO: 49700 - DNA, 91 bp, Homo sapiens
  chr12:54943469-54943560
  hyper
gggagaggaggagccgcaggagctgcagctctgccagcttgggccgagcctagagacaccggcctggctggtccacgccagccgcaggtgg

SEQ ID NO: 49701 - DNA, 30 bp, Homo sapiens; identical to SEQ ID NO: 8826
  chr12:54982004-54982034
  hyper

SEQ ID NO: 49702 - DNA, 37 bp, Homo sapiens
  chr12:54982266-54982303
  hyper
ctccatggctggggcggcggccggtgggcccgcgctg

SEQ ID NO: 49703 - DNA, 30 bp, Homo sapiens
  chr12:54982575-54982605
  hyper
ggcccgggagccgtcgtagtggacagctca

SEQ ID NO: 49704 - DNA, 30 bp, Homo sapiens
  chr12:55413595-55413625
  hyper
aacaaacaaacgggcggcaaaactggacct

SEQ ID NO: 49705 - DNA, 30 bp, Homo sapiens; identical to SEQ ID NO: 8827
  chr12:56101313-56101343
  hyper

SEQ ID NO: 49706 - DNA, 31 bp, Homo sapiens; identical to SEQ ID NO: 8828
  chr12:56121857-56121888
  hyper

SEQ ID NO: 49707 - DNA, 30 bp, Homo sapiens
  chr12:56122105-56122135
  hyper
attcctccttccaccgccatggctgccggg

SEQ ID NO: 49708 - DNA, 30 bp, Homo sapiens
  chr12:56132068-56132098
  hyper
ctggcctcagaccccggtgacaggctccag

SEQ ID NO: 49709 - DNA, 30 bp, Homo sapiens
  chr12:56137768-56137798
  hyper
aatggggcgggtttcgagatagtgccttcc

SEQ ID NO: 49710 - DNA, 30 bp, Homo sapiens; identical to SEQ ID NO: 8829
  chr12:56211121-56211151
  hyper

SEQ ID NO: 49711 - DNA, 34 bp, Homo sapiens
  chr12:56211699-56211733
  hyper
ggcactgtatcttgcgaacgacagaaatggcaac

SEQ ID NO: 49712 - DNA, 30 bp, Homo sapiens
  chr12:56224113-56224143
  hyper
agctatttggtggacgtccacaagcgcccc

SEQ ID NO: 49713 - DNA, 30 bp, Homo sapiens
  chr12:56320955-56320985
  hyper
agtggagtcccgatcgtagcaagccaccat

SEQ ID NO: 49714 - DNA, 30 bp, Homo sapiens
  chr12:56326150-56326180
  hyper
gggatggtgaagcccggttcctgggacccg

SEQ ID NO: 49715 - DNA, 30 bp, Homo sapiens
  chr12:56360050-56360080
  hyper
ctgaaaggcagctgcgtaacacataccaga

SEQ ID NO: 49716 - DNA, 152 bp, Homo sapiens; identical to SEQ ID NO: 8830
  chr12:56390555-56390707
  hyper

SEQ ID NO: 49717 - DNA, 30 bp, Homo sapiens
  chr12:56391054-56391084
  hyper
gccccgccccttctcgagaactcgcagagc

SEQ ID NO: 49718 - DNA, 88 bp, Homo sapiens; identical to SEQ ID NO: 8831
  chr12:56472731-56472819
  hyper

SEQ ID NO: 49719 - DNA, 30 bp, Homo sapiens
  chr12:56474160-56474190
  hyper
aggcaggtaagtggcgcgagagcaccggcg

SEQ ID NO: 49720 - DNA, 30 bp, Homo sapiens; identical to SEQ ID NO: 8832
  chr12:56497905-56497935
  hyper

SEQ ID NO: 49721 - DNA, 30 bp, Homo sapiens
  chr12:56511632-56511662
  hyper
ttttatggttccatcgggtgggggttttct

SEQ ID NO: 49722 - DNA, 30 bp, Homo sapiens
  chr12:56511924-56511954
  hyper
ctgggaacgccctgcggcatgtcgcacgcg

SEQ ID NO: 49723 - DNA, 305 bp, Homo sapiens
  chr12:56521402-56521707
  hyper
ggtaggggattagggacgggatagacggggttagttttcaaacactttcattccaaatacgatcgtatcctttccttttgtaagggcaggcaggaaaaagttgaaggataaggaatgtgcttagagtatgaaaactagagaaagtcggcaaaagaacatatatatatatcccagaccaaatcctgccaaaccgaatgagtagagggaaatcctgaagctccacaacccctcaacttcgcaacttgggctttctccaaaaccaagaaattggcggtgcagctctgcatgacgtcataccacaggca

SEQ ID NO: 49724 - DNA, 30 bp, Homo sapiens
  chr12:56523255-56523285
  hyper
tagtcttgcagaggcgaagccggttacccg

SEQ ID NO: 49725 - DNA, 121 bp, Homo sapiens
  chr12:56552004-56552125
  hyper
ggaacagcggaccccgcccaagtcattactaatgtagcaatcgtctgcataaacccaggccacggttcctattggctgagtcctctgagggtgacgtcatcgggacgtactaagactaggg

SEQ ID NO: 49726 - DNA, 30 bp, Homo sapiens; identical to SEQ ID NO: 8835
  chr12:56583475-56583505
  hyper

SEQ ID NO: 49727 - DNA, 84 bp, Homo sapiens
  chr12:56614494-56614578
  hyper
acagagtgagactccgtttcaaaaaaaaaaaaaaacaagaatgcaaaataaatttagagtactgagagtcggagaggaaatgct

SEQ ID NO: 49728 - DNA, 30 bp, Homo sapiens; identical to SEQ ID NO: 8836
  chr12:56618226-56618256
  hyper

SEQ ID NO: 49729 - DNA, 30 bp, Homo sapiens
  chr12:56652043-56652073
  hyper
ggatccccatggctcggcccgggctccgtc

SEQ ID NO: 49730 - DNA, 30 bp, Homo sapiens
  chr12:56660465-56660495
  hyper
atctgcggtagacacgcccacgaagtcgcc

SEQ ID NO: 49731 - DNA, 30 bp, Homo sapiens
  chr12:56727496-56727526
  hyper
gaaggtgacggaaacggctagttacccaga

SEQ ID NO: 49732 - DNA, 30 bp, Homo sapiens
  chr12:56727791-56727821
  hyper
accggggtccgaggcgcttcttccaatcaa

SEQ ID NO: 49733 - DNA, 30 bp, Homo sapiens
  chr12:56753690-56753720
  hyper
gaggaccgagcaggcgacagctcctatttc

SEQ ID NO: 49734 - DNA, 42 bp, Homo sapiens
  chr12:56882299-56882341
  hyper
cttgcgacagtctgcggatgcttccgcgtgggcccggcgagc

SEQ ID NO: 49735 - DNA, 31 bp, Homo sapiens; identical to SEQ ID NO: 8838
  chr12:56958137-56958168
  hyper

SEQ ID NO: 49736 - DNA, 30 bp, Homo sapiens; identical to SEQ ID NO: 8839
  chr12:57022641-57022671
  hyper

SEQ ID NO: 49737 - DNA, 30 bp, Homo sapiens; identical to SEQ ID NO: 8840
  chr12:57026396-57026426
  hyper

SEQ ID NO: 49738 - DNA, 30 bp, Homo sapiens; identical to SEQ ID NO: 8841
  chr12:57081310-57081340
  hyper

SEQ ID NO: 49739 - DNA, 30 bp, Homo sapiens
  chr12:57081557-57081587
  hyper
gggaagccaaggaacggttcaggggtgggg

SEQ ID NO: 49740 - DNA, 30 bp, Homo sapiens
  chr12:57481594-57481624
  hyper
acctgtggccagtccgctcgctttccccgg

SEQ ID NO: 49741 - DNA, 99 bp, Homo sapiens; identical to SEQ ID NO: 8842
  chr12:57504303-57504402
  hyper

SEQ ID NO: 49742 - DNA, 70 bp, Homo sapiens; identical to SEQ ID NO: 8843
  chr12:57504933-57505003
  hyper

SEQ ID NO: 49743 - DNA, 30 bp, Homo sapiens; identical to SEQ ID NO: 8844
  chr12:57505514-57505544
  hyper

SEQ ID NO: 49744 - DNA, 36 bp, Homo sapiens
  chr12:57521846-57521882
  hyper
ccagaccactgagtcccggacgcccccggagggagc

SEQ ID NO: 49745 - DNA, 30 bp, Homo sapiens; identical to SEQ ID NO: 8845
  chr12:57522303-57522333
  hyper

SEQ ID NO: 49746 - DNA, 112 bp, Homo sapiens
  chr12:57614085-57614197
  hyper
acatccccgctccgcggctccccccaacccccaccgcgccccggagccggcgcctttataggcacatttattgcaataataaagtgaggcgcggggcggggggcgggggggc

SEQ ID NO: 49747 - DNA, 20 bp, Homo sapiens
  chr12:57618690-57618710
  hyper
aggccgcagtacctggggct

SEQ ID NO: 49748 - DNA, 89 bp, Homo sapiens; identical to SEQ ID NO: 8848
  chr12:57619110-57619199
  hyper

SEQ ID NO: 49749 - DNA, 730 bp, Homo sapiens
  chr12:57631780-57632510
  hyper
ggtggggaggctcacagcccccgtctctggggaatttgggtcttagggacgtaggaaccgagtcctaatatctctccccactcccacgataacctccaccaccccctccctcctcgcagccgatcctgcagagcacctccccctccagagcccgccctgtggagggcgcgggcgggagcgagctatgcacccgtctctgggatcgtcggggtacagggagggagagggcgctttctagggtccgcctccctttccttctcgctgatacttccgccgccccctactctgacaagcgcggctgtaattaggctgcggggtcccgggctctccgcctcactccggcggataatgagataaagtgtcagagacacggcgagaacaaagagacagagactcgctgcgatgtgtgtggggggggcgggggagcggggctgacgggctgttagagcctccagcagcccagccctcccgagagcccgcgcctccagggcccaggaagggagggcgtgtcctgtcacccgcgcaccccagccctccagtctctgggaccaaaaaacaatcccagagctcaaactcgagcggccgcacaactgggctgcacatctggttctctgtggcacagctggggagccaggacgccggaaggggcgcctggtccttgcgcctttgctcacaggccctcgcctgcttccttgtgccctttgttctgagttccggtgaccccggccag

SEQ ID NO: 49750 - DNA, 246 bp, Homo sapiens; identical to SEQ ID NO: 8850
  chr12:57634395-57634641
  hyper

SEQ ID NO: 49751 - DNA, 30 bp, Homo sapiens
  chr12:57634840-57634870
  hyper
ccatctgtgccctgcggggtggaatgtggc

SEQ ID NO: 49752 - DNA, 170 bp, Homo sapiens; identical to SEQ ID NO: 8851
  chr12:57635324-57635494
  hyper

SEQ ID NO: 49753 - DNA, 30 bp, Homo sapiens
  chr12:57635939-57635969
  hyper
acgacccgagccctcgcggtccctcccctc

SEQ ID NO: 49754 - DNA, 30 bp, Homo sapiens
  chr12:57824227-57824257
  hyper
tttttaggtcaccccgcaaaggccacaggt

SEQ ID NO: 49755 - DNA, 30 bp, Homo sapiens
  chr12:57853499-57853529
  hyper
ccagaaatccaagccgggatttagtactca

SEQ ID NO: 49756 - DNA, 30 bp, Homo sapiens
  chr12:57855185-57855215
  hyper
aacccttgggaagccggctgctataaccag

SEQ ID NO: 49757 - DNA, 122 bp, Homo sapiens; identical to SEQ ID NO: 8852
  chr12:57861191-57861313
  hyper

SEQ ID NO: 49758 - DNA, 30 bp, Homo sapiens
  chr12:57881742-57881772
  hyper
ctactttccggtagcggtgccagggcagtg

SEQ ID NO: 49759 - DNA, 30 bp, Homo sapiens
  chr12:57914291-57914321
  hyper
tctgacctcgggagcgcctggctgtaatct

SEQ ID NO: 49760 - DNA, 30 bp, Homo sapiens; identical to SEQ ID NO: 8853
  chr12:57917374-57917404
  hyper

SEQ ID NO: 49761 - DNA, 189 bp, Homo sapiens; identical to SEQ ID NO: 8854
  chr12:57941135-57941324
  hyper

SEQ ID NO: 49762 - DNA, 45 bp, Homo sapiens
  chr12:57944029-57944074
  hyper
tcccagccccacgccggctaccaccatggcggagaccaacaacga

SEQ ID NO: 49763 - DNA, 132 bp, Homo sapiens
  chr12:57984704-57984836
  hyper
gcaaagccggaaggcggccactttgcagcaaagaagccctagaccttgggagtcaatcaggccagcccaggccgcaccacggtctcctagttgacagttcgaggggcctcgcgggccgcttgcttcgtcagc

SEQ ID NO: 49764 - DNA, 291 bp, Homo sapiens
  chr12:58004716-58005007
  hyper
ttcgccttaattggcgattagtcttagctggagtcccggggcctggaggaaagaagggtcctgagagagggcggcatctgggttgtgttcacccacaaaagactccccatacacgcaccccgtaccagggggcctctgtccactcggccggggacagccccaaacccagaacatcttcgcacaggccaaggccccatccactgagtcctccttcatcgcagaggccaaggggagacctgggcagaccctgcagacaggctgaaccccgaccccagcgctccgcagagcccg

SEQ ID NO: 49765 - DNA, 134 bp, Homo sapiens; identical to SEQ ID NO: 8857
  chr12:58021324-58021458
  hyper

SEQ ID NO: 49766 - DNA, 254 bp, Homo sapiens
  chr12:58021713-58021967
  hyper
ggtgccttcgggggtacccctgccccatcctcttccgcttcacccctgcaggacccagacagttcccaggccccacttcgtggttctctctttgtcctagggctggccgttcctggccgcagcgcccccgctgtggccttagcctgttcaaggcccttctccacccccacatcctgcagcccctgccctaccaggtccagcggcgtccgctccagcacgtccacaagcctctccagccgcgtccgcgccgtgaa

SEQ ID NO: 49767 - DNA, 67 bp, Homo sapiens; identical to SEQ ID NO: 8859
  chr12:58025666-58025733
  hyper

SEQ ID NO: 49768 - DNA, 17 bp, Homo sapiens
  chr12:58025869-58025886
  hyper
cgagcagaaggaccaga

SEQ ID NO: 49769 - DNA, 107 bp, Homo sapiens; identical to SEQ ID NO: 8861
  chr12:58025901-58026008
  hyper

SEQ ID NO: 49770 - DNA, 167 bp, Homo sapiens
  chr12:58026065-58026232
  hyper
cgcggttttcccggtacccctcccctcacttcccaggccccagggtctcccggcctcctttcttctcgccctctcctgcatctcggtttcctcacacacccgaggcctggcatcttaatgctgaagacatttggatgccgcggtttcgacgcggccgtgcgtaagcg

SEQ ID NO: 49771 - DNA, 30 bp, Homo sapiens
  chr12:58146165-58146195
  hyper
gggcgaacgccggacgttctgggcacgtga

SEQ ID NO: 49772 - DNA, 30 bp, Homo sapiens
  chr12:58146416-58146446
  hyper
ggtggagcccgaggcggtgccatggcaacc

SEQ ID NO: 49773 - DNA, 30 bp, Homo sapiens
  chr12:58148374-58148404
  hyper
tttctcagacaatccgattccattccttac

SEQ ID NO: 49774 - DNA, 36 bp, Homo sapiens
  chr12:58158675-58158711
  hyper
gcctctgcctctcgccgctccacgtgcctctgagct

SEQ ID NO: 49775 - DNA, 715 bp, Homo sapiens
  chr12:58158778-58159493
  hyper
cgacctgtgccttaccaaatgcaaacatctggtcccagtctcggcagaggcggccccagggcccaggcacaaggtggcgcagccagtggggcatcgccatggtcaacagcgtggacacaaacaccgagcccacagcgcggatgaaggtctccgtgtcgggtggcacttgagcctccaggcagcccaagcgcgagccgagcagaaccgcggcgatgccttgtcgggagggggcgccgtcagggttccgggaggctctggtagggcgcccccgacgcctgcccagctctgtcctgggactcaccttccagtccgaacttgtaaaattcccccgccacgtcccgaaccagggcgggcggccccgtgccacgtccccgctggcgcctcagacgccgcacaaggtcgcagactacgttgttcagggttccggcgtagcgggcggccgcttgaggccggaggaggagcggggccaggagactgcggagcctttgccattcttcgccttccctgcagggttgaggagagagtgcgcatcgggaaggtggggacggctcgacgggactggctgcagtgaaggagcgcgttcggctgcggtggccaggagagggattgcgtctgcccccttggggtacggaaacctgcaccggcctgcgcctgtcttccagcccccttcctctttactcatttcctgccctcaggggccggggttcccgggtaa

SEQ ID NO: 49776 - DNA, 134 bp, Homo sapiens
  chr12:58159767-58159901
  hyper
tctgggggcagagaagactcacgcagtgagcagtccgcaagcccgctggcggcagcggcggtgctccgtccagggcgagaagctgcagcgctcgggccggggtccctcctgtcgcagcagctcctcgacgagtg

SEQ ID NO: 49777 - DNA, 431 bp, Homo sapiens
  chr12:58166378-58166809
  hyper
caaactcagggaggcggggctcgttccacagggacaccacgacggctcgcggcccccagcctctaccccgctccggatccgggatctgagcgccggccgcggtgcccaggcactcccttggcgggccggatggcggaccccggcccagatcccgaatctgagtcggaatcggtgttcccgcgggaggtcgggctctttgcagactcttactcggagaagagccagttctgtttctgtgggcatgtgctgaccatcacgcagaactttgggtcccgcctcggggtggcggcgcgcgtgtgggacgcggtgaggaatgggctgcgccgggtgagggtccgtgggaggtccagatcccggactccgcctctcccatatggagccatcctcacgactgtctttttctctgtcttttctcccgtaggccctgagcc

SEQ ID NO: 49778 - DNA, 243 bp, Homo sapiens
  chr12:58176215-58176458
  hyper
cttggacaaattctcgaacccattcaccaaccacacaagtttgttgtgagtcataaatggataatgaatataaatgcgcattgaaaataaacataaaatgttacccacatttcttgtgttgttgttttgtgacgactttatttcttggtttctgttattttacctggggtgggaggtggggggtaattcccgtatgaaatgtgtcgtctcaagaaatcaagtagaggcgaggactgtgttcct

SEQ ID NO: 49779 - DNA, 30 bp, Homo sapiens
  chr12:58239497-58239527
  hyper
tggtcagaggcagccgggagggagcccgac

SEQ ID NO: 49780 - DNA, 30 bp, Homo sapiens
  chr12:58240427-58240457
  hyper
ggtgcccccggccccgatcccccagcggca

SEQ ID NO: 49781 - DNA, 30 bp, Homo sapiens; identical to SEQ ID NO: 8867
  chr12:58241024-58241054
  hyper

SEQ ID NO: 49782 - DNA, 78 bp, Homo sapiens; identical to SEQ ID NO: 8868
  chr12:58259122-58259200
  hyper

SEQ ID NO: 49783 - DNA, 1072 bp, Homo sapiens
  chr12:59313473-59314545
  hyper
tggctagcttagggcgcaggacttcatccccaatctctggcgtcgttactggcccccaaccctggtctacctgcagccagttaggacgcgccaagagcccacctgcgccgcccgcaaagcacgtgggagggaaactgaggcccggacagttctttttccacgcccacggagcgccgatcgcggcctgggccagaaggagctatacggcaaaaaggggactgcacgccgaaccccattccccgccggctcctgttttctcgaatctccagcggcccgggccccctccccccgcgggaagaatacttacagccgagcgacccaggacgggagtggctcgggaagacgcgctagccgcttacgactgcagtccagcaggtccccgaggcagcggcaggtagtggggcatgggcgctcggcggctaccccagagggctgcccgagttccccgcgaccgccgctgtctgaccggccagcgcgccccagcaccgcgcacagcagcagccccaaccccgcggcgcgcgcacggaggctcggcgcgctcatcgcggtccagcggcctaggtctctacccgaagctcccagccggcgcgcgctcggggcccggcacaaacttccagccgagggtgcacgcccgccctcgcggtcgcgtgcgcgctcctccctcgcgctgcccggtcaattccttcttttactcccggcggcgaagccctttcatgcccccaaacagcaggagggaaaccgaaaagaactgccaactgcaacagagttgcagcttgagcagcgtcggctcgccgaagccccttcttgtctgcaaaagaaactttttcgcctccaccccgcggcactgcgccaagtccccgcgcggcggagtagcaaggcgggcgggtagaggccgacgcgcgcccattggccgactcggctgcgggcgtccccgtggccacgtgacaataacaccgctccagccgggggcctacgcgcgggagaaagtggagctgagattgtaggaaattcagagttatattttccagcctctccagccagaagtctccactacgtcgtgggaaacatatat

SEQ ID NO: 49784 - DNA, 1473 bp, Homo sapiens
  chr12:59989520-59990993
  hyper
ttgcacagagctaccgcacatctgtcttctaggtcaggctacagagtacttcggatacagcaagttacgacccatctggaaagacagatctacctgccttttggctttcttccttggtcaaaactaaaatccgaagtggagtgccccgagcgatagagaaagtgcctatagctttgacagccgcttggagcatgctcagtcggtctccaggcaccgggaggcggctcccccccaccaccccccgggccggcctccaccgcagcctgtccggcccccacccctggcgcgcgctcctccgcacccacaagggcgttcagcagccgcgcctccccttcccgccaccgcctccttctccgctggctgtggcgggcgaggacacgtcaggggccataaataaataaataattccattcacccgttgacagcgaggcgaatcggctgcggtttgctgggaacggagggctgcagcgcccaccctgcgccagagaccagataaagtaagtacagctggggagggaggggagaggaggaggaggaggaggaggtgccggctaagaggagggcgagcctgcgtctgcgacccgagctgcccgcggagccgcacgcgtgtgtgcaaataatggccagcctgtgacaaacgtgccaacgcagagttggccagcgagcccttatatagacaaaaaaatcccgaagcggccgcgggagcagagctcgcgtcagccagtgcgcgccgacagctgcccgggaactgagggggcgcgcggggtcctgggcaaggagcgcctcgcgtgctttcggccaggaggtgctcacgctctcggcttttacaccgagactcagcgtggcgcggtgcaccccagtctccctggctcacgggactccgagggctgcttccagtgcggcgtgtctctagtgcgcgccccgccagcatccggcccccgagccccctagggtggcgtggcttcattgccgcagaaggtggaggcgggggtggagtgtgtggagagaacgtcttctctttgagcagatgatcaggacaggaagaggctgtgaggggaagacgaaataccgggggatgggggggttgtctttcttcatttttggtccccaggaaggatggcaggggtggaagcagatggaaaactatatgcgggcgaggcctgagcccaggcagaaagggacctctgacttggcaagggttcaggagggcctgagccttctggtcttgctgggccactgcaccacattgggggcgccaggcccggtcaggtggcgccacaggctgcgagcccgctcacgtgcgaactgcctgttttctcagcggatgctgcatcgcggcgcccttctccacccccttttctcctctacttccgcgaaaaggattgcagactgccttggaaagggcggtcgtgcccagtgccactttcccggtagggctgaggagggacttctgtagttccaattccagggaaa

SEQ ID NO: 49785 - DNA, 32 bp, Homo sapiens
  chr12:59991052-59991084
  hyper
agacatagaagaggaaacgaggagtggtttct

SEQ ID NO: 49786 - DNA, 301 bp, Homo sapiens; identical to SEQ ID NO: 8873
  chr12:62584711-62585012
  hyper

SEQ ID NO: 49787 - DNA, 1483 bp, Homo sapiens; identical to SEQ ID NO: 8874
  chr12:62585030-62586513
  hyper

SEQ ID NO: 49788 - DNA, 30 bp, Homo sapiens
  chr12:62665265-62665295
  hyper
aatacttttaaaaagcgaagttgattgtaa

SEQ ID NO: 49789 - DNA, 566 bp, Homo sapiens
  chr12:62829159-62829725
  hyper
gtctgcatccctaagcgaactgctgcgatcctaagcgcggggagctcccccacccagaggtacccaggcggtgcttgggcggtagtttggagaccctgagagggcaatgcaccagacaggaaactcgccctgggtctctcaccacaccccacctgagctgcggcaggtgccattgcaggagtgcagccaccacgggactgcaccctgccctgggaaccacagcccccgtatctccacatcccaggatctcctgctgacattccccagtgtccactggacagctgcaatggtacagcgctggctggacccaaaaggtgctgcaggggctccagtactctagcccacagggagtacgactccctaaggaaaggacgaaaggctgcagctgctgcaaaagaaaccagagcaagttttccagagcccgaagcttcctttcctggggctgtgagaagtcactctgcccccagcggcagcacaaactctgctccgctttgtaagagaagagagaagtccccatccagaggccgagcagcatctgcaccttgtgctaacgctgtagagagtga

SEQ ID NO: 49790 - DNA, 257 bp, Homo sapiens
  chr12:62860157-62860414
  hyper
aagtgcaccagttgcgtttaaagaaaaaaaatgtatattaacaggaggtagccactgatttggggccactagtccagagattcgaaatgaagcgggaggagacacgttaagattaatctacagggaaacaaattatttacaccgaaatacaatttaacacaaacatacgcaaagagatatgccaaggagtactcgggggctctgttcaggcacttgttaatgaaaacgaagcgaatcttgacgccttaaaccctgtc

SEQ ID NO: 49791 - DNA, 871 bp, Homo sapiens
  chr12:63025567-63026438
  hyper
ccataaattagggggcctggccgccgtccctcccaaggacaccgcagactgagattattctgtcggccgcactcggcccccaaggagtagcactgcgagggtggagggtcctccagcgcgggggcgggggtgtaggccccgagtgatttcctgccacagtgccggagcgggactggcgctgcctcccgggtccaggttccagccgctcccagctgttggcggcgctgctgagatgatggcctggatcccccaggttccgggactccccaggtggctccccgaggctatttacagctgaggttcggccggtgattgctgggacggaaaactcatttctcagcctggcttttatttacactcttattaaggaggctttcattcgtgttggaatggcagcgagaggctgcgggccaggcggccgaatgggtcgtgcccgagcgacagcggccgcctgcgccgcgaccttgagggcagaggagcgtgggcggcgtgcggggacaaaggcgcgcggggagcctgggtcacggctctgcagcagacacgggacctccacgtttctaccaccccggaaagttgagcgccttgggggctgcatttctccctttattggtagctggttcggctcgcccctttgcccgaccacacgctctttgtaaatacagaataggacaaaacggaaagagtgatgtgctgtcccctccgtctaaaaccctaagtaaatacccagtcctcccccagactcttctccacctgtggttcaggtgtctgggaagaaggccctgcacgcccgtccgcgcctcccctgcccgggggagccccgggtaggcagtggccaaagactctgtagaacaactcccgggagggcaggctc

SEQ ID NO: 49792 - DNA, 30 bp, Homo sapiens; identical to SEQ ID NO: 8877
  chr12:63138854-63138884
  hyper

SEQ ID NO: 49793 - DNA, 1611 bp, Homo sapiens
  chr12:63327111-63328722
  hyper
ggtcgggaaccaagcctgccccggggtatccgggccaccagaacagggtcagcatcaaggcgcccaggcattggaagagctgattggttcccggacgaaccaatcaaccagcgaggccgtgcacggataggggagggccaaaactaccgaggggatggggttaaaggaaaaggcgcaggtgtgccagccaccaggttttgcgtgcacttttgcactccctggttcattaataaccttgaattctattctaaatgtctcctagttttcccgtttcgtacagctgaggtagtagatagaagggaaaacgttacttatcttaccattcataagatggttattaatagtcagtggaaaagtggccatggagctgggggaagggcaataaaatcctccacctctcctttcccgattccactctgggtcgtcaacctaactcagtcggttcctgaaatagctgatcagtcaaacgcaagcttaatcaccaaagcggattaccaaaatgttatattagacagttggaataagtttccccctccccaagggctgagggaaatagtactggcatttaccgaaagcgcagcattttactacctgctaaaggagaagcggaggaactcgcgggctgaaagtgagagaaactgagaccttcggaaatgtacaaccacgcactcggacacggccacctcccggaatcggacacaagctcccaggcgcagtgacatctcctccaagcctccacccccataaactcttcatcacgcgggggcgtcaactatattttgggagggtgggggtacagatagcagattttccttatgtgtttcaaacttcagagcttttctgcccgttttttttccccaagtgacagagaccccggattcacagacctgtctcaccttagctttcccacgctccagcgctgccacccacccctccaccacccataccggggctggagacgccgcgtccttgggctgggggaagagggagtggggagaagagggaaatggccagtgtaagtaaagagctccccgccgaggcctggacgccggcagctagtgagagccctgaggccgagaagcagggagagaagagggctggaaccgtgcggggaagggccgcgaggagagcaggggcgccgccggtgtcgctgcactcactctgcgtagccagtggcccagggcagccgccgagtctccttgaggatgaggatggggcgggcgatgtggtcggcgctgcactccacctcgtcctgagacagccccaggaactctggccgcccgtaggggaaacgcaggggcaggtccgagcctccgcagctgccgccgccgtgctcggagcctgagctgccagccatgatgccgcccatgaaattggccacggcagatttcactcgagtgagcatattactccggcgcccggctgcagcggtgcgagcaggaggcggcgggggccgggcaaggcgcagcgcggggcatgcaggctgcggtgggcgccgggcgcacggcgagtcgggccactgggacgcgccgcgcgcggctcccagagcctagtgctgcagggggccgagccccggcctctcgtgcttagtgccgcggtggccgccgcctc

SEQ ID NO: 49794 - DNA, 215 bp, Homo sapiens
  chr12:63328940-63329155
  hyper
ctgcaagggctcaggctgctgcggtggccgttgctcagcccctcccctgccggcccaagcgagactcgcaccgggatcgtgacctcctgggggagggggagaccggctgagtcggtacctggcggaggggatgggggcgctgtgagctggaggcggtacaggtgttagcggctgtcacgtggagccgggcagccgggaaaaggattgaagaatcc

SEQ ID NO: 49795 - DNA, 648 bp, Homo sapiens
  chr12:63543753-63544401
  hyper
cggatcttggcccgggaaatggacttcacgctgctgacacagggtgcgagcaggaaccccttttggaaggccacacccgcttgctctgcacccttgctctggcgcgacgccgtcttcccgcggacgttgcaccagatgttgtagcagatgaagccgtagcaggtacccaagatgaccacgggcgccacaaagatgccgcccgtcatccaggtcacgtaggcacgagaaccccagggctggatgaaggtggcccagcagtcgcgggccttggtgacattgttcacctcgatcatggagaagacgaagtactgcggcgtgctcagcacgaagctcagcacccaggcggccgcgatcatgaggcgcgagcggcgcgcgggctgttgcagagtcttgagcgggtggcacaccgcgatgtagcggtcggctgtcatgactaccagcatgtaggccgacgcaaacatgccgaacacctgcaggtgcttcaccacgcggcacagccagtcggggccgcggaagcggtaggtgatgtcccagcacatttgcggcagcacctggaagaatgccacggccaggtcggccaggctgaggtgtcggatgaagaggtgcatgcgggacgtcttgcgcggcgtccggtgcagagccagcagt

SEQ ID NO: 49796 - DNA, 101 bp, Homo sapiens
  chr12:63544498-63544599
  hyper
cgttgccctccccgagggcttcggcctcccggcttgtgttgccagcgccggtggccagaggccaccatgggctggagttgcccgagggccccgcgtcggga

SEQ ID NO: 49797 - DNA, 1307 bp, Homo sapiens
  chr12:63544728-63546035
  hyper
cgctcgcagcttgccgggctctgcgatccctccagtgggcgtctcccggagcagcgtcccgcctgcccactgagcagctctcagcagggtgagctggcccctctccctgctctgccttttttcaacttcggcgaggtcgggaaggtgagctccgagcttccggaagcactgggttcccaactcaagtatttatgcggtgcttgtttccttgggacgcgctccctcccgccctattgccggaagactgctggttgcctactccccgctccctggagttttattttttcctctccctacgtcggtgtttgtcctctgcatcactgtggagggggtggagctgggagactcgcagattcctcctcacagtaggtgggatcgtggcgctttcccgcttttcccttccaaaaacttggacaactggacgagtcatgccttttctgggctcgtagccgtttccacaagcttccctcactagccttcctcgctagcctccttaaccatgcatttgacttcaacaggcacgctaagcgcggtacctggaaacctccagtccacgcaccggcgtccacgcatctagctcctgcacctgaacctggctctcgacctcacctcctccagtccgggtttcttccttctcaccgagctcacccgtgcagcagtctggcaaattttattccccaggcaaattttcccggggcaaacatttctccccgctcgtgacttaaagagctatctcttcctagtaacgtctttgatgcatgctatttattaccctatgtttgcgacgggaagaacgcactcatcactttgcagccccagtggctgctgtgcctgtattcacagcggggtttggggggagtgtctcctggttttctctatggagactagggacttaaggagttttctctagattcctggggttttctgcgggaaaagcctgattcccacagcggggatggcggaaatttggccgcagtggtccgtggggaccgtctggttactactgagtcgtggggacatctttttgggtggacaaagagcagctgccggacagcggccatccaggcagtgctgtccagggcaagggacagaaaacccgcccggctcctgtgctcaggagtaagaaagaggcaatctcaaagagaggaaagaggccctgggaaggaggggaaacaaccacctacctagtaatccgttactctgaacagctggagcccctctgcagggcgggagggaggcagaaatgcgatctccctcagctctgttttaacgttggtgaagatatgcctcgacggacagcaaggggg

SEQ ID NO: 49798 - DNA, 1250 bp, Homo sapiens
  chr12:64061815-64063065
  hyper
gctctcctgccctctcctcaccgatgccgagagtggttctgctggagaaccgccgcgcctgcagttcctgcaccttttcccggagctgcgccagggaattacggacgaactggaaggggccgagaagaaaggtcttggccaccacctctagctccaagccttttcgctctttcagactttggatcctccccggggaggacctccaggagccccttggcagtttcccgccgcctagggccgacttttccatctcctcctctacctccggctcccgggcgagggaggccccgcgccgccccttagactggctgcggccggaagattgcagccgctttgagcttactccttgttttctcataatcaaggagtatggtggagctgggtcaatttcaggcacagcccagccgagtcaggcgaggtccagagagacctgactcgcctggcagcctcaacggacttgtccccgcagccgttgcggacctcccggtcgtcatggcgactgtgaaatgtggggtggggcgcatgcgttggaagccattcgcgcgggcagtccctgagtgtcccctcacgtgctccccagcgcgagcagcacccccgcctctgcgcttcccagagcgtgcagcttccggtgagggcagccccacgcacagccccccacaccctccccagcgcctgcagcctccggtgcgcgcaggccccaagcccacatgcgcagtcctcaccttgcgcgcagccccatgtacagccccggacgggctcccagccccactggcgcagaacccatcaccgcttgcccttcacgcgcttcattgggagtgcagcccccaccccgagcgcgcagctccacgcagcctctccacactctccccagcgcctgcagcacccccagtgcgcacagctctgccagtcgcttccccgggcgccgcccctgcaccacttcggcccataaccttgcggcgactgtctgaagaacttcccgtggtttcattcttttcttcgggtttagtcttagctgtgacattttaaccaaaagattacacgttaattaacgaggtattaaagggaaagatctcagctgaaagaaatgactgtaggaagtgtgtcagggaagccaacggaaccgccggcccgccggcggtgcgcccggcattaggaacgtctctactcccctacgatcgctgaggtatcggacagtcagtgcccgttgccaacgcagagggaacgggccgagactgcgggcaacaagtggc

SEQ ID NO: 49799 - DNA, 30 bp, Homo sapiens
  chr12:64173434-64173464
  hyper
gttcccactcagcccggcgtctggaagcag

SEQ ID NO: 49800 - DNA, 330 bp, Homo sapiens; identical to SEQ ID NO: 8882
  chr12:64237614-64237944
  hyper

SEQ ID NO: 49801 - DNA, 111 bp, Homo sapiens; identical to SEQ ID NO: 8883
  chr12:64238194-64238305
  hyper

SEQ ID NO: 49802 - DNA, 30 bp, Homo sapiens; identical to SEQ ID NO: 8884
  chr12:64238523-64238553
  hyper

SEQ ID NO: 49803 - DNA, 314 bp, Homo sapiens
  chr12:64782994-64783308
  hyper
aattggagaggagaccgtgcttccagtctgttgctggtttacaaggtaaatctattcctggacgaaaggggtacaggaacagcacccgaaaaccggcgacaggctgtggcaggcccgacgtctttcaagcccagctcctagcgtcgacgcccctccttccaagacgtttcccagcaggccctgcgcccagtttggatcaagtgagccgcctgagattgccaagcgtcctgtgcgcatctcattaacgcatctgcttattcatgcatttattcttttgctggggagggggtggaggggaacggtgtctcactcat

SEQ ID NO: 49804 - DNA, 27 bp, Homo sapiens
  chr12:64783543-64783570
  hyper
aaggattataggcgtgatccacggcac

SEQ ID NO: 49805 - DNA, 45 bp, Homo sapiens
  chr12:64784468-64784513
  hyper
gcggggacccgggccgcaactgcaggaatcgacgctaggtcggct

SEQ ID NO: 49806 - DNA, 30 bp, Homo sapiens
  chr12:64798724-64798754
  hyper
accccctggctgggcggaccgggtgggggt

SEQ ID NO: 49807 - DNA, 112 bp, Homo sapiens; identical to SEQ ID NO: 8885
  chr12:64799098-64799210
  hyper

SEQ ID NO: 49808 - DNA, 396 bp, Homo sapiens; identical to SEQ ID NO: 8886
  chr12:64845174-64845570
  hyper

SEQ ID NO: 49809 - DNA, 30 bp, Homo sapiens; identical to SEQ ID NO: 8887
  chr12:64845921-64845951
  hyper

SEQ ID NO: 49810 - DNA, 30 bp, Homo sapiens
  chr12:64846195-64846225
  hyper
gccggtggaatggtcgcgcgggccctgtta

SEQ ID NO: 49811 - DNA, 59 bp, Homo sapiens; identical to SEQ ID NO: 8888
  chr12:65002988-65003047
  hyper

SEQ ID NO: 49812 - DNA, 30 bp, Homo sapiens
  chr12:65153388-65153418
  hyper
aaccgggaaaagggcggagaaccgggaaaa

SEQ ID NO: 49813 - DNA, 72 bp, Homo sapiens
  chr12:65174375-65174447
  hyper
gtggcagtctccttctcgcccggtccggagcggaggggagcggctcaggtgccggctcgggggaggcccggg

SEQ ID NO: 49814 - DNA, 30 bp, Homo sapiens
  chr12:65175281-65175311
  hyper
gtgggcagtttccccgctcttccctcctcc

SEQ ID NO: 49815 - DNA, 231 bp, Homo sapiens; identical to SEQ ID NO: 8890
  chr12:65218319-65218550
  hyper

SEQ ID NO: 49816 - DNA, 627 bp, Homo sapiens; identical to SEQ ID NO: 8891
  chr12:65218900-65219527
  hyper

SEQ ID NO: 49817 - DNA, 186 bp, Homo sapiens; identical to SEQ ID NO: 8892
  chr12:65219605-65219791
  hyper

SEQ ID NO: 49818 - DNA, 363 bp, Homo sapiens
  chr12:65220111-65220474
  hyper
actatgagaaggcaatcggcatgatgcccagcaggtgccccggaaaagtcagaagagcatattggtcagacatacagggaatccttgtagtgtggcaagaataagtcagcgcgggaccgaatttcctggtctttgttatcaagcaaacgtcatgattatacgctcctccattcagcacctcgcgtccggacagcaacctcacttgttttcagcgtgccttaaagcgtgcgctgggctggaaacactcccgtggccgttgttatcaccgttctatgtttgggcaggacttcgtttaaaccacctcagagagaggcggatccatgtggtacttaatattccttcggagaaaaaaaaaacttatct

SEQ ID NO: 49819 - DNA, 342 bp, Homo sapiens
  chr12:65514781-65515123
  hyper
gaggacataggcaggggaaggcgctggaggcgggggccttacctatgagtactcttgcctggtgagcatcgatccataggtacaggctctcctcctgcggcggcccggcctccgcccgcagtgccagcaggcacaggaggatgctccagagccagagcgcggcggcagggaaggcgctcctccgggccatgctgctcaggacctcctcgctgccgggaaaactcctcgtgccgcacctacgcaacctggcgccgtcagatactctgctgcgctgcagctccctcagccagggctgttcccgtttagacggctgggcgcgtcgcctcccggcctgggtgccaa

SEQ ID NO: 49820 - DNA, 57 bp, Homo sapiens
  chr12:65564595-65564652
  hyper
ctaacagtctccctcccagtgcggcggtggccgcctctagttcactcaggatcaatc

SEQ ID NO: 49821 - DNA, 50 bp, Homo sapiens
  chr12:65564722-65564772
  hyper
cgaagaggaacttctccagcaatttaaacgggaggaggtgtccccaacag

SEQ ID NO: 49822 - DNA, 30 bp, Homo sapiens; identical to SEQ ID NO: 8894
  chr12:66122482-66122512
  hyper

SEQ ID NO: 49823 - DNA, 228 bp, Homo sapiens; identical to SEQ ID NO: 8895
  chr12:66122767-66122995
  hyper

SEQ ID NO: 49824 - DNA, 15 bp, Homo sapiens
  chr12:66123380-66123395
  hyper
gggaggtggagcacg

SEQ ID NO: 49825 - DNA, 1036 bp, Homo sapiens
  chr12:66135073-66136109
  hyper
ggtgtccgggaccaccggccttagccttctccaagcccagggcagggcgagaagaacatggcccggttcccctcggggtctctggcccagctgcggagggggaaaggtgatcgatcttgctgggggccaccgctagcccaccgcttcctgccgcgacctgccgcggcggccggagcccgggagcttcccattggctcacgggccgacgccatgcagtctgggggggcgtggccgggcggcggggcgtggccaggcggtgcggggaactgcggagagaggagaggagaggagaggaggggaggggaggggagaggagtggagaggagaggaggggaggggagggcaggggcggggcggggccgggcggcgggggcgcacaccccaatctccctagcgctgtgggggtggctgcagctccccgcgcgctccctcctttgggggggtttctgggctcgtgacttttttttaaataaagaatgagcggatgcccgtgacaagttaatagctctcgccgcgctctaaagttaagttgtatctccttcccgccgcgagtctccttccacagacccgccggagctgccgggacgggcgctgcgcgggactgggcgttaggtgctcccggctggttccggcgagcagcccccacccctcgcccacgctcggggttagagaccccagcaccccacgcagacggcccgggcttagacctctccacgtcgctgtggcgcgcgccccgccaacacccccaccccacgcgcagcccgtgtcttctttacccccgcgcacttaacgcagggcgcacgcacgcatcccggccccctcacactcacactgcgtcttctgtcacaccccctgtcgcacacacactgttctctgactcccaccatctcctgtctcacacccactccagtttcgtgttgagcggccgccagttctccctcggtcgcgccggcgcacgctcgtccccttctgccccggagcccgcccgcgccgcacggtggccccttgcgctggcctgatcgtgggaaccaggcgg

SEQ ID NO: 49826 - DNA, 448 bp, Homo sapiens
  chr12:66216561-66217009
  hyper
gtttttaaatgtgcacgattggcagttaggaaatgtcactgtaatcgttaggtgaaacttcaatccctttgatgaagataccatctttgagccaagccctgacagaaaacctttggttcctgttagacccctccctccccagtcagctgctgggctccatccggagggatggaggctctctctctccattacagctaagcgttcccagacccagcagaaaccctgggttcctgcagagcactcaacgtgcagcaaagtgtcccagctctgcaaagggcagctggaaatggatttaaaatggcaacgcggaccaatcagcgctgccgcgccaaagcagacatttacacgcgcctcctccacatgcacagcggaacctggcggtgcctaactcctgcttagggctgcaaagtaggcgtttttattccacggtggtctgtatctttgaaaa

SEQ ID NO: 49827 - DNA, 1125 bp, Homo sapiens; identical to SEQ ID NO: 8899
  chr12:66217365-66218490
  hyper

SEQ ID NO: 49828 - DNA, 1750 bp, Homo sapiens
  chr12:66218549-66220299
  hyper
gcagggtggggggaagaggaggaggaattctttccccgcctaacatttcaagggacacaattcactccaagtctcttccctttccaagccgcttccgaagtgctcccggtgcccgcaactcctgatcccaacccgcgagaggagcctctgcgacctcaaagcctctcttccttctccctcgcttccctcctcctcttgctacctccacctccaccgccacctccacctccggcacccacccaccgccgccgccgccaccggcagcgcctcctcctctcctcctcctcctcccctcttctctttttggcagccgctggacgtccggtgttgatggtggcagcggcggcagcctaagcaacagcagccctcgcagcccgccagctcgcgctcgccccgccggcgtccccagccctatcacctcatctcccgaaaggtgctgggcagctccggggcggtcgaggcgaagcggctgcagcggcggtagcggcggcgggaggcaggatgagcgcacgcggtgagggcgcggggcagccgtccacttcagcccagggacaacctgccgccccagcgcctcagaagagaggacgcggccgccccaggaagcagcagcaagtcagtacgagggcgcggtgggggcaccagcccaccccgtccccactgccggggcccagacacgcgcggggcggccggagtgcgggagcccagtcgccgcggccgtcgcacactgcccgccggccggccggggggagcggcgcagaccccacgagtgcgccgcgcggccccggggcgccagcaaccctccgggcggggaggtggggagccgcggcgggcggcccggggaaggcgggaggtggggtcgggcgaagcgcgtcctcggactttcgctattgtgcacggccccgagtggcgcggtgtcgcccagtgactggaagcgaccgggatccgacaaacccgggctcgcaggcgctttccgagttgcttttgcaactgcccgggaggaaggaggtgccggggacccgggcgcttcggccgatctgggctgaaggggctagagtcttgggggccggaggctctttctcccgcctcccggggctgctcgcgggtcgggggctggcgcgccgcagccgcccccttggcgccctcctccaagctctcggtggcccaagactcgcgccctcccgacaaagaacgcatggagacccggctgcctggtcctttttgggctctttaaatatgcggcggccgccggagggagcccggggcaggggctacggggagcctggttccccgcaggacggggttaactcgcccagctaagggcgcgttgaaaggagtgtccaagagagtgcagggtagccagggtcgcttccttgtcaggggcccggtcccccttttgcccctggatctcgcgcctcagagctgcagccattaaatgctcttctccaaggccagtggccgggggttgagtaggggacgatcgaggggcgcccgggaccctgcggagtggagggttttgtctgcggatgcaaccaattaagcgtgcagccggcgcttgcagagctgcgctcagcgcgcagggctgggggttttgttcgctgtaatttccaagccgcggcgggcagagttggagcgggatatgtctattgagaacatttaaactccactttctcgggctttaaaacttgctctctgcttagtcttaaatcgcttccttcatggcaaacacgccgattagaaaataatcctagag

SEQ ID NO: 49829 - DNA, 101 bp, Homo sapiens; identical to SEQ ID NO: 8902
  chr12:66300831-66300932
  hyper

SEQ ID NO: 49830 - DNA, 239 bp, Homo sapiens
  chr12:66563704-66563943
  hyper
agggtaccgggggtcggggtcagccatgatggcaacagcacccctaccggtcccggtccactaaccgcaaccgcctcctccccacttccgcgaggaagagcccagccccagcaagccgtgcggcgtcggcgggcgaacaccgagcgagtcgattttctcgcttcaaaaattccagctgggcggagaaagcggggatggctccgagttagaatggaagagaaaacggtttacattcccgg

SEQ ID NO: 49831 - DNA, 607 bp, Homo sapiens
  chr12:66582758-66583365
  hyper
agctctgggctttctccagttcgcactctgcttgtctcggcagctccgtccccaccgcagaggtgtgaaggggcgcaaagccagcgaagggagaacccgggtcgggtaacccccaggcctggccaggcggacgcaggggcatctcgggcgaggcgcgccttgcgtcacgtgggcaccgcccctgcagtgaccggagaacggcgtgttcctagggctctgctgccgtcgtggaagcaggatttccgcggttgtgtaacggcctgtcgcaggcgtgcagggacctggactccgcctcgtccccggggctcgggcagccgagccatggcggggaactgtggggcccgcggcgcgctgtcggcgcacacgctgctgttcgacctgccgcccgcgctgctcggagagctctgcgctgttctggacagctgcgacggcgcgctgggctggcgcggcctgggtgagtcggcggggaccggccgggggcggcgggggagcccagcgcgccgcggggcccgctcggcgtcgccctgcatggctggggtccctcgcggggctggcgcggcctccgggaagttcccgccagggagccggccccctcctttcctgggtt

SEQ ID NO: 49832 - DNA, 342 bp, Homo sapiens; identical to SEQ ID NO: 8904
  chr12:66629082-66629424
  hyper

SEQ ID NO: 49833 - DNA, 35 bp, Homo sapiens
  chr12:68617123-68617158
  hyper
caacaaccaaccagagcggcgccacactgtcccac

SEQ ID NO: 49834 - DNA, 30 bp, Homo sapiens; identical to SEQ ID NO: 8906
  chr12:68726213-68726243
  hyper

SEQ ID NO: 49835 - DNA, 30 bp, Homo sapiens
  chr12:68726459-68726489
  hyper
ccagccgccagcctcgctggcccaggtgct

SEQ ID NO: 49836 - DNA, 498 bp, Homo sapiens; identical to SEQ ID NO: 8907
  chr12:68758755-68759253
  hyper

SEQ ID NO: 49837 - DNA, 30 bp, Homo sapiens; identical to SEQ ID NO: 8908
  chr12:68933051-68933081
  hyper

SEQ ID NO: 49838 - DNA, 30 bp, Homo sapiens
  chr12:69004852-69004882
  hyper
ggaagccgcggcggcggccgcgcggggccg

SEQ ID NO: 49839 - DNA, 30 bp, Homo sapiens
  chr12:69005089-69005119
  hyper
tgtctgaaatatggcggaggaagtgagagc

SEQ ID NO: 49840 - DNA, 30 bp, Homo sapiens; identical to SEQ ID NO: 8909
  chr12:69005423-69005453
  hyper

SEQ ID NO: 49841 - DNA, 30 bp, Homo sapiens
  chr12:69080620-69080650
  hyper
ttggcaaacttttgcgcctgcgcccaccgg

SEQ ID NO: 49842 - DNA, 30 bp, Homo sapiens
  chr12:69080878-69080908
  hyper
cccgaagtcttgcccgtctcgcctgttggc

SEQ ID NO: 49843 - DNA, 30 bp, Homo sapiens
  chr12:69139773-69139803
  hyper
gtgaccaagggggtcggggacccagaggat

SEQ ID NO: 49844 - DNA, 30 bp, Homo sapiens; identical to SEQ ID NO: 8910
  chr12:69201648-69201678
  hyper

SEQ ID NO: 49845 - DNA, 40 bp, Homo sapiens
  chr12:69241506-69241546
  hyper
acaggcgtgagccaccgcgcccagccgtatctcctttcaa

SEQ ID NO: 49846 - DNA, 699 bp, Homo sapiens
  chr12:69326684-69327383
  hyper
tacgtctcggtactccggtctcagggtctcccgacactgacgctccctgcctcctaaggaggcaaaagctggaagcaacaccttcgggagtgagccgtgcaaccagagaccgggagcacgggcagcctcggtgccctcgacccagccgcccgcgcctccctctcctcctcctcctggcgcctccgccgtccggcagctgccacagctgcgcccggccccgcgcacccccagcctcaccaggtcccaggcgcgcacctctacccacccgcggccgcccggcggggccgggtgttatagcccggtcagagggcgggcgcgcccgggccccgcccccggacgtccctccggcccactccggagccgcgcgggtgcctcccgggcggggcctcagccgccttcgcacctaggagagacggcgcccgcgcggtgcgccctttcgtggcgcggctgctggtgcccgcggccgggcggctgagctgggcggagggctgcgggcatggagtcgccgctcgcggacagtctttgctggagccccaggtcagaagtgtgtcctcgcctcggccacggctgtagcctgggcagccacagggcgctccaccgagggacactctctgtcgcagactgcagccgcttgggagacgtttagggctcggcgggtttcctgcggttggcggtgccggggcccacctggagccggga

SEQ ID NO: 49847 - DNA, 30 bp, Homo sapiens
  chr12:69864062-69864092
  hyper
ggcgagagaggccccgccccgccctggagg

SEQ ID NO: 49848 - DNA, 30 bp, Homo sapiens
  chr12:69979607-69979637
  hyper
cctccttctaggggcggagcctggagcgac

SEQ ID NO: 49849 - DNA, 30 bp, Homo sapiens
  chr12:70133406-70133436
  hyper
aaattccgggcaggcgcccggagtcgcgcc

SEQ ID NO: 49850 - DNA, 30 bp, Homo sapiens
  chr12:70636633-70636663
  hyper
gtccctgaagtacgcgcacaagctccggag

SEQ ID NO: 49851 - DNA, 200 bp, Homo sapiens
  chr12:70637716-70637916
  hyper
gagcccgctttagacggctctgccgccttcccggcagctggtgctgtctgtggcttcttaccttctctcaatacacgtatatcatctgccagttatgtgtatttctgttagtgtgtttgcaagtgtcagatgggagacactggactggctaacgggtgtcaggatcctgcaggccctgggataccgaaggctgtgcatgg

SEQ ID NO: 49852 - DNA, 9 bp, Homo sapiens
  chr12:70759855-70759864
  hyper
tctttcatc

SEQ ID NO: 49853 - DNA, 597 bp, Homo sapiens
  chr12:70760475-70761072
  hyper
gggcggggggagcacgccagccgccgagagtggggggcgatggcgaagctccgggtggcttacgagtacacggaagccgaggacaagagcatccggctcggcttgtttctcatcatctccggcgtcgtgtcgctcttcatcttcggcttctgctggctgagtcccgcgctgcaggatctgcaagccacggaggccaattgcacggtgctgtcggtgcagcagatcggcgaggtgttcgagtgcaccttcacctgtggcgccgactgcaggggcacctcgcagtacccctgcgtccaggtctacgtgaacaactctgagtccaactctagggcgctgctgcacagcgacgagcaccagctcctgaccaaccccaaggtaagaacgccccgcgcacccaggggctccccgcgagggaggtttggaggcagcgtcggtgttagactccgcgcggggagggttcggcgtgtgctcgcattgctaggaggagaccaggtggcgcaggctgtgctcaaaccaggaatgactacatcagggagccccagggctccggtcttttcaggtgggtttacgcgcggcgaccagtggtgcccagaggct

SEQ ID NO: 49854 - DNA, 588 bp, Homo sapiens; identical to SEQ ID NO: 8914
  chr12:71003554-71004142
  hyper

SEQ ID NO: 49855 - DNA, 327 bp, Homo sapiens
  chr12:71314300-71314627
  hyper
cagtcagtctgtggcgccgacagaaaccagcaccagcttcaacctccctaagagagggagagaggaagagcagtaggaggttgcgggtaaggggaacagaagcgctcagaggcggcaaatgcctggccttctggacgcccagaagccaaggcggagacggcagggtggactccgcgccagcccagcagcccagcagcagcgccgcggctactgagcatgcccagcgccggccctcacgaggcaagggaatttcaaagtgaaattccgcttctccgggtcttagcggcggcttggagcagagtaggctccatcgctggggtggtggtt

SEQ ID NO: 49856 - DNA, 2095 bp, Homo sapiens
  chr12:71833002-71835097
  hyper
ttttagggcaaaagcgagccagacagtgcggcagacgtaaggatcaaaaaggccacctatcattcgccggggacgcctgcctccttaccctgataacgtaactatttctctgcataggattttagtttttgtgtttttgttttgttttattctgtttaatcacttcaagtatctcatccattatttgaagcgggctcggaggaaacgtgccgcatcctccagtccttgtgcgtctgtttaggtctctccgaagcaggtccctctcgactcttagatctgggtctccagcacgcatgaaggggtaagggtgggggggtcccctattccggcgcgcggcgttgagcactgaatcttccaggcggaggctcagtgggagcgccgagaactcgccagtaccgcgcgctgcctgctgcctgctgcctcccagcccaggacttgggaaaggagggaggggacaagtggagggaaagtggggccgggcggggggtgcctgggaagccaggctgcgctgacgtcactgggcgcgcaattcgggctggagcgctttaaaaaacgagcgtgcaagcagagatgctgctccacaccgctcaggccgcgagcagcagcaaggcgcaccgccactgtcgccgctgcagccagggctgctccgaaggccggcgtggcggcaaccggcacctctgtccccgccgcgcttctcctcgccgcccacgccgtggggtcaggaacgcggcgtctggcgctgcagacgcccgctgagttgcagaagcccacggagcggcgcccggcgcgccacggcccgtagcagtccggtgctgctctccgcccgcgtccggctcgtggccccctacttcgggcaccatggacacctcccggctcggtgtgctcctgtccttgcctgtgctgctgcagctggcgaccgggggcagctctcccaggtctggtgtgttgctgaggggctgccccacacactgtcattgcgagcccgacggcaggatgttgctcagggtggactgctccgacctggggctctcggagctgccttccaacctcagcgtcttcacctcctacctgtaagtacttccccacgtcactccgggagagagactaagaggggaaggaaggttcgtccaaggcgaggctggaggctcctcggcgcccgcctgctcgtgggggaggggggcgagtttgtcaagggcatcctggccaggcctgttagggcccccagagaaatgcacgtgtctcggggagtagcgtgccggcactttctggacccgcagagaaatggcttcgagtgcaacccgggaaagcgctgctgcgccgcagcttcccagtccagcgctagaaacatcgcagggcgaattcctgcaaatgcaggcatttgcgtgcggagtggacatttgtgacccagagcctggtacccaaaggcaggctgccatctggtccccgccccaaccgcctctctgcgtctagtcgcattccacgaaaagatggtctgtagaaagtttccccaaaggagaaacaacttgcccagctccaaagggtttttagtctgcatcccttgcactgtgacgtgatgtaacctttttggggttttttcctcttttcctcccttccttcctcccttcttccttccttccctccctcctttctttttattttctttcttttttaacggcgtgattaaaatgtggcaaccacaaaccccgattagagctgccagaacgttatctttacctttggctgcccgcgccgccctttgaagtgcccgcggccgctgtgtaatctttaaccatctcttcccccggggaggaaaggggaagtgggctgaaggctgttgggctggtaaacagcggcaccgacacccaaagggagacctgaagctctctatcatccctgggggattctcccaccccttctctccccactgcaacttccaaagccctgaggcggcggctcattgcgtaattttttctgtggaaaacccaggcccgaaggtaacaggtagttgggtgaacgcggtgacccaggaggaaccctattctcggagaccaaggcgactactctctccacccccgtgcaaagcatctggggcttc

SEQ ID NO: 49857 - DNA, 30 bp, Homo sapiens
  chr12:72057675-72057705
  hyper
cacttcctgcgacacgcaggaaacaaaggc

SEQ ID NO: 49858 - DNA, 30 bp, Homo sapiens; identical to SEQ ID NO: 8918
  chr12:72080236-72080266
  hyper

SEQ ID NO: 49859 - DNA, 167 bp, Homo sapiens
  chr12:72234298-72234465
  hyper
acgtgcggagatttcgtcgaatagtgcctattcgcgttccgagggcacatcttatgcatagttagggctatcagctttatgatatgccaccgatagtatttcccagtgcaggagtatttcataaacagctggaatcaactgaagtgactcatcgaacactaatggtt

SEQ ID NO: 49860 - DNA, 249 bp, Homo sapiens
  chr12:72332524-72332773
  hyper
ctgactgtggccatcggcaaccagaaatgagtttctttctaatcagtcttgcatcagtctccagtcattcatataaaggagcccggggatgggaggattcgcattgctcttcagcaccagggttctggacagcgccccaagcaggcagctgatcgcacgccccttcctctcaatctccgccagcgctgctactgcccctctagtaccccctgctgcagagaaagaatattacaccgggatccatgcagc

SEQ ID NO: 49861 - DNA, 765 bp, Homo sapiens; identical to SEQ ID NO: 8920
  chr12:72665266-72666031
  hyper

SEQ ID NO: 49862 - DNA, 465 bp, Homo sapiens; identical to SEQ ID NO: 8921
  chr12:72666342-72666807
  hyper

SEQ ID NO: 49863 - DNA, 961 bp, Homo sapiens
  chr12:72666997-72667958
  hyper
cgctgcactacaatctgatgctcaccgccttcatggagaacttcaccttctccggggaggtcaacgtggagatcgcgtgccggaacgccacccgctacgtagtgctgcacgcttcccgagtggcggtggagaaagtgcagctggccgaggaccgggcgttcggggctgtccctgtagccggttttttcctctacccgcaaacccaggtcttagtggtggtgctgaataggacactggacgcgcagaggaattacaatctgaagattatctacaacgcgctcatcgagaatgagctcctgggcttcttccgcagctcctatgtgctccacggggagagaaggtatggagggaggcggtgccccgcgctgccccaccccggcgcgcggctcgaacctctgggcggcctgcgaccccggggacccagctggcttccaatacccgggaagccaggggtggggggaaggaaacgaaagcggagtagggcagtcagaactccggggtctcccagatgcctcggggtctcgctgccgccaacttcgcaaactgactcaccggtgccaaaagatgaatgctgccccctcctctagtcgggacctctcctcttcctgtcagagttccttagccatcgaaacgcagggctctttttctgaagggtagctgataatctgagcgatgccagagtgacatgaaaagcttgccaagttactgtcgagggaaaatacgtggcgctgaaggccaagacaacagcgcatccaggttagcatgtcagggcaggtcagggacacaccgttctccacccccacccacaacatgcccatcttccctgactattagtctcctgccaggtgcagagcagaggatgggctttggctgcgtcaagtttccccaaacttcaagttgagattcggagtgaaaagagtggtttccagagataggctgagaggaccgggacgggggtgga

SEQ ID NO: 49864 - DNA, 95 bp, Homo sapiens
  chr12:74931680-74931775
  hyper
cgcaacccgggaaacgtcaaaacaaacagaaggacttgggattccggagcagtcgcccctatcgctgctcctgcagttgcggacgccaccgaccc

SEQ ID NO: 49865 - DNA, 121 bp, Homo sapiens
  chr12:75601378-75601499
  hyper
cgtctgcggggcagtgcagcttgccggtgcggtagtaattgagcacataggcgaagacgcccgggtgccggtcgaagaagaactcgcggccgccaccgggatggtcgctggccctgccgcc

SEQ ID NO: 49866 - DNA, 248 bp, Homo sapiens
  chr12:75601695-75601943
  hyper
cggtaggtttcgtgccgggtgcccccgacattgaggatcaccctctcgttgttctcgatcttgcccatctctgtgactcagacatgactagggggaggcaaacacagcgccgagttaaagatcttagccgtcaaagacacaccatgacccccaccaccaacccagagcgagtccagggatgcagagttggcagacaggcacggggcaaagaccctccccgggaggggatcagcgtccagcgctgtccc

SEQ ID NO: 49867 - DNA, 503 bp, Homo sapiens; identical to SEQ ID NO: 8924
  chr12:75602928-75603431
  hyper

SEQ ID NO: 49868 - DNA, 443 bp, Homo sapiens; identical to SEQ ID NO: 8925
  chr12:75728067-75728510
  hyper

SEQ ID NO: 49869 - DNA, 30 bp, Homo sapiens
  chr12:75905531-75905561
  hyper
cacagcttctcctacgtggccaatgaagag

SEQ ID NO: 49870 - DNA, 30 bp, Homo sapiens; identical to SEQ ID NO: 8926
  chr12:76424958-76424988
  hyper

SEQ ID NO: 49871 - DNA, 30 bp, Homo sapiens
  chr12:76953528-76953558
  hyper
atccgccgcgtcgccgcctttctgggcacc

SEQ ID NO: 49872 - DNA, 31 bp, Homo sapiens; identical to SEQ ID NO: 8927
  chr12:76954093-76954124
  hyper

SEQ ID NO: 49873 - DNA, 30 bp, Homo sapiens
  chr12:77272157-77272187
  hyper
ggatgccaggagcccggtacggcggcagga

SEQ ID NO: 49874 - DNA, 43 bp, Homo sapiens; identical to SEQ ID NO: 8928
  chr12:77272815-77272858
  hyper

SEQ ID NO: 49875 - DNA, 30 bp, Homo sapiens
  chr12:77459926-77459956
  hyper
gcgagcagatggcacgccagttagccctgg

SEQ ID NO: 49876 - DNA, 62 bp, Homo sapiens
  chr12:77718708-77718770
  hyper
gcgggctgctaggtggcggcggcgcggggcggggaggcgcggcccggcggaggagggaagaa

SEQ ID NO: 49877 - DNA, 30 bp, Homo sapiens; identical to SEQ ID NO: 8930
  chr12:77719020-77719050
  hyper

SEQ ID NO: 49878 - DNA, 112 bp, Homo sapiens
  chr12:77719311-77719423
  hyper
ggtcctgggagtggcgggttcggatgggctggctgcggtgggccactttgggcatctcggcgtggcctgcgccggggtcacggggagggctgtcagcgccagggcggcggaa

SEQ ID NO: 49879 - DNA, 30 bp, Homo sapiens; identical to SEQ ID NO: 8932
  chr12:77928810-77928840
  hyper

SEQ ID NO: 49880 - DNA, 1397 bp, Homo sapiens
  chr12:79257481-79258878
  hyper
acttccgagcagaacggttcagctgggaagagaggaagcagggagagaatctatgctttagtcgtcactgctctggcaaggggtcgagagagatgggggagggaggtggcaaaaaataaaaatgaaaaaataaaaaagcatctccaacaatgttgcacttgacccaagtgtacaaacttattggtcgctgcaatggaaactcccagtgcactctccacggcctggcagccgccgctgatgggtggagtcgcgctcccggccccacctatgggacggagctgcttctcccgcatctcggctccaccgcacccttcgcgggaagtccccaggcttccagcaaagctcagcttatcccgcccccgcttccaacccggaaccccagaagaacagcatgatgagcctccggcagccaggtgggccacctccccgcggctcagtttgaggacacttgtgcggaaccctttcacatccccaccctacccagctttcacaactccgccgggttaaatggccaaagacaaacttctacctctcctgtccccggtcccagcttttcaaaaacccacagctggcgaacccacacacatcgaaactcctaggtcgctgttgcagtctgggcatgctcagtatcagggtaggttttgattgagagtaaaaaaaaaaaaaaaaaagctttgtattatgctctctttctcctgtgcatactgcttgctgaacagcttgtggggcattcctgagtctacctagaggttttatcagacgcccttgattgtgtctccttgggatctgttcccctcttacttcaccccctcccccaacccgcctccaccccgcttcccaggtccctgtccgctgtggggatggagagacactaacagaactgggatgggcgatgttggctgaacggatccacctattattagtgcgcggggattggctccttggcgcagcgtacccgaggtggagccaatcaggatgctggggctcggagatgatgggcggccgcctcctcactggagggattcctggagaagctgcagtgtggggatgctctagaccgagtactgcccccagtgtctttccacctcctcctgcagcagcggcagcggcagcagcagttagcagcggcaacttgaggctgcaccccgggcaagtccccagggtggtgctcagccgagaggggggcttggcgccccgaaggggtgtgtgtagggtgggggcgaccacgtgggaccagctggtggccctggaaaacctcccacacacccacacccacacaccccttttgtgttgcaggctgcccctccaagagcggaggcagcgagagtacgcgtgtgcctcgcgccggtccacgcggggagagcactggggaccgagacccggcaccacctcccggt

SEQ ID NO: 49881 - DNA, 31 bp, Homo sapiens; identical to SEQ ID NO: 8935
  chr12:80083437-80083468
  hyper

SEQ ID NO: 49882 - DNA, 433 bp, Homo sapiens; identical to SEQ ID NO: 8936
  chr12:80084656-80085089
  hyper

SEQ ID NO: 49883 - DNA, 30 bp, Homo sapiens
  chr12:80328507-80328537
  hyper
gtaattgatgtcggcgccgcggtgcagcag

SEQ ID NO: 49884 - DNA, 1556 bp, Homo sapiens
  chr12:81330304-81331860
  hyper
ccatttccaaatggccgcccagggtcctaaatccggcggctgcggagagggactagagggtgtcctcctctgcagagccgtaggactcgagcgccttcatcactggacgctggagccaggaaggaaacccacacactcagggacaggtataaccccacaggggtgcaccagtgaggccccgatcgcagcggaggactccatccctgagcttgtgagggcgtcctggggaggaagcgaacactttccccgttcaagtcagagagcaggactcactgggtggcaggtcagaagttgaattttaacccgacctgcgctttgtccccgcgccttccgcagcctgggcgccgcggtggcaccgagctgggagaggacacgagaggctggcgcgggagaagccgagagttgctatcgaccgggagctgccggcggcgggagcagacgcgaccctcgccgctttcgatctcgaagccgcggagagccgatctcggctgctggggctcggctccccgcgctctgccttgccctttcggcagagggcagctccctgcctgctgcagccccgccactgtgcgcccggcagcccaggggtgcgcccagcccgccccccgagtggccgccgggactccagcagttggaccgaccctcgccctccggcgcctggacaaacttccttcctcccgggcccctgcgccaagcaagctgacaggcggctccctcgccggtctcctctgggctctggccgggcgagcttgctctctgcccctctccaaccccgagcccctggcgcctatagccgtccccgcgcagcggctccaacaaagccagaggaccggagacgacccggcgaggggctgggagtggcagcggggaccccagagccagaaggaggcgtcccctcggcggggcgagtacagtgggaaggggcagcgggaacgtagcggggagagaaaggggaagaaagtgttctgttctcggcgcgaacgccttcctggctcgtcctcgttccccttctcctcctgcctgagcgcgtcccatgtcccgttgggaattggcaggcggggaagggaggaggggagaggggacgcggtggcctggcgagcgagccgctcccttacctctgtccagggtgagcggctggaccactgtcaatgtcgccatgtctgccgtgggagccgaagtgacgctcggcttcagcatcagcaaccgctcgtagtgagaaaaaaaggaggagattgggggcgggggtggagagggaagacggaaaggagggggaggagggggaaggaaggaaggtggtggtggtggagaagaaagcttgggtgggttggtagccagatggagacgcaactgttccgcggcggcagatcttcagttgcggtgcggagctgagcaggtatccgagagcgactgcatcgccgggctctgggagggaaggctctgccctagaactttgctattccacccccaggagcgctgggtgggtgtagctggcgggttgcttcctttcaactttccactctaataaaatggtcagaatatacgtgtgtgcatgcggg

SEQ ID NO: 49885 - DNA, 318 bp, Homo sapiens; identical to SEQ ID NO: 8938
  chr12:81471296-81471614
  hyper

SEQ ID NO: 49886 - DNA, 403 bp, Homo sapiens
  chr12:81471753-81472156
  hyper
cggcgactctagtgtggcttccaaacttctgggctctgggctcacttcggaatttgcccccgccccctactcccttccctcaggccccaggaagttgcaagagtaccatttgtcgcacactcggggaccgcgggtggccggaggagatgaaaccgtcttggctgcagtgtcgtaaagtcaccagcgccggggggctcggagggcccttgcctgggtcctctccggcccggggagccggtgcggccctcagggctttagtggtcccgggcccgcggggcggtctcgggggccggggatgcagggcactgtcctccggcagtggcagcgagtacaagacccacttcgcagcctcggtgaccgaccccgagaggttctggggcaaagctgccgagcagatcagctg

SEQ ID NO: 49887 - DNA, 511 bp, Homo sapiens
  chr12:82152214-82152725
  hyper
tgatcaatgacaaccgcagtctccggcttgaggagaagggaggctcacacccagcactcctggaccatttccctagcaacgggaggagaaaggcagctcagacacacgcgtgccccggcgccctcccggaacgtgccccggcccggtggcgtggcaggagctcggcatcttcccgtggctccgtcagcagccaaaaggagaagcgtccatcggaaaaatggcatattacaaattttgctttgggaagcaaagctcggttcagaccattgtcaaaggaggagagggggaggcggctcttaaagcagccgcggcccctttgccagaacagccgcagctccccgcgtgcagctggagccccggggcggagaccggagaccggggactgggtttgactttcagaaacttaaccacgcggcgccgctccccctccgcgcccgggccacccggggtgtgtggggcgtccctccaaaagaaagcttggagaaaaggcgtgagaagtatctgggagaga

SEQ ID NO: 49888 - DNA, 199 bp, Homo sapiens; identical to SEQ ID NO: 8941
  chr12:82153055-82153254
  hyper

SEQ ID NO: 49889 - DNA, 196 bp, Homo sapiens; identical to SEQ ID NO: 8942
  chr12:82153283-82153479
  hyper

SEQ ID NO: 49890 - DNA, 125 bp, Homo sapiens
  chr12:83080815-83080940
  hyper
tggcggccggagtccgcccgagcgacaccggagcagtgcgcccgggaggcggcgaggggaggcggttcgccttgtccctcccacccgcgcctctttctctctcttcctccagctggtcccagagc

SEQ ID NO: 49891 - DNA, 232 bp, Homo sapiens; identical to SEQ ID NO: 8944
  chr12:83080990-83081222
  hyper

SEQ ID NO: 49892 - DNA, 1209 bp, Homo sapiens
  chr12:85305072-85306281
  hyper
cttaagtagtgaaccgcaaggatggtgcagactaagattgggtctacctataagatctggaggggaaaacggcaagaccagaagaaaccgtcgcagacttatttgcataagcacccaaacactgcttacgtcactgcgccggagtccggaccccgccccgtcttactccagcctttcccagctagggaggaggatggaaagggaaagcgggacgctggagagcgcgagcctgggggctttgcttcctaaaacgcacatcaaaggctgcttctcagctcaggaaaaataattcccgttcccgcagcctgtgccactgggtgggtcatgcctgttcccgaacgcctcgggcgtcttgattcattcttatgtatccagttggtgcgctacgttagagtgcaaggatttccctgtactcaataccgtcttcttcccagtcacacacagaccagcctagtgaaagaaaggtagaaacgatctgggtttctaactgcttcccatcttcttacagtcccagcagcaccaccctcaccgccacactctcaaattccaggatgcgcagaaacacaggagccgtgatttctccagcagccacgtgcctttcgtacggcgaaaggccccctttcgggccatttatcacaggatacctcaagcaaaggggaactgtggtcacgtgaaaacactctgtcctcggtagtcgccttctgcctttgctaaagcgaacggaagcgaatgaggaataaagctctctgctctccccgccccatcgcccacctgcacgaggtttagcttccaattcacctcgcgtctctctctgccccaaccctcccaactttcctcttggactttcccgtgttggaccccacccttcaaccaaccccgacttggcttggaaacgagtaggtctctggggatgctgtgggcaatttccacgacgggaagaaaggatggcggcacgtttcaacccatgtgcttccccttacatgtgcagcctgtcgccccccaccctgattgtacagagatgcagagttagacggttgcccgcccagcccagcttctccctcccagggcttttgagctgccctccctcctcccaccccaggacgcagcgagtccttcccggcatccatccatcaattcgttcccggtgctggtgcccaggctcctgggtggctaatggcgagccccacctcacccccagttgtgccctta

SEQ ID NO: 49893 - DNA, 236 bp, Homo sapiens; identical to SEQ ID NO: 8947
  chr12:85306322-85306558
  hyper

SEQ ID NO: 49894 - DNA, 174 bp, Homo sapiens; identical to SEQ ID NO: 8948
  chr12:85306789-85306963
  hyper

SEQ ID NO: 49895 - DNA, 220 bp, Homo sapiens
  chr12:85430010-85430230
  hyper
tccctgaaatgctgcgttcgtttcaatttagaatcgagattgtttgtccttctagagcacctgtagggaaaaaccggtgtctcttccttgtgattggctgttgccatggatacgctttgtgtagcggctatgggcgctgtcttacaacaaagccaaggaatctcgctgctgaggggtgagccggggtcttaagactgggattcccgttgagggaggtgaa

SEQ ID NO: 49896 - DNA, 465 bp, Homo sapiens
  chr12:85667266-85667731
  hyper
atagagactcctccacctatgcgcgtttaaccacagagttgttcttgattgtaagggacttcgcccacttggttgaagtggagagccggtcctcattccagacgtcccgcacggcagtcgctcatggctccctccaggccgggagccaggaaggtggtccttcaccgaggtgcgcaccaagcggcggtccacccaggcaatggggtgcaccaatttgcctccaaaaatttgctgcgcacacaacctgttcacagttcctgatcagaaagggctaacgagatgtctgtctacagctgtctctgggcgagggcgcaggctttgggaagtggttcagcgcgatcggggacaccgcttgcagcccttggtcctgcacccctaggaggggtgtcccacaagctcggcttcccttttgcgagccacagagagctttttgttccgaaactctcattacgacagatagtattt

SEQ ID NO: 49897 - DNA, 170 bp, Homo sapiens
  chr12:85668061-85668231
  hyper
tataaaaggtatcaatgggcacggaaggggcacagtaggtggagaacttacgggaggccaatctacttcactccttcgactctctttgattttgtatattggctatactctggtcgggtttgattaatgaccacggacttcacatttacgttgcataattccagtccaaa

SEQ ID NO: 49898 - DNA, 383 bp, Homo sapiens
  chr12:85673211-85673594
  hyper
cccacccatcgccaccgcgtccacactccgccgcattccagagaaaaagaaaaggccacggcctcgtaaagctcccagctggcccggaccccgagctcctcccggttagaagccgaagcggcccctctactacggcggctgcgattaacagttgccaatgcatctggttccttgggcttcggattaatgtgaatcttccacgtaaacgatttacggatgaaataaaagccttttagagcaatatttcctttcaagttcttaagacgcctctaaatctttctggtagtgagtggccggcatgggggcggggtggggacgggtggctcaggaaggcgcaggcagtagggagtggaggtttaactgctttgcgatctcaccaagat

SEQ ID NO: 49899 - DNA, 1149 bp, Homo sapiens
  chr12:85673844-85674993
  hyper
atataaaagcaacttcgggtgctccttttccagccgggacgtattaaagggaccggagcggggcagttcccgacgccgcagcgctcgctttcccttccctcctctctggccctccctcctcccacccactggctccctcccccagcgctctccagtttctgtgccccaggagctacgcgacagtcttccaggattatggagtttctgagcgagaagtttgccctcaagagccctccgagtaaaaacagtgacttttacatgggcgcaggaggtcctctggagcacgttatggagacgctggacaatgagtccttttacagcaaagcgtctgcaggcaaatgcgtgcaggccttcggacccctgccccgcgccgagcatcacgtgcgcttggagaggacctcgccctgtcaggacagcagcggtgagtcgctagcgccccagccggagccgccgcagcccttccgcaatcgaaaatgcaggatcggtctgatcaggcagggagggagaaaggagaaaagtgggagcgagggacctggaaggtggaggaaggtagtggaaggtgctcgctttatgaagcggtgttactgctgctgcagcctttgggggcggagggcggagggagggagagatccagcaccgggttgcctctgagcgattctcctttcgctgtagggtctggtcgcctacggatccctgagtccttctgtaatattggttcctggagtaaactgatagggcgctaaatagagcgtaattgagtcaagacagaacgcttcctctgcgagcccgccttgcagtccgggcggtaggaactgaaatcgatcacagctcgttagagtacgtcactgtcgtcacgagtagggaaaaaaaaaccggaaaacaaaaacaaaaaacaaaaaaccctttgagctcctttaggtaaagataaatctttttaattttccaagacgtggcgatatattttcaaagtttgaggatccctagatttctagcgtgtgtgaatttgtaatttctgcttttttttgcgtttgcaatacaacacgcgttgaatgtttgttaaacactaaagcacactaaatagcttcgggcaaaccatccccggcctaatcactcattcccagattctacgttttgtatttttatgacttc

SEQ ID NO: 49900 - DNA, 30 bp, Homo sapiens; identical to SEQ ID NO: 8954
  chr12:85918797-85918827
  hyper

SEQ ID NO: 49901 - DNA, 34 bp, Homo sapiens
  chr12:88429159-88429193
  hyper
tggggggcggaggacgcacgtgggaacccaccag

SEQ ID NO: 49902 - DNA, 1345 bp, Homo sapiens
  chr12:88973383-88974728
  hyper
aatggaaaaaggtgcgtgcattgtggaggtactagagctctttagagcccacacagagctgcaaactaggcagacaccgccgagagccaagtttcccgggcaggcgggcaggttcccgccccgccgagagctgccgcttaggagttccgcgttggcttcgctcccgcggctgcacccgcgttcgcgccgctcctggtgcccggcgcccacctcggggctacacaaataaatctgagtgagagagctagtgagggtggcgcgtggggtgctgtttcataatctcctggaatccacgggaaaaccgtctcctatgcaaagacatgccttcccgtgataacttaacattccatggcccaaaagccaatctttccaccagacgggaattacggtttccgactgacagctcaaaacttaactgctgaggctccaaacttgacactggctccctctcagcactcccactccttttctccctggctcacccggctcggctcgggatcacacaccacgccggcctcccccgcatcctcttgtctcacccggcaggcacagccctgcacgccccagctgcaagtcccagggagcgccggcttccccggggcaccgggcgcgatttttcctggagagcctgggagctcccgggcgcgccctactcacttgtgtcttcttcataaggaaaggcagcgctgcgatccagcacaaacagtggtgtggcgactccgtttagctgttctggagctccagcatattgcacgaacagcggcggcagatagtccacgcattgggtagcccgagcgcagcgccctctccactgtccctgcttcccgcagcgcttctagtctcggcgcgaggcggcgagcgaagcccggctgctgagccgccggcgcttttatacagttcccgcccgcctgctccggacacgcctccttcccttccggagcccggggtaggcgagaagcaggcaagggcgcggagggaagaatcgggagggcggccagagcacggtaaatgccccagaagtttggcagattaggccaaccttgtccgctcgcctgggggccccggacctgcactggcgggagaccgcgaaggcgcggggacgcagagggcgaagcttggtaccctgcagctactgctcgcgaggagtcccagcttaccctcccggatccgctggggctcacctggcacccccggggacagacgaaatacctcgcgcgccagagagggctcggagctccctctgttatacaaagtcggagagggagaggagtccgggaggttcggagcaaagaattcaccctgcctgccttagagaaataaagtttaattgcgatctgtagttagg

SEQ ID NO: 49903 - DNA, 351 bp, Homo sapiens
  chr12:89744646-89744997
  hyper
ggtcaaggtcagactcgatgtccgaggaagagtcagagctgatccgcaggcccccgagccccagcactggcaacggcggcgagctgctgctacacgagccgtctagattggtctcgcaatgcagggagaactcggcttggaacttactgaagccacctgccagaacgagaaaagcaatcatctaacctgagaagccgtagtagttttcacagcttgtaagaaccgcagcccggcgcaagaaacaccacaagcatcctacgaaccccctacatacagaaccatctataagagaaacacactttaaatgtgcaccatcgggaatggaacgaacgggcccgcctcgccagggaa

SEQ ID NO: 49904 - DNA, 30 bp, Homo sapiens
  chr12:89746243-89746273
  hyper
gcacaccccctgcgcgaggcagctcctcaa

SEQ ID NO: 49905 - DNA, 450 bp, Homo sapiens; identical to SEQ ID NO: 8957
  chr12:89747141-89747591
  hyper

SEQ ID NO: 49906 - DNA, 30 bp, Homo sapiens
  chr12:89919885-89919915
  hyper
ggacgggaggtatgcgccgggtcagctgtg

SEQ ID NO: 49907 - DNA, 386 bp, Homo sapiens; identical to SEQ ID NO: 8958
  chr12:90101373-90101759
  hyper

SEQ ID NO: 49908 - DNA, 48 bp, Homo sapiens
  chr12:91502982-91503030
  hyper
gttagattgcgtacacgtgcgcccccttctgggcgagcccagcctaat

SEQ ID NO: 49909 - DNA, 91 bp, Homo sapiens
  chr12:91775751-91775842
  hyper
cttaaatctcacaaagagaaaacaaatgtatgtgtagtagatagtaggtagtaaagctcccgaaactttgggctttcgtttttgggcacca

SEQ ID NO: 49910 - DNA, 30 bp, Homo sapiens
  chr12:92540469-92540499
  hyper
aaccttactggatgcggacaggagagccag

SEQ ID NO: 49911 - DNA, 256 bp, Homo sapiens
  chr12:93835924-93836180
  hyper
gacttgggacaggccgcgaggggaggcgcggggctctggcgctcgtggccgagcctgcccgcgacggtggtacggcacgacccgcgcgcgactgcgcgcgcgtctctcttaaccgtggccacgcccgcgccggtggacgacgtaacagaggcctggcctacgacgtatcccattcattcattcacgcgttcgttctttcagctcacgcgttcgttctttcagctcagcctgcattgcgcgcgttccctgctggctc

SEQ ID NO: 49912 - DNA, 30 bp, Homo sapiens; identical to SEQ ID NO: 8959
  chr12:93963381-93963411
  hyper

SEQ ID NO: 49913 - DNA, 30 bp, Homo sapiens
  chr12:93964216-93964246
  hyper
cgggacgagcacggcgtccccacgccatcg

SEQ ID NO: 49914 - DNA, 30 bp, Homo sapiens
  chr12:93965713-93965743
  hyper
tgcattttccgcagcgctcgcgaccgcccg

SEQ ID NO: 49915 - DNA, 1186 bp, Homo sapiens; identical to SEQ ID NO: 8960
  chr12:93966029-93967215
  hyper

SEQ ID NO: 49916 - DNA, 65 bp, Homo sapiens
  chr12:93967274-93967339
  hyper
cgagggcggctgcccgggcgtcgagagtaggctgcgaagcccccgccgagcgcggcttccatggt

SEQ ID NO: 49917 - DNA, 529 bp, Homo sapiens; identical to SEQ ID NO: 8961
  chr12:93985155-93985684
  hyper

SEQ ID NO: 49918 - DNA, 30 bp, Homo sapiens
  chr12:94071279-94071309
  hyper
gtcctgcattgtagcgtctgcgacctgggc

SEQ ID NO: 49919 - DNA, 1324 bp, Homo sapiens
  chr12:94542796-94544120
  hyper
cgccactgcccctgctcgcctatctgctggcactggcggctcccggccggggcgcggacgagcccgtgtggcggtcggagcaagccatcggagccatcgcggcgagccaggaggacggcgtgtttgtggcgagcggcagctgcctggaccagctggactacagcctggagcacagcctctcgcgcctgtaccgggaccaagcgggcaactgcacagagccggtctcgctggcgccccccgcgcggccccggcccgggagcagcttcagcaagctgctgctgccctaccgcgagggggcggccggcctcggggggctgctgctcaccggctggaccttcgaccggggcgcctgcgaggtgcggcccctgggcaacctgagccgcaactccctgcgcaacggcaccgaggtggtgtcgtgccacccgcagggctcgacggccggcgtggtgtaccgcgcgggccggaacaaccgctggtacctggcggtggccgccacctacgtgctgcctgagccggagacggcgagccgctgcaaccccgcggcatccgaccacgacacggccatcgcgctcaaggacacggaggggcgcagcctggccacgcaggagctggggcgcctcaagctgtgcgagggcgcgggcagcctgcacttcgtggacgcctttctctggaacggcagcatctacttcccctactacccctacaactacacgagcggcgctgccaccggctggcccagcatggcgcgcatcgcgcagagcaccgaggtgctgttccagggccaggcatccctcgactgcggccacggccaccccgacggccgccgcctgctcctctcctccagcctagtggaggccctggacgtctgggcgggagtgttcagcgcggccgctggagagggccaggagcggcgctcccccaccaccacggcgctctgcctcttcagaatgagtgagatccaggcgcgcgccaagagggtcagctgggacttcaagacggccgagagccactgcgtaagtcctgcccccggggcgccgcggagagcgctgctgccggggagccgccgccgccgccgaggcagaacgagctgggggcgagcggcggggcgggggtacagccgggtgacatttaccaggtctcaggttcacaccgcgggcggccgtccgaaggctcctctcggacggtccccgagacctggagcacggcctgaggtccccaaagggagagtgtaaaaaggggggcggggagggttggagttagactcaaaactctagtggctgcatcccattgccatccttccctgtccaaacggggacgcttgttt

SEQ ID NO: 49920 - DNA, 30 bp, Homo sapiens; identical to SEQ ID NO: 8963
  chr12:94544421-94544451
  hyper

SEQ ID NO: 49921 - DNA, 301 bp, Homo sapiens
  chr12:95266892-95267193
  hyper
ccaggagctgcgcgccgtcggcgggccgtgcctggaggaggctcgcgccttccaaatgccggagtgcaggcatccttcctctccccaaccccagccccggcctcgacctgtcgcccacctggcccggacctggggctggctccgtctctggggtgtgcgccaagggagccccaccgacgcccagcagagctgcccgggctcccaaagaaggaccggggctttgggcagaattctggcagccaggcgggcgtcaggggagccggagaaggggctcgccagcaggcgtggggcggagtgccgg

SEQ ID NO: 49922 - DNA, 433 bp, Homo sapiens
  chr12:95267247-95267680
  hyper
cgaagagtgcgggcccggggtccccgcggcgccccttcccctcctcagtcccccgggggcgaccgcgctccccgccgaggtccgtccccgccgcaccctcactattcccgctgggaggaccccggcgcacgcccccgcccccgcaccccggggcgacggcgcactcaccctccgcatggtgtctgggccgtccgggcggggctcggcgacttgggcgcgagaagggctgggccggcggcgacgctcggccggccgggagctccgcgctgccccctcctgcacacgcctgcgccgcggccgccaagccggcgggggcggggcggggtagcgctggccgcggggtccccggggctctcccgggctgcggcggaggcgcggagccggccaagggcgcactgagctcgcggagctccggggccccggggcctttctg

SEQ ID NO: 49923 - DNA, 93 bp, Homo sapiens
  chr12:95267706-95267799
  hyper
cgggccgcttcgcccctctcctcttcctcgagttctggccccaccaggagcggagcgagtctccgatgcctgccccgcggcccccagaactga

SEQ ID NO: 49924 - DNA, 154 bp, Homo sapiens
  chr12:95397471-95397625
  hyper
ccgcctcccgggtgcgccgagcaaaacccaccggatggaagctgccactcagccgcaggaagcccacgcccagaaggttctcacgcgaacgccagacgtggtggctctgcgcgtgcgcagagctaggtcttgcctacgcggtcatgttctggct

SEQ ID NO: 49925 - DNA, 32 bp, Homo sapiens
  chr12:95467507-95467539
  hyper
ccccgccagagctacgcgttcccagccaggta

SEQ ID NO: 49926 - DNA, 30 bp, Homo sapiens; identical to SEQ ID NO: 8965
  chr12:95610976-95611006
  hyper

SEQ ID NO: 49927 - DNA, 14 bp, Homo sapiens
  chr12:95942964-95942978
  hyper
gcgtggcaaactcc

SEQ ID NO: 49928 - DNA, 30 bp, Homo sapiens
  chr12:96027743-96027773
  hyper
tggggattagatggtaccaaaatgacagtg

SEQ ID NO: 49929 - DNA, 89 bp, Homo sapiens; identical to SEQ ID NO: 8966
  chr12:96183451-96183540
  hyper

SEQ ID NO: 49930 - DNA, 30 bp, Homo sapiens; identical to SEQ ID NO: 8967
  chr12:96184005-96184035
  hyper

SEQ ID NO: 49931 - DNA, 376 bp, Homo sapiens; identical to SEQ ID NO: 8968
  chr12:96184964-96185340
  hyper

SEQ ID NO: 49932 - DNA, 123 bp, Homo sapiens
  chr12:96252230-96252353
  hyper
tcagtgcgtttcgccgcccctagtctagtctggctagcccccaattcctttaaaaggggttaaaacgggtgttgcagaagagagaacactcaggtagaaagggcctgcggcagaggcgccccc

SEQ ID NO: 49933 - DNA, 192 bp, Homo sapiens
  chr12:96252587-96252779
  hyper
cgccgcctgcaaggcgcaaacccaagccgctgctggttgctaggagatactgggccagccatctcctccaatcagcacgcacctctttgcgtccaatcacagaggcaggaagggccgtggtgggaggtgaaaggtcatagtcctgtttggcggccatttctcttgaaactgcggctcgggacctgcggtacc

SEQ ID NO: 49934 - DNA, 30 bp, Homo sapiens; identical to SEQ ID NO: 8970
  chr12:96336231-96336261
  hyper

SEQ ID NO: 49935 - DNA, 91 bp, Homo sapiens
  chr12:96336989-96337080
  hyper
cttgcaatgattaccgcccccgttgctgtggttgggggaggcgagcaaagggcagcggctgcgagcgcccgcccccgccccaccctcccag

SEQ ID NO: 49936 - DNA, 74 bp, Homo sapiens
  chr12:96587651-96587725
  hyper
gtgagccagcacgcccggccgagggctggcttttaaaacaccgaaaacccagacaggaacggtgtccatctcca

SEQ ID NO: 49937 - DNA, 34 bp, Homo sapiens
  chr12:96618051-96618085
  hyper
gattgtggtgatgaccgaccgagccattacatgt

SEQ ID NO: 49938 - DNA, 98 bp, Homo sapiens
  chr12:96794232-96794330
  hyper
tccccggaggagagcgagtgcaagagaaaaaacacttttattgaaacgatccaaccagcggcggcggagaaaagcgaccggccgcgggagcttacccc

SEQ ID NO: 49939 - DNA, 30 bp, Homo sapiens
  chr12:96794596-96794626
  hyper
accaaaccaaaactcgtgcttcagttatac

SEQ ID NO: 49940 - DNA, 584 bp, Homo sapiens
  chr12:96883140-96883724
  hyper
ttttggctctaatattcgccagcgctctgctcagaacattctctgttcgcatttcatacagcggtgccagcgcacaaccaggcaacgccctcaggagcatcattgttttctggacctggttctttctcgctctgccctccaggggccgctgtgtttctcggaatgcgcgcgggatgcccggttgccacgagaccgtcgccaggcaaccgcgtgtacacatactccaggcgggccggggcgcgtcaatatggcggcgcagggctccccctcgagctctccgtcagacgactctaccacctcggggtctctgccagaactgccgccgacctccaccgcgacttcgaggtcgcccccagagtcgaaggggagctcccggagctcgctgcttcagtggacctgccccgaggactcattgcccctagccgtgttttatgggccgctggacgcgaaaaacccgctcctggcctcttgtgagaaggagatccaggagttgttaggctttatgaggaaaaagaaggctttagccaccacggaggaagagaagcacgaattccgccggcgttggtaagcgctggcggggcact

SEQ ID NO: 49941 - DNA, 30 bp, Homo sapiens
  chr12:97301646-97301676
  hyper
atggtcctcttccccgccccgctttaagag

SEQ ID NO: 49942 - DNA, 151 bp, Homo sapiens
  chr12:97379781-97379932
  hyper
ggaaccagaggtagcgggaagccagcaagggcgaggctctttctaggaactctaggtccaccgcttgcctttggggaagagggaggaaggggccttggggcgtgaagttgcctttgggacatcagccagagcctgcgacgcaagcgcggcc

SEQ ID NO: 49943 - DNA, 114 bp, Homo sapiens
  chr12:98897818-98897932
  hyper
aagccccgttctcccgcttccgctggttacgtcccagccttggttagaggactagcagtcaggaaagtttggacgctgaaggaatcggtctcctggtccgacagatactgggtg

SEQ ID NO: 49944 - DNA, 30 bp, Homo sapiens
  chr12:98908924-98908954
  hyper
ctgcagacaagcctcgcttcttttcttccc

SEQ ID NO: 49945 - DNA, 40 bp, Homo sapiens
  chr12:99037821-99037861
  hyper
tgacctcaagtgatccacctgcctcggtctccaaacataa

SEQ ID NO: 49946 - DNA, 30 bp, Homo sapiens
  chr12:99038275-99038305
  hyper
cccaggcagcctcgcgtccacttaccaggc

SEQ ID NO: 49947 - DNA, 30 bp, Homo sapiens
  chr12:99039000-99039030
  hyper
tttgcataagcgggcgcgcgccgtccgggc

SEQ ID NO: 49948 - DNA, 990 bp, Homo sapiens
  chr12:99287417-99288407
  hyper
atcaagcaattccaaagttcccgtgtctctaatctactgatccaacgtgcccggcgcacataagcagcaccgcgactgaatttcaagtcttctcaaactcacacctcagttgctcagagaggagaaatgcagcgaggactcgccttcctggccagtctctgaaaacgcgaaaccttcctgagctgtccatttgttttaggggctgtttataaacggctggttttcttggaggaaaaataaacaaataaatacggggcgatggcagcatcctgataaacacaggaccttgtttggcttttggcaagttgtaacctggagtaaaatcacatccaagttacaagcacgcaaattggaatttcgctggaaacactgacccgaccttcaccgaagcagcaaatcgcagtctctgctgctctgctcctgctctccaaggcttaacattggaaagtccatgcccacgtccccctctaattaatcaatgtagaaagaaatacgagggaagagagagggagcacactccacaccaaccttgccagcttctattcttcctgctattccttaaaggcgatgcacagcgcacctggaaattacgtggacttggcatggctttttaatattaaagacaaacgacctttggaaaatatacactgttaaagtcaaaccatttggagagacacccagcaatttacctcctcaaactcctcggaaccccaagaatgaggaaaggaaatggaaaatgcgcttaacccgggggtggtgggggaatcgataaccagaacaggtttgaaaaaaaaagcccccctcccgccccctccgtagagaccgctagctgaggctgcaacacctgccccggcaaagcgtctccgcagccttcccggcttgcccgactcggcttcctccgcctctgccccggctgcggcaccacttcttggagccacgtctcggcgagcgggggccgcggagcgagggggccgctgtgccgctactcac

SEQ ID NO: 49949 - DNA, 315 bp, Homo sapiens; identical to SEQ ID NO: 8974
  chr12:99288621-99288936
  hyper

SEQ ID NO: 49950 - DNA, 353 bp, Homo sapiens
  chr12:99289161-99289514
  hyper
ggctcggcagcggcagagcagtggcagcagccgccactgccgctgttactgcggtcgccgccgctggagagaggaggacgaggagggcaaggggcagaagcaggtcctgctctgtctgccccagaggccacctcgggtttcttctcactaaccaagcgacttcgtgtttacctcgcaggagacgcctcggcagtcctcaacttgtgtgcgccggtggccctctcctgtgggacttgcgttccagctgttctcagagcgggtatgatcggcctccagtagacttggagggtcacgggtgagattttgataaggttcaaatactcctcactcctgcctccggtttccaccaaagt

SEQ ID NO: 49951 - DNA, 30 bp, Homo sapiens
  chr12:100378180-100378210
  hyper
cctcctcttcggggcgcagcttttacaatg

SEQ ID NO: 49952 - DNA, 30 bp, Homo sapiens; identical to SEQ ID NO: 8976
  chr12:100593408-100593438
  hyper

SEQ ID NO: 49953 - DNA, 30 bp, Homo sapiens; identical to SEQ ID NO: 8977
  chr12:100594371-100594401
  hyper

SEQ ID NO: 49954 - DNA, 30 bp, Homo sapiens
  chr12:100594719-100594749
  hyper
ggacaagatatatacgcctagtggtttcat

SEQ ID NO: 49955 - DNA, 30 bp, Homo sapiens
  chr12:100660801-100660831
  hyper
ggagtcaaaagaaccgccataagctcgcgc

SEQ ID NO: 49956 - DNA, 30 bp, Homo sapiens
  chr12:100661553-100661583
  hyper
cactactctaggaccgggtgagagagttca

SEQ ID NO: 49957 - DNA, 652 bp, Homo sapiens
  chr12:100967340-100967992
  hyper
cgagcgcccacgggtcgcgtgcttcccggcagcccgggggcggggcctcagaccacgcccccgccttatgattggtcccttcgaaacaggcggcggccagcggctactgaccctgaggcccaggcggcggcggcagcggcggcggttggtcaggggcgtgttggccccgcacagattgagccgagttgtcgccccgctgggagaagtgaccctcctgcgcctggtgagtacttccctgtttgtcttctcttttcctggcgaacttttacgcgctgtctcggggcctccgcgcctcagcctgagggctccaggagccccccgctctctgaggccccgaagctgaggtttgttgggtctcccggctgcgggagccagtacgctctgcgtttgcctggctgcggcagtcgcgtgctctgattggctcctggggccgtcaaggtgacgttgcgcctgccttcacctgtccacccaagtgcggagagaggggcgacaggtgtgcggggcggttggggctgctggtgtgggcgagctcagctggggaggagggatccagccgctactcgccctgctttaaatccagagcggtatcagagcccgaaggtactgtgggatcttcaggggcaccctcatccctaagcgcctggcacttaga

SEQ ID NO: 49958 - DNA, 340 bp, Homo sapiens
  chr12:101111364-101111704
  hyper
gaagggaggggcccagggagccgtcgaaacacccggggaaacttcggggttcgcctctgcggaggggtctggaagggagggagacggcggccgtgcgcgccgctcctgaggggccgatgttccgcggggtttcgggccgcgggtaacccgggaaccgggtgtctgcgggaaaaacgcttcaaaatttgggaggatctgggagcttcgggactctagaaacattcccctcgcttccgaccactcaggggaagggacgcgggtgttaagtcctcctctagcggggtgaggcttggagttgggagatgtgcgttcagccagcgcttatcttgtccctgactga

SEQ ID NO: 49959 - DNA, 30 bp, Homo sapiens
  chr12:101673745-101673775
  hyper
ttctaaacctttaccgaagggagtgaaaag

SEQ ID NO: 49960 - DNA, 31 bp, Homo sapiens; identical to SEQ ID NO: 8980
  chr12:101762739-101762770
  hyper

SEQ ID NO: 49961 - DNA, 30 bp, Homo sapiens
  chr12:101801632-101801662
  hyper
ctggatgtagataccgtggaggccagaaga

SEQ ID NO: 49962 - DNA, 30 bp, Homo sapiens; identical to SEQ ID NO: 8981
  chr12:102091039-102091069
  hyper

SEQ ID NO: 49963 - DNA, 30 bp, Homo sapiens
  chr12:102270863-102270893
  hyper
gggagccacatctgcgccccgtgacctggc

SEQ ID NO: 49964 - DNA, 30 bp, Homo sapiens
  chr12:102271173-102271203
  hyper
gtccgcgcccaacccggcctccgccgagtg

SEQ ID NO: 49965 - DNA, 604 bp, Homo sapiens; identical to SEQ ID NO: 8982
  chr12:102455399-102456003
  hyper

SEQ ID NO: 49966 - DNA, 170 bp, Homo sapiens; identical to SEQ ID NO: 8983
  chr12:103218426-103218596
  hyper

SEQ ID NO: 49967 - DNA, 573 bp, Homo sapiens
  chr12:103311038-103311611
  hyper
tgcgtggtgcatctccgcacagtaacgcccctcgtgggcgttgtcctgacgcaggaggccagggcagcctgccggatgctccaggtcacctgcccaggacgggccggaggggaggggctgagggagggtgtgggggacgcaggaggcaccacttcgctgcccgccctgggtaaagggaagaagccagggagcgacgggccacccaagccccgtcgattagacaggtttaggcacttccgggactctcagaagcctgggaagcgagttctctgcaattggactaagcctgcgaccgtctggtataacaattatatgaataatccgccccccttacccccagctgaaacagtcaggattctcatttagatttttgttgttgttgttttcccttctgttaacctctaagcacactgccttgctgtgcgctgacttcagaaaactacagctagagggcacgtgaacgctgagcacagcaggtaaagagcaaatgtaagagcgatctgggtttaaatccagcctggtgttctccagctattcgcacaactgctcctgaagctcggaaaagagggtggt

SEQ ID NO: 49968 - DNA, 30 bp, Homo sapiens
  chr12:103344670-103344700
  hyper
tgacgtcacaatgccgtctgacccggtgaa

SEQ ID NO: 49969 - DNA, 221 bp, Homo sapiens
  chr12:103350082-103350303
  hyper
ctttctccgcagcgccgcgtccccagacgtcctgaagctggacggggttctggccagagagcgccagggccgaaggcccaggaaggacgcctgggcaggcgctgtccaagcggtcgagcgacggctgcaagcgcctccccctccctctcggcgccagcacgcggccccgccgggctccgctcccagtcgcctgccaccgggccgccgggcacacgcctggg

SEQ ID NO: 49970 - DNA, 247 bp, Homo sapiens
  chr12:103350383-103350630
  hyper
cgccatcactcaacccccgccccgcatctttcttctccgagggtctgggagtatcccagagcactcccttctttatgatatccgctaagctggtccggaaataatctttatggggagggggtggcggtagggggcgatggtacagggggccagaggtcatcctagggggacgtccctgccatatacacccacctacaggacggctcacaaccactcctcggtgtcgcttccccgcggccccccacac

SEQ ID NO: 49971 - DNA, 842 bp, Homo sapiens
  chr12:103351143-103351985
  hyper
gcagcccgccccgagcgcgccgcctgtttattcagccgggagtccggcacgcgccaggcgcacgcactgcaacaacaaacccagctgaatggagagtttgcaaggagcgggagaaaggaacgggagggggggagaggagaggaggagggggagtttagggagtgggtgggaggaagaggtaagaggaggggggggagtgggggctgcagccgctcgctgcagcagcggggagtggggggcgaggcggggccagggctgcgcgtggggctgggtgtcccattgaaaaggcggacgcactccggcagcccagcactctctcacttctggccagggaacgtggaaggcgcaccgacagggatccggccagggagggcgagtgaaagaaggaaatcagaaaggaagggagttaacaaaataataaaaacagcctgagccacggctggagagaccgagacccggcgcaagagagcgcagccttagtaggagaggaacgcgagacgcggcagagcgcgttcagcactgacttttgctgctgcttctgcttttttttttcttagaaacaagaaggcgccagcggcagcctcacacgcgagcgccacgcgaggctcccgaagccaacccgcgaagggaggaggggagggaggaggaggcggcgtgcagggaggagaaaaagcattttcactttttttgctcccactctaagaagtctcccggggattttgtatatattttttaacttccgtcagggctcccgcttcatatttccttttctttccctctctgttcctgcacccaagttctctctgtgtccccctcgcgggccccgcacctcgcgtcccgga

SEQ ID NO: 49972 - DNA, 103 bp, Homo sapiens; identical to SEQ ID NO: 8987
  chr12:103352051-103352154
  hyper

SEQ ID NO: 49973 - DNA, 112 bp, Homo sapiens; identical to SEQ ID NO: 8988
  chr12:103352170-103352282
  hyper

SEQ ID NO: 49974 - DNA, 469 bp, Homo sapiens; identical to SEQ ID NO: 8989
  chr12:103352313-103352782
  hyper

SEQ ID NO: 49975 - DNA, 213 bp, Homo sapiens; identical to SEQ ID NO: 8990
  chr12:103355122-103355335
  hyper

SEQ ID NO: 49976 - DNA, 239 bp, Homo sapiens
  chr12:103358686-103358925
  hyper
tggcttggatctagcgcaggtcgaagttatattccttcttcctttgtatgcaagattaggttgttacaaaagagggtgtgtaggttaatggcaggaagcaagttgcagcgcggagcgcgggccctgagcgcgtgtcaggcttaatgatttattcaagctgcagcgcatccgggcgttgattggctgcaggcatgcgtccgctgtcagctgcgcgcgccgggaactctccaggctacctg

SEQ ID NO: 49977 - DNA, 349 bp, Homo sapiens
  chr12:103359258-103359607
  hyper
gaacgtcccgcgtgcgcccccctctaggcagccagcgggcggccgcttacaaagccgcctttgatgctctggctaccagggctattttggggacgagatgggggaaagccgccaacccacactccttggagggagtcactttctgcaaagtgcgttggagaggactgggccctgggtccgggctgtcgaagcaggaagtggatgtaggggacaaaagctccgcacctgccaaatgcgagaccttagagagagcctccccctcgccgctccctgctcccccgcgggcccgggaagcttgcactaccgggctcagcgcagccagccccaccgcctccggactcgaccccac

SEQ ID NO: 49978 - DNA, 30 bp, Homo sapiens
  chr12:103481413-103481443
  hyper
gtgctaagtgctatacgaaattaaaatctt

SEQ ID NO: 49979 - DNA, 30 bp, Homo sapiens
  chr12:103602171-103602201
  hyper
tggtgtgcagtgtaccgtgaaatggtaatc

SEQ ID NO: 49980 - DNA, 575 bp, Homo sapiens; identical to SEQ ID NO: 8993
  chr12:103889138-103889713
  hyper

SEQ ID NO: 49981 - DNA, 310 bp, Homo sapiens
  chr12:103889788-103890098
  hyper
cgcagtcgccgggcaaccacaatggggctgccttgccgtgagaccctcccccgcgactgccaccaaagtcacagaaaactttcacacctctcatctgacactgtggcctgtgcacgactccaagcactggggaagccttcgacatcagaatatgaatggcacctgttcttccgggggcggcaagggggatcccgatgtttatcaaaatgggttgattttccacggagggggtacttctggaggtagtaatccccagaaatcctgaaattcccccttccacctactcatctgcctcgaattgtaaaccatt

SEQ ID NO: 49982 - DNA, 30 bp, Homo sapiens
  chr12:104036483-104036513
  hyper
ggcaaggaatctgaacgtccaaaggggcat

SEQ ID NO: 49983 - DNA, 476 bp, Homo sapiens
  chr12:104235215-104235691
  hyper
aatttcagggtggcgcgggggtggccgtgtggtgtggtggcgcgcaggccacatgggatggaatgatgaggtacgaccccagcgccgcccgcccagctccgccgcaccttcgtcctgccttctgggactgacccccagctctggccacaaggacagcgcccctcccaccccagctgctctggccccggccctagaaggtgacctctctccgcattaatggcctctggcagtctaattaatggcagtctggacctcccctggatcgtggggcccctctgagacgtccccgatccccagcttaaatttatccaggaggacctgtgagtgggtggctgggccgaggttccactcatgggctgatgtcggctggaggatcccagccccttaagacctcagtaagtttgaagggccctcccattacacagcctggaaggccaatgcccgccccccgcctaggtttccgcctggcggcagag

SEQ ID NO: 49984 - DNA, 797 bp, Homo sapiens
  chr12:104322591-104323388
  hyper
tccgcacactaaatacgggaagttgtaaaagactgtgacagactgtcactaaaaaacttgtcttcaggaattcggacgattatctgaaaagatattcaaagttcaattttgttggaggaagcaataaggaagtggggtgtctatgtcagagacgggcgcgggtatgcgagggggtaacgtatagagtaggttaaagagacgtagaaaatatttccaaaggcacaagtttagcatgagggacttccctcacaggaaagacacctggtgttttatatgtccttctgagcacagacagggtatttctatgaagttacaaagctgcaatcccgttctcatgtgcagcaccacaggttttgctttcaaatatctgcaggtgcatcctcctgcactcgttaaactaagggttttccttttctgtgctagacccgcttttacgaccacgctctccacctgattcacagaaagggttctacgaccgtcaggtcaccgccgcctttgtactttattggggagtcgaaggcctcagcgctgctcgcgatttccctaaggtggtcgggaaggtcccaaccacgttcttctgtaaaccagataaggaaggcctggggattccggccgcggaaaggcacagaggaggtgaacgctccggctgcccaagtgacgcacttgtaggcggattcggaaactcgtgctcttgagccggaggcggagcccccagactcagaccgaccccccagaaccgggcggccttgcccgaggcatgaaggctttctaggcccgcttctaaaagctgtgtacaa

SEQ ID NO: 49985 - DNA, 31 bp, Homo sapiens; identical to SEQ ID NO: 8996
  chr12:104359126-104359157
  hyper

SEQ ID NO: 49986 - DNA, 30 bp, Homo sapiens
  chr12:104359463-104359493
  hyper
gcgctcctagtccccgtcttctggtcctcc

SEQ ID NO: 49987 - DNA, 241 bp, Homo sapiens
  chr12:104443910-104444151
  hyper
ttcttccacctctgcgcgaagccgctgggaacccaggagttgcgctggcagagaggggcggccccagaaaccacttccagatgtgctcggctggccggctcggatgcgccagacttcctctggctaagtgcaaaacatgcaaaaaacaacgctgttctggaggaaaagacacaaaaccagagaagagcaaatgctttcagggtgaatttctaccacacgttgagtcgaaggcaaactttga

SEQ ID NO: 49988 - DNA, 30 bp, Homo sapiens; identical to SEQ ID NO: 8998
  chr12:104459091-104459121
  hyper

SEQ ID NO: 49989 - DNA, 30 bp, Homo sapiens
  chr12:104531876-104531906
  hyper
agtcggtttaggagcgatcattggccgaag

SEQ ID NO: 49990 - DNA, 420 bp, Homo sapiens; identical to SEQ ID NO: 8999
  chr12:104609376-104609796
  hyper

SEQ ID NO: 49991 - DNA, 728 bp, Homo sapiens
  chr12:104682327-104683055
  hyper
ttttgtgaaagttgagataaacgtgtattaagcttcttttttgaagcttttctgaattcgggatttaccgggaaagtaggacgtttaattttagcggagtagtgcaatgatttaaccctgactagaactctgacgtttacagctagccttgaggccatgttttcagccagtgtgcggatttgccggggtcagactccaagcttgattgtgagttctagcctttgtcagaaatgcagcaagtcatgctaacttgcaagggagtcaacagagggcacgcggtgcctgcggggccgggacggaagccccgcccccggcgcagttcccgcctgttagcgggggagaagcaccttacacgctccgctctgcttttgtgccacacagaggacggtcgggccctggaaggaacgctctcggaattggccgcggaaaccgatctgcccgttgtgtttgtgaaacagagaaagataggcggccatggtccaaccttgaaggtaggagagagtaacgtatctttttaaacgggggatgagctcgttgagctcagcgtggtcacagcctgccttttaaagccagcgtggatgtgaccctccaaacgggacgcagcgctgggaaatgacgaaaaacgctcgtgggctagcgcatgtgttaatcgaagttgatgagacgttggacaaatttcacatctcgggaaacttgaaatttctaacgctttttatcttttaaaatag

SEQ ID NO: 49992 - DNA, 299 bp, Homo sapiens
  chr12:104850237-104850536
  hyper
tcctttgaaagaaaaacgaaaccgcccagttctgagcgtcggaaaatgggcactcgctccctgggggtttggggcaacttccccgctacgtcgcccagggattttaaataattgccagccaccagaaaccccctaacccttaattcttccctccgagacccagcccgctgcttgccacttccctctccaaacgctggcgggggtgggtggcagcaccgaggcgattttcttcgtctttttttcctccgggttttgtcatggaaacgctgacacaacctccagacggcggccgagcccgg

SEQ ID NO: 49993 - DNA, 2255 bp, Homo sapiens
  chr12:104850577-104852832
  hyper
cgcacaccgcactccccgggcaacagctggacgcgaccatatcccgggtaggggcggggggagcgcgacgctccgccccggcgctagggtccctccctcctcccggctctccgcaggcgccctcccctcgccgggggccgcgagttgcatttggtaaaacccagccccggaatatatagatcgttggagcgcaatgaagtagcctttggagagaagggagagggcccgtcggacagccacagcggccagcgcagcggcagcggcggcggcaccaccatcaccgctcgcaccccagccgcccggcccgcgaccaggcagcggcggccgccggcgggatcggaggaggcggcggagcggcgaggaggaggagcaggagcgcgcagccagcgggtccacgcatctcagcacttccagaccaactccggcaccttccacacccctgcccgggctgggggctccgagagcggccgcgaagcgactccgatcctccctctgagccttgctcagctctgccccgcgcctcccgggctccggtccgcgcggcggggtccctgctcctgcgccccgggcgcgcttcccggacaccccggtccccgcagccaggacaaagccatgaagccagcgctgctggaagtgatgaggatgaacagaatctgccggatggtgctggccacttgcttgggatcctttatcctggtcatcttctatttccaaagtatgttgcacccaggtagggggcgcgttagcgtggttttgttggatattttcttctctctcgcgctctagctcgctccgcctgatttctgcctcttccaaccctacctctccgccttcggcctcttcggggctcctggctgcccagagctcctggctgcccagatctacccgggtcaccgcgtcgggatggggaggagaagggaaggtgtgcttcgccctcttcttcctaccggctccgggctggaggatgggaccaggaggggcggtagtttttttttttttttttttcttcttctttttttctttgtgtcccttgtctgtctgtctgcgaggtagcagggaaacggagaggtgtgggaagcaaccgggggtgaggggctggtttgaggagaacgaaactccctccctgctgctgccgaggtcggaggatgaaagagttacccggagccggctgctctgcgcccgggcgagccgcctcttcctggttgccgggccgggggcgaagggtgtacgccccggcgaggttgcgagtccctgcagcaggctgggagcccgggactgggctcccacgtgtcccgggctccgcgcagagctgagcaggtgtggagagtggtcgggtgcccagcgttgcccctccaccacgcgccggccgtttgcccccggggtccgggtccgcagtgaccttgcggctggtgccccggggcctgctccagcccccagccctgagctggaaactccgagctcctgggtcacgccttgaccactgcagttttggaggaaactttggccaggtcctgggctgaccgtccgtttgcatcccccacttctgggatccgagcaacgggaatcccccgggcggcgtgggaatgaaccccattcctccggtcccttgtggctcaggcaaagttccacgtccgaaatctggactgggggagggacgaggctcgtcgcttcctaggggtgcgagggaaagtttgggttctggagagggaggggcgccctcgagcgcggcggccgggggtgagcagctcggctgcgaagcccaacaggtagaacgttccgagaagccttccgggtaacgcgggtctccccgccaagccgtggctcccctgctcccttttaccctcccttagcagccccctgccgggccacgttggctcagaaatccattttctacgcctccgagttgcctttctcagcgtagtcacagcaataatttgcttttctaattgcaaggaggagggaggtggaaacgcatttccttccagggaagtggggttggtgtttttcatttttgcctcccgccttctcctttcactgtgtatctaacactttaaacagacgcagtcccgaattcatcaagcctgcgtttgggtcgatggcagaggaataaagctgttctttccatcaaacaggcagggctgcaggctgcagattccttgacagcgcagggacagacggcccctttgccccactcggtctggagcagttgttaaggcagccacactgccaaggatatggtccgactctaccacatg

SEQ ID NO: 49994 - DNA, 31 bp, Homo sapiens; identical to SEQ ID NO: 9003
  chr12:105110247-105110278
  hyper

SEQ ID NO: 49995 - DNA, 30 bp, Homo sapiens; identical to SEQ ID NO: 9004
  chr12:105380156-105380186
  hyper

SEQ ID NO: 49996 - DNA, 604 bp, Homo sapiens
  chr12:105477919-105478523
  hyper
cctcagccccctcccggcagaagacaatggcctgcgtgccagttcccatccgggaccctccccaagccctcctctgaggtctctctgtttttgtttgtttgtttgtttgttttaaacgctgtcttggtgtttagcaaagtctaagcatcgctgctcatccccagccccaccgccccggccctcccgccccggagtctggaaaccaggacagggtgacagccgggacgctcgcccgggccggactcacccggccagtggagaagcgccggagcgcctggctgccccgccgcagcatgctggagaggagcgctagcactggcgacgcggcagcgcgggaggcaggcgggcggcgcagcctgggcgcggcctgggcgcggcctgcagtctggatgccccggactgcctggctcgcggctcgccgctctcggcctctgctagtccgcacccctcccaaagcccacagcccgcggcccgccccaccctaccagctgcaaggccccgccccctagctgtcaagaccccgcccccagctggaaggccccgccccgccagctggctgcgttcggacagccaacctggtgcgacccggcggagcgcgtgggct

SEQ ID NO: 49997 - DNA, 131 bp, Homo sapiens
  chr12:105629077-105629208
  hyper
acttgactctcatctcgagtgtgctaatgaagttcccttgtgcgacaaatggggcaggtactgtatttttctcttcactaatgggaaaacggtgccaaaaggaggcctggtaccgccggaaaagagatcca

SEQ ID NO: 49998 - DNA, 30 bp, Homo sapiens
  chr12:106216288-106216318
  hyper
ggaagaaaaacatttcgctaagcatttcat

SEQ ID NO: 49999 - DNA, 30 bp, Homo sapiens
  chr12:106532197-106532227
  hyper
gccagaaaacctctcggtggcccgcttgac

SEQ ID NO: 50000 - DNA, 31 bp, Homo sapiens
  chr12:106532782-106532813
  hyper
cccctccccgggaggacgcgcagacggggcg

SEQ ID NO: 50001 - DNA, 118 bp, Homo sapiens
  chr12:106533275-106533393
  hyper
attttcttgtaggtgtcgccgcagcctggcggccggagctgggggagggggcagggaggcctggtgttcggttacaggcggtgactcacggaccttgcccgcccgaggctggcacccc

SEQ ID NO: 50002 - DNA, 265 bp, Homo sapiens
  chr12:106640991-106641256
  hyper
tgtctaggccagggcccgccaaggaggagcggccggctcccgcctccgggcctgggcaggcagcgctaggggccggtcgggaagcacgaaggagcccggccgtgggtccggaggccgcagtcgatggggacagttgcggggccgggggtacccaccttctgctcgacgccctgcaagccctggcccagctcctccctctgccgggagaagtcctggtggctgcgccggacctgctggacctcctccaggacgtggtggacgcacc

SEQ ID NO: 50003 - DNA, 55 bp, Homo sapiens; identical to SEQ ID NO: 9007
  chr12:106641514-106641569
  hyper

SEQ ID NO: 50004 - DNA, 30 bp, Homo sapiens
  chr12:106696369-106696399
  hyper
atccgagctgttctcggcctctctggttca

SEQ ID NO: 50005 - DNA, 30 bp, Homo sapiens
  chr12:106751656-106751686
  hyper
catggacgtgctagcggaggagtttgggaa

SEQ ID NO: 50006 - DNA, 30 bp, Homo sapiens
  chr12:106751991-106752021
  hyper
ccagcataggtgtgcgtggggaggactgac

SEQ ID NO: 50007 - DNA, 133 bp, Homo sapiens; identical to SEQ ID NO: 9008
  chr12:106974817-106974950
  hyper

SEQ ID NO: 50008 - DNA, 455 bp, Homo sapiens
  chr12:106975231-106975686
  hyper
acgtgctggcccctcgggctccccagtctccgtacattgtcccactcagctctgattgtggggagggggcggaccgagggggcggggggcgtctttccgaaggatcgcggaaagccgcgcgctgccaggggcccggggttagagacccccactcccgcacggcgttagggactccgcgcttccccgcccccgccgcggcccgccggctctgcctctgtccatggtcaaagcacccggggtaatccgcctttctcttccgcccgccgggccccattcatattctaatcacagcgcggccgacccgcgaacggccactttatcggggcccgcaggagacgcagcttgctccccctcacttccacttccagcaccccccggccctcgcccccctctttctgcactttcaactccgccgaggagggggtccctgggaaaaccgcgtccccacttggatg

SEQ ID NO: 50009 - DNA, 598 bp, Homo sapiens
  chr12:106976181-106976779
  hyper
cgcttcactccccacgcgtgtctgcggatccgcgtgcaaggggtcaagacataccccctcccgcattctcagggccaccacccgaaatctaacccaggaccaaaatggggggtgggtgggggcgcaagagaaggaagggagtggggccccactcgtggtagcgcaggcgactccccaggctccaggagttccccgcggctccccccccgcccgcgcccccctcccggcctgccagcacggcgcggggcccgatggtggggaagggccgggagggggagggggccacatctaagccaattttgatttcgcctataatgagtgccgggcgaaggctggagaaggcctctggaactttaaataagaaaaacgttgctaatgctataatagaagggggaagtcggagggctgggattgcgtcgctctgagccccccttttcggaggcggcttttcttattcaaaacaggcccacaatgggcttcacagtgcgcctcgccacggccccatctgacgagcggccattcatcaggccggctggcctatcaatgacattgctcccatcggggctcctataaaatgatgctttttcccatgaaacat

SEQ ID NO: 50010 - DNA, 16 bp, Homo sapiens
  chr12:106976842-106976858
  hyper
cgctttttctctctcc

SEQ ID NO: 50011 - DNA, 282 bp, Homo sapiens
  chr12:106977374-106977656
  hyper
cgcgcgcgaaggagcgcgctttcgcttgccctggacacaaagttacgtaaagatgcgctggctcgcggcgagctcgaggtgccacttgcagaaactttgccagccgaccgccccctcccggacccaggtcctcctagggtatgggggcctcggaatagcggtgcgctcggggtctggcggccagggccgggaagccgagcggaacgccccgaggcgggggagggtgacggcttcgcactgcgcctgggaggtggggaccgaggctccggctggtagagacgc

SEQ ID NO: 50012 - DNA, 30 bp, Homo sapiens
  chr12:106979711-106979741
  hyper
atgacctgcggaaacgcgcccctttgttcc

SEQ ID NO: 50013 - DNA, 265 bp, Homo sapiens
  chr12:106980177-106980442
  hyper
ttactcaagttatccggaaattcgagaacgatgggggaaagtgggtagaattttaggccaccgagaacttgtgcaaagtgggccgggccgggtcggtcgcctacgcaacagaaggatcatttcttttaaaacgggatggcgcgttagagagggccactgccaagctggagctggaaacttctgcctccatccactttccgctcccatctccagaacccagagctgaggcggccaaagtacttcctggagccggatttgagttccc

SEQ ID NO: 50014 - DNA, 97 bp, Homo sapiens
  chr12:106980649-106980746
  hyper
tggggaaggagccactgtctgcgggcttgggagagcaaggagccggaggtccgagccttgctccagcgcccaaaccagacagtctcgccctccccgg

SEQ ID NO: 50015 - DNA, 195 bp, Homo sapiens
  chr12:106980911-106981106
  hyper
cgcaggctgggtcctcggagtcccggattcagcacgcgactctgtgcggcagcctgggacagcgcgctttcctacccggcctgcaggtcccagagactcggaaaagtttgcaggggccgcccggcgcctcgggcctgggatttccaaagccgctcccgcccccgtccccagcgcgtcaccatggagactgctgga

SEQ ID NO: 50016 - DNA, 321 bp, Homo sapiens
  chr12:106981338-106981659
  hyper
cagctataccttttctcagcccgccttggagcccttgctccctccctcctctccgggttctcttccagcctcccccctcacccgtccggaggttaggcgccagctgggcagtgcgcccgcctccccaggagccacaggctcaccaacgtgaaaggttctggcttttcttccccacgacccgtgggtcgcccagggtgagtttctcaccccctatctcaaacccgatctgaaagggtgatgggttagaataaggtgggaacggaacgggaagagaagggagcgtctggccagaaatcttgcgagtggggatgggtaaagagg

SEQ ID NO: 50017 - DNA, 986 bp, Homo sapiens
  chr12:107167935-107168921
  hyper
cccagcatgcccttggcgggaattctttccggctggatgactaccaatcccagcatgccattcggcacgccagtaaattagatggaagagcgggatagccccattgcatgcagggaattgcagtccatttagcggctggttcatagatgggcggggaagagccgggttgctctagtcctttgagaatgattcatagaggagggtcaggaaagaagaacggttcagtctgtgaaagcccccttaaaagactggacagttctccgagggagggagaggcaggagagcaagcagggccttgggcctgactccgcctcggtccgctagccaggcctcgaccgagtcctgggccttgtcaggggcggccgtgaggcgccggttgctgggggagcggtgacgtcgcggggtgaaagttgaggggcggtgacgtcgggccggcccgggcggaggctggcgggttggaggcaggacggagggagggaaagagggaaggaaggaagctgggaaggagcgagcgggggcgcgaggcgtttacctggaggcagcggcttgggcgcgcagagcggccgcggctcccccgcacctgcggccatggatgaggagcgcgccctctacatcgtccgggccggcgaagcaggggctatcgagcgggtcctgagggattacagcgacaaggtaaagagtcctggccccgggcgtgcggtatcgcacccccgggccgccctccgtgcttgcacatcgcatccttccccacccccctcattccggggatgcgcattgctctcccccgaaaacgtttccggcttgggcatgcgtgtttgtgcccccagccttttccatccatgcatcctgcatcccactacccccactgtagcgcccactcctctgattcctggcccagcagcttgacctccggtcctcctctcaagcgtgcaagtcacacccccggaatccgtagatgtgcatctgtgccccgtgccccactcctg

SEQ ID NO: 50018 - DNA, 1526 bp, Homo sapiens
  chr12:107486363-107487889
  hyper
actcactgatgaagaccgagtgtttcaggtcgtcagtactctttggccagagaagtattaagtcaattctatttaatacttagggcacctaaaattcgtaagcggtataagcaagacagtcccacgtctaaattcacagatttggcggatcgcatggaattcattaacatcagactcattaaacacccaaatccatttcccacgggcttgtgactcaccgccacctgttgatgcccacattggaggagccggcgaaccaggggtccaggatgtagacgcagcggatggtgtcggcgccctgaatgcactccttcagggcggggttgtcgtggagccggagcccctttcggaaccagtgcacggcgttcacccccatgccggggggcgcggcgggtcctccacggagaaattcaaggaaggaggctccggctcatagccgacaccttcgcttccaagagaattgcctcacccggggcgtgaggaaagggcggcagagggggaacaggaaaaaatgactccgaggaggggaccggagaaggcgggggcgccggaggcgcagtggaaagatgaatggaggttgcctagtcggcggagtccgggtgtgacgccctttaggagcccgcgcccgccgcaaccgcctggaggcgacgcataacttcgagggcctcggacctccggagcctgagcaagttccaggagctcgagccgccacgacggcccgagccggcacggacggccccaggagattcgtcacggaaacctcgccccaccaaggcggcccctaaagacaaaacggcccgcccgaggtgagtcaccgaggagaaccggaggggaatgagcccctgtcggcgacgctgtctctcggcccgggagaaaggaccgggaacggaggctagaggcggtggtcgaggccgctggacggttgccggccggtgaccggtcccgaggctgcccgggtgactctgccgccgccgccgcgtcagcggcctcggccccgcccccggctcctcattggagggcgcgctcccctcgtgaccaccggcacctcacgtttctgaagtgtgtttactacactggctcggaggggtaatctgctcgcgcttcggtcgcttttggaggagcggcagccgcttgatcccaaacttgttgaccctcgtccacacgctgaactcactgcctctgcccctttcctgtgccgactggtggccgtcccttggaagcaaatcgcgttgaccacaggccccttgtgagggaaggcttagccccgcccccaagggccatgagcggccaccattggccgaggctcgctgagacccggatgagcacggggatgcggggagcttgcgggcgcgcgcgctgctccgttaggcgcgcgtgcgctctcgctgcgttccagagggtaagggggcggggccggcgggcaggagcgcgctcggcgattcctcccgtgggatttggggagggcctggaaattgtccggtttccttcaggagccagtggtggagtcgggcggagagtgaggggag

SEQ ID NO: 50019 - DNA, 31 bp, Homo sapiens
  chr12:107488196-107488227
  hyper
ttgtctacttttccagcgacagtgaactgca

SEQ ID NO: 50020 - DNA, 2714 bp, Homo sapiens
  chr12:107711706-107714420
  hyper
tgctggagcaaaccccggctgaaagagggccgcactaattggtttgcgtacccgaagtgggaatagagagggaggaaaaccatgtttcaggtgttacggggggaaaaaagtgaaatgcgaaccgcaggggagagagcgaccgtcaggcagacaccttgtgaaccgcggtggagagcacacctaggtggggaggtcaccggcccaacccaccaccctccgggagaatgcgggcagggacagcagcagggggcagcatccacgtctctacgcttgcaagggttccccaagtccctggccactgctccccacttcctgcagcctcggtgtccgccgggggcgtgtgtgaggggcggggccgcatggggaggagggatttaaaaaaaaaaaaaaaaagcgaggtaattagcattctccgattccactggctctccgccgcccctgctttgcatacgcccgtcccactggctgcccggggtttgctggggttcggcaaggtttgcagccgccacggccgctgctgcgctccggtgcagggcaggctggcgccgagcgaaccagggccgggaactgggagccgggagccgggagccagctgcccgcggagctgcggcggcggcggcatctggggtggtctcagtcccacgaacaccgtggccggcgcccggtggctactgcgcccagcggggctcagggaagagcggtctagacactttttattttggaagaaaggggcaagccccggcgggagcttccttcccggcctggctcgctccccattgcgcccagctccggcccggactctggaagatgactccagggtctgctctgtatattccagcggcggcagttccgggaggcagccgaaagtactaacagttggtagcagcggctagtggaaaagtgagccaaggcggcgcggactcggctctccccgcgccccgcggcactcgctgctcctcgccgctccttccctttggctcccaggcggctgcagcatgaagtggcgcagcgatggccaggagaggtaagaagcccgtggtgagaacgctggaggatctgacgctggactcgggttatggtggcgcggcggactcggtgcgctcctccaacttgtctttgtgctgttccgactcgcacccggcgtccccgtatggcgggagctgctggccgcctctagctgactccatgcacagccggcacaacagctttgacactgtcaacactgccctggtggaagactccgaggggctggactgcgccggccagcactgctcgcggctgctgccggacctagacgaggtcccctggactctccaggagctggaggcgctgctgctgcgttcgcgggatccccgggcaggcccggcggtccccggcggcctgcccaaggacgcgctggccaagctgtcgacgctggtgagccgggcgctggtgcgcatagccaaagaggcgcagcgcctgagcctgcgcttcgccaagtgcaccaagtacgagatccagagcgccatggagatcgtgctgtcctggggcctggccgcgcactgtacggcggctgcgctggccgcactgtccctctacaacatgagcagcgccggcggcgaccgcctgggccgcggcaagtcggcccgctgcggcctcaccttctccgtgggccgcgtgtatcgctggatggtggacagccgcgtggcgctgcgcatccacgagcacgccgccatctacctgacagcctgcatggagagcctcttccgggacatctactcgcgggtcgtggcctccggggtgccccggagctgcagtggccctgggtcaggctcgggctccggcccaggcccgagctcgggccctggtgcggcccccgcggcggataaagagcgggaggcgcccgggggaggagcggcgagcggcggcgcctgcagcgcagccagcagcgccagcgggggcagcagctgttgcgccccgccggccgccgcggccgccgcagtcccgccggcagccgccgccaaccaccaccatcaccaccaccatgcgctccacgaggcgcccaagttcaccgtggagaccctggagcacacggtcaacaacgactcggagatctggggtctcctgcagccctaccagcacctgatctgcgggaagaacgccagcggtaagtgtctgcgcgggtgccactccctctcacctaacctggccaactcttggcgcaagtttgcctcgcgtccccctcccgcgtcttcccagccacgcgctgctgtcccaagccgctgaggaggcggccgggctggaggtagccagaacaagaggttgcctgtttgctcctgcactcgggtgcgcgtatttcacgctgctggtgctgtcccaggtccgggagcgcgaggttccgcccccggtgcggggcggggcgacagctgcctccagcaggcagtgagcaaaacccagcaccattttttggagcagggttgagatcatttgcgcttagtacatatactccacccctgcactgtttgttttgaccttgaagatgccacttccctgggcgcatgaattgggctccctaggacttgggaggaggcgcgttccgctctccgcaatccagtgctcccacttccccactccctcggggggcacgcagtgcacgggggaaggaggggcctggcggccgtaccggctgaatggttgaaagcttgcacggcctagacagtcgtaaaggtgtgtgt

SEQ ID NO: 50021 - DNA, 693 bp, Homo sapiens
  chr12:107714658-107715351
  hyper
ttgttagtttagggcgtcgtttccagcaggttctatcatcgtctcttcatgccccactgttttgaaggcctgacttgggtaggtttgaacccgcagttctgtccttgaagggggtggggccggggcgcttgttttcgagagctcgcgctggcggtgctgcccgtctgcgaaagccggagctagacacttcaaagcttcaattttccacaggaaatggtagaaacgtaactggagactctaaaggcgaaataaaactttgttacatattcggcggtttggccagaggttgcgcggttggagctgaaatgcagtctttctgggcagatttcattcatgttgctgcctgtctgtttcccgggggctggaggagcactgcggtgggcggtgccaagggtgtgcatgtgcgtgtgagagtctgtgtgcgcgcgcgtctgtgcgtgtgtaagtgtgcttgtgagtgtgcgcaggaacaagcgggcgcgcagggcgcccggctccagccgaagcctttggaaaccgaccctgccgccctcggtcccttcacctggatttgatcgtcagtgggggaggggaaggaaggagcaaagcgggtgtgtgtttgtgtgtgttggggaggggaatccgcactgatctcggagactcttcgggatctctttgccagagcccttccccgtctgctgccagccagggcac

SEQ ID NO: 50022 - DNA, 30 bp, Homo sapiens
  chr12:108154514-108154544
  hyper
ccgtccagaagcttcgggaagggggctgcc

SEQ ID NO: 50023 - DNA, 390 bp, Homo sapiens
  chr12:108169023-108169413
  hyper
tggccttgccatactcgctgcgcaccgcgcccctgggcgttccggggaccctgcccggactcccgcggagggaccccctcagggtcgccctgcgtctggacgccgcgtgctgggagtgggcgcgcagcggctgcgcacggggatggcagtacttgcccgtgccgctggacagcgccttcgagcccgccttcctccgcaagcgcaacgagcgcgagcggcagcgggtgcgctgcgtgaacgagggctatgcgcgcctccgagaccacctgccccgggagctggcagacaagcgcctcagcaaagtggagacgctccgcgctgccatcgactacatcaagcacctgcaggagctgctggagcgccaggcctgggggctcgagggcgcggccg

SEQ ID NO: 50024 - DNA, 6 bp, Homo sapiens
  chr12:108169549-108169555
  hyper
cgcaca

SEQ ID NO: 50025 - DNA, 108 bp, Homo sapiens
  chr12:108237416-108237524
  hyper
ggagccaaacagcttcttcatcgcggcagcttcggagaagcctcagctaccctgcagctccccttcgccttttcgcggaatccggagtccagtcacaattagctaagc

SEQ ID NO: 50026 - DNA, 853 bp, Homo sapiens
  chr12:108237660-108238513
  hyper
cggctggcgctgggcttccagtgccggactgccagaacaggctgggagcgctggggtcttggcgctctgcagccaccagagatctggccgagtgggtctggttacccccacccctgtgccgccacagcccggcagatcgcctagcttggctgccccagctgccgcatctgtccctctgtccgcgtctctgggagcccggcggggtgggaggttgctggctgttgctgtccactccggatcctgaggccgcccagggtactcctaccccgcctgcctcggtgcccctgacctgcagtcgtcacctgcactccaggcgggcaacaacagcgaggacaccctgcccggccaggctcccagcatcagagacgctgggtggacaacgtggtggcggccaatccaggtggtccgccagaccgcggcagagacaacgcagaggctgcgggttaggactgcccagcgctagcggcccccagctctgtgcgcccgctgaggaggagacagccagcagcgtggtcaggcaggctctcgcgctgaggaggcagtgcactcaggatactgaggccgcccagagcacgccccgccaacccacctaggcgcctgagctgcagcctctgcgccgtctctgccgcggtccggcaggccgcctggattggccgccgccgctgctgccaccacggtgtccacccaacgactctaatgtgggaagtctggcggtggagggtgtcgcgggctctccggcagacccgtagctggtggtggagctgagggccctggggcatggcgggcagggacttgaggcccgcaggaggagggggccgtgccgatgctggctgtgccggggctgcctgagaac

SEQ ID NO: 50027 - DNA, 45 bp, Homo sapiens
  chr12:108238683-108238728
  hyper
cgctgcctgaccagtctgcgggccggttgtgcttgccgggggaca

SEQ ID NO: 50028 - DNA, 439 bp, Homo sapiens
  chr12:108297324-108297763
  hyper
agttggagatacaccgattctcctgtttctggggaaggattctcagaaggtggctcatatgagtaaaaatcatttttcctgggtagctgattcctagaaactcgcagggcggcacagcacggcggctcgtggcagcagaagaggaagatgccgcggtggaaggcgtcttcgcggccgggcagcgacgcgtacacctgccgccggaagaagagcgacggtcgcacagctctcaggccgggggccggagccccggcagcccggccgcgcccatccacgcccagccacgcccagccacgttggccgcccgcccagcctgctgggaaactgctcgctgcgcattcgcccgccggcgccgacttggcgatggccagctacacaggtccggcgggggcggcagccatgtggggcgcgggctggcgtggggagcagcccacagctg

SEQ ID NO: 50029 - DNA, 31 bp, Homo sapiens
  chr12:108306543-108306574
  hyper
cacagggggcagctgccggtggagggtgttt

SEQ ID NO: 50030 - DNA, 591 bp, Homo sapiens
  chr12:108523021-108523612
  hyper
cggtaggcagtgctgtggctccgtgcgaggagcgcgccgggctgaggcgcgctgctggtggcggcggcggcagcggcgcgggagctagggctggagacgtgaagtccaggggagcgagcaaggcagccaaggaggcagcggcgaggcagcgagagagagccaggcggccggagctccgcgccgagccgcagccggtgccctgcgcgcaccgggcccgggcatctccatccccggggcgggtgcccgcgcggggcctcgccgcggctcggggcacccgcagtgccgcccgcccgagcgccaggctcacaggagcccggctttcacttcctctcgcttccgcccgcctccctggctcgccggctggcgtcgccaccgcctcctcgtccccggccaccgctgtcgccgctgctgcaattcaaggcgcacactatcccactttcccgctggaggcgcagaggatgccccttgagccagacctggagaaatagccccagggcccggcaggaggagccttggtggcgagaaaggaaatccaggctcccctttccttaaagccactgcagcagctgggaaggcgcccacagagcgggc

SEQ ID NO: 50031 - DNA, 30 bp, Homo sapiens; identical to SEQ ID NO: 9021
  chr12:108523873-108523903
  hyper

SEQ ID NO: 50032 - DNA, 30 bp, Homo sapiens; identical to SEQ ID NO: 9022
  chr12:108594027-108594057
  hyper

SEQ ID NO: 50033 - DNA, 30 bp, Homo sapiens
  chr12:108908902-108908932
  hyper
atgggagtggcccacggcgcgtctttcccg

SEQ ID NO: 50034 - DNA, 30 bp, Homo sapiens; identical to SEQ ID NO: 9023
  chr12:108956082-108956112
  hyper

SEQ ID NO: 50035 - DNA, 30 bp, Homo sapiens; identical to SEQ ID NO: 9024
  chr12:109125490-109125520
  hyper

SEQ ID NO: 50036 - DNA, 137 bp, Homo sapiens; identical to SEQ ID NO: 9025
  chr12:109162626-109162763
  hyper

SEQ ID NO: 50037 - DNA, 30 bp, Homo sapiens; identical to SEQ ID NO: 9026
  chr12:109250886-109250916
  hyper

SEQ ID NO: 50038 - DNA, 30 bp, Homo sapiens
  chr12:109458717-109458747
  hyper
gtagtggtggatgacgagccctccggtttt

SEQ ID NO: 50039 - DNA, 37 bp, Homo sapiens; identical to SEQ ID NO: 9027
  chr12:109535376-109535413
  hyper

SEQ ID NO: 50040 - DNA, 38 bp, Homo sapiens; identical to SEQ ID NO: 9028
  chr12:109592370-109592408
  hyper

SEQ ID NO: 50041 - DNA, 121 bp, Homo sapiens
  chr12:109746985-109747106
  hyper
ggggggctccctcgcgctcgcccctcgcgttccgcaatttggccgccgtcgcagctcgaaccgtttttaaatttccctctctggagctgtccagctcagagcatgcgcagtagccgtgcgg

SEQ ID NO: 50042 - DNA, 269 bp, Homo sapiens
  chr12:110011227-110011496
  hyper
cgcgcaggccaagacggctccccaggccaagacggctccccaggccgcacacagccatgagccaggctgcttgacgggacctgaccccgccaggttcccgtccagtccgcggggtgactccacccacagctggccgcgccaccgctcaggtttcaatttttattggttcgcagttctcaccccagggcgggacactcccagggacttgtttcccattggtttaacggaaggagcggggcgggaaaacccgtgtcggcttggctgcaaca

SEQ ID NO: 50043 - DNA, 30 bp, Homo sapiens
  chr12:110338647-110338677
  hyper
aatgagattcttggcgtgcaccaggccttt

SEQ ID NO: 50044 - DNA, 30 bp, Homo sapiens
  chr12:110561794-110561824
  hyper
aatgaaacatcacacgcatttaacataggt

SEQ ID NO: 50045 - DNA, 31 bp, Homo sapiens; identical to SEQ ID NO: 9031
  chr12:110719374-110719405
  hyper

SEQ ID NO: 50046 - DNA, 30 bp, Homo sapiens
  chr12:110841652-110841682
  hyper
ttacgcaaaaatcacgttatcatcctaaac

SEQ ID NO: 50047 - DNA, 30 bp, Homo sapiens
  chr12:110888265-110888295
  hyper
cttgagtggtgcagcgtgaggcagcgccca

SEQ ID NO: 50048 - DNA, 30 bp, Homo sapiens; identical to SEQ ID NO: 9032
  chr12:111020656-111020686
  hyper

SEQ ID NO: 50049 - DNA, 121 bp, Homo sapiens
  chr12:111021163-111021284
  hyper
cctgcccctagccccgccccgattcaccgctcaggcccaagcccagccccttgggctcgctgccttatgcagtcaccaaggttgaacatgcgcagagggtgcggacgcagtgtctcttggg

SEQ ID NO: 50050 - DNA, 45 bp, Homo sapiens
  chr12:111051730-111051775
  hyper
acgcccctcgtttacgccagcttcacacccgctcactagtgctcg

SEQ ID NO: 50051 - DNA, 66 bp, Homo sapiens; identical to SEQ ID NO: 9034
  chr12:111052027-111052093
  hyper

SEQ ID NO: 50052 - DNA, 283 bp, Homo sapiens
  chr12:111127124-111127407
  hyper
ccccggctgcctcccgccccgcagggtgggcctgtcctgggcctcccgcagttacaaaggtcccgcccgtgggagcgaatcgcggatcacaaaaatcctgccccgggccagcctaagggaagggtgggcgggggaaccacttccttcctccgccggctggagcggggcgaatccaccccgccaacccctttcggggagcttctgctccatcccaccgtctccgggccacccctgcctctgggtctcctgattccttggcctcgtcccctgcacagtttctgcc

SEQ ID NO: 50053 - DNA, 209 bp, Homo sapiens
  chr12:111284785-111284994
  hyper
ggggtgtggcgcagcgaggccgcgcagcaagcagtcctcccggcaccgtcggaagcgcagttgcagcagccgtcggacaagcggccggagcagccacggacaagcagtccgggccccgccactggtaagtttcgccgcccgcccggccgcgcctgctgcgccacagctccccctgccagggaaaaggaaagagcggtcgcggtccccag

SEQ ID NO: 50054 - DNA, 828 bp, Homo sapiens
  chr12:111471131-111471959
  hyper
aataatataatggcgcggaaactgtgggcggtggtggtgacatttcccacgactcagtggcgcccccgggcggctcccaccctccctccggccggcgcgtctacgcagccccaagtgctggctgcgaccctcggatcccaagcatatctggcgatggagcggcggcagcccgaggcacgtgttgtgtgtgctccgattgcaaaagaaaaaaaaatgcatttcaaactattaacttttttttaagcgtgcaatgccgggagctgggggtagacaggtgcaagcgggggtaggcgccccgcgcgcccgcctcccgcagcgccccctcccaaacttccctttgcattgatcagcacgttacgtcagtattgataagtttgcaaaaagccaaagtcaagtgcaatcgcgcggcacaccgaccccggacttgggggggagatgcagcgagcgctccgcgggcccgggagccggcggcaggcagggcagcggcggcgccggcgcctctcggagaggctgcctccccccaacccctcccctcccaccccatccccggctgcctcccccgggcgggcgccgagctccccgcccggcgcgctccgcccgcgccctccgggggtcgggggggcgcacggctcccgggcccgttggcggcggcggcggcggcggcgcggcggcggcgaggggcagcgggtggcaggaggccggagggcgcccgaggggccccgggccgcggcgctcagggcccgggcggccggcggcggccccggggctggggggagtccagcccggatattgagtgcagccattgagaaaagccaaactcttgtgtgt

SEQ ID NO: 50055 - DNA, 137 bp, Homo sapiens; identical to SEQ ID NO: 9036
  chr12:111472058-111472195
  hyper

SEQ ID NO: 50056 - DNA, 315 bp, Homo sapiens; identical to SEQ ID NO: 9037
  chr12:111472356-111472671
  hyper

SEQ ID NO: 50057 - DNA, 84 bp, Homo sapiens; identical to SEQ ID NO: 9038
  chr12:111472851-111472935
  hyper

SEQ ID NO: 50058 - DNA, 163 bp, Homo sapiens
  chr12:111473179-111473342
  hyper
tggaatctcagagaacgcaccgtggaggcgcggctccggcctctgttctttcccggagtgccccggacgcgcctggcaaggccccccagccttggagtctcgcaaagtctcggcgggtgcggcggggatcaggggcgggaaaatggtgcggataacagggcgg

SEQ ID NO: 50059 - DNA, 30 bp, Homo sapiens
  chr12:111843200-111843230
  hyper
gcgatgatgaaagccgtggtcgctattgca

SEQ ID NO: 50060 - DNA, 515 bp, Homo sapiens
  chr12:111844288-111844803
  hyper
cacgtgttagggagagcgttggggtaactgaggccgtgggatgggggagagggcatcgctgacgcccccagcccaccctacggtagcctcgccggttgggggcggccctcccctcaacttgtgcctggggaggagcggtcaggggtcacccattgctaccctgaaagtgaaagtagtcaaactgaggctgtgagcacagatgagcccttgggtgtgggggcagcgggggaggatgcgccggcccctccccactccccattccgggccatgtggctaagagggtagcgccctgattcaggaagcccctctccccagttcctgcactgccgaggtcgaccgggccaggcccccgcatgctgctgaattgggcggttcaccagggctaggcgtcccagagacaggtttctggtattgatcctctcacacctcttgcctggggttccctgggaatcccccgaccaaaaaacgtctggagtgggtgttggtcttctagatccgcacggtagggatggtat

SEQ ID NO: 50061 - DNA, 30 bp, Homo sapiens
  chr12:111884592-111884622
  hyper
atccaggaggtccggtggtgcacacggctt

SEQ ID NO: 50062 - DNA, 30 bp, Homo sapiens
  chr12:112036145-112036175
  hyper
catgttccggaaaacgccaccacagcctcc

SEQ ID NO: 50063 - DNA, 154 bp, Homo sapiens
  chr12:112123545-112123699
  hyper
aggcgagtgttccgcgagctccaatcggataacaaccagtgacacactcatagggcaggcgctggccggcgcgggccccggcgggctcaggcgaggctggaaggcgagccgagaggccgagcggcccggggccggcagcgccgccaccacctca

SEQ ID NO: 50064 - DNA, 30 bp, Homo sapiens
  chr12:112123949-112123979
  hyper
ggttttcgcacagtcgcgagttaacctctg

SEQ ID NO: 50065 - DNA, 30 bp, Homo sapiens
  chr12:112167993-112168023
  hyper
ggcctcaacccactcgatgacagtagcacc

SEQ ID NO: 50066 - DNA, 653 bp, Homo sapiens
  chr12:112204490-112205143
  hyper
aaccaaggcgagctgcgttcgcggggccgggtctttccgcacaggcggagggcggtggcgggcgcggaggcgtcgcgcgagccagggggcagccacgggccgggggtacctagcgccacccgcttcgcttgcatcagctgcgcgccccatcccgaggaatggtagaggcagccccgcccccggcccgcccccgcctttccattggctgccgcgcggggcggggagcggggtcggctcagtggccctgagaccctagctctgctctcggtccgctcgctgtccgctagcccgctgcgatgttgcgcgctgccgcccgcttcgggccccgcctgggccgccgcctcttgtcagccgccgccacccaggccgtgcctgcccccaaccagcagcccgaggtcttctgcaaccaggtgagcccaccggccgggctcgcgctttgttttccggcccgagtcccccgcaggcccctaggaaggccccgcgccgccgtgggccttagtgtactcatctggggctcgaggggtttgcagaggctgacctggaagcacatctgccccctcctctcctgcaagcattttagccccttcgccgcctctgacagtccccgtcccatttccccgtgacttgggccccctctccgtcttcgcccagcc

SEQ ID NO: 50067 - DNA, 30 bp, Homo sapiens; identical to SEQ ID NO: 9041
  chr12:112213516-112213546
  hyper

SEQ ID NO: 50068 - DNA, 30 bp, Homo sapiens
  chr12:112241750-112241780
  hyper
ctgcaggcatacactgaagtgaaaactgtg

SEQ ID NO: 50069 - DNA, 30 bp, Homo sapiens
  chr12:112546245-112546275
  hyper
tctgcagaaccacgcgtcccacggggcctg

SEQ ID NO: 50070 - DNA, 30 bp, Homo sapiens
  chr12:112546890-112546920
  hyper
tcctatttattctccgtcctgaagaaccag

SEQ ID NO: 50071 - DNA, 30 bp, Homo sapiens
  chr12:112645385-112645415
  hyper
agtatgacttcagatgtgaactgttaacca

SEQ ID NO: 50072 - DNA, 43 bp, Homo sapiens
  chr12:112689846-112689889
  hyper
attacaggtgtgagccaccacgcccagccggatgcttaactac

SEQ ID NO: 50073 - DNA, 30 bp, Homo sapiens
  chr12:112817767-112817797
  hyper
tcctttgaaaaccattcttctgtggaaata

SEQ ID NO: 50074 - DNA, 30 bp, Homo sapiens; identical to SEQ ID NO: 9042
  chr12:112842259-112842289
  hyper

SEQ ID NO: 50075 - DNA, 30 bp, Homo sapiens
  chr12:112847007-112847037
  hyper
ttttggcttcagtgcggaaccccaacgtgg

SEQ ID NO: 50076 - DNA, 30 bp, Homo sapiens
  chr12:112856505-112856535
  hyper
gtagacgcggagcgcgcagctcacacctgg

SEQ ID NO: 50077 - DNA, 36 bp, Homo sapiens; identical to SEQ ID NO: 9043
  chr12:112884176-112884212
  hyper

SEQ ID NO: 50078 - DNA, 197 bp, Homo sapiens; identical to SEQ ID NO: 9044
  chr12:112888120-112888317
  hyper

SEQ ID NO: 50079 - DNA, 30 bp, Homo sapiens; identical to SEQ ID NO: 9045
  chr12:112891142-112891172
  hyper

SEQ ID NO: 50080 - DNA, 87 bp, Homo sapiens; identical to SEQ ID NO: 9046
  chr12:112915450-112915537
  hyper

SEQ ID NO: 50081 - DNA, 117 bp, Homo sapiens; identical to SEQ ID NO: 9047
  chr12:112924320-112924437
  hyper

SEQ ID NO: 50082 - DNA, 153 bp, Homo sapiens; identical to SEQ ID NO: 9048
  chr12:112926826-112926979
  hyper

SEQ ID NO: 50083 - DNA, 30 bp, Homo sapiens; identical to SEQ ID NO: 9049
  chr12:113013033-113013063
  hyper

SEQ ID NO: 50084 - DNA, 319 bp, Homo sapiens
  chr12:113229230-113229549
  hyper
atgtcgagaagtcccgtcccccacccctccggactccccccttctctgctttaaccatccaattacttaacttctctgcctaggggttcgcttcccacccatcccctcctccaaggcatcttagcgctgtccgtggtgctgaccgccaatcccctggttgccgtttcgaccagctgggatctctggtgcgcccaacctcccctcccggcctcccacctttctttctccaggcaccgcacacataaatcacgggtgggaggcaggcttggttcccgcttggttccccctgcactgggaagctgccgccccgcttcccttg

SEQ ID NO: 50085 - DNA, 30 bp, Homo sapiens
  chr12:113376666-113376696
  hyper
ctcccccgaacatacgagccaggtaggtac

SEQ ID NO: 50086 - DNA, 9 bp, Homo sapiens
  chr12:113494406-113494415
  hyper
ggatttggg

SEQ ID NO: 50087 - DNA, 794 bp, Homo sapiens
  chr12:113494430-113495224
  hyper
cgtgtcagcgccggtggcgctcagggccgagatctgtctcctccccttcctcctcctccgccccctcccctctccctcccggagcacggccgaggcctcctcccacccgcgagatcccggcggccgccagccggctcctgcgtccgtccgtcggccgggcagtctgtccacgcgcggaaagctcggcgcggcggccgaggggcctgggagggaacgggcgcggaggcgggaccgcggctccctcccactccggggggagcccaggaggcggcggtgctggagcgcgagccggagccggagccggagacgaagagaggcggtgagaacgcgggtgcttagggaccccacccccggctcccgctgggggcccgcgagcggctcggggacgtctgggctggggaagcggggctgttacccccagggcgggaggcagagacgatccagctcctggcttcgccccctccgcgacgcgacccccgaggggccctgggccgcgcctgcagcgccgcgcatccccgtgcttcccggcgcaccccagcgcacccggcatccccccggcagggcgagggccccgggggaagggaaggctccgggagccaaggagggcgccccccaggcggagagtctcggaaaaccgcgcccccggcccctgccttccctccaggcctgccccaagggaaagcgggcggggcgaccccgtacgccccccttgctgtcccccttcggttccccattgttctcagccgaatgctctcctgggaaggggggagggggtgctgcgctctcctcttaaa

SEQ ID NO: 50088 - DNA, 420 bp, Homo sapiens
  chr12:113541666-113542086
  hyper
gcacagccagcccaggcggaagtgggacacccgctgattgacgggtggggagggcggagcctgcagtccgccctgccccctcacctgagcgctcagcctggaggcagcaggtccagcgcgcgctgcggaaggcaccggggtggcaggcggccagcttgttcgggttgggggcgctggccttgcgcaaggccgagagccactggttgagctcattcacattctgcagcgggtgggaggcgatcagggggcgggtgggaacagagggacgccccccgctccccatcgcggtggggtctcaccttgcactggaggtaggtggtgtgcagcgcccccgtgccgtcctgcgtcaccacctgcatcacgtggggcagttggaaggcgccctcgtctacgcgctccacggcgcggatgtgagacacg

SEQ ID NO: 50089 - DNA, 30 bp, Homo sapiens
  chr12:113573571-113573601
  hyper
gggggcgggaggggcggcccagggacctcc

SEQ ID NO: 50090 - DNA, 30 bp, Homo sapiens
  chr12:113573927-113573957
  hyper
tggtgggtgggaggcgtcgccagagagagg

SEQ ID NO: 50091 - DNA, 30 bp, Homo sapiens
  chr12:113590909-113590939
  hyper
cgcccctggttttgcgagcgaatgtcaggg

SEQ ID NO: 50092 - DNA, 507 bp, Homo sapiens; identical to SEQ ID NO: 9054
  chr12:113592182-113592689
  hyper

SEQ ID NO: 50093 - DNA, 30 bp, Homo sapiens
  chr12:113623579-113623609
  hyper
ctggattcgcgggccgttcacacgtagcct

SEQ ID NO: 50094 - DNA, 39 bp, Homo sapiens
  chr12:113659024-113659063
  hyper
tgggttggactcaacgagtaaggcggggaacaagggagg

SEQ ID NO: 50095 - DNA, 31 bp, Homo sapiens; identical to SEQ ID NO: 9055
  chr12:113772605-113772636
  hyper

SEQ ID NO: 50096 - DNA, 398 bp, Homo sapiens; identical to SEQ ID NO: 9056
  chr12:113796496-113796894
  hyper

SEQ ID NO: 50097 - DNA, 518 bp, Homo sapiens
  chr12:113900159-113900677
  hyper
gtctgagcccagcaatcctggcgccccacccagggggagagcaggatgtgtgcgtgttcgagtccggcctgctccctcgggctcaacataaacgtcaaagtaaggaagagcgggagctggacccggctggccacttcctgacccacagccctattcctagagaagctgaccttgagcctcaagattggccaccagggagcgccagcgtgcaggtggctcggtctccctctcggtggctcccggttcacgcgagttcctcgctcgctctccgtcttctccctctggctgacgctgtctctccatctcctcctcatcttgccccctttcctctccctctctttcaatctctctccttttcttatcatctttttttttaaagacggggaaagcacagcgagaaataagattacaaaatgccactcggattgcagagagagggaaaaacaccgtctccgccccttggcctcaccctctctcagtccaaagaggtggcggtggctgggtgggtgggtgggggc

SEQ ID NO: 50098 - DNA, 406 bp, Homo sapiens
  chr12:113900752-113901158
  hyper
cggttgctgggagagtactggcggtgggctgaggctcctggagagcccgcggggtggagatgggggtcggccccccctcggcgcccagccgaggagcagctgccagttgagtgcggacccgagagagaacccccgagggacacccacgtctcccaccgcgtctgcgtcgggcgttttggtttcaggaggctgcttcggggcggggcccccgggggccgagcgcggggggcggcccggcggccttaccacacggcggcttcgttgagctcggggttgggatgcgacaggggtccgctgtagccgctggtgccgctcattgggaagggcgggctgggcccgccgctgaatacctcgccgggcatggggtgcagcgtgcccggcaggcctggctcggggctcggtgtgt

SEQ ID NO: 50099 - DNA, 610 bp, Homo sapiens; identical to SEQ ID NO: 9059
  chr12:113901407-113902017
  hyper

SEQ ID NO: 50100 - DNA, 458 bp, Homo sapiens; identical to SEQ ID NO: 9060
  chr12:113902041-113902499
  hyper

SEQ ID NO: 50101 - DNA, 30 bp, Homo sapiens
  chr12:113902784-113902814
  hyper
gcacccgctttgtacggcgggaaaaccagc

SEQ ID NO: 50102 - DNA, 563 bp, Homo sapiens
  chr12:113903015-113903578
  hyper
aaccattaatttaattctccccgaaagtgaaggggaagatggggagcggcaaatttggagccccaaagggacagggatgggagacggccgcggcccgcggcgagccggaaaaccagcgaaggccgctgcccccgcgccgtgcgcgccgcctccgcccatatggcggccgggccggaggtaattggaacaaacgccgtctgaaaagggcacaaaagccgcagctggggctttgtccgcgctcccacggggagccgccggccccgccgcccggcccctttctcgcccgctgccggtcgccaccgccgggatctcccagcgcggattaggcggggctgcctcgctgggggctggggagtcttccccaccattacggggaacgaggggcccccagtatccagctccccacctcatccagcgcgcagggagaggaggcggtgggataggtcggggcgggggcgaagtggtcctcggggaaaccttggttaattatccaggcggggaaaaattccgggccggtaccgcccccactacctcgctgctccgggcccagattttgtagggaa

SEQ ID NO: 50103 - DNA, 2007 bp, Homo sapiens
  chr12:113904491-113906498
  hyper
tgctagtgagcaggcggcttggaatgaatccagacccccatcccctcccctcacactaccctccagcgctcggaatccacctcatgccaagtacaccaggcacagggcggcaggaaggctgtgcgtctgtccgtgggggccgcatgcatgtggatttgccagtactggcctcagtgtgactggtgggagtgtgcgcgtctgtggagttgtgtctccgtgagtgtacctgtgtgtgagagggtggaatttacctatacgtgatcgtgcgatcgtgtctagacgtgtgtccctggagtctctgaacgcaagtgtgagtgcaccttgtgccctgcgtgggtgaatgtgtcactgtatctcgtgtgtgcttctgtgtgcatcactgtatgggtgagaccatgtatctgattttgtgtccaggacatgtgggtgagtgtacatgtgtctgtgatcgtgtgtccagcgagtgggcgatgttctggagcggcggaaagcgtgctggccgggacccttcgccctcagctcccggaataggacaggtgcggaacagcgaatcccggggcgccccttacctccgtagtaggtgtacggggtggaccccaacatctcagactcgtccaagcggccgcccagcggacgcatgcgccgcggactccggaagaaggcgtgcctccgggcgcctagggcgctcagctgtttcatccggcgttctttggaccgtcggttctgaaaccacacctgggacagaggagggggctgtgaacccaggatcaggagtgtcctctccccccctcttctcccttccctgactgggctgcccctgctgggtccttgcgcctcttccgcaccaggactcccccgaggcggggccgggccggattaggccgggaggggtggagagaggcttcggcgaaccagccaagggtgaaggatttcgcggacccgtggggcgactcataaagacttgggcttcctggtccccggctcgcccgcggcctgacggctctataaaggcctccctcccggcacggctctcgcctcggcccctcggctccggagccagcctctggccgtttgtctgcccgcgcttcggcgcagggagggagggggcatcgcctgtttctctgctcgaaaggtggaggtaaagagggatcccggaccccagagaggcttacaaccttccataagcaaggcggggggcggaattcagagaggtaaagtgacccgcccccaaatcgcaataccaggaggacagcagggctagatggaatctttcggttcacagtccccgacctcgggcaagtgccccactcgggcgcacggtctgctcccagaccagaaccaggcgcgctcgtagccaaggaagcttggcgggagactcctccgaggctcccggctcccaggccagcggggctaaggagctgtgcccgccccgggccgcacctggatgacgcgcatgttgaggccggtctcctgcgccagctgctcgcggatgtggcgcgtgggcttgggcgtggcggcgaaggcagccttgagcgtctccagctgcttggccttgatggtggtgcgggggccgcgccgcttggtgcccgagttctgctcctcgttctcgttgttggccgtctccttgtccgacgaggtcgagttgtccgtctctttggggtcgtcctgcagtgcgtcctggaggtccggggacaaactgcggtccgtacaggatgacactgcgggcggacggatcgggaaggggacagcggcgtcagcgacggccagacgcctcttcagtccagtggcgggttcccgccggcccaagctacggcctgcccaggctacggccagccccgctggattccctcccaaacctgcgacagcccctcccccagggacccggtgcccgcccactctctccaggcggggctgggcctttggaggggcgctcttaagccctctccgcgcgtctcagctagtacctgggtaagggtagggggacgcgtaccctctggagaactccca

SEQ ID NO: 50104 - DNA, 285 bp, Homo sapiens
  chr12:113906998-113907283
  hyper
cgatgacgtagagctcctcgccggtggacagctgcttgttacacaccatgcaggtgaaacagttgaggtgaaagactttgctccgggccttgcgcaccaggtcgctgggcgagatgccttgcgcgcagccggcgcatttcgtgccaaagcgcctgtggacacaatgtgcctgtcactatggggtgggactgcatccagccctccccagcccctgacctcttcccacccgacctggcttcggtgaagtccccatttccatatctgtcaaacggaaccccaatcctg

SEQ ID NO: 50105 - DNA, 30 bp, Homo sapiens
  chr12:113908945-113908975
  hyper
cctccgcctgggctcgggacctttcctgga

SEQ ID NO: 50106 - DNA, 30 bp, Homo sapiens
  chr12:113909373-113909403
  hyper
cctccgctgcccttcgcctcttgtctcagc

SEQ ID NO: 50107 - DNA, 97 bp, Homo sapiens
  chr12:113910416-113910513
  hyper
cagggggagattcagggtggacgggtcttcccgcagacagctcggaggtggcactcaccacgtctctcctttcctcgctgcaccttccagattccag

SEQ ID NO: 50108 - DNA, 140 bp, Homo sapiens
  chr12:113910972-113911112
  hyper
ctgagcttgttagtgtatactcgctgtttgagaattccatttttgcatctgtttattgtgttagtaccatcaatcctgtgagtaaatttctgcgtgtgcgttttcgtgtgtgcagattcgtgtgtttgtaattgtgtatg

SEQ ID NO: 50109 - DNA, 340 bp, Homo sapiens
  chr12:113913883-113914223
  hyper
cggcggcgttacaaattgtaaatttaaattgctcgccggattcattacctcccctctttgatttcagccagccgtgaaaaattatactggtgtaccactgagaaactgttttgccgcaaagagcctacgcctaatcactggctttctccctccgacaaaagtgtaattattttgtttggggtgtaaatataggccgcgcctcgcacacacactcagcgtcccgcagcgccgcagagcaccgcccgccgccggaaggaatcgggcccccgagtaggagcgggcgtgaaggctgagccccgctgtctggaggccggaggagagcggctggtgtggcgctccg

SEQ ID NO: 50110 - DNA, 30 bp, Homo sapiens
  chr12:113914521-113914551
  hyper
gtgtgccccactggcgctaggccgtggatt

SEQ ID NO: 50111 - DNA, 30 bp, Homo sapiens
  chr12:113916458-113916488
  hyper
gcccggctgaacaccgcgagccaaggggct

SEQ ID NO: 50112 - DNA, 30 bp, Homo sapiens
  chr12:113917064-113917094
  hyper
tcgggaacaaattccgtgagaataaaatca

SEQ ID NO: 50113 - DNA, 143 bp, Homo sapiens
  chr12:113917373-113917516
  hyper
gtgggtgcagcttgttgaactcggagccagacgctttttctggcgaaacggagaaaaaacgccgcggaaacggtgcgcagggttggggagtataggttctgattgcaacataattccgcaagcttttttattttttatttttc

SEQ ID NO: 50114 - DNA, 120 bp, Homo sapiens
  chr12:113917580-113917700
  hyper
cgggtcttggggcgaggcttagctggtctgggggtccttgcgtgtccacagccccggatacgcacccgcgaaacgttcgacatcgccgcttttttgttttgttttgctttgtttttttag

SEQ ID NO: 50115 - DNA, 397 bp, Homo sapiens
  chr12:113917730-113918127
  hyper
cgcggccggctggggcctcgggcagtgacagtgaaacgaattccaaacccattctgaactcgccatggcgctctcctgccctccaacacccaccccaaacaccgtgtaggcagaagcgaggttccccgtgaagccgggttaaaatcggcagctgagatgcggtgggatgggatcatagccgagttcggaggatgcggggagagaatagaaaaatctccatcgttctgctctgctctctttctttctcctctaagcaggtttgccggagaaggcaggggtgagccacggtggctgcccggctgtgcaccggcgccggagtttggaccaagacaaagacaggagctgtccgcggtgctgaatcggcggcgccgtcgccggagcaagggggcttctgtaa

SEQ ID NO: 50116 - DNA, 30 bp, Homo sapiens
  chr12:113957640-113957670
  hyper
catttgttaaggggcgaaagtcctcaggtg

SEQ ID NO: 50117 - DNA, 492 bp, Homo sapiens
  chr12:114029352-114029844
  hyper
cagaggctagagtgtccctagcgtcacgccctgtcgccctcccctgagctcccggaagcccatggggccgcggccaagtttccccgcctcccgaggagagacagagaagccacgagtcgccgggtgggcgcggcgctcctgggctcaccggggcgcattggcactggcggcggctgcgcgggctcggccggccccaccatcaattaagcgaccgcggggtccggcgagcggcagcgtgtgtggaaattaccttttgatttcttaattacattgtcctcacctgcagctcaacccgcctaggagaggcgctcgccgagctcgattctccgggtgccataaattaggacgccagtcgccggcgaacgctgggggcttccagtataccttccagcgcagcccgcaggctatttttatctccctcagcacctcggcacctcggaggagcttctgctaattcactaccccgacaccgtctcatctcccctgcaacca

SEQ ID NO: 50118 - DNA, 46 bp, Homo sapiens
  chr12:114075829-114075875
  hyper
aaacgcgcagccccccgcccccggctcgccccccactccccgccgg

SEQ ID NO: 50119 - DNA, 123 bp, Homo sapiens
  chr12:114075909-114076032
  hyper
cgcgtttcacacagcgcacaatggccgccctcaaaggcgcgccgcccgcattgttcgggccggcgcccgcgcgtcctacctccgcgcgcgaattaacccccgtcaccccgccattgtcaccgc

SEQ ID NO: 50120 - DNA, 68 bp, Homo sapiens; identical to SEQ ID NO: 9068
  chr12:114833897-114833965
  hyper

SEQ ID NO: 50121 - DNA, 8 bp, Homo sapiens
  chr12:114834208-114834216
  hyper
cgatctaa

SEQ ID NO: 50122 - DNA, 30 bp, Homo sapiens
  chr12:114837557-114837587
  hyper
cccgttccgctctccgcaagatccatcccg

SEQ ID NO: 50123 - DNA, 265 bp, Homo sapiens; identical to SEQ ID NO: 9070
  chr12:114838757-114839022
  hyper

SEQ ID NO: 50124 - DNA, 30 bp, Homo sapiens; identical to SEQ ID NO: 9071
  chr12:114841187-114841217
  hyper

SEQ ID NO: 50125 - DNA, 30 bp, Homo sapiens; identical to SEQ ID NO: 9072
  chr12:114841521-114841551
  hyper

SEQ ID NO: 50126 - DNA, 40 bp, Homo sapiens; identical to SEQ ID NO: 9073
  chr12:114841855-114841895
  hyper

SEQ ID NO: 50127 - DNA, 30 bp, Homo sapiens
  chr12:114842685-114842715
  hyper
ttgaatctgcagcccgggtccccgcaatgc

SEQ ID NO: 50128 - DNA, 185 bp, Homo sapiens; identical to SEQ ID NO: 9074
  chr12:114843001-114843186
  hyper

SEQ ID NO: 50129 - DNA, 687 bp, Homo sapiens
  chr12:114843260-114843947
  hyper
cggcggcctcccagactccatttgccggggagctccgagccgcgcaaaatctctgcaagctgtgctctgcagaatgcaaagccgggctggaatccgccattcccgccgccccagccgactcggccgacgagctccctcctgagcctcccgggccatctgccgggacggttacctcgttcggtgaagccggtgcattcaccacatcctctgctgctcctagcagggaagccggcggtgaggcgggggagcaggcatggtggctccggggtttatgcggggtttactgcttacccagaatagcggctactgctgcctactagggcgcacctaccgctggagcctccgcggcgactgcccacctccaacacacacctcctctgctgtgcgcttgctctccctaaatacttcccagttggcaagcgccaaagaacacaaaatagcctccaagagcaccggcaaccatataatctcagtgccccgctcctcctttacacccccagggagggaaagttggaagcccagtgaatggtcgaagtcctttctgagcgcagctttcaggattaaagttcccggattcgaggtaagagtcagtctctctcactctctctccctctctctctctctctgaaatacaagccaactcagctgagcacagtgacgttgggttgcctcgatgctcacaaagta

SEQ ID NO: 50130 - DNA, 30 bp, Homo sapiens
  chr12:114844184-114844214
  hyper
acaaatcatttcaaacgcggtcggcttcta

SEQ ID NO: 50131 - DNA, 371 bp, Homo sapiens
  chr12:114846147-114846518
  hyper
gagggaactcttcacgaagggaggtgggagtccacctcagacctctattggaaggaaatcgagttgttccgggggactgaggtctcttgcataaggcatgggatccttattattattattattatttttaaatcccccgcggaggagctctgggcaaatgaataccgaggcgccgctctagctggttaggcttgggatgcgataactcagtgccctcttgcagacttgcatagaaataattactgggttgtcgtggaggggacacgagacagagggagttctccgtaatgtgccttgcggagagaaaggtccaagaatgcaattcgtcccagagtggcccggcaggggcggggtgcgagtgggtggtggag

SEQ ID NO: 50132 - DNA, 137 bp, Homo sapiens
  chr12:114847042-114847179
  hyper
cgggcagcttccagcgccggccacaagctcccaggccagctgggccgcagacccctttgcttccagagagcacaacccgcgtcctttctctcagccaggctgcagtggctgccccgagcttcgctttcgtttcccaa

SEQ ID NO: 50133 - DNA, 13 bp, Homo sapiens
  chr12:114847423-114847436
  hyper
gcagccacctgga

SEQ ID NO: 50134 - DNA, 79 bp, Homo sapiens
  chr12:114847577-114847656
  hyper
cgggcagtaaactccggagccggctacagcgcgcatcctcccttcctcctttcggagaactgtcgctttcccgaagctg

SEQ ID NO: 50135 - DNA, 476 bp, Homo sapiens
  chr12:114851898-114852374
  hyper
ccctgctggaaatgcgcacagcccctgctggaaatgctccttccctttccctactctcccgcgccttcaggtagagcgtttaagggattcccagcagttcccgagtacacgtggaggctgctccccggcgtgctggagcggctgcgggctcagtctgcggagggcgccccggtgaagtgtggagttcgcagtcggacgcggccgcccggcctctcggttccgggccttcccctcccaggcactgcgttctgcggccgggacagcacccgccaggcgcggcccttctcctatctttgctctgtggctctccctggggccggaggagtcctgccgcctcaaggccccagactccgcacccggagggacttgccgctagcgccgctccttcagcctccccaggcgctcccttcgcttcccggtgtttcaggctcttcccaccgcctgtttgctctgggcgcagcgctggctgccacact

SEQ ID NO: 50136 - DNA, 203 bp, Homo sapiens; identical to SEQ ID NO: 9081
  chr12:114877706-114877909
  hyper

SEQ ID NO: 50137 - DNA, 59 bp, Homo sapiens; identical to SEQ ID NO: 9082
  chr12:114878129-114878188
  hyper

SEQ ID NO: 50138 - DNA, 113 bp, Homo sapiens; identical to SEQ ID NO: 9083
  chr12:114878472-114878585
  hyper

SEQ ID NO: 50139 - DNA, 107 bp, Homo sapiens; identical to SEQ ID NO: 9084
  chr12:114878862-114878969
  hyper

SEQ ID NO: 50140 - DNA, 30 bp, Homo sapiens; identical to SEQ ID NO: 9085
  chr12:114881661-114881691
  hyper

SEQ ID NO: 50141 - DNA, 30 bp, Homo sapiens; identical to SEQ ID NO: 9086
  chr12:114882053-114882083
  hyper

SEQ ID NO: 50142 - DNA, 30 bp, Homo sapiens; identical to SEQ ID NO: 9087
  chr12:114882588-114882618
  hyper

SEQ ID NO: 50143 - DNA, 110 bp, Homo sapiens
  chr12:114883301-114883411
  hyper
ctgacagagaagcgcggttgctgcaagatgtctgcagaaatgggtctttaaaagtttccacattgtttagctacacaaacgtgtttgcggttcccgaggccctccccctc

SEQ ID NO: 50144 - DNA, 37 bp, Homo sapiens; identical to SEQ ID NO: 9089
  chr12:114885146-114885183
  hyper

SEQ ID NO: 50145 - DNA, 16 bp, Homo sapiens
  chr12:114885371-114885387
  hyper
cgctggaagaaacgaa

SEQ ID NO: 50146 - DNA, 30 bp, Homo sapiens; identical to SEQ ID NO: 9091
  chr12:114885606-114885636
  hyper

SEQ ID NO: 50147 - DNA, 365 bp, Homo sapiens
  chr12:114886065-114886430
  hyper
caggtgcacccttaccggcaacttggggtacacaaccggggtcccagcatcacctcccctcgccccgcgctcatgtccccactctgaggcccgtgggcactgaggtggcaccgacctcccaggacccctgcattgcctcacactttcacttccctccctgctccgcagtgtccataaaataccagccgttcacctgcctatagcgaacggatccgagggtggaggcaatgacttacctggttgtgggtggatggatgaagaaggcctttacttggagcctaagccctggcgcgcgcgcaccacggcgcgaactgctccatcaagcatccactggcctccagccgcgtttccggttgtagcactgg

SEQ ID NO: 50148 - DNA, 32 bp, Homo sapiens
  chr12:114886560-114886592
  hyper
cgagatgcctgcctaggcgtttctggttacaa

SEQ ID NO: 50149 - DNA, 30 bp, Homo sapiens
  chr12:114889027-114889057
  hyper
gcttcccacggggtcgtccctgccagggca

SEQ ID NO: 50150 - DNA, 290 bp, Homo sapiens
  chr12:114917690-114917980
  hyper
gcagtcttttagggtcgccggaccggcttcctggaatacctgaggtcgcagattcaggtagtaaacagatgtggggtccaccctccgccaaatgggcggggcaagttcaacatcccgcctccccgaccttaagtgcgcagggcgcctggtgctcgcttgccgaaaacgttaaacatttttctttgatcccgctctttttttggggggaaaaatgtctggggaagagggaagtagtgggggagtgaggtgcctgcccaagcgaaattttgatgcccgcctgcctctggctc

SEQ ID NO: 50151 - DNA, 30 bp, Homo sapiens
  chr12:114918285-114918315
  hyper
ccttttggtggtggcggtggtgggctcctc

SEQ ID NO: 50152 - DNA, 30 bp, Homo sapiens
  chr12:114918678-114918708
  hyper
agctccgcctgccccgggttccagcgagag

SEQ ID NO: 50153 - DNA, 140 bp, Homo sapiens
  chr12:114939042-114939182
  hyper
attaaactcgtctccggcccctccgatctgcagctcgatcaggggcagacactgttgagggaagccagagagaaggggcaggcctgctggcggtcagtgatgcatgatggaaggaaccgggaggcgcgccctggaagcag

SEQ ID NO: 50154 - DNA, 30 bp, Homo sapiens
  chr12:115106021-115106051
  hyper
cgagccagctgcggcgacctggacgcattc

SEQ ID NO: 50155 - DNA, 343 bp, Homo sapiens
  chr12:115106458-115106801
  hyper
tgagttcttttttccccaattcgggagagcgcaaccagccaactaccaccttctcagaggcgcggacaccgcgcgttgtcgctggatccagagctgcccccttcaggctgtagccgctgcgcagaaggagcgcgccctggaaatctcccagtcctcgggggagccccagcctcaaaggtccccagggcccgtctcagctcaggccctgccacccccgcagcgcaccccgcccctccccccccccgcgactccgcaccaacatactctggttgtctgtcttccctcccacccccggagacatcgcagaggaggctgtaggggtccccacgtgcctggccagaga

SEQ ID NO: 50156 - DNA, 2285 bp, Homo sapiens; identical to SEQ ID NO: 9096
  chr12:115120680-115122965
  hyper

SEQ ID NO: 50157 - DNA, 30 bp, Homo sapiens
  chr12:115174583-115174613
  hyper
aactctccccagagcggccttttccctctt

SEQ ID NO: 50158 - DNA, 30 bp, Homo sapiens
  chr12:115836506-115836536
  hyper
tcctgctgcctctgaactgttgcctaccag

SEQ ID NO: 50159 - DNA, 183 bp, Homo sapiens
  chr12:115889540-115889723
  hyper
gatgttgctcaaacacagcagcgtcgtgacagtgccaatagccagcagtctcctgtccgcgtgggttgcgagccccgggcgtggacggagttgggagcggagggcggcaggtgccagcggggcccgcctctccctgcaggcggccccggcaagttcacggccggcccggggcgaggggcgagc

SEQ ID NO: 50160 - DNA, 30 bp, Homo sapiens
  chr12:116185147-116185177
  hyper
tgagtttagagaagacgacgacaatggtca

SEQ ID NO: 50161 - DNA, 30 bp, Homo sapiens; identical to SEQ ID NO: 9097
  chr12:116354934-116354964
  hyper

SEQ ID NO: 50162 - DNA, 184 bp, Homo sapiens
  chr12:116713912-116714096
  hyper
atacatttttaatttcgatgaatctagacaccgtcggcgggtgccaggcttccacgagaacaattgacaccctaactgcttcaagattaaggcaggcgattcaaatccgaaggaaaagttgtcaattatcagaaagagagagcgcgagagaggcgaaggcagataaaagcgatgttatcaaacc

SEQ ID NO: 50163 - DNA, 142 bp, Homo sapiens
  chr12:116946057-116946199
  hyper
aaataaatcaaaccaagccaacgccaagctctgcaagctctcagcggctccagcgttttcaaggagcggggtcaaggtcaaagggcccctcccaggctgcccgggcggggctgtagtgggatgctggtccccaggctgcgcc

SEQ ID NO: 50164 - DNA, 377 bp, Homo sapiens; identical to SEQ ID NO: 9099
  chr12:116946250-116946627
  hyper

SEQ ID NO: 50165 - DNA, 115 bp, Homo sapiens
  chr12:116971016-116971131
  hyper
gaacatctcgaaggcgacagattccagttgttaaggctacgatgaaatagcagaagactctgggaagcagcgtgcaacgagtggcaaaggagcccctaacgctctttcttctgtg

SEQ ID NO: 50166 - DNA, 30 bp, Homo sapiens; identical to SEQ ID NO: 9101
  chr12:117146994-117147024
  hyper

SEQ ID NO: 50167 - DNA, 30 bp, Homo sapiens
  chr12:117175869-117175899
  hyper
gtgaccccgccctacgccccgcctccgctc

SEQ ID NO: 50168 - DNA, 30 bp, Homo sapiens; identical to SEQ ID NO: 9102
  chr12:117176098-117176128
  hyper

SEQ ID NO: 50169 - DNA, 205 bp, Homo sapiens
  chr12:117316475-117316680
  hyper
gctgggaagccgagcggggcatcctgaggtcagggcgccagaggctgcagaaccctggagggtgtggctgcaggggacgcccgggcgggacaaggcaggtaggagaagaacccagaggtgtgggaagagggtgtctccgagtcagggcgcagcacggaagtaactctggggtagaaggcgagggcggggcgggggaaataaactc

SEQ ID NO: 50170 - DNA, 30 bp, Homo sapiens
  chr12:117316951-117316981
  hyper
ccgcacgcctggtgccggaaggggagagcg

SEQ ID NO: 50171 - DNA, 554 bp, Homo sapiens
  chr12:117317231-117317785
  hyper
gggcttcgcgtctgtcgctcaacttcctttttctgcaccccgcgatccatccaaaatgttcttcctgtccctgggattgggcagcctcagcctggcccctttcagtcgcgggagcccctggcctctccaacaggagagagagaaggtagggagaagtggatgggacccccggcgcccgggagccgggcagagagcgccccgaagcgcgcatttctcttcgccagcgcccgggctgcgcgggcccacgcgacatctgtcgcctgcggtcccggctcacaccccgcgcacccccgcagctccctgggcgctgccaccccccacgctccggctgccgcctttccccgcgggcgcagacgctcgggcctcgccttcaggcgccgctccaacttcccagggtgtctgcggcgcgcggcggggctcgggggcggggacctaagggcggctggctatgtcaccttcgagcttcaccttccggccctagacccatctatggtgggctcagcctgattctctctccctcattctctgcagcgctcctcgctactccaggatcc

SEQ ID NO: 50172 - DNA, 30 bp, Homo sapiens
  chr12:117319249-117319279
  hyper
tgttgtgctgacggcgctattattaattaa

SEQ ID NO: 50173 - DNA, 30 bp, Homo sapiens
  chr12:117319770-117319800
  hyper
taacgtgcccccagcgcctggctagaaacc

SEQ ID NO: 50174 - DNA, 30 bp, Homo sapiens
  chr12:117348612-117348642
  hyper
ctgaggggcagctgcgtaaacctctgcttt

SEQ ID NO: 50175 - DNA, 30 bp, Homo sapiens; identical to SEQ ID NO: 9104
  chr12:117349181-117349211
  hyper

SEQ ID NO: 50176 - DNA, 268 bp, Homo sapiens; identical to SEQ ID NO: 9105
  chr12:117536861-117537129
  hyper

SEQ ID NO: 50177 - DNA, 30 bp, Homo sapiens; identical to SEQ ID NO: 9106
  chr12:117537369-117537399
  hyper

SEQ ID NO: 50178 - DNA, 30 bp, Homo sapiens; identical to SEQ ID NO: 9107
  chr12:117628454-117628484
  hyper

SEQ ID NO: 50179 - DNA, 30 bp, Homo sapiens
  chr12:117747574-117747604
  hyper
gagttggcgaggctgtgaagaaacagtctc

SEQ ID NO: 50180 - DNA, 30 bp, Homo sapiens
  chr12:117797359-117797389
  hyper
agaggtgagatgaggcgcctatgggcgcgc

SEQ ID NO: 50181 - DNA, 399 bp, Homo sapiens; identical to SEQ ID NO: 9108
  chr12:117798055-117798454
  hyper

SEQ ID NO: 50182 - DNA, 192 bp, Homo sapiens
  chr12:117799086-117799278
  hyper
ggttgcacccactcgcctcctggtaggagccgcgcgcgtccctccccttcccctccgctttgtgcctccaagatccctccccaccccctctcccctagcccccactcctcccttctcttcttccctccccttgcgtcccctccctcagcctcagcgaacccaagttcgggacggaggctgcgggcttccccg

SEQ ID NO: 50183 - DNA, 138 bp, Homo sapiens
  chr12:117799330-117799468
  hyper
cgctgctcgctgcccggccgcccctcggaggagccgcggcgctaagtagctcctcacccagcggctggaaacgcggcataaatatgtagggactgagccgtgagctcagcgagggtcgtgagggggaatttatttctt

SEQ ID NO: 50184 - DNA, 30 bp, Homo sapiens
  chr12:118274656-118274686
  hyper
gggggtgccccaggccgggccccaagctct

SEQ ID NO: 50185 - DNA, 38 bp, Homo sapiens; identical to SEQ ID NO: 9111
  chr12:118313952-118313990
  hyper

SEQ ID NO: 50186 - DNA, 30 bp, Homo sapiens
  chr12:118407314-118407344
  hyper
cggagaggcgtcggcgtgaacctgggcaca

SEQ ID NO: 50187 - DNA, 150 bp, Homo sapiens
  chr12:118541716-118541866
  hyper
caccccgccccctgcgcccgccagcctactcctgccggcggaaaacaacaggagcgggatccctcccgcctcccagccaggcgggagcccaacttcctctaccttggcccgggaggagggctttctgccgagggcgcgccgagccgggtc

SEQ ID NO: 50188 - DNA, 614 bp, Homo sapiens
  chr12:118573923-118574537
  hyper
gagccagtgtgctgagctctccgcgtcgcctctgtcgcccgcgcctggcctaccgcggcactcccggctgcacgctctgcttggcctcgccatgccggtggacctcagcaagtggtccgggcccttgagcctgcaagaagtggacgagcagccgcagcacccgctgcatgtcacctacgccggggcggcggtggacgagctgggcaaagtgctgacgcccacccaggtacaccgggcggcgggcgtgcagcgagcggcacggcgcggaggcctgtgccggcctcctgggtgggacccagcggagacagggccaggggcggtggggaggttcagcctgcgtgtgtcgaggcccccccaggccagaggtcccggggtccatgtcccatgcctgggggccaccccgagcaccgggaacccggcctgtggcgtggccaggcaggttcggcctgcggcagaaattcattcacttttcccgggcttcagacccaagagggacctaggttcggaaacaggccggatccccctctccccccacaggccagggcgctggagagggacgtcgccgggacagagtaggctgtggctgcccggacgcccccagagcttcccctagg

SEQ ID NO: 50189 - DNA, 110 bp, Homo sapiens
  chr12:119212089-119212199
  hyper
acccccccacactgcctaccacgcggggcgtttgaacacgaatttggaggtccttgtttgtccttgaacgcggcagggagtggaggaaggcgccgggaggaggcacaaaa

SEQ ID NO: 50190 - DNA, 130 bp, Homo sapiens
  chr12:119212318-119212448
  hyper
cgctgctgaaatgcaatggacaaaagggagaggaatggccgcatcttccggctgcccgttgctatggtttccgcggagctggtgaaggggagggctgttaccaggcaacgggagagggaccaagacaaag

SEQ ID NO: 50191 - DNA, 978 bp, Homo sapiens
  chr12:119418345-119419323
  hyper
acctccacttgcttgggattacgattgaactgcgaggcggtaaggagatggggaggagagaccgaaaagtaactatccccctgctaatcctcgagattttcctctccaaccctcccactaagcgctttcttttccaaaacgtactcctttcccgagactagcggcattaggaaaagtggctgcaggcggattccccaggagtggatgggggtggggtggggtgagatgggaactctttcctctggacggggttggcggcggggacgctgggcaggccggctgtgagacacaaaagagatacccttgacagctccgcatgcacagatgtaacgctgcgccccttggcgggcgggggccctgctcggcagatggcgagaagccgaattggtgagggattgtctatcaaatggcactttctgggtggtggagacctcgctaacccccggcgcaaagaggaacgcagggcaccctctgtaccggcctaggccgtgtctcccaaaagtgagggtctgggggaggccggctggggtggatagattaagttttttacgagcccccccaaccccccccccccccccacgcagaagatcagctacaagacttgcgaaggggctggaaagaaaggtggcctggcccaaagggggcacccaggaaagggctgaggaaggccagcgatgatgggagaggagaggggcctgggaagcaggatctcctgcctggcgcagattggggtgccaggatggcttctcagagggatcagcgctgcaactcggtcgccgcggggccctggtgacaggcgcacgccccgccctttctcctcccaagacctgcgggcttttgttatgcagatggcggcaggaggctgagcctgaggaggagggggttggtggggaggaggagagacggagaggggggaggaaagtgcagctcgcgcgaccagcctcctcttccaacgtcacattgtgcgagagacaaaac

SEQ ID NO: 50192 - DNA, 590 bp, Homo sapiens
  chr12:119419368-119419958
  hyper
cgtcgcctcttctctcctggtgctgcccagaaagccagccctcccttcccttcttggggcgcagaggctcagccagctcagagcgcagcctggagccgacccagaagggcgaagaaagcccagcggacgagcctcctttctctgctgcctgcccgggctggggcgtcccatcccccgccctgaactccgatctctcccaccccacccctctctgggtttcacccggacagagccgggagctgggtgtcgcccccgtttggaatccacgtttcagcactttggacagcgccccggacgccccggcccctttgggttggcgatggcgagcgttcagcaaggcgagaagcagctttttgagaagttctggcgaggaaccttcaaagcggtggccaccccccgtcccgagagcatcattgtcgccagtatcacggcccgcaagccgctgccaaggtaatgatctccttcttagaaggggggatcctgaaggtcctcctttctggcctgtgccccagagcccggaggggtggatgcaggcagccgggccagggcgcctgtcttttcccgtcactactcggcggctcccgctgaaa

SEQ ID NO: 50193 - DNA, 30 bp, Homo sapiens
  chr12:119421330-119421360
  hyper
attccacctttggaacgtacctactgttgg

SEQ ID NO: 50194 - DNA, 30 bp, Homo sapiens
  chr12:119458732-119458762
  hyper
ctcgcccgtagagggcgctgtagaggcagc

SEQ ID NO: 50195 - DNA, 130 bp, Homo sapiens; identical to SEQ ID NO: 9115
  chr12:119499107-119499237
  hyper

SEQ ID NO: 50196 - DNA, 32 bp, Homo sapiens
  chr12:119616601-119616633
  hyper
ccagctgttccctccgcggattctccggggct

SEQ ID NO: 50197 - DNA, 178 bp, Homo sapiens
  chr12:119772413-119772591
  hyper
atgaccccgcccccacgaattccagccaatgaggaagccctcctcggcgtcccgttgccaagcaactgggttccccccacccccacccggcccaagggttagcagttgcctactttccccgcagtgcgataaacccctcgttggggccgccttagttctcggccgctctcggaggatg

SEQ ID NO: 50198 - DNA, 148 bp, Homo sapiens
  chr12:120031719-120031867
  hyper
gaagatgacaagaccgaggaggacgtgcccatgcccaagaactacctgtggctcaccatcgtctcgtgtttttgccctgcgtaccccatcaacatcgtggctttggtcttttccatcatggtgagtgaatcacggccagaggcagcct

SEQ ID NO: 50199 - DNA, 303 bp, Homo sapiens
  chr12:120032127-120032430
  hyper
cggggaagttcttccgtggactttgctgactcctctgaccttcctaggcacttgcccggggcttctcaaccctcttttctagagccccagtgcgcgccaccctagcgagcgcagtaagctcataccccgagcatgcaggctctacgttcctttccctgccgctccgggggctcctgctctccagcgcccaggactgtctctatctcagcctgtgctcccttctctctttgctgcgcccaagggcaccgcttccgccactctccggggggtccccaggcgattcctgatgccccctccttgatc

SEQ ID NO: 50200 - DNA, 771 bp, Homo sapiens
  chr12:120032454-120033225
  hyper
cgctctgtccaggcaacagtttcctctcgcttcttcctacacccaacttcctctccttgcctccctccggcgccccctttttaacgcgcccgaggctggctcacacccactacctctttaggcctttcttaggctccccgtgtgcccccctcaccagcaaagtgggtgcgcctctcttactctttctacccagcgcgtcgtagttcctccccgtttgctgcgcactggccctaacctctcttctcttggtgtcccccagagctcccaggcgcccctccaccgctctgtcctgcgcccggggctctcccgggaatgaactaggggattccacgcaacgtgcggctccgcccgccctctgcgctcagacctcccgagctgcccgcctctctaggagtggccgctggggcctctagtccgcccttccggagctcagctccctagccctcttcaaccctggtaggaacacccgagcgaaccccaccaggagggcgacgagcgcctgctaggccctcgccttattgactgcagcagctggcccgggggtggcggcggggtgaggttcgtaccggcactgtcccgggacaacccttgcagttgcgctccctcccccaccggctcacctcgcctgcagctgggccacggaactccccggccacagacgcagagccctgattcagcgctgtgaaaatcgctagccacccgtcccccatcaagtccgcccacacttgcccacgggtggtggcaccatattcgattcgtgggcacctgcaa

SEQ ID NO: 50201 - DNA, 30 bp, Homo sapiens
  chr12:120105357-120105387
  hyper
aaagcgtgagaacacgtgcattaaaagggc

SEQ ID NO: 50202 - DNA, 30 bp, Homo sapiens
  chr12:120106056-120106086
  hyper
ataccagcagtgagcgcgccgcgctggagc

SEQ ID NO: 50203 - DNA, 30 bp, Homo sapiens
  chr12:120315153-120315183
  hyper
ccaatcagcgtctccgctcctatgatagac

SEQ ID NO: 50204 - DNA, 30 bp, Homo sapiens; identical to SEQ ID NO: 9121
  chr12:120427167-120427197
  hyper

SEQ ID NO: 50205 - DNA, 30 bp, Homo sapiens
  chr12:120524638-120524668
  hyper
tttcccatgaatgacgagcacttattcctt

SEQ ID NO: 50206 - DNA, 30 bp, Homo sapiens
  chr12:120525012-120525042
  hyper
acggaggcagccttcggcatctgagccctc

SEQ ID NO: 50207 - DNA, 30 bp, Homo sapiens; identical to SEQ ID NO: 9122
  chr12:120525323-120525353
  hyper

SEQ ID NO: 50208 - DNA, 30 bp, Homo sapiens
  chr12:120638499-120638529
  hyper
atgaagagcagaggcgacccaccctgcact

SEQ ID NO: 50209 - DNA, 30 bp, Homo sapiens
  chr12:120638747-120638777
  hyper
ccgtcatctcggggcgtgcaagccgccacc

SEQ ID NO: 50210 - DNA, 30 bp, Homo sapiens
  chr12:120639078-120639108
  hyper
cctttaagtagggtcgcgaaggaaggcgct

SEQ ID NO: 50211 - DNA, 30 bp, Homo sapiens
  chr12:120806368-120806398
  hyper
ggagttggcgctgccgccggcgggtcccgg

SEQ ID NO: 50212 - DNA, 30 bp, Homo sapiens
  chr12:120806602-120806632
  hyper
gccggaccggcgggcgctcccgggctcgct

SEQ ID NO: 50213 - DNA, 30 bp, Homo sapiens; identical to SEQ ID NO: 9123
  chr12:120807603-120807633
  hyper

SEQ ID NO: 50214 - DNA, 30 bp, Homo sapiens
  chr12:120875541-120875571
  hyper
aattttagatagggcggtctgggatcagaa

SEQ ID NO: 50215 - DNA, 30 bp, Homo sapiens; identical to SEQ ID NO: 9124
  chr12:120875883-120875913
  hyper

SEQ ID NO: 50216 - DNA, 30 bp, Homo sapiens
  chr12:120884033-120884063
  hyper
cacactgctggtagcgcttgaagaggtcgg

SEQ ID NO: 50217 - DNA, 30 bp, Homo sapiens
  chr12:120884514-120884544
  hyper
tggacttcggcagccgcgaggcagtggcgc

SEQ ID NO: 50218 - DNA, 30 bp, Homo sapiens
  chr12:120933823-120933853
  hyper
caagccaatagggtcgcgcggcgaggggcg

SEQ ID NO: 50219 - DNA, 30 bp, Homo sapiens
  chr12:121019397-121019427
  hyper
accccgggatggagcgccttgcagctgtaa

SEQ ID NO: 50220 - DNA, 30 bp, Homo sapiens
  chr12:121022688-121022718
  hyper
ctccccagccgggccgcagagccattatcc

SEQ ID NO: 50221 - DNA, 30 bp, Homo sapiens
  chr12:121078181-121078211
  hyper
caggagcctccaggcgtgataaagagcgct

SEQ ID NO: 50222 - DNA, 30 bp, Homo sapiens
  chr12:121079467-121079497
  hyper
ctccgagcaggtggcgccaaacccactcct

SEQ ID NO: 50223 - DNA, 30 bp, Homo sapiens
  chr12:121087367-121087397
  hyper
gcttcttctctgcccggcaccccaaggaag

SEQ ID NO: 50224 - DNA, 30 bp, Homo sapiens; identical to SEQ ID NO: 9125
  chr12:121124596-121124626
  hyper

SEQ ID NO: 50225 - DNA, 30 bp, Homo sapiens; identical to SEQ ID NO: 9126
  chr12:121124878-121124908
  hyper

SEQ ID NO: 50226 - DNA, 30 bp, Homo sapiens; identical to SEQ ID NO: 9127
  chr12:121163872-121163902
  hyper

SEQ ID NO: 50227 - DNA, 30 bp, Homo sapiens
  chr12:121342273-121342303
  hyper
tcctgggttctaggcggctgctgctcgcac

SEQ ID NO: 50228 - DNA, 30 bp, Homo sapiens; identical to SEQ ID NO: 9128
  chr12:121409658-121409688
  hyper

SEQ ID NO: 50229 - DNA, 30 bp, Homo sapiens; identical to SEQ ID NO: 9129
  chr12:121454257-121454287
  hyper

SEQ ID NO: 50230 - DNA, 201 bp, Homo sapiens; identical to SEQ ID NO: 9130
  chr12:121476534-121476735
  hyper

SEQ ID NO: 50231 - DNA, 30 bp, Homo sapiens
  chr12:122110452-122110482
  hyper
gccccacctgcgcccggctcacctgcgctc

SEQ ID NO: 50232 - DNA, 214 bp, Homo sapiens
  chr12:122214096-122214310
  hyper
tgtgagccccctcctcgcccaccccgccacgtggtgagggttattttaagttctcagagacccaccgcgtctgcctcgtgctcttcttgcccctggagcgctgggggcatcctgagtcaggctgtgagaagattcgccaccagagggcgccccgggccctgggtcgtccaaggggacaaggacgttcccgtctgtgcttcggggttccctgacc

SEQ ID NO: 50233 - DNA, 30 bp, Homo sapiens; identical to SEQ ID NO: 9132
  chr12:122231022-122231052
  hyper

SEQ ID NO: 50234 - DNA, 1023 bp, Homo sapiens
  chr12:122231273-122232296
  hyper
cccgagggggcgccccggggtggcggccgcctgtccgtgctcgggacgctggggactgagggtcggggctctgggctcagggtaaggggcgtccctcgcccccaccccagccccgctgcgggcctcacctcggggaaggagccctggctgtacaccatgagcagcgaggtcttgccgcagccgccgtcgcccacgatcacgatcttcagctccttcctgcccggaccgggggcggcggtctgggccagggccccgggggcatccattgcccggagcccgcagcactggcggcggcgcgccgggcactagcggagccaagaggtcgggggcggggcggggccggaaccagccccgcccactcggagcagcgccgcctccgccaggcagcctcccggccgacctcccagcctcagtttcctttctgctaaggtctcagccctgggtgtgggtattcagctctcagtcccagggatactgcagcaccggaaaaacggggctcagctgcgagcaaagctcccacccccaacccaccgccaccctccgcgcgtcacgtcgcgcccctcgccggcgagacccgatcgtggctgcccagcgactccaggtgcccctgattagcaggctccgccttcggcagggaccctctgattggctggcgcggccagacagggtctcccggattggctggctgtgcctccgcaccgggttcgagaagcccccggcctccagctccgggaagagcccctcaactttgcactgccccagcggtgtggcttggcacatgtccgcctctggcctcagcttccccacaggaggtagcggcggtggcaccagggaagatgctgacgcgagagtcatgtctgcccacctcgcctgggccagggacgccagcgtgcacgcgggttcggggtgagggactgggctccgcttacccgcaccccgaccctgggctgcagggtggacgtctgacgccctctgccgggcaatcgcctcggcgccggccgctccgggcgcaggttggcccga

SEQ ID NO: 50235 - DNA, 76 bp, Homo sapiens; identical to SEQ ID NO: 9135
  chr12:122237446-122237522
  hyper

SEQ ID NO: 50236 - DNA, 30 bp, Homo sapiens
  chr12:122242591-122242621
  hyper
cgccgcggcggagacgacaacaacttgctg

SEQ ID NO: 50237 - DNA, 30 bp, Homo sapiens
  chr12:122243313-122243343
  hyper
tgaaactgtaatcacggcgcagatacagtg

SEQ ID NO: 50238 - DNA, 30 bp, Homo sapiens
  chr12:122243740-122243770
  hyper
atcgatgagttctacgtgggcccggtgcct

SEQ ID NO: 50239 - DNA, 30 bp, Homo sapiens
  chr12:122249854-122249884
  hyper
gcacccgtctcctccgctccgtctaggctg

SEQ ID NO: 50240 - DNA, 30 bp, Homo sapiens
  chr12:122326468-122326498
  hyper
tgagtcagctggggcgagatcatcccctag

SEQ ID NO: 50241 - DNA, 47 bp, Homo sapiens
  chr12:122459558-122459605
  hyper
cgaggaagggtcagcgcgcgtgtccgcacgcccgcccccaccgcgcg

SEQ ID NO: 50242 - DNA, 198 bp, Homo sapiens
  chr12:122459881-122460079
  hyper
gtgcgagtgtctgtgcgcgagtgagtgagcggcgggcgggcgcgagtgtggccgccgcggagcgcgagcaggacccggcgggcgcgctccccagcctccgtctccccgccggaaccatgtcgggcaggtcggttcgagccgagacgaggagccgggccaaagatgatatcaagagggtcatggcggcgatcgagaaag

SEQ ID NO: 50243 - DNA, 360 bp, Homo sapiens
  chr12:122461020-122461380
  hyper
gatcgaacctttccgcggcctcgtcggggtctgctcggaatcggcccctgggccaggcccgaggcgcaagcagatcgccaggttgggtcagagttgttgaaaactccccgctgcctgatttcaactttattatttttttcccacgccttcactggggtcccggagggagaggagccgccgcaacgctggctctgagtgtcagcgcccgcgggctcgtctcgaccctttatttcgagcctggaagctgggcaggccctgtggcaggggatgtttacgtttgggggtgtcgtttctcgagtagcgcctcggtctctaaaagccactgggggcgagcctccggtgtggcggtgtcacaagtta

SEQ ID NO: 50244 - DNA, 31 bp, Homo sapiens; identical to SEQ ID NO: 9137
  chr12:122478893-122478924
  hyper

SEQ ID NO: 50245 - DNA, 165 bp, Homo sapiens
  chr12:122667643-122667808
  hyper
gcccccgcgcacgcgtcctagcggttgccgggcaacgcggcccgggccatggaggcgtcgtacgagtccgagtccgagtccgagtctgaggccgggcctgggactcagcggcccgggaccgggaccgtgagcgcggccgtgcgcgagcacttgcggaagctgtgt

SEQ ID NO: 50246 - DNA, 30 bp, Homo sapiens
  chr12:122687936-122687966
  hyper
agctgaaccagtgccgctcggcggaggagg

SEQ ID NO: 50247 - DNA, 619 bp, Homo sapiens
  chr12:122688563-122689182
  hyper
gctggggacagaggctggagccgggcgcggtagaccccgccagcctgggccgcccgcgcccgacgcgcagcgctgctgccaaccccggcccgggggtccccgcagagtgggtctctgctgccgtcagcccttcggagactgtcgcgttgaaagaatgaaccagagttcgccccctgcccgcgccagggcgttttgggtcaccgagtcctgtggggatccgaggcggctgccgcccaaggccgagcgcagcctcaggacccgcgccccaccagacggggtcgtgcgctccgcggcgggtggagagccgggctctggggtctccgcggctcggagggcggcggggcgaggccgtgcggccagcgcctggggacgcccgcggcgggacaggggccacccgggccgcggcgcagcctgggctgaaacctcctgggacggaaccaagccacctgctgtgcgcccttctcggtgaatggcaccgccgcccgcccgggcctctcgtccacagcccgcggtgctcgcacacctgagactcatctcgcttcgaccccgccgccgccgccgcccggcatcctgagcacggagacagtctccagctgccgttcatgcttcctccccagcc

SEQ ID NO: 50248 - DNA, 30 bp, Homo sapiens
  chr12:122750901-122750931
  hyper
cgcctcgcgcaacacgtttaggttcactcg

SEQ ID NO: 50249 - DNA, 203 bp, Homo sapiens
  chr12:122907626-122907829
  hyper
aacaggctgcaaggcgcttccgaagcaggttaagttggggattgggaaggatcatctctgccctcgcctccctccagggaaagaccctggatgaggcgtccctggagaaaatgctgaaaggaactgtagagcaggttaagcttgggaagaactgtatctgctccccacttccctccgggaacgaccgcgggttaaaaatcctt

SEQ ID NO: 50250 - DNA, 30 bp, Homo sapiens
  chr12:123011685-123011715
  hyper
gagaacggaatgggcggaactcagggtggg

SEQ ID NO: 50251 - DNA, 30 bp, Homo sapiens
  chr12:123237067-123237097
  hyper
actccaggatgcaccgcagacaccgaggcg

SEQ ID NO: 50252 - DNA, 528 bp, Homo sapiens
  chr12:123258854-123259382
  hyper
ctctgggtagtggtgaacagccggttctttcaggccttccagcgccggagcctcgggcgtgggcaaaaagcgtccatacgcagcctgagccacttgggagcccccagtttccgaggcagaagaacagtgcccaccagcgcagcggggctgcggcccggaaaccctggcggggagccccgagccccggcgggcgcacgccgcgtgggcaccaggcaggcggttggagtacggggcgggggtcggccgagggcgcggggccccggggctccgggctcgcccccgccgctcggggcaggcgcgccgatggcgtttctgaggtgacgccgcccacaccgggcttctccgggggcggaggaaacacctatgaaccctccggcagccttccttgccgggcgccaggtaagcagcggttccgggcgcggcggggcgccgcgggaacggtgcacattggtcgaaatctattgcttctcaagaacggtgtctacttaaaatgtgaaacaggccgggcgcggtggctcacgcctgtaa

SEQ ID NO: 50253 - DNA, 119 bp, Homo sapiens
  chr12:123319235-123319354
  hyper
ttgctgttcagatccgcctgccttctgtgccagcctaacagcgcccggcctcagcccccattgtccctggagctggcgaggtgtccggttgcggagccggcggcgtctctggaaatgca

SEQ ID NO: 50254 - DNA, 502 bp, Homo sapiens
  chr12:123380318-123380820
  hyper
tgcctaagcaccagtcgcggttccctggctcccgcaccccgccccaagcgcccccatttctagcccagtcccctcaacacgaccggaggcgccgcggtcgcctccgcctccggccaccgttcgaggagcgaaccccgctcgaggcctcacagccgccgccttaagcccagctcggctcacctcctccatcttctgcaccatctccgtcagctggccctcgtcctccagcagctcgttgagctgcaccagcgacagcccggcgaaccgggcttcgctcccggcgcccgccatccccacgtctcggccgtcgtcgccaccgccgctgcggccaccaggctccgccgaccggaagcgccgccctcaagggccgccccccgcgggggggacacgtgacgccagccctgggtcgtgacgtcatcaccgcgcgggcgggcggacgtgacgtaagtgtcgcggctcgcttggagtggaatgtgtcagggacagtcgggacttctaaagg

SEQ ID NO: 50255 - DNA, 30 bp, Homo sapiens
  chr12:123414330-123414360
  hyper
gggacatggcaggtcgtctttcagtgctgc

SEQ ID NO: 50256 - DNA, 31 bp, Homo sapiens; identical to SEQ ID NO: 9141
  chr12:123414419-123414450
  hyper

SEQ ID NO: 50257 - DNA, 30 bp, Homo sapiens
  chr12:123450200-123450230
  hyper
gggaatgggcagaggcggggatcctgtcag

SEQ ID NO: 50258 - DNA, 30 bp, Homo sapiens; identical to SEQ ID NO: 9142
  chr12:123451176-123451206
  hyper

SEQ ID NO: 50259 - DNA, 182 bp, Homo sapiens
  chr12:123459137-123459319
  hyper
tcatttgttggctgcggtgagaccacgccccgtcgccctcccacacctgaccccgccctcccgcgtccattgggaacgccaccggaagtaatgcgagacggagcgttttggtggagacactcactggggcaatctgaggtaatccaacagactgtggcggagggaccggaagcgccaggcag

SEQ ID NO: 50260 - DNA, 30 bp, Homo sapiens
  chr12:123459803-123459833
  hyper
gacggtgggggctccgcggcacttctgccg

SEQ ID NO: 50261 - DNA, 31 bp, Homo sapiens
  chr12:123497425-123497456
  hyper
tgtccacctcttggatcgccactttgtccca

SEQ ID NO: 50262 - DNA, 30 bp, Homo sapiens
  chr12:123634942-123634972
  hyper
accggcactgcccacgcctgccccccgacc

SEQ ID NO: 50263 - DNA, 30 bp, Homo sapiens
  chr12:123636160-123636190
  hyper
gagcgcagccgtcccggtccccacctcagg

SEQ ID NO: 50264 - DNA, 30 bp, Homo sapiens
  chr12:123717035-123717065
  hyper
ctggggaaaaggaacgattgatggttatga

SEQ ID NO: 50265 - DNA, 30 bp, Homo sapiens
  chr12:123717761-123717791
  hyper
cgcgtccacctcgccgttccccctcgcgca

SEQ ID NO: 50266 - DNA, 212 bp, Homo sapiens
  chr12:123754991-123755203
  hyper
agagccagcgtggcaccggtgaccaacggggccactcctctccccgtcgagtccttccccccatcccgccccgcaacacaaccgccttttgggaagtctgtttccgaccaagtgtcagagaagaagggccccagtgaggtcacaaagcccggcacctacgaatccctcaatgttgtgcccactccccatggctccctcggtcccctgggctc

SEQ ID NO: 50267 - DNA, 30 bp, Homo sapiens
  chr12:123868412-123868442
  hyper
tcccaatggcagctcgggtgtcttccatcg

SEQ ID NO: 50268 - DNA, 30 bp, Homo sapiens
  chr12:123868650-123868680
  hyper
cagctggagcccggcggagcagttggctga

SEQ ID NO: 50269 - DNA, 30 bp, Homo sapiens
  chr12:123869319-123869349
  hyper
ggttcctggcatctcgcgggcgcggtcgtt

SEQ ID NO: 50270 - DNA, 291 bp, Homo sapiens
  chr12:123874196-123874487
  hyper
ccgggccgcttcctttgctgccgcctggctgggagtggcgcccacacggctccgccatgagcctggcggtgtttgacctcggaaaagtttgactgcgccttcgtggcgtctccgcagcccaagaccctacttccccggaggtggccgcggtcccaggctgtgcggggcctgcgcgggcccctcggagaggtcacgggtctcaccgcctcggtgttgaatggtccccgaggcggcgagggcccggcgttgcttctggggacgccctcctccgtctgtacttactcagaggag

SEQ ID NO: 50271 - DNA, 239 bp, Homo sapiens
  chr12:123920538-123920777
  hyper
gaaaagaaaaggaaggcgtctccctgccagtaggtgccctcctacgccccgcaggcgccgtgggcccggaaccctcgctcccacactcacctccccgctggccggagggctctgtctccgcagcccctccacctccttcctgaggtggtccctctccatcttcagctcctccagcgccaggctgccctcattcaccagcgcctccagcatctccaggacgcggacgactttgaactgca

SEQ ID NO: 50272 - DNA, 30 bp, Homo sapiens; identical to SEQ ID NO: 9145
  chr12:124018978-124019008
  hyper

SEQ ID NO: 50273 - DNA, 30 bp, Homo sapiens
  chr12:124086888-124086918
  hyper
tctgagccctggggcgctcatccctccagc

SEQ ID NO: 50274 - DNA, 30 bp, Homo sapiens
  chr12:124155697-124155727
  hyper
ggcagtggctgctgcgttttcgtgtctgag

SEQ ID NO: 50275 - DNA, 31 bp, Homo sapiens; identical to SEQ ID NO: 9146
  chr12:124156317-124156348
  hyper

SEQ ID NO: 50276 - DNA, 30 bp, Homo sapiens
  chr12:124196656-124196686
  hyper
gaacgggtgagcttcgcggcgtgcacactc

SEQ ID NO: 50277 - DNA, 496 bp, Homo sapiens
  chr12:124246516-124247012
  hyper
ttgcaaaccggtcggcgtggggtggggtcgcaccctcggctgcagcggcccgagggcggctcctggcggcgagggtcccgctccgcatccaggggcgtgcgcgctgccggggccagggagcaaccagcctacctcggcggcccgggggcctggtgcgcgcctccgagatcccggggccggggcgtgggctgcggctcgcgggttcgggatcgaggggccgggcgcggggcactgccgagcttgcagcccccagcgccggcgccgtcggcggggcgagctgcggccgtttccggggcgcccattgctagggccgccgttgccacggacgcccgccctgcgcccggctccctctgcactgcgcggcgccatggacgacctgcgggtgctgtggatgcgcgaccgcgtgtatgcggctttcggcatcaccgacccccagcttttcgaggacctgctcaaccgcgacgacggccagggcgaggacctcatcttgcacttc

SEQ ID NO: 50278 - DNA, 202 bp, Homo sapiens
  chr12:124779621-124779823
  hyper
gcgggccggggaggtgcggagagggccgggcggcaacgtgcgcctcggggctgggccggcctgcgggatcgcagcgcagcgcagaggcgaggctgggcccggcgggcgggagccgcggagggcggagggcggagggcggcggcgctggcaggagcgcggcccacggcggcgagcaggctgcaggcccgcggggatccggggc

SEQ ID NO: 50279 - DNA, 30 bp, Homo sapiens
  chr12:124780044-124780074
  hyper
gacagccccgactccgggctgccccccagc

SEQ ID NO: 50280 - DNA, 31 bp, Homo sapiens
  chr12:124790623-124790654
  hyper
ggtatgggcccatactcggggctctctgggt

SEQ ID NO: 50281 - DNA, 31 bp, Homo sapiens; identical to SEQ ID NO: 9149
  chr12:124870576-124870607
  hyper

SEQ ID NO: 50282 - DNA, 30 bp, Homo sapiens; identical to SEQ ID NO: 9150
  chr12:125051052-125051082
  hyper

SEQ ID NO: 50283 - DNA, 196 bp, Homo sapiens; identical to SEQ ID NO: 9151
  chr12:125093637-125093833
  hyper

SEQ ID NO: 50284 - DNA, 100 bp, Homo sapiens; identical to SEQ ID NO: 9152
  chr12:125198343-125198443
  hyper

SEQ ID NO: 50285 - DNA, 30 bp, Homo sapiens
  chr12:125225301-125225331
  hyper
ctcagtggccatcacgagaacaagagggca

SEQ ID NO: 50286 - DNA, 138 bp, Homo sapiens
  chr12:125256629-125256767
  hyper
atggagagacaagtcggggggactttacccccaggatggggaaaagtcacccacaattcaagcaaagatgacccttgtgacagattaacatttcagggccgctacctggagaatggacggctcgggacacgcgtggga

SEQ ID NO: 50287 - DNA, 30 bp, Homo sapiens; identical to SEQ ID NO: 9153
  chr12:125398614-125398644
  hyper

SEQ ID NO: 50288 - DNA, 30 bp, Homo sapiens
  chr12:125399082-125399112
  hyper
cggcccggcggccacgaaagccccggccag

SEQ ID NO: 50289 - DNA, 30 bp, Homo sapiens
  chr12:125399710-125399740
  hyper
ccctgcgagatggacgggtctttatttttg

SEQ ID NO: 50290 - DNA, 30 bp, Homo sapiens
  chr12:125473672-125473702
  hyper
gggttgtgttatcgcgagaactgtaactga

SEQ ID NO: 50291 - DNA, 129 bp, Homo sapiens
  chr12:125477527-125477656
  hyper
cttgtcttggcaagaatccatcgcaggtggcgctggtacttcctggcactaagatcgattggcgggaccgggacttcgcggcttagcccctccattttcaagttccccgccaaaccctcccctcttggt

SEQ ID NO: 50292 - DNA, 444 bp, Homo sapiens
  chr12:125534028-125534472
  hyper
gtcaagctagaggtcgtgaccccctggagtctcggtggtttcgggttggggagcagagcgggtggggcaggaccgactcgccggtgccagtcaggatatcaaggtgacagcgcccggcactggccttggtcgaagggtgactccgccccattgctaagctccgattgggcacgcccttttctggttcttcttcaggattggctgggaggtgcggcctatgaaccggaacgcgtcgcgattggttggcgctcaggccgatcttccagacgcggaggcctgggccgatgtggcccaactctctgccagccaatcagcgctcgggctgagtgtggcgcgtgagtgtgtccgggatccctccgccgcccgggcgttggggtcgcgggaagggaggggactgggaggggatggggtggggacgcgcaggaggcccgtggggttgacttg

SEQ ID NO: 50293 - DNA, 119 bp, Homo sapiens
  chr12:125670141-125670260
  hyper
gcaacacctccgctccgtcactgcctgaccctgcgctgggaactcattcccgggaccgccagggaatctgcccttcccaggagaactcctggctgcctccgcgtgctcctagggcctgc

SEQ ID NO: 50294 - DNA, 194 bp, Homo sapiens
  chr12:125670334-125670528
  hyper
cgccttcgctgtgtttcaggtcaccgcacccagcctgcgcacccctagcccccatcccggtgccgtgcagaggctctgcacacagcctcggcctcccggaggccctcccctctctcctctcccctctcccacaggcactccctagctgtgccacatttaacccgggacctcctgtccgcgctcagtcttgcagt

SEQ ID NO: 50295 - DNA, 30 bp, Homo sapiens
  chr12:125672126-125672156
  hyper
cattgcctgggcaccggggagctggactcc

SEQ ID NO: 50296 - DNA, 30 bp, Homo sapiens
  chr12:125815801-125815831
  hyper
ccgctgactctgagcgacacaggacaagct

SEQ ID NO: 50297 - DNA, 293 bp, Homo sapiens
  chr12:126018009-126018302
  hyper
ggaatgttcctaaacgcttgttttccctttgcatagctgattgcagagcccagcaagtctttctctaaatggctttactttgacaaggggtcgcgatggcattttgattggcatccgcctctcctccggggaaggacctcgtgggcgatggtcctggcgcacccgctagatggcgccgcagaccggcttgtacaggccgcgcgccctcccctccccggcggaggctcctggagcccctgcccggcctgactggctgcgtcctcaggccctgcgatttccagggattcccgatt

SEQ ID NO: 50298 - DNA, 30 bp, Homo sapiens
  chr12:126109505-126109535
  hyper
gaagaacagttctgtcgcaccctcaccaaa

SEQ ID NO: 50299 - DNA, 30 bp, Homo sapiens
  chr12:126168471-126168501
  hyper
gtccctgtgcagagcgccccctgccggtcc

SEQ ID NO: 50300 - DNA, 30 bp, Homo sapiens; identical to SEQ ID NO: 9155
  chr12:127509692-127509722
  hyper

SEQ ID NO: 50301 - DNA, 30 bp, Homo sapiens; identical to SEQ ID NO: 9156
  chr12:127765316-127765346
  hyper

SEQ ID NO: 50302 - DNA, 162 bp, Homo sapiens
  chr12:127865688-127865850
  hyper
aggtcctgaggacgcggcgagttcacggagaggacctgccgggcaggggctctgggagcctccgcggggaggggagggcgcgcggccggcgcggccacaacccggtctgcggcgccatctagcgggcgcgccgggaccgtcgcccactaggcccttttccgg

SEQ ID NO: 50303 - DNA, 213 bp, Homo sapiens
  chr12:127940024-127940237
  hyper
gggcccgccgcccagcgccaagaaagcgggtggccacatcgaagtttctcaacgggaggagcggattcgtctggagacgccgccttctccccgcgcctcttcttccagcactgccacacgggtcctggaaggatcctgcaccctctgctcagtccccgctcagtctctgctccgggctgggggctttctccacctgcccgggcgggggcgcca

SEQ ID NO: 50304 - DNA, 31 bp, Homo sapiens; identical to SEQ ID NO: 9158
  chr12:128024229-128024260
  hyper

SEQ ID NO: 50305 - DNA, 1129 bp, Homo sapiens
  chr12:128750748-128751877
  hyper
accgcacagggaagccgctgagatcacctgggatcaccaccatgagggaggccagccctggagaaatcagagggaaaagatagagagaacgaagtcgggggggggggggggagggcggatcttccttgtctgagtctgcagagaaattgcctattgcaggagcaagtctagagaggggctattctccacccactgaaaagataataaaacacatgctatgggcggcggggagatgattggggagtggaagccccacagacatgcagtgaaaaatgatcctttcttcccctctgcgttctcgtccccttcccagagacaccgctgtgatctcgtgcctcgccccctccgcacacgcacaggtgcacacccgcatctgtcttgagcccgcaccccgccttcacgctccgctgcgcgctgcttttccgcgctcagtgatccagttaggagctctccccgcagcagctgcgcgggactttgcattccagatgtccccagccctccaggctaaagcagcggccacctgaagttgaggaatggggcgtgacgaccaccaggtcccgcagtgaccacgggagggtggggagaaggagtccagctccgccttgagcgtcgggtccctgggcaggaccctccgggccacgggccgctgtccgttgggcacccgggcaggagtctgcgaacgctgagtttctctggaaaggcgcggacccccggaggagccgtcccagccgcctggggagacgccccctcctctcccggtcttctttcccgggcacaccctccctagcccgggcgggggggttctccatctgccgcccctcccggcgggcaggcgaactctctcctaccgcaccctcaatctgtccgcggtcgcggggctcggcgggggcggggcccgggcgggggcgggggcggggccgggggcggggcgggccggcggctgcggaggctgcggaggctgcgggagaaaagttgtcccggccggagcgcgagcagcggcggagccggagccgccagagccagagccggagctgcggcggcgtggacccggcaggggcgggcctcggacagcagagacgcagcgggcccggccgaccgggctgcgggagtggccccgggcatggggcgg

SEQ ID NO: 50306 - DNA, 1057 bp, Homo sapiens
  chr12:128752114-128753171
  hyper
cgaggggtgcggcgggggcctcggcgggggctcggatcccatcaacagcgcctctgcgggtgccgagccgcccctaatccagaagggcgctcccagctgggcgccgggatccgggcaagttaggctggtcccgagtcccgaatctcccaccccggaccccccagacccagagctgccccgcggatgaggagggggcgtggctgagggacacggtgtttgttccccatccctgagttccgtgcggacctgccccagccccagcacagtcaccctgtggaactggcatccaggagaggtgctccgctctgtgcgctccttcctcccggctgtgtgctccctgtccacagctccccatccacagcttcggcactgtggggctggtgctccaggagggaaggcccggttctttgcatcccctttccgcaaccgctagggtctctgtgcgggccctagaggaacgctcactcatcgcgcagctcaccagggaccccagcttggcagaaaccaggggctctctgcgggttctctcaaatgagtcctttgcggtgggggagcgcggatggggaggtgggtgcgtccctcgcgacgggaactacctcaccagcggtcctgtccggggctccttcacctcagtgtcctcttctctacaatgggagtgacggccctgctttgggttggaggaatttaaaggagttaacgtatggcgcccgcagggctcacgaaaggtagccgtgtggtttttccgaccttttttattatgtgcgtgtgcggccgagtggccgcgcggatgcggcggcgggaagggcggggagaggcggtctccagccccaggagccgcggggcaggcggggagcaaggcctaggctctgccagggcagcagctgcccgagtcccggggcgcgcccagggcgtagaaaaaggagagcgtcgctttcctgctccccgcgccctggcgaaggtctcgggttcatttggttaaacggaggtgcgcacatgggtgccctgagccttcgcgcggcgccgcgggtccagtatcggccccaggctctgagcagag

SEQ ID NO: 50307 - DNA, 117 bp, Homo sapiens
  chr12:128753738-128753855
  hyper
aaagcactttgcagaggaaggcggtgctaattgagcagggcgtgaccgacctcctccgggttttcaccccttgcccttgagagaatttaaccaggcgaactggatgttccctttaaa

SEQ ID NO: 50308 - DNA, 393 bp, Homo sapiens
  chr12:128850382-128850775
  hyper
atggaggtggccaggctgccccgttgattgtgtgccgaggagccctccccgggaaggctgtgatttatacgcgcaggcttgtcacggggtgaaaggaagggccactttttcattttgatccaatgttaggtttgaaagccacccactgctgtaaactcagctggatccgcgggccgtgattaaacacattgcccgctttgttgccgagatggtgtttcggaaggcgctgtgaatgcacttccctttgcggggctcacacagacaagatgtgtgttgcaaggatgaggcgcctgctcggcctccagcccagggccgggaagggagaaggtgctgtgcgtcgctgcctgtgtcgcccgcggctctcctcccagcgacagactccagacctctatg

SEQ ID NO: 50309 - DNA, 15 bp, Homo sapiens
  chr12:129337894-129337909
  hyper
cacggggcacacccg

SEQ ID NO: 50310 - DNA, 238 bp, Homo sapiens; identical to SEQ ID NO: 9163
  chr12:129338587-129338825
  hyper

SEQ ID NO: 50311 - DNA, 31 bp, Homo sapiens; identical to SEQ ID NO: 9164
  chr12:130136921-130136952
  hyper

SEQ ID NO: 50312 - DNA, 30 bp, Homo sapiens; identical to SEQ ID NO: 9165
  chr12:130387116-130387146
  hyper

SEQ ID NO: 50313 - DNA, 221 bp, Homo sapiens; identical to SEQ ID NO: 9166
  chr12:130387796-130388017
  hyper

SEQ ID NO: 50314 - DNA, 30 bp, Homo sapiens
  chr12:130396143-130396173
  hyper
ctggcgcgctcaggcgccctgcttgtggca

SEQ ID NO: 50315 - DNA, 330 bp, Homo sapiens
  chr12:130498553-130498883
  hyper
aagccaaagcagggaagcctccggaaagagggcaaggagagtggcggggtgcgagcggggcgctgcggaggaggctgcagcggcagcggtgcgggcaggagctctgatgcgatgcgatgcgatgcgatgctgcccccctgtgtccttcgacgatattgctgcgggaagctttctgtgctcaagacctcgtccatccctccatcagctcagaccttctctgcgaatagctctccgggtggtaaagagatgcatcacatttaaaacttcgagacgtcctggattcacttagaaagatgggaagaggctcacgcctgtaatcccagaactttg

SEQ ID NO: 50316 - DNA, 73 bp, Homo sapiens
  chr12:130526814-130526887
  hyper
aaggtgcacacagatgtgggtcgctgccttcccaacaggctcctgcccggttcacctggggaagcgcagggct

SEQ ID NO: 50317 - DNA, 136 bp, Homo sapiens
  chr12:130526931-130527067
  hyper
cggcagcttgcagggcccgctgtctccactagggggcggcgtacgcgcgtctctcgaagccgggacccgcgcggggaggctgcactggctggaaacagcgcctgggcgctcccgcggctcccacctcagagatgtc

SEQ ID NO: 50318 - DNA, 30 bp, Homo sapiens; identical to SEQ ID NO: 9167
  chr12:130589237-130589267
  hyper

SEQ ID NO: 50319 - DNA, 1245 bp, Homo sapiens; identical to SEQ ID NO: 9168
  chr12:130645408-130646653
  hyper

SEQ ID NO: 50320 - DNA, 170 bp, Homo sapiens; identical to SEQ ID NO: 9169
  chr12:130646945-130647115
  hyper

SEQ ID NO: 50321 - DNA, 335 bp, Homo sapiens
  chr12:130647573-130647908
  hyper
gggcgacggcaaatgccagcccatcgagatcccgatgtgcaaggacatcggctacaacatgactcgtatgcccaacctgatgggccacgagaaccagcgcgaggcagccatccagttgcacgagttcgcgccgctggtggagtacggctgccacggccacctccgcttcttcctgtgctcgctgtacgcgccgatgtgcaccgagcaggtctctacccccatccccgcctgccgggtcatgtgcgagcaggcccggctcaagtgctccccgattatggagcagttcaacttcaagtggcccgactccctggactgccggaaactccccaacaaga

SEQ ID NO: 50322 - DNA, 119 bp, Homo sapiens
  chr12:130647950-130648069
  hyper
cggacgagcccacccggggctcgggcctgttcccgccgctgttccggccgcagcggccccacagcgcgcaggagcacccgctgaaggacgggggccccgggcgcggcggctgcgacaac

SEQ ID NO: 50323 - DNA, 31 bp, Homo sapiens; identical to SEQ ID NO: 9170
  chr12:130709678-130709709
  hyper

SEQ ID NO: 50324 - DNA, 30 bp, Homo sapiens
  chr12:130765404-130765434
  hyper
gcggctgccctagcgcgttagtaccatctc

SEQ ID NO: 50325 - DNA, 27 bp, Homo sapiens
  chr12:130765888-130765915
  hyper
tattcatcgactccccggcagggggag

SEQ ID NO: 50326 - DNA, 374 bp, Homo sapiens
  chr12:131199803-131200177
  hyper
cctccagggacccagaggccacgcaggcacggagccagcacccccgcctcccccggggccagtgaccaggccgggaggtgaagcagtcctccctccctccggccagccgccaccccgacctcagccagcgtgcgctccccggggacaggagggaggctgcttccaccgaggcctctgctgacagatgtccgggcccccacctggacctacccagacctaagctcctgggcgggtggtcccgtacgcgctgcctttcccggtgaaatacggtttccactgggagagtctgcccccggccagcagcccgcgcacactgctcacacaggcacacgcatgcacgcacacactctgccggggaacatctgttttgacaa

SEQ ID NO: 50327 - DNA, 367 bp, Homo sapiens
  chr12:131200379-131200746
  hyper
caggcgagcggggccgtgtccatcgggtgccaaactttgcctggaggggcctttcttaaaagcctggggtgggggccatgacagagccacagcacccctgcagctgacacccggcacccaggaagaagcccgtcagcccttcccttccgagacgatcctgaattccaagcagcaccgacatgccagcagggcgagccgctgctccccgcacccagcgcccccggaccccacgctgaagggcattctccatccgctgcaagataaactttgtctgggcaaagagtttccggctaaccccctgtgatcaacgccgctgcagctcgggtgcagaaaggcgaggggagacgggaagctatttttaggagaa

SEQ ID NO: 50328 - DNA, 204 bp, Homo sapiens
  chr12:131400788-131400992
  hyper
cctgactgtctaatgcacctccgcatccccggcacgcaggacccggccgggctgccgcctctcagaatcgctgtgcaattggcgattgcgacattcatggaataaattccccttcgcgacacatggggacgctcacgctccacgctgtggccacactcttacgcgcctttgttcaaatggtccgcggtaatcacccctccagct

SEQ ID NO: 50329 - DNA, 47 bp, Homo sapiens; identical to SEQ ID NO: 9171
  chr12:131438508-131438555
  hyper

SEQ ID NO: 50330 - DNA, 30 bp, Homo sapiens
  chr12:132196021-132196051
  hyper
tcccttccctcacccgcttgatctcgtctg

SEQ ID NO: 50331 - DNA, 324 bp, Homo sapiens
  chr12:132312445-132312769
  hyper
caggcccgcagggaccgcagagcctccgccgaggaccccagcccccccaacacccgccctcgccctccagtcccccgcgccccccaagccccaccctccctctcccgcggtccgcgggctccaccaagcgcccacctgctgcgctgcggcggcggctccggggcctgaacccgggtctgaacccgggcctcggcgccgtggggggtggacccgggagcgcggccggagaggggagtcagggtcagctccccgcaggcgccccgacccccgcctccgcgcccatcccgcgcgtccccgccgccccaagagcgtcctaagacaccc

SEQ ID NO: 50332 - DNA, 526 bp, Homo sapiens
  chr12:132313394-132313920
  hyper
tcctggggaggcgccggctgccgtcccggctccgtgcgctgggagcgcgccgcagccgcaggagcccgtggagttgtgagggggtcgcccacccggagcccgggtcgccggcttgcagcagccccggagcagccgggctgggcgagagcaggcatcgcggccgccccgagctctgcgcgctgcgtgcgttccgggtgggagtggcgggggcaggagcacgcacccacaaagcgaggaagggcaggggctacggagtgggggcaccccgaaagccttgagcccccgagtttgctcggttgagggtgttgggggcacagggatgctggcccccagctccccactggacaaggacctggccctcagcctccttcccctccaccccaggtcggccaggctggccctgccttgccctggtacagtgctgagccgggggcgcggggagagccttcctcactccacacccagtagctgtccccagctcagcttagaaaccctgcctgggggcagcgacgtggcctcttcctac

SEQ ID NO: 50333 - DNA, 38 bp, Homo sapiens; identical to SEQ ID NO: 9174
  chr12:132380561-132380599
  hyper

SEQ ID NO: 50334 - DNA, 38 bp, Homo sapiens; identical to SEQ ID NO: 9175
  chr12:132380827-132380865
  hyper

SEQ ID NO: 50335 - DNA, 30 bp, Homo sapiens; identical to SEQ ID NO: 9176
  chr12:132414834-132414864
  hyper

SEQ ID NO: 50336 - DNA, 51 bp, Homo sapiens
  chr12:132480345-132480396
  hyper
tgtgaacgaatcccaccgcagcttgactgaatgtgccgttcatcctgagtg

SEQ ID NO: 50337 - DNA, 31 bp, Homo sapiens; identical to SEQ ID NO: 9177
  chr12:132982486-132982517
  hyper

SEQ ID NO: 50338 - DNA, 30 bp, Homo sapiens
  chr12:133067448-133067478
  hyper
taggtggacgggtgcggcttcgcaggcgtt

SEQ ID NO: 50339 - DNA, 30 bp, Homo sapiens; identical to SEQ ID NO: 9178
  chr12:133067719-133067749
  hyper

SEQ ID NO: 50340 - DNA, 37 bp, Homo sapiens
  chr12:133136492-133136529
  hyper
ttagtcgggtctgcccgcgccccgcccccgccccgcc

SEQ ID NO: 50341 - DNA, 30 bp, Homo sapiens
  chr12:133137345-133137375
  hyper
tgagcctgcggacccggagtcctcccacct

SEQ ID NO: 50342 - DNA, 31 bp, Homo sapiens; identical to SEQ ID NO: 9179
  chr12:133175116-133175147
  hyper

SEQ ID NO: 50343 - DNA, 30 bp, Homo sapiens; identical to SEQ ID NO: 9180
  chr12:133263931-133263961
  hyper

SEQ ID NO: 50344 - DNA, 294 bp, Homo sapiens
  chr12:133286745-133287039
  hyper
ggtaagcggtggggtcggtgcacgcaggcgtccagcaatgggtaagcggtggggtcggtccacccagggagcgctggtccccctggaaggaaacccaggctctaacgcggtccctctgaggaccctgctaggcgaaacgcgccggccatagaaagactgtcccgcaggagagggcggtgttcggcccggggtttgaggggtcgggaccaggaggagggacagcccggccgaacctgaacgcacttcaggccgcttgaacagcacacgcaggaactgcgccgacggaaaacttta

SEQ ID NO: 50345 - DNA, 30 bp, Homo sapiens
  chr12:133405921-133405951
  hyper
ctggacggcgcgggccgctggccgctgggg

SEQ ID NO: 50346 - DNA, 123 bp, Homo sapiens; identical to SEQ ID NO: 9181
  chr12:133443617-133443740
  hyper

SEQ ID NO: 50347 - DNA, 1166 bp, Homo sapiens
  chr12:133463690-133464856
  hyper
gagcgcacactgcaccgccgcccgtgtggcctgcccgcaacccggtggctctgcccggccccggcccccggccccggcctcagccccgcacctcgtctccgcccgatggtccactcccgcttcctcaggaggacgtgcggctcgccctcctccgcgcccagacgcaggagccgtccccagggctgcggcggcggcgactgcttgccttcctcgggccgctccatcgggattcacatctgcggagaccccggaaacgcccatggagactcccgaccccagaggccgagactcggcgcccgccccaccccgcgggccccggcccggccgcccgcgcccacgcagccccgcagcccggcctggacgccggcgggcgccccctcccacggccgcaaccaggtcccccttcgccgcccgccgcagccccctcgccagccgcgcttacccccgccccgcgccgaacccggaaccggctgcgccgccgccgctgtcaagagacattgcggctccctcagctgatccgcggggcggggccagaggcctctgcgccccgcgattggctggcggcggcgctcaccaagagcggcagctaaagcggagccgggagtggcccgcgagagtaggcgcgtggagggcgctcggccatctttgatcctgaccaggcgacttcgtcgcctgcggatcacggaagtggctgcggtcggcgccatgttatgttggggcagaagggacggggaacttccggattggaagccccaaggattctgagagccccgctaatctggggatgactcctaggagtagaagacggtccatcttagttgtcacgaggtagtgcacgtggggaccctttcgggtacagttgcacacagtggatcacacagatccgaagtctgaggcacagggcgcggtccgcgagtgggagcggctgcttgtgggcagggtggacgcggggccacgtcttggccggcgttttgcggggtcttcctgttctgaacgcgcgtaacttttgcctcagtatctcacttcttggaatccggcggcgttcacgtgtgtgctccagagaagggcgccagagggtattccctgaaagtgaaaggtcggcgaaagaggagtaaagacggcgagacgcgtccacgcagggggagtctgtgcggtttggaggaacg

SEQ ID NO: 50348 - DNA, 8 bp, Homo sapiens
  chr12:133481374-133481382
  hyper
tttcctca

SEQ ID NO: 50349 - DNA, 173 bp, Homo sapiens; identical to SEQ ID NO: 9185
  chr12:133481489-133481662
  hyper

SEQ ID NO: 50350 - DNA, 252 bp, Homo sapiens; identical to SEQ ID NO: 9186
  chr12:133484600-133484852
  hyper

SEQ ID NO: 50351 - DNA, 186 bp, Homo sapiens; identical to SEQ ID NO: 9187
  chr12:133485161-133485347
  hyper

SEQ ID NO: 50352 - DNA, 250 bp, Homo sapiens; identical to SEQ ID NO: 9188
  chr12:133485439-133485689
  hyper

SEQ ID NO: 50353 - DNA, 62 bp, Homo sapiens; identical to SEQ ID NO: 9189
  chr12:133485815-133485877
  hyper

SEQ ID NO: 50354 - DNA, 103 bp, Homo sapiens
  chr12:133706913-133707016
  hyper
cctggtctgtgcgtcacggacgcgctctgggccgaaggcccgcagggtccggcacagagtggcggctgcggcgccggcgacgaatcgccggctctagggtccc

SEQ ID NO: 50355 - DNA, 31 bp, Homo sapiens; identical to SEQ ID NO: 9191
  chr13:19918627-19918658
  hyper

SEQ ID NO: 50356 - DNA, 30 bp, Homo sapiens
  chr13:20176071-20176101
  hyper
ccggtgggctgcggcggctccaggtacctg

SEQ ID NO: 50357 - DNA, 6 bp, Homo sapiens
  chr13:20176478-20176484
  hyper
cggaga

SEQ ID NO: 50358 - DNA, 30 bp, Homo sapiens
  chr13:20207703-20207733
  hyper
gcggtgttacgccgcgcccgccttaatatg

SEQ ID NO: 50359 - DNA, 30 bp, Homo sapiens
  chr13:20357070-20357100
  hyper
cacattcaaaatggcgctgccacaaactgc

SEQ ID NO: 50360 - DNA, 30 bp, Homo sapiens; identical to SEQ ID NO: 9192
  chr13:20436972-20437002
  hyper

SEQ ID NO: 50361 - DNA, 41 bp, Homo sapiens
  chr13:20532065-20532106
  hyper
gttgttcccttggccgaatggcagagtccagttggggcttc

SEQ ID NO: 50362 - DNA, 30 bp, Homo sapiens
  chr13:20702016-20702046
  hyper
ggcaccggccgtggcgtggcgccctccgct

SEQ ID NO: 50363 - DNA, 78 bp, Homo sapiens; identical to SEQ ID NO: 9193
  chr13:20702907-20702985
  hyper

SEQ ID NO: 50364 - DNA, 663 bp, Homo sapiens; identical to SEQ ID NO: 9194
  chr13:20735460-20736123
  hyper

SEQ ID NO: 50365 - DNA, 436 bp, Homo sapiens
  chr13:20766418-20766854
  hyper
cgcccaaatctctgcccggggatttttctgcagaagccgctccaagaggtaaaggtcagttcctgcagcgaaggcttcctgcttcaccggcgaaacggagctttgcttcgaagctaagctttcggtgaatttaaaacgtttggtggcagtgggtcaagtagccaggcggctgcgctagagtaccccgaagggacatcggcgacaccacaaacctcgcgctggcggctcgcccgcgcctttttcccctcccgcgcgcgcccggccccactcgcaccccgggcggtgccatcgcgtccacttccccggccgccccattccagctccggagctcggccgcagaaacgcccgctccagaaggcggcccccgccccccggcccaaggacgtgtgttggtccagccccccggttccccgagacccacgcggccgggcaaccg

SEQ ID NO: 50366 - DNA, 108 bp, Homo sapiens
  chr13:20767134-20767242
  hyper
gagactgggaaagttacggagggggcggcgccgcgggcggagcgcgcccggcctctgggtcctcagagcttcccgggtccgcgaacccccgaccgcccccgaaagccc

SEQ ID NO: 50367 - DNA, 30 bp, Homo sapiens
  chr13:20767483-20767513
  hyper
tgtcctctgtactccgcatagtgcgagagg

SEQ ID NO: 50368 - DNA, 64 bp, Homo sapiens
  chr13:20767827-20767891
  hyper
cggtgggagagacaagcctcgtttttgccatggccggcaggggggtcccgccatctgcggaggg

SEQ ID NO: 50369 - DNA, 797 bp, Homo sapiens
  chr13:20805880-20806677
  hyper
cgcagcaaatgaaacgggggaaaggggcaccggccctcactctggcctcttagacacacgatatgaaaccttcataaaacctgttgtacaagtcaaaggggaccacgctggggtaaaagtcaaaccagtccatcctcgttcctctgcgtacagagagagggtccagcgcgggcggcgcccactgccatcgggccggggccggggcgcgtggacaggagggtgcggatagaggcagatcgggggcccggtcgccccacgtgcggccagacacccatcccggccgcgctctgccggctctgatccggtgccagacaggagcgacaggggcgaggtggggaccagccgccgacctcacctgttttgttttcttggaggaaattcctccgctggggggccgaggtggcaccgcccgctcgccccccgcaagacccagccggtccgcgcccgcttacctgctctgcggccggcggccctggcgcgggctctgcgcggggcggcgcccttcgctccggctgggcaggcaggtcgggctcgggcgccgccggctgtcgggctctcgtcgggtttcgggtgaaggccccggctcccacctgctgcgccttttaaccgcgccccaccccgcctctgccctgacgcggctcgggcgggctgcgggaggcgagcgctgtcactcgacgagccccccgcccccacctacccggggcgcactagccgctgggcgcggaccgtccccctgaggagcaaggagtgcaggaccggggctgtccctccggggccggatgcgcagagcggggacc

SEQ ID NO: 50370 - DNA, 503 bp, Homo sapiens
  chr13:21099486-21099989
  hyper
gggatgagaacacagtcgtcgcaggatcgcagccagaattcgtttcattcaacacggtgcctggcacttctatgtggacctgcgggcagacgcggcgacattcaacagagtccaggaaccgcaggccccgcggcctgggcggtcaacctcggaacctcctgcaacgctggctcccgggaagcagacccaactccgcggggcgcctccacctgccaagcccctccagccgcgcctctccccgagcccgccagcgccgtaggggccgcagggcgcagggcttcggaggaccggaggccggggcggggacagcgacccggcgcccaccccgagggccccacgcgagggcaccacgtccccggcgtctccccgggctccaggggcagcagcgcggctcggagccctttacctgccaacgatcaccacgcagccggccgcggaggacgccatggttgggccggggacgcggcgccgcgggcgctgggaccaggcgccggcggagctgc

SEQ ID NO: 50371 - DNA, 30 bp, Homo sapiens
  chr13:21141310-21141340
  hyper
tggcaacggctcggcgtcgcgctttggcca

SEQ ID NO: 50372 - DNA, 30 bp, Homo sapiens
  chr13:21141749-21141779
  hyper
gccagctctggaatcgcacagcagagatgg

SEQ ID NO: 50373 - DNA, 31 bp, Homo sapiens; identical to SEQ ID NO: 9200
  chr13:21345744-21345775
  hyper

SEQ ID NO: 50374 - DNA, 30 bp, Homo sapiens; identical to SEQ ID NO: 9201
  chr13:21347997-21348027
  hyper

SEQ ID NO: 50375 - DNA, 1165 bp, Homo sapiens
  chr13:21634590-21635755
  hyper
ctgcgcctcgggccgcgtcccgccaagaccgtgagcaaactcgcagagttggcgcggcagccggccgggagacgccgagcagggcctggccgcccgcagcccgggaggaacggcgcccccagggtccggtggcctctgaggggctgactggcccgtgagccggcggcgcggccgcggggaacggggtgggaaccgcgcggcagtgggtgaggcggcgcagccaccgggggctgaggggcggcgcggcctcgactgcggcaccgccgtgggtccgtcggctcgcgggacgacggggcggccggcgggggccaacagggcgggctctgaaggactgattggcccgtgggacgatggcgcggccgggaggatggccccggatccgtgggaccgctgcgccgccggaccgggggtcccgaggctgtcaggggcgcccggccgggcgtctagtgaaaagccgatcccccggagacagcggaagcagaggcgcgcccggcgctacggcctttcgggtctaggacaccgcccccggcccgcgccgcccctgccccgccgggatcccggccgccccggtcgccgcacaacaaagcggcgcagccccgctgcccccgcccgacgccggcctccaacttccccggctcctctggaaccggctccgcgggctccgtacggcctggactacgagccgccgggcgggggcggctccgggcgggcgcggaccgtgggggcagggcgcagggctccgtccggacaaacttcctcggccgccccgccgggcgcccttcccggagcctcggcaccacagtaggtgcgcggagccgcagggctcgaccgcttcgcggaaactctcgccaccctccgagctgccgccccgaccccagctcccagccccctcacctccaggggcgcggtctacaccctcgggggcgtcctggccggcggctcccgggcctctcgcgccgggagaccgggcactggtggctggagctgctgctggccccgcagggacgggggagccccgggcggcggcggtggcgtggacggcgactgctccatcttcccggggcgctcacgccgcggttccaaagcgcagacccaagtgggacattcgctacattgttggcattccacgggcgtcacgtgaccccgcctcccgcgtcactctcgg

SEQ ID NO: 50376 - DNA, 228 bp, Homo sapiens; identical to SEQ ID NO: 9203
  chr13:21635777-21636005
  hyper

SEQ ID NO: 50377 - DNA, 30 bp, Homo sapiens
  chr13:21650013-21650043
  hyper
ttgaggacccagcccgtccccaactctcct

SEQ ID NO: 50378 - DNA, 30 bp, Homo sapiens
  chr13:21750214-21750244
  hyper
gtctctgtttataacgtaatagtgctactt

SEQ ID NO: 50379 - DNA, 30 bp, Homo sapiens; identical to SEQ ID NO: 9204
  chr13:21872204-21872234
  hyper

SEQ ID NO: 50380 - DNA, 30 bp, Homo sapiens
  chr13:21872649-21872679
  hyper
agcgacactcagagcgagattgtttgggcc

SEQ ID NO: 50381 - DNA, 149 bp, Homo sapiens
  chr13:22178311-22178460
  hyper
cgcttctctcccggcgccgccgcctaccgcttgggaactctcgcgacatccgacaggcttccgccccgcctaccgggcctgcgccgtgggtgcggttgctgaggcgacgctcgcagccgcaagaggtggccttcggttccggggctgcc

SEQ ID NO: 50382 - DNA, 748 bp, Homo sapiens
  chr13:22243266-22244014
  hyper
ctgtacccaactggtcgaggaacgcccctgctgtacccatcactgctggctgcctcggagattaatgcgagcgactcgggtggtttatgagaagtgacacttaatacccagcttcttgtatctgccgccgagcagttaacgttaaagcccgctctgtaccaccgcggatgtgactgctgtaaataccacggggcagggctctcatgcttcagaaacacgtaagcaagacgcaccgagccagccccggacacccaatgaccctggactgcggcaaagggggggtgggaaaggaagaggggaggaccactcgctcttctctccttcctcctcgcccgggccggagcacgccttcctccccggagggcaggggaaggtcgctccaggtcgctggcacctccagcgcccccgaaatctgcaaattcatcgctccctttcgtcttcaggcgaagccctcccgtccggagtagggccagccccagttatgcatctccagcctttagctgactactaaggcggatccgacttctcccccataaccaggttttgattcgcttccccaccgcaggggttcagtctctgctttcgactttgcttctcagttgcacgccccgcagtgtggagctgcgctcaagtctcggcaactttcaccatcttgacccgagagtcgggccgtttctaagacaatgtgaacaaagaggagcagggggagggaaggggggccccgcgggagggctgtgggcgagtgtgt

SEQ ID NO: 50383 - DNA, 558 bp, Homo sapiens; identical to SEQ ID NO: 9207
  chr13:22244072-22244630
  hyper

SEQ ID NO: 50384 - DNA, 401 bp, Homo sapiens
  chr13:22244998-22245399
  hyper
gggtttcttcctcccgcctctcgcagtgcatctttcatttgcttttctttgtaaagccagggctcctcgactgcctcccaggaagtcctgcgctctggcgcgccgcacctcgcctgccgcagagcggcgcgggcagtaagccgggcgctaggaccgcggggagcccgggctgcggcggcgctaccttaaacccagcccaatgccgctgcctgcgccactctgcgcgccggcgggggctgcgcaggaggagcgctccgcccggctacaacgctccgcgagccggcgcggcaacacctgttcgcggcagcctgggcggcacgcgagctcccggacgcggctctcctcgctcgccgctcgccacccgttctaagccaatggacatctgccgagcctctggagaa

SEQ ID NO: 50385 - DNA, 30 bp, Homo sapiens; identical to SEQ ID NO: 9209
  chr13:22247199-22247229
  hyper

SEQ ID NO: 50386 - DNA, 97 bp, Homo sapiens; identical to SEQ ID NO: 9210
  chr13:22247844-22247941
  hyper

SEQ ID NO: 50387 - DNA, 133 bp, Homo sapiens
  chr13:22248799-22248932
  hyper
gatattctagttggcgcttcttcacgcaccccttccctccatgagcattttttttttttgatgcagtcacctttaggataggacgtttgccacatgcagtcgagtcattagaaatcccgtaactctgccactg

SEQ ID NO: 50388 - DNA, 31 bp, Homo sapiens; identical to SEQ ID NO: 9211
  chr13:22553926-22553957
  hyper

SEQ ID NO: 50389 - DNA, 124 bp, Homo sapiens
  chr13:23489831-23489955
  hyper
tgctctgtctgcaccgcaagctcacctcctggctccgcgttcggttcggcacttggaactggatctggcgactgtgccggcgcgccgcctctgccgcggtcctagcgccgctcggcttcacgct

SEQ ID NO: 50390 - DNA, 668 bp, Homo sapiens
  chr13:23733629-23734297
  hyper
agacttttaaaggctcgcaaatggaaccactccctccagagggactatctaaatctcctcaggtgctgaccctttctgacagtaaaggacgagggccagaagtgtaaagattgtggtcccgcgctccaagcccaagatgcgttcagcaggagtagttgggttggaaagaaggcacccagcgtctgcagcgaaggactcgcgtgggagcgagaaatgtccctgcccagtgccccgcgcgctggatcgcgggggcgagtctgagggtggagaggccgccgggtggaggcgcgcaggggtgcgtgggtgggtgcggaaggagtgcagggtatggaggggaatcttggggcggcgcgaaggaggagcgcttggaaaggcgcggtgtttggtcacagaggggctcggagtgggagtgcaggggtgcggggagggagtgcagggacgcggggagggagtggaggggtggggacgtgctggaggggcgcgcctcgatagaactggagaaactggaaaagtggaggggcggggcagtggctggaggaacctctgaagcgacgcggggaatatgtgaaggagtgctatgttggaacttggaggggaggggggatgctggagaggcacacggtgatggacatggaaggacccgggaggtgtggagtggtgggcccggc

SEQ ID NO: 50391 - DNA, 22 bp, Homo sapiens
  chr13:23734814-23734836
  hyper
cgccttcagttcccccaattcc

SEQ ID NO: 50392 - DNA, 224 bp, Homo sapiens; identical to SEQ ID NO: 9216
  chr13:23949730-23949954
  hyper

SEQ ID NO: 50393 - DNA, 565 bp, Homo sapiens
  chr13:24040495-24041060
  hyper
gcggaagcgggcagcgtgcgctgctgtcccgctacccagcccgctaggctgcgcagctgcgtctgcgggcggggagccggggcggccgtgggcttcctccgggcgcgggctgacggctgccgcctgtgggcgccccagccctgcagccgagcgggaggggcggaccagcgggtgtcgggagcaggctgcagcggccaggcctctgcggcttctcggagtactgggtccactggagagcgaagagccgcggccgccaggattcccagcagcggccgcgtgttgagagcctagaagtggccccgaagccgtgcctttcccgatagccaagcagaagtaggacttgaagcaccgaggctgggatgcccatgctggtgacgccttggggctcgcagttatacttggtgaccggtctacacggcgattcggtgctttccggagtagcagattcatctatctttagacccaccttcgtccttcggcggtttagcacggcctgcgctttcctgcgagccctgctgtcacccgaacagcctgatgacttcacgctcaaccactggagggcaca

SEQ ID NO: 50394 - DNA, 617 bp, Homo sapiens
  chr13:24153515-24154132
  hyper
gagcgcggagccctgcgctgggaggtgcacggtgtgcacgctggactggacccccatgcaaccccgcgccctgcgccttaaccaggactgctccgcgcgcccctgagcctcgggctccggcccggacctgcagcctcccaggtggctgggaaggtaggtgcgtcgctgtccccggcgcgcggcgtcccgcgaggtcttcagccctcgccctggtggatccccgctgggtgggagccgggagtggaggcggccgccctagggagggaggagcgcaggcgggggctgctcacgggcggagtactgcgcggcgaagggaacccccgaaggggctgaccgggtctcggggccgtgacaggcggcgaggcggtgggaggggagcgtgtgaattcacgccgggtccccgcgggcgacgcgagcgacgcgacctggactcctatccgggatattgtaaatagatctgcttgtgaggctcacgactgggagcctgtcactctgcccaagcccgacccggccccggcgcccgcccgcgtcctgcggaggtcccctgagccagcgcgcggctgcaggggtctcggggccgcatcccggaccagcgccagcggcgggagagcgttgtc

SEQ ID NO: 50395 - DNA, 30 bp, Homo sapiens
  chr13:24462963-24462993
  hyper
gggtcctggcaggacgaattcaccgccact

SEQ ID NO: 50396 - DNA, 276 bp, Homo sapiens
  chr13:24477488-24477764
  hyper
cgggtgggtaccggccgcgcccctgctcggaggcggcgactccctcccccgccttactcacaccgtgcctcagtttccccgtcagtgcagcggacaagacaatgccgaggtcccaggcgggcggcaggatccaattagtccgtgtaaaatgagaggcatctggcttctcccgggcaccccgcagcctgccccgcctcttagtggctaaaggcagggagcccctgagtcccagcgcggctgggggctctcagcagttctggccgagctccctcccgc

SEQ ID NO: 50397 - DNA, 30 bp, Homo sapiens
  chr13:24477978-24478008
  hyper
ttccgggctctcccacgtctgcacactcca

SEQ ID NO: 50398 - DNA, 167 bp, Homo sapiens
  chr13:24553696-24553863
  hyper
caccgtcctacccacgaagaacagcaaacaatagcacagccccggccctggaagccgagctagccgcagagggtgatgcggaactgctcatcgccagggaaacgcggcattcggacagccgtccagagcctgtctgagttctgctgggcggggagccagagactgat

SEQ ID NO: 50399 - DNA, 1042 bp, Homo sapiens
  chr13:24734727-24735769
  hyper
tgtgggggcgtggccgagggtgtggcctgagggagtgagctaaccgggggcgtggcctgatatggggcggggggaagagccgggctgggggcgtggcctggtggggagcggggctggggcgtggcttggctgagtgtgctgccgcggcgcgggaggagagtgtgcgttgcgctttctcccgcgatcgccctgccggtcgctagctccgagggcgcgcactggatcccaggctcctccgagagtgcggcgacctcggggctccgccggcaccggaggtggctctgagggcagggacgtgttggacacgctgactttgtaggctccgccaagaggcgccgcaggaggtaagacggcttcgggcgcgcggctctgccgggcgggcgcgggcatgggctgttaggtagaatatcgggaggatttgagtcccagtggactgcctcggggcttcgggatgtccagctcccagctgcttggcctctgcttcccccgccggtggaggctaccgggtgctcacctgttaggtccgtgcgcccgctccctgcccggcggtggctctgcgccctctgggccacccggcaccatcgcttttgggaggacatgcacgtggtgttctcgcaaaaggccgtttccagccggaagcctgcagggaggtcgccttgtaacttcacccgcgctcccagctcgcggggcctggcctacaggggcggccgtgggggtggcagagtctggggagcctggcgcggcggagccctgtaacgctctgctccatcgggtggcgtggctggtgcctccggggacccggagcgatgcggttggagagcttagtttagaaagcaagtttctcttggtaccagcggagtctcgtcccaggggaaagattttgggacccggtgcccatcgtctgtggactgcagggaatgcattggcggagttggtttggtcccattctgtgcaggaggtgggggaattggtactccagccccaggcaggtagaagcccgcgctgctgccagcgtcagggggagctcgggtgacttgggctg

SEQ ID NO: 50400 - DNA, 30 bp, Homo sapiens
  chr13:25087284-25087314
  hyper
tttaagccttcctgcgtttgaaattcgtga

SEQ ID NO: 50401 - DNA, 95 bp, Homo sapiens
  chr13:25254432-25254527
  hyper
ctctgggcgcccagcggaaccagggctgtactcacctggatgccggacccgccccctagagaccccgccccctggcgttcggctactaaagggaa

SEQ ID NO: 50402 - DNA, 152 bp, Homo sapiens; identical to SEQ ID NO: 9219
  chr13:25320387-25320539
  hyper

SEQ ID NO: 50403 - DNA, 415 bp, Homo sapiens; identical to SEQ ID NO: 9220
  chr13:25320613-25321028
  hyper

SEQ ID NO: 50404 - DNA, 1081 bp, Homo sapiens; identical to SEQ ID NO: 9221
  chr13:25321112-25322193
  hyper

SEQ ID NO: 50405 - DNA, 30 bp, Homo sapiens
  chr13:25322238-25322268
  hyper
cgaaccacgcagctccggactccaggcagg

SEQ ID NO: 50406 - DNA, 30 bp, Homo sapiens
  chr13:25497029-25497059
  hyper
ggatctcacccgcgcgtctgcgctaaagcg

SEQ ID NO: 50407 - DNA, 55 bp, Homo sapiens
  chr13:25497283-25497338
  hyper
gagcgatggatctccgtgttcccagcaaagcagggagcacggagagtcaaagcta

SEQ ID NO: 50408 - DNA, 191 bp, Homo sapiens; identical to SEQ ID NO: 9222
  chr13:25497657-25497848
  hyper

SEQ ID NO: 50409 - DNA, 68 bp, Homo sapiens
  chr13:25592477-25592545
  hyper
tggtgcttctccacctggtgccgccgctgggcccacagcccgacttcgccactgcgtcgcccccgggg

SEQ ID NO: 50410 - DNA, 312 bp, Homo sapiens; identical to SEQ ID NO: 9223
  chr13:25620893-25621205
  hyper

SEQ ID NO: 50411 - DNA, 311 bp, Homo sapiens; identical to SEQ ID NO: 9224
  chr13:25621263-25621574
  hyper

SEQ ID NO: 50412 - DNA, 52 bp, Homo sapiens
  chr13:25744682-25744734
  hyper
ccgacgggtctgagggtggatcgacagaggcagggtctggggcggcgggcgc

SEQ ID NO: 50413 - DNA, 294 bp, Homo sapiens; identical to SEQ ID NO: 9226
  chr13:25745300-25745594
  hyper

SEQ ID NO: 50414 - DNA, 354 bp, Homo sapiens; identical to SEQ ID NO: 9227
  chr13:25745726-25746080
  hyper

SEQ ID NO: 50415 - DNA, 49 bp, Homo sapiens
  chr13:25861518-25861567
  hyper
ggtggcgtcaacggcgcaggtgcagccggtgagcgccgtctcctagaaa

SEQ ID NO: 50416 - DNA, 6 bp, Homo sapiens
  chr13:25946011-25946017
  hyper
aaagcc

SEQ ID NO: 50417 - DNA, 373 bp, Homo sapiens; identical to SEQ ID NO: 9229
  chr13:25946300-25946673
  hyper

SEQ ID NO: 50418 - DNA, 112 bp, Homo sapiens; identical to SEQ ID NO: 9230
  chr13:25946801-25946913
  hyper

SEQ ID NO: 50419 - DNA, 14 bp, Homo sapiens
  chr13:26042693-26042707
  hyper
cgggactagagggt

SEQ ID NO: 50420 - DNA, 402 bp, Homo sapiens
  chr13:26042768-26043170
  hyper
cgcccaccccggcccgacaagcagcttgggcgtccagcccggcccggtccctgcagggagggagcgcaggagctgggggcggctctcccggggcggggctcgctccacaagcgccaggggccgcgcggggcgtgggcgtgggcggggccgggggcggggccggccttggctgccgcggcacaggcggcggcgtctccagggggagccaaggtacgtaggcggcgtccgcctcacccgagcatccttccccgccggtggccgcccgcccgcggcccgcgctcgcagcctcccgcctggcggttgacttctttgtgtcgtattctctgcctgcgccctgtctctgcaggacctgttcgttcttctttgggctataagaaggcagaggatgagatgtcccgggcc

SEQ ID NO: 50421 - DNA, 97 bp, Homo sapiens
  chr13:26043340-26043437
  hyper
cgcgcacctggccggcccccgtccatctcccccagagccttcccctgccccctccccaccccactagcccgcggtgcagccccgcgcttccagtagg

SEQ ID NO: 50422 - DNA, 30 bp, Homo sapiens; identical to SEQ ID NO: 9232
  chr13:26594656-26594686
  hyper

SEQ ID NO: 50423 - DNA, 30 bp, Homo sapiens
  chr13:26623879-26623909
  hyper
gctcaggatgctagcgaaaagcctcccagg

SEQ ID NO: 50424 - DNA, 92 bp, Homo sapiens
  chr13:26624295-26624387
  hyper
gaagatgggaatccgcggcgtctggcacggggcagcagccccgggaaagccctgaggagctgccttcctttcggggagccttcaggggagca

SEQ ID NO: 50425 - DNA, 4 bp, Homo sapiens
  chr13:26624425-26624429
  hyper
cgtc

SEQ ID NO: 50426 - DNA, 441 bp, Homo sapiens
  chr13:26624756-26625197
  hyper
gcgctgggcgcaggccgccctacctgccgagccgtcggggccgtctttgtccgcccggccaggctcgccagcgccctgctggcggtcattgtcgcagccgccctggtccaggcgcgcctcggcgctggagcagcagtagcgcaacgcgcagctgccgcagcagatggtggcgtcgccgccgtcgaagcgctcgggacactggaagccgatgcgccagacgccctgcgcgtccagccagccgtggcagtactcgccgctggccctcgcccccgccgccagcagcgcagccagcagcagctgcaggagcgaagcggcgttccaggatgaggagacggacgagcggcgagcgccccacatggcaccaccctgggcgcggacagcgcgtctccagagagcgcaggacggtctccgagaagtcgtggccccggcgacccccgggcc

SEQ ID NO: 50427 - DNA, 390 bp, Homo sapiens; identical to SEQ ID NO: 9234
  chr13:26625266-26625656
  hyper

SEQ ID NO: 50428 - DNA, 124 bp, Homo sapiens; identical to SEQ ID NO: 9235
  chr13:26626239-26626363
  hyper

SEQ ID NO: 50429 - DNA, 30 bp, Homo sapiens
  chr13:26760407-26760437
  hyper
cacatctggagtgccgtgtggagacgccag

SEQ ID NO: 50430 - DNA, 30 bp, Homo sapiens
  chr13:26760649-26760679
  hyper
tctgttagggcgcgcgcacacacatgcacg

SEQ ID NO: 50431 - DNA, 30 bp, Homo sapiens
  chr13:26828723-26828753
  hyper
ccacccctgccccccggccccccgacccag

SEQ ID NO: 50432 - DNA, 30 bp, Homo sapiens
  chr13:27050497-27050527
  hyper
cctagggagggcagcgggcaggctgggctg

SEQ ID NO: 50433 - DNA, 359 bp, Homo sapiens
  chr13:27131469-27131828
  hyper
gattaggatataagcgcaaactcaaaggtactgtaatgggcacctagcaatcagaggtgatacaagggtctcttggcccgaagtatccccacctctcctcgctggaaaggacgctgcctaagcctcatcccgagctgggggcggaggaccaagggtgagagccaccgcctccgcaatcccccgcccctcggcaccgtcgctcagcgcgctcgccggctccctattggccgaggcactcgccaatcctggtgaagcggccccgtgagttggccctggttggtggagccggcactgagcccccctcctgctccggccgagcccccccgccgggagggggcgtggccgcggccgtggacggg

SEQ ID NO: 50434 - DNA, 450 bp, Homo sapiens
  chr13:27131859-27132309
  hyper
cggtgtggtgcgaggcgggtgcgccgggcggccgcggcgcggcgggaccatggagctcagagcgcagccccggcgccggcggcgggaccgcggaccggtgagtgagggctgcggtcgccccggctctccgctgtaggctgctgtggccctctcggctccgggccgggcggctgtcgggggaggggcggccccacggcgaactgaagttgctgcatcgccgcgcgctccggccgggcggcggggcccactgcgggctgcggcgccgcctcgcgcctatccctgcagcccggccgcattctcccggccggctcccgcgctggcaggggcttctcgccgtcacggcgcggccaggcggcccttctctcccgcgcctccgggcctccggccctttgccgtccggtgcgcgctccctggactcgggacagccacccgccctccccgccgtaagtg

SEQ ID NO: 50435 - DNA, 45 bp, Homo sapiens
  chr13:27132629-27132674
  hyper
cggggtatcatccccgggggtctttacccgcgcgcctgggcttta

SEQ ID NO: 50436 - DNA, 1014 bp, Homo sapiens
  chr13:27334205-27335219
  hyper
ggtaggacttcaaaacaccagcgtgagcgaggcaggcacacacggactcgcggcggtctgtttgcaacagcgctgggaatgcacattggaaaatcacatcttgcatgctgaaaacgaacaactgtttgacatctgggctgctgccgagaaaaccacgcggcagcggcaggtctcgagccaggggccgccatcctcgatggaatatttaaatcgcctatttccatcgaactcccaccctccaaacgcatcccccgcgcgcgtgcacatcctcaaacgcacccccgaccggaacaaagaggggctccagactccccccgtgcgcacggggcagtcgggagggccacgagagggaggtgtgtgcaatggaagtaccgagacagacagacagacagatgcccatgcactgctgccgattccctggcggcggggacgggagtcggacgcgagggggacagacagggtgcggggacaggcggcccgcgggggcgggggggtcatcgagggggtcaccttggctcgcccaggccgagggggctcctccggtgcttccgaagcgcgtgggctactcgtgtcgcatgtcggcgcagttgcccgctgtggcaaggggggggcggccgggctccggagcgggccgggagggcgcggggcgcgcactccgcggcaggtgagcggcgcggctgcaggtgagcagcagcctcggctcgcgcgcccagctttccccgccgcgcccgcccggcccacacgctccccgcgcgcgcgccgcccccgccccgcgcgcgcccggccgcccgcccgcccgcgggatccccgcgaggccgcgcgcccccacgggtcagggctgctctagggtgcgggcaggcgagggcggcccaggggcgcggggcgaggggcgaaggagccaggaggctgagaactgcatggtagccctgcctgcctgccgcgctgcgcgccccaccccagccggcggccccgggcttgcaccgggcggggcaggggagcgctgcctggagccct

SEQ ID NO: 50437 - DNA, 133 bp, Homo sapiens; identical to SEQ ID NO: 9238
  chr13:27744843-27744976
  hyper

SEQ ID NO: 50438 - DNA, 30 bp, Homo sapiens; identical to SEQ ID NO: 9239
  chr13:27825511-27825541
  hyper

SEQ ID NO: 50439 - DNA, 30 bp, Homo sapiens; identical to SEQ ID NO: 9240
  chr13:27868706-27868736
  hyper

SEQ ID NO: 50440 - DNA, 30 bp, Homo sapiens; identical to SEQ ID NO: 9241
  chr13:27949036-27949066
  hyper

SEQ ID NO: 50441 - DNA, 292 bp, Homo sapiens
  chr13:28024611-28024903
  hyper
cgcaccgctccgcacgcctcatatttagcattacctgtgctggggcaagcgattgacatactgtagcggacgcaagtacagcggatctgcggcgagtccccttcgctctccgtagtgggcggggcttcaccccgcgtcctttaaaggaaaggtgatgggcggagccacgtttttctactgttgggattcagttccgccgacagaaaatgcggagaacgcggaggaagtccctgaggggaaattgctgctcacctggctcccgctgctccgcaggtgcggtgaaggctaatgt

SEQ ID NO: 50442 - DNA, 30 bp, Homo sapiens
  chr13:28107367-28107397
  hyper
gctgcaagcgagggcggccagtccatcgag

SEQ ID NO: 50443 - DNA, 30 bp, Homo sapiens; identical to SEQ ID NO: 9243
  chr13:28179804-28179834
  hyper

SEQ ID NO: 50444 - DNA, 30 bp, Homo sapiens
  chr13:28194816-28194846
  hyper
cctatccgagagctcgggaggcgggccaga

SEQ ID NO: 50445 - DNA, 30 bp, Homo sapiens
  chr13:28363825-28363855
  hyper
ctcccaccccgccccgctctgggggacttt

SEQ ID NO: 50446 - DNA, 30 bp, Homo sapiens
  chr13:28364857-28364887
  hyper
tcgcttcctctcagcgacccagcccagctc

SEQ ID NO: 50447 - DNA, 30 bp, Homo sapiens; identical to SEQ ID NO: 9244
  chr13:28365572-28365602
  hyper

SEQ ID NO: 50448 - DNA, 73 bp, Homo sapiens; identical to SEQ ID NO: 9245
  chr13:28366528-28366601
  hyper

SEQ ID NO: 50449 - DNA, 374 bp, Homo sapiens; identical to SEQ ID NO: 9246
  chr13:28366664-28367038
  hyper

SEQ ID NO: 50450 - DNA, 30 bp, Homo sapiens
  chr13:28368805-28368835
  hyper
gaccccgctctgcgccgctggcgaccccac

SEQ ID NO: 50451 - DNA, 5 bp, Homo sapiens
  chr13:28369065-28369070
  hyper
ccgag

SEQ ID NO: 50452 - DNA, 298 bp, Homo sapiens
  chr13:28369161-28369459
  hyper
cgattgtcccgctccggcgtggcgcacaagcgtcgcggagctcagagagctaagccggaagggaaggagagcgctctccttggactgcaccatgggtcccaacccctgcagcgcctccttctcacctgggatccagccccacctccatccctcaccatttcgctgtcctggccaacagccgggagggcagaaaccactccctccataagcacaagaaatccgtccttcactgcgcttggattgataacgattcgttagggacaaatttccattctgcgggatggtgcagacttctctc

SEQ ID NO: 50453 - DNA, 20 bp, Homo sapiens
  chr13:28370403-28370423
  hyper
tgattttagtcccagtctaa

SEQ ID NO: 50454 - DNA, 45 bp, Homo sapiens
  chr13:28370502-28370547
  hyper
cgaagacccagactacaaggccccggaaccaggagcttgtggggc

SEQ ID NO: 50455 - DNA, 144 bp, Homo sapiens
  chr13:28370985-28371129
  hyper
gatttgggggcgggcggcagcacgattttctggcaacgagttcgttgtgggtctgaaggaccggcttagaactagcacctctcctggattacaggagggggtggtcttgtgcacctgggaaaggccttcgccagcactcagtgt

SEQ ID NO: 50456 - DNA, 337 bp, Homo sapiens; identical to SEQ ID NO: 9249
  chr13:28371360-28371697
  hyper

SEQ ID NO: 50457 - DNA, 459 bp, Homo sapiens
  chr13:28394522-28394981
  hyper
ttcaaaagagtgggcgtgagcaagcgagaaaagccccttcaattctgggaaacttaaagacagtttcttccagcaggaacacctggagaggcaaaaaaaaaagcaaaaaacaaaacaaaacaaaacaaacaaacaaaaaaagttgtgttggaacccgtggagagaaggaactgtccgtttccaaactctgcttcggcccctctcccctcccacccacggccccaggcagagagggccggaaaggcagcccattcctgcccgcgcattcgggcgcacaagcgcattgcgcatgtactgtggagggggcaccctggtctccacctggaatgcgcttctagccaagtaattgcgtcgcctttgcgcgcagctggcctggggaacctgggcccatcagagccagttactcttggtccccgctttactggagggtcgcaggagactttcgcttccaaaagcaca

SEQ ID NO: 50458 - DNA, 248 bp, Homo sapiens
  chr13:28395256-28395504
  hyper
ttttcagtcaaatgcgcaaagccaggtggctcctttaacacccccagagattgtccccatgatctcctctgcgccatggggcgctgggtgctgggggcgccgtctgtatcctctgcctggtaactgcccccatcgcgccccactgcgccccagcccaggctggaaaactgggccaacagggaggcttggatggggggaaacccagcctgaggctggaaacggctagaagtgaacgggacgagtggctt

SEQ ID NO: 50459 - DNA, 56 bp, Homo sapiens
  chr13:28395742-28395798
  hyper
ataaaagctgaatgcgcacctcaaagagatgtggtgtttgcgcagggaggccccct

SEQ ID NO: 50460 - DNA, 30 bp, Homo sapiens
  chr13:28396024-28396054
  hyper
ggcactggaaatgccgtcaaaccagagcgc

SEQ ID NO: 50461 - DNA, 101 bp, Homo sapiens
  chr13:28397107-28397208
  hyper
gcagaagctctttgcgcacagacatctctccaaggtgacccatttggcacagctgaaataaataaccccgctcatgcccagagagcgggggaactgtcaga

SEQ ID NO: 50462 - DNA, 30 bp, Homo sapiens
  chr13:28476962-28476992
  hyper
agcagtgaatacaaactgagaaatcaaaag

SEQ ID NO: 50463 - DNA, 1054 bp, Homo sapiens
  chr13:28491467-28492521
  hyper
aagagctgctgttaaatggctcgggaaggtgctcgcctaatggctcggtatcgctgccgggcctgttgtgggcgaggcggcttggagggggcgcaggcgtcagcggggattcagagcggaaacgcatttcgcctgtaatggactcggcgattttacgataccaggagctagatccacggggaagtacaacacacgaccttactaagcggagggttccgcttgatgcgttttttatacggctgtacgtgataaaattccagataactttgtttcatctaataataataataacaataataaatggttgtttgacctttgctccctgggtcccttctataggtcgcaggcagcagaaaatgctaattgtgaaagtgagaacgcgcctccatggaatacccccggcgatcccctcctcctcccccacagccgcgggtacccgggtttttgccggcgaccgcaaccggcggatttgctttctgctgagagcctcttttctttctgcagggccgagcaaaaatattaaatggaagcaaatgaagcatcgaaatggagaccaatttacagaaatgtgcaattagttgagaagtgcaaagtaaacactccgggggtggcaggcgaggcagggagcaggggagggagagtggggcgcagactgagtccagagtgggtgtaggggtgcccagggaggaggggaagggggaggaaaaggagggggaggggaaaagtggccgatctttgtcctgagcggagcttgccgtccgctcataaccgcgtcgccaagtcaaccctcggcgactcggcagattatctccaagggtcaacacgccgcggccaggcaaccccctccagcctgccctcctgatcgatgtggtcactcgcggccagggtgatagggtagagttctccgcggccgcagacaatggactcattgacgcgggcgcacagagattaggtgcccgggccccacggcctttcactctctgcccccaccaaaactgcaggtggcacttttccctgaagaaatcaccgaaactctccccgcccgccgccgtgc

SEQ ID NO: 50464 - DNA, 695 bp, Homo sapiens
  chr13:28493980-28494675
  hyper
attggaacaaaagcaggtgctcgcgggtacctgggcctagcctcttagtgcggccagccaggccaatcacggcccccggctgaaccacgtggggccccgcggagcctatggtgcggcggccggcccgccggtccgcgctggctgtgggttccctctgagatcagtgcggagctgtcaaagcgagcaggggtggcgccgggagtgggaacgccacacagtgccaaatccccggctccagctcccgactcccggctcccggctcccggctcccggtgcccaatcccgggccgcagccatgaacggcgaggagcagtactacgcggccacgcagctttacaaggacccatgcgcgttccagcgaggcccggcgccggagttcagcgccagcccccctgcgtgcctgtacatgggccgccagcccccgccgccgccgccgcacccgttccctggcgccctgggcgcgctggagcagggcagccccccggacatctccccgtacgaggtgccccccctcgccgacgaccccgcggtggcgcaccttcaccaccacctcccggctcagctcgcgctcccccacccgcccgccgggcccttcccggagggagccgagccgggcgtcctggaggagcccaaccgcgtccagctgcctttcccatggatgaagtctaccaaagctcacgcgtggaaaggccagt

SEQ ID NO: 50465 - DNA, 696 bp, Homo sapiens
  chr13:28495098-28495794
  hyper
gccccagatcgccttcggagccccggagcccctcacttcccgcgcttcgttaaggaagggcaggcatctaggggcgccaggtaggtgcagaaaggcagggagggaaaggaaactgcacccaacccagcagtgtccggctgccctggttgtggaaacaggataggagtaaagaggaaggggctggggcaaggcgggggctcaccgcgaggctgaaagccggcctctcaacgtcagagcctggcagctaggagagcaatctgagaagcgaattcgtttttcaccaaccgaaagcaattgaagctgtctccccgcaccgcttcccaggaagtaatttttcaggagatgggcgctccctgcctagctggtggggaggcgagaggcctggttcctgcggccctccgcgccggcagagaacagaaggtctttcccggagccgggagccggaggcacggggtagcccccgggtcctttgcggccccgcgcgagcggcaagttccggcgcggcctgtgtcgtcgccgctactcactgtcatcgctgccgtgcctcagccacttctggtcacacctgcaccgcaaatagttgccttttcctttcaactggcagccgggagtagggggaagcagctcgagccggcgtcccccggcccaccccgaaaatcctcagcgcccatctgcggggtctggccagccctgcct

SEQ ID NO: 50466 - DNA, 1827 bp, Homo sapiens; identical to SEQ ID NO: 9254
  chr13:28527189-28529016
  hyper

SEQ ID NO: 50467 - DNA, 30 bp, Homo sapiens
  chr13:28534633-28534663
  hyper
gaccccaagctctgcgctggaggcgtcagg

SEQ ID NO: 50468 - DNA, 206 bp, Homo sapiens
  chr13:28535063-28535269
  hyper
caaacagggtttattgacaggcgtttcacggcaacgcatagcaaccccggcggctagggggcgggcctgtgggcgcggccggggcgcggggagacctgcggggcaccggggctcagaccggccctgacccaggacccctgacccaggacccctcgcccagcggacccggacacggcttcctcctctgcccggcaccccccgacccc

SEQ ID NO: 50469 - DNA, 326 bp, Homo sapiens
  chr13:28535305-28535631
  hyper
cgcccgcgggccgggccaccggagcccctttcccaatcctggagctgtatacgccacccggaagggccgcggaattggagaggtgctgcagagggtctatacctcttgctgtttcccggctctgctcatcttccccaactgcccttaaggcgcctccgtgggcgcgctgattaggctctcggatgttggtgggaagatcgaaacgaagggctaagcccccctcgcccgggtcctgccggaaagttcagctcggcggcctccaggatcaaaaattttaaaggctgcagcccggtccccagtggatcggccagataacaagaaactgt

SEQ ID NO: 50470 - DNA, 644 bp, Homo sapiens; identical to SEQ ID NO: 9256
  chr13:28540455-28541099
  hyper

SEQ ID NO: 50471 - DNA, 230 bp, Homo sapiens
  chr13:28541179-28541409
  hyper
cggcttccctcccgcccccttcccggccctcaccccgcggccgctctcccgggacacgcaaaggtcttccttagggcgtgcgccacccccgccaaccgcgccccagacaggggctgtagaaagtgggtctttgggagccaggatctgggagcccctgctaggagaaaggcgcctcctctaggagaagggaccaagccaaagctctgaggctcacccgaggctgatctgtg

SEQ ID NO: 50472 - DNA, 1347 bp, Homo sapiens
  chr13:28542188-28543535
  hyper
tagcccaagaaggttcgagcctccctctctcctcggcggccaggagccacgcaaggaatgcatgccgcagcaagtgccggaggacgcgattctgccggcgtccagcagtgctcacgccgacattccccggagcttcccgaaggtgtcccggggttgcgaatgaggagctcttggaaagaggacgcctgaacacggtgttgagactcagaatattcactcccaggctcagtaggtcagagaagccccgacgggccagaggcccccgaatttgtctccgggccgtgcccctcctggcgccgagctcccagacagcccgggacgcccctgtgcgcactggacgcgcgacgcgcagcagccactggctcgacccgcgccttcccaagcaccctccgaaggggcgcagcctctgcttaccttggctgccgagggactgctgcgccggcttccgcatccactcgcacaggttccgccgctggccgccgggagacagctgctcggcggcagcggtggcggcgggcccaggagggccggggttgagcgtttgcagcagcccagaagcgcaggaaggcgcggcggccgggtggtgcgggtggtgatgcgggtggtggtgcggatggtagtctgcggggctgctgtagcccatggctgcggccggggagccaccgttgaggccgtgagccacggcgttggcggcggccgcggcgcctccgggcgcgtagccattccagtcctcccggagtggggcgccatacgctgccggccaggatggccccggggactgcgcgctgtccaagttcgctgccgctgcagctgcggccgccacgtggtaaccgccgtagtccgggtactgcggggggctgacgaagttctgcggcgccaggttgaggccgccagagtggcgcacggagctagggtacatgctcacgtccttgtccaggaggtagctcacgtacatggtggcgagggtccgggagcagacctcaccatgctgcctggggaccgacgctggaggctgccggggggcacgaagggaaaggggcgaggggactcgaggagcggcgggtggctgcgccccagcccgcggtgctccgctggctcctcgcggctcttctgcctccgaggcggtccctccctctggcctgcctcctccctccctccctttcttccttctttcctcccacctccttcccactaggctgcagaggcggggaagacccgccacaggctggcgtgcggagccccaggccggcggccttccgtgattaacgagtgtttacaagactctattagtaatgacacagacaccaatggttggagacgtcgaggcgcagcgcgcactctacgcac

SEQ ID NO: 50473 - DNA, 58 bp, Homo sapiens
  chr13:28544070-28544128
  hyper
gaaatttgagttaaattcaagcgatttattgttaaacgtttacattcaagaatcagaa

SEQ ID NO: 50474 - DNA, 81 bp, Homo sapiens; identical to SEQ ID NO: 9259
  chr13:28544503-28544584
  hyper

SEQ ID NO: 50475 - DNA, 176 bp, Homo sapiens; identical to SEQ ID NO: 9260
  chr13:28544665-28544841
  hyper

SEQ ID NO: 50476 - DNA, 317 bp, Homo sapiens
  chr13:28549574-28549891
  hyper
ggagctgcgctctcccgtctctttactgggagcgttctcctgccggggcttggacatttccaagggaagtgaaaatccacaaagctgcccccacttcgtaagggcctgtgcctggagggtcgtcgggttacagaaattgaaatcagctctttgccttccaactcttcttggccttgccaccgcgattggttttgttttctttgtttttaacgaattggtaagtaaaatattagttgttcaccctgaaatctgccctaaccacttccgtaccccctgaagctcgctgggcgcgccctgggctgtccttccctgagcag

SEQ ID NO: 50477 - DNA, 176 bp, Homo sapiens
  chr13:28550239-28550415
  hyper
cgccgcgcagccagctctctgtcccttcagctccagctccttctaaagggacagactcagcgtctgcccccatctgcaccccttcccgcaggaataaaatcattttccggacaagcttggaactgttgaaatgtaactatgtaattggagacaccggggtcgtgtctgggagattc

SEQ ID NO: 50478 - DNA, 14 bp, Homo sapiens
  chr13:28551534-28551548
  hyper
cccaaagccgacct

SEQ ID NO: 50479 - DNA, 391 bp, Homo sapiens; identical to SEQ ID NO: 9262
  chr13:28551993-28552384
  hyper

SEQ ID NO: 50480 - DNA, 334 bp, Homo sapiens; identical to SEQ ID NO: 9263
  chr13:28552659-28552993
  hyper

SEQ ID NO: 50481 - DNA, 30 bp, Homo sapiens; identical to SEQ ID NO: 9264
  chr13:28578210-28578240
  hyper

SEQ ID NO: 50482 - DNA, 67 bp, Homo sapiens; identical to SEQ ID NO: 9265
  chr13:28592625-28592692
  hyper

SEQ ID NO: 50483 - DNA, 30 bp, Homo sapiens; identical to SEQ ID NO: 9266
  chr13:28599040-28599070
  hyper

SEQ ID NO: 50484 - DNA, 30 bp, Homo sapiens; identical to SEQ ID NO: 9267
  chr13:28602387-28602417
  hyper

SEQ ID NO: 50485 - DNA, 500 bp, Homo sapiens; identical to SEQ ID NO: 9268
  chr13:28608022-28608522
  hyper

SEQ ID NO: 50486 - DNA, 30 bp, Homo sapiens; identical to SEQ ID NO: 9269
  chr13:28610100-28610130
  hyper

SEQ ID NO: 50487 - DNA, 30 bp, Homo sapiens; identical to SEQ ID NO: 9270
  chr13:28611397-28611427
  hyper

SEQ ID NO: 50488 - DNA, 30 bp, Homo sapiens; identical to SEQ ID NO: 9271
  chr13:28622462-28622492
  hyper

SEQ ID NO: 50489 - DNA, 30 bp, Homo sapiens; identical to SEQ ID NO: 9272
  chr13:28623585-28623615
  hyper

SEQ ID NO: 50490 - DNA, 107 bp, Homo sapiens; identical to SEQ ID NO: 9273
  chr13:28636039-28636146
  hyper

SEQ ID NO: 50491 - DNA, 30 bp, Homo sapiens; identical to SEQ ID NO: 9274
  chr13:28644712-28644742
  hyper

SEQ ID NO: 50492 - DNA, 170 bp, Homo sapiens; identical to SEQ ID NO: 9275
  chr13:28674056-28674226
  hyper

SEQ ID NO: 50493 - DNA, 470 bp, Homo sapiens; identical to SEQ ID NO: 9276
  chr13:28674720-28675190
  hyper

SEQ ID NO: 50494 - DNA, 30 bp, Homo sapiens
  chr13:28712522-28712552
  hyper
cccgtcgtcccgcgcggcccctttaagaaa

SEQ ID NO: 50495 - DNA, 30 bp, Homo sapiens
  chr13:28713752-28713782
  hyper
ttgtagaaggcttgcgggagaaaggttttg

SEQ ID NO: 50496 - DNA, 1111 bp, Homo sapiens
  chr13:29067874-29068985
  hyper
aaccctcaagttcctcggggctttgacccctcaatggcggcggtctaactgctggtaaaacccccggcccctgactgttccaccgcccgtctcccaaacgcccagcgaaggctgacttaggtggcgggcggacctcatcgattcctcaaaccacatcgtttggtcaaaatcgcccgccctctcttcgctcggattttaaaggctaggcttgtaagtcagtaagttaacggtatttgggccctgggctgcccttgtgggtcagggtcactgatgtccgcgacacggactggaccgcgcaccacgcctgctcccggcagaggccccacccgggtggctgagcgcagcgcactggggccccgcggtccgagagcggcggggaggagcgggcgctcgccgagcgttccccgggacagtccggcttggggactcaagcgggtcatgggatgccggcgctggccctctcctgagatcctcctgctcccccgcaggcacgagtcccctccaaatcggctcccctcctacactctcgtgacgcgaggtcgcggccagtgcccaatatcaccaaagtcccggcctcagcccagccccgggcagcctggcaggctttcaggagcctctgctcccggctccgggggaccctgcgtacctgccccaggtcctctgggaatgggctctgggtgccaggcaggtcccggtgcgtgctgctcctagtgcccagggcctcggcagtgagaccccaacccgacagctggataagggatcagcgatcctgtcgcaaacggacagccccagcgcggacccggtctgagcgctgatgctcgcgggtccaggccagccactcctcgaggcgctccctcggagaaagggcgcagcggccccaagcgtgcccgctgcaactagtgtcccaggttctcgccgtagccagcttctccgggctacagcctcgtctccccgcgtgcaccccgccctggcctcggaggctctgccctccggccgccccatcgcagcccgcctcaggccccggcccccagccgcgcctcacctgtgagaagcagacagctgagcagcgcgcacagcaggaccccggtgtcccagtagctgaccatggtga

SEQ ID NO: 50497 - DNA, 916 bp, Homo sapiens; identical to SEQ ID NO: 9278
  chr13:29068993-29069909
  hyper

SEQ ID NO: 50498 - DNA, 166 bp, Homo sapiens
  chr13:29105478-29105644
  hyper
tcccggggtgtgtgcggattctcaataaaaagggaaaagcacgatccaagttaattttccagcgccgacaggaaatgctgtttcctgcatcgtacaacgctggtgccaacaagactgacacaggagcccattgtcccgcgaacaatgtggcgatggggaaggacgc

SEQ ID NO: 50499 - DNA, 512 bp, Homo sapiens
  chr13:29106302-29106814
  hyper
cccaaagtctccccagaggctcgtttcgaacccgcagctagccaagggcaaatgcatactcgaaagtgccacgcctctcgtccaccctgcgccgcgtccagtccacccccttcatcccgcgccccatgtccacccgcccgctgtccaccctgcgccccatgtccatgcgccccctgtccacccgctcactgtccaacccgcgccccatgtccacccgcctgctgcccaccccgcgcccccagtgcacccgcccagccccgagcgcccgcggagccgagtggagagcagcggccgcagcgcggcgccaggctcgggctgggctggccggcgcgaacccccgggggcgtctgggcggccaggccgggtggcggctgcgcacgtaggagtaccccctgagcccagccgctcggccggcctgacccgcgggtgaccggatacgagtaacgcgtgcgccccgatctgtgccctgcgcggggtcgggcggggaccggccgggggcgccgcgcgcccgg

SEQ ID NO: 50500 - DNA, 165 bp, Homo sapiens; identical to SEQ ID NO: 9280
  chr13:29106898-29107063
  hyper

SEQ ID NO: 50501 - DNA, 57 bp, Homo sapiens; identical to SEQ ID NO: 9281
  chr13:29107252-29107309
  hyper

SEQ ID NO: 50502 - DNA, 30 bp, Homo sapiens; identical to SEQ ID NO: 9282
  chr13:29233061-29233091
  hyper

SEQ ID NO: 50503 - DNA, 30 bp, Homo sapiens; identical to SEQ ID NO: 9283
  chr13:29283831-29283861
  hyper

SEQ ID NO: 50504 - DNA, 1128 bp, Homo sapiens; identical to SEQ ID NO: 9284
  chr13:29292470-29293598
  hyper

SEQ ID NO: 50505 - DNA, 315 bp, Homo sapiens
  chr13:29393538-29393853
  hyper
aagcttgcttctagaaagaaacgcctgccttttgcgcaaatcttttcagagactggctttgggctcctatgaatcaggcaccctagcgtcctccaaagttcttcccgatgctgaaccccaatgcctcctgctgcgcctaattcgaagcggctccctcttctgttctgagcggaaaacagcggaacccattcctggaggcctgccctggaacggccaactcattcttactcctttctcctggggtccgatgctagggcaccacggtgaccagccgcgcagcgggcagcggcccgcgccgcgcccaccgcctgcgga

SEQ ID NO: 50506 - DNA, 166 bp, Homo sapiens; identical to SEQ ID NO: 9285
  chr13:29394546-29394712
  hyper

SEQ ID NO: 50507 - DNA, 216 bp, Homo sapiens
  chr13:30002456-30002672
  hyper
cctggcagccctttcgggcgtccccaggcagtgccctgaagcccaggctcgccttttgtgcttcctgcgtccgctccaggcgtgtctgcgcggtgcggaggcgcatccccgccaggggagggctgggagcggccgcgcacccagaggagagcaggctgtccttttagggagccggcattggtaaatgctctgtggttatgcgactattgatttgcc

SEQ ID NO: 50508 - DNA, 30 bp, Homo sapiens
  chr13:30424899-30424929
  hyper
agggagccgccgaacgcctcctcacccagc

SEQ ID NO: 50509 - DNA, 30 bp, Homo sapiens
  chr13:30688850-30688880
  hyper
agactccttggaaccgcagcgccgacgcag

SEQ ID NO: 50510 - DNA, 30 bp, Homo sapiens
  chr13:30880885-30880915
  hyper
gtgtgacatacatacggttctgcaccgaaa

SEQ ID NO: 50511 - DNA, 30 bp, Homo sapiens
  chr13:30881422-30881452
  hyper
accacctgctgtctcgccctcgcccctttc

SEQ ID NO: 50512 - DNA, 30 bp, Homo sapiens
  chr13:30881676-30881706
  hyper
gagcttgggactcccgcccaggttgccggg

SEQ ID NO: 50513 - DNA, 384 bp, Homo sapiens
  chr13:30982477-30982861
  hyper
tgcaaaggagaagcgcgtgcagtcccggcgcggcccgctctgctcagttctccagggcgggccttggcctggactgcgtgtcgggaggactcgcgggccccgcattgccgcatgccaccggcaggtgtctctttcctggcttgggaacctattgtgagttcaccaaatggaggcgcgaggaggagggggcgggcaggggaggggcgccgagagccggagcgggcaccgccccctgcctgcccgctccccgagcgcaccgcggcccagccacgaggctgccggtcctcacctttgaaacgccggcagctgcgcgcgctgcggcaggcgcggagaggagccacctcgtcacgtggggaggaaatgccttgccggcctccaaaccta

SEQ ID NO: 50514 - DNA, 30 bp, Homo sapiens
  chr13:30995671-30995701
  hyper
gagcagagcaagagcgcgctgcccacaggg

SEQ ID NO: 50515 - DNA, 19 bp, Homo sapiens
  chr13:31019964-31019983
  hyper
cagctggctggcttcccgg

SEQ ID NO: 50516 - DNA, 30 bp, Homo sapiens
  chr13:31039577-31039607
  hyper
gccgcccgcccgaacgcccggcccgagggc

SEQ ID NO: 50517 - DNA, 237 bp, Homo sapiens
  chr13:31039901-31040138
  hyper
tctccccgccgcggcgctgccccagactcaccctcagcgaggcacagagtcgcccagtgcccgtccggctctcacttgccccggtgctgtctctatggagctcaatgtactgcaatggctgtgagagcgggagccagacgcagcctcctcactctctccgctctgtaacattactctccagccagcgcggctcctattggctaccgccaactcacggggctcgctcattggcccgat

SEQ ID NO: 50518 - DNA, 30 bp, Homo sapiens
  chr13:31248213-31248243
  hyper
gcggcgccggcagccgctctagccaccctg

SEQ ID NO: 50519 - DNA, 30 bp, Homo sapiens
  chr13:31736222-31736252
  hyper
cgttgccatggcagcgacagggccgctccc

SEQ ID NO: 50520 - DNA, 30 bp, Homo sapiens
  chr13:31736623-31736653
  hyper
ctggcgcttttgcgcgggttccctggcaat

SEQ ID NO: 50521 - DNA, 30 bp, Homo sapiens
  chr13:31774853-31774883
  hyper
cagggccttcgggacgtgccctggcccctg

SEQ ID NO: 50522 - DNA, 296 bp, Homo sapiens
  chr13:32605028-32605324
  hyper
actgtccccttagagtgcacacgttcgggctccgatgccccttgaaaagactgcatttctgggagggaaaagtaaaaatgcagataccaccatgcgtgtggaaggcagggaagaaaaagcccagacaagcgtcctcttgttgagtctctttactgcaacgaggctgacggatggggtttttcaaaacgtcgctgcaaccagatgcaaggctgcagctttgcttaccgcagcgtgctgcagttgtgtttatttcagggacagacacaaggggaagcagcagccagagcacacccggg

SEQ ID NO: 50523 - DNA, 181 bp, Homo sapiens; identical to SEQ ID NO: 9289
  chr13:32605442-32605623
  hyper

SEQ ID NO: 50524 - DNA, 299 bp, Homo sapiens; identical to SEQ ID NO: 9290
  chr13:32605674-32605973
  hyper

SEQ ID NO: 50525 - DNA, 280 bp, Homo sapiens
  chr13:32889524-32889804
  hyper
agaaatacccgcagcggcccacccaggcctgacttccgggtggtgcgtgtgctgcgtgtcgcgtcacggcgtcacgtggccagcgcgggcttgtggcgcgagcttctgaaactaggcggcagaggcggagccgctgtggcactgctgcgcctctgctgcgcctcgggtgtcttttgcggcggtgggtcgccgccgggagaagcgtgaggggacagatttgtgaccggcgcggtttttgtcagcttactccggccaaaaaagaactgcacctctggagcgg

SEQ ID NO: 50526 - DNA, 107 bp, Homo sapiens
  chr13:32890557-32890664
  hyper
gacttatttaccaagcattggaggaatatcgtaggtaaaaatgcctattggatccaaagagaggccaacattttttgaaatttttaagacacgctgcaacaaagcag

SEQ ID NO: 50527 - DNA, 250 bp, Homo sapiens
  chr13:32893212-32893462
  hyper
gatttaggaccaataagtcttaattggtttgaagaactttcttcagaagctccaccctataattctgaacctgcagaagaatctgaacataaaaacaacaattacgaaccaaacctatttaaaactccacaaaggaaaccatcttataatcagctggcttcaactccaataatattcaaagagcaagggctgactctgccgctgtaccaatctcctgtaaaagaattagataaattcaaattagacttag

SEQ ID NO: 50528 - DNA, 110 bp, Homo sapiens
  chr13:32899211-32899321
  hyper
ggaaggaatgttcccaatagtagacataaaagtcttcgcacagtgaaaactaaaatggatcaagcagatgatgtttcctgtccacttctaaattcttgtcttagtgaaag

SEQ ID NO: 50529 - DNA, 183 bp, Homo sapiens
  chr13:32900236-32900419
  hyper
gtcctgttgttctacaatgtacacatgtaacaccacaaagagataagtcaggtatgattaaaaacaatgctttttattcttagaatactagaaatgttaataaaaataaaacttaacaattttcccctttttttacccccagtggtatgtgggagtttgtttcatacaccaaagtttgtgaag

SEQ ID NO: 50530 - DNA, 116 bp, Homo sapiens
  chr13:32900634-32900750
  hyper
gggtcgtcagacaccaaaacatatttctgaaagtctaggagctgaggtggatcctgatatgtcttggtcaagttctttagctacaccacccacccttagttctactgtgctcatag

SEQ ID NO: 50531 - DNA, 51 bp, Homo sapiens
  chr13:32903578-32903629
  hyper
gtcagaaatgaagaagcatctgaaactgtatttcctcatgatactactgct

SEQ ID NO: 50532 - DNA, 160 bp, Homo sapiens
  chr13:32905054-32905214
  hyper
gaatgtgaaaagctatttttccaatcatgatgaaagtctgaagaaaaatgatagatttatcgcttctgtgacagacagtgaaaacacaaatcaaagagaagctgcaagtcatggtaagtcctctgtttagttgaactacaggtttttttgttgttgttgt

SEQ ID NO: 50533 - DNA, 1117 bp, Homo sapiens
  chr13:32906407-32907524
  hyper
ggatttggaaaaacatcagggaattcatttaaagtaaatagctgcaaagaccacattggaaagtcaatgccaaatgtcctagaagatgaagtatatgaaacagttgtagatacctctgaagaagatagtttttcattatgtttttctaaatgtagaacaaaaaatctacaaaaagtaagaactagcaagactaggaaaaaaattttccatgaagcaaacgctgatgaatgtgaaaaatctaaaaaccaagtgaaagaaaaatactcatttgtatctgaagtggaaccaaatgatactgatccattagattcaaatgtagcaaatcagaagccctttgagagtggaagtgacaaaatctccaaggaagttgtaccgtctttggcctgtgaatggtctcaactaaccctttcaggtctaaatggagcccagatggagaaaatacccctattgcatatttcttcatgtgaccaaaatatttcagaaaaagacctattagacacagagaacaaaagaaagaaagattttcttacttcagagaattctttgccacgtatttctagcctaccaaaatcagagaagccattaaatgaggaaacagtggtaaataagagagatgaagagcagcatcttgaatctcatacagactgcattcttgcagtaaagcaggcaatatctggaacttctccagtggcttcttcatttcagggtatcaaaaagtctatattcagaataagagaatcacctaaagagactttcaatgcaagtttttcaggtcatatgactgatccaaactttaaaaaagaaactgaagcctctgaaagtggactggaaatacatactgtttgctcacagaaggaggactccttatgtccaaatttaattgataatggaagctggccagccaccaccacacagaattctgtagctttgaagaatgcaggtttaatatccactttgaaaaagaaaacaaataagtttatttatgctatacatgatgaaacatcttataaaggaaaaaaaataccgaaagaccaaaaatcagaactaattaactgttcagcccagtttgaagcaaatgcttttgaagcaccacttacatttgcaaatgctgattcag

SEQ ID NO: 50534 - DNA, 4933 bp, Homo sapiens
  chr13:32910400-32915333
  hyper
ggtttattgcattcttctgtgaaaagaagctgttcacagaatgattctgaagaaccaactttgtccttaactagctcttttgggacaattctgaggaaatgttctagaaatgaaacatgttctaataatacagtaatctctcaggatcttgattataaagaagcaaaatgtaataaggaaaaactacagttatttattaccccagaagctgattctctgtcatgcctgcaggaaggacagtgtgaaaatgatccaaaaagcaaaaaagtttcagatataaaagaagaggtcttggctgcagcatgtcacccagtacaacattcaaaagtggaatacagtgatactgactttcaatcccagaaaagtcttttatatgatcatgaaaatgccagcactcttattttaactcctacttccaaggatgttctgtcaaacctagtcatgatttctagaggcaaagaatcatacaaaatgtcagacaagctcaaaggtaacaattatgaatctgatgttgaattaaccaaaaatattcccatggaaaagaatcaagatgtatgtgctttaaatgaaaattataaaaacgttgagctgttgccacctgaaaaatacatgagagtagcatcaccttcaagaaaggtacaattcaaccaaaacacaaatctaagagtaatccaaaaaaatcaagaagaaactacttcaatttcaaaaataactgtcaatccagactctgaagaacttttctcagacaatgagaataattttgtcttccaagtagctaatgaaaggaataatcttgctttaggaaatactaaggaacttcatgaaacagacttgacttgtgtaaacgaacccattttcaagaactctaccatggttttatatggagacacaggtgataaacaagcaacccaagtgtcaattaaaaaagatttggtttatgttcttgcagaggagaacaaaaatagtgtaaagcagcatataaaaatgactctaggtcaagatttaaaatcggacatctccttgaatatagataaaataccagaaaaaaataatgattacatgaacaaatgggcaggactcttaggtccaatttcaaatcacagttttggaggtagcttcagaacagcttcaaataaggaaatcaagctctctgaacataacattaagaagagcaaaatgttcttcaaagatattgaagaacaatatcctactagtttagcttgtgttgaaattgtaaataccttggcattagataatcaaaagaaactgagcaagcctcagtcaattaatactgtatctgcacatttacagagtagtgtagttgtttctgattgtaaaaatagtcatataacccctcagatgttattttccaagcaggattttaattcaaaccataatttaacacctagccaaaaggcagaaattacagaactttctactatattagaagaatcaggaagtcagtttgaatttactcagtttagaaaaccaagctacatattgcagaagagtacatttgaagtgcctgaaaaccagatgactatcttaaagaccacttctgaggaatgcagagatgctgatcttcatgtcataatgaatgccccatcgattggtcaggtagacagcagcaagcaatttgaaggtacagttgaaattaaacggaagtttgctggcctgttgaaaaatgactgtaacaaaagtgcttctggttatttaacagatgaaaatgaagtggggtttaggggcttttattctgctcatggcacaaaactgaatgtttctactgaagctctgcaaaaagctgtgaaactgtttagtgatattgagaatattagtgaggaaacttctgcagaggtacatccaataagtttatcttcaagtaaatgtcatgattctgttgtttcaatgtttaagatagaaaatcataatgataaaactgtaagtgaaaaaaataataaatgccaactgatattacaaaataatattgaaatgactactggcacttttgttgaagaaattactgaaaattacaagagaaatactgaaaatgaagataacaaatatactgctgccagtagaaattctcataacttagaatttgatggcagtgattcaagtaaaaatgatactgtttgtattcataaagatgaaacggacttgctatttactgatcagcacaacatatgtcttaaattatctggccagtttatgaaggagggaaacactcagattaaagaagatttgtcagatttaacttttttggaagttgcgaaagctcaagaagcatgtcatggtaatacttcaaataaagaacagttaactgctactaaaacggagcaaaatataaaagattttgagacttctgatacattttttcagactgcaagtgggaaaaatattagtgtcgccaaagagtcatttaataaaattgtaaatttctttgatcagaaaccagaagaattgcataacttttccttaaattctgaattacattctgacataagaaagaacaaaatggacattctaagttatgaggaaacagacatagttaaacacaaaatactgaaagaaagtgtcccagttggtactggaaatcaactagtgaccttccagggacaacccgaacgtgatgaaaagatcaaagaacctactctattgggttttcatacagctagcgggaaaaaagttaaaattgcaaaggaatctttggacaaagtgaaaaacctttttgatgaaaaagagcaaggtactagtgaaatcaccagttttagccatcaatgggcaaagaccctaaagtacagagaggcctgtaaagaccttgaattagcatgtgagaccattgagatcacagctgccccaaagtgtaaagaaatgcagaattctctcaataatgataaaaaccttgtttctattgagactgtggtgccacctaagctcttaagtgataatttatgtagacaaactgaaaatctcaaaacatcaaaaagtatctttttgaaagttaaagtacatgaaaatgtagaaaaagaaacagcaaaaagtcctgcaacttgttacacaaatcagtccccttattcagtcattgaaaattcagccttagctttttacacaagttgtagtagaaaaacttctgtgagtcagacttcattacttgaagcaaaaaaatggcttagagaaggaatatttgatggtcaaccagaaagaataaatactgcagattatgtaggaaattatttgtatgaaaataattcaaacagtactatagctgaaaatgacaaaaatcatctctccgaaaaacaagatacttatttaagtaacagtagcatgtctaacagctattcctaccattctgatgaggtatataatgattcaggatatctctcaaaaaataaacttgattctggtattgagccagtattgaagaatgttgaagatcaaaaaaacactagtttttccaaagtaatatccaatgtaaaagatgcaaatgcatacccacaaactgtaaatgaagatatttgcgttgaggaacttgtgactagctcttcaccctgcaaaaataaaaatgcagccattaaattgtccatatctaatagtaataattttgaggtagggccacctgcatttaggatagccagtggtaaaatcgtttgtgtttcacatgaaacaattaaaaaagtgaaagacatatttacagacagtttcagtaaagtaattaaggaaaacaacgagaataaatcaaaaatttgccaaacgaaaattatggcaggttgttacgaggcattggatgattcagaggatattcttcataactctctagataatgatgaatgtagcacgcattcacataaggtttttgctgacattcagagtgaagaaattttacaacataaccaaaatatgtctggattggagaaagtttctaaaatatcaccttgtgatgttagtttggaaacttcagatatatgtaaatgtagtatagggaagcttcataagtcagtctcatctgcaaatacttgtgggatttttagcacagcaagtggaaaatctgtccaggtatcagatgcttcattacaaaacgcaagacaagtgttttctgaaatagaagatagtaccaagcaagtcttttccaaagtattgtttaaaagtaacgaacattcagaccagctcacaagagaagaaaatactgctatacgtactccagaacatttaatatcccaaaaaggcttttcatataatgtggtaaattcatctgctttctctggatttagtacagcaagtggaaagcaagtttccattttagaaagttccttacacaaagttaagggagtgttagaggaatttgatttaatcagaactgagcatagtcttcactattcacctacgtctagacaaaatgtatcaaaaatacttcctcgtgttgataagagaaacccagagcactgtgtaaactcagaaatggaaaaaacctgcagtaaagaatttaaattatcaaataacttaaatgttgaaggtggttcttcagaaaataatcactctattaaagtttctccatatctctctcaatttcaacaagacaaacaacagttggtattaggaaccaaagtgtcacttgttgagaacattcatgttttgggaaaagaacaggcttcacctaaaaacgtaaaaatggaaattggtaaaactgaaactttttctgatgttcctgtgaaaacaaatatagaagtttgttctacttactccaaagattcagaaaactactttgaaacagaagcagtagaaattgctaaagcttttatggaagatgatgaactgacagattctaaactgccaagtcatgccacacattctctttttacatgtcccgaaaatgaggaaatggttttgtcaaattcaagaattggaaaaagaagaggagagccccttatcttagtgg

SEQ ID NO: 50535 - DNA, 97 bp, Homo sapiens
  chr13:32918693-32918790
  hyper
ggagaaccctcaatcaaaagaaacttattaaatgaatttgacaggataatagaaaatcaagaaaaatccttaaaggcttcaaaaagcactccagatg

SEQ ID NO: 50536 - DNA, 71 bp, Homo sapiens
  chr13:32920962-32921033
  hyper
ggcacaataaaagatcgaagattgtttatgcatcatgtttctttagagccgattacctgtgtaccctttcg

SEQ ID NO: 50537 - DNA, 429 bp, Homo sapiens
  chr13:32928996-32929425
  hyper
gcacaactaaggaacgtcaagagatacagaatccaaattttaccgcacctggtcaagaatttctgtctaaatctcatttgtatgaacatctgactttggaaaaatcttcaagcaatttagcagtttcaggacatccattttatcaagtttctgctacaagaaatgaaaaaatgagacacttgattactacaggcagaccaaccaaagtctttgttccaccttttaaaactaaatcacattttcacagagttgaacagtgtgttaggaatattaacttggaggaaaacagacaaaagcaaaacattgatggacatggctctgatgatagtaaaaataagattaatgacaatgagattcatcagtttaacaaaaacaactccaatcaagcagtagctgtaactttcacaaagtgtgaagaagaacctttag

SEQ ID NO: 50538 - DNA, 183 bp, Homo sapiens
  chr13:32930563-32930746
  hyper
gatttaattacaagtcttcagaatgccagagatatacaggatatgcgaattaagaagaaacaaaggcaacgcgtctttccacagccaggcagtctgtatcttgcaaaaacatccactctgcctcgaatctctctgaaagcagcagtaggaggccaagttccctctgcgtgttctcataaacag

SEQ ID NO: 50539 - DNA, 189 bp, Homo sapiens
  chr13:32931877-32932066
  hyper
gctgtatacgtatggcgtttctaaacattgcataaaaattaacagcaaaaatgcagagtcttttcagtttcacactgaagattattttggtaaggaaagtttatggactggaaaaggaatacagttggctgatggtggatggctcataccctccaatgatggaaaggctggaaaagaagaattttatag

SEQ ID NO: 50540 - DNA, 172 bp, Homo sapiens
  chr13:32936658-32936830
  hyper
gggctctgtgtgacactccaggtgtggatccaaagcttatttctagaatttgggtttataatcactatagatggatcatatggaaactggcagctatggaatgtgcctttcctaaggaatttgctaatagatgcctaagcccagaaagggtgcttcttcaactaaaatacag

SEQ ID NO: 50541 - DNA, 356 bp, Homo sapiens
  chr13:32937314-32937670
  hyper
gatatgatacggaaattgatagaagcagaagatcggctataaaaaagataatggaaagggatgacacagctgcaaaaacacttgttctctgtgtttctgacataatttcattgagcgcaaatatatctgaaacttctagcaataaaactagtagtgcagatacccaaaaagtggccattattgaacttacagatgggtggtatgctgttaaggcccagttagatcctcccctcttagctgtcttaaagaatggcagactgacagttggtcagaagattattcttcatggagcagaactggtgggctctcctgatgcctgtacacctcttgaagccccagaatctcttatgttaaag

SEQ ID NO: 50542 - DNA, 157 bp, Homo sapiens
  chr13:32944537-32944694
  hyper
gatttctgctaacagtactcggcctgctcgctggtataccaaacttggattctttcctgaccctagaccttttcctctgcccttatcatcgcttttcagtgatggaggaaatgttggttgtgttgatgtaattattcaaagagcataccctatacag

SEQ ID NO: 50543 - DNA, 146 bp, Homo sapiens
  chr13:32945091-32945237
  hyper
gtggatggagaagacatcatctggattatacatatttcgcaatgaaagagaggaagaaaaggaagcagcaaaatatgtggaggcccaacaaaagagactagaagccttattcactaaaattcaggaggaatttgaagaacatgaag

SEQ ID NO: 50544 - DNA, 123 bp, Homo sapiens
  chr13:32950805-32950928
  hyper
gaaaacacaacaaaaccatatttaccatcacgtgcactaacaagacagcaagttcgtgctttgcaagatggtgcagagctttatgaagcagtgaagaatgcagcagacccagcttaccttgag

SEQ ID NO: 50545 - DNA, 200 bp, Homo sapiens
  chr13:32953452-32953652
  hyper
gggttatttcagtgaagagcagttaagagccttgaataatcacaggcaaatgttgaatgataagaaacaagctcagatccagttggaaattaggaaggccatggaatctgctgaacaaaaggaacaaggtttatcaagggatgtcacaaccgtgtggaagttgcgtattgtaagctattcaaaaaaagaaaaagattcag

SEQ ID NO: 50546 - DNA, 397 bp, Homo sapiens
  chr13:32953885-32954282
  hyper
gttatactgagtatttggcgtccatcatcagatttatattctctgttaacagaaggaaagagatacagaatttatcatcttgcaacttcaaaatctaaaagtaaatctgaaagagctaacatacagttagcagcgacaaaaaaaactcagtatcaacaactaccggtacaaacctttcattgtaatttttcagttttgataagtgcttgttagtttatggaatctccatatgttgaatttttgttttgttttctgtaggtttcagatgaaattttatttcagatttaccagccacgggagccccttcacttcagcaaatttttagatccagactttcagccatcttgttctgaggtggacctaataggatttgtcgtttctgttgtgaaaaaaacag

SEQ ID NO: 50547 - DNA, 246 bp, Homo sapiens
  chr13:32968824-32969070
  hyper
ggacttgcccctttcgtctatttgtcagacgaatgttacaatttactggcaataaagttttggatagaccttaatgaggacattattaagcctcatatgttaattgctgcaagcaacctccagtggcgaccagaatccaaatcaggccttcttactttatttgctggagatttttctgtgttttctgctagtccaaaagagggccactttcaagagacattcaacaaaatgaaaaatactgttgag

SEQ ID NO: 50548 - DNA, 148 bp, Homo sapiens
  chr13:32971033-32971181
  hyper
gaatattgacatactttgcaatgaagcagaaaacaagcttatgcatatactgcatgcaaatgatcccaagtggtccaccccaactaaagactgtacttcagggccgtacactgctcaaatcattcctggtacaggaaacaagcttctg

SEQ ID NO: 50549 - DNA, 877 bp, Homo sapiens
  chr13:32972297-32973174
  hyper
gatgtcttctcctaattgtgagatatattatcaaagtcctttatcactttgtatggccaaaaggaagtctgtttccacacctgtctcagcccagatgacttcaaagtcttgtaaaggggagaaagagattgatgaccaaaagaactgcaaaaagagaagagccttggatttcttgagtagactgcctttacctccacctgttagtcccatttgtacatttgtttctccggctgcacagaaggcatttcagccaccaaggagttgtggcaccaaatacgaaacacccataaagaaaaaagaactgaattctcctcagatgactccatttaaaaaattcaatgaaatttctcttttggaaagtaattcaatagctgacgaagaacttgcattgataaatacccaagctcttttgtctggttcaacaggagaaaaacaatttatatctgtcagtgaatccactaggactgctcccaccagttcagaagattatctcagactgaaacgacgttgtactacatctctgatcaaagaacaggagagttcccaggccagtacggaagaatgtgagaaaaataagcaggacacaattacaactaaaaaatatatctaagcatttgcaaaggcgacaataaattattgacgcttaacctttccagtttataagactggaatataatttcaaaccacacattagtacttatgttgcacaatgagaaaagaaattagtttcaaatttacctcagcgtttgtgtatcgggcaaaaatcgttttgcccgattccgtattggtatacttttgcttcagttgcatatcttaaaactaaatgtaatttattaactaatcaagaaaaacatctttggctgagctcggtggctca

SEQ ID NO: 50550 - DNA, 516 bp, Homo sapiens
  chr13:32973293-32973809
  hyper
aaaagaaaatcttttaaatctttggatttgatcactacaagtattattttacaagtgaaataaacataccattttcttttagattgtgtcattaaatggaatgaggtctcttagtacagttattttgatgcagataattccttttagtttagctactattttaggggattttttttagaggtaactcactatgaaatagttctccttaatgcaaatatgttggttctgctatagttccatcctgttcaaaagtcaggatgaatatgaagagtggtgtttccttttgagcaattcttcatccttaagtcagcatgattataagaaaaatagaaccctcagtgtaactctaattcctttttactattccagtgtgatctctgaaattaaattacttcaactaaaaattcaaatactttaaatcagaagatttcatagttaatttattttttttttcaacaaaatggtcatccaaactcaaacttgagaaaatatcttgctttcaaattggcactgatt

SEQ ID NO: 50551 - DNA, 384 bp, Homo sapiens
  chr13:33000976-33001360
  hyper
aaagtaagcacagtcacgtaggtataaacaggaagccaaggagcccagaagaggggcatatactggcggggtgggatagctgcccggtcttaaaaggcaaaagaaggcgggagggcaagccaggcaggaaggccagcgtcaaggagagaagcggcttggtttacaggagataaaaacagttcgaagttgctggaacatcaagcgcaaggcagggagcggtgggagttcaggctggagcggtggggcctagcaaggtggccacaggcacaagcccgcgtaattcccagaggttgggtaccggagggccgcttacgcaattcgcaagtgaacgaatttgggcgcccatggcgaggctctgtcagtgacggtcggtggtggcgccgc

SEQ ID NO: 50552 - DNA, 30 bp, Homo sapiens
  chr13:33001995-33002025
  hyper
ggtggccccgggcccgtgcaccggcgccca

SEQ ID NO: 50553 - DNA, 31 bp, Homo sapiens; identical to SEQ ID NO: 9291
  chr13:33162267-33162298
  hyper

SEQ ID NO: 50554 - DNA, 30 bp, Homo sapiens
  chr13:33590258-33590288
  hyper
agaatgaacctgagcgtccacgaaacgtcc

SEQ ID NO: 50555 - DNA, 382 bp, Homo sapiens; identical to SEQ ID NO: 9292
  chr13:33591066-33591448
  hyper

SEQ ID NO: 50556 - DNA, 530 bp, Homo sapiens
  chr13:33924390-33924920
  hyper
cgcccccgtgggtcgcggcgtctccggggcactgacctgccagccgcctctcccggacgttcttccacagcagatcccaggctctggccgtggagtcccgcaactgctcactgatggatctcctgagctgcgtttggcaaggtttccgtttgctggtcattttagatccgtcctcataacgaccggcgggctctccaccgccactcccgcgtggcccgcgactcagactcccggcgactggaaaggacggacgcggcactcccgccggggtcccgggacccaatgcgggcgcgacatgggtcggtccggcgctgggaggctgcgccacgcgcgaggaccgggatgcctggccaccagaaacgccgcgctaggttattaacctctgcgctcgccaactcctctactcctttcccactttccttctcctcccctcctcccctccgttgggcgctcctccactcccctccctcccctgccctccccctggctgcctcgcgccccactccttccaggagcgcgcttccccttcc

SEQ ID NO: 50557 - DNA, 733 bp, Homo sapiens
  chr13:35516270-35517003
  hyper
gctcacctgtctatccgttcggggtggttgggggagggacgaggggtgtcggggtgggtgggtgggaagagaaggagggcagggcaaaagagggggtgcaccgagggctccgcccccccggaggctgtgcgcaggcgcagtggctgctaccgcaggcagggggcggcaacatggcggagtgagcggcggcgtcggggcttcacaacaacagtggtggccgtagcagcggcggcagcagcgtcaatagcatcggccacagcctgagcttcagcaccggccagcgtcgtggccagctgctcgcgtcctcgggcttctcggagcggctgcagcatctccgcggggggcgggccgggccggacagaccgggagagggagagagcagaggcagcggcggcggcagcggcagcggcagcggcacacctgctgggcgggcacagccgcttgcccggcagcggttagcggtaccgccaccgccgagaataagcctgcggatcccccgccgcctccgcgggggagagcgccggagcgggccgggctgaggcgcaggcggggagcgggcccggcgccgcggcgctggtggatgctggggctccgaggcgacggccggggggcgggggccgaggcaggtataacggtaccggcggcggcagcgccgctgctcttcccttctcctcaggaggggggccaatggctagcgagaagccgggcccgggcccggggctcgagcctcagc

SEQ ID NO: 50558 - DNA, 320 bp, Homo sapiens
  chr13:35517052-35517372
  hyper
cggtggtggcggcaccgggggcagcgggatgggggagctaaggggggcgtccggctccggctcggtgatgctccccgcggggatgattaacccttcggtgccgatccgcaacatccggatgaaattcgcagtgttgattggactcatacaggtcggagaggtcagcaacagggacatcgtggagacggtgctcaacctggtaaggaaaaggcgtgctctcaatctgcttccccagtccccacatacaccgtccccagcgcctttccctcccacccttcacccccagggtcacacgcgccgcgcgtccctgggagcgcaga

SEQ ID NO: 50559 - DNA, 122 bp, Homo sapiens
  chr13:35517409-35517531
  hyper
cgcgctgctagagccacgccacctccctcctctcctctttctggtcctctcctgccacctgagcgcagtgcccaacttaacaccgcttcttctcactttttaggaccgcgagtaacccagta

SEQ ID NO: 50560 - DNA, 878 bp, Homo sapiens
  chr13:36704687-36705565
  hyper
aatttgaacatgaggcagcctcgctgtccctgaaggaacttgagaccctgcaaacgtacttgcaacacccacgctgcagccaccaccacgcacgaatcgaccccatccacaagcacacatcactggcccgggcacacggaaaagcacacacacaataagaggccgggcccggccactccttccttggttcccgctccgcagccagttctgacaatgacaagcacctctcccagctcctccgccctggctctccatctccactaacaacgcgaaaagcctgggagggcccgctcgcctgactccaggtttaaagccccatggcaccaaacaaaagaggcaggtgccagcagccccggggccgcccgcacgcaacgcccccgggtcgggccaggctggccagggcagggcggccgcctttcgaggaactgcgggcggggcggcggggccaagctgagcgcccgccctgccctcggcgccccgcggctgcgggcggagcgggctctgcggagtcccccggccgccctccccgcagctcccgtccccagggaaggcaaaccacgcaccggtccgcggagagacgccgccgggggtctttgtggccgcgctgggggccgcctcctggtgctgtcctcgccgggctgggcgcggccggggctgcggggctgcagggctggggggcggcggcggggccgggctgggcggcagcagctgctggagcgcggcgcctcggttgcggccactagtgcagggatgtgcctcggcccgtcctcattgaaatgcggcgcttcgcacagcctcactccagcctctctctccagaggagggcggcggcggcggcggcggcgggcgcgctcccttttcttgtctcactcgctcac

SEQ ID NO: 50561 - DNA, 106 bp, Homo sapiens
  chr13:36705621-36705727
  hyper
cgcccttcttggcagggcgcacccaccacggctgcgccccaggtcctcctccctcccagcgccctcttcccaccgcagcaacctcggtgcatctggcttgactaca

SEQ ID NO: 50562 - DNA, 98 bp, Homo sapiens
  chr13:36729246-36729344
  hyper
cggcggcgccttcccccggcgtccccaaatagaaacagcactagtgccctctctccgaccccaccagggccgctgccgggctcctccttactcagacc

SEQ ID NO: 50563 - DNA, 373 bp, Homo sapiens
  chr13:36919850-36920223
  hyper
gtattgtaaagagtaaaatcacgcgcaatccatcccaatataaccgcagttgttcgtgggccttcttgcagagaaaggctgcccaaccttgacggggccatgggcgctgcgggagggcaaaagaccacagagatctgcgaagccaaagtaaacaacggggttggggcggcgagaatgatcaatagcgatgctccgaaaggactccgcgataggaatcgagcgggaaggattccctccatcctaacagtccatgggttaagaggccgaagcttccctaaataccacactcccgcgagagaagggactgagaacaacttctcaaactattctctctcgaaatcgctcccttcctcgaaaattccatctctgagac

SEQ ID NO: 50564 - DNA, 120 bp, Homo sapiens; identical to SEQ ID NO: 9300
  chr13:36920266-36920386
  hyper

SEQ ID NO: 50565 - DNA, 560 bp, Homo sapiens; identical to SEQ ID NO: 9301
  chr13:36920464-36921024
  hyper

SEQ ID NO: 50566 - DNA, 34 bp, Homo sapiens; identical to SEQ ID NO: 9302
  chr13:37004838-37004872
  hyper

SEQ ID NO: 50567 - DNA, 150 bp, Homo sapiens; identical to SEQ ID NO: 9303
  chr13:37005430-37005580
  hyper

SEQ ID NO: 50568 - DNA, 163 bp, Homo sapiens; identical to SEQ ID NO: 9304
  chr13:37005899-37006062
  hyper

SEQ ID NO: 50569 - DNA, 224 bp, Homo sapiens; identical to SEQ ID NO: 9305
  chr13:37006433-37006657
  hyper

SEQ ID NO: 50570 - DNA, 64 bp, Homo sapiens
  chr13:37006733-37006797
  hyper
cgcagcaccctgctcgtcacttgggatggagaccggctttcccgcaatcatgtaccctggatct

SEQ ID NO: 50571 - DNA, 175 bp, Homo sapiens
  chr13:37247973-37248148
  hyper
attttccaatggtggcgcaagctcctccctcgcccgagctgggcgccgtcctagagccaagcgcccgctagagccgagactagggggcggtgaggagtgggacccgctcgcggccattggttgtgcggccaggaggggcggagggacgacgcgcgggctgtgcggggccggcagc

SEQ ID NO: 50572 - DNA, 699 bp, Homo sapiens
  chr13:37248294-37248993
  hyper
ggggaagtcgcgtgtcctgacctgcaggtcagtgagggaaacttgcagggtcccgagctctgggggtgaacttgccctacgcggagagcgccccactccttgcctggggcggcctcgggtcctggaggcgagccgcctcccagactctcccccgagatctgggctcccggagatgtggctcctttctgagaaacacccccaaatctatcccttttgaggtgtccttactgtcccgagaagcaatcgcagcccggctctccgagtcttggggtgactccacgggctgcaggaggagccgcgaggggccctgagtgcaatgtccttggccccgtgttgacctgcctcggtcccagacactgggaaccgggaaggtctaccctcgctctgcaaggtggattcctccatgcaagtgtagacagttctacactttgcagagtgtgtctaggtgccttctgtttgcttttgcctttgtggtgtgtggagggtcattcttgggtttgttttgctcctgtctgattttctagggtcatttgcgtcccttctcgggaacggggactcgccatgcgcacactgacagctggctttgcacctgctaaggcgctggagagtcttttcgcccgtcttagggtggccctaaatccggggaagttttatgtggcgctgaacacttgcgtttcccaggggcgttttccctagctc

SEQ ID NO: 50573 - DNA, 22 bp, Homo sapiens
  chr13:37249039-37249061
  hyper
cgggtctgatgagacactggaa

SEQ ID NO: 50574 - DNA, 30 bp, Homo sapiens
  chr13:37357329-37357359
  hyper
gaaggaaaagaaaatcgcaatagtatgaca

SEQ ID NO: 50575 - DNA, 299 bp, Homo sapiens
  chr13:37393237-37393536
  hyper
gccgcggccgcacatgcgcagtcagtcccgttggttgtgcgctcagccccgcccccagaggcgccgcgctccctgacagcccgcgggcgtacacacgctgacgcgcaggctgcggtcgcgcaggcgcagtcggggcgccttcccggtataggcgccttttaccccagcgtgtcctgagtctttggttcgcgaagtgccgttaggccaagcaggtgctaaaagcccggggtcgtggaccccggccaggtcttagcagcatggaggcgcagggtgtagcggagggcgcggggccgggcgcc

SEQ ID NO: 50576 - DNA, 30 bp, Homo sapiens
  chr13:37493532-37493562
  hyper
aaacaccccggctccgacacagtccaagcg

SEQ ID NO: 50577 - DNA, 120 bp, Homo sapiens
  chr13:37574642-37574762
  hyper
aaccctgttatctccgaactgttggtgttattctgagtcacagcaccagctcttttataaagagggagacccgctccttctttaacagcagattcgtcaaaatacgtccaaggcaaggaa

SEQ ID NO: 50578 - DNA, 55 bp, Homo sapiens
  chr13:38443376-38443431
  hyper
cattccccagcaccacggcgtggctgcagctcctttgtttaccatataagtcaca

SEQ ID NO: 50579 - DNA, 236 bp, Homo sapiens
  chr13:38443479-38443715
  hyper
cggaagactgaggagcacccccaaactcctgctcagcccgagtcaagcaccgaaagcttcacaggtttttttcctgagccttgaagagaaaccacatagccagaaccttttgaactcctaaccccgcagggatgtccgcctcccagaagagagccggcttcccaggcagcttaggaaacttaaccgagatcccagaaagaaggcgaggtgtagctccggtcgaacggagccccgag

SEQ ID NO: 50580 - DNA, 93 bp, Homo sapiens
  chr13:38443934-38444027
  hyper
cgaagccatgggaggcgggggaggggcggcccgggagggggaggtaaccgccaggggaggagaacctctcccacccccgcctgcacagatccc

SEQ ID NO: 50581 - DNA, 30 bp, Homo sapiens
  chr13:38923589-38923619
  hyper
tagaaactttagagcgcgtccgccccagcc

SEQ ID NO: 50582 - DNA, 30 bp, Homo sapiens
  chr13:38924123-38924153
  hyper
tcttttcctcaggtcgaaggtttcctttaa

SEQ ID NO: 50583 - DNA, 30 bp, Homo sapiens
  chr13:38924397-38924427
  hyper
gcttggccccgtcacgagggtgtgggtgtg

SEQ ID NO: 50584 - DNA, 30 bp, Homo sapiens
  chr13:39260618-39260648
  hyper
gcgtctgggcgcgccgaagggggctgggct

SEQ ID NO: 50585 - DNA, 695 bp, Homo sapiens
  chr13:39261087-39261782
  hyper
ttactacccaaccctcagctccgcacctcctcccccgaccaacgattggccacctgggaggactggagtaaggggtgcgagcggagggatttccctcaaagcccagggtccggggacctggaaagtagaagtggagggattcaattctccgcgcgattgaggcgctagcggcggagctggacggcctgggaaggcttcggctcctcggctgcggctccagcccggacggcgccgcgcaactttgccatccttctggcccagccccggctacaggaggaccccgcgggcaacgcgcggagttcctggcacttcccggcggtgtctcttgttgtctgcccggggaccgacttcgcatgctctcaggctgacctgtccaagcccgaacaccgggaccatgcactcagccgggactcccgggttatcctcgcgccggacaggcaactccaccagctttcaaccaggaccgccaccgccgccccggctgctgctgctgctgctgcttctcctgtcactggtaagccgcgtcccggcacagcccgctgccttcggcagggcgttgctgtcccctggtctcgcgggggctgcaggggtccctgctgaggaggccatagtgctggcgaaccgcggactccgggtgcctttcggccgtgaagtctggctggatcccctgcatgacctggtgttgcaggtgcagc

SEQ ID NO: 50586 - DNA, 101 bp, Homo sapiens
  chr13:39261928-39262029
  hyper
cgcgtccggctgcagctgcgctatgacgcgcccggaggggcagtagtgctaccactggtactggaggtggaggtggtcttcacccagctggaggttgtgac

SEQ ID NO: 50587 - DNA, 17 bp, Homo sapiens
  chr13:39262129-39262146
  hyper
cgcgtgggcatcctgtc

SEQ ID NO: 50588 - DNA, 102 bp, Homo sapiens
  chr13:39610512-39610614
  hyper
ggcaacaatttcttccgtttcagtcaagggtcgtaaaggtatgcagctgacgaaagaataattgcccggaaggccgaaggaaagcaccgtgtgttgatgtaa

SEQ ID NO: 50589 - DNA, 346 bp, Homo sapiens; identical to SEQ ID NO: 9310
  chr13:39610816-39611162
  hyper

SEQ ID NO: 50590 - DNA, 34 bp, Homo sapiens; identical to SEQ ID NO: 9311
  chr13:39612008-39612042
  hyper

SEQ ID NO: 50591 - DNA, 30 bp, Homo sapiens
  chr13:39612905-39612935
  hyper
ctgttgggaggcgtcgccacggtcgtggca

SEQ ID NO: 50592 - DNA, 678 bp, Homo sapiens
  chr13:40176661-40177339
  hyper
cccatctccaactgcggtgaggcgccctcgccaagacaagcccatatttagccccctgccattgcctcaccgagccactccacccatggagacacacaatgatccctccattctaaaagggggcaagaggcattttccagccggctctggacgaagggaggggataaggatgggaaggcagcaccccccggaggcagacgccaagagcggacgcggctggcaggcagagccgacggatccgccgagctcaggaagtccggagcccgggagcagcccaactccggctccggggcagagagggagcccgggagaaagcagcggagcccacgcccacggggcagccgagtgatttacttacatggctggcgggcggcggccaccttccctcccgcgtcccgggcgcacacacaacttgctgtctttctcgggcgggaacatccacgggaaaccggaccgtcctgcccttctttgcctctgtccctaacagccgcagaaccccggggcccgacctggaagagcaggggttggcaggaggcggagggtctccagaagcgggctggcaccagcggagacccccactcccggcgagtccgcggcggcagctctggcggagcgctgtgggcgcgcgcgggcgccggggatcgcacgcagaggagcggatctccctttggcaggcga

SEQ ID NO: 50593 - DNA, 30 bp, Homo sapiens
  chr13:40177738-40177768
  hyper
ccgttaaaagaagccgtagacgggaaagag

SEQ ID NO: 50594 - DNA, 254 bp, Homo sapiens
  chr13:40976491-40976745
  hyper
aaacacagttcttcacggtttgccagtagtcgagggaggaatctgaaagctgactgtttctcccacagcttcaggagcattaaaacttcaaaagaggaactatttatgctgtcattaccacagcggtcacttctgcaggatttctttctctgatgcagcactggttggacacacttggcccagggccgagaggggagaggagggcgttacagagacactgagtcatcctgcctcctccacgccctccgcagctg

SEQ ID NO: 50595 - DNA, 30 bp, Homo sapiens
  chr13:41241719-41241749
  hyper
tccagggccggcagcgaagggctcaggagc

SEQ ID NO: 50596 - DNA, 61 bp, Homo sapiens
  chr13:41345300-41345361
  hyper
caactgaaatggtgcgtcccgctgccaaacacgtccccgccctctcttccgcttccggcct

SEQ ID NO: 50597 - DNA, 197 bp, Homo sapiens
  chr13:41364042-41364239
  hyper
ttggctgcggggctccgcgcctcaggggcgccagtgctgggcagcatggagccgcttgtgaatggagacttgctggctgcccaggagtgggcggctgggcaggggcggtgaacgtttagggtccggccaagaaagttggaagtcgtctccctgacctgttccttgcgaggcccgggaggagacgcgcctggccggtc

SEQ ID NO: 50598 - DNA, 30 bp, Homo sapiens; identical to SEQ ID NO: 9314
  chr13:41635845-41635875
  hyper

SEQ ID NO: 50599 - DNA, 30 bp, Homo sapiens; identical to SEQ ID NO: 9315
  chr13:41706961-41706991
  hyper

SEQ ID NO: 50600 - DNA, 327 bp, Homo sapiens
  chr13:41767765-41768092
  hyper
gaattgaacccattcggctgagctgcttgaagttgtgagctatgtaggactgggcctgagatcgaagcttgtgatggtcgaaggcgtctgcaaacttgaggatggcggtgcagttggtcaggtcaagacgtcgggctaagaaggaggcacaggcttcccgcacatattccagctgtagcatgtcggaggccgcgtacaggcgctgcacattggcctcactgagagacacacgacccgtgtagcagtagtcgaccaacacctcgaaggactcggcgtccacatcgtgcatggtcacgctggcctgctggctctcgtacatgccacctg

SEQ ID NO: 50601 - DNA, 30 bp, Homo sapiens
  chr13:41768402-41768432
  hyper
ggcgacgggcgctgacggcgagaaaggctg

SEQ ID NO: 50602 - DNA, 30 bp, Homo sapiens
  chr13:41837783-41837813
  hyper
ggaggagttgtcctcgagcatgcctaacaa

SEQ ID NO: 50603 - DNA, 30 bp, Homo sapiens
  chr13:41885137-41885167
  hyper
ggagtcttatgaggcgttctgatgcatagg

SEQ ID NO: 50604 - DNA, 40 bp, Homo sapiens
  chr13:42031266-42031306
  hyper
ctgggacacggccgcgggctccttcgtccctcaccgccag

SEQ ID NO: 50605 - DNA, 524 bp, Homo sapiens
  chr13:42032236-42032760
  hyper
taatagaacgcacttcgggggtggtggagaagattacaaggtaacagcgactgcgtggctgtcacttggcagaggcgccaagtgtcagttatcttcgggaaccgtggcggcccctcctggccctgggaggtggtcccgctgcccccctgacttccgtgcactgagcccctggccctgcccgcagccccggccctggactcggcggccgcggaggacctgtcggacgcgctgtgcgagtttgacgcggtgctggccgacttcgcgtcgcccttccacgagcgccacttccactacgaggagcacctggagcgcatgaagcggcgcagcagcgccagtgtcagcgacagcagcggcttcagcgactcggagagtaagtgcggcccccgctaggatggcgccgggatctcccagctcccaggacctgccccgcgaaggctgcggcctcagttttcttatcagtaaactgaggaatggtttcctgaagctcaacgcagtaggccgagtggtggcggggcccctgacga

SEQ ID NO: 50606 - DNA, 84 bp, Homo sapiens
  chr13:42615144-42615228
  hyper
cgttcaggaaatggcccgggatgaggtccccagctgcttcccagccgggttagcgcttcctccgccgcccgggctcctcctcgc

SEQ ID NO: 50607 - DNA, 30 bp, Homo sapiens
  chr13:42615634-42615664
  hyper
ctgcacacgcaacgcggaggttgagtaatt

SEQ ID NO: 50608 - DNA, 57 bp, Homo sapiens; identical to SEQ ID NO: 9316
  chr13:42615948-42616005
  hyper

SEQ ID NO: 50609 - DNA, 739 bp, Homo sapiens
  chr13:42621977-42622716
  hyper
ttagacacttcttgtgcgttctgtcgtcttgggctgcgtgtagtctcttgtttctgcgctttctccacgcccttcccagtttcctgttagccgaaggggatcgctctttctgaacgaaaagttctcagagcggagctgaacctcccggaaaatgctcttctcttccgtgtgcgccggatgggggtgggggtgggccagaaactgaacgccgccgtcaggagagctgaggggacccgacggccctggcggaggcgggagaggtacggtcctcggagtggggctgggggtggggaaaccgacgaggggcagcccccgactgtcttggtggcagaggggacttttattcagctggaaccgcgcggcgaggcccaagtgtctctggagagattcggggttcaggaggtggcgggtgcacccaagggtgctgggaggaagctccaggttcccattcttccccagggatcggcgttgcccctgctgtccagaagtgagagggggtgtgcgggcatcgccactacggggtgggctgcagaggtttcctgcctcccccaccctcctgtccatcctagggacccagaccgtaagggagtggaagagatgttgctccaaaccctgtcaccccatcctctctacccgcgctggtcctatccgaggctgggtgcgcaggggtccgaggcgggcgggggtccgttacctctgcgtcccaccgtggccgccgctccggcgggaaccgagcgga

SEQ ID NO: 50610 - DNA, 30 bp, Homo sapiens
  chr13:42623466-42623496
  hyper
tgggaaaaagctgacgcgcagtcgcgagtt

SEQ ID NO: 50611 - DNA, 755 bp, Homo sapiens
  chr13:43148612-43149367
  hyper
ccaggttgtctgcagcgtcgccctgttcttctatttcagagcgcaggtgagtggccaccttcccaggggatcgcggctgagagcgcccatctccttcccccgcacttggaaactgagtctggcggcagggctgggccacccagagcttgcatattccggaagggaaagtgactccagaagggagagaggaagtgttgagtttggggacaacctggcgcagggctgtcgggcgcaccctgctctctctccgcccacgcaccccagcttctcggtgctctgggggcggactcccctggccggacgatgggtttgaatctcaccccgtcccttcgctgggaaacaacactggcctctcaccttttctggtagtgattgcatactttttctccctgtcatttctcacttgaagttaagaatcaacttctgttcacgtaggaaaaaagatgagcgccttcacttgggcatctacctttcccttcccgcccaccacccggcgggtttcggttcctgcgcctggctgctctgcaggtgtgctggggccacggtgctggagggctgcgcggagcgggaggtcgcggtgctcgtgcccaggtcgcccaatgggtgggcagaatgacacggcgcgaccagagaggcgcgggctcgggatgggggctctgcggctgtggcgctgtcctgtgggggtgaaggaagagggacagccccacgtgcctgctagggatgtgggcggaggaaggaagcgaggtgagtgtgat

SEQ ID NO: 50612 - DNA, 598 bp, Homo sapiens; identical to SEQ ID NO: 9320
  chr13:43566053-43566651
  hyper

SEQ ID NO: 50613 - DNA, 158 bp, Homo sapiens
  chr13:44359821-44359979
  hyper
gcttgcccacctgtcgaccccactttccccatgtgctcgccgcgggatgacaaccacaacactccagaaccaccccccttccgaaagagggcggggttacgccttcagccaatcaggacccgcgagccccgggtgtccaacctatggggtggctgtgg

SEQ ID NO: 50614 - DNA, 235 bp, Homo sapiens; identical to SEQ ID NO: 9322
  chr13:44360043-44360278
  hyper

SEQ ID NO: 50615 - DNA, 326 bp, Homo sapiens; identical to SEQ ID NO: 9323
  chr13:44360467-44360793
  hyper

SEQ ID NO: 50616 - DNA, 657 bp, Homo sapiens; identical to SEQ ID NO: 9324
  chr13:44360995-44361652
  hyper

SEQ ID NO: 50617 - DNA, 206 bp, Homo sapiens
  chr13:44453168-44453374
  hyper
gtgaggaaacccagcgtcctgaccacactgctgggtcagcgaggcgtccctcagagaccggaaacgcggacttcagctcgcttgggaaacggcttccattagcagaagggagactgcggtttagtcccgaggtcgctccagcagcccggcctcacgcgacccaccattcccgccgccccctcacggtgcccgccgttcccgccgcc

SEQ ID NO: 50618 - DNA, 30 bp, Homo sapiens
  chr13:44454164-44454194
  hyper
ccgacaggaagtcccgaatgggctgtgagc

SEQ ID NO: 50619 - DNA, 313 bp, Homo sapiens
  chr13:44544246-44544559
  hyper
ttggcttcaccatgacgtcattggccgcgctgcaggtgggcggacacggcgagcggctgacgcagtgtcgcgaggtggtgctcaccacatccaaggccatcccggtgcaggtggatggcgagccctgcaagcttgcagcctcacgcatccgcattgccctgcgcaaccaggccaccatggtgcagaaggccaagcggcggagcgccgcccccctgcacagcgaccagcagccggtgccagagcagttgcgcatccaggtgagacgcgtcagcatgcacgactatgaggccctgcactacgacaaggagcagct

SEQ ID NO: 50620 - DNA, 30 bp, Homo sapiens
  chr13:44716763-44716793
  hyper
actggtgaagaattcgtaaactgacagcag

SEQ ID NO: 50621 - DNA, 630 bp, Homo sapiens
  chr13:44947746-44948376
  hyper
cacaaacgccgtggtcgcccgaaccttcggccccgcagcattcggctacaggaccgcgacactgcagggccccggctctgcgcgctgcgctccggccgctcggcgcgggaggacgtgcggtcgcgcctgcctcggtggccgcgcggggtaggtggctgcggggaccggaaggatggcgaggaagtcggaaagggtttcctgagatgagagattacttccgtccgggctgcggcctctctctggagtcggctagccggggctcggggagcggggtgcgcagggctcggggccacgccttgccacctgcagcgcccgggtgggccgcgggggcctcggcgggacgcgctcggccctgtcgcaggagctaacgcagggggaatccttgcaggtgggagcatttcagagcgcacaagccatggtggccaaacagcggatccggatggctaacgagaagcacagcaaaaacatcacccagagggggaacgtagccaaaaccctggtaaggcggggtcggcgccggccaggcagagccctgcagcccggcggggtggggcggaaggtgggggcggggccgggcgggtagcggcgcagggtccggcctcccggctcccggcccgccccttctgcggg

SEQ ID NO: 50622 - DNA, 206 bp, Homo sapiens
  chr13:44991618-44991824
  hyper
tctgcacacactgggccggcccatttctgcagggctctcagcctgcatgggctactcattgctgtgcccgtgacaagcattcctgaccaactcctccctcatcaaagcccccttctgcctccagcatcacccgaatggggcctccacagagcccaggacatcagtccctcccctcatcctcacccgaagggcgtccctcagccaca

SEQ ID NO: 50623 - DNA, 297 bp, Homo sapiens
  chr13:45009498-45009795
  hyper
aaacctgggcagacgtcgcagccaatgggagcccgagttatttatagctccgaattaaaggttcagagtttgcctagcaacagtgggcagagaatcccgtgagaagagccacaggcgctgctccaataacaaagaacggccaaggcggaaataaaaaataggagaaatccaggcgcaggctaagaaaacaaaactttttctctgattcttcttcattgtgaaggagcccgcgccaccggggacccgtttgtgcaccgtctagaagacccttatccaggatcccgacttctggggccc

SEQ ID NO: 50624 - DNA, 30 bp, Homo sapiens
  chr13:45011239-45011269
  hyper
ctgggccattgcttcggcagaaaatgtgaa

SEQ ID NO: 50625 - DNA, 387 bp, Homo sapiens
  chr13:45149890-45150277
  hyper
tttttcatttgagttccgcctggcgcaagaggctgtgcctgcagctgagcctgcgaaaggaggttcaggctttgtggaggcggaggctgtggtcccgacgtagaagatgctgcagggggcggcggctgaagcagcgacggaggcggaaaatcctcggaagatgtggcattactaccgacgccggtacctgctgcattgagagcagaggcgctgccactaccgctgccccttcgagggaacattgccgggtgcgccatcttcctagcgctaatgtctgcagcggcggcggccgcggcggtggactcaggcggctggtgcattgtgttgggtaccgggggcgcggaggagacgagtgcaatttccttctgcaccgtaatctttgtattg

SEQ ID NO: 50626 - DNA, 104 bp, Homo sapiens; identical to SEQ ID NO: 9329
  chr13:45150766-45150870
  hyper

SEQ ID NO: 50627 - DNA, 30 bp, Homo sapiens
  chr13:45151422-45151452
  hyper
tcccccggctccaccgtatcccccagtctc

SEQ ID NO: 50628 - DNA, 30 bp, Homo sapiens
  chr13:45885584-45885614
  hyper
tcatcacgaaatgccgcctcttgtcatggt

SEQ ID NO: 50629 - DNA, 30 bp, Homo sapiens
  chr13:45885876-45885906
  hyper
cagcgtccggggagcgctcgctgtctttga

SEQ ID NO: 50630 - DNA, 30 bp, Homo sapiens; identical to SEQ ID NO: 9330
  chr13:45915195-45915225
  hyper

SEQ ID NO: 50631 - DNA, 30 bp, Homo sapiens
  chr13:45915702-45915732
  hyper
ttggccctgcgcctcgtccagcctaggttc

SEQ ID NO: 50632 - DNA, 27 bp, Homo sapiens
  chr13:45991118-45991145
  hyper
gttcgtacttttgaacgctttccaagt

SEQ ID NO: 50633 - DNA, 146 bp, Homo sapiens
  chr13:45991444-45991590
  hyper
cgtttctcttatttaattcttggtaagttctttcagttttacttcctgttccctttttagtcttaagtcttaaaactgtaattgcacagcctttaatgtgctctcatacatttattgttccttgctggaccgactgccctttcaat

SEQ ID NO: 50634 - DNA, 30 bp, Homo sapiens
  chr13:46039569-46039599
  hyper
ctgcagctggtgctcgccggaacccagtcc

SEQ ID NO: 50635 - DNA, 65 bp, Homo sapiens
  chr13:46189868-46189933
  hyper
tttgtggcagctctcggttaccatgggaaccgcactccgcagcctccctgggccccatctaatct

SEQ ID NO: 50636 - DNA, 190 bp, Homo sapiens
  chr13:46425364-46425554
  hyper
caggttgacagcgtcggggaaagacatcagaccatcaatccagcttttcctgccagctggggaaacaacactcggtcactaacagcacccaatcacctagagagcgagagtgagccgaggcaaacacgccgggttccagacaccgtcccagcccccgagacccgggtttgcaaagggctgcacacgttcg

SEQ ID NO: 50637 - DNA, 46 bp, Homo sapiens
  chr13:46425575-46425621
  hyper
cgagaaaggacttgaacctgagcccggtgaaggtaaaatgacacag

SEQ ID NO: 50638 - DNA, 30 bp, Homo sapiens
  chr13:46626470-46626500
  hyper
gggcctccgcattacgggtccgctcaatgc

SEQ ID NO: 50639 - DNA, 487 bp, Homo sapiens
  chr13:46626731-46627218
  hyper
accaacccgcccgccgcctctccagggtcaagcgaaactgggtcgcaggaagaaaaataacgaagagattgtagattaagaaaaggcaacaaaaacactaccaggccgctaggaggaccgcctcaaaatgccgccggaagtcagaggtttgccctgttcctctgtagacccaggcagcttccggccgtcagattagtcgtcagtgcgcagacaccacccttcgtggacacgccctctaggcgtaaggttccatgcgagcggtaagagtgcggcgggacttggaaatcgaatctgtgctctgtgagagatcctaggaaaggaaactgggagcccgggagaactaaaattcccaattaaaagtgaatttaagtgagttttctctttttattacataattccttaccataaacagctgttgtaaatgcgcaaaatgcggcatttgttgacagtacctagagccactcattcattcgttcaacagtgttta

SEQ ID NO: 50640 - DNA, 30 bp, Homo sapiens; identical to SEQ ID NO: 9336
  chr13:46785408-46785438
  hyper

SEQ ID NO: 50641 - DNA, 559 bp, Homo sapiens
  chr13:46785660-46786219
  hyper
agaaaaccgaatgcccgcttttcgagagcactgcaaaattagccccgggacccggctgcacaaaagtgcagccttaaagaatgccagcccatattctagacacccaagtaaagcatcctgtaatcgagagaaaataataaataatagtggtcattgccattaagcataaaaatagtaataacaattgtcaccacggcgttccgtacagcagctgcgcgtggagccggcttctcctccggcccccacggcccgcagcttcccctgcagccccacagtgcgtcggaggaaggcgagggctccgcgcgcgctgcaccgtgggctgggcctgcccctcccggcgcccgcctcgcctcgcctgtcccgcgcccgcctcgcctgtcccgcccccgcgcctgcgcgtcaagtggctgggctggcttagcggaccccggttgctagggtgtgtctccttggcctcctagagggtggggatccgtggtgcttcttcgggaacagcctcctgcaggaagaccctcgctggacctttacctcgctgcctagattccgaggaaaaggagat

SEQ ID NO: 50642 - DNA, 753 bp, Homo sapiens; identical to SEQ ID NO: 9338
  chr13:46960937-46961690
  hyper

SEQ ID NO: 50643 - DNA, 30 bp, Homo sapiens
  chr13:47128872-47128902
  hyper
cggccatccggttccgctccctgggggagg

SEQ ID NO: 50644 - DNA, 30 bp, Homo sapiens
  chr13:47371400-47371430
  hyper
ctccatggccccgccgcctttgcacattgc

SEQ ID NO: 50645 - DNA, 30 bp, Homo sapiens
  chr13:48612252-48612282
  hyper
ggtctttccggctgcgcccctgctgggtgg

SEQ ID NO: 50646 - DNA, 30 bp, Homo sapiens
  chr13:48808172-48808202
  hyper
acctggagaggggacgaagggacagtccgc

SEQ ID NO: 50647 - DNA, 219 bp, Homo sapiens
  chr13:48877515-48877734
  hyper
gagagtggcgctcccgccgagggtgcactagccagatattccctgcggggcccgagagtcttccctatcagaccccgggatagggatgaggcccacagtcacccaccagactctttgtatagccccgttaagtgcaccccggcctggagggggtggttctgggtagaagcacgtccgggccgcgccggatgcctcctggaaggcgcctggacccacgcc

SEQ ID NO: 50648 - DNA, 30 bp, Homo sapiens
  chr13:48878451-48878481
  hyper
cctcttgtgaggctcggaggcagagggtcg

SEQ ID NO: 50649 - DNA, 575 bp, Homo sapiens
  chr13:49794350-49794925
  hyper
gcgctccgccgtctgacctgccgcgcccgcagcgtgcgggctgggaaaggaggcgctcaccgagagggaccacgcgccaggctcccagcccgacccgggacgcggcggccgcgcggagcacccatgggcagcccctggaacggcagcgacggccccgagggggcgcgggagccgccgtggcccgcgctgccgccttgcgacgagcgccgctgctcgccctttcccctgggggcgctggtgccggtgaccgctgtgtgcctgtgcctgttcgtcgtcggggtgagcggcaacgtggtgaccgtgatgctgatcgggcgctaccgggacatgcggaccaccaccaacttgtacctgggcagcatggccgtgtccgacctactcatcctgctcgggctgccgttcgacctgtaccgcctctggcgctcgcggccctgggtgttcgggccgctgctctgccgcctgtccctctacgtgggcgagggctgcacctacgccacgctgctgcacatgaccgcgctcagcgtcgagcgctacctggccatctgccgcccgctccgcgcccgcgtcttggtcac

SEQ ID NO: 50650 - DNA, 30 bp, Homo sapiens; identical to SEQ ID NO: 9339
  chr13:49821935-49821965
  hyper

SEQ ID NO: 50651 - DNA, 30 bp, Homo sapiens
  chr13:50018122-50018152
  hyper
ggaggaaacagctgcgccaccactccagtg

SEQ ID NO: 50652 - DNA, 30 bp, Homo sapiens
  chr13:50069494-50069524
  hyper
ccaccgcgcccacccggccagtatgatagt

SEQ ID NO: 50653 - DNA, 301 bp, Homo sapiens; identical to SEQ ID NO: 9340
  chr13:50070356-50070657
  hyper

SEQ ID NO: 50654 - DNA, 96 bp, Homo sapiens
  chr13:50070684-50070780
  hyper
cgtctccccttctccagtcgttccagtcctccccggccctctacttgagtgggtgggtcttctgatgggttcctgcccttgcgtgtgtgtatagct

SEQ ID NO: 50655 - DNA, 160 bp, Homo sapiens; identical to SEQ ID NO: 9342
  chr13:50265730-50265890
  hyper

SEQ ID NO: 50656 - DNA, 30 bp, Homo sapiens; identical to SEQ ID NO: 9343
  chr13:50367045-50367075
  hyper

SEQ ID NO: 50657 - DNA, 30 bp, Homo sapiens
  chr13:50510689-50510719
  hyper
acggcgtgcgcctgcgcaccagctggtttt

SEQ ID NO: 50658 - DNA, 210 bp, Homo sapiens; identical to SEQ ID NO: 9344
  chr13:50570751-50570961
  hyper

SEQ ID NO: 50659 - DNA, 501 bp, Homo sapiens; identical to SEQ ID NO: 9345
  chr13:50571241-50571742
  hyper

SEQ ID NO: 50660 - DNA, 30 bp, Homo sapiens
  chr13:50699329-50699359
  hyper
ttgctgcagcgcctcgttctatttttcctc

SEQ ID NO: 50661 - DNA, 30 bp, Homo sapiens
  chr13:50699701-50699731
  hyper
ctatttatagattgcgtcaacattgcgaaa

SEQ ID NO: 50662 - DNA, 915 bp, Homo sapiens
  chr13:50704231-50705146
  hyper
aatgttgccagtgttcggtcccgactcaggggagaaacggggtgggggtgtggggatcccggaaagggccggaaaagccgggagcaccgggaggtgtgaggccagagtttctgctactgggggctcttccagggaagacgctggcgggaataggatggggctggcagctggggagcctcgcggtggctattgcacgtctcggcccccctggacagggttatgtcaggagagcgccctggcaccgagctctggccgctggataagatactccctcgccggctccctccgtgagcggggctgggcgggtgcggaggggcgggcggtgcgcctcgccgagcccggggcgctgaggtcggcaagtcgtcttcggaactggcggcggcgcttctccagtcgacgtggaaaaaaaaatcgtctcaaatagcacccctcggtctgcagccctttaacactggtaaagtagataacaaggaactctgctgaacgagggaaactcagtttagaacgtcccagagtttccaagtttgtcaagcgactgggaatcttggtcgccgcgtggagagctgcgcccatttccccttccagaagaaaactgaaggcgtattcctccaaaggaaggctgcagtcaggcgccacacagaacacaggcagtcctctccggccgatctcgggctcgcctctcccagggccgtagggagcatcttttctgagcagccccgggagggcagctccgggcgctctccgcgctgggccctgccgcggccggtgcgttacatcaggaaacgcttggtccggttttctgtctgctagtcaaaacaattggctgaatctcgaaataacttttttgatagtccggaaaagaaacatgacaaatagactcaccatcaggcttgcgtcagagaaccattttcccca

SEQ ID NO: 50663 - DNA, 30 bp, Homo sapiens
  chr13:50705368-50705398
  hyper
gtgtgtgtgtatcccgctagtctagcccag

SEQ ID NO: 50664 - DNA, 83 bp, Homo sapiens
  chr13:51086819-51086902
  hyper
tctctgcaatttggccgctcctggacttgttgcagccaggcttcaaagagaaaccaccgcttcctccccgagccccacgccag

SEQ ID NO: 50665 - DNA, 30 bp, Homo sapiens; identical to SEQ ID NO: 9347
  chr13:51483842-51483872
  hyper

SEQ ID NO: 50666 - DNA, 13 bp, Homo sapiens
  chr13:52027210-52027223
  hyper
ggctgcggaggct

SEQ ID NO: 50667 - DNA, 78 bp, Homo sapiens
  chr13:52027258-52027336
  hyper
cgcctcgccgttctactggtcaggccctatcctttcattagcatatttaaacagctcaggggcgggggaagcttgtag

SEQ ID NO: 50668 - DNA, 122 bp, Homo sapiens
  chr13:52028194-52028316
  hyper
acctcgtgagaaagcggaaaaactgacttcagcttgcccagatggcgcagagaatgggtttcccgtaaccccgcctgtgtctttccttcagcctcgtcccaaatgccgtgggagggaaggca

SEQ ID NO: 50669 - DNA, 30 bp, Homo sapiens
  chr13:52158691-52158721
  hyper
tcgccggtttccggcgttccgctccggcca

SEQ ID NO: 50670 - DNA, 261 bp, Homo sapiens
  chr13:52585299-52585560
  hyper
agctggggtctggctcggccttccctgcgcaccccctgggggcgagtaagcgccgaacgcggggaggaaaatcctcctggtgggagtgagcacgctgcgcggacgcgggggaacaaaactcactttccgactggccccttctctggctgtgatctgtctctcctgctcaggcatcgtcccgcacggacaccgaattcttctctgatctggctcagagcaaaaggtcacctggtcggtggaggagagcggggtgttaaagtc

SEQ ID NO: 50671 - DNA, 30 bp, Homo sapiens
  chr13:52586274-52586304
  hyper
gagggagggagcgacggctgtcaatcacag

SEQ ID NO: 50672 - DNA, 30 bp, Homo sapiens
  chr13:52702429-52702459
  hyper
gcgcttcactggccacgctgctcctggtcc

SEQ ID NO: 50673 - DNA, 351 bp, Homo sapiens
  chr13:52702766-52703117
  hyper
cagacaccggaggatcgggttctgagagagacgcatacggacttggggccgggggtgactcgccgggaactgagggcccgcgaccctcccgcccaagtggcaccaaagggtggaagcccccaaattaggaaaattccttctcccctagggccgcccctggaagcggccgcgggtgagtggcaagacgcttacccgtacccgacctccgcgtgtggagcgttgccatagagaccgacgcgccctggacgctacacccacacagcccaggacgctaggccttttctgggccgcccccgccgccccaggccgaaactccatccctttcccccaccctgccgagctcccgaagcc

SEQ ID NO: 50674 - DNA, 30 bp, Homo sapiens
  chr13:52703402-52703432
  hyper
gcagtctacagtagcgctccccgctcttgc

SEQ ID NO: 50675 - DNA, 650 bp, Homo sapiens
  chr13:52733270-52733920
  hyper
gttctggtttggccagccctgcgcttattaacttctttttttgctgcaacagcggttctcactggttctttccgggcagcgagcgagaagaatccgttgagccggggccggcgcccgcggggcaactgcaccgcgggggagcccagtcgccccgctcacccgtgagggccctttctcctggaaaagccgctccgccctgctgacccccacggcaccgcgcgcccagaccccaaggcggcgagggacttgcgggtttgcggcgagtggtccagaccgcggggcggaagtgaggggcgcggccgcgcgtccggggcgcgtctacccctcgctcccactcggctccgcgccgcgaccacgcgccgccctcctcgttctagaggcagcccgccagggcggggaccactcacccgcttccccggcgaccctagtccactccttggcctggcaaccggcggcttccgcggggcgggcccggcgggtcgtctctcgggttgcgggtgaaggaagccgcctgggtctggcgggaggcactgttcttggagtagccgggcctacgaagagcacgttttaaagctgttgttccacgttgcggtggaacagtgctgttaacattgagggaaattgtccccgactaactgagttctgtctgc

SEQ ID NO: 50676 - DNA, 13 bp, Homo sapiens
  chr13:52980501-52980514
  hyper
gcggccccggcag

SEQ ID NO: 50677 - DNA, 42 bp, Homo sapiens
  chr13:53024907-53024949
  hyper
ggagcgccccctggcggtccattagccgccggcctttcagaa

SEQ ID NO: 50678 - DNA, 83 bp, Homo sapiens
  chr13:53029370-53029453
  hyper
tagtcctgctatgtcgtggggactgagcaggccgactcctcccccatcgcacgtccaggatgaagagcgctgtttaggtttga

SEQ ID NO: 50679 - DNA, 48 bp, Homo sapiens
  chr13:53174356-53174404
  hyper
taggcactgggggaaggaggccgatgaccctgagattctccagcgacc

SEQ ID NO: 50680 - DNA, 30 bp, Homo sapiens
  chr13:53226381-53226411
  hyper
acggccgccgggcgcgtcgccccaggaacc

SEQ ID NO: 50681 - DNA, 123 bp, Homo sapiens
  chr13:53226635-53226758
  hyper
aacagacatacaaacgcccctaaccgccacacgttccttagggatgacagtacgttacaaaagtgcttctaaagtactactgaaagctccgtgggagtgcccgctggcgtgggcgcggtggaa

SEQ ID NO: 50682 - DNA, 341 bp, Homo sapiens; identical to SEQ ID NO: 9353
  chr13:53312972-53313313
  hyper

SEQ ID NO: 50683 - DNA, 100 bp, Homo sapiens; identical to SEQ ID NO: 9354
  chr13:53313512-53313612
  hyper

SEQ ID NO: 50684 - DNA, 272 bp, Homo sapiens
  chr13:53313677-53313949
  hyper
cggtggcacgcacccctgagtccgaactgtggaacctgatactcacacaacccaggccctgcgtgtggaatccctggcggtactcaccggggggctgcagaattccacgtcatcaggtcccaccagggcaatgggaactttgtcggagttctctgtcatgtttgcggcgggaggagtgaggcacttggagactccctgggcaccctgggatctgtcccgctgccccgacgtgcagggcatttcaacgccgcgcgcacacacggtgcacggtc

SEQ ID NO: 50685 - DNA, 144 bp, Homo sapiens; identical to SEQ ID NO: 9356
  chr13:53419876-53420020
  hyper

SEQ ID NO: 50686 - DNA, 122 bp, Homo sapiens
  chr13:53420877-53420999
  hyper
cgcagcgcgtagatggctccggtagctgggtccaccgagacataagtggacacggcgcccccggcgcggcccacctcggcctccagcagccggtaggtgacctggccgttgcggcccaggtc

SEQ ID NO: 50687 - DNA, 744 bp, Homo sapiens
  chr13:53422533-53423277
  hyper
aaaaggcaggggctgccccaacgcctcacaggactcatgcctccagcctcaagtgcgatccgaaaggctaaggaagtcttctctggtttccaggtcgggcgtcagtctcaggctctcggaatcacgctctttgcgagccctgtgcgggagaagtctgcgggtagcagctccgagcctccagcgggctctgaggacgcgcggacccgccctcactctgcgcctctccgtctcttacagaagctgcgccgcctcgcgccgcctttgcctttatagccgccgatatgctaatcacccgagccgggtagccaatggccgcctccccctcgcgtcgcccctccgcctgcctctgacaatccctttaatgtggaaaggcttagaggggaaaacaagaaaggaaaattagggaatctttcttttgtttaactccttttgctttttcccccttttcttgtcagcaccctgcatgtagaggagttggcacagggctccaggagtaaaaggagcggatggttttgttaattgtcgcctgcctccctccgtgccgcggctagaactaagtgcgaacacgctggggtttcaccccagtggctcctgattccgccttcccccagcccctgccaacacacacactctgcattttgcacctctgacgcttccaaacccttgcagccccctacccacagacttgctctgctgaatgaggctctgctttccttctctcctagctacggtgcctggaatagc

SEQ ID NO: 50688 - DNA, 217 bp, Homo sapiens
  chr13:53423925-53424142
  hyper
gaacaaaatcacagcgtgacgttgaaacctggcaggaacgtggggggaacttaaccatctgcttaggaaagtgtggagcttcggcactgccaaaatctgggctgggcggatcctggggctggccgggcgctgcgctgccccacagatagccccctcccatccctgacggccagggagatggagctcggatctgcaacaagacggattcttaatgatt

SEQ ID NO: 50689 - DNA, 1391 bp, Homo sapiens
  chr13:53424662-53426053
  hyper
tacaggagcccaaatcgcagccctttcttccgctgtcttccatctcccaagtgcgatttagtatgtagccctcccaccgtccccgcccaagagatattccttggggggtacacgcagtcgaaggaactttctattttccttccgagccccgcaacactcccaccccaacctggggctggctggtgacctttagcgcccctaggctaacgtcatctctcctcacccctcttcccccggagacccagacgggaacaggttcagaacttggctggtggacagcggcctcagcgcttccgctggcgtacccagggcaaggtcaggcccgcctggcgctgctgctgccgggcggaggacccggaaggtggggaaagtgggtggaaatggggccggagtcccaaaggaagggatttcagcggtttccgcgagcacagcccggccgcgaatggctgggacccggacctcgcgccagcgccccctgcgcatctgcaccccgcagttctgggctggactcgggagccccgccacgcgctaagtttgggtttttcgcttggccagagattcggaactacttgcaatttctactcaaagtgcttccgcgtcagcatgctcattctcaaggctgaaataaaccaaggcgtgcttgaaagtgggaaaaggaaaggggagtaggggcaggcaaaagccaggaggcgggaggaggggtgtagggtggctggtagcaggtctaaagtgttttttccgcggccaggccctcgtcgatcggaagtagccacgacggcggcggcgccgggaggctgagagctgggagccggggagcccgggaagggagccgcgagcctccagccgccaccggcgcgcacaggtctttccgtgccggcggtggaggtgtgaaggcacgcgaacaccgtgagctccgggccggcagcggacagccactcgattatggaaatacgatttaaaatagcacatcaacgtccgcagcaactccccgggaaggaaaatatgtccggggaggtggcgctggagaggagtaggggaaagggaggggagctcgcccgcccgggtgctgatcaggcctcacaaaagccgctcgaatcgccttgttatcataccaaaaggtctgggcaggcccaaaggagcccctttctctcggttttagcaacttcgccggcaactgtctcgcaatcttgagaacaaacacagctccacaatggccggcgttttctcggaatgcaaatgttgcgggctccgcaaagctgggtttctgttaccgagcctaatgccggcattgtgaaactcgcgtgcaaacaccaagattgacatgggcgtcacgtgatggattagggctccaggaaagttttcaaagaggcgacaatggggggctcagactg

SEQ ID NO: 50690 - DNA, 887 bp, Homo sapiens; identical to SEQ ID NO: 9361
  chr13:58203565-58204452
  hyper

SEQ ID NO: 50691 - DNA, 116 bp, Homo sapiens
  chr13:58204883-58204999
  hyper
tatagactgagtcagagaaagcgttaggaagaagccgcaactaatgtctgtgaagggaggaccatgaggcgagagtgaatacgattcgttccgctgcttctgactcatccggcaga

SEQ ID NO: 50692 - DNA, 191 bp, Homo sapiens
  chr13:58205044-58205235
  hyper
cgcctccagaacccgaaataatgtgtagacagacctgtgtctaacatcccctcggagggagctccccggggtaggagcccctggctggaccgccgcggccgcagctctgcaccccctgccctccctgagtcgcccagaaaaactgaaagagagactgcagaatgcatcacgccaaaccttgatgtgttgct

SEQ ID NO: 50693 - DNA, 789 bp, Homo sapiens
  chr13:58205442-58206231
  hyper
ctgtttcccttctagcgagagacagggagagtgtgtgtgcaaggactgggagggaggctcccccttcctttttattcggcctcccccctcctcctttaaatgtgcacgtccaaccatgagttgcctgttgatttcccttcgcctgggaagaaaagcaaactggaattaaactgcttggagagaagtccttgctcgcggggagaggatgggatggtagcggaggctactggcttggcgtagagaaatcagagagtgtgttctacgaacagaggcgaagatttatctctctacttcccccctcccaatagactcacacagcaaatgctgatcaggctgtggctttcttgatttcgggggagagccttttccgaggaagagagggaggagcctggtggggagaggaaactacaaatcgggacactagttctttacgctgcatttcctcccctccctttggctgctcggaaaggagagagaggaaaaaaaaaatacgcttggctggtagatgcagtccgccgccgccgctgcctcagccagcaatgcaagattagatctctaaatgcagcaaaacactgcctgaaaacagaccggcccgcgcagcaagcagacatttcacggtgcgctggggaagcttcaaaatatatctgtgactctgtcttcgttgctcttcatccccatcaatttcatcacgggaggcgagcagcaagtaagaatttcactttcggatctgcctagagacacacctccctgctccctcccccactcgatgtgaagagtattccggagtct

SEQ ID NO: 50694 - DNA, 96 bp, Homo sapiens
  chr13:58206452-58206548
  hyper
cgcagcttctcacccagtgcggatgctgtagatcaacaggttcagggaacttgagcagaataaggagagaccaccgggtgccgcagctcgggtgca

SEQ ID NO: 50695 - DNA, 30 bp, Homo sapiens
  chr13:58207733-58207763
  hyper
ggtttcgtctccgtgcgccagggggcgctg

SEQ ID NO: 50696 - DNA, 30 bp, Homo sapiens
  chr13:58207990-58208020
  hyper
gtacaacgtgaccatcgtggcgcgggacgg

SEQ ID NO: 50697 - DNA, 30 bp, Homo sapiens
  chr13:60737568-60737598
  hyper
caactagacccggtcgttgtcaatctatga

SEQ ID NO: 50698 - DNA, 30 bp, Homo sapiens
  chr13:60738475-60738505
  hyper
aacgacggggcccacgacgctccaaaagga

SEQ ID NO: 50699 - DNA, 30 bp, Homo sapiens; identical to SEQ ID NO: 9366
  chr13:60970461-60970491
  hyper

SEQ ID NO: 50700 - DNA, 30 bp, Homo sapiens
  chr13:60971329-60971359
  hyper
cccgcacgcggaagcgccggccgcactgag

SEQ ID NO: 50701 - DNA, 214 bp, Homo sapiens
  chr13:60972271-60972485
  hyper
gaattgcggccattacggttgtaatcatcccgtttaattcagtaacgcttttcccaggcttgcacaggcacattctgggatgaagggtaggaacggggatgaaaaagatttgcaacggctctctgcaattactgctttaggagaaagagtgaggcattaaaagaccaaacaaaaccagggggaatagtgataaaccgtacgtacagaggaacag

SEQ ID NO: 50702 - DNA, 170 bp, Homo sapiens
  chr13:61989022-61989192
  hyper
ctccctttccctcccggcgccatccttcccgtgaagtttagataaaggtagaaggtttgaaaaaccatccgagtgggaattgcttcacaatactgcaacttgtcggggtcgcggggttccttgaccctaacccttaccggcaggttcctgtagctggtgctgctcctggg

SEQ ID NO: 50703 - DNA, 30 bp, Homo sapiens; identical to SEQ ID NO: 9368
  chr13:61989582-61989612
  hyper

SEQ ID NO: 50704 - DNA, 30 bp, Homo sapiens
  chr13:67797088-67797118
  hyper
ctaccacttctccaccgacttctatctctt

SEQ ID NO: 50705 - DNA, 30 bp, Homo sapiens
  chr13:67798990-67799020
  hyper
gttgcaatctatcaacgatcatgtgcttca

SEQ ID NO: 50706 - DNA, 244 bp, Homo sapiens
  chr13:67799456-67799700
  hyper
atagacatactggcacgttaatactggttgactgggcacttgtatgcagtacttatagaccagtaaaagtgctcgtttacctgtctggtgtgtaaggggccctttgtcttgaagcctccttgggaactgcactctgaggcactgaagtgatctgaactagtggaagagcgtttagaaagggtgtcacaacccccaacaaaggtgttgtccaaagggagttcctgaatcacgtggtgctttttca

SEQ ID NO: 50707 - DNA, 33 bp, Homo sapiens
  chr13:67801106-67801139
  hyper
gttaagtataacccacgtcggttgttttcagaa

SEQ ID NO: 50708 - DNA, 255 bp, Homo sapiens
  chr13:67801446-67801701
  hyper
tctcagataaatacacggtgccattgatgggacttataatgtacctgaggtctatattaggagggttatcatttacatcggtgacattgatggtaaccgttgctcgagcaggagtggagctgccgtcactagccagcactgtcactttgtgaatggctgtctcctctctatctaaggacctctgaactgtaatcagcccagtagtattatttaaagcaaagagtcttttggttgcaggggcgacctgggcaccaa

SEQ ID NO: 50709 - DNA, 30 bp, Homo sapiens
  chr13:67802379-67802409
  hyper
tgtagacaaggctggcgctggtccctgtgg

SEQ ID NO: 50710 - DNA, 783 bp, Homo sapiens
  chr13:67803747-67804530
  hyper
gcccgcgattagttccggcagagtgatgcaggtagggatgcagatacagccgagtaggtgagctctgccccaaccgtctacccaattacaagcatctttcgcctacactgaggacacatctaaacacagaatttacaattgtgcatgcgaaactttacacttacgttagttgcctcaacctttcccctttcccagtatgctgcagttaggaatgatttgttccaacacatagaaagccatgcatctggtagcaccagtttggggagaaatcagaagcagcaaaatgtttcctccttgtaaaatgtgttgcttcgggctggcaaattagcaactccagagaacaaattcacggatttgtcgttagtcattctctccacatttcgtctctcttacccactgggtctgggttcttctgggcatttagcacacacaacacatagttgcacttcttcagctcagggatattttccacagcagcatgcataccatttccatccgatgccaatactgcttaagtctctaacttcttgtaggaaacgtcagagttgcggtgatgatgattctctgacagctatccgggtgacagttgcccgaaaaattcctaatcggttatctcttgcgtgcttcagagactctgaggcgctcctttccgtctcgcgtgctctccctctctcccttcccctctgcccctctctccttctccctctcctctctctgaactgaatttcttgatataactctcaataagcccagagggagggcgtgactgcccaggccccgccc

SEQ ID NO: 50711 - DNA, 123 bp, Homo sapiens; identical to SEQ ID NO: 9370
  chr13:67804644-67804767
  hyper

SEQ ID NO: 50712 - DNA, 422 bp, Homo sapiens; identical to SEQ ID NO: 9371
  chr13:67804863-67805285
  hyper

SEQ ID NO: 50713 - DNA, 276 bp, Homo sapiens
  chr13:67805379-67805655
  hyper
cgcgcctggaaacctgagcccggactcgcggctgctgcaaaacccgcttccagcccacctcactgcgaactttgcttccgaggggctggaaggagtcccaggcagctgtttcccaagctgtggaacacttcctttcccctaggcactttctgctgattccaactttctttcctgtgattttcgtcttttcccgtgcatttcatttctccgactccagctctgtactaaatcctcacaagtttctcgttttcatacgggaactggatggaatgactc

SEQ ID NO: 50714 - DNA, 30 bp, Homo sapiens
  chr13:67806732-67806762
  hyper
aagtcatgttgtagtcgcaacacatagctt

SEQ ID NO: 50715 - DNA, 30 bp, Homo sapiens; identical to SEQ ID NO: 9373
  chr13:70682112-70682142
  hyper

SEQ ID NO: 50716 - DNA, 708 bp, Homo sapiens
  chr13:72438284-72438992
  hyper
ccatacttttgagcgcgcgcgcgcacatacacacacacacacacacacacacacacacacacaacatttaccccaaaatagtcgaaggttcaaagcccaaacacacccaagtcccatggaaggaagaatacctaaacacggaaaagaatttctggctaggtcaggataggacatttgctggactggaattcgaatctttttcgtttcacagccttcccgggcactaacagagaagaagtctttctccatggaaaaaagagctagcgctttttcaacccaatgtccttctggtctccttgctacacttcctttccacctaagtttccctatctctgcgggagcacacactaactccgctccttctctcaatcttcaaacttatttggagggtaccgaagtttctgcgcaaattttgcgcgcagttcccacgtgcccgcttcaggtcttcaactttccctattttctttctcccggaatctcactctgaacttttgcctctgcgcttccttgcagagaaccgtggggacaaagcggcgctgtgaaagggggtggaatgatcatctctaccccgaaactgacaagttgccccactcccgccccctcttggtagatcctcccccactgagcgttcattagcataaaactggtctggctggggaccggtcccgccgcctcctccgtgcgcgcgctttgctgggctggggaagc

SEQ ID NO: 50717 - DNA, 212 bp, Homo sapiens
  chr13:72439203-72439415
  hyper
tgagtctcgggcaatcggtcacctccccctaccgaagaaaacctgctggttgccctcgcatctgccccggggccaccgtacccctttatttcctttgcacacgcactcgctcacacgcggacacacgcacacatgcgcgaacacacagacccctcccctcggctggcttcccctccgggcttcggagctcaagtccccggagcccatccccc

SEQ ID NO: 50718 - DNA, 553 bp, Homo sapiens
  chr13:72439764-72440317
  hyper
tccgccccgaggctcggctttcccacatcccacagcagcccatccccgggacccagagggcaaggggaggaccgggccgaagagcgaggtctgggcagggtgaggtgccaacttctcagggggtcgggcgcggctggcgagccccgagcagggagaggagagggccgcgctcgccggggcgcgcggctcgcgggcgcgcagagcgagcggcgccgggaaaggagcgagggcaggcgagcaggctggtgggaaggggcgcgggcggcgggggctatcccccccgactcaccttgcgttggtgcagtcattgtagagggtctcgaagtccttcctggagatgagtttgcagcggttcactcctggctggatggcgcccagtcccctcaggatgcgaacttgttccacattgcacaccaccggcgtgatctccagccgcttcagcttggtgtagaccgtatgcaagccccccaccaagtgcttcaggaacaggtcgaaagcctggggcaggcagatcagctcgcagccctccaccgtgaaggaagccactttggcc

SEQ ID NO: 50719 - DNA, 272 bp, Homo sapiens
  chr13:72440914-72441186
  hyper
tataaggggaaacagacggaggagaagcgagaggaaaagttgccacacacccccgggaggggaaggggaaaaaaggggggagaaggagcgaggggggcaacaacaactccgggagagaacgagaaggagaaagggagagaagggggagaaaaggaggtgaaggtaataaagagcgagcgcaagaggggcgagcacgagaggcgctctggagaggaacgcacaaaagtgtcccgcaagtcgaaatgcgagtcctctccgggggctgggatcga

SEQ ID NO: 50720 - DNA, 191 bp, Homo sapiens
  chr13:72441500-72441691
  hyper
cggagcagagactccgagagcgcgagacactggagagggagcgtgcgaggaaaggaggaggggagggggaggatacggaaagaaactgtgggagggacggagaggaaaagccggggacacagaagtggcgatcggaaaaggagagggagatcatctacttctcttctactactaccgttagattgcatgtc

SEQ ID NO: 50721 - DNA, 30 bp, Homo sapiens; identical to SEQ ID NO: 9374
  chr13:72966642-72966672
  hyper

SEQ ID NO: 50722 - DNA, 30 bp, Homo sapiens
  chr13:73811863-73811893
  hyper
gaaaaatcatttcccagttctctatccatt

SEQ ID NO: 50723 - DNA, 30 bp, Homo sapiens
  chr13:73814875-73814905
  hyper
atatacatcttaacagattctagtcaggca

SEQ ID NO: 50724 - DNA, 30 bp, Homo sapiens
  chr13:73916612-73916642
  hyper
ctgcccttgctgcacctctatcacacctgt

SEQ ID NO: 50725 - DNA, 30 bp, Homo sapiens
  chr13:73957665-73957695
  hyper
tggaaaacatacactactatgcatacagta

SEQ ID NO: 50726 - DNA, 1470 bp, Homo sapiens; identical to SEQ ID NO: 9375
  chr13:74707124-74708594
  hyper

SEQ ID NO: 50727 - DNA, 185 bp, Homo sapiens; identical to SEQ ID NO: 9376
  chr13:74709333-74709518
  hyper

SEQ ID NO: 50728 - DNA, 200 bp, Homo sapiens
  chr13:75149990-75150190
  hyper
gctgctgtcactatcagtatccggcaggagcccgcccgccccggcccggccccaggccgtggaggaggggggagggtgcggcgcaggaagctgaagataagtctccaaatcgggctaagctgggagtggggacagcgagggggagggccgggaagcaatgaagtcagaggcacagcagcgactgcagctgaatcaatttg

SEQ ID NO: 50729 - DNA, 36 bp, Homo sapiens; identical to SEQ ID NO: 9377
  chr13:75794020-75794056
  hyper

SEQ ID NO: 50730 - DNA, 47 bp, Homo sapiens; identical to SEQ ID NO: 9378
  chr13:76054891-76054938
  hyper

SEQ ID NO: 50731 - DNA, 1104 bp, Homo sapiens
  chr13:76055017-76056121
  hyper
cacacacacacacacacacacacacggcaagcaagccatctccggtcacaccccagacaccgccgtcctcccgggacgggcgctcctccacgcgtgctccttggacgcgccagctccccctccatcccgggaccgttgtccttttccctccgggtccctgctgtagccggccggccgctcccgccgctcgcccagcccccgaacgccttctctcccactcccaaggtccagggaaggggccagccggcgcttgagcgcgccacgtggagcgcgcgcgcctgcagccaaacctcagtcggtccttaaagtggggtccccgcccctcccgccctgctccccgatcccccaaggccgagcccgcccccgcgcctccgagcccctgtcttgcctggctggggtctgtggcgcggaaaacgtggcaggccatctgcgactcggggtcgtcgggctgcgccttgatcaggtaggcaaagtaggtgaggtcgtggctgttgtggatgaagcgcgagatatgctgcgccttgtgctcgaagatgaataccgccgggttgggctgcgtggccgacggactagtgccccccgaggccccagcgcccggcgcggggacgcaacgcaggaagggcgcgctgagcaccaggatcacctctcgggccgccggcgccccgcagccgcccgcctcgggcttctggctgcgcctgcggatctcggccatgagccagggcagcataggcagcgtggtcctgtggtccaggcacgaccccccaacgtaccacagccggaaccgcttatcgcttggcttcccggggccgggctgagctgagacgcccggctcgggctccagggggtgcgggaacggctcatcctgaatgcagctgggcggctccataactctcgcctcaccagggcaccgcggaggccggccgggcgcaccgcgccccccactcccgcgcagaaggcgccgccgaaactgtgccaactgccgcaccgggctcccgcgcctgcctgggagcggcgcgaccccgaactccgcgcttcagcagccctgccccatgcagcacttccacgggcgcggctcggaggctccggcggcgggcaccgaggcaa

SEQ ID NO: 50732 - DNA, 30 bp, Homo sapiens
  chr13:76056404-76056434
  hyper
ctgcagggctgcggcgcggtcagtcctcag

SEQ ID NO: 50733 - DNA, 30 bp, Homo sapiens
  chr13:76124409-76124439
  hyper
tccccttccttcttcgttttgcctcctgtt

SEQ ID NO: 50734 - DNA, 30 bp, Homo sapiens
  chr13:76211036-76211066
  hyper
tgcatcttatgtcccgcttagattggcgct

SEQ ID NO: 50735 - DNA, 135 bp, Homo sapiens
  chr13:76450654-76450789
  hyper
gggtttctggtcaataaaatgcgatgttcggacgcatgcctgaagtgggcttgtctcaccactagggggaaggcaaatacaactcttgggtgcttctgtagctcacacgagggtaaataacgaaaagttttaata

SEQ ID NO: 50736 - DNA, 1110 bp, Homo sapiens
  chr13:77459235-77460345
  hyper
agaggctctgtaatcatctctcgggcaggagaaggactgggcgctggagtggcgagggggtctggggagctcactccctgcagaagacgtactcggtgtagctggtccagatcttgtcctcgctctggtcggtgctgctggcaaaggcgcaggtgcccgtggagctgcacgccaccatgtggaagcccgactcggacagcttgtcgaaggcctgctccaggaagttgaacttgaggtaatagcgcgaggtgtagcgctccgggggacggtcggggtcccggctttcgttcagggtgtccccaaacacctccttggccagcgacgtctttccgcaaacggtgatgcgcgccactcgccggaacttggcgtccgcctgcgcgtcccgcccgatggtgtaggagccgcggtagccgatggtgatgtagcccgagcgccggctgccgtccagcgactgggacggcgtgagcagcgggcccgccgcgcccccggacggactgcggctagccagctccagcgtgggcgacggcgccccggcagaggcgccctcctgctgttcgggctccgagtagccaagcggcagcagctcgtcacccagcgagccctccttgtgcaccccgcgccgcgagggcggcggccccgggccgggctgctggggcgccccgaggcggcgcacgagctctggcagctcgaagtactcggcctcgcgctgcagccggctgcgctcggggaagtagtcgggcagcacgagctgcaagtcccgcaggtaatccaggatgtagcggaagaggaagccgtcccggtccagaaagaagcggcctttgctgtcccgggccagctcctgcggctgctgctgcgtgaacatgcgccagagcagcgagtcgggcaccgacaccaccgtgcagcgccgggtcacgtacacctggccccccacgttcagctccacgatgtcggggaagagcggtggctccgcggaggacgacgaggagccactgccgcccccgccgccgcccccgttgggtaatccacgtgtgctgtccgccagagccatgacagagaggtggccgggccgggacagtggcaggaagccgcgctgcactcaggagctgcaac

SEQ ID NO: 50737 - DNA, 30 bp, Homo sapiens
  chr13:77566815-77566845
  hyper
ctgggcgaccaactcgctctggtttgaacc

SEQ ID NO: 50738 - DNA, 30 bp, Homo sapiens
  chr13:77601287-77601317
  hyper
cgagtctaaaatggcgcccagggctcgcgg

SEQ ID NO: 50739 - DNA, 46 bp, Homo sapiens
  chr13:77901201-77901247
  hyper
ccgccggggctacccgcaatgggaagctgccggcctcacagagcat

SEQ ID NO: 50740 - DNA, 30 bp, Homo sapiens
  chr13:77904036-77904066
  hyper
gggagggctgcagccggggggcgtgggggc

SEQ ID NO: 50741 - DNA, 378 bp, Homo sapiens
  chr13:78271861-78272239
  hyper
ggtggtggctgccgcggccggaggcgagggcccggtgctgatgcgaaccgccggctcggcctcagcccgcgcgtggtcggccccccaggccggggcgacagggaaggagccgtagcctccccgtggcccgaggagccggcgcggcggcgcgcactccccggcggccgcggcgccctcggggcccacgatgatggcggagcaggtgaaatgcgcctcggcaggggtcagctctggagcgggctccgggccggtggtgaacgcggagctggaggtgaagaagctgcaggagctggtgcgcaagctggagaagcagaacgagcagctgcggagtcgagcggccagcgcggccgccgccccgcacctgctgctgctgccgcc

SEQ ID NO: 50742 - DNA, 30 bp, Homo sapiens; identical to SEQ ID NO: 9382
  chr13:78272624-78272654
  hyper

SEQ ID NO: 50743 - DNA, 1076 bp, Homo sapiens
  chr13:78492823-78493899
  hyper
aacgctaataccgcccgcagcctcttcgccagtatccacgctcaaaagtaactcaagtttgcgcgccagtgggaaacttggcgctcatgactcgccagcgcgggtcgaaactccttcctgatgccctctcagctgtttttcttcccccgcgtggccaggaggggtaaataatatgcagtggggcggggcgttctggaaggggtgtgccagggagggaatgatgggggtcccaggcaaagctccgaactctttcacgtaacgggaggaatacagacacgtcttagttaagcgtgcgtgggaaccgcggaattaaggcacctagaggccaagggcttgtgtcaagctctgcattttgccccgcaggggaacctctataccccgcgattgaactcgaaagactcctcccggcggatgaaagccgctactccctggctggctgagctacagctcccgcagcgcgcccaggagtgcgccggagattcggaaacccgcagagacttctcaagtcagcaggaacttggaaaccgctgttccctccaaacggcttcaaacactcgcgctccttcctttacccaacctaattttaatttgccctctctataggcttaatttttatttttttaaaatcccaaactagtaagccaaaccgaagccccagaataaggttcaatcaatgattttaattcaacaccaagcccgaatgtttacctctcggatctgacaaaccagatgcagagcgacgaatggagaccaccttcccgggaggcggaacccagctgggttccagcctgctctgggagaggagcacgcctcccttgagctgcaggcgggtccggctctgacgaaacgctgcgagaatgccagacagtgtagcctccaccgtttgctcggggtctctgctgccatcagacaagtacttttattcattcatcccttcccatcaatcaccgccagactcctcccgcgccttccgaccccgctgcaacctttccccttgggcgatgcctggacagcatcagtagtagttgcccgagggaggggggcagtcctcgtccggggacaggtcccaaaaggct

SEQ ID NO: 50744 - DNA, 30 bp, Homo sapiens
  chr13:79161129-79161159
  hyper
gtcgccagagcgcggcgcagggatcgagct

SEQ ID NO: 50745 - DNA, 10 bp, Homo sapiens
  chr13:79161827-79161837
  hyper
ccccagccac

SEQ ID NO: 50746 - DNA, 30 bp, Homo sapiens
  chr13:79168029-79168059
  hyper
ctctgagtgcactgcgtggaagccgaaaat

SEQ ID NO: 50747 - DNA, 17 bp, Homo sapiens
  chr13:79169698-79169715
  hyper
ctccagcccttggttcg

SEQ ID NO: 50748 - DNA, 264 bp, Homo sapiens; identical to SEQ ID NO: 9384
  chr13:79169849-79170113
  hyper

SEQ ID NO: 50749 - DNA, 36 bp, Homo sapiens; identical to SEQ ID NO: 9385
  chr13:79170347-79170383
  hyper

SEQ ID NO: 50750 - DNA, 778 bp, Homo sapiens; identical to SEQ ID NO: 9386
  chr13:79170467-79171245
  hyper

SEQ ID NO: 50751 - DNA, 272 bp, Homo sapiens
  chr13:79175671-79175943
  hyper
gccggggctgcacggcgaagtaggcctcgagggagcgcttctcgggcgcggcgatggaagtccgcttgcgcttcttctcgccgccgttgaagagctcaggcttgttcattttctcgcgctgggcgccctcggcctcctcgagccacgcctgcaggatgggcttgagcgcgatcatgttgttgtgcgagagcgtgagcgactcgaacctgcagatggtgctctggctgagtgagcccacgcccgggatcttgaggttggccagcgccgagccc

SEQ ID NO: 50752 - DNA, 48 bp, Homo sapiens
  chr13:79176077-79176125
  hyper
cgatgccgctgccacctgcccggccgccgccgccgccgctgccgctgc

SEQ ID NO: 50753 - DNA, 144 bp, Homo sapiens; identical to SEQ ID NO: 9387
  chr13:79176276-79176420
  hyper

SEQ ID NO: 50754 - DNA, 576 bp, Homo sapiens; identical to SEQ ID NO: 9388
  chr13:79176608-79177184
  hyper

SEQ ID NO: 50755 - DNA, 317 bp, Homo sapiens; identical to SEQ ID NO: 9389
  chr13:79177305-79177622
  hyper

SEQ ID NO: 50756 - DNA, 120 bp, Homo sapiens; identical to SEQ ID NO: 9390
  chr13:79177885-79178005
  hyper

SEQ ID NO: 50757 - DNA, 14 bp, Homo sapiens
  chr13:79183409-79183423
  hyper
ctttgttggtttcg

SEQ ID NO: 50758 - DNA, 31 bp, Homo sapiens; identical to SEQ ID NO: 9391
  chr13:79979539-79979570
  hyper

SEQ ID NO: 50759 - DNA, 45 bp, Homo sapiens
  chr13:79980676-79980721
  hyper
cactcccgcgtgcgcgacaccaggcggcccgtaggttccaggtgc

SEQ ID NO: 50760 - DNA, 43 bp, Homo sapiens
  chr13:80055213-80055256
  hyper
tcccgccccccgcgcgccttttgcgaccgcccactcgacaggt

SEQ ID NO: 50761 - DNA, 244 bp, Homo sapiens
  chr13:80913491-80913735
  hyper
ctatctccttttgggtcgagagaaaaaaaaaagatatcatatttcttaaagtgaaagaaaaatggctttttaaaaaaagggcattttccagggtcccactgctcactccgggcgcgcaggacccagctcccggagctgtaaactttcggtgcagatttgcttgcagtcaaagtagcatctttgaaataaaagggggcttttttgtttttattttttaagtgatttctgccgatccgatccctgg

SEQ ID NO: 50762 - DNA, 1670 bp, Homo sapiens
  chr13:80913999-80915669
  hyper
taatggaaaatgatcgcgaccgcttgatgactttcttcctgcgctgggtcagcccgagcttccaaaaataaaataagtgtgacccaggctgaccacgaagaacggaagagagagagctgcacttccgaaccgcagagacccggcgccaggcagggcgacgctcccacccgctccgggctagactgtccacacggagcagaggcgggcactccctccacccggcaccctgcctttttctcaccctggaagtctcctgcccccgaggcgggcaacctgtgtcccccagccccaccagcgccccgcctagggacagcctctccctggactttgccttccaccaagaggaagaacaggttagaaatgcgggcgcctgcaaaggcaacctggaaaatacaaagtgtttttctctccctctcccgctctcagcgccgaattcgcggccagtgcacggctgggagcagacttcaggctagctgtcctccgtcccaaccccctagagcgcgggcgcgcggggtcgcctgtcggggacactgcacggggtgcatacagaagtccccgcagaggcaggccgagcccaagccccgggcgaggcaggtccgcggggagcgccccggatcctcgcgaagaccctgcgggatttgagaaagggaggctcggggagagacggacccaactcctggtccggctgcacctactccatgttgcccacaacgcgccggccgcggcgccaggaggggaagagccaaacgtgcctcaccgtgatcgcggctttgcaccaacccctctcccttggattctcttctttctgcgatgtgcaaataaatccagtctcgatgcaaacttttttcctttctttccaacctctgctttagaccaacttccgagcaatcggcgggagaaaaaaagagaattcggagccagattccccgctgatgaacactccggggttcggagctggagacgactccccttctacaagcgcacgcggagtatttcctcttttttctcaatgaacaagaggccgaagcgccaacggcaagtcccttttcctggcagatgagcgaatgggaaaagaaaacggccttacggagaacctaaagccagatcgccaagtggtgcggccggggccgcgtcgtagcggaggcggcgcgggggcgcgggccgggccgggccgggcgggcgcgggggcctgggcgctgcgcgctccgccggcccctctcctccgctagcgctgcggcgcgcagctctcggcggtgcagactgggcgttgtggaggcgaggcagcgaggccgaggcgggggcggtgggtgcggaggaggaggaagaggaggaggaggaggaggaggagggtctggggcccgcccggggggggctcgccgttggcctgcgccctcgcctttccggaggaggcagggagctctgcggcggccgcggcagcagtaaatggcgtcatgtggatccgaggcggaacagagcagttgttgtcccagaggatatatcgcatccggtcccagctcattggctccgcggggctacattcactcacactccagcgcccgccagcgctccgagccgcaggaggcattcaaaagggcaaccgcgccgccccgcgcgtccccaggccggtcctgccgcccgagcgccgtcacgcggggcgcccgcggggccgg

SEQ ID NO: 50763 - DNA, 30 bp, Homo sapiens
  chr13:80915905-80915935
  hyper
ttctgttcccctttgcggagcgggtgacgg

SEQ ID NO: 50764 - DNA, 500 bp, Homo sapiens
  chr13:80916946-80917446
  hyper
caagggaagtggcatgcgttatttccgggcgctggcctacgtcccccgacccctaaggtgagggtggacgaggctacaacggcctgctcccgagcgtcccgggactgcgggcgcaaaacagctgggcctctctggccacagccgctcgccggacgcccgaatccattgagccgacggtgaacgcaggcgccgctgcgctcgcggcccctctggccaccagggggcgcccgcccggcgcggggctaaggctgctttcttctccgggacacgacgcggacaggctgggttaccttccaaaacgtgtgtgcattaggccggctggtttaaaatgaatacaaagatattaatataaacgacacagaagatagcttgccctcctgtctgcttgggagggtcaaagcctgggtgtgcaaggctaggcaggaacgtgctgccggtgtgcggccagcaagtctctcgagcagagcaggtgaaagcaacgccgtcgcttcgcctcttca

SEQ ID NO: 50765 - DNA, 247 bp, Homo sapiens
  chr13:84455510-84455757
  hyper
tttttcacagtctacgtgtaggtccccttctatctcattgcaggaacagatcttctctttgcaaacgtcccctgtaacgtttccagcggcaaaacaaagagacgtctccagcaacagaatccaaagcagcatttttaaagcgagcaattcatccccgatctcatcacaaagtaacagcgaccatcctgctcgccacagacacaattcaagttcatttagtgctccaatgtccgaagccaggaaagga

SEQ ID NO: 50766 - DNA, 625 bp, Homo sapiens
  chr13:84456112-84456737
  hyper
tgtgcatggctgtgcgtcggactgaccttgcctctctgatacaaagcagggttttccgcggcttctgttgttgaggctgctggtggagttcttgctgtggttgcgggttgcccagaagtccccccgaggtgctgtccagttcccccggtgctgaaatcacgcccgaccgaaggactcacgctgcccagccaatggcgctggaaaatttccgcaatcgctgcgttttgtggttgtccatccttttcctttcctccccttcggtcctcttaaggcttttttttttcttttctgtgctctcgctctcgcttactagctcttcttttcctgttctccttctctttcttctgctctttcggaattacgtggaggggggcggagggcggggggcgagttgtctgagggaggaagagagcgcgagaatgaggggaggggggcggagaagagagttgctaagaagctctgctcgttccagcctggtgcactctgaaagatctgacaccctctgctgatctgcagtagcaaaaatccatctggctagggaatgctgaaagaaaaaaaaatcaatccacgtacagggcaagcgttaaaaatgtgggcataaaaggctgacgatctacatagatgc

SEQ ID NO: 50767 - DNA, 450 bp, Homo sapiens; identical to SEQ ID NO: 9398
  chr13:88323380-88323830
  hyper

SEQ ID NO: 50768 - DNA, 651 bp, Homo sapiens; identical to SEQ ID NO: 9399
  chr13:88323867-88324518
  hyper

SEQ ID NO: 50769 - DNA, 71 bp, Homo sapiens
  chr13:88324920-88324991
  hyper
gggcgcctctttcctccagcctctgggactgcgctgctcgcagtctcctcgccctgcctgggcttgagaaa

SEQ ID NO: 50770 - DNA, 1515 bp, Homo sapiens
  chr13:88325192-88326707
  hyper
tcctccctccccttcttcctccgttttcccttccttctctttggggcggggtgggggagggggagcctcgcgtcctggaactccgggtgcttctgcctgggctgctgcttgagcagctgtgcccggagcctccggtgcggcctgggtgctgggctccagtccgagaggctccatgctgcttactgcagggacgtacagggcggtgatccagtatctaaattctttgggagaaaatgaatagttcccccgcccccgccctccaggaaaaaaaaaaatctgagaatctgagaatgttcagcgcacccgcgaatttgcatcggaggtgcgtttccccgtcagaatgtcagcctccccaggctcattcaactttattttctcaaatttttggtctcctttgctagcaaggaggagggggaagggagtgggttgagaggaagctcttcgacccttgctaactagaactgaattaaagttgtaaacgctggagtttaatactggctggactgaatttgcaatgggctttcagatggggtgggaggtgaatgggggcggggaagcacagggagggagggggaggggacccaacctcgctgaatggatgtgcggatttgatccagcggagaactgaaatttcaaggtaaacgttttgctttcactggggtggggatgtttttgccgcttttaagccgggagacgtttaccgttgcgttgggaggtcggggatacttgcgaggtttatgcactgtggttccaattcatctcgacacgtctgggtggccacacgtgaatgattcgcaggcacactgatacatgtgcgtttgaatgcaggggcgtttaataacgcgggctggagtcgacttggggatcaggagcaaggtctccaggcttgaacccgctgtctcggaaacatcttggctttagtttggagttgcaattcgatattagacttcggtagtgaggcaaaggcaaggttgaccagagaaaaggcataggttcctagagtccagcatttctatcaaatgtcctccaccccattaaccaacgcagcatgcgcgcgcgcgcacacacaaacacacacacacacacacacacacacacacacacgctcattccatttatgtccttcctttaagagtgctgctgttgatcagaagtaggaagtggaaggaagccttcaaggggacaaaaagagagcaagaaaaaaaagggggagggggtcatattgattcctgtgggagatgaaattcggatattaaacaactgacctaagtcgcttacagttcttcctcccacctttctattttgcctcttaatcagcccaggcgtcctttccctgagattaaaaaaaagagagaggggagcgttaacaattaaatgtaataagcaactccaaagatggggatgctgtcgaggtggtagttccgtgcaaaccttgctattaccgttgcaaatagacgcggagcccaaggtaagggaggctttcgtgctgatccttggtgtactgattcccggtaa

SEQ ID NO: 50771 - DNA, 85 bp, Homo sapiens
  chr13:88326936-88327021
  hyper
cgtggtagtgaagtccaccatcaaagcaaatgcgctctccttttttctccttactcaaagctccgggagacaattggtgatttaa

SEQ ID NO: 50772 - DNA, 31 bp, Homo sapiens; identical to SEQ ID NO: 9403
  chr13:90384876-90384907
  hyper

SEQ ID NO: 50773 - DNA, 30 bp, Homo sapiens
  chr13:92001425-92001455
  hyper
cgggtgttcctgcccggtcttctgttccta

SEQ ID NO: 50774 - DNA, 30 bp, Homo sapiens; identical to SEQ ID NO: 9404
  chr13:92001749-92001779
  hyper

SEQ ID NO: 50775 - DNA, 808 bp, Homo sapiens
  chr13:92050705-92051513
  hyper
ctatttatttgcatcgatgtcgctccgagtcttcagcactgggccgcgtatgacagcatcttagtgggtgcggagcgggacagcgcgccgggggcgtggcaggggcgtggcctgtccgcggggcggggagtgcggggcggggcttccgcggagcgcagcgagcgggcacatcccaggttagctgctgcgagccgagccgggcggcggaggcggcggcggcggcggcagtggcggcagtggcggcagtggcggcagcggcagcagttgcagcagtggtggccagagcggatgcttgcgggctccctgcggctccactagttttcttcgccccgcccagccgcccactcttctcggctagggaagaagaccagagggtgctcagctggaaaactctggtgtctcagcttagggcctcctccgggaagagctaactgctcccaggtgaagccggtgcccgcgggcggtccgtacaccccgcagccggctcgcaccgctcgagagcctcggccgctgtgtcttccacgtctgcagctcagccagggcgcgcagggcgagtggggtccactggcgggtaaaggggaccaggacggcgaggatggacgcacagacctggcccgtgggctttcgctgcctcctccttctggccctggttgggtccgcccgcagcgagggcgtgcagacctgcgaagaagttcggaaacttttccagtggcggctgctgggagctgtcagggggctgccggattcgccgcgggcaggtaaggggcaatgagggggtctctggactggcggcgtccgagcccggcct

SEQ ID NO: 50776 - DNA, 30 bp, Homo sapiens; identical to SEQ ID NO: 9406
  chr13:93152311-93152341
  hyper

SEQ ID NO: 50777 - DNA, 440 bp, Homo sapiens
  chr13:93878954-93879394
  hyper
tttcccctttctaccgactaggaagagatccagtccaggttttgcctttgactcggcctgtgaatttcggctgtgcaatgtgtagcacgtttctttctcccccctcctttctccttccctcttgcctccagtgactgtctccaggatttctctcttcctatttcaggaggactctcacaggctcccacagcctgtgttaagctgaggtttcccctagatctcgtatatccccaacacatacctccacgcacacacatccccaagaacctcgagctcacaccaacagacacacgcgcgcatacacactcgctctcgcttgtccatctccctcccgggggagccggcgcgcgctcccacctttgccgcacactccggcgagccgagcccgcagcgctccaggattctgcggctcggaactcggattgcagctctgaaccccc

SEQ ID NO: 50778 - DNA, 173 bp, Homo sapiens; identical to SEQ ID NO: 9409
  chr13:93879602-93879775
  hyper

SEQ ID NO: 50779 - DNA, 298 bp, Homo sapiens; identical to SEQ ID NO: 9410
  chr13:93879918-93880216
  hyper

SEQ ID NO: 50780 - DNA, 204 bp, Homo sapiens; identical to SEQ ID NO: 9411
  chr13:93880533-93880737
  hyper

SEQ ID NO: 50781 - DNA, 332 bp, Homo sapiens; identical to SEQ ID NO: 9412
  chr13:93880793-93881125
  hyper

SEQ ID NO: 50782 - DNA, 819 bp, Homo sapiens; identical to SEQ ID NO: 9413
  chr13:95201108-95201927
  hyper

SEQ ID NO: 50783 - DNA, 612 bp, Homo sapiens
  chr13:95202013-95202625
  hyper
cgctttgcgtccaactggcttgcttgtcttttcctggtgatcatgtacagcatttcttccttgtcctgttaaacggtgtcgtcggaattcttccacctccctccttctacgctgccactgggcgctgcacacgcgccttactttcttagattgctctcggcgcgcgcagcccgcacggtccaggagctgggtccaggcccccgatggcggctcctcgggatgctggttccgtcctcccagggccggtccccgcgagatccgaagcagcggggtcgcctcggggagctcctgcccaggcctggtagccccttcccttcgatctgcccctgcctgtgactatccacattcgtcaccttgctccccgaaaagttccaggccccaggtgaggagccgtgtaggcccaatacgattggatgaaggagtgtacggggcaggaatcgtcagactggcctctggagaggagtttgcagcctctccgtgctccgggcccgggaaatgtccaccttaatcatcacctctttgcatggagcctgactggcaaataaatgctgggtgagctcactaacgatgattattcagtcaatgctatttcccacacgagtcaacaaatgt

SEQ ID NO: 50784 - DNA, 30 bp, Homo sapiens
  chr13:95254325-95254355
  hyper
ggtaggtctgggggcggggagggggatgaa

SEQ ID NO: 50785 - DNA, 30 bp, Homo sapiens
  chr13:95254675-95254705
  hyper
gctccttcctgtctcggccacactgtgacg

SEQ ID NO: 50786 - DNA, 201 bp, Homo sapiens
  chr13:95354638-95354839
  hyper
ggacacacttagggtcgcctttgttttgcgcagtgattcaagttgggtaacccttgctcaacacttgggaaatggggagaatctcccccacccgcaacctcccgcaccccaggttcccaaaatctgaatctgtatcctagagtggaggcagcgtctagaaagcaaagaaacggtgtccaaagaccccggagagttgagtga

SEQ ID NO: 50787 - DNA, 175 bp, Homo sapiens
  chr13:95355116-95355291
  hyper
cgggagaaaacctagtccccgaaaaggaagaacagcaatccggacaagcagttggcgcctttgtcccgccagccccttctccaaccagcccaaagttgggcagctgctgcgaaggagggtaagggcgatgatcagaagggggctgattgatgcccccaggcgctcgcctcaccac

SEQ ID NO: 50788 - DNA, 504 bp, Homo sapiens
  chr13:95355493-95355997
  hyper
aggggttaaattagcggggggagaggccgcacctaatttcagacacttttctttctaatgtggctccagccccagagggaggggtcaccgggactggaggctggggtgtcctctaagaccctctctcccttccagatctctctgttccgtgcggatcctgccagagcccgcgtgatcatcgcctcccacacccctccctccctgacctggccagtctcttctcccagggaggaactttgcggaggggtcagtgttgggaaccctggggtcctccgccgcctcctgatcttccgccagtcccgccactcctccgccctgggcgtgccttccgcaggtgaacctgaaggtgcgtctgcaatgctgctgttgcattctcgttcttgtagattcttcttctattctctctctttgccttccgtttcacccagcacccacttttcctacgctgctctgaagaagttctctatcttctgtctcaggctctccgtgcgtcctttcactcgt

SEQ ID NO: 50789 - DNA, 194 bp, Homo sapiens; identical to SEQ ID NO: 9416
  chr13:95357040-95357234
  hyper

SEQ ID NO: 50790 - DNA, 30 bp, Homo sapiens; identical to SEQ ID NO: 9417
  chr13:95357450-95357480
  hyper

SEQ ID NO: 50791 - DNA, 221 bp, Homo sapiens; identical to SEQ ID NO: 9418
  chr13:95357682-95357903
  hyper

SEQ ID NO: 50792 - DNA, 30 bp, Homo sapiens
  chr13:95358190-95358220
  hyper
aagcgaccatcctgcgtggacctttctccc

SEQ ID NO: 50793 - DNA, 369 bp, Homo sapiens
  chr13:95359620-95359989
  hyper
gagagattaataaagtttggacggctccctcggcctccgctgggccgcgggcgcaagaaagacgcggaccctcgaggcggacgagttgcgggaacttcgcttgcctggaggacacggcggcccaggcggccgggagcgccggcgccgagccgcgctctgattggctggcgcgaccgtccctatctgctccggggagagtggaatcttctctccatcttctgcgccccgagcctggggtgagagggagatccgcggtgctttctcctatcttcttgggggagggggaggaggaaattgtcaagggaagtaacaatcgcggccagcaaccctgctctcccaaagccaccccctcgcgcgacagcgtcccca

SEQ ID NO: 50794 - DNA, 539 bp, Homo sapiens
  chr13:95360263-95360802
  hyper
atggagatagagatcgcgagccagcagcagctctctgcccaatcacagcgctgcatttgtgggccactttcagacgcttacaccacccacccccgggcctttctctacgccctcttgccccggagccgctccccccgctccaaccccttacttctgcacagtctaacttggcaggaggctctctgcaggcgcaaaacccgccaacttgttagcaagaccattggagtcagaatgggtgataaacgagtctgtggggcctgtggaggtcctcaaacagccgcacaatctgttggcgatatgacctcggtgctccccctcggcatcctcacccctcctcttacccatctttccagtcctcttctcattcatcaacaactccggagcgtttctcccagaaaacgctgatctttgggaaaaggggagggggcgggaggaggcggggagtcttcaggccgaggaggcggccgagctggaaggctcagggtggtaactaagatttagggctggggtgatttccagcgagccgcaggaagttccgt

SEQ ID NO: 50795 - DNA, 495 bp, Homo sapiens
  chr13:95362956-95363451
  hyper
caagcagcttttcccgtgtgccagccatttcagacctcacatttgaacagcgtgcatgcaacacggaccgggagggggttgggggttggggggctgaggggcgaggaagaagaatgagaaacaaaaacaaaaccgaccatgaaacttccaacaaaactggaaaggccaacatgtcaaaaagttactcctccacctccgtgggtcaaaacgcaacaggttccgaagtgcaaagcaaacgccaactgctgccgcacacaaccgcctgctttcgagttggctgccgaagtgcgggtctgaaatgatcctgcgaattcacaggcctgctcgcccgcgcccttgcgcgcttggccactcctgccccgcctggcctctctgcctctacctggcacctatacattctatgtacatacaaaccgggcccccggtcgcgggagggcgcacggggaggccgcagcgctcgtacctatacatatgtacacgtgtgcacaccggtcc

SEQ ID NO: 50796 - DNA, 466 bp, Homo sapiens; identical to SEQ ID NO: 9421
  chr13:95363493-95363959
  hyper

SEQ ID NO: 50797 - DNA, 226 bp, Homo sapiens; identical to SEQ ID NO: 9422
  chr13:95364064-95364290
  hyper

SEQ ID NO: 50798 - DNA, 1127 bp, Homo sapiens; identical to SEQ ID NO: 9423
  chr13:95364329-95365456
  hyper

SEQ ID NO: 50799 - DNA, 568 bp, Homo sapiens
  chr13:95365497-95366065
  hyper
cggcgcaggggcggaggtgctgcaggagagttaaggaaaacgggccatcacctcagttcgcaggtccgcgctgtggcacctcccgctctccccactcccgcggcgcagggggccccttcccagcccaggccgccctctgcaccggctcaggtgagtgtggctacctgcatgtgtgcgcgcccggagccggcactgggtgtgcatgtccagccgcggctgtgtgtgtatatctgggggcctgcggaggaggtggagcccaggactcggggagggaggagggatcagcggagccgcctcccgctcccacacccccaggacctcgaattaacagatcccctccgccccccgccccctcccaatcctcctcctcccactccttttcacttgagagcaggtttaggcgagtggagagtccggagcgcgccggggagtctgcgccctgtttggcgttggcaaaccctggtgtcatcccggctacccaggccggcctggcgtgcagctgccctggttgtggccctggaatcctcgccgggaggaagaaggcggcgggcacgagtaggagagcctc

SEQ ID NO: 50800 - DNA, 974 bp, Homo sapiens
  chr13:95619807-95620781
  hyper
tgggttttgctcgggcgacttgattgtctttcaagttggcgttaagagttttcaacaggtctccttccctgccagccgggaccccgggggtccctcggagcagggcgggtgggaccgctcggcctccttctctcgcccgcacgggcgccgccgcagacccggagcaggcacccggcggccgccgcgtgggctgcagcttagcctcctctgcgggcgcccggcagggctgcgcggccgagactcggggcgccggcgccggggcggccgggagctctgtcatttggcaactccctgcagactgatgacacggcgctttccatggtcgagccccacaaagtgtagggctgcggggcgcacctggctgggctcctaattacccggcctgggacgcacggggcagccgcggagggtggcgcctggggtcgggccggggtccccttcgccgcagtcccgcccacccgcagcctccgaggggtcccggccagggcgttctccacacgctcggctacctgcaggggttcgccactgcaagccgggccagtagaagtttgggggcgaaggcagagagcatttccttctcggcttttggcgcctccacgctgcacagaggcaggggcgactctgcaggccccgtttcccccatcctcccctccaccccagttccccgcaggacgtaggcgccgtccctagctcccccttctgtcctcgccctaacaccgcagggcctctcctggggatgtggggtcctgcgtgcttttgggggctacaaaaagtgggggccgtcgcagagcagagggaagctaggagcgggcaacgaattgaatcctggagacccgggaggagcgaggctgctgccgtccccggggaaagggcgacttcggcggggataccccgtgccaggccctgcaactcccgggccctcgggaatgggatgggggaggcgcggggtgcgcgcagctcccggtgatgttaag

SEQ ID NO: 50801 - DNA, 165 bp, Homo sapiens
  chr13:95620853-95621018
  hyper
cgctgcggccgctgtgtgcccgaggggcggctctgtaacccggctccaggcatttcttaggtttcccatccccgccctccaagctcccgggagcgcctgctccgctgcccgcagacaggcgtcgttcaaacctcagctctgctcggtctgcattcatggacccca

SEQ ID NO: 50802 - DNA, 30 bp, Homo sapiens; identical to SEQ ID NO: 9428
  chr13:96056222-96056252
  hyper

SEQ ID NO: 50803 - DNA, 30 bp, Homo sapiens; identical to SEQ ID NO: 9429
  chr13:96056473-96056503
  hyper

SEQ ID NO: 50804 - DNA, 510 bp, Homo sapiens; identical to SEQ ID NO: 9430
  chr13:96204922-96205432
  hyper

SEQ ID NO: 50805 - DNA, 112 bp, Homo sapiens; identical to SEQ ID NO: 9431
  chr13:96296233-96296345
  hyper

SEQ ID NO: 50806 - DNA, 183 bp, Homo sapiens; identical to SEQ ID NO: 9432
  chr13:96296372-96296555
  hyper

SEQ ID NO: 50807 - DNA, 109 bp, Homo sapiens; identical to SEQ ID NO: 9433
  chr13:96296840-96296949
  hyper

SEQ ID NO: 50808 - DNA, 229 bp, Homo sapiens
  chr13:96296991-96297220
  hyper
cgcagcgctaaaatgcgctcagccaatccggcagctggcgcagacacgtggttcgggggcgcgctccgttgctggccctggatgctaaccctaggaaggcttttcaaagagaaaccagattcgctcctacccggttgttggtctggccctcagcaagctaatttcccagaggagcttcaggtgaattatcttccaaaaagagatgcgttttaatcgcagaagtctgcag

SEQ ID NO: 50809 - DNA, 30 bp, Homo sapiens
  chr13:96330037-96330067
  hyper
aggagtgtcatgtccggctgggagttggag

SEQ ID NO: 50810 - DNA, 477 bp, Homo sapiens
  chr13:96705466-96705943
  hyper
acttggacgcggcgaccgtcccggagccgagctgcgaaagccacagcgctgtggagcctagtagcagccgcaccacgttcgtggctttcgctggcgccatggcacggagagaaaagcgcgagtccctcggacccggtacccacagtctgtggccgccacgcttcggccggctcttcccgctgcgcggctgcccacttccggtgggaggagctcgagtccgttactgggtgccgggtccagaccggcgcatgcgtgtcccgctccggcgcggtttagtgggtgcggcctggagagcccacgccagccggacactgggccacgtcggagccgccggggcggcgccgggttgctgagcggcgtcacagatgctcccgcgggtccgctcccgcgggtccattcccaggactttgggttctcggacagaggccttaggacacggggcgggaagctggctctccagaccgaactagggctctg

SEQ ID NO: 50811 - DNA, 38 bp, Homo sapiens
  chr13:96742398-96742436
  hyper
tgcgagtgtgtctgcgtgcctgcgcctgggcggacagc

SEQ ID NO: 50812 - DNA, 201 bp, Homo sapiens
  chr13:96743568-96743769
  hyper
ccacatccagaagacggggggcaccactttcggccggcacctggtgaagaacatccggctggagcagccttgtagctgcaaagcgggtcagaagaagtgcacctgccaccggcctggcaagaaggagacgtggctcttctcccgcttctccaccggctggagctgcgggctgcacgccgactggacggagctcaccaactg

SEQ ID NO: 50813 - DNA, 30 bp, Homo sapiens
  chr13:97876444-97876474
  hyper
gggtggatggtccccggggccctattccca

SEQ ID NO: 50814 - DNA, 246 bp, Homo sapiens; identical to SEQ ID NO: 9438
  chr13:98085204-98085450
  hyper

SEQ ID NO: 50815 - DNA, 703 bp, Homo sapiens
  chr13:98795068-98795771
  hyper
ccagtggcgctccccgcgctgcattaggtagcgccgcgcggagcccggccctggccggaagcccaagagaggcgcagatccccggcggcgcgctgggctcgggaggcccctgggcgcacctgcccgggcggagcggagcggggcggggcgggcgcagggcgcgggcccggacgctggagggggctgtggctctcccgcgtccccgctgctcgggctgcgcggcgcccgcctccccccgccgaggggccggcccagacccggggaggggcggtggccactgcacttcccgctcgccggcctcagaggcggcgggtccggcgcgggcgcagcggtgcgggcgctcggctggggcgcggggcggggacgcggccgctgcccgctttgcgccgctcctccctgcgcgagtagcgctggccccggcgtcgaggcggccatggcgacccggagcccgctccccacccaccccgcctgctccgccctcccctccgccccgcgccacctttgatggctcggacctcagccggccaccgccagccctgctcgcgcgcccgcgccgccgccgcccgcgggtattaatagccggcgccgccgcgccctcggccgccgggggcttgggagccgccgatcccggagcccgagccgggagagggagccgccgcagccgccggcgctgtggaggtaggaggcgcgcggtgaacaatga

SEQ ID NO: 50816 - DNA, 31 bp, Homo sapiens; identical to SEQ ID NO: 9440
  chr13:99064433-99064464
  hyper

SEQ ID NO: 50817 - DNA, 31 bp, Homo sapiens
  chr13:99129086-99129117
  hyper
cctcacacactggcctcgctgggactctggc

SEQ ID NO: 50818 - DNA, 330 bp, Homo sapiens; identical to SEQ ID NO: 9441
  chr13:99229763-99230093
  hyper

SEQ ID NO: 50819 - DNA, 30 bp, Homo sapiens; identical to SEQ ID NO: 9442
  chr13:99404491-99404521
  hyper

SEQ ID NO: 50820 - DNA, 355 bp, Homo sapiens; identical to SEQ ID NO: 9443
  chr13:99739097-99739452
  hyper

SEQ ID NO: 50821 - DNA, 39 bp, Homo sapiens; identical to SEQ ID NO: 9444
  chr13:99740139-99740178
  hyper

SEQ ID NO: 50822 - DNA, 30 bp, Homo sapiens
  chr13:99852543-99852573
  hyper
cgggaacaaagaggcggctggacggcccag

SEQ ID NO: 50823 - DNA, 30 bp, Homo sapiens
  chr13:99853194-99853224
  hyper
tgagtaccggcctccgccatcctggctgcc

SEQ ID NO: 50824 - DNA, 30 bp, Homo sapiens
  chr13:99853482-99853512
  hyper
tgccctggtgttctcgtgggccggccccag

SEQ ID NO: 50825 - DNA, 30 bp, Homo sapiens; identical to SEQ ID NO: 9445
  chr13:99853794-99853824
  hyper

SEQ ID NO: 50826 - DNA, 30 bp, Homo sapiens
  chr13:100153851-100153881
  hyper
acaactatcatgagcgcgaggctgccggtg

SEQ ID NO: 50827 - DNA, 30 bp, Homo sapiens
  chr13:100154400-100154430
  hyper
ccctgtaacatgtacgctgaggaagcgggt

SEQ ID NO: 50828 - DNA, 30 bp, Homo sapiens
  chr13:100259287-100259317
  hyper
ccccaaatggcaaacgtgaacgcgccagtc

SEQ ID NO: 50829 - DNA, 259 bp, Homo sapiens
  chr13:100608461-100608720
  hyper
ggcacctcctgctcccactcccctctccgcccagccgtgggcagctgaaatggatgtgatttcacgcacttcctgcgcgcgcacacacacatgcacacatggacatacacttgcacacacgcacaacgcgcattccccctccaatgccgcccgcacacgtgcgcgagcctggacgttccccttttgtgctcgttttgcaggcccagagctcctgctgctggttttctcctttctctccttcatcgcctcttccttcgcc

SEQ ID NO: 50830 - DNA, 110 bp, Homo sapiens
  chr13:100620374-100620484
  hyper
ttgatcaatccgttccgggatcccggataacccccaaaagggagagcggcgtggcagggagggaaagaagtccggatgggccctctcagaacacaatgtccaatagctga

SEQ ID NO: 50831 - DNA, 104 bp, Homo sapiens
  chr13:100620515-100620619
  hyper
cgggttggagtctgaacccgaggcgcctgcgtccctcccgcagggacccccacgctccaccgggtggggcccacgcggccgccgggagggggcaggaaatgcaa

SEQ ID NO: 50832 - DNA, 1399 bp, Homo sapiens; identical to SEQ ID NO: 9447
  chr13:100620631-100622030
  hyper

SEQ ID NO: 50833 - DNA, 505 bp, Homo sapiens
  chr13:100622155-100622660
  hyper
cgcggggcctgtgtgtgctatcgaattacttattcatagaaaaaaaaaagggggggagagaaaaaaaaagaagtcacatgtccgggttatacgtatgcgaagagaagcagcagaaggagaaaaaaattaaggcgagcaggaggaggaggagaagcagcggcggaagcggcggcggcgcaggagctggtggcggcggcggcggcgcggccggggacagacacccacctgtatgagtacgcttgtggatcttgaggttctcggagcgcgcgaagaccttgccgcagccggggaaagggcagggaaagggcttctcgccggtgtgcacgcggatgtggttgatgagcttgtatttggccttgaagggcttgccctcgcgcggacagtcctcccagaagcagacgtggctgctctgctcggggcctcccacgtgctccaccgtgacgtgattcaccagctcgtgcatggtgccgaaagttttggagcagggcttggcgccgccggccgg

SEQ ID NO: 50834 - DNA, 1130 bp, Homo sapiens
  chr13:100622719-100623849
  hyper
cggggtcgatccacttgcagatgagctcctgcttgattggctgccgcatgtagcgcaggaaggccccagccgcccctgggaggtgggggtggtgctggtgcgggtgctgcgcgggcgccggcggcggcggcggcgccgggggcggcgcgtggtgctgcaggtggggcccgggcccggccgctgctgcggccgccgcagccgccaggttcaggtttaagttcacggctccgtagccgtgcagggcggccgccgctgcggccgcaaccgccccgtagtgcgcgtccccagagcgcggcgcgaagggcggttcggcgcggccgtacagctcagccgccgcggctgccgctgccgccgccagccccaggcgcatctggccgttgagcgggtgcgggtggccgcctggggcccccggcgtgtcgtgcagcgcggggaagagcgccgggccgccgctgccgtccgggcccgcgtaggtgccgctggcggagatgaacatgccggccgagtggggaggcggggccgggtgctggggggagccggtgccggaccgctgctcccctccgagcggggccccgtgcatggccgccgcgggggccgtggcggaaaggtccctccggaggacgaagtccctgctgtggcctttgccgctgctgccgccgccgccactgttggtggtggtgtagcccgagagggcaggaggaggaggaggcgggggagggggagggggtgaaggggtgggaggaagaggaggggctgggggcgggggcgcggagggctgcgcgccactgctgcccccgccgcaggggtagctgcccgcgccggggtgcgcgaccaaggctgcagcacgggcggcggctgccggagcctccgggtgtgccgggaacgcctgggagggagggctgaggcccagcgtgctcgcctgggccatgtgctcgggtccgagcggagtggtggccacgccggggtcagcgcccaggtcccgcaggcggaggtgcgcgacggcggcccggagttgggagtgggcgggcgggccggccagcgccgggaagcctgtcatattctgaagcggctggacctgagccgttgccaaatccgctaatctcagcgctggcgggttcctcttgctcaaaggg

SEQ ID NO: 50835 - DNA, 30 bp, Homo sapiens
  chr13:100624115-100624145
  hyper
gctcgattggctcccgttcaggccctcgac

SEQ ID NO: 50836 - DNA, 14 bp, Homo sapiens
  chr13:100630284-100630298
  hyper
gatccgctcaagcc

SEQ ID NO: 50837 - DNA, 146 bp, Homo sapiens
  chr13:100630673-100630819
  hyper
agaagggacggcgacgtgactttgaacttggctcagctcttctgtgccctgcagagagaggagaactagagccgggaaagaatagccaggagcgcccaacccgtagggtctccggcgggaattaaggcgtccgccccaccgcccgg

SEQ ID NO: 50838 - DNA, 1229 bp, Homo sapiens
  chr13:100631530-100632759
  hyper
aacctgcagagactcgcttaagccgggagaggctgcctgagccggcgcaagagagcccgggttctgccagccatagtgagctagaggattcttcccgcgtttttgtttatttcatttcagaacataattctgaaaaatttattattttctcttcgtttaattttatttcaactcctagagatttataaataaaagcagttctccaggccagccaggagaacacgcccgaggcgctggcctcaggctgtcccttcacacctccgcagcctctgggccctccgttccctctctagttacctcgggagcgcgagatttgggcggcgggacaggaaacgtccgcagcggtcagccaggcgcggcgccgggagcggcctcgccgctgggccaccgcccgggtggtactccctgctcctggagaaggagtggatggatatatatgctttctagaaggtttaagccctgccgtgtctgacggcttcttctcccgagaccctgagcctgacccgcagccaaactccggcctgagtctcgcttggtctcgggcgttcccacacttctcagcccaaggatgcgcggcccggcttctgggcatttaccctgagggtgacactgtctttaaacgacttccgaacaacccccttccacgcaggggccgctgcccagtgtttactgctgtaaacggagcaggacgcaagcggcgggtggggagctcagcgcgccgaggggcggacggggacgccgcggggggcggggaaggcggtgtctgggtgggcgtccggagggtgggaagaaggggcatgcctggctttctctgtgcccacggtcctgcacctgtggtttcaatgccacagagcaagtttacaaaggcggggtgaaagtagggagcgtgccaagcgggcagcagaccagccccccgccgctccttgtggcgcgctcccggcgaggccccgggcctgaaatgtccccgcgcgcagagcctcctgccaggcgacccagctgttagccacctctcgagcggcctggagtgctcgggccaggcgtccccggggttttcggtgtccgctgggagctgctcagatcccggggaagtcggtggcctacgcagaaagactggagcgctgggttgcctcccattcctgacccggctgagggcgccctgaccccgcggcccgggcccgcgtccgagccacgctggacgcccggctcccgggagcgccgcggtcggccag

SEQ ID NO: 50839 - DNA, 379 bp, Homo sapiens; identical to SEQ ID NO: 9451
  chr13:100633419-100633798
  hyper

SEQ ID NO: 50840 - DNA, 602 bp, Homo sapiens
  chr13:100634142-100634744
  hyper
caggcggcggcggaggcggcgggcgcaggagagcggctcccagggctgaagtggccgccaccaccgccgcctgcgcctggagcccggtggccgccggacgcaccgcgcggatcgggagcgggagtcgaggcggcgcggaggcgcagggctcgcaggggcgggcgggcgcgctggccatgctcctggacgcgggtccgcagttcccggccatcggggtgggcagcttcgcgcgccaccatcaccactccgccgcggcggcggcggcggctgccgccgagatgcaggaccgtgaactgagcctggcggcggcgcagaacggcttcgttgactccgccgccgcgcacatgggagccttcaagctcaacccgggcgcgcacgagctgtccccgggccagagctcggcgttcacgtcgcagggccccggcgcctaccccggctccgctgcggctgccgctgcggccgcagcgctcgggccccacgccgcgcacgttggctcctactctgggccgcccttcaactccacccgggacttcctgttccgcagccgcggcttcggggactcggcgccgggcggcgggcagcacgggctgttcgggccgggc

SEQ ID NO: 50841 - DNA, 389 bp, Homo sapiens
  chr13:100634940-100635329
  hyper
cgcaactccacaaccagtacggccccatgaatatgaacatgggtatgaacatggcagcagccgcggcccaccaccaccaccaccaccaccaccaccccggtgcctttttccgctatatgcggcagcagtgcatcaagcaggagctaatctgcaagtggatcgaccccgagcaactgagcaatcccaagaagagctgcaacaaaactttcagcaccatgcacgagctggtgacacacgtctcggtggagcacgtcggcggcccggagcagagcaaccacgtctgcttctgggaggagtgtccgcgcgagggcaagcccttcaaggccaaatacaaactggtcaaccacatccgcgtgcacacaggcgagaaacccttcccctgccccttc

SEQ ID NO: 50842 - DNA, 119 bp, Homo sapiens
  chr13:100635398-100635517
  hyper
cgcgggctgggacagggaccaggcgcggaggggagacacgcacaggctgagactcaggctgtgggtgccgacgctgggcgcagaccgccagccggggacctgggatgggaggtgttttt

SEQ ID NO: 50843 - DNA, 22 bp, Homo sapiens
  chr13:100635597-100635619
  hyper
cgagttttgaatgattagcctc

SEQ ID NO: 50844 - DNA, 2 bp, Homo sapiens
  chr13:100636108-100636110
  hyper
ag

SEQ ID NO: 50845 - DNA, 245 bp, Homo sapiens
  chr13:100636130-100636375
  hyper
cgcctcatagattattcatctatgaccaggtctcagccaaaatcgtgccagacgatttcctaaaagaaagccaaatgttttagcaacttcccccgtcaatatttactccgaagtggggatgcgccagcggcctattgttctcttccgggaagggagggagccgaggtgcgagacaagcttttaacaaggtttaaaatttgagaaatttatttgcatgaaatgctcgctttcgagtcctgtgtctg

SEQ ID NO: 50846 - DNA, 375 bp, Homo sapiens
  chr13:100637156-100637531
  hyper
gctctgggtgtctgcagccagcgccgatgtttgccgtccacaggggagaagccgttccagtgtgagtttgagggctgcgaccggcgcttcgccaacagcagcgacaggaagaagcacatgcacgtccacacctccgataagccctatctctgcaagatgtgcgacaagtcctacacgcaccccagctcgctgcggaagcacatgaaggtaccaccgcggcggccgggaggagggcgaggcaggccgaggcgccggtgcagcactggcccggaccacctcagccggcctgggagggtccccaggggccagggcggcggggggaacatttctgggggtgctctcccccaggggcccggccccacagcagctgcactc

SEQ ID NO: 50847 - DNA, 30 bp, Homo sapiens; identical to SEQ ID NO: 9455
  chr13:100642760-100642790
  hyper

SEQ ID NO: 50848 - DNA, 341 bp, Homo sapiens
  chr13:100647979-100648320
  hyper
cattcctgcaatagacgataggttctgttcggtagcgggaatgtcctgtttctttgctttaagtttcactttgtgattaaaatgcaataaaataagtctggaaaatcatttttaagagaacactttcaagaagcacttcctttcctagtgccagacaacggtgctccccaaccacttggctggaacgcttgctttcgatttgtttgtttcgcgcatttccctaaagagccgggctctttgcgctgttttaattctgctttaaaaatgcatcgcttctgccctgaatccttctctgaaacaaattcctatcgaaagtgtatcagattcgttccaaatatggg

SEQ ID NO: 50849 - DNA, 146 bp, Homo sapiens
  chr13:100740895-100741041
  hyper
tgctttgcaatttacgctttcgaacatgcaggaatgtagtttgggcatttgtctggaacttcggattctcgggactccagggtggccaaggcgcggaggtgactcaatgacattgaccggcctggatgcacgtgggttgctgagcc

SEQ ID NO: 50850 - DNA, 30 bp, Homo sapiens
  chr13:100741349-100741379
  hyper
agaggggcggtctgcggggacaacaatggc

SEQ ID NO: 50851 - DNA, 30 bp, Homo sapiens; identical to SEQ ID NO: 9456
  chr13:101422012-101422042
  hyper

SEQ ID NO: 50852 - DNA, 30 bp, Homo sapiens
  chr13:101449976-101450006
  hyper
agcccagttctgcaccgatatcattgcccc

SEQ ID NO: 50853 - DNA, 31 bp, Homo sapiens; identical to SEQ ID NO: 9457
  chr13:101717570-101717601
  hyper

SEQ ID NO: 50854 - DNA, 138 bp, Homo sapiens
  chr13:102068219-102068357
  hyper
gggggcaggtgcagcgctgtagtgatgcccagtggcctcgtcctcagccacctgccccccaacacctgctagatgcccaggcggggcaggcccgaggtgtcgccggccctgggcttcccaagccagcccaggggcatc

SEQ ID NO: 50855 - DNA, 228 bp, Homo sapiens; identical to SEQ ID NO: 9459
  chr13:102068417-102068645
  hyper

SEQ ID NO: 50856 - DNA, 259 bp, Homo sapiens; identical to SEQ ID NO: 9460
  chr13:102068811-102069070
  hyper

SEQ ID NO: 50857 - DNA, 118 bp, Homo sapiens; identical to SEQ ID NO: 9461
  chr13:102568454-102568572
  hyper

SEQ ID NO: 50858 - DNA, 108 bp, Homo sapiens; identical to SEQ ID NO: 9462
  chr13:102568659-102568767
  hyper

SEQ ID NO: 50859 - DNA, 705 bp, Homo sapiens
  chr13:102569312-102570017
  hyper
gctcgtcgcaggaaccccggcgggggtcgccaccgccactcgcgctgccttctcgccctgcccggctcccgggcgggaggtagagccggccggcggctccccgggcgccggctggagggcgggtcccggcagggtctctgcgcgtccgtcggtccgggtcgcgctgggcaggactcagcgccgggctccagctgcccgcgggccggtgccgccgccggcgccgcccgctctcggcttctgccggtgattgtcaagtgctttggaaatcagcatctggagagaccaatcttctcccctgagatctctaatcaaacgctccgttcccaccccactacaccccctccacctatgtggtccccctcctgatgtacctcttcagaaagaaacaaaacgtataggtaataatgatttaaaaataataagaaagaaagctaagatggattgcagggatggggtgctaagaggccgagccaaagcaggtggaattgaaggaacatcggggcgctttttcttagatgcaactcgctggttcccgagccttccgcggcttggttggggcttctcggtcttaacgtggttaccggtgcactgaaactctcagcagcggttggagggcgaggtggtttccgccctccctgctaatccctccagcaccaacgcccccccgtcgccacccccaaccccgggttggagggaggagcctcc

SEQ ID NO: 50860 - DNA, 716 bp, Homo sapiens
  chr13:103046524-103047240
  hyper
cagaatcaccagcaacgccagctcccttccctttccttcagatgggtctcgggtccagagctggcgcccgctagcgggaggccagaccgggagggccaaggcagccacctgtggctttcccatccctcaggtccagcagtgcacatggggtgcccccgcgtcaacgccggaggagtgaccttgcaaacccgcgccccgcgggcggcagagccggccgctcactgcccggtccccggccaccacggaagagcgaagatctctgccagggcaggagccctagccccgacccgcgccccaagtctctcccgcgcggcggcttccggccgccatggtttccatagcaacaacagcacaagctgccgggtcccagagacgccctagggtcagaggtcatctccgtggcaacggaaacttcccgcgctacggcggctccaacgggccgcttccgccgcattgcgtagcgaagcccccggcgagccgaggctgggagcgcggtgatggccggtccccgtgagcagagggcagcggcggcgggaccggggactctgggccaatgggtaaagccaggaggaagcccgtgcctggcccgttgggctccctcctcctcagagccgaagcagtccacactcggaacccagcttcacccggattaccgaggggttccacgcctggaggcagagctgcagcgtgggcccgctcgcggctttgcagaaaac

SEQ ID NO: 50861 - DNA, 1189 bp, Homo sapiens
  chr13:103052308-103053497
  hyper
cttttagactgtctaacaactcgcagtttctcctttgctgcaggaatggtggccgcaaacggtctcagcctccgcacccaccgcctccgtccccgcccacccgcacctcctcctcctctgcctcgcgctgcacccgcaggcggcagacccctcggagcgcgccaccccagctacgttgcattggcaaggttcggaggctggagggcagcagccacttgctgccccagtcgctggggctctgggtgccagtgcggcccccggcagagcccagggcgtcagggaggccgtggagagccatgatctactgcaccgcagtgccagcgtcaggagcttccagagcccgggctgccactgcgggacggccgatctgcccgctccctccttcagacacaaccccagacaaaaacagccggccccgggtccctctccaccctgaacggagctaggggacgccacacactcccggctgccagcgtgagcggttccgggaaaggctgcgcccagcctcctcgccagcgccgccgccaccaccatgcagccctccagcctgcctcccctgggttgctcgcccacagctccgcggccgcccccaatcgcctcggactgagacgcggggacgggaacccctgggatccgactccccaaatcagatgcatttgcatttcttatgtaatgtactgcaagttcccttgttggagccctttggaatcggggcgcatgatcaccagtaggcttaaaagcaggaactcacggcctggctcatccccacccctggccctgtgggaccccgacgcagggctttgacaccgctttctaaagggggggacttcaattacaaatattagaggggctgggcttgtcctctcagtctggggttccctcccggcgcaagccttgctcaagtattcccggtggcaggatgtgtcagaggcagacagggggaatgagttaatgctcgggcacccggagctggacgggggagggacgcgggggctgacggaggagcggggccgcgagggagggggcctcttttactttggtaaaggtgatcgtggtggcgaatattgtgcaagctaatcagaaagtctagagcaggttctcggaacccagctacgtccctcgaacctgctgcagaagtaaggggagctcgcggttctttttcctggcaactaccgaagcttcagctgcc

SEQ ID NO: 50862 - DNA, 314 bp, Homo sapiens
  chr13:103054561-103054875
  hyper
agtgctcagtgggatcggtttgaacctgcagttctcaatcaccacgaagaaaagatgcaaatttaggtgccccctccccttgtcagtcttgtagtaggtagagagcgccacaaatccccttcctccttcctctcactcttccagtttccaacaaccgtgagcatgaggaaaatctcccctccggattcctcgcccagcctcggatgtgagttacaggcattagagggaggaggaggaggagttgaagtttgcattgaaaagactggctttccatgacgtagccacgtgctttcagacccgtcaccagtgagatg

SEQ ID NO: 50863 - DNA, 31 bp, Homo sapiens; identical to SEQ ID NO: 9467
  chr13:103258072-103258103
  hyper

SEQ ID NO: 50864 - DNA, 1643 bp, Homo sapiens
  chr13:103450907-103452550
  hyper
ccgggtccccatatttcgctcttctccgggctcagctgcctttctccgccggtctcggcgagtgctggaactgtcgccagaaagaagcaataaagtagcaaagtgccaaacatttacaagacggactctcgaaatgatccaccgataaatgaagaagtgtaagaggtggacagaagcagccgagccttcggcagggacccgccggccgatcgcagcagccaacgcgactgcaaaggttgccgcccggcgtgcagggcaggcgcgcgggtctccgcgaccccaggacaatcaaagcccgtgccccggcgcgcccaggtgagggtcccctggcgttctgctgtcccggccgagaaccgcgctgctcctctctctcaggacaatgatgaacttgagttgctcctgccactggagcatcatttgggagcgaatccgtctcaggttccagccaaggtgtagggcgaggggattggcccgtgcgtcgggccaggctcagtaacgccttctccaagtggatggcggggtggacacgcgtcccggcgccccgggctccctgggatatgtagttcgcgacaggacgagcggaaatactgccaggattttaccacctctcgcccatttatttacttctcggtcaccgctttcgggggacagataaacaccacagatgcccatcaaaggggcgcacgggtctggaggcgcagctcaggtttttgcgttggtcaccctgccctccgcacgtggagagggcaggcataaagcaccttgaaaggaaggtgctgtcaatgctatccgacgacctgtcgccgggcaccgcagcatcctcgctcgctccgatgggacgagggacgccggccccagggtaacaggaggcgcctcgccggccgcgcgctggatgctgtgatccaggtccggagccgggttccgccgcggccgcagcgacccgaccccacccgacaggccagaggtaccccggggcggggggcaggggccgaggtggcggccggctgtgcgctctgagcgcctggccctccgctgggcacctgggcgccgccagcccggcctgctgccgctctacgcgcagccacctgggcattcaaaatttttacttaattcgataccggcctgggctgccaggggtcatcgcctctccgagccccgtggcgtccagatggaggccactgcatgggtgcgcgctctcccgggaaggagtagggggaagagctgtgtcgcggggggaagagaagcgccagggaaagaagggcctagccctctggtgaacaaagctcgattaggaggtgtccatgtggataccggtgacccctgtgcggccgtcggtctccacgccacgctgggcagggtccgggaaccagcgcgcagcggccgtcgccttcccctgcacgccagcacccgggtctgggccgccgccaggagtcacgggctcaccgccctggtcagcttggcagtcggacccggagccgcctcctctgcctgcctccctcttgccagctgccccgaaaacccagaagagccggtggctccgagccaaggcgggcctggttcggcgccaggaaagggggtttctttcctattttcttttgtgcaattgtcattattaatgataccgactcgtttactcaaacagt

SEQ ID NO: 50865 - DNA, 326 bp, Homo sapiens
  chr13:103452750-103453076
  hyper
cggcccttgggctctgcgggctggggactcggggtgcccgcgacacgcgcggaggcgcgggctgggttggccacgggcagggagcgcagccgcgctccttcctctctgcccgcgtcgcctccgcgcgcactggttctgcgcggcggggcttggcctgcgcgactgtctactccgtcccggcggcctcggagcccggccgagcggcgagcttgtcagaggacggtggtggaaacgctcccggcctccccaggggcgcgggctggaggctggcgccaggcgcggaggactcccggtatcttttgacaggctggcgcctcggctctggg

SEQ ID NO: 50866 - DNA, 30 bp, Homo sapiens; identical to SEQ ID NO: 9470
  chr13:103454353-103454383
  hyper

SEQ ID NO: 50867 - DNA, 30 bp, Homo sapiens
  chr13:104332948-104332978
  hyper
cacactaaaccagctcgtgtttggggcatt

SEQ ID NO: 50868 - DNA, 291 bp, Homo sapiens
  chr13:107001523-107001814
  hyper
ttgcagggatggcccgacactccccgcagagcctgagagcgagtggcgagccaagataccagcggcacaatgtttcacctgcgctgccagatactcagacagagaaaacacacgacagtttgtcaaaacagccatcagcgcggcgcgctcgttttttcccgcagcccccggtcctggctgccaatgtacacggccaggtttatctaagggctggagagctcctctcttaaattcccggcgaggtggggatgatgtggcacaggaagggaccgggagcgctccccggggagc

SEQ ID NO: 50869 - DNA, 194 bp, Homo sapiens
  chr13:107185496-107185690
  hyper
gtggctggagcaggcggcctgggggaggggcgaggcctggcgctgcgcgattccgcatggaagagtgacctctggaggcaccgggcgggcagcggcgccgcgggctccccgcgaccgcctcgcccgcccgcccgcctctcccggactccgggacccgctgctgcgcgaggtcctagcccggctccttccggcac

SEQ ID NO: 50870 - DNA, 2699 bp, Homo sapiens; identical to SEQ ID NO: 9472
  chr13:107186447-107189146
  hyper

SEQ ID NO: 50871 - DNA, 30 bp, Homo sapiens; identical to SEQ ID NO: 9473
  chr13:107220221-107220251
  hyper

SEQ ID NO: 50872 - DNA, 30 bp, Homo sapiens
  chr13:107570017-107570047
  hyper
ggggagaccttgggcgaggcctccaggcgg

SEQ ID NO: 50873 - DNA, 30 bp, Homo sapiens
  chr13:107570496-107570526
  hyper
cttcattcctcagccggtggggagccgagg

SEQ ID NO: 50874 - DNA, 220 bp, Homo sapiens
  chr13:108518133-108518353
  hyper
agtcctggtaagcctcgacgcactgcctgcaagtggtcatctcgccgccttccttgagcaccacatccagactgcagttcaaagtgttgggactggacaaccccgagaacaactcccaaagtgtgtaggaattacaaaacgaaaggtaaaaatccgacaagttccagagcggagtgggatgcttgctcctcacctcctgcccgtcccccccggccgcccc

SEQ ID NO: 50875 - DNA, 256 bp, Homo sapiens; identical to SEQ ID NO: 9475
  chr13:108518444-108518700
  hyper

SEQ ID NO: 50876 - DNA, 1037 bp, Homo sapiens
  chr13:108518708-108519745
  hyper
tgctgccgctgctgctgctggtgctccttgtcccgggcccgggtcagcttggcctcggcgcagaaccacaagtgatcagagagcaggactgtgaaaaacaagagagatgccagagacagtcgccatttctgagccctctcggaatcgatgaacggtttctcgttctctcggggtgctgccaaccagatttttaagccgtcgtcatactgccgacacatccaagcacccctggtcatattttgggaacgcacagccctggccgactccaccgtgagggcgcctgtgccggtgtcaccacaatatgcattgacttaaagggtttaatttccttatcccctcctcccgtttcttctctctcctctctctctttctctctcttcccctctccctctctcctctctctctctctccctctccctctcttttatctctctctgtctcttttgcctacataaatattaccaggctttgaaggaaggtctgacttgcttcctaatcatcagccgaccccatcctctgtagagtgggaaacaataatggagagagagagagagagagagacggaggaggctggtgctggtggccggcggcgaggctgggtgcagggggcgatggtggaggtgacagggtggctggcgcggctccggtcacccaggcattgtcagcgcgcgggtccccatggccccgcggagcccagcccgctctcccctgccaggggcatgccgcgcctccgctgcccactgacggcgcccggagcgcctcccctcctcctcctcctcctcctcttcttctcctcctcttcctcctccttcctttccttctccttcttcttctcctccgcctcccgctcctgctccgcgctggctctcccagagtccggagcctgggctgcctccggcggggcgctccctcccccccaccccccaccccgcgctctaagtgctgccgccgccgccgccgccgccgccgctgccgcagggccgcccgcgggcgccgccgccggggctccgactgctgacgccgcctcccgcggagct

SEQ ID NO: 50877 - DNA, 195 bp, Homo sapiens; identical to SEQ ID NO: 9478
  chr13:108519901-108520096
  hyper

SEQ ID NO: 50878 - DNA, 225 bp, Homo sapiens; identical to SEQ ID NO: 9479
  chr13:108520309-108520534
  hyper

SEQ ID NO: 50879 - DNA, 124 bp, Homo sapiens
  chr13:108520701-108520825
  hyper
cgagctgggtgcctgcgagtcgccgccgcagtctgagcctctggtgccccttagcgttggctctcggagttctgagaagggaaaggagacagacactctgggaaaatctggggtcacctcgatt

SEQ ID NO: 50880 - DNA, 168 bp, Homo sapiens
  chr13:108520915-108521083
  hyper
cgggagcagcaggtggcgtgggtgccagacgctgccggtgcgcaccgagtgcagcgctgccccggctcgccccgggggtcgcgtgggacagcggtttgcggtgtcgccctctctgcggtgctttccaaggaccctcatgccccgcccgggtgcacattcaccacatgg

SEQ ID NO: 50881 - DNA, 85 bp, Homo sapiens
  chr13:108868006-108868091
  hyper
tggggctgcggaggcgggacctgcaggatcctggttagggtcttgagtacacacggctcctattggcctcggcagcagatgctct

SEQ ID NO: 50882 - DNA, 30 bp, Homo sapiens
  chr13:108871152-108871182
  hyper
cttcccctgggggtcgtgcgggggccgagc

SEQ ID NO: 50883 - DNA, 84 bp, Homo sapiens; identical to SEQ ID NO: 9482
  chr13:109147713-109147797
  hyper

SEQ ID NO: 50884 - DNA, 124 bp, Homo sapiens; identical to SEQ ID NO: 9483
  chr13:109148154-109148278
  hyper

SEQ ID NO: 50885 - DNA, 168 bp, Homo sapiens
  chr13:109148477-109148645
  hyper
cgtggagaggaggcttgtcggtcccttcctgggaaaggaatcgcggggacttcccaaccgctaggacgcgtaagccgaggctgggagtagaagccttctgaactctggacctaccccagaaggagggggcgaaactggccatttcgagggacgcggaagccccgttgc

SEQ ID NO: 50886 - DNA, 301 bp, Homo sapiens; identical to SEQ ID NO: 9485
  chr13:109148885-109149186
  hyper

SEQ ID NO: 50887 - DNA, 2107 bp, Homo sapiens; identical to SEQ ID NO: 9486
  chr13:110434418-110436525
  hyper

SEQ ID NO: 50888 - DNA, 16 bp, Homo sapiens
  chr13:110438287-110438303
  hyper
cgcaggtagccgcact

SEQ ID NO: 50889 - DNA, 31 bp, Homo sapiens
  chr13:110439117-110439148
  hyper
cctttctccccgggccgcgtttcccgccgtc

SEQ ID NO: 50890 - DNA, 30 bp, Homo sapiens
  chr13:110790389-110790419
  hyper
cccaagcagcaagtcgtggggaaatgtgaa

SEQ ID NO: 50891 - DNA, 30 bp, Homo sapiens
  chr13:110790922-110790952
  hyper
cgcacccggaagcccgttacccaaaggcaa

SEQ ID NO: 50892 - DNA, 243 bp, Homo sapiens
  chr13:110958810-110959053
  hyper
gtctccagacaaggagaaatacgcccaaagctgctcccaggggctaggagctcggagctcccagtgtgggtctctgagcagcgcggggtgggcgctcccggccctccagcccccaactccctcgcgcacccgggacgggtgaaggcgcccagctgccgagcatacccgcgacgcgggttcaaatcccgccggctcccaggcaccctcaccccgccacagcgcgggctgtttctcctcccttcc

SEQ ID NO: 50893 - DNA, 131 bp, Homo sapiens; identical to SEQ ID NO: 9488
  chr13:110959517-110959648
  hyper

SEQ ID NO: 50894 - DNA, 390 bp, Homo sapiens; identical to SEQ ID NO: 9489
  chr13:110959752-110960142
  hyper

SEQ ID NO: 50895 - DNA, 840 bp, Homo sapiens
  chr13:110960344-110961184
  hyper
cggtgtaactctcggggactgacaagccgggcccgcacgttcacgtctctcttcctccctttcccatgcaggtggctgctgctggggacagtgaccgtggggttcctcgcccagagcgtcttggcggtaagtcctggctcccgcgcttggacttgcgcgcccgagagtggttgggacgtttgagtggccttggagaaggcagctcgtccgtgcgctcccgagtgtgtgtgtgcgtgtggatgttcgccaggctgcccaccaaggttctgagaaagcttgctcttccctcatcatgctttccacctttccttccccttgggttcccagcgtcaatcctgtgttttgcaagcgtcggcctttcacgggaactgggaacttaaaatgtagcctgaggcaccgttttcgttgctttgggcaaagctgcagccgtagaggccaggaaagtgtgtcagtcactaggcagtgagacgccaggcttagggcgaaaaaagttttcctggaactcgggagctggtggggagtctctgtcacggactgagggttttttgtgtttttaaatgggagtctctgggtaaaggggcggggcgaggaggcgaacgagacaaccttagtattgtttgaattgaagcattgcgagggaacaatggcagaaaaaccgcgttttctcccaagtcctgttccggccctggaagagctgctccgggcgccacactgggatcctgttcgccgagcctgcccctccacgccggccgtgcacagccctgccgataccgtgggtgcagctggcgactgcactgcgaggctttgtccattttatacgttttgtttaaagagtaggag

SEQ ID NO: 50896 - DNA, 31 bp, Homo sapiens; identical to SEQ ID NO: 9491
  chr13:111158610-111158641
  hyper

SEQ ID NO: 50897 - DNA, 829 bp, Homo sapiens
  chr13:111213551-111214380
  hyper
gacgagtgggaaaccccgagaaggaggcatttgctgtccgaggccgggaccctgtgcgcggccgggtgccctgctggaagccccgcgccccccgtccccggcggagccccagggcggtgtggctcatgcggcgccggcctcacctgcggtgtcccagatggagatgttgtaggagcgccactgcttcaggtagaaggcgccgcccaccgtgctgaccgtgtccgggaagcgccgctccatataccgctgcagcagcgacgtcttccccacgttcatgtcccccaggagcacgatcttgctgtcgggcttcctcatcttcccgtaagaacccccagcgcccccgcgccctctccccgaggctggccggctcgtgcgccctgggcgcagctggaggagcggaccccggactcgccgggacccggattctcgtgaacgctccgggaccttcgcctccggacgcccgggagctcaagagaggaagcgcgtgtgcgcgcccgggaaggagctgggtgcagagcacggagcccacgtcgggggcccggaccgcggcggcctcgcctcgccccgcccccgcccccgcccccgggccctttcaccgccgcggccccgccctatcctcctccgcccaccgcccccgtcccgcccctgctggacctcgccgtttcgcaagcatccgagttctccagccgaggctcgggactgctgcagggtggaaaatgaaagttctgagagcaccttccgcccctccgcttctgcacagccggggctgcggtgcgaggagcttggccgcggggcccgaacgaggcgaaggggccggggcccttgggga

SEQ ID NO: 50898 - DNA, 172 bp, Homo sapiens; identical to SEQ ID NO: 9494
  chr13:111268136-111268308
  hyper

SEQ ID NO: 50899 - DNA, 30 bp, Homo sapiens
  chr13:111268687-111268717
  hyper
gggactggatattgcgacgcctgggccgca

SEQ ID NO: 50900 - DNA, 31 bp, Homo sapiens; identical to SEQ ID NO: 9495
  chr13:111305635-111305666
  hyper

SEQ ID NO: 50901 - DNA, 151 bp, Homo sapiens
  chr13:111358788-111358939
  hyper
ctgtgtccgccgcgcgggaggagcgtttacagtgcaagcttctgttgccgggccctggcctgttagcgaagcacgtgtgcatcccagcacagcccacgtcagcacgctaatacacagtgtccaccccagaacacacgtcagcaccccaata

SEQ ID NO: 50902 - DNA, 30 bp, Homo sapiens; identical to SEQ ID NO: 9497
  chr13:111364909-111364939
  hyper

SEQ ID NO: 50903 - DNA, 108 bp, Homo sapiens
  chr13:111527013-111527121
  hyper
atcccaaccacggcctcgccccaaccttggctgcggttccccaagcagagccgcgccagaaccgcccggctcacccccctctccccgcccctgcgcctctctcccggt

SEQ ID NO: 50904 - DNA, 328 bp, Homo sapiens
  chr13:111767017-111767345
  hyper
ccccacttcaggccacgccgtttccttgaccttcccccggcagggtctgaagcgtcaccgtccgtctagagcagagtcgcgcaggcccctgccctgccggtgaggtcggcgccgcgctccggagagtcggttcctcccgattcagacccatatggcttcagatggaaccatcatttctgttccgtcatgaccggcttgcaaggtagcaaagcgaaacaaacgtctcgttttcagcctgtccccgccaccttgaaataaaaccggcaaaaataaaaagagcattctgggaagtacttcatcatttcaacgctcacgaattcaaaacata

SEQ ID NO: 50905 - DNA, 398 bp, Homo sapiens
  chr13:111767587-111767985
  hyper
tctttcttctcctggcggtgatgtcattgggcgacggcggccgaggccggggggcggcggcgggcgcccgcaggttcccgagccgctcctgagaaggcgcctgacagcgggccggggcgcacggagaagcgggccgggccggacctgctgggccgcgccgagccaatcgccggcgccggccgctcgatgggcgaggcggcggcggcggcggcgggggccgcgggccgggccgccgctccgaggtgaaggcgcgcgcccctccccgcctgcctcccgggccgcagcgatgaattccgccgagcaaaccgttacgtggctcatcactctgggggtgctggagtcgcccaaaaaaaccatctcggacccggagggctttctgcaggcgtcgctgaaggatg

SEQ ID NO: 50906 - DNA, 30 bp, Homo sapiens
  chr13:111768459-111768489
  hyper
cgttgcgtgagtttcgcctcccaggttaat

SEQ ID NO: 50907 - DNA, 30 bp, Homo sapiens
  chr13:111806515-111806545
  hyper
gaggtggcggcgcgcgggccacccccaggg

SEQ ID NO: 50908 - DNA, 32 bp, Homo sapiens
  chr13:112707799-112707831
  hyper
caccccgcagccacgcgcgggcgtaaatcgtt

SEQ ID NO: 50909 - DNA, 170 bp, Homo sapiens
  chr13:112708307-112708477
  hyper
cgcaggacagcctcgctgcccggggccgagttcggtggacaagggggcagcgcccacagcaagccggaaagagggaggcgcggggccgcgcttggggcctgccgctgcacgccagcctgggcaaagagctgccaccttctgcgggcgaagcgggtcgggacgcaggacgg

SEQ ID NO: 50910 - DNA, 30 bp, Homo sapiens
  chr13:112709241-112709271
  hyper
cctttgggggaaagcgaggctgctaggaag

SEQ ID NO: 50911 - DNA, 30 bp, Homo sapiens; identical to SEQ ID NO: 9498
  chr13:112710413-112710443
  hyper

SEQ ID NO: 50912 - DNA, 30 bp, Homo sapiens; identical to SEQ ID NO: 9499
  chr13:112710808-112710838
  hyper

SEQ ID NO: 50913 - DNA, 1061 bp, Homo sapiens
  chr13:112711800-112712861
  hyper
cgagaactaaatccgcgggctgaaattacgttttaaaaattaacatgttgaagcgtgtgccatttagtgagaggtgttttgggcaaagaatcaatttaactgtgactgaccgacgggcttgactgtattaattctgctaccgaaaaaaaaaaaaaaaaaaaagcaatgagccgcaagccttggactcgcagagctgccggtgcccgtccgagagccccaccagcgcggctcacgcctcagtctcgccgccccaaggtgggatccgacgcccaaaggagggcgccccaaggtgggatccgagcgggccgccctaggaggagtgaaccccgcccgggcgcacagctccgtgcgcctgtcctccctcctccagcgaaatcacacccgctttgcctcctcttgcagcaccgcgcgtgcctaggttctcggtctgcgcagctgggagtctcccccaccagcgccgcggagccgcccgcttccgctccctctttccgcgggtttgagcctcccgtggagaggaaaggtcacgaagtttcaaaggtgaaatggattttcggcggtggctggtgcgggagtcaatgggcagggcggggcaagcctggcagtcatcgacccgagcagggacccggctggccgcctccccttgcaggaaacaggtgtttgaacgcgatagcggccgccagtcaactaaggcattaaaagctcgctttataacatcgatttcctggagtgcggtggggcctgcgttctggaagctcgtttgtgaaaggcggggttgggggaattgccctgatggtaccccagttggcgcagaagatccccaaaagtccctgtcaccgcagcggcggacagcggggctgcccaggcggctgggagggcagcttttccctcccgctggggtggaaagaggagtcctgctccgttccccacccaggacaatggtcttgttaccccggcctcctcccctgcacctagggcctggcatgcagagagcgcccgcagcagagggggaagtctccaacaactggcaggtgtcccccgaggagctccgcttgatttggaag

SEQ ID NO: 50914 - DNA, 30 bp, Homo sapiens
  chr13:112714009-112714039
  hyper
gtgcagggcactggcgctgcgttaaagccc

SEQ ID NO: 50915 - DNA, 335 bp, Homo sapiens
  chr13:112715383-112715718
  hyper
ggcgtgcacccgccacgcgaagccagaggttggacgacgcagccggccaggcgcggctcccgggggaccccgaaaccgcctgtggctcaggccctacttggcaagaagagactggggagtgagaggaggggtcactcttgctctctcgcacaatagacttcccgcaggcgagtgcgaacggccttttgcttcctccttcttttccaggacccttagcgacaggagaggaagagaagcggcccggcggtttaattgccaatttcctgatgcagccacagggcccagcagcggctcagcctaggccaccgggtccaggcctctaggcaataggcccg

SEQ ID NO: 50916 - DNA, 510 bp, Homo sapiens
  chr13:112715803-112716313
  hyper
cgccgggcgctcggcgcatccgccgtgcccacagcgctgaggaccaactagggctgccctcggccaggggcactgtgcccgtttgagtggcactcggacctggcgaggggtggaagcccaggtagagctcgcgtctttaagagccacccgacagaactgcgcgctacatctgcgccagctgggctgggtgggaacagcgcagaaatactcccgtgccggggcgtacagggcaggtaggcccagcagagagtcttctcggaaagtttcccacaaaagaagggccgggcaggccgagcggcaggaaaagccggtgctcagcggcgaggcccgagaggtctggcatccggcggcctcccagctttgctcgggtctcccgccgcctctctccagagccgcccgtagctccgtggggcggagggcgcaatgccccgctctggttccagcctttttcctccccttgtctcctctttcattcataaacctggtggctacagacgcagcttgaatatt

SEQ ID NO: 50917 - DNA, 120 bp, Homo sapiens
  chr13:112716691-112716811
  hyper
tcgattgtgaatgtgcggctctccacacgaaccgcccgaaagaaagcctgggtcgcttttgaggagaaggagtttcttgacccttccccgcaaacgctactggaacggcctccaaactag

SEQ ID NO: 50918 - DNA, 102 bp, Homo sapiens
  chr13:112717140-112717242
  hyper
gccatcacccgaacgcgcgctccaggccctcgaacaaggcctctggctgccagagcgagtgaggggcgcagaggcggcagagagcggagagccccggtgtct

SEQ ID NO: 50919 - DNA, 654 bp, Homo sapiens
  chr13:112717322-112717976
  hyper
cgggccggagccgtgcagccgggcccgctgcctctttgcccctcatggctccgcgcgggaggaaaccgggccttctccgcccgccctcctctcgctgcggtgtccccagcacccccgccccgcccccgcgcggtccccaccgtcgcgctcccctccctcctcgccctcgctccgcgcctcctgttggcagagatggcctcgaaggcctcttccaatttgaatggctctttcttcttctctctcccgcgctttcttttccgccttctcctcctctccttctgactactcttgtctctttcaaaagctccgcctggaaactagcggcttcctcttcatctgcctcctttaactgtggcctcggccctctggggcgacaccagagcgcggaagcctgagcccctcggagatccggggaggcacctacacatggcctcaatcctccaaccggccccagaagccgtaggagctgaacccaggagggcaaccggttgtggtgcggccacatgtccctggagagtgtcagcaagacgggtcgacttcaccaggaccacgaaagacagggcagagtttctgtcttctttcactgtcccgtagaactcctagcttgtccatcgtgctccttgcttgggactcgggactgacactgggccagaa

SEQ ID NO: 50920 - DNA, 906 bp, Homo sapiens
  chr13:112720120-112721026
  hyper
gccttactctttccacgagccaggcctttcctttgcatgacgcagaccggcggctgagacccgtcctgaggccccgcctttcattcggtttatgtggccccgcgcagttcacgcagttttctccgttcttaggcaaccagctcgtgggaaattcactccagaaaagcgtgcgccatatcattattttgcgattcaacaaactttttcaactgttgttcaggaactagattccagatagatcttgttgtgttcggccttcctagaaattccttttccagaggaagaagatccgggttgggaagagtgcgtgactatggccccgggctcattgaaagactcctccccacaaaagtttagggctgatactaaacgaagctatggagccatgcccacacaaatactccccctttacccgaattgtggggcctggactgtgaaggccttcgctgcaagagcgggcactggcgaacttcagtgcacgccgcggccgagaacggatgcagggcgggggatggctgagccgcctgatccttgcagagaacctgcaggggccctcggagggtatcccctgcgtccaagggagcgcccctccttttcagcactcgggggaactgagggcgacgtgccagccccgcactcaactttccccttccctgcaggcacagagttggccggcgggggcagaggaggagctgggtctccactgcgcccgtttaaacctggccaggggctgcgtttcctccccccaccccacgacgatcctttcttagtcttcgcttttcaacccaatcgttaatcattcggaacgcgcgggcggggagcggcgaggagggcgagctcggggttcgccgccgccgccgccgccgcgcgcgcgcgctcaggaagcggtgtggctgtcaccccctc

SEQ ID NO: 50921 - DNA, 92 bp, Homo sapiens
  chr13:112722128-112722220
  hyper
cggcccatgaacgccttcatggtgtggtcccgcgggcagcggcgcaagatggcccaggagaaccccaagatgcacaactcggagatcagcaa

SEQ ID NO: 50922 - DNA, 128 bp, Homo sapiens
  chr13:112722274-112722402
  hyper
cgacgaggccaagcggctgcgcgcgctgcacatgaaggagcacccggattacaagtaccggccgcgccgcaagaccaagacgctgctcaagaaggacaagtactcgctggccggcgggctcctggcgg

SEQ ID NO: 50923 - DNA, 30 bp, Homo sapiens
  chr13:112724439-112724469
  hyper
tcgctgaaccaaaacgtactgcagccgagc

SEQ ID NO: 50924 - DNA, 261 bp, Homo sapiens
  chr13:112726467-112726728
  hyper
cagatttctgtctccggaaaattccagttaattcaagaaacccatccccggacgtgtgcccgcccccccccgaaggctcgcttcaggccagcccggactccagcgccccctcgaccccgtcgggctccggccgactcccgccccctccccacccacgctcggcctgggcccgggggcagcggctccagaggcgtcggcggcagaatttaacccccggtctgagtccttggaaacttcaagtgaaaagcagacttggccttg

SEQ ID NO: 50925 - DNA, 379 bp, Homo sapiens
  chr13:112726796-112727175
  hyper
cggggtgcgggcccccagtatccggcggggtggggcggcgtcaggacggagcgagggccggcgggggggctcgcgtggaggcccaggccgggaggtggggacgcagggacccctcacccagtcctctgctcccgcccgagccaggcctcgggatcacctccccttgcctgagggcgagctctcctcctccctcttcctccccgcctcccccgttcttccctccctctctccctcctccctccccggcccttcctctccagctgcgcgcccgccgggaccacgctcctcccgcccccgggagccgagcggcgtctgcggctggtccggacgtgtcccctccgggcgggggtggccgggcctcctcggggcctcgggcctc

SEQ ID NO: 50926 - DNA, 41 bp, Homo sapiens
  chr13:112727837-112727878
  hyper
cgaagggagggggaggggaggccgggtaccggccgggtccg

SEQ ID NO: 50927 - DNA, 239 bp, Homo sapiens
  chr13:112727961-112728200
  hyper
cgcaccagcgacccgggcgcggactggggcctgcagggcgtgactggctgccccccaggactccatctccttcataaacacctgccttttccattccccggggccgcttcggctgctcctctggagggaagactggggagaaggttgcctgcgctctctgccccagaggctctgttttagaaactgtttcttaatttccataagaaacaaaaaaatcacaggaaggcctggttcctctc

SEQ ID NO: 50928 - DNA, 89 bp, Homo sapiens
  chr13:112728335-112728424
  hyper
cgctttctccacccgggcagagctgcggctcccgggcgttgcgcgtggcgtttttcatcacggagggaaagccgcggctccgcgggaaa

SEQ ID NO: 50929 - DNA, 30 bp, Homo sapiens
  chr13:112728784-112728814
  hyper
gggtgacatgggggcgctgtgatggaaaat

SEQ ID NO: 50930 - DNA, 265 bp, Homo sapiens
  chr13:112758107-112758372
  hyper
tcccctcccctctgccgtgtttcctgaatccgtacgctatgcaggaggggggcgggggcgggggcgcggggaggaggagggggccgtttgccattaatctgggaacaagcggctaacctcggtgactggtattttcgcttttcttttctcacttttctcagtgtggggaaagcagtcaagcccgcgcggagcgattgtgaggggctctgctggaatttggcagcgcggaggcttggagagaagccccatgctggctcccattcag

SEQ ID NO: 50931 - DNA, 119 bp, Homo sapiens; identical to SEQ ID NO: 9508
  chr13:112758495-112758614
  hyper

SEQ ID NO: 50932 - DNA, 460 bp, Homo sapiens
  chr13:112759320-112759780
  hyper
ggggcggggagcgctcgggcagccaccctgtccccgtctggagccccgcgctgcgtctaggagggcgcaacacgcagtccccgcgggggccagagctcggagccccctagtgcatgccccctctcctcgcgccctgccgaggcctcggccctgcctgccgtgccctgggcctggttgtgcccgggggtccccgcgggcagggcgcggggcaggcagggcgcgcgcgccgacgctcttttgtctgataactaatttgagttaatgcgatctttatgtaaagctaacagcggataattgtctattttctcgccaacagtctccatcacaatcacttatctggaaacctgcggttggattaatcgttatattcccgagatgagcgtcgctgcaatccgcagcgaacgcgggtagggacctggagacgcctcccgggcgctggcggggccggtgtgggccagct

SEQ ID NO: 50933 - DNA, 498 bp, Homo sapiens
  chr13:112760006-112760504
  hyper
cggggcctgggggggcccaggcgccggaggagccgtcggtgccggaatgcagcgtgtttcacttgggagaaacgttgccctcggtcccttgcctccctcctgttgtctcggtttttctggcttcgtccttcgtcccacccacccgttcccacctcaggtccctcccccaggatcccctccttaaggatccaggtctctgaaaattattggcaacagttacacgccccacgattgaaatccacaagagaagagtcccagttctgcaggccgctccagggctaggggtagagatggtggcaggtggtgcgtcaactctctagggaagaggaacttgcattacaaagacttgtctttctgagctgaagtcaaaacgggggcgtcaagcgcgctccgtttggcggcggtggaggggccgcgcgcccgcgctgtcccagccggagctgccctggctggtgattggaggtttaacgtccggaattcaggcgcttctgcagctca

SEQ ID NO: 50934 - DNA, 410 bp, Homo sapiens; identical to SEQ ID NO: 9512
  chr13:112760789-112761199
  hyper

SEQ ID NO: 50935 - DNA, 30 bp, Homo sapiens
  chr13:113261126-113261156
  hyper
tcccagtgccagagacgactccgagcgaga

SEQ ID NO: 50936 - DNA, 255 bp, Homo sapiens
  chr13:113547076-113547331
  hyper
ggtctctgcagggtttctgcacgctggggagggcaggttccccagtggagccactccctgcgggtctgagtggggcccggggtctctgcacggtcaccgatgctgctgctgctccagggagcgggcttgcaggagcaaggatccagtccctgaacgcacgtgctccccccgggagaaattctgcagccaggcttggtccacgcaccgtcctcccggcccacacaccctcctcccggacctcagtctgtctctgtg

SEQ ID NO: 50937 - DNA, 31 bp, Homo sapiens; identical to SEQ ID NO: 9514
  chr13:113548353-113548384
  hyper

SEQ ID NO: 50938 - DNA, 31 bp, Homo sapiens; identical to SEQ ID NO: 9515
  chr13:113548669-113548700
  hyper

SEQ ID NO: 50939 - DNA, 293 bp, Homo sapiens
  chr13:113597574-113597867
  hyper
cgcctgtgctgagtcccgacgctgtgcgccccactcccgaggctgtggttggggggtcgcggtcgagctctagggcccccggccgcagagcccaggcgcggggagggcggcggctcccagctcccggtccccggctccgcgccgcaggcgtgaacgcccaacggagggcgccggcgcccgggagaggcgccgccttggttgcaggggccggggcgcggcggcccgggctttgagagacgggccgctcttcccggcgcggtgccttccagggaggctgcgcctgcagcaccgca

SEQ ID NO: 50940 - DNA, 1128 bp, Homo sapiens; identical to SEQ ID NO: 9517
  chr13:113622875-113624003
  hyper

SEQ ID NO: 50941 - DNA, 88 bp, Homo sapiens
  chr13:113683949-113684037
  hyper
accctcttcccaaggtgggggcggggctgccctctgctggagacgcggagcattgcggctcggtcccgggacatccctgggagaccaa

SEQ ID NO: 50942 - DNA, 229 bp, Homo sapiens
  chr13:113807778-113808007
  hyper
cgaggctcacagactgcgctgaccccagcaggcacagctgggtccagggactcgggaactcgcagcctgacgcgggccggacccccggggtgggtgctgagggcctcggatgccctccctggctggacgttgtggctgtgctgatactgagcggtaaccctaggaaggagagtcccctgggctcagctacccgggacaaggtcaacagggacaccggccccagttccag

SEQ ID NO: 50943 - DNA, 193 bp, Homo sapiens
  chr13:113862928-113863121
  hyper
ttaatggtaatgtgcgccatgggagcgccgccgaacggagagcgccaccccctacgcctcaagcgggccagctggcgtcacttccggccctcggtccgtctgggtcctggcgcccccggccccgccgcgggtgcgcaggttggttccggagggagaacctggggaccggctcggcgacgcgctcgggctgagg

SEQ ID NO: 50944 - DNA, 30 bp, Homo sapiens; identical to SEQ ID NO: 9519
  chr13:113864394-113864424
  hyper

SEQ ID NO: 50945 - DNA, 88 bp, Homo sapiens; identical to SEQ ID NO: 9520
  chr13:113951224-113951312
  hyper

SEQ ID NO: 50946 - DNA, 77 bp, Homo sapiens; identical to SEQ ID NO: 9521
  chr13:114017867-114017944
  hyper

SEQ ID NO: 50947 - DNA, 477 bp, Homo sapiens
  chr13:114017991-114018468
  hyper
cgctccgggagcccggactttgcccggcccgtcccagcccaacccacctgcgccctcgggacccacctgcgcccccgggacccacctgtccggctcctggggacgcccccgccctgcagcagccgggaccatttgatcgccctgcgggtgagcgtgaccaggtagctggagaaaaacttctcgtaggcggcgtcgtcgaagtcctcaggccgctcgaatccgtacgggtcgatcctgcaaaaccgagagaaggaggccggcgtccccgaagtttcctctggggggtcgcgggcccgcgcggggaccgcagccgccggggacgcccgcaccccgcgccacacacctggggacccgcgagcgctcggcgggctgcatgcggggagggaggcgcgcaccgagcgaggccagcgggtcccaagttcgcctcccggctccggggcgcttaagtccttccggcgggaccgcgggcgcgtgggg

SEQ ID NO: 50948 - DNA, 31 bp, Homo sapiens; identical to SEQ ID NO: 9523
  chr13:114048391-114048422
  hyper

SEQ ID NO: 50949 - DNA, 31 bp, Homo sapiens
  chr13:114238865-114238896
  hyper
cccgctctcccagggcgcgcagcactggcgg

SEQ ID NO: 50950 - DNA, 755 bp, Homo sapiens
  chr13:114285597-114286352
  hyper
aaacttgaccgttagcgccttgtgtgcggtttgggggtcacgctctgccctgtcctgttcttgcttgcttgggtcgtccgaagtttcttgttgcttttgtctaattggagaagatgcctgtgactgacaagaggaagatgagccacattcagaaccggtggggtgatgccgtcaccgtgacaaaagcgtccaccgctggacgtttttcctgctccgtcatggctgctcactgtggttaaggaaattcagcagtggctgcggatagcgaacagatggtgggcatggcaccctcgccgtgtgggaggggactgactgtctgaattgtctttttcgactgtaggtaattggtacgcctcagagaccggcagcgtcaaacaccctggtggtaggaagcccacacacccccagcactcactttgcctctcagaaccagccttccgactcctcaccttggtctgccgggtgagcacttccctctggacccttagagttgtaggactgcttgcggttcgcacctccacgttctcctgggccacgtgtgtcacacagtcgtgcgatggggctcccacgcgcgttgacgccagcctccgaatcacactcacccatcatcgtggcctgcacaggtgtgcagccgaggcgcactgcctcggtcatggagaagtcgggctgggcaccgcccaccccgctttgtgtctggtgtagtgggtgctctctgaagggctggcagctcttggccaagacggggagaagctggc

SEQ ID NO: 50951 - DNA, 301 bp, Homo sapiens; identical to SEQ ID NO: 9525
  chr13:114565969-114566270
  hyper

SEQ ID NO: 50952 - DNA, 79 bp, Homo sapiens; identical to SEQ ID NO: 9526
  chr13:114566409-114566488
  hyper

SEQ ID NO: 50953 - DNA, 139 bp, Homo sapiens
  chr13:114566903-114567042
  hyper
ggacgcgcggtcagagcgcccgggaggccgaggcgagccgcgggcgccgcggggcggaggctccggtcatcccgtcctggcggccctgaaggtcacatcgcggcggcggcggcggcggcggctgcggcacctcaagcgc

SEQ ID NO: 50954 - DNA, 230 bp, Homo sapiens
  chr13:114776259-114776489
  hyper
tggggaggagggggccgcgaggggagtagggggctgcgtgacgaggagcctccagcaccgcaacgcccaggaggcgccaggttaggccatctgcctggcctgttcagccgcttcccacacctgacaggtcagatgctgctcctgccacggggccggcgacgagccacaggctcccgaaaaaggcaaggggttcactttaggaggggagaggtgagcgggacggggacgct

SEQ ID NO: 50955 - DNA, 30 bp, Homo sapiens; identical to SEQ ID NO: 9528
  chr13:114776875-114776905
  hyper

SEQ ID NO: 50956 - DNA, 31 bp, Homo sapiens
  chr13:114976825-114976856
  hyper
ctttctcaagtgcctgcggagtctggtttga

SEQ ID NO: 50957 - DNA, 30 bp, Homo sapiens
  chr13:115046752-115046782
  hyper
cccggctttcatggcgccccggccacggag

SEQ ID NO: 50958 - DNA, 30 bp, Homo sapiens
  chr13:115079952-115079982
  hyper
ccgtcccgcgggagcgcgcacgctcgcgca

SEQ ID NO: 50959 - DNA, 31 bp, Homo sapiens; identical to SEQ ID NO: 9529
  chr14:19403466-19403497
  hyper

SEQ ID NO: 50960 - DNA, 98 bp, Homo sapiens
  chr14:20773920-20774018
  hyper
agtaaccacacagacgcacgcagcttcgcgtgtgtgccgaggaattcacgggcagtacataaactggactccctgcttcattcggagtaacaaaaaca

SEQ ID NO: 50961 - DNA, 144 bp, Homo sapiens
  chr14:20811548-20811692
  hyper
gatgagcttccctccgccctatgggaaaaagtggtctcatacagaacttataagattcccaaatccaaagacatttcacgtttatggtgatttcccagaacacatagcgacatgcaaatattgcagggcgccactcccctgtcc

SEQ ID NO: 50962 - DNA, 145 bp, Homo sapiens
  chr14:20929636-20929781
  hyper
ggcctgccccgccccgttccgtctagcagcacgtgataggctatccccgcccgggtcatgctattattcgcgtagataaaccaattcctggtcctgtgaaggcagctctccttttccattggggagcgacgcacaaacgtcaact

SEQ ID NO: 50963 - DNA, 87 bp, Homo sapiens
  chr14:21093066-21093153
  hyper
gtttcctttgaacgcggtgacaggcttacaggtctgtgaacgaaagggcgcctaataagtgacgtgaacttcgaccccatggcactc

SEQ ID NO: 50964 - DNA, 139 bp, Homo sapiens; identical to SEQ ID NO: 9533
  chr14:21093454-21093593
  hyper

SEQ ID NO: 50965 - DNA, 646 bp, Homo sapiens
  chr14:21098629-21099275
  hyper
attcttagagtcctccgctctaccaggtgagctatcggaaagtgtctgtgacattcgttagcgtagatttttgtgcattgagtagcggctggtgagactcctgacttctttgcatttgggctcagattactgttcaagaagttccagagagccaggtctatagttaactgagtcccgggagcagccttgaggcagtaggaagtgagatctgagtcggaggtagtgagaatggaaacagagcagaagccaccggcttggggtgaatctgcatagcttctgaactaggctgccctcagagtaatctgcgagccagttttcgccccaggagcgcaggaagggaccaccaggcaggctacaagtggagaagtgcgcaggactccgggagtcatggctatcagcagattagattagatctgttccccacaaacacagaggtatggaccaagtgtaacatttttctcccagagacgtgaacagtctagtttcttcctcgcttactgcagcgtacaaacacctattttcccagtatcgttcataggatcccgacgctgtactttttcgtctcaaatccaggatctggctttcatggaaagatcataaaatgcttcctttcttcactagtttgtttcagcgttgaaaaggctaa

SEQ ID NO: 50966 - DNA, 291 bp, Homo sapiens; identical to SEQ ID NO: 9535
  chr14:21100047-21100338
  hyper

SEQ ID NO: 50967 - DNA, 285 bp, Homo sapiens; identical to SEQ ID NO: 9536
  chr14:21100725-21101010
  hyper

SEQ ID NO: 50968 - DNA, 138 bp, Homo sapiens; identical to SEQ ID NO: 9537
  chr14:21101037-21101175
  hyper

SEQ ID NO: 50969 - DNA, 89 bp, Homo sapiens
  chr14:21101234-21101323
  hyper
ccctttactttcctttccgtttcatctttctctctttaaagtcagtagttaacaaatactgcaatcggcgctacggctaggtcacctag

SEQ ID NO: 50970 - DNA, 42 bp, Homo sapiens
  chr14:21101618-21101660
  hyper
gagaccctgaccgcgcggtgatccagccgcgggatggagtct

SEQ ID NO: 50971 - DNA, 30 bp, Homo sapiens
  chr14:21121520-21121550
  hyper
tgactggctttccccggcatcgataacaac

SEQ ID NO: 50972 - DNA, 108 bp, Homo sapiens
  chr14:21131528-21131636
  hyper
agttgattggaacccgccttagaagagaaccttgcgctggttgccaccgcgcacctctcagggtggagcaaatcctccgagtgtggtttcctcgcgtcccagagcgct

SEQ ID NO: 50973 - DNA, 1166 bp, Homo sapiens
  chr14:21151009-21152175
  hyper
cccgccctctccggcgttcacagttgcgcagtcagaattgtgtgcgtcccaccgcctcagcccccagttctccgacgcccaggtgccggtccccaccctacacacaaacacacgcatccacgctcgcgaggcccctgggtccgcgcccagtgaggccaacagccctcgggcgcccagaggatgagcagcctcggtatgcccgagtttcaggggcgcctgctctgcttgggagcccctcagtgaggcaggggaatccagatttagaaaggttgtcctcagaacctcggacgcaggactgtcttacaagctggctttgtgactctgcagtaattactttccgggtataaagagatttctttctttcccgtctctggttaaggatgtctcgagtagggatttttaggagagttgtttccgtgcttccttcgatagctcagctggtagagcggaggactgtagtacttaatgtgtggtcatccttaggtcgctggttcgattccggctcgaaggagacgctgctgttttggggtttacggttgctcttcgtttgtgcaaaaaatctctgtatcttgacgtgatcaaatctgtttctgtctctcacccttgtccgaaggaaacagcttagccgcgaggtgggctgcgttaatcgcgtcttgaaaagttggttacctttctgaaagatagtagacccgaatcgtcccaccgttgggggaaggcactgttgtcttaccgaagtgtgttatattttggcttctacgttaagtccaaaggccggcagatatatacgtatcgcgcgtctgtcctggggctcagtaccctacagccttgcaaccgagctcagctctggccctcgatctctatttcagccccctccaggttccctccaggccctagcgggcttaaatcgctccccgggctcagtgagacacaagcatgtgacctaaagtctaaaaagctgccttccttcaccccatcctgcatctggatcgaggagaataagccagagaataagccacacttgaaacttggtgaagatggaaggaataactaaataaggcctaagggaaatgtcacaacagaggaaaagaaacaaaacaaaaaaccttcagaacagcaggcggaaaagagaaattcagagtgataggaagcaccactcagctacagtg

SEQ ID NO: 50974 - DNA, 520 bp, Homo sapiens
  chr14:21152234-21152754
  hyper
ccggacgagccctcgtggctactgtttttccacccccttttgtcaactactgaaaaaaagtctccgttaaatttgaaacacaaactgtctcgcgatgggctgtcctgccaaagaaagcagcagcgaataagtacgtggcagatggtgctgtcgaccagtgtcaagaccaagtttcatgggttcctggacgctcagccaggggtagtctctgaagggccgcctggcaattgggagcagaagccagtttcccgccatctgctctccgtggaggcagtgctctcgcggctgctgcccgttggggtccagctgaggaaggagcgcggatcccaggctcgttctttgcctgggctgcccctgcggcccctggggcgggtgctgctgcggcgccagctccaagggcggatccaggcgggaggggcctcctcggagaagcggggcgcggtcccaactacgcagaggctggcacgccgaccctccacacctcaccacgcccccatctccgtccgtgtacacacactca

SEQ ID NO: 50975 - DNA, 341 bp, Homo sapiens
  chr14:21341856-21342197
  hyper
tattatcgtctacccgtgtcagcaaccaagaaacctgcagcctgtctcaaaggaaaccaagaaagaagttttggactcttgtgcaggaagcttgtggcgcggcgccccctgccgaccaatacgacggccacgggaactgggagaccacgaaggctctgggcctgcggagttgcccaagctcctccggcttctccggaaacggctttttccggtgacacccctggagccacagtgatttgtttccctaaaggaagcggtttcccgccagggtatcgtccctaataccctccgaaggagcccattgaggagaaaggcatagaatgtcccgcagaaggcagaag

SEQ ID NO: 50976 - DNA, 864 bp, Homo sapiens
  chr14:21439058-21439922
  hyper
cacatccagccacctccgcaatggaaagctcgtggcatacagcaggcgctcattatttgaagcctcttcattctcctgcttcctcggtggttaaggaggcttttggaagttcaagtccgtctcagctaagaaccaggagacacggctttggtgcctctcggcccgctgggtctcggcggcgcagcgtcccctgccggccactgtggcggcggctggaatcagcctcagcacttaaggggccgcgcgggaggagttgccccacctccaggcagctctttccagagcagtgagggcaagtctggggattatctccataaaggaagcgaggtggctcggtggaggggcttcagatccccttcccaggaccctgtgacccgccatcggaagagagtggacctcattctatttcaatgtctgcatagtacagacatttgctgtgggcaaatcggacccatgagcccagagagcatcatcccgggaaagctttcccgaagcacaggcttccctgcaccaccatacacgcgcacacccgcacgcgctcactcccccagccctcctcccctccctcactcccgccctggaagaagcggggagctgaggggagaggtggaaccagcagagaaacgggccgggcaggagcccgcaccagcccggcttgggacaccgcagccgctcctgccctctgctggctggaaggcgcacttacacattgcggtcatcgcggatcgccgagggccgctggtgccgctctgccgccaaggacgctcagccattggagtagaagtgagagaggccgcgggctgagtagagaggggtgaggattccggaaaggaagcatcgtcaggaagcgctgaagttcctact

SEQ ID NO: 50977 - DNA, 30 bp, Homo sapiens; identical to SEQ ID NO: 9543
  chr14:21492721-21492751
  hyper

SEQ ID NO: 50978 - DNA, 223 bp, Homo sapiens
  chr14:21492960-21493183
  hyper
tggccggtgccaagcgccccggaccttgcacacaacctcgcgcgcaccccaaacacgccctgcagctcttggagcctcagcctttgtgcgcagcaaccgagcgcccgctccgtgctggccctttcccccgagcctccagctccaggggacgcggatcaatcacaccgcccgccggcccggctggcgccttccaggccctacggcccctcgcctgcccctcccc

SEQ ID NO: 50979 - DNA, 30 bp, Homo sapiens
  chr14:21493395-21493425
  hyper
gggcgaggggcgggcggctggacgcttcca

SEQ ID NO: 50980 - DNA, 65 bp, Homo sapiens; identical to SEQ ID NO: 9545
  chr14:21539065-21539130
  hyper

SEQ ID NO: 50981 - DNA, 30 bp, Homo sapiens
  chr14:21539697-21539727
  hyper
tcctctctggtccccgccggcaggaggctg

SEQ ID NO: 50982 - DNA, 31 bp, Homo sapiens; identical to SEQ ID NO: 9546
  chr14:21553686-21553717
  hyper

SEQ ID NO: 50983 - DNA, 30 bp, Homo sapiens; identical to SEQ ID NO: 9547
  chr14:21566069-21566099
  hyper

SEQ ID NO: 50984 - DNA, 30 bp, Homo sapiens
  chr14:21567005-21567035
  hyper
aacatgcacagactcgggaagttcttcctg

SEQ ID NO: 50985 - DNA, 30 bp, Homo sapiens
  chr14:21737920-21737950
  hyper
ccgcggcgtcctatcgctgccccttagagt

SEQ ID NO: 50986 - DNA, 341 bp, Homo sapiens
  chr14:21769053-21769394
  hyper
tatgtcccaaataacccgtagaaataataactgtcatgaaaggagaagccacgtgctctatttgtccacaggctgaggaccaccttgctgcggttgaccgctgctggccgggacctgcgggtcgcggaggaggcggcgccgctctcggagaccgcaaggcgcgggcagaaggcgggatggcggcagcgcctctccatgcaccagcgcccccagatgcaccgactgcaagggcatttccactgcgtcggccctgccagcccccgccgcgcccagcctcgcgtccaagtgggacacagacagctccacacagccggtgcaccggtgccggagaaacccaagag

SEQ ID NO: 50987 - DNA, 30 bp, Homo sapiens; identical to SEQ ID NO: 9548
  chr14:21851939-21851969
  hyper

SEQ ID NO: 50988 - DNA, 113 bp, Homo sapiens
  chr14:21852939-21853052
  hyper
ccctgagcccaagtcgcggcagcatccttccagtcggccagtccccttgctgcagttcatgaaaactggcactattctatggcttcccccaaataaccgttacttcagttaat

SEQ ID NO: 50989 - DNA, 30 bp, Homo sapiens
  chr14:21904891-21904921
  hyper
aaaataggcaactacgacagctaaagacat

SEQ ID NO: 50990 - DNA, 81 bp, Homo sapiens
  chr14:21905486-21905567
  hyper
caaaggcgaaaagacgcaaaacagcgcaaagggtgggactataaggagctcccttccccctcccccgcaggttaggttgag

SEQ ID NO: 50991 - DNA, 239 bp, Homo sapiens
  chr14:21979449-21979688
  hyper
tcacgcggacaccccgaaggctaaccggaaaatgacccctggagctgagcaagacagaaaagtcatttccggtgtcgcgctttcttggaagctataaagagccacgttaggtgttggcagagcggccggtatagtcctcatacccgctctctcatgcttccggacacagtgaggctgtggttgccatgttggtgactggcagagcggccatgttgcttatagacgcgcatgcggccatg

SEQ ID NO: 50992 - DNA, 30 bp, Homo sapiens
  chr14:21994770-21994800
  hyper
tcagtggagcaaggcgataggcttctctta

SEQ ID NO: 50993 - DNA, 227 bp, Homo sapiens
  chr14:22004961-22005188
  hyper
cacccctccccaggcacccaccgttctcagacgcgctgggaccttcgcagtccgagattaactgttggggtttccgctgctttcgccgagacattcccgggtagagagttgggagagggaggggcaacgctcacttggtcttaaccggggtgacctggtctcgtctcccccttgggtccgaagccaattgatgcctctcccccagcgcaaatcactgtgaagcagag

SEQ ID NO: 50994 - DNA, 30 bp, Homo sapiens; identical to SEQ ID NO: 9553
  chr14:22694049-22694079
  hyper

SEQ ID NO: 50995 - DNA, 30 bp, Homo sapiens
  chr14:23058097-23058127
  hyper
actcttggaggacccgtcgaccacaccgga

SEQ ID NO: 50996 - DNA, 543 bp, Homo sapiens
  chr14:23291813-23292356
  hyper
cctccaccccatgaacgctcagcttcctcttccctccctcccaaccctgcataagctggcggccagacaggagtctgggcgagcgccccaacccctgaccacaactgcctccggccccgagatgcttggctgaatctcggtagtgcccccagacgggaagccccttgttgggggggcgggggcgggaggcggggcgaggaatgtgcctcctcggagccggaggaggggtctcccgaaggccgtctcttccaccccgggttcccgactccccgccccctcggggtagctgttgcatcagcttccagattccaaaccaaagaaagtgggctccactaagctgggaaggcgtcgggcagcaaagccgccgccaggaggcagcgcttaatcaaaaatgtccgggccgagggggcccaggataccggagtccccggagcgtctttcatctgaagtcttagcagcagcgcggacctaacaaaaaagggagttgctgaattagttcaagaaaaggcaactggaaatgcttcatcacgttttaaggctaaa

SEQ ID NO: 50997 - DNA, 30 bp, Homo sapiens
  chr14:23299070-23299100
  hyper
ggccaccgaggccacgcctacttccggcta

SEQ ID NO: 50998 - DNA, 30 bp, Homo sapiens
  chr14:23299454-23299484
  hyper
catatgcgggtaagcgctgatctggcagtt

SEQ ID NO: 50999 - DNA, 30 bp, Homo sapiens
  chr14:23340562-23340592
  hyper
gggcggggcgggggcgggaatgacgaataa

SEQ ID NO: 51000 - DNA, 119 bp, Homo sapiens
  chr14:23355365-23355484
  hyper
cgcaccacgacctacccgttatcctcgttggaaacaagagcgacttggcccgctcccgggaggtatcactggagggtgtgtatcctgaacagattccatacttgcgatctcaggggaat

SEQ ID NO: 51001 - DNA, 494 bp, Homo sapiens
  chr14:23355772-23356266
  hyper
cccgggtcccgtacagcccagcgggcgcctgagccggtgccttcctgcagagggccgccacctggccgggacgctgagctgcaagcacatcgagacgtcggccgcactgcaccacaacacgagggagctcttcgagggcgcggtgcgccagatccggctgcggcggggccgaaaccacgccggaggccagaggcccgatccgggcagccccgagggccctgcgccacctgcacgccgcgagagcctcaccaagaaagccaagaggttcctcgccaacctggtgccgcgcaacgccaagttcttcaagcagcgctccaggtcgtgtcacgacctctcggtgctctgagccgcggtcgccatggccactgcggtcgccatggtcaccgcgccctccgctcgccccccctcgccccgccccgcccccgtccggcttccttggtggaggccgtctaggaaaccaaaaactcccaggatgccccggtgtgaccgccggg

SEQ ID NO: 51002 - DNA, 130 bp, Homo sapiens
  chr14:23398732-23398862
  hyper
gggctgcacagtggcgtacggcatggatccaccaatctcagggtctggttcctgacgaacttcaatctcccagaatgcttagtctatctgaagaacgccgttgagagactacaccgcccatgaaaccctg

SEQ ID NO: 51003 - DNA, 30 bp, Homo sapiens
  chr14:23450223-23450253
  hyper
gagaaacggactcacgagataccagggggg

SEQ ID NO: 51004 - DNA, 65 bp, Homo sapiens; identical to SEQ ID NO: 9556
  chr14:23450507-23450572
  hyper

SEQ ID NO: 51005 - DNA, 753 bp, Homo sapiens
  chr14:23450867-23451620
  hyper
gcggacgggacccctccgggagaatagcctgccggtgctccggccaggggtgggccaaacaggcacggccccgctggcaaggggctcccgtggcgctggtcgtagcccatgctgatgccgctggtgcgattgctgcagggccggctacctccagctccgccagcccccgccccgtccagcagcaggctgccccgggggctggacggcttgctcgcgtcgctggccgagctactggcgaagctagagcgggggctgagggccggggccgtgggctccagccgaaaatcggggggcaacgactgaggtagaggcaaggcccgggtgggcggcggccccgcgggaaaagagccttcgtagcgcggcgcctcaaaggagccgcgctgatttcgctcagcgtccagggaaccttgctcccgggccggctccaacggctcatccccaggtcccccagtagctcctcggggccctgacttcctaggtccccccaacccacttaggcgccccttgcccggcccgggggtcccgtcagacccagaccggctagattcaccctttctgcggccgaacttctccagcaggcgactggctttctctcctaaccgctccatgccctcgggcctggggcctctcgccccctccccgcctggcaccctgcggcgtctcggcggccggttctctttccctgcagccggactctggttccccaggggcacaggggaggcacaggggcttagcgggcggcctggatgccct

SEQ ID NO: 51006 - DNA, 480 bp, Homo sapiens
  chr14:23451828-23452308
  hyper
cttttgtctgcctggccggatctactttcctaggggggcggagcgcggtgtgtgcgagagcgccgggggtgtccgcgcagggatagctggtgtgcgtgcagcggaaggcgctaactgccctggatgtggagacccgcggactggacgtgagaggcgggcaggggcagttggggcagctgcccctacaacactgaagaattggaataggaaagagtgtgggggtaggggacggggactctttgtctgcagttggaatgcgcggaggggcatggtggaatgtgtcgcgtcccgggaccggacgacaggaggcatgttctgcgctagcaccgtgactttgttcccagcgtggggactgtgggagagatggagagagactggtacagaaatggtgagacaaggagagagccataaagaggaagacagagagaaagaagacaaatgcataaagaggttcagagacgtgtacgtaaagatagccct

SEQ ID NO: 51007 - DNA, 30 bp, Homo sapiens
  chr14:23503913-23503943
  hyper
tccatgaagcatttcgattcctggctcttc

SEQ ID NO: 51008 - DNA, 30 bp, Homo sapiens
  chr14:23504301-23504331
  hyper
aaattctaaaaggacgtacctgccatcttg

SEQ ID NO: 51009 - DNA, 30 bp, Homo sapiens
  chr14:23527201-23527231
  hyper
cagctgcaaggcggcggcgttttgagagcc

SEQ ID NO: 51010 - DNA, 30 bp, Homo sapiens
  chr14:23527614-23527644
  hyper
caggggataaaagacgtgggaagttcaata

SEQ ID NO: 51011 - DNA, 30 bp, Homo sapiens
  chr14:23563700-23563730
  hyper
cctcctcatctaatcgagcagacattttac

SEQ ID NO: 51012 - DNA, 110 bp, Homo sapiens
  chr14:23755383-23755493
  hyper
tcctgattggtaggcgcaggcgggcgggcacgggcgaagcgcactgggctggccattggctgcgtgggtctcggctgaagtcaggtattggctgcgtgggcctcagctgg

SEQ ID NO: 51013 - DNA, 13 bp, Homo sapiens
  chr14:23770626-23770639
  hyper
ggccgcaggcgcc

SEQ ID NO: 51014 - DNA, 6 bp, Homo sapiens
  chr14:23772220-23772226
  hyper
atccac

SEQ ID NO: 51015 - DNA, 102 bp, Homo sapiens
  chr14:23775762-23775864
  hyper
tgctaaatttgccccgagatgtcccgaagtccggcatatttctctgggcagcctagaggctcaggagcccagcccagcccagcccaccgtgccctctcagcc

SEQ ID NO: 51016 - DNA, 189 bp, Homo sapiens; identical to SEQ ID NO: 9560
  chr14:23776070-23776259
  hyper

SEQ ID NO: 51017 - DNA, 155 bp, Homo sapiens
  chr14:23821420-23821575
  hyper
catgcccagagccacgaagagcaccggcaggcagcagaggccgagctgcagctgctggccgccgcccagcgcccccacctgggcgagcagcgcctcaaagctgagggggcctgggggcacggccagcgacaggctgctgcccagtccgtcgccgc

SEQ ID NO: 51018 - DNA, 679 bp, Homo sapiens
  chr14:23821601-23822280
  hyper
cgctcccgctcaccctgcagctgctccgtgggcaccgcatctccgagggtcccgacctgctgttggggggcagggggtggcaggagaagggtgaagcggaggaaaccgcagagcaagggcagggggcaggtgggagggagggctaggaaggcagtcaggggcgagggatgcgcaggaggaaaatgccagacgctccgcgggggcgggggtgctgggagaggatggcgtcgccacctggggctcgggcacttactccgttggaggtgggggtgatctctacagtgttgtcgattttgccgccgcccccgccattgggctcgggggtcccggtggccacccggggagccagcttgccgaccgcaggggccctgccggcccgcgccgaaaggatgcgctgtcctctggctcagttgcgcgccggctgcccggacacagacagctcgaagagatcccgctctgcagctctgcagccgcgggcgcctccttggtctctgcgatctctgcgctgctttcccctccccttcctctagactctcctccccttcccacgtcagcagaaccttcggtccagactcttcgtcagagagaggaaggggggccagggcccaggggagggagggaaggggggctctgtcgtctctttcctgggtctgcgggccattgcggtaaaaaagaaaaa

SEQ ID NO: 51019 - DNA, 555 bp, Homo sapiens
  chr14:23834232-23834787
  hyper
atggctttggcctcccgcgcagcctgcctcaggccaggctcggttttgctgacttcagcggtggctgccccgcaccatggtccgcggcctctagcccccagctgtggcgcctgagtcgtggcctccgccaaggttggaggaggagaaagaaaacccacaaaacttcccaaatgagaggcaggctagccaggcaggaggaggagcggggcgggccggggcgtcgctgcgggacggcatccaagggcgcgcgctgcgtgctgtccccgcggcctcccgggcgccaccggctcggccaggccccgggagctgcccgccctaggccgcgggggcgccccgggctcgcaggatccgaaaattcccttcccgggccggggcgggtgagcaggcgggcgctgggctgcgctcgacgcctctccaggccgctcaggagagcctcgagggctgggagaagccgccggggcggttgggctggacgagcgagtttaggggccaaccgtctccacccgccggccgcgctgcagagcggtgctcccagggctggggtctgcggcgacc

SEQ ID NO: 51020 - DNA, 85 bp, Homo sapiens
  chr14:23835314-23835399
  hyper
cgggtcctgtggactcgcctgggctgggagtggggacactgagagggctgcgaaggctccgggggtcgcgcgtggcccgcaggct

SEQ ID NO: 51021 - DNA, 52 bp, Homo sapiens
  chr14:23938809-23938861
  hyper
agaaagcccttattcgtattggcttagatttgcaagcggcagttgtctatca

SEQ ID NO: 51022 - DNA, 30 bp, Homo sapiens
  chr14:24020942-24020972
  hyper
ggctggagtctaggcgtcccacacaatgga

SEQ ID NO: 51023 - DNA, 63 bp, Homo sapiens
  chr14:24024865-24024928
  hyper
ttacgcgctgcccccgcccccttccctccccccaccccaacccccctcgccaccattgccact

SEQ ID NO: 51024 - DNA, 31 bp, Homo sapiens; identical to SEQ ID NO: 9563
  chr14:24036950-24036981
  hyper

SEQ ID NO: 51025 - DNA, 48 bp, Homo sapiens
  chr14:24505638-24505686
  hyper
tcgtcctgccccttcgccctactctgtcacctcgctggaaggagtgga

SEQ ID NO: 51026 - DNA, 30 bp, Homo sapiens
  chr14:24550380-24550410
  hyper
agccgcctcctgggcggagccaccccaccc

SEQ ID NO: 51027 - DNA, 30 bp, Homo sapiens
  chr14:24583041-24583071
  hyper
ccctcaggagcgggcggagggaagctcgca

SEQ ID NO: 51028 - DNA, 30 bp, Homo sapiens
  chr14:24605744-24605774
  hyper
cgctggcctggggccggggccacacacaga

SEQ ID NO: 51029 - DNA, 30 bp, Homo sapiens
  chr14:24610777-24610807
  hyper
ccctagctggcggccgcgactctgcgcctg

SEQ ID NO: 51030 - DNA, 30 bp, Homo sapiens
  chr14:24665430-24665460
  hyper
gagacttccctggccgcacagtgaccgttc

SEQ ID NO: 51031 - DNA, 30 bp, Homo sapiens; identical to SEQ ID NO: 9564
  chr14:24682901-24682931
  hyper

SEQ ID NO: 51032 - DNA, 43 bp, Homo sapiens
  chr14:24685344-24685387
  hyper
gaagaggattgcagcgaggtaccaacacgaccacacatgcaac

SEQ ID NO: 51033 - DNA, 30 bp, Homo sapiens
  chr14:24701373-24701403
  hyper
gttttccttccccacgtctcccgtaaggca

SEQ ID NO: 51034 - DNA, 140 bp, Homo sapiens
  chr14:24711904-24712044
  hyper
gaaccgtgacggtgcgtcagaaggccacgccccagcggagctgtagctgcccgcttcctgcactctctgccggctgacatgagttggcggctgaggctgtcgtggccgctgaggctgttgtggccgttcgtctgggtcct

SEQ ID NO: 51035 - DNA, 92 bp, Homo sapiens
  chr14:24769097-24769189
  hyper
cgacgtcgaaggtccgtccgcagttaaggaagcttttgcagccggacaggtcgcgaagcacacatggggcagggtccgcgctctccacacaa

SEQ ID NO: 51036 - DNA, 30 bp, Homo sapiens
  chr14:24802999-24803029
  hyper
ggggcgccaggacccgcggcgtcccgcacc

SEQ ID NO: 51037 - DNA, 459 bp, Homo sapiens
  chr14:24803663-24804122
  hyper
aggtagagaccctcccgcagcagaggctcggctcaccctgccgctggcccaggccactgcgagcagcgccgcgagcgcacagagcacgatccccagcagcagcagcagcagcgggtactgctggctcaggctgtagtaggtctcgtagaagaggtcttcgctggggggcggccgggggctgaagaggcgggccatgatctccccagccccgagccccggggctggctagggccgggcgccgggttacctccttcggcccggcgggccccacctgagcttttctcacccgctcaaagccgctaccaccccgcgcccccaacctcgtggcaatcccgtctcctttttcaggccctccctgcggcctcccagcccgctcccagctggcgatgaggggatccctcagtcctttcctcctcctccctcaaacccggattgtagaggtgccctagaaaagcctca

SEQ ID NO: 51038 - DNA, 329 bp, Homo sapiens
  chr14:24808628-24808957
  hyper
cagattgcggctggggtcaaccggggtcactcacgagtttacgatcttgaccgccacatcgtagccccacttcctatgttgcgcccggaacactgtgccgaacccgcctttgccgacgagctcctggttctccagttcctcgatggacaccaagggggcgggggcaccgctgggcctgagagaggggtgtcgcccactagccggccgtgccgtgcctcagcgctgctccccgcgcccctgtgactcggcgttctcactgcaatccccagcctccctcgccggcccccaccgtccccggactcaaagacgttctctgagcgagtctgtgg

SEQ ID NO: 51039 - DNA, 30 bp, Homo sapiens
  chr14:24835089-24835119
  hyper
tgcccaggctccaacgccaggccgagcatt

SEQ ID NO: 51040 - DNA, 30 bp, Homo sapiens
  chr14:24837169-24837199
  hyper
cactcttgaaggaccgttttccaattcagt

SEQ ID NO: 51041 - DNA, 30 bp, Homo sapiens; identical to SEQ ID NO: 9567
  chr14:24868067-24868097
  hyper

SEQ ID NO: 51042 - DNA, 220 bp, Homo sapiens
  chr14:25148243-25148463
  hyper
gaactcctgaattgccgcctttcagttcctgcggctgctctgactgtctgcattgcgccctctagtgtccagactgagttcttttactgtctagactggggagtccagagcagattcttttacccgccacgtgagggagcaattcagggaaagtaaaactattagtaaaagacattattttattttcaaataatcgtaattttaccgagttcctagaaaa

SEQ ID NO: 51043 - DNA, 1034 bp, Homo sapiens
  chr14:25518549-25519583
  hyper
gcagggtgccgtgcccgccagaaaagctcgcctcagttttggcagtaatgattttcctagaagatgccagagttcgcgaagatcggagtgattcgcggatttctgcgctcaagctagaggcgcagcgaccccgagctcccccacactgggagcctcggggcagcattctcggggcccatgccatcgcggggacggtgcggaaaaaaaggctccatcctcaactttctcggaggaaatcgctccgttctgcggcttgcccaatactgcccgcacaacgggtcccagggttggagagaaccagggacacgagtccctctctgcgcgcacaaagcagctgcgccggggcgcgcggccccctctcccgccacccgccaacttggaagaatctctctgggagcctgcctactcccctggcctcacagccacccgcctcggacggagcgccaggcgccccaacagccgtggcggctgcaaccgcatctcccgggcttggcctccgccctgaccgcctggctcccctcgccccggtcctaccgtgcagcctggctcgcgcccctgccgtgccagtgcgcggcacgcgtcccagagcacgaggctcctccccggggggctgccccgcgcggggctccgggctccggacaaggcttagccggcccgggtgctggctcgccgccgctcgcggctcccgcgccggctcctgctgccgcgcgcgaaaagggaggggttggggggaaactcccggcaactccaactccgggcgctggagctccagctgcagccgcgcgcccgcccgccgccgagtgcgagcgcctgcgaagcaaacctgcccgcgcggccgcctctgagcatgctcagtgccgccgtgggcgagcccgagcgccctggcccggggcaaagagcagcggctaggggctgggggctgggggccgggacccgcgacccgccccaggcctcggagcgcggaggtggcagaggaagggaaaggccaatgtaggggcgggggccctgagccaaagacccgggagaaaccgatc

SEQ ID NO: 51044 - DNA, 305 bp, Homo sapiens
  chr14:25601969-25602274
  hyper
gaatgttggaagagtcctgaacggcatccctcgggggtgggcagcatttggggaagctggcgtatgcggcacgagagtgcaaggaaggaagagctgcaaccacgtggctgagctcagccctgggagatggggccgtccttcctctgggagccacggaaatttctacctgggtctaggcgggcagaggctctgcagcagcggacacgcatgactgggtagagccagtcttcaacagtgccaccgtgtggcagagaggagcagtgacagttataactccgtagaattatatgcgggttctcccagcc

SEQ ID NO: 51045 - DNA, 372 bp, Homo sapiens
  chr14:26674245-26674617
  hyper
tgtttgccaagtcgccggtcccctgcgtccccgcccgccggtcccttctccgacccgagacccccgcccgccgcagcccgactctggggcgtttgggaggtgggcctgaggtttgcctaggactcgagttcctttcaaaggaaggcgagagggagatggggagaaggagactcggagacttctctattaaagccgcgctgaactctagccttctggcaagccgcggcaagccgccaatttgaagtgtgtgagctttaatctgctcctagcctgatgggctcccgtgtccacagggagctgggaggcatccattacgccggaccaaggagatggagcgtctaggaaatatgttaatgccggagccctccccgc

SEQ ID NO: 51046 - DNA, 31 bp, Homo sapiens; identical to SEQ ID NO: 9569
  chr14:26892909-26892940
  hyper

SEQ ID NO: 51047 - DNA, 325 bp, Homo sapiens
  chr14:27066461-27066786
  hyper
ggcggcgggggatggggccagcggggaggtggaagcgatacccaccgcccgtattggtcctcttggtgctgccggcttcagggggggcttccagcggccttttccgcgagtccggcgggtccaggtctatgggaaccccagtgtgggtcccgttctgctggatgggagctgccgccatcatgtttgcagttcctgccgctgctaccgggagaaggttctcccttttgttttggctttttcttttcttttttcttttttttttttttttttttttgcgtttggggtttcttaaggttttttttttttaatcggatcaatataaatc

SEQ ID NO: 51048 - DNA, 150 bp, Homo sapiens
  chr14:27067006-27067156
  hyper
gggagtgggagagcgcgagggctggcggggcgcggggagaagccgaggaggaggggagagtgagggaaagagtgaatgagcaggaggaggggaaggaggtggatgccgagagaggagcgagcggcagaggagggcaggagccgggaagga

SEQ ID NO: 51049 - DNA, 419 bp, Homo sapiens
  chr14:27067372-27067791
  hyper
gtagactcccacacacttcgcgctcgggtccctgcctctcagcagcgccgccgcctcccagcgccgatgcttcagccggcggggcggctgaggggtgagggggaactccgcgggcgggggcgagggagcgtgtgtgcgcgagcgtgtgcgcgcgcgaggggagcgcgtgcgcggtgaggacgcgcgccggcggttggggcgggggcgggggccggggcgctcctgtgggaagggaggggtgaaaggtcgctggtccccggcaacacggctcaggcaaacgtaagcggcttgtcgcagaaaccaaggggtccacgaaacgcgctaggctagaaggcgggaaggagagattactgacagccgtgccagccaataaaatagaaatgtgagaaaggttcttcgggccccttcccaatcaggaa

SEQ ID NO: 51050 - DNA, 30 bp, Homo sapiens; identical to SEQ ID NO: 9573
  chr14:27068101-27068131
  hyper

SEQ ID NO: 51051 - DNA, 659 bp, Homo sapiens
  chr14:29225834-29226493
  hyper
agtttcttgaaactcggaggctcagctcagtgtaaaaacatgggggttctcctgagtcggtttccctgaccacagggggacccctgcaaacacggcctcctctttaatacctttgtaactcagttcttcaagcaacccacctaggagaataaaaggacccactgagctccaataactgagtagatgattaaataaagccgagatctcagatcttcgcgtttggggtggggagtgggggcgctggggaaaagtcgggaatagccccgcggtacctggggatcccagttgttttttctaagaaagcccggggttaaaaaatgcattggaatgtggcgatgcctccatcagccgtcactttataagttcccaagtcacgctgctctagaccattgtggatgaaagtggattgtctctccagaaccaaatattccctgacctgcttccccaacgcgccctcacgctttcctgggagagcacagcgctgccggagacgcggcgcttctgtcaattgtgcagagcaattactaagaaaatattgtgacgatgttgtagggcgaaaggggacgtgaggaggaaagggagggggagttagtttggagagcaatttgcaaaggaatattaactttgattcccgaggtcaccgcgggaaaaggggttct

SEQ ID NO: 51052 - DNA, 30 bp, Homo sapiens
  chr14:29228250-29228280
  hyper
tctaggaaaacctgcgggccctgttttgtg

SEQ ID NO: 51053 - DNA, 68 bp, Homo sapiens
  chr14:29228887-29228955
  hyper
tgatgccgctctacgcgcagcttagtctgtcttctcctctcctccccgcaggcgactccttccaaaga

SEQ ID NO: 51054 - DNA, 30 bp, Homo sapiens
  chr14:29229304-29229334
  hyper
agcgtcgggcaagctcgcgggtatgcgcag

SEQ ID NO: 51055 - DNA, 779 bp, Homo sapiens
  chr14:29234529-29235308
  hyper
ccttagccctgcccctggccacgggatccttttaaagcccccgattcgcaatttccccattcacttcaacctccaaccgaaccttcccagttccaaagcccaagaagctgggactgtgagatccacgttcccaaggctccccggtgctttccagcagcactcagggttggcaagagctggcttcagtatactgttatttcaggaatgaggcccgcacaaaataaaagcatttgagaaacggaaaggaaaaaaaaggagtgaaaataggaaggcttaaaaaaaaaaccggaaagaaatagacgcccacccttattttccctccaatgtcaacaagcaaaacgaaaatatttccagggtgatcgctcgcagctacccgcttccaattcggattagaagctgaggctggagcggcgaggagaaaacgacatcgagtcaccccgcgcgtgagcgacgctctggagcaggagagaaggaaaaggaagagacacacgtatatagcatgtgttacctgatttatttcgagattgtttggtactgttttctctctgggcacctctcatttcggaaggccatcagaggcgcccactactgagcggccccggccgccgcagcagcacccggagccccagtcccggtttccccgcggtgccggagcccggagctcgccgccgcccaggcctcaggaatcgagtaagtaacccctgtttggccccgcgctcctctgcccacttcctcctcctcatctcatcgctcccaaagctctcccacaccctcctccc

SEQ ID NO: 51056 - DNA, 143 bp, Homo sapiens
  chr14:29235341-29235484
  hyper
cggtgggccttatctccccccttatccaaagctgcgctagactattacctacaaagggcacaattttcctgctggctcagaaatgccagacactggcctgcaaggccgactcggaaaagtagtgcctcgcctctacctcctcc

SEQ ID NO: 51057 - DNA, 30 bp, Homo sapiens; identical to SEQ ID NO: 9578
  chr14:29236206-29236236
  hyper

SEQ ID NO: 51058 - DNA, 30 bp, Homo sapiens
  chr14:29242808-29242838
  hyper
ataatttttttccacgttgacagaaatcac

SEQ ID NO: 51059 - DNA, 30 bp, Homo sapiens
  chr14:29247133-29247163
  hyper
atccttagcgtcagcgctgtaagaggtgga

SEQ ID NO: 51060 - DNA, 30 bp, Homo sapiens
  chr14:29247443-29247473
  hyper
cgtctttttacgcacgcagcaactcgtcct

SEQ ID NO: 51061 - DNA, 56 bp, Homo sapiens
  chr14:29254383-29254439
  hyper
tttcgccccagcggccgctcacaaagcgccacccgcgcctcgggcgcccgcagaag

SEQ ID NO: 51062 - DNA, 148 bp, Homo sapiens
  chr14:29254611-29254759
  hyper
cgcgtccgccgggaccccgtccctctttccccttcagtcttcagggagggggaggcgctccgcattagcggggcagttcagcaaccccgaccccacccgcgtggctccaggcccaggggtccgttcacttccccgtccggtttggggg

SEQ ID NO: 51063 - DNA, 30 bp, Homo sapiens
  chr14:29255104-29255134
  hyper
tggatgatggatagcgttgggagctgtttt

SEQ ID NO: 51064 - DNA, 645 bp, Homo sapiens
  chr14:30396137-30396782
  hyper
caaggaggggcgcggcgaggaaagggcaagatacctggaaatgtcatgagaaggatggaaatgggtgaggaggcggcggactggagagaaatcggtgaatagaggaagatggggcgagaggaggatgagcaacagcgagcgcagcgcctcgggttgcaggcgtccagccgcggcggggccagccgcttccagagcgccggcgaggctggcggccagccgagccccgggagccggaaagttggcgcggagagggccagccgggcagcgccccctgcgccgcggggaggcgccgggctggcagcggtgcggcgacttaccttctggtcgacaatggagcaagccatctcgcggacgtgcgccaggctgtagtccccggacgagtcctgcagcagcagcaccggctcacggctcaggccgatctgcagatggaacgagatgcccccgaccggggccgcgacaggagccaagaacggcgcgggcccgggcccggaccctgggaccagtgcggcggccgctgcggcagctgccgccgccacgggcagcagcggactgggcggccgcaggaccggaggggcgctcatcgctcggcggggcgcagggccgggcagcggagggcgggggctggcggcgcggcagcaggaaagt

SEQ ID NO: 51065 - DNA, 455 bp, Homo sapiens
  chr14:30396985-30397440
  hyper
ccggcactggggaggcgccgccgccgccaagaatctgccgcctggcgcgctcggaaggacggggcgacgggtcggcgcggcccgagcgccgggcgggggccggggcgggaagggggcgtgaggggcggggaaggggagctgggggcgggcactggggagccaccacccggcgggcgcgggagtcgcaggagcagcggccgcagtggccgcagggtgcccggtcgccgccccctccgcccgcagttcccggggcctgagcctccgcgagccgggataggaccgagtggcggggctcggagccgcctcggcaggcgcggcccttccctccctgcagggattcccgtcctctcgggtcccgctgccccgccccgactgcggacggagtggatggggtgcaccgcctcagacccgcttcctggggtcgcgaacttcccgggccccaaggtccctgccac

SEQ ID NO: 51066 - DNA, 33 bp, Homo sapiens
  chr14:31028136-31028169
  hyper
aaacaatgaccccgcgcccggagtttttctgag

SEQ ID NO: 51067 - DNA, 117 bp, Homo sapiens
  chr14:31091324-31091441
  hyper
aaactcttagtattcgcctaacattacgggccactgaattaacctgcaccgggtctcccagttctaccgagagtggaggtcttcctggaggaggtggggtccggaactcaggcacac

SEQ ID NO: 51068 - DNA, 466 bp, Homo sapiens
  chr14:31343656-31344122
  hyper
cgccgccgggccccgggggaccggctcccgcgcttcctcccgcgccccccgcacagtgctcatgcgcacggcccagcctttatagcggccgcgggggccttgccttccgcactcgggcgcagccgggtggatctcgagcaggtgcggagccccgggcggcgggcgcgggtgcgagggatccctgacgcctctgtccctgtttctttgtcgctcccagcctgtctgtcgtcgttttggcgcccccgcctccccgcggtgcggggttgcacaccgatcctgggcttcgctcgatttgccgccgaggcgcctcccagacctagaggggcgctggcctggagcagcgggtcgtctgtgtcctctctcctctgcgccgcgcccggggatccgaagggtgcggggctctgaggaggtgacgcgcggggcctcccgcaccctggccttgcccgcattctccctctctcccagg

SEQ ID NO: 51069 - DNA, 30 bp, Homo sapiens
  chr14:31496013-31496043
  hyper
ctggtcgctctggccgaccgcatcccgtct

SEQ ID NO: 51070 - DNA, 30 bp, Homo sapiens
  chr14:31677430-31677460
  hyper
ggccgaccgcctggcggttcaccccaaaga

SEQ ID NO: 51071 - DNA, 30 bp, Homo sapiens
  chr14:31888988-31889018
  hyper
acttgaaataacgccgcgttggccgagagt

SEQ ID NO: 51072 - DNA, 81 bp, Homo sapiens
  chr14:31889986-31890067
  hyper
taggattaggacagcggtttttcagtccggagattccggccacaactatttttgtctgtttttatcgtaagccagagtctt

SEQ ID NO: 51073 - DNA, 30 bp, Homo sapiens
  chr14:31926761-31926791
  hyper
atgtcccggatgtgcggtcttggaggccgg

SEQ ID NO: 51074 - DNA, 119 bp, Homo sapiens
  chr14:32030582-32030701
  hyper
acgtcatcactccgcgccacccgcgacagtttcccagcagggctcacagcagcgttccgcgtcatggggatttggcagcgtctgctgctttttggtggggtgtcgctccgggctggtgg

SEQ ID NO: 51075 - DNA, 30 bp, Homo sapiens
  chr14:32030901-32030931
  hyper
aggctgaggcgtggcgggacttgaaacaca

SEQ ID NO: 51076 - DNA, 133 bp, Homo sapiens
  chr14:32670300-32670433
  hyper
gggaggtataaggacgtacaagaatgcttctccagttcaactctaagtgaacgatgtaattcctcaaatccacctctcagcctgtttttcagcgttcctgtgtttggctgccaggggcgaaagtagcggtcga

SEQ ID NO: 51077 - DNA, 2396 bp, Homo sapiens
  chr14:33402367-33404763
  hyper
cggcctgtgtcactcttggccttggcaacttctggccaatccgccctgcccctctgggtcccggcgggccggctgcgccctaggctcaaagggttaagcaggtgcctctccgggcgaggcgctattggccgagggctggggcggcgcggccgcggtcaccacgcttcgccgatcccaacttgggttcctgcggaaggcaaggcggccactcgtcccctggctgcggctgcggggcccaggccttggcgcgcagggagtgggaaggagaaaaggacgagaaggggcaagcaccagccgcaccagcaaagggggcgagggtggcgcgcgcaagatgaggggagctgaagccctgcatcccgaaggaggctgcgcccaccgcccgcaactccactccaggctcgccagccggaagaaagaggaggaagtgggacaacgggggtcctgggcaggggtaggggaaacgatcaactcccactgcccccacccactagtcgagttggaatgcaagtcgtcacttaaaaaggctcacccaaaccgcaggcatacctcctcaccccttaaagaaacattgatgtaatagtgtggagaagtaactgagagacgcgaggaaataaatgcacgtgttttctctttttgtttccctggtggttggaatttgcagagttcgtctcagtggtggctgctaatttattcgtttcatcggtcgaaaggggcgtatagaggtgggtcagcggggcacaaccggatccctctaaccggacctcacctcacaagtttgtcctggaccaacccgcccgcccaccagcagagggaagggcccattcttataaggagaacaaactctccattgcacaaaagcggcttctttttttctctccgtctttgcacaccatccctcctcgataagtatcaagttctcgaggagcccaacttgcgcttggcagccctcgcgctgcctgatgtgcataagacgggcagagaggggttccggccaggaagggaggctctacgtccccattcctgcacacgcgggctggcttccaggttgctggaagccgcgggaggcgcgagcttgcctggatggtggttatttctctagagaaaggaggagagagagagcgcgcctgagtcttgcactttgggtcggaagtgcgcggcgtgtgtgtgtgtgtgtgtgtgtgtgtgtgtagaggggggcgggaaagaaacgcaccctccgctgccggtcattcccttgcaccggccaagtcctcgccaagcctcccggtgcatccttcctccgccaccccctccccttcttccctcagctgggctcgcgcggcgcagccggagcagccagtgagagcaacatcctggaaagaggggggagcaccgccgccccccaaaagggaaaaaaggccccaccctgacacgttttgctgtttgcaagtccctcgcacgccccccgcacctcctcctcgcgcttgcggccccccccacccccagcccgctgcgcgcacatcaaagctcctctccgccgcgcacagtggccgcggctcactaatgggattgcaggctggtgcctggctccgctgctgccgccgccgctgctcgcgctgctgctgctgccgccgcccgagcccgagcccgagcccccgccagccagagcccagagccgccgcgcccgggggccgaagccgcggcgatgatccgaatctttccggatttcagcgtgcaggtgacggccgcggcggccggcggggcggccgcgggggtgccggccggcgcgggcatggggagggccggcgccgcggccaacggcaccccgcagaacgtccagggcatcacctcctaccagcagcggtgagtagtcccgcctgggctgggatagtgcccccgccccggggtgctggggtgggactcactttgcctcctgttttgtgtcttacaacacacatgcacattgccagggctcactttgcctgcccctcgttctacagatgaggaagaaaaacacacttcactttggtggattgaaaagcactccagtgcgctggcgaagtgaaatcatcctttgccctttgcctggccccaaatccagagcttcagccccgagtagcggaggagttgcagcgaagtctgagacgccgcacaaggtgcttttgcaaagtttaggatcctcatccctttccagtggaattttctcaatgcctcagccggatgcggacccgcgcatacggacagctaggggggcaattgatcactggaggctgattgatcatttgtttccaaacagaataggaacgattttcatgtgtagctgtaaacttgcaattctacataatagtgttatcatgtcacctgttactacagggaaatacagcatgaaatccgagtctcttcggcgctgttaagta

SEQ ID NO: 51078 - DNA, 30 bp, Homo sapiens
  chr14:33408445-33408475
  hyper
cccccgcccgcccacgccccccacccggga

SEQ ID NO: 51079 - DNA, 30 bp, Homo sapiens; identical to SEQ ID NO: 9589
  chr14:34126415-34126445
  hyper

SEQ ID NO: 51080 - DNA, 436 bp, Homo sapiens; identical to SEQ ID NO: 9590
  chr14:34419301-34419737
  hyper

SEQ ID NO: 51081 - DNA, 700 bp, Homo sapiens
  chr14:34419820-34420520
  hyper
gcgctccaggacgcagtcgcccaccacctcgcccaggaagttgtccaggtagcagaagcccacctcgtgcagacagggcacgatgtactccagggcaattttctccaggtccagcctcatgatgtgtcccaggggcatctcgcccgcagaatcgaggtccgggatccccagcgtgcaaccagagagggaacgatctacacgagcgcgaagccgaggcgcggggagcgtggcccggggttcagaaacctgcggctgccacggtacccgagccgctgcagcgtcggggacaagggaaagtttctcgcaactctcgggagaagggatctgccttcgggaaccagcgggagtggtgcggagctccacgacccgtttccggactggcccggcgagcagtgcggcgcaaggagtcggagggcgccttttggggatgggaagccaccactgccgcgactgcggccagactccgggagacgctgaggtccggcccttaagccggccgactccgcgcgtcacgggctccgccccgggaccgcctccgggaccgccctttcccccgccccgctgccagtcacccccgcctgctctgcccctccgcgaaggatcccagagagcccggcgccaaccttagttgtttgtgaccaggggagcggctggaaagcagactgaatttttagaatgcgctggatttgcatattgtttt

SEQ ID NO: 51082 - DNA, 651 bp, Homo sapiens
  chr14:34529231-34529882
  hyper
ctggtgccctcgcttcggatgcaagatcccagctctgctgcagctttcgagccggagggacaatcgaaatgatcaaaaatgcccggcgggcagccttggcgagcgcgcggcggggcgcggggtgaagtctcgccagggcgcgccgcggcggacaccgagccacacgcactgtgcctgcgcccgcggccgccccgaaggtagtcggtaactgcggcgggcggcggccggggctggacagccagccccgcccggcaggctcgcagctcacgtagcgctagcgtgagtcagcgcgttccagcgcagccccgggccgagggagggctcccgcgcgcagcgccagcagcccgcacgtaccggccccgggagggggcgcctaggtggttccactcgcgggtgccctgtgccctgcagtgtccccacgccccaggttgtccccctcgaaagccacgtgggcgtggggctcgccttccctgggcggagtccccatcggtgcctgcccgcccggaagtaggggcgcgagggtgacgggcaagaccgagcccggcccgtgattcttcctcagccggagctcgaccttctccttgtcccttgcgtttcctttctttgaaccacacactcgctcgctcacgtttgtcccgactaagttgcccc

SEQ ID NO: 51083 - DNA, 30 bp, Homo sapiens
  chr14:34931807-34931837
  hyper
agactggcccagagcgcttgcggaagaaat

SEQ ID NO: 51084 - DNA, 137 bp, Homo sapiens
  chr14:35008735-35008872
  hyper
gggccagggtggggcgggagcccacctgctcaaagccggctcctcgtcgctaggctcttcaaccgcgtaggggtcgtagtcatccggaagccggttcatggtggcctgcagcggcctacaccgtccacaagcaattt

SEQ ID NO: 51085 - DNA, 30 bp, Homo sapiens
  chr14:35098769-35098799
  hyper
tggccccaaagtgtcgagggagggtggggg

SEQ ID NO: 51086 - DNA, 30 bp, Homo sapiens
  chr14:35183913-35183943
  hyper
cggtcacgtgggcacgcctggtccccagcc

SEQ ID NO: 51087 - DNA, 30 bp, Homo sapiens
  chr14:35451778-35451808
  hyper
gcgcaagcagagaccgccccaccctccgcg

SEQ ID NO: 51088 - DNA, 30 bp, Homo sapiens; identical to SEQ ID NO: 9594
  chr14:35452095-35452125
  hyper

SEQ ID NO: 51089 - DNA, 32 bp, Homo sapiens
  chr14:35591764-35591796
  hyper
gccgcgtttatggccgcgttaagtctgagtgc

SEQ ID NO: 51090 - DNA, 30 bp, Homo sapiens
  chr14:35761907-35761937
  hyper
ggtgtttgcacccccgtctggacgcaggga

SEQ ID NO: 51091 - DNA, 30 bp, Homo sapiens
  chr14:35872860-35872890
  hyper
ggtcagagagaacccgggccaggcaagcgg

SEQ ID NO: 51092 - DNA, 30 bp, Homo sapiens
  chr14:35873668-35873698
  hyper
cgcggcacctcctgcggctcgaggcggatc

SEQ ID NO: 51093 - DNA, 30 bp, Homo sapiens
  chr14:35874139-35874169
  hyper
agccactagggtcacggacagggaactttt

SEQ ID NO: 51094 - DNA, 1379 bp, Homo sapiens
  chr14:36002577-36003956
  hyper
tctccctactcctgctcctatcgagaagcacttaagagcgcagacgcccaggacccagccgcgctcgggcgtcccgactcggaggctggcggcgggcaggcacgctctcccgcgctgagagcccttctgcggagatgaactctcgagtgtcgccgccgcgcgcgggcccgatcgataccggcgggcggacgtgctcccgccgccgacagcagccacagggcggtgcagtcagctgtccggccgctcggtcgcacttctcatcagctcaatacccgcagaggacgtgcaccggttccctcccggacacccaccccgtggtctccgccgcaccttctgcccaccgccccttccgctcggccgtccggcgcagagcgggagcttttcagccagacgccctcgcgttgggggcagccgggtcccggcccgagcggagggcgtcgtgaggtggccttttcgcccggctccccagtgggacgctccgcggaggcagccaaggcggggagtgtcgagctccctcacactctggaccttaccttctggcgtcttcgcccgggaggctgcagggggaggcggacccagccggccacaggggcaggttcgcggcgctgtgaggcggggctgggcgtgcgccgccgccgccgccagattcgtctactccagtgaatcggcacgggagaaagccccgcccccggcgcccgctcccactcctgattggccgggccagcccggggaggcccggcgggaccccggcccgcgtctcagctataaagatagccccggcatgacagccgcggcgaagctcttctagttcatctgctggccggctctcagtccccgtggcgccccctttcctcttgtcccagagcgctctcgactccaccatgccaaggggattcctggtgaagcgaactaaacggacaggcggcttgtaccgagttcgccttgcggagcgtgtcttccctctgctggggccccagggggcgccgcccttcttggaggaggctcccagcgcctccttgcccggcgcggagcgggcgacaccccccacccgagaggaaccaggaaaggggttgacggcggaggcggcccgggaacagtcggggtcgccatgtcgggcggctggggtgagcccggggacgggcgggcgggaaggcgcggagtggcgggcgggtggcagggaaggtcccgggcccagccccagccccagccccagtccagcgaagccggcaggcgcagagctgcgtcgggcgttcctggagcgctgcctcagctcgcccgtctccgccgagtctttccccgggggcgccgccgccgtggccgctttctcctgctccgtggcgccagcagccgcaccgaccccgggggagcagtttctgctg

SEQ ID NO: 51095 - DNA, 654 bp, Homo sapiens; identical to SEQ ID NO: 9596
  chr14:36004080-36004734
  hyper

SEQ ID NO: 51096 - DNA, 100 bp, Homo sapiens; identical to SEQ ID NO: 9597
  chr14:36004821-36004921
  hyper

SEQ ID NO: 51097 - DNA, 125 bp, Homo sapiens
  chr14:36005011-36005136
  hyper
cgggagtgcccagcaaattttctcgtgcaagcactgcccgtccactttttttagctctccagggctgacccggcacatcaataagtgccacccctcagaaagccggcaagtgctgctgctgcaga

SEQ ID NO: 51098 - DNA, 30 bp, Homo sapiens
  chr14:36278517-36278547
  hyper
cacgactctgccgtcggtggcgaacggtgt

SEQ ID NO: 51099 - DNA, 115 bp, Homo sapiens
  chr14:36295570-36295685
  hyper
taggttgtgaggcccgggccgggggcggggaggagccaagggggcgagcaagctcggtggctgggtgggttggggcgttccgcgcgcccttcattgaagcggcggtggccgggct

SEQ ID NO: 51100 - DNA, 27 bp, Homo sapiens
  chr14:36789319-36789346
  hyper
tggaggaaaaaggaccctgaacgctaa

SEQ ID NO: 51101 - DNA, 233 bp, Homo sapiens
  chr14:36789412-36789645
  hyper
cgggttttcacttaggccaacctcacccactcttggggaggacagctgcaaggtaaacgactctgcaaccggtaccgccgtcctcctcactccgaccgaggaggctgggcccgggctccttccacacctcggcttcgggaccgcatcccacacctctgcaggcctagctgcccccggcctctgctagagaaaaagaatggcgaggagggaccggatggtttccatattcccag

SEQ ID NO: 51102 - DNA, 73 bp, Homo sapiens
  chr14:36973148-36973221
  hyper
ggcagcttttgagaactgcatcggggttaaacggcagagatcctgacgacctgggcgaccgtccctgcgcagc

SEQ ID NO: 51103 - DNA, 361 bp, Homo sapiens
  chr14:36973454-36973815
  hyper
ggaacgcaggctgaggtcaggctgaccacgccgcctcctcagtcgccgtatcgcggggctggcggccagcgccttagaagagcctgctccgccgcaggaagaaagacgcccgacaggcgcccactgcccgaacccacgcgggggccagtcagccagcgggccgtgttgggaaagctccgcgcggcggcgggacataggatccccatcggggacctgggcgacggcctgagcttgggcgcccctccagctgggcgtcatctccacacagttcttcccttgcgccgcgaattcagcccctgtgaagacgctttgggcattggcgagcaacaggggaaaaaacgagtcacttaaatgggagaag

SEQ ID NO: 51104 - DNA, 426 bp, Homo sapiens; identical to SEQ ID NO: 9600
  chr14:36974501-36974927
  hyper

SEQ ID NO: 51105 - DNA, 261 bp, Homo sapiens; identical to SEQ ID NO: 9601
  chr14:36974967-36975228
  hyper

SEQ ID NO: 51106 - DNA, 142 bp, Homo sapiens; identical to SEQ ID NO: 9602
  chr14:36975280-36975422
  hyper

SEQ ID NO: 51107 - DNA, 237 bp, Homo sapiens
  chr14:36977297-36977534
  hyper
gaaacagcagtagttcgctggctttgtttggtttcgtttatttgtacaaagaaagattgtgcgttaagatcttttttaaaaatccctgcaagttagagtttgcatcatcgtcgtgacctagtgaactaatatttgtatattctgggatcgaaattccgaggaagtttctgctcttccgcacaccagacttgccggtgtggtctccaggaggggttgggggccgcgtcctcagggggc

SEQ ID NO: 51108 - DNA, 191 bp, Homo sapiens
  chr14:36977738-36977929
  hyper
gggaggatgaggctgcggacaggaaacgaagggcctgggacagctgcttctcttggtcctagaaaccaaactttcgtagcgagagaccctaagacagctcgagatttcaagtgtccacacttctagtttagacatttggcaaccaattcggaacagccgggccgcgaggggcccccaggtctttggcggcg

SEQ ID NO: 51109 - DNA, 236 bp, Homo sapiens
  chr14:36977974-36978210
  hyper
cgcagactccccgccagtcccggccacacccagccagggctttgcagctccagcctgagaatgttagccccggcaaccccttctggcggttgttcctttaaaaaccaattcattttttccatcaagtcttctacccaatgggtagactcttcgttaaatgactgttaaccagtactgaggagaagcacaatcaacatagtttctctgtcacctttcttgccggttttttcctccca

SEQ ID NO: 51110 - DNA, 30 bp, Homo sapiens
  chr14:36978618-36978648
  hyper
tgccattgtgttaccggcccaaagctcaga

SEQ ID NO: 51111 - DNA, 30 bp, Homo sapiens; identical to SEQ ID NO: 9605
  chr14:36979743-36979773
  hyper

SEQ ID NO: 51112 - DNA, 150 bp, Homo sapiens
  chr14:36981787-36981937
  hyper
acacagctgcacaaggaggaacgcgtcagccagaaggcagggagagccagaggaacatggtgtccagcgtctcctaaccaggatctagccgagcagagaaaacattcagcctcctccctcccaatacccgtgtctgtcactttctttcca

SEQ ID NO: 51113 - DNA, 15 bp, Homo sapiens
  chr14:36982869-36982884
  hyper
cgcagtgtgtaccct

SEQ ID NO: 51114 - DNA, 485 bp, Homo sapiens
  chr14:36983114-36983599
  hyper
cgaagccactagagcggctctccaaggctctcgagaaagtcctagtgtttacatggcgaagtgggggtggggagaggaggaaggggggtgcagtgtgcaaaatctcccccactcctctcagccgttggggcctagggatgggtagggtactttggcggaggcaaagcttcgcggtgatctcggggtgaaccgtacttgctcccaaacctcggaagcttccaagcacctcagcgccaggggcatcctcagaatgctgatttctccgagaggggaggccagaaattgggcacgagttgatgcaggagattcccagaaaggaggactgtcggctttccagaagccgacggtgctgtaggggcggagggtgtccccaggttgcggaaccctcttgcactgctcccagcgcgcacctatttccctaatgaaacgcttcagattgcgttctaggtctcttcccgcagctgcgacaattcccccagccggga

SEQ ID NO: 51115 - DNA, 389 bp, Homo sapiens
  chr14:36983673-36984062
  hyper
cgattgagttcacctttccccgggacaagtaaacagacttcaaactatgccgactgtagacggcgaggagaagaatgtatttgatggaaactccatccaatgcaaagatgataaggccgagggtgccacagcctactaaaattgtgactcccaaaggcttcctcccagctagaatggggtgcggggcagccgccagaaccacagccgggcaccgccagccaggtccccgcccgggcttgggctaggctggggcaggttaagcgaagctccaattccgtgggatccggacctagagccaaacagcagctgcagtatccatgtcccctgcccggccggcctgagctgggtgccttagccacctacactcccggtcccggaaccacagctga

SEQ ID NO: 51116 - DNA, 30 bp, Homo sapiens
  chr14:36984320-36984350
  hyper
ccggagcgaggactccggccagtctgcttt

SEQ ID NO: 51117 - DNA, 43 bp, Homo sapiens
  chr14:36985989-36986032
  hyper
ctctttcctctccccagctcccgtcctcccttcaaaaaaaaaa

SEQ ID NO: 51118 - DNA, 123 bp, Homo sapiens
  chr14:36986348-36986471
  hyper
ttccttggtctaaacgcggccaggttgttaagaaaagtcgaagcgcgtggagcagcggtggatggtggtctgtgtggcgggcaggagggaagcggtgaggcagagcgctgggctagggccggc

SEQ ID NO: 51119 - DNA, 1189 bp, Homo sapiens
  chr14:36987301-36988490
  hyper
gcccggcccgccccaaccgacggcgccctcctgacccaggcagcctagcgctggggcccaagaggcccatccgcggggaactgccagcgcctgccccaggccgtaccgtcgagggggctgtactggagcgctcacagccccaaccctggctgccctccctcagtctcagttccctctttcgaaccaaaagacgcagtgggggaaaggccgcttctgctcctttcgtgcccagcccgggtcagagcattaggattagctggccacaggcggcgaactgggctcaggccgggagctggggtcctacggtagaccccagtttggagaggttaggagagggggtgttgacttccaaaagctggagcccccagacgctttgcctcttggcttctctcctgtcaggccccagtgagggcacctgctcggacccttagagtcccctctggaactgcgagtcctcccacctgcccagactccgctggagagagggccgggccgggcgctcgagtgcctcccaacagggcagcctccctcctggcccggtctagcctctccgcgctctgctcgcccctgctccttgagctcggggtcgcttcccttggctccccgaggtcttctgcgccgagcagagctgccagtccaccgcgcctaggagacgccgagtacccgcatctgaccgcaggaccccagcgctaccaagtgcctgttcttggacccccagccgagcagggggaagcatccccagctcccgcacccaagtccctggcgccgctgccgggccgccctccctgatgcccagcgcgcagcctgccggcgccgcgccttctggacggctctcgccgcacctcctgagctcagcccgcggccccgcagtggggcggcctcacttactggcggggaagcgcgggtctgggttggcgccgtaccatccggggccagaggcgctgttcctcatggtgtcctggtacggcggcagctcgctcatgttgcccaggttgccgttgcagtagccccccacggcggagtgcgagagctggggcacccccgccgccgtcatgtggtaggcggcggtgacggcgccgtggtgccccacggcgtgctgctgcatggccgctgttggcggtgccgcctggccctgcctgtacgccgccagcggagccccgaggccgccgccctccatgcccactttctt

SEQ ID NO: 51120 - DNA, 57 bp, Homo sapiens
  chr14:36988763-36988820
  hyper
ttgttttagcccggcgccaggttttaggcagccaccagaggcggggcgtaagcgcta

SEQ ID NO: 51121 - DNA, 148 bp, Homo sapiens; identical to SEQ ID NO: 9612
  chr14:36989192-36989340
  hyper

SEQ ID NO: 51122 - DNA, 1156 bp, Homo sapiens
  chr14:36989403-36990559
  hyper
cgcactgttggtctacgtgtctgtcagtctgtctgcctctcttctgccgccgtcagagggacacctctgctccccgccccctttccccctaccggagagaatccgagcgggcggagggggcgctgagtaggggatcgactgcctcccggaggctgtcccggatccccgagccacaacccgcccccgcagctcaggggtttttcagtgggccacccccgctaacacgcctcccccaaggtcttccccccccccccccacccccggccgagcaaacacagcactggcccccagagctgggaggatgggaaggggtctcacgggagggtccgtcactgaagttgccccacctcgaacaaacctggtgtccctgaccctcgcccatctcccagacacgcggggatctggggctggagctgactttccgaggacatcacagccccagcacccgagcccagagccacgctgttttcccctctgatgcttcagggagcgcgcgagcagggagcggcgtgagtgcccgtctgtctgttgccgggcggaactgagcctgaaccccggcggctggagcgctggccaggagggggcgaatgccgaggtgcgggcagctcagcgggcgggaggctgggccgaggctcgcctccgcccgcagctcagccatgcaaaagtgctcttgcttcccgggaataaccaaatatctttgtttaaagtggtggcgtaaatggccagtcgctttgtggccacgctggatattagtagatgaggatcattctgcttcaattgggcgcctctcatccgacgagcaagaaactgcttaggaggaagagggtttcctgtctgcgcgttcccaggcttcaagtgtgggccccgcgccttgagggtccttgggcgcctggcgagggggagctgtgggctgcgctccccagcggaatcgggggtgtcccccgcgttgctccggccaggccggggcctgcagccgagtcgactaccgagtggagcactgaacggcgcggattttgagaccgactccggtttttgtccttggattttaaacgtttttatcattgtttttgttttgctttctccttagctgttttagtctcctctgcgcgccaggggctgggagggcggagcgctccccggccggccccggcaggtg

SEQ ID NO: 51123 - DNA, 110 bp, Homo sapiens
  chr14:36990922-36991032
  hyper
ggggaggccaccctacgtttgcgcagggagacgcgctcgccgctggtgttgcgaaagaccagagcgaagcccggctccttgcccttccttcccaggggcttctctggggg

SEQ ID NO: 51124 - DNA, 122 bp, Homo sapiens
  chr14:36991094-36991216
  hyper
cgacgccgggcttaagcgaaccacagaggagaactggcaacgctgaatacagaccttgtctgcaggcgcgacctggccgggcctgagtcccgaatggggtctaattgcgaaggcggggtggg

SEQ ID NO: 51125 - DNA, 177 bp, Homo sapiens
  chr14:36991600-36991777
  hyper
tggctggcagctccccggcctccggctctgacagtccgggggcaaccaggcctgcagttctcgaggaaacccccagccccccacgtctcgttctggaccaggaaccccctccccaacaaccgcgcagcaagtggcgactctgggagctgaactggagtggagctcgaagtggctggg

SEQ ID NO: 51126 - DNA, 175 bp, Homo sapiens; identical to SEQ ID NO: 9618
  chr14:36991988-36992163
  hyper

SEQ ID NO: 51127 - DNA, 243 bp, Homo sapiens; identical to SEQ ID NO: 9619
  chr14:36992221-36992464
  hyper

SEQ ID NO: 51128 - DNA, 200 bp, Homo sapiens
  chr14:36993693-36993893
  hyper
cgcgggagcccggggcgtgcagacaggcggctttcacagacgcagcgggaggaaggatccctctactgctccctttcccgatttgaccgtctagggcctttgagaggactttccttttgggaaagcttttctcaattcgtggcctgtgggcaggctggggggtggggcgccaagtcatccgagcgcggcttctgcttctc

SEQ ID NO: 51129 - DNA, 942 bp, Homo sapiens
  chr14:36994138-36995080
  hyper
accgactccaggggcgccctctggcgggaaggggcctggggtaggagggaacctgagggagcgggttacaaagcagagaacagcgggagctcagcagctccctttgaattgcgaggaaaccaagacggagacgggaggtaggagcacgggcctgaagcggtcagccgaccctgtgaggcccgcgctgccgtgctacgccgcgaatccgccagacgcccccgtcggaaggggcagggacaccctcgggggcgctctagggttcgtgctgcgctaaggtaagtttcgcagctgctcctgataattaaaggacagattcccgaagcatccttgtggcggcgcggctgttttcgccccaggacctgtgcagcctcattcagctttaggtagtcgaaacctatagctctttctgccctctgttccccaacaaatctcagtcccaacagtgggagcccgtgggccttgggtgttcgagtttcccgcgggcttgccagcagcgctggggttccctcctccgctcctttcctcctctccaacctcccaccacagcccgtctcccccacatccccaacacttgtcccaggcagtttccggtggccgcagtatcgaccccaggccattggggtgggtgtgagggaagggtggagggggaatctccgaggcccaatgttttctgggacttgagggaggctgaattctccctcgctgcctaggacttggggtctgaaggttgcagaccgaggcgatccgcagcgccctcttccggcggccgtctggagaactgcagctttagagcggtctcggggaagctttgctactagtttccggctagggaaaactggtggtggtcggagactggtagtacatcatccacgcattcgctcattctaactgtccgcccgaccatacgtcaggctgtctatcggtccacccaaagccaatata

SEQ ID NO: 51130 - DNA, 943 bp, Homo sapiens
  chr14:37050375-37051318
  hyper
gcgactccgccgcccctggagcgcgagcgcgcttcagcttgtagcgatgattctggaaccagatcttgacctgcgtgggcgtgaggcgaagcaggctcgccagctgctcgcgctcgggcgcagacaggtaccgctgctgccggaagcgccgctccaactccagcgtctgcgccttggagaatagcacccgccgcttcttccttttctcggcgtccgagcccggagacgcgggcctagcggacggccgctgcgacgagtctggcgggctggtctccaggctgctctcgtccgaggctagggacagcaaaggagacacgggtgggtgagacgccggaccctacgagggcctgctgcccttctggcgcgggcgtggaggcactggccagagggcacgcccactagcccgagactttcgggatgaggccatttcctgagtccacatctggacatccacctctccgaatgcggtgacctcattcataccacagcggtcatcagcgggcctgagatcgtgccccgaaaaaacccaccccggggccctcttaacatgtccgcaccggtagttgcgctggccgaccagtttatcacaagctgggtcaccagcgccggcctcctccaggtcgactgcactgcagtgtgccgaggtttgcggagccctgagtgggaacggggtgggggtaaactcgccaacactggccatcccagacggaggcctggagatcgtggccgtgttttcaggcatggagagggggcggggggtggggtgggggcggcaggtggcggcgcgttttaaatttcaattattccgacctctagaaatcgtcagacacagaaaccccaaatctcggagcaccagtgccaggcagggatctgctcttaggatgtgccgaccgggatgaatgcgttaggggttcgaggacagggctcccgtttccaagactga

SEQ ID NO: 51131 - DNA, 6 bp, Homo sapiens
  chr14:37051678-37051684
  hyper
aggcgc

SEQ ID NO: 51132 - DNA, 204 bp, Homo sapiens
  chr14:37051713-37051917
  hyper
cgcatttacagcggaatctctgtttatataaacagctcttcccacccaggccgctttgaaagccgaggtccgggtctccagggtgttaagtacctgaatgagcactggaccagagccggggcgagcccggaaggtgccacctccgcccccgccccgccccgcaccccgccccgcaccccgccccttggcgcccagttacctccc

SEQ ID NO: 51133 - DNA, 188 bp, Homo sapiens; identical to SEQ ID NO: 9624
  chr14:37116106-37116294
  hyper

SEQ ID NO: 51134 - DNA, 13 bp, Homo sapiens
  chr14:37116652-37116665
  hyper
cggcctcagaacc

SEQ ID NO: 51135 - DNA, 619 bp, Homo sapiens
  chr14:37116771-37117390
  hyper
cgtggctgctcttggtgcctcatgggagcgcccggggtagggactcggctagtgacctgtaggacatgaggggcgagctgggagccgattcgcccacggcgtctccttcgccatggaggccccccacccattccactccggggttgcggccacgcaccataagagcaccttcaggtctgagctctttaggggtgggagtaggcagttcgtgagtccgggaaggcctgcggggtttcccgcctgctgcggacttagcgtggggccgaccggggctggcgagggctggcgaggactggcggggacccgcggggctgagccagctctcgcgaagccctcaagtgaggaacggcgcttgtggctgcgcgctctccgcagccaagttgcagggtccagcaggggctcaggtcctgttccctccgcagatcccggatctagggctctagtggtctcggccggagggaaggtgacgcgcagtgggcgcagacgcagagtgcggggcgccgaacgtgggaaggagcgggttcagcgcgctggtgagagtttcaggaaatccgggagagggcggtatttaccagtcccttccccgagagcaaccaggcaaatcggggaaggttagagg

SEQ ID NO: 51136 - DNA, 30 bp, Homo sapiens
  chr14:37118415-37118445
  hyper
aactttattgatgatcgtttgaaagttatg

SEQ ID NO: 51137 - DNA, 596 bp, Homo sapiens
  chr14:37123597-37124193
  hyper
aatgcccccgctagccgcaaggttcctgctggcctgtagagctttcgtgatccccgccaagatgcgaacagtaaggtcctcgtatggatcgcagtttttgtccgaaacctgaaaacactaacttgggatttcgcagttctggccctcgggcccgcctcggaggcgcacccccaatccccacggaacgaattccgcggctaaaatgcattttcccaaggcagtaaaagtgacccctgcacctaacaacctttgggctttctcttctcctgactaccacctctcgcagggtgcgctgaaatctctttatcgttatcgttttttataaatgaaatgatttatttattcgctgtttgcagggaatgaaaggagttgatcctgactccaagatgcattccaaagaaagaaaacgcaactgtagcccggactccgcggaggaaggccaactgactccactacgtgcacttccgagccacttgggcccagctagctgtgttaattatgggttctaattttattgcaactcggcacctcctggtttgttcccactatagtggtcttaaaaagaaacacacacaggcataccccagaatgaatcc

SEQ ID NO: 51138 - DNA, 98 bp, Homo sapiens; identical to SEQ ID NO: 9627
  chr14:37124481-37124579
  hyper

SEQ ID NO: 51139 - DNA, 659 bp, Homo sapiens
  chr14:37124992-37125651
  hyper
gcaagagaatccgcccggtagggcatagaagatgggttttcggtgaatcgtgaaaagacatgatcgggtttcccttggagcatggtggagaatgatgcggagccttggggtcaatggagagttgagggtgcagagggatctgaaagggggaaccaaaaatatcgggctttgaaattctgtggattttcaaaggcggttcccaaccttgtcaaaaactacagtgggtgcgcgatctaatctggctcctataggtggcgctgtgacaaggtgcggtggccgggagaggcggctgggggactcgaagactgcgggaaattttctgcgactccgacgctaacccgctgctcccagcctccgcttcctgttttcgagggattagctaggactgtgcaacaccagtctccgctctcggagtcggcacgggggctggtgggtggcgggatgaactcggggaaggcgacaggctggaaacgcagctcctcgactttgcagcgcaccaaccccctatcgccccgtccgctgctcaggtgcgaggattcgccagacgccacaggactgggggcgactcgcaagggcatcatgccacctagaggaaacgcgcagtgagtgagccctgggtcactgaaaatgggagaacgttcgagtcggtcaagatgact

SEQ ID NO: 51140 - DNA, 46 bp, Homo sapiens; identical to SEQ ID NO: 9629
  chr14:37125763-37125809
  hyper

SEQ ID NO: 51141 - DNA, 147 bp, Homo sapiens
  chr14:37126566-37126713
  hyper
gaataccagcaatcccgctcgccttcaacgcgtggggtaagggggggtggggaacaattactgagtgacgctaatatggggaaactgaaaagaaatgtcgattgtttttattgtaatagaaggagtgagcaaacagaaaaaccaacc

SEQ ID NO: 51142 - DNA, 815 bp, Homo sapiens
  chr14:37126964-37127779
  hyper
cgtgaggctccttgatgagaaggtggagaggctgccgggctattctccgagcatcttccggccgagctctgctcctctccgtgcgcttgcggcttctccttgggctagcgcgtccgcagtccctccaagtccaggccgcaggtcagtgtgcgggcgcctcctgtcctcctctcccaccagaggacccctgagggctgtctccatccccaatccccgcgactgctccttttagccgccatcccctcccgcagcgcagatcctgcaggggccagcggtccagggcggaccctccctcgccctgggcgcggggcgagcttctggctgtcacttgccgctgcagtttcagggaaactcagctggccgcttaccctgcaagacggggacatagcagagggccgagttctggagaagctgggcttgtttttctctctgcaccgcgcgcaatgccccaactgaccctgaagggtcttgcctttactgcatttgcccccagacggctagaagtcaatgcactatgaaaatcccagtcccggacctcggactctggctgtcttacaatccctgcaactcctccgagtggacaagaggcgggcaccgtcgcctgggcctcgcttggggggggggggtcctgtccccagcagggggcaagttggaggaatcagctccttaatattttctgctagctctgcttgtcataactgcaactcggaatagaacaacctctctcccgtgcatacgcacccccaactctcgccctatcctcccatccacagtcatcactgacctgtagacccggaggagcaggcttccggggg

SEQ ID NO: 51143 - DNA, 196 bp, Homo sapiens; identical to SEQ ID NO: 9633
  chr14:37128139-37128335
  hyper

SEQ ID NO: 51144 - DNA, 287 bp, Homo sapiens
  chr14:37129074-37129361
  hyper
ctgcagaactgctaaagctctcgcagagtccccagaccccccgcgggacatgaggtcttgcctgttcgtatgcgaacatccttgtacccgcctagcagccctgcagactgcaaattttccctgggtgcacggaagtagagcagatttggcgcagaggtcgatactcactgcctgtctgtgaggggggaggaggattccttcctggtcaagttgccgggcatgttcattccctcccgcaagcctaaggcagagtcataagctcccctacgatgcggcaaagtctcaac

SEQ ID NO: 51145 - DNA, 1990 bp, Homo sapiens
  chr14:37130071-37132061
  hyper
aaaattcagaagtaggcagaacgacagggcctctggagcttaatggaagacgagggaattacatccatgtgcagcgtcggtgtccactgtcttgggactaagtctctttcatatttaaacaaaactctttcgagagggctcgctggtttggagaaccctcacaaacgctgccaccgagggccaggggcccaggacagtggctgaatgtggcagagccttgggctccgtagtgagtgccccacgcactggcaattggtcgacttggggctgtgcgctagcgttagccgcctgtggttcagttccccgcacacggcgtggcccgtgcctcgagcctgtgtggctagtggttggccggtccacctggactggggggtcgccgcaggaagctggcggtaggaggaacctccctggccttaacagtggcccccacctgtggctcgggctccccgcaacctcctggtttctttggccggcctatcttctcacacctgcgctctcgccacctggcatggactgaagtgaggtagaatcggcaggtgacacagatcctctcctgacagtccccagaggcccgcatgacagattttgctaagacaactccctcacccctgtgcacggtggcgcccgcctcccacctatagccttaacttcaattctgagatgtccatcgttccccggaggaggtctcctcgggccccttctcccttcgagtcattcacattcagaccaaacgctttcatttgtttattcagcattttaccagcctgattttgctgtctttttgtgccgcttctgggaagatgtcaaacacccattttcattgtatttagtcacccaggtggggagctagcctgaaagagacagcggaaggagtttcctggactgcgctgtcgctcaccgacccgcaccaatcaccatgcagcttgccctcggacccgccccttttagggcgtgtccccagtgagtgatagacggagccgccctgccctgctcagcccagcccacgttgctgcttagattgaaatgcagaactcaagcctctttcatcggggcacagacttccttttacttcttccttttgccctctcgcctcctcctcctgggaagaagcggaggcgccggcggtcggccgggatagcaacaggccgggccactgaggcggtgcggaaagtttctgtctgggagtgcggaactggggccgggttggtgtactgctcggagcaatgggtgagtggcggcgggggactctgtcagagccgggaagggagggagggagcgagcgggcaagggagggagggagggagggagcgcgagggcgcgcgccactaggcgctcacattctctattgactttgctcgtgttcctacaagttgtaggaacacgctaagggtcagcggcgcacagcagttcaatgtgaacgctggctactgggtggctgttgatgccattttctgattttaagagaagggagctgtggcatcagcgagcccctcagcccgagtagcaaaccaagttttgtttcacacgcgcgcacacatgcaaacaaaacaggaaaagaaaagaaaagaaaacaaacaacaacaaataaaacaccctctagcttcccctagactttgtttaactggccgggtctccagaaggaacgctggggatgggatgggtggagagagggagcggctcaaggactttagtgaggagcaggcgagaaggagcacgttcaggcgtcaagaccgatttctccccctgcttcgggagacttttgaacgctcggagaggcccggcatctcaccactttacttggccgtaggggcctccggcacggcaggaatgagggagggggtccgattggacagtgacggtttggggccgttcggctatgttcagggaccatatggtttggggacagccccagtagttagtaggggacgggtgcgttcgcccagtccccggatgcgtagggaggcccagtggcaggcagctgtcccaagca

SEQ ID NO: 51146 - DNA, 263 bp, Homo sapiens; identical to SEQ ID NO: 9637
  chr14:37132290-37132553
  hyper

SEQ ID NO: 51147 - DNA, 203 bp, Homo sapiens; identical to SEQ ID NO: 9638
  chr14:37132602-37132805
  hyper

SEQ ID NO: 51148 - DNA, 278 bp, Homo sapiens
  chr14:37133048-37133326
  hyper
cttggagagtgcggccggggctggacttggggcgcagcccgggaggcccgagcctgcttggggctgccggctgcagactccgctgtgggcagagcagcttgcttggggatcactacggccgggagaagtctggccgggaggagtccagcacgccttggaaattgaagtattctccgattctggtaatcaggccaaatttgctcaggcaggaagttcaaatgtcacctaattggtttcgttcttatgcttcacttcattttcctcggaaatggaggtcc

SEQ ID NO: 51149 - DNA, 216 bp, Homo sapiens
  chr14:37135419-37135635
  hyper
gtgtcttccctcaggcgtgggtcagagaatttggaaaggcctactctgaggggagtaaaacttcaccaggccctgggctggaagcacaggaggtcgcggctgggcccagcgccctcgggaggccaagggcagggagccgacccaaggtctaagccctccagctctccgtcgcgggtttgggtcccgtctcaagagtggggcgcgcgggctgggcct

SEQ ID NO: 51150 - DNA, 278 bp, Homo sapiens; identical to SEQ ID NO: 9641
  chr14:37135739-37136017
  hyper

SEQ ID NO: 51151 - DNA, 331 bp, Homo sapiens
  chr14:37136294-37136625
  hyper
gttcggactttctctccggtggctctcggacaaacacgcttggccaatcctgcggagaggggcacccagataaacgtaacaaagctaccattttctcgactaaaggtcacattgtaatctcccaaggaagttagtgagaaaacctcaaattatacggactggctgtggaccgtttaatttttctttccctccgtccctccctcatgtctccaaaggaaaatttaaaacactcgtgtttttattttccccccgagaaaagctaaacaaccaccacaacaaaagccccagatttaagtctaaattcatcaccgtcctggagtcaagagttcaa

SEQ ID NO: 51152 - DNA, 87 bp, Homo sapiens
  chr14:37641119-37641206
  hyper
aaactaagtcagaccgaactggatcattttcaagtaaaataggtagcaaggcaaaaagaccgcctcaaagtcgctgcccttggggct

SEQ ID NO: 51153 - DNA, 30 bp, Homo sapiens; identical to SEQ ID NO: 9643
  chr14:37641949-37641979
  hyper

SEQ ID NO: 51154 - DNA, 131 bp, Homo sapiens
  chr14:37666878-37667009
  hyper
ttttgtccagacaacgttttgctctttcagaagagaaagagcgttctgcgctcgtcgtcttggattcgacaaccataagcatcccgttagggcaaccaccgcagcagactaagttcgactactttctctcc

SEQ ID NO: 51155 - DNA, 797 bp, Homo sapiens; identical to SEQ ID NO: 9645
  chr14:38052532-38053329
  hyper

SEQ ID NO: 51156 - DNA, 392 bp, Homo sapiens; identical to SEQ ID NO: 9646
  chr14:38056998-38057390
  hyper

SEQ ID NO: 51157 - DNA, 411 bp, Homo sapiens
  chr14:38057503-38057914
  hyper
gggctcaacaggagatttattcgctaggaagggaaaatgcccaaacaatgaagaactatctgcacttgtcacctcgagacgcttgctgtcctgctctgtccgccttccctggcaaccagctgtcctggccgccaacccgcgcgcgtcctaacgcgcgggtggcaggtcgcatcacccagaggtggcggagtgtgcggtctgagaactgcgagaagcccacaaagcaggggctgggcctgcaggctccccgcggtccagctcccgaggcaggtctccaaagtgcccccgtcccccgcataactagaaaatgtctccggcaagtaacagagcgagagctaaggccaacttaagcttggtggggtgaaggcaaggcgctgatgtttctaatacgttgaaaaggagaaagggaac

SEQ ID NO: 51158 - DNA, 101 bp, Homo sapiens
  chr14:38058219-38058320
  hyper
tctcatctggggaggcaattacgcgataattaagcgactcacacggctctttttatcttgtccgcggtgtggagtggggcgatcaaagtaaaggctgtcca

SEQ ID NO: 51159 - DNA, 231 bp, Homo sapiens
  chr14:38058545-38058776
  hyper
tcaactttaagttcttaggaacgacatttttgaatcaaaatttaaaacaatcttcacaaaatgcaaaatagcggctaccctaaaatgtcctgtcggtacaacgcttcccctgcgagagtgaattaactcccctcctcccacctcctccagagctaccctgatggctaagtttcgtttctcttttaatgagaagagagttcatgagtctccgttggacacaacttaattcta

SEQ ID NO: 51160 - DNA, 374 bp, Homo sapiens; identical to SEQ ID NO: 9650
  chr14:38060542-38060916
  hyper

SEQ ID NO: 51161 - DNA, 12 bp, Homo sapiens
  chr14:38061159-38061171
  hyper
cgccgccggccc

SEQ ID NO: 51162 - DNA, 989 bp, Homo sapiens; identical to SEQ ID NO: 9652
  chr14:38061332-38062321
  hyper

SEQ ID NO: 51163 - DNA, 508 bp, Homo sapiens
  chr14:38063798-38064306
  hyper
ccggctcctgctcccgctcgctgctgggaagaggcaagcgcttcctagagccgctgttttcaaagcccggagtttcctaaaactccctctccggctgcgagagtcgggacagagcagggcagcaggtcccgcttccaggcccggccaaggcccggccggggccacaccggcgggcgggcagcggtggcaccgagaaggcgcccccggcccgcctgcctgccttgcctggcgcccaccgctccccggcctcccccggcacgggctccagcggcgccccaccggccgcccgcctcgccttgcctctcacctcctgcgtgtctgcgtagtagctgttccagtcgctggtttcatgcccttccatcttcacagttcctaacatcctggagccaccctgcccaatacaaccatccagccctgtgcgaagcgacgggcggccgcgcggcgcggggcgggggaggggagctgagcagctgcagtcacccgagcgcccgcgcgggcccaacgccac

SEQ ID NO: 51164 - DNA, 1323 bp, Homo sapiens
  chr14:38064382-38065705
  hyper
gccgggggcaggcggctgccgcggagcgcggcgccggggagcgcctccgcgggaagtgagcgggctgcctctgcgaggcaagtgcagttgagctgatgtggatcttacgtcgcttgagtgcccacctcctcgtcctctccccatttgtccgccgcacaaagacgctcgcacctacaaagcccgaggtgcacctgcaaggcggccgcccgccagtccggccgccgcgcctcccgccccgccgcttcaccgctgcgcgcgacccctcccccgcgacccctcccccaagcggggccctcactttgtttgcaaagcagtgtaattggtttaggcccggaggctagggaaagagggaaatggggagggagggggtgtaaccccctttggaaaaagaaaaaataggcggggccaggcgggcgggcgggctagggctctggatcggaacctcgcagccggagaaggccgggggcggtggcgtcggagactgggcttagagaccttgtgggataactgaccccggggtccctccccagaggtacacgccaccttccgagcgcgggctgcggcccagtctcgcgcccctcctgctctttgcttcctccctcctgattcctgacccaaagttcaaccccgggagactggagaatacagacttttttttttctttcctcctgagagcttcagactagaaaagggaaaaagccccacttttgcttcgtcactagaaaccgggtcatctgagtcagccgagccaagtgacgttaggccgacccgggccccgggctagcagagcggaggcgctgccacgaaactcgtacctgcggctaagagcaggtgagtcacagcaccggtttatatctttatgacataactttttttttttgttccgcctcggtccgctcctctccccttgtcatctgtagcgaccacaaagaggaagaaactgagagcagatgtctgtgtgatagggcaggcggacccaagtcgggccgtcctccccctgccgggctcctcctcccgccccccttcagccgcttcagggagtgagctggagacgaccgtctggtttctgataggaaaaggtcagggggaggggacatctcccataacacgcgcgttagctgggagagcaagggcctgggcgcgggaacgcatctgcactgcgaaagagatgccaggcagaagcccgagactgcccgcagcggcgcttggtcctgtctgtgacccggagggtccgggctgagatctcaggggctcgcttggttcctaatcggtcctggacgtcggtgggagagtcttcccaacgcaaagtctctttactctcat

SEQ ID NO: 51165 - DNA, 239 bp, Homo sapiens
  chr14:38072482-38072721
  hyper
cctggacctgatgcccggattctggcaatcgtcagttgtaggaacaaagtctggagtagtggctggcatgagagtcagccctgacgacctcacccagggaaatgaggaacccgtgtgaacctaagaaggaaaccgctatggtggttgtggtggtgggtggctcagctccagaagtggtgaagcgactttcccgaaagggaggaagactctgggataattggcaccgcaaaaatttcctt

SEQ ID NO: 51166 - DNA, 1680 bp, Homo sapiens
  chr14:38677133-38678813
  hyper
agctgacatcctagctcttcccggaaaaactcgaatgtcgccctgccgttcctggggttggtgacaggtctggtcatcgcacggcggcagctcctcacctggatttagaagagctggcgtccccgcccgcccaagcctttaaactctcgtctgccagaacccgccaactctccagggtacaaagtacagcagggacgcgggtggagcccttccaagcggcgcagccttatctttcccgagtgaacacctaggtggattcccaacaccgcgcctggcacgtttctggagggagtctcaagctcctccagagctcccagctgcgcgtcctcgtttctgcagtcgatattcctgtgggagacacggggggctctgagcgctacgagctttattaagagatttgcgaatggttcactcaggtccctgaacactcccaatagcctaagctgcctgctgtgttatagcgcagaagcccctaacgcacggtggttgtcctttcttctcataacgctcgcagcttagggccagtttccgcgattctaagagtaattgcgtgggcacctgtgctggggccaggcgcaaagaagggagttggtctgcgcgaagatcgtcaacctgctaacagaccgcacatgcactttgcaccgaccatctacgtctcagtctggaggttgcgcactttgggtaaggagggcccggaacttccctggcgggtctgagctgcaaggcaagcgagggtgggaagagggaatttagggttctggactgcgggacgggagagaagctggggtctccagagaaaagggcagcaatggagggaaactgagatgaactccagacatccatgttcatggatccgtttgagtctttgctttgggtaggagaggagtggaatgagacagaatctatacctttggttcccacccgccctccagtaaggccgaggaactctcttggttcctctgagagcaagaggcagatggtgctgcgagggaaccccggaaggagccactaaagttgagcagagtgcaggactgggaaggaaaaaaatggggggcgggggggacaagccacctatgtgctctcctccctttctccaccccacccccttttttcgtagctgctgacgcgctggtggtgcctattaatcatttaccagtccagagccgcgccagttaatggctgtgccgtgcggtgctcccacatcctggcctctcctctccacggtcgcctgtgcccgggcaccccggagctgcaaactgcagagcccaggcaaccgctgggctgtgcgccccgccggcgccggtaggagccgcgctccccgcagcggttgcgctctacccggaggcgctgggcggctgtgggctgcaggcaagcggtcgggtggggagggagggcgcaggcggcgggtgcgcgaggagaaagccccagccctggcagccccactggcccccctcagctgggatgttccccaatggcaccgcctcctctccttcctcctctcctagccccagcccgggcagctgcggcgaaggcggcggcagcaggggccccggggccggcgctgcggacggcatggaggagccagggcgaaatgcgtcccagaacgggaccttgagcgagggccagggcagcgccatcctgatctctttcatctactccgtggtgtgcctggtggggctg

SEQ ID NO: 51167 - DNA, 227 bp, Homo sapiens; identical to SEQ ID NO: 9660
  chr14:38724298-38724525
  hyper

SEQ ID NO: 51168 - DNA, 381 bp, Homo sapiens; identical to SEQ ID NO: 9661
  chr14:38724978-38725359
  hyper

SEQ ID NO: 51169 - DNA, 84 bp, Homo sapiens; identical to SEQ ID NO: 9662
  chr14:39583444-39583528
  hyper

SEQ ID NO: 51170 - DNA, 30 bp, Homo sapiens
  chr14:39583755-39583785
  hyper
gttccagtctgttgcgagttcaggtctatt

SEQ ID NO: 51171 - DNA, 162 bp, Homo sapiens; identical to SEQ ID NO: 9663
  chr14:39735616-39735778
  hyper

SEQ ID NO: 51172 - DNA, 30 bp, Homo sapiens
  chr14:39736706-39736736
  hyper
tcctggaggagctacgcagggtgagcccag

SEQ ID NO: 51173 - DNA, 98 bp, Homo sapiens
  chr14:42074488-42074586
  hyper
gcgcagtccctcagcggctcggagtttggccttccagctctccaactcagatcctgagcctcctaagctcccgcggagaccctgaagtcccggatctg

SEQ ID NO: 51174 - DNA, 30 bp, Homo sapiens
  chr14:42074871-42074901
  hyper
ctcgagtatacgggcgcctgtgcacctcca

SEQ ID NO: 51175 - DNA, 647 bp, Homo sapiens
  chr14:42075396-42076043
  hyper
cgtctgtgccggtgaccttagagactaggtctggcttatgaagactgttgggctccctttctgcccttcacatagtaaaatgtgaccaactgcagtattcgtaatgtctgatgctgagctgagttgattcccaaatataaatgttcttttcagaatccgctcccatctgattagtaagcaaatcaccacccacaactaaggggacagcggaagccagcctcagatgactgaaacccccaagtcagtagctctcctcaaaatttccggcgggttattatagataatgacttttcccaccgccctaagcagccgaagcttgactcagtgatgattctctctatcccgtaactgcgaggaagtgggcgatcagcaaattgcccttttgcaggaggctggggacgcccctggaagttcgctttcattctccaggttttctgccttttcccttcccccttcctgcaacgcccccgcgcctcctcagcctggggatttcctggcgcttcgccggccctctccgcaaccccctgataaatcggttcagaaccagtctggctgggaggcccgagggctgacagcagcggagcggccccggccggggtctcacggactctcggggtctggccgacacggccgctcccgtcactgca

SEQ ID NO: 51176 - DNA, 288 bp, Homo sapiens
  chr14:42076105-42076393
  hyper
cgcagggctcagttccacgcggccaggaggccgccgttgcccacacgcgacgctttgggaagcccagctcccgggtccgccccggccgcggccgcagccccggacctcggctgcttgcctcgcgcctgaactgcggactcgccccagcgcggtggccagcgggcggggcgctgtgttccgcggcgcgcagggaggcggtgagcgtgtgcagagctgcccgaacggaggactatgtatgtgtgtgcgcgtgtttgcgtgtgtttgagcgtgtttttccttcttcccttg

SEQ ID NO: 51177 - DNA, 672 bp, Homo sapiens
  chr14:42076695-42077367
  hyper
agtgttttgtaagccgctttccagctagctgcgtgtgtgtgtgcgcgcgcgtgtgtacgcgcgcgcctatctgatgcatttgactgtcttttatccaactgcccagaagcaaatgtgttaactcggcgatgccccttcatgcccgggttcttgcagagctctgaggacgcccagacccattttcctggctggatttggagcggctgctgggctgtggacccaggtgtgtggatcgctttacccagaagcttggaaagcgccaatattaacctgcttccaggtacatcacaaggtcaagagagtgtcttgcagccctcttgtttccgtgtatctacaccttcttctcttggccagaaggatatttacgttttggttcacagcatttgaagccaaaagttcagcccttcgaactggtttgctatacaaaacaaaacaaaacaaataaggtaatgaggattgcttattaaactgcttaacaaaatccccgactcttcctcagccctttctcggctccctcctccccaccaaaatgtcaccagctcttgaattacgtggattcgggttggaggagaacttgaaggaaacgtgattaaagggctatgcgagaacgctctctttgctgcccgcggtccggtgggcttcgaagccaatcgtgagaaggaccggttccct

SEQ ID NO: 51178 - DNA, 319 bp, Homo sapiens
  chr14:42077488-42077807
  hyper
cgccctgcctctgcccgctccccgggcgcggagccgcgggtttcatggggcgattgcagcgattcccccacccagagcgacctgcgggcagcggcggcagtggcaggagccgcctttccgattccctacgatgcgggtgctgagctatggcaaagggcagcgaagtgacgagcgagacccgcgtacgactgtgaaagccacctggagccaccttgccgggattgtacctgcaggcagaaagtcttcctacgaccgtcttttcccttagaggcaccaggtaacaaaccaacgattactcgcctcacccaatttccttttg

SEQ ID NO: 51179 - DNA, 558 bp, Homo sapiens
  chr14:42078886-42079444
  hyper
aactaaggagtgttcgtttgtctcccgcctttgggagctgcttgctggctacattcagcggaggatttggcccagccaagctcagggtgccctgcttcaggaggcagtgactggggctgctggggggcggggggttctctttgctaacgccgtttaggaagtgtaggggcgctgcctgattttcccccactcgctgcatttctatagatatccatatgatggcatttgcagacttctagctggccgatagctgctctgcttgtccctgcgcactgacgtccccaactcctcttcgagtctgggctcggctgctgctgcagccctcgcaggctggtggtgctacaaggccatgtatgcagcgggctttgggggctgggctctgccactgcagctggcaggacggctttgacactttctccgggcagggcggaagagctcagcggaccccctggcagacagcaagcgcatcgtggccgaggcggccgcctggatgcgagaggagggagatgcccagagccacagaggagcgtggagggcggtggtgtcctgtctttgcct

SEQ ID NO: 51180 - DNA, 216 bp, Homo sapiens; identical to SEQ ID NO: 9671
  chr14:45431366-45431582
  hyper

SEQ ID NO: 51181 - DNA, 31 bp, Homo sapiens; identical to SEQ ID NO: 9672
  chr14:45432097-45432128
  hyper

SEQ ID NO: 51182 - DNA, 30 bp, Homo sapiens
  chr14:45553393-45553423
  hyper
atcttcggctaggtcgtcacaggctccggc

SEQ ID NO: 51183 - DNA, 30 bp, Homo sapiens; identical to SEQ ID NO: 9673
  chr14:45603849-45603879
  hyper

SEQ ID NO: 51184 - DNA, 35 bp, Homo sapiens
  chr14:45722602-45722637
  hyper
ttgtcttcaaagttcgtttcgtcttcgtagggcac

SEQ ID NO: 51185 - DNA, 30 bp, Homo sapiens
  chr14:48143181-48143211
  hyper
agtgctcatggcaaccgctggtgcagaacg

SEQ ID NO: 51186 - DNA, 124 bp, Homo sapiens
  chr14:48143412-48143536
  hyper
aaatcaaagactgctggagctcggattccccgcggggataaatcaagtgcaaagccgctcgttcgcacgagtgcgttgctgccggctaaacccaactccgagccagagcccaggcgccggggaa

SEQ ID NO: 51187 - DNA, 101 bp, Homo sapiens
  chr14:48143617-48143718
  hyper
cgccgggaggggccccggaacggcgcgagtcgtgcattttcgctcaccagcctatcttgcctaagaatcacaaggtcacgatagcgtcgcgattccactca

SEQ ID NO: 51188 - DNA, 160 bp, Homo sapiens
  chr14:48143797-48143957
  hyper
cgtgaacatgaacatatccagcccagggggtacgcaacgggaccttcaggaggccggcggccagccaggcgcgctccactcgcgcccgggccaagccgaggtgcccgggaaccgctcgccgaaggaggaagcgccgtccgtctgtccttccccggcggcg

SEQ ID NO: 51189 - DNA, 62 bp, Homo sapiens
  chr14:48144358-48144420
  hyper
cgaaggtccccggaggggcgtcaagcggcgacagcggcccgcccgcccgcagtccgaagccc

SEQ ID NO: 51190 - DNA, 86 bp, Homo sapiens
  chr14:48144677-48144763
  hyper
agccgccaccgccaccgctctccaaaatagcctttagcgcccggccagcgtagaggtgctctggccggccgcaccaattcccggag

SEQ ID NO: 51191 - DNA, 125 bp, Homo sapiens
  chr14:48145236-48145361
  hyper
cgcaggcggaccggcggccgggctgctgggctgctgggctgccggggaggaaggctgtgtgtggtcacgttgtgcgctacgtgctgagagcgcgagctgctagccgcagccgggcgacgtcaaag

SEQ ID NO: 51192 - DNA, 81 bp, Homo sapiens
  chr14:48145469-48145550
  hyper
cgaggccggcggcatctggcctccaacctcccccgccaaagcgctccctcgcctctcggggagctccgcggtggcgaatgc

SEQ ID NO: 51193 - DNA, 30 bp, Homo sapiens; identical to SEQ ID NO: 9677
  chr14:50022777-50022807
  hyper

SEQ ID NO: 51194 - DNA, 30 bp, Homo sapiens
  chr14:50053095-50053125
  hyper
aagaagctggcccacgcatgcgctcttcaa

SEQ ID NO: 51195 - DNA, 30 bp, Homo sapiens
  chr14:50065190-50065220
  hyper
gccaggtgtgcctccggagagcagccacca

SEQ ID NO: 51196 - DNA, 30 bp, Homo sapiens
  chr14:50066076-50066106
  hyper
cccagggtcctgtgcgtcttcctacggacc

SEQ ID NO: 51197 - DNA, 30 bp, Homo sapiens
  chr14:50088245-50088275
  hyper
tgacgctgcggtaccggtccctggtgtacc

SEQ ID NO: 51198 - DNA, 30 bp, Homo sapiens
  chr14:50101947-50101977
  hyper
gcagcgtacagtgacgcggtggaggtcggt

SEQ ID NO: 51199 - DNA, 28 bp, Homo sapiens
  chr14:50154755-50154783
  hyper
ggcgcgcggggagccgccgcggtgcgtc

SEQ ID NO: 51200 - DNA, 30 bp, Homo sapiens
  chr14:50160153-50160183
  hyper
gccgcccccacagccgcgccagggcttgac

SEQ ID NO: 51201 - DNA, 30 bp, Homo sapiens
  chr14:50234590-50234620
  hyper
cagctttcagggaccgattcaggacattat

SEQ ID NO: 51202 - DNA, 31 bp, Homo sapiens; identical to SEQ ID NO: 9678
  chr14:50238427-50238458
  hyper

SEQ ID NO: 51203 - DNA, 30 bp, Homo sapiens
  chr14:50319951-50319981
  hyper
aagattatcctcaacgatcgaggcgaactc

SEQ ID NO: 51204 - DNA, 30 bp, Homo sapiens
  chr14:50470488-50470518
  hyper
atgtgcgggcttcccgcttcctctttctct

SEQ ID NO: 51205 - DNA, 119 bp, Homo sapiens; identical to SEQ ID NO: 9679
  chr14:50511810-50511929
  hyper

SEQ ID NO: 51206 - DNA, 13 bp, Homo sapiens
  chr14:50582894-50582907
  hyper
gccctataaaata

SEQ ID NO: 51207 - DNA, 30 bp, Homo sapiens
  chr14:50583203-50583233
  hyper
gcttctccaaaactcgcacaaagctccgca

SEQ ID NO: 51208 - DNA, 30 bp, Homo sapiens
  chr14:50698772-50698802
  hyper
gagtccgcttttcccgagactgtgctgggg

SEQ ID NO: 51209 - DNA, 30 bp, Homo sapiens
  chr14:50778577-50778607
  hyper
tagctcctgggatccgaggttggagtgcca

SEQ ID NO: 51210 - DNA, 30 bp, Homo sapiens; identical to SEQ ID NO: 9681
  chr14:50863768-50863798
  hyper

SEQ ID NO: 51211 - DNA, 128 bp, Homo sapiens
  chr14:50999594-50999722
  hyper
ggcctgtagggtgacgggtagaggaagaagggcgatgggaacgtagccctccaagttaaacacggaaaaggtacgttaagggcaccgggccagaagtaacctggcagcggggcgccggggaaggaggt

SEQ ID NO: 51212 - DNA, 1183 bp, Homo sapiens
  chr14:51026823-51028006
  hyper
ctccccactccttcccaccagcgccacagcaacatcctcagagtctgagcgaactgcgcccagcgcgggcacggagcctcccaccgccagcaacctgcggccccggagaaggcagcgagcgcagtgacagcgcctcaccgccaccagctcctggaccaccatggccaagaaccgcagggacagaaacagttggggtgagtagcaaatgagaacttctgcagcctgcacggggtcttctggccctccactttctgcttctgtggagacagggagggccaagggctgctaggtgcctgcgtccacggctgggagacgggccgtagccgagccgctccctgtttgggcggaggaaccatggccgagcggtacccgcgtcaccgaatcgcgctgtcggggtgagggctgcagcttcgcgcaggccgggcctccagctccttcttccccacccccctcccgcctcctcccagcatttggacagcacccaccaggcgcctccggggacttgtgggttccgccttagcgatcggttgggaggaaggctatgggggtgggcagggggctgttgttactcggccccagaggggcgaggggtcggggatctagagcaggccaagccccaacccccctccccgggagccgccaactcgctggctctgcagggcgcgggctcccggcggcgggcggcgggcggcgcgctggaacaatgaggcggagcgcgccgggtcccggacggacggtagcagaccgagcaactgggagaagggccaccctcttgggaattcctgagcactgcagtactcctcttaatttgggggttgggtgggggaattggggaagaaggagagcaaagttgtggtttccagccttctgccccaccccgacgtggtaccccattcagaccagccccaagggtggctttgttctttgattttaccttttggagacattgggctcatgattcagcaccaggccgaggggaggggaaaggagaggcgagacccagtatgttcacaccgcgagtgggtgggcggtgctcacgcaggcggagaagaacgggcgcagcgatgcggaagaaatcgcggccccgcccgccttgctgctccagacctagttctggacggttagtgtgggcaggctgggcgtctttttgtcgtaggttcccgatttcttgcagtcacagtgc

SEQ ID NO: 51213 - DNA, 30 bp, Homo sapiens
  chr14:51134982-51135012
  hyper
gggccatggtccgccgcgggccgccgaata

SEQ ID NO: 51214 - DNA, 30 bp, Homo sapiens
  chr14:51298355-51298385
  hyper
cgcgaccctcctgccgggtctacactggct

SEQ ID NO: 51215 - DNA, 968 bp, Homo sapiens
  chr14:51410198-51411166
  hyper
gggagtgtgtgtcttcggggaggacgagtccagggcattgcctggccctgggccgcctttgcgaaagactcacggaattccaggagctacacccactcaggagaatgggtgggcggcgctctacgcttggagcgggaccctgcccctcctctgcaccacacttagccactcccagaggcctgagacttacgaccttttcccagctcggcgtttgtctcccctcccaaaataccaagctccagcaaggcaagatttttgtcccttttgtttagggctgagtgtccagggcagagaatagtgtccggcatacaggacaagaggcccccgtcacctcttgattaaatgctgagagtcaaagttccaaaaaagtttgtgaagtggacaggcgagaggggcctgggcttttgcccacctggcggtttccaggggcggacggcacagtggtttgggcgggacactggcgggtggcacctcggagacatgagttcggcgtctgttgggaggcctaatctgtcccccaggctgcccgcccacagcctagacacgtctcctctggacttcggggcaaggaccgggtgcaagggaccactctgaggggttctccacctcgtcccgcccggccgcggccggagactccgactccgggctggaccccggcccgccgtcccgcccccggttaccttggggcacttgtcgtagtagtgctgctgcgtgcggatccagcgccccaccaggtggtcgcgcaccgtgtgcgccagcgcgaagtagtagtcgcgggtggtggccacgttgcggtccttgaccagcgtgaagtgcaggtgccggttgaaactcttcttcagctctgccacgttctccacgcccacgatgccgcggatgctgatctgccgccgcttctcctggtccgtcaggggcttcgccatggctggggcggcgggctgcgcggcgggctgcgcagagagctggaa

SEQ ID NO: 51216 - DNA, 409 bp, Homo sapiens; identical to SEQ ID NO: 9685
  chr14:51560304-51560713
  hyper

SEQ ID NO: 51217 - DNA, 1891 bp, Homo sapiens
  chr14:51560770-51562661
  hyper
cgtctgctgcaaaaccggatgatcggagacgcagggagttaggagtgggttttcttaggactcaccttatgtagtttccacatggcccccagagccttgacttcgtggctggagtgtttgccctcctccaagcactggtagcacacgggcatcttgcattgcacgcagtacatgctgtggttctccagctcgtggtctgtgcaggtggagaccttgcgtgggctcagcctccggctcacacgaccctgggccgggggcaccaggcggtgcttggctaggggcccccggggcgggtggcagcgcaggcggcacggatcgcagtagaagacatcgcactgttcgcacatgacggtggcttccttgggcgccttctcgcagagctggcacttgagggccgcggctttgctctgctggtagcggtcaattaccccttccagtacgcgattcttggggaagccgcggagcccccggtcatccaggatgaggctgcggtgacactgggggcaggtgatacaggagttgcggggcaccggggccagggccggtgacaagtgggtggccggtggcggcatagccgggggaaacacgcggacgccgttgggggacttctggcacggggtagtgggggcgctggcgaaccccccgtaggagccatagccgctgtccgcctcgctgtataggctcatcttgtccaggtccagatagtcatagtcggagaccccggagcccgcggcccgatggctctggggggattcagactctggggtctgcaccaggatgttgcgggcgcacgcctgacacaaattgtgagagcagggcaggatgatgggctcccgatagaaggagccgcacacggggcatttcaactcctcttccatctcctccatggggaccggtctgggaggagacagcgacggctgcagcgggtgcctgagctggcgaggtggccgacgggcccgtcttgtccagcaccctggccagcggcggcggctgtggtggtggtgccttcccgcgcagcactggcacggacacccagagaggcgctagctctgtgagccgcagccgcgtagccgccgcgccgcgcgccagcccggaccgcccctacctgccctcctagtcccgccccggcccatgagcagcggcccattgggcggggggcaagagatcgaagctctcattggccaccagacccgtccgtctcctcgtctccgcaggccacagggggttcggtagagtctgaggatagggcagtcttcgctcgcggctgcaagatctctgaagggggccggcgtgcggaggctaggggaccgggaaggaggagttaggcgggatgattcatcctcgcccggcttacttccgacctccggtgcagtctcccaggagctgggggcgtgagaaacccctccccgcagcgagtgggctgccggagggggctggggcttctcgccagcgtttgcgtttggctcccagctctgagctccgcgcccacctaccgcgggcgagtgctgcgcagcacggaggacgccccttctcttccgctgctggcagccttcgcaggcgtctcacccgggcctaggcttctgcacggcagtggggcttttctccttctccgtgaatccgctgacgccgtgccctggagctcccccatcccgggagtctgacggcgctggcgcaagccctggcgacactcttggcttctttcatcctgcgtccctcgtttcctaaagagcatgtataaagtcgatttcctagtgtcgacatgagattcaactgggtaaccgatggaaatggtcagcattagtcagaatctatgaccccttcgtttcatgctttaaattatagctcggcccagaggcctcagtgccgtggtgtgaacgtgcttccttccacg

SEQ ID NO: 51218 - DNA, 1647 bp, Homo sapiens
  chr14:52117842-52119489
  hyper
cccccaaagccactatcgggaggggacaaaaataatttctgaggggccatgggcactaaaaccacagcagacagaggctgtgtctacctgaggaactggagaggtagaattagagggggaggctgggcatcctcggcggcgccccctccatccagcgtgaaacccacgaggcgcggcgtctcgagtggcgggcgggcagggggctgcaggattcacgaagccacctccgccggggaccgccttctctcggagtggcctcccctccggcgttccgctttagtaagacgacactcaggccaaacagccgcccccggccagcccgactcggctctggagggagcgccccgagggagtccagccggaggcggagaaggccactcggccagaaggtggggagccgccggcgtcccctcgcacctccgtctccacagcagggggaaaggccctgatcgccgtggtccacaccaccgcgtccacctgaggctcgcctcgcttcctgggtccctagaggggtggcgtactccgctttctcctgcccccaagtggccgcacccctccgcgggacgcttggttgggtccagggcggggcgggcgggcgctccccgtactgccgcgagctcagcgcgcagctcccgcggctcggctgccgccgcggccagttggggcgggtcgggggcggggtctcagggggcggggattcgggggggcgggtcgggtcgggaggcgtgggtggggggcggggcggacgcggagcgcccctctggctggcggggccaaggggctgagaggagtggggcaggctcggcgccggtaggaagagtcagaggggtgaccagagagcccaacgcctggtgctcaagactttctccgaggtatgaacaagaaccaggcgtctgggccctttccgctcgccccatcgctcagccgccgcgccccggacgcccgctgtgccccctgccggcggggcggcggcgggactgggtttcgggagggtttctggaagtcgcgagtcccagcgaaggcagtgcaccgctctccgcctctttcttcgccttcttctcgctcccttagctctgggtgtcgggcaccggtggtaaggtcgcttctccgtgagtcggaggtcgctcactctgggacgggcggacgaggccctagggcagccgagcccggcagcgggggaggcgtggagctcggggcggcttcagcggcgggggcgggaggctggtcctggctgcagactgcgcgcctgggctccgtgcgcggtccctggttctctgcatcgcggaggtccccggatcacagggctccctggcgggccccggcacccaggtctgtgtcgctgtggctgggcgccgggactagcacccgagtcccgcgctcccgggggctgcgccgtgccgcctgttgtgcgcgcgcagaggccggacagcccggctgcgggaagggacccgagcgcagggtctgccccgcgtcccggaaagtgcctagtctgcggagccggaggttgagctggggcagatcggcgccagacgggggcctgggtgagatacgagttgggggtgcggcctgcagaatttgggtttctggaggagcttacggcgcgctggcggagccccaggcgaacaggagcaccggattcggctccgg

SEQ ID NO: 51219 - DNA, 403 bp, Homo sapiens
  chr14:52313654-52314057
  hyper
ctttgtgtggtgcagcggctgggatcccactgcatctacatggcaaccaggaaatcagtcattcagagtttccatggtaaccagagggggggaggggtggaaaaatccattttatcacggtatgctgtgtcccttcctggaagcctacagaatttttagacagaggtcattatgaaatcaacaacaacaacaaacgcccgttggcatcaagacaggcctgtgaactggcatccccaggcaggctgcagactgggagggtgggagtgagcatgcagctgaccccaccatgaggcacagggcgtcgccttctcccctcagcacagaggagaggtgacgaatgccacttggtctctgcagcgtctgtagagggaagtctgtaagcgggagtgtcaaccccaattgg

SEQ ID NO: 51220 - DNA, 276 bp, Homo sapiens
  chr14:52327351-52327627
  hyper
ctacacatactcacaacgctgccgccgcgctccgtgggcaactcctactactgctgggctgggctgggctgggctgggctgcgccggagctcgcctgcacagatcagctccggagaggggaaaaccacgctcctcggaccaagcctcgggagctaaggtaaatgaaacgttttccatgttgctcgtttttaattgagaaaaacgaccgtcgcttgtggttttaaggtccgatttctaagggatgatagagacatcgcttcaggactaggggaaatg

SEQ ID NO: 51221 - DNA, 180 bp, Homo sapiens; identical to SEQ ID NO: 9690
  chr14:52455648-52455828
  hyper

SEQ ID NO: 51222 - DNA, 444 bp, Homo sapiens
  chr14:52534582-52535026
  hyper
gagggcagcgccccgcgcttgacctcctcgtaagcgcctacctgctcccaggtggccaggaaggcgtgggtgggggtaaagcgcgcagagcgcgggaagccagcgcgcacatagcgggcggccaggcccagcactgcgggggaggtgtcctctcggtacaggactcggcctctgccgtggctcgtgtcgatgtccgccagaaaaggggcgatggccgggaagtcggtggggaaatcatagtccacatactgcgtttccctggggaagtcctgagtggagatgatgccgttggtgcccacctgggagaggagagggacaaaaaggtgacagtcgctcaagcccaaggacgctaccctttcgcgcagggagggaagggaactgacttaggcaaaaagcctctctctccttccccactggccagggagtctggattcagggaaacaa

SEQ ID NO: 51223 - DNA, 208 bp, Homo sapiens; identical to SEQ ID NO: 9692
  chr14:52535055-52535263
  hyper

SEQ ID NO: 51224 - DNA, 770 bp, Homo sapiens; identical to SEQ ID NO: 9693
  chr14:52535334-52536104
  hyper

SEQ ID NO: 51225 - DNA, 109 bp, Homo sapiens; identical to SEQ ID NO: 9694
  chr14:52536342-52536451
  hyper

SEQ ID NO: 51226 - DNA, 698 bp, Homo sapiens; identical to SEQ ID NO: 9695
  chr14:52734303-52735001
  hyper

SEQ ID NO: 51227 - DNA, 379 bp, Homo sapiens; identical to SEQ ID NO: 9696
  chr14:52735044-52735423
  hyper

SEQ ID NO: 51228 - DNA, 174 bp, Homo sapiens
  chr14:52735451-52735625
  hyper
cggatcgggatggacgcggcgccaggcgagctgcgccctgggccaggaaggtttgctgctgagttccccaaattggattccttccacagccccgagatataactcagtttgcggagcgaaatgagggaaagttagagaaaggaagggaaaggctgagcccggcggtgtctccct

SEQ ID NO: 51229 - DNA, 1106 bp, Homo sapiens; identical to SEQ ID NO: 9698
  chr14:52781105-52782211
  hyper

SEQ ID NO: 51230 - DNA, 41 bp, Homo sapiens; identical to SEQ ID NO: 9699
  chr14:53161603-53161644
  hyper

SEQ ID NO: 51231 - DNA, 30 bp, Homo sapiens
  chr14:53162661-53162691
  hyper
gggtgcccgccccgcgccgccccgcccagc

SEQ ID NO: 51232 - DNA, 30 bp, Homo sapiens; identical to SEQ ID NO: 9700
  chr14:53173876-53173906
  hyper

SEQ ID NO: 51233 - DNA, 30 bp, Homo sapiens; identical to SEQ ID NO: 9701
  chr14:53197057-53197087
  hyper

SEQ ID NO: 51234 - DNA, 545 bp, Homo sapiens
  chr14:53257753-53258298
  hyper
gaaggggcctgggacgttcgtgcccattcaaaaccgatggctgcagagagcgcgaccaactgtctcatttcccacgccaaagtctggggagcgaagttccgaccccagtcccagttccagccctgccaggccaagaccagcgtatggccggaccgctggccatcatccttaacctctgctccaggcgcgcgtgcgttcaacttcctgggaaccgcgctccacaccatgtgcacccagctggcgaggattaacgcccagctcctccacacaacacccccgggggcctggccggggcaccagacacacctgttagataaacctgagggcaggcccgccccagcccccaggacacacggtcctgctctcgcgccccggccccggtccctcctcacccgtagaggccctgcggtcggcgctcctagccaggcgcgtcggactctcccccaccagtgtgcacagcaccggatccggatccggcttcagcgccagccccacctcctcctccaccgcccgcgccacagttgggaaccgcggcccagacgtgg

SEQ ID NO: 51235 - DNA, 1411 bp, Homo sapiens
  chr14:53416858-53418269
  hyper
acacatcccccgtcccgcgtaactacgcaattaaggttataattgggaggctcgaatcattacatatgaaaattcagagaatagcaaaacaaaataagacgcaaaggggaacaggtctatctgcttaaatactgaaagattttacatctccaaaaagcatttgcgagatgccaagatttctcaaatgggcccctcccccgtcgtgagcctctttcctccccctaccaattctgggaagtcattagttggacgcggctgggatgctactcaccgagtttctccaccagcttaagcatcacgcctccaatgtgcacctcgccggtcactctcagggtgacatcgcggttcaggtccgtcacatggacactcagttcccacgtcccgtccgcgtagcagccatctggcatccttatcccgtccagagccatggctccttcctgcgagcgcggaggaaatggctctcgtaagcgtcactcccccaaagaaaggcgaatcccaccgaattcgcagcgccggccacgggctgggaggtggtggaggacccggggctttcggcagaaactcgggagggcggcggcggccggggctgcgggaggaccctacgccccgctcgccccgcagcgttcctcggtcccggcgccgcccgccccacaccgtccccgcctagcggaccgcggagggcttcacctgccggccggccccgagacacagcgcgggctgactccccgttcccctccccgccgcgccccctcgggtcccggcggggtcccgctccctcaccgcgcgctcctagcgctccgggcccgggactcgcgcggcaacaggcgaggggctggaggctcgcggggcggcggtgtccgcgtccggttcctcggctggcgaagcgctgcctgtggccggagcggctaatggagtcccgtcgtcgcggcccctcgcctggctccccgcgctccaccctctccccgccccctctgtccgagcctggctgggctgggcgcgctggctccctccttcgccgcccgcagagctgccctgagcgggtccggccggcctcgcctctgcccccgccctcccggcgccgcgctcgggggagggggctgcgggtcccgggcggggcggggcggcgtggggcggggcggcgcgggggtggcggggggcgcggcggggcggcaatctcggccccgcggagcgctgcccttttatggaaatgaaggacccggctcaggaattgaatccaacatccgggctctaggcggcgggccctgaggagggggagcgggggagcgcgggcggcctttcccggggcgctggtggccggcggggcgtctagagctcaggctggactggggcccccgcggcgtgtgtccgcgctggcagcagggagagggggcttgtccgtgagaaacggccc

SEQ ID NO: 51236 - DNA, 30 bp, Homo sapiens
  chr14:53619585-53619615
  hyper
gtggtggttgtggtcgtcggtgcccggcgc

SEQ ID NO: 51237 - DNA, 30 bp, Homo sapiens
  chr14:54410903-54410933
  hyper
acagccctgatactatgtccaggcagctta

SEQ ID NO: 51238 - DNA, 1649 bp, Homo sapiens
  chr14:54420071-54421720
  hyper
ggaagctgcagcagtgcgttgctcgggatggcactacggaatggctcctaaaaggaatatttgaatataatgagactccaccgcagacaggctctgtttttcttccagcccctcggagtcacgtgagcgccgaggcccctcccgcggcaggcggcgaaagggcttgcgcgccctcccctcctccacagccccccgcccctcgcgggcccgcccctccaggcgaggccaacctccgcgcccgccgcccgagcctcagcggtccgggaggagctcccggcggcgctcggcagagccctcggccggtgccccgcggccgccgcgctcccagggctactggcgcagcgcacggagaacccggttctcggcgcggtgcgtcgtgctgggcccccgcgccgggccacctgaagccagaggatttggggcgcactgaagggactgcgtctcccagctcgaacccggcttaagtggggccgggagcgaggtcgggaaagtctcacccgcccaaagcctcaccaccgagaggcacttaaaaaggaaagcgcagagggaccctgcccacgcgcgtgtacacacacacccccccacacacacacaagcaaacacgagctccccgccacttcctccccagggtctcctcaaggccaaatattgctcccaatgacagccagtcaccccttggcgaacgcctgctaaggctccgaagagccgggccaccgatctagctcccggctgaaagcagccgaccttgtcacgcgcggggccgggaatgggagggagggtgttagagggtgatcgctgtgggaaagtgagagggagcggctgttagtcattgctccgggtccattaccgagaatccccaaacctagtccgccgctgcgtggcccctctccccatgcaaagcagacccccgaagaagccatgccaggctgagggacagacgccggggctcgaagctccgggcagattcagaaagaggcgtcgctgcagaaaggacgcatcacagttttcagatcttaatgtggccgaggttttacaactcccgacccggcgcagaaaggaaatcccaccatgttccccggagtcgagaaaacggtgaacagctttcggcctgcgctcgacctctgcgtctgcgtctctctcgcctcggcttcccttattttttaaaccaccaccacactccttcccccgccacttccttcccccacccccttcctccgttgcaccagcagcagagtcgcacgcagcaaatactccttcaagaattttacctacctacagttcaagcagttactgggatgtcctgactaatcgaagatgctgccgcgcgcgtgggtcgctctgcgcaagggcctcttcgaaaacccgactaggcgcaactcagcgttcagcagggccgggagcgccaggtcgtccccggggcccgggccccatgactcctgccccaaagcccactccacccgacctccctttcctgaggctgttcccagttgctgctttgggtcgctccggagctcaagaactcgggttgcctgccgccccactctccacgcacatacttggttttcttcttaggggcattggcaggtagactttgaggaagaaaagtaaaggatcgaacagctcagccctccctcccgaccgtggatgcc

SEQ ID NO: 51239 - DNA, 16 bp, Homo sapiens
  chr14:54421784-54421800
  hyper
gcccggcaagagccgc

SEQ ID NO: 51240 - DNA, 290 bp, Homo sapiens
  chr14:54421831-54422121
  hyper
cgctggggcgggctgcgaaagggttgggaagagcaaagggtttttttgttttgttttgagacgcagaagccctttaaaaagcccggcgaggagaggtccagaagtagagaaagcagacggaggcaagctgtgcccgcggggcaaagggacagtagaaggggcgggcgcccgggttccccggaaaaccctcggccccaaggaatctcctggggcgggagagcgcggttctaaaaccgagaggataggaaggggaagggggagttgtgtttcaatttcggattcaccaggat

SEQ ID NO: 51241 - DNA, 667 bp, Homo sapiens
  chr14:54422343-54423010
  hyper
tcaactcacaaaccgcgatccttggaaaccatcctccaaagcagtgcttggaggcctctaaggcccccggaccaactcccgctggaagaagcctgcagggactcgggaatcacgggaacctttcccgtcggttccgggcctggagggccaggaagagccgcgcgtccgcctttcgtcccgccaggaactccccataggacacgacaccgcaggaacaagcgtcctgggagcccctgggatcttggctgtcgtctctagggaccctacaccgtgaaatgatagaggcgaggttccttgggttccgcaagtcgacgaaaatagctcgtggagaaggcgcgtcctgcaactgcagttcgcaagctctcagggcgccccgccagctgggggccagattgggtgacactcccctcgacgcagcctccggagcggcgcgcactctccagaggccagcaggactgcgctctctaccgcagaacctgctccagctaggtgttctctccccatctcgccgtcgctctgccccctcactctctctggacctcagagccggttctctccttcctcctcccgcgctttccgtccggggatcgcaacctccagcccgtgggcaacgcgttcagcccaagaccccacagtttttcccaacgacccccctaccaagggcttc

SEQ ID NO: 51242 - DNA, 256 bp, Homo sapiens
  chr14:54423264-54423520
  hyper
caccataggtccctgcagtagcgggctcgccagcagcagctcctggggacctctgaacggttgcagtgaacctgggcgagggccggggactgtggcgctgcaggctcgagatagcttggacgggaatcccatcggggagacaagctagatactcagccggagcagcagcggcgtctcaggctcgcgtccctcagctcggatgccacactcacctagcttccgggccgggctccgcgctccttccctccctccctcc

SEQ ID NO: 51243 - DNA, 424 bp, Homo sapiens
  chr14:54430253-54430677
  hyper
agtggctggtggtggggggagcggctactgcgccttccccttgggcactcctctcgggtccctgaggcgacgccctagtaagcctccacgcacgtcagcgaagggtgggtggagggtcaccctgaccgcgccccacagctggctcccgcgctctgcccaccgccacgccaccttcaccgcgcgatctcggcactcccgcctttctcttgccctcgttatttttagttcggctgctgcacctccctgcctgcaacagctcgccccactctcagactcgttttgcaggatttgtgcccctggtggctaacctgatccacacttgaataaacagcgagcgcccgggcaacctgggcgagccacccgcgcggaatttgcatccatccgcacgagaggttcctgagacgctaagcgttctcgcctacca

SEQ ID NO: 51244 - DNA, 30 bp, Homo sapiens
  chr14:54686292-54686322
  hyper
ggcctgggcagggagcggccccccggctgc

SEQ ID NO: 51245 - DNA, 411 bp, Homo sapiens
  chr14:54686918-54687329
  hyper
cactgacttgatttgcgaagacacgcatgccttttccgagttggactgacgcacgccctcccggagcccgccccccatccgcagcccagttcggcgctcacactcctccggagcccccggctgcattcccgtaatgagcatccccctggaactgcctgccctttatcttgctggggggacccgcaccttttgaactgccatctgtagattgtgttggtgcactgacttgttaactgtgccacgctgtgaaggaaatggcatgatttagatcaagtgctcacgacggctgttcataagaaacacttgagccaagctgttgctgctcagaatgtgccctggggagaggggttccgtttcgggtcacggtcctgccttgtatgagggcaggcgcaaagcgctgcaatcccgggg

SEQ ID NO: 51246 - DNA, 30 bp, Homo sapiens
  chr14:54908212-54908242
  hyper
cgccctctgatggccggagtctgcgttgca

SEQ ID NO: 51247 - DNA, 30 bp, Homo sapiens
  chr14:54976300-54976330
  hyper
ttagaatttgccggcggaacagcaatgacc

SEQ ID NO: 51248 - DNA, 30 bp, Homo sapiens; identical to SEQ ID NO: 9707
  chr14:54976979-54977009
  hyper

SEQ ID NO: 51249 - DNA, 30 bp, Homo sapiens
  chr14:55031718-55031748
  hyper
tccagtccttcttgcgaatattcaacccat

SEQ ID NO: 51250 - DNA, 30 bp, Homo sapiens
  chr14:55032290-55032320
  hyper
catcccagcaagtgcggcagtgacctcggg

SEQ ID NO: 51251 - DNA, 108 bp, Homo sapiens
  chr14:55032357-55032465
  hyper
gggccccagaagggccgagggtcagccgagcggacgaaccacattcccaaggacaagcagcgggtggcagcaccgcccccgcccgagcgccctcgggtccctttctgc

SEQ ID NO: 51252 - DNA, 30 bp, Homo sapiens; identical to SEQ ID NO: 9708
  chr14:55032797-55032827
  hyper

SEQ ID NO: 51253 - DNA, 30 bp, Homo sapiens
  chr14:55034580-55034610
  hyper
ggggcgggctggggcgcccagggggctctg

SEQ ID NO: 51254 - DNA, 352 bp, Homo sapiens
  chr14:55367880-55368232
  hyper
tctatttggtggaatcgctctacactccttcagagaaataactggggcagggagattgcctttccagcgcactgtttttctttcaaaaaacagtgaacggtagaatgcttcttagggcaaataaataaatgtcaccaagacacacggaaggtgtagactggaaaataatgtctttggtcccagctgtagaagccagaagctttatttttttaaacacagaccaatactgcttctctggccaacaggcagcaaagtccccattttccactctccatcaccccatcttgcatcctacccacactgattgcatccccaccctctgggtgaaaagccgacacgcctcagacgctaa

SEQ ID NO: 51255 - DNA, 30 bp, Homo sapiens
  chr14:55369846-55369876
  hyper
tctgggcgcccagtcgccccctcttcaggc

SEQ ID NO: 51256 - DNA, 30 bp, Homo sapiens; identical to SEQ ID NO: 9709
  chr14:55493320-55493350
  hyper

SEQ ID NO: 51257 - DNA, 30 bp, Homo sapiens
  chr14:55493976-55494006
  hyper
ggaaccggcggaggcgatgaccgtgacggc

SEQ ID NO: 51258 - DNA, 802 bp, Homo sapiens; identical to SEQ ID NO: 9710
  chr14:55595809-55596611
  hyper

SEQ ID NO: 51259 - DNA, 30 bp, Homo sapiens
  chr14:55658383-55658413
  hyper
cgattggtttgctccgtgcgatatttgaat

SEQ ID NO: 51260 - DNA, 30 bp, Homo sapiens
  chr14:55738873-55738903
  hyper
tgtcactgcaggcccgggcggggacctggg

SEQ ID NO: 51261 - DNA, 30 bp, Homo sapiens
  chr14:56584859-56584889
  hyper
cataacacaggggccgagcctccgccgggc

SEQ ID NO: 51262 - DNA, 30 bp, Homo sapiens
  chr14:57046228-57046258
  hyper
cccttcctcgctcgcggttttcgacgctgc

SEQ ID NO: 51263 - DNA, 108 bp, Homo sapiens
  chr14:57260986-57261094
  hyper
taggccctaggtgcccgggtgggcacacttccgcgagggcccggggacagcgccggccaagtcttgcgggcaactgcacactcggttccgggaggcaggtactccagg

SEQ ID NO: 51264 - DNA, 233 bp, Homo sapiens; identical to SEQ ID NO: 9712
  chr14:57261174-57261407
  hyper

SEQ ID NO: 51265 - DNA, 414 bp, Homo sapiens; identical to SEQ ID NO: 9713
  chr14:57261465-57261879
  hyper

SEQ ID NO: 51266 - DNA, 178 bp, Homo sapiens; identical to SEQ ID NO: 9714
  chr14:57261965-57262143
  hyper

SEQ ID NO: 51267 - DNA, 866 bp, Homo sapiens
  chr14:57263779-57264645
  hyper
tctgtcacaccaacccaagggcggaaacggggcgactaggggaatcaggttttatcagagcaccctgcgctgacaggctcgggcggtttagaagagaaaatcagaggtgctcagggcacctggtcacaaacctgggcatgcagatgcctgatgggggcttggaccctttcgtggcacgaaaaggagagagactgctgttcatcttaaaagtctcgaaggaggcaaaaacccaggcggaagtcatggctgactctgatcctgcatcttctcattctggttgttttccaccgcgtctgctcccatttgcgtgggatgcgctggtctcctgcccgactcttttgtgttcctcttttgcatgattaaaaacacgtttctatatgcactaaaccatcacctagcactggcacgcctggttttgggttacagctttgtccgtataataacagcgaagttctccctgggtgtgagatgcgggttcgaacatgtggtgtgcgcgccagggctggccgcttccggttaagtggacgcggggacttgactgcgtcccctgccttgcaggtaactggaatgggttgcctggcaagttggccctgcccgggacgccgaagggaccgcttccccattccagagcctgcctctggccttcagggccgctgacaggtccgaaaagaaagagaaggcactcagttttaaaaaaaagagatctagaggactggggaaaaggggatgagccaaggcaaactgggaattgctcgggcttcccccgaaagcctcagctcagtgccgggggagaccccaacggagggccagactcccccaaatccagtggccgaagacctggatttcctgggaggatccccgggggc

SEQ ID NO: 51268 - DNA, 42 bp, Homo sapiens; identical to SEQ ID NO: 9716
  chr14:57264764-57264806
  hyper

SEQ ID NO: 51269 - DNA, 208 bp, Homo sapiens; identical to SEQ ID NO: 9717
  chr14:57265147-57265355
  hyper

SEQ ID NO: 51270 - DNA, 85 bp, Homo sapiens
  chr14:57265469-57265554
  hyper
cgcggcggagagcgggccgcccggcaccacgttccttctggcagttccgccccagcctcccagcgtcttgcgcctgtggcggcgg

SEQ ID NO: 51271 - DNA, 149 bp, Homo sapiens; identical to SEQ ID NO: 9719
  chr14:57265912-57266061
  hyper

SEQ ID NO: 51272 - DNA, 78 bp, Homo sapiens; identical to SEQ ID NO: 9720
  chr14:57270893-57270971
  hyper

SEQ ID NO: 51273 - DNA, 49 bp, Homo sapiens; identical to SEQ ID NO: 9721
  chr14:57271153-57271202
  hyper

SEQ ID NO: 51274 - DNA, 50 bp, Homo sapiens; identical to SEQ ID NO: 9722
  chr14:57272063-57272113
  hyper

SEQ ID NO: 51275 - DNA, 5 bp, Homo sapiens
  chr14:57272210-57272215
  hyper
cgggg

SEQ ID NO: 51276 - DNA, 111 bp, Homo sapiens
  chr14:57272910-57273021
  hyper
caaacttggaaaaaccgctcaaccactattattccacatttgaagtcatttccggtaatcattttcacctaattagtagtctgggtaattagatttcgaggtaagtaacag

SEQ ID NO: 51277 - DNA, 495 bp, Homo sapiens
  chr14:57274554-57275049
  hyper
cactatgactgctcacgaggtggcctctggagaactcatacctagaagctgaccgcggtcgcgcggcgagttccggcagccggtcggcgaccgcacctccgggcgcgagtgcctgggtcccgcgttcctgcccggcagccccgcagccccgcagccccgcagccccgcagccccgcaggcctggcgcccgaggtcccgctccactgcccgcgccccccgcgcagccttatatctaacggtcaattcgtgcaatctgtcgcttctccctcccccacgccttgttttttttttcttccaagaagcccatctaccagttgctgtgtcctcgctcaacaataattacctcgtccgagaattaattataataaatgttttcttgataaactaacgagataatccgaggggcacacgtcccttaattacaggccgccatgctcctctctgcttctcgtccgggctgattaattttctgcatgatggaaaggaaacaaaact

SEQ ID NO: 51278 - DNA, 87 bp, Homo sapiens; identical to SEQ ID NO: 9726
  chr14:57275210-57275297
  hyper

SEQ ID NO: 51279 - DNA, 11 bp, Homo sapiens
  chr14:57275674-57275685
  hyper
gtcgcccgcgc

SEQ ID NO: 51280 - DNA, 569 bp, Homo sapiens
  chr14:57276221-57276790
  hyper
gcgagcagtgagcgccggggcggacgagaagccagcgctcccagcctcctcggttatccgctccggtttccgctcacgttcaacaggggccgacaggggctcgagcggcggcccccggcccaggccgacccgcaagcgaaccgagcttccggcgcgcgggcccaaggaggcgcctggctttttattattgttgtttcaatccatccatctagttacatctgcatctttttgtctcggactctaaaaaggtccctgggatccatccaaacgaccccaaccaaatctgggggccaaaacgcaaagatcgcgggagaagcccagaacggcgttgacataaaaacaaaaccacaaacaaaaccttccaaaacaccccagattacattcgcagcgtttcgacgacgttttgcagaagcgacgacccccaggagcacgctctctgcctctctcccactaccgctctcatctctagatcacatttttctttttgcaacgatcgttattacacctcaaaatttgtaagagaaaaaatacatccgcctacagaactccacgttcgcagaggggcatcg

SEQ ID NO: 51281 - DNA, 86 bp, Homo sapiens
  chr14:57277301-57277387
  hyper
aacagggggaggaaaacaggccgctgctgcacggggggacgagcaggcaacaaatccaggcctccgacattaccagaatgttcttt

SEQ ID NO: 51282 - DNA, 247 bp, Homo sapiens
  chr14:57278053-57278300
  hyper
tagctgggaccacatcgggcctcgaggatgcgagtgtgaggtcgacaagatatcgtggaagagagcgaacgagggaggcccccgttggaaacagtttctgtgttagaacaaacgccaccaaacgaccgacactgcgaggcctggagctacctgggctggcgccgcccgagccccgggctgcgagcccagaggctgggaagtgatgggacctgggggcccgagccggagagtgcgacccccagcccaa

SEQ ID NO: 51283 - DNA, 141 bp, Homo sapiens; identical to SEQ ID NO: 9729
  chr14:57278621-57278762
  hyper

SEQ ID NO: 51284 - DNA, 727 bp, Homo sapiens; identical to SEQ ID NO: 9730
  chr14:57278837-57279564
  hyper

SEQ ID NO: 51285 - DNA, 48 bp, Homo sapiens; identical to SEQ ID NO: 9731
  chr14:57279642-57279690
  hyper

SEQ ID NO: 51286 - DNA, 40 bp, Homo sapiens
  chr14:57281265-57281305
  hyper
aggaccatgttgttccggaatgaaacggattaagattgtg

SEQ ID NO: 51287 - DNA, 108 bp, Homo sapiens
  chr14:57283300-57283408
  hyper
atacctgagatacacggtgcaaacgcccccggctccctcctttcccaattcacccacttcttaatttgagtttcttaatgtgcaagcgccagggccggctgtggtcag

SEQ ID NO: 51288 - DNA, 591 bp, Homo sapiens; identical to SEQ ID NO: 9733
  chr14:57283445-57284036
  hyper

SEQ ID NO: 51289 - DNA, 589 bp, Homo sapiens; identical to SEQ ID NO: 9734
  chr14:57284070-57284659
  hyper

SEQ ID NO: 51290 - DNA, 31 bp, Homo sapiens; identical to SEQ ID NO: 9735
  chr14:57734480-57734511
  hyper

SEQ ID NO: 51291 - DNA, 514 bp, Homo sapiens
  chr14:57735566-57736080
  hyper
cccggcgccgcccgcgctgctcccattgtcaccgcctcatacgccggaagtggaactgcgcgcgccagggaggttgtcgggaggggccggcgaataaaacgagcggcgaaagaaccgaaaaaaggctcgacgctaccgtgtatgaggaactttgatccttgcgggccaccattccggaagtagaatttagaggaagaaaataccggagttgcagggtataggtaaatttctcaaggttataggttggggttcttagaactttttgtggtgtgtgttggcctagagcgactcagaagcgttagtgacttcacctaaaaaagctaacctctctgctgagcgcgaccggtatgcggcgcaggatgagcctcagggcttctgttaagagtctgtctgagaaagccggtctgcgctgttcctcggtggcgaccttaattatgagatgagctaatgctttactgacttaaccatggcgcagcgggcagtgtggctcataagccacgaaccgggaactcca

SEQ ID NO: 51292 - DNA, 30 bp, Homo sapiens
  chr14:57857574-57857604
  hyper
tgttccccccacctcggccgccccccatcc

SEQ ID NO: 51293 - DNA, 89 bp, Homo sapiens
  chr14:57858260-57858349
  hyper
agcttaagaagcccttcgggcagggaggttgagcctggggaggatcggacgatacgatatgtccgatatgaatccgagctacaaatgcc

SEQ ID NO: 51294 - DNA, 145 bp, Homo sapiens
  chr14:58331876-58332021
  hyper
acctcctaaagatactgtaaccggagtaactcccgcgctggcagcgtctcaacagcccggagtgaacgagctgaccccaccagcgccgggacccacgtctgggtcggccgcccccgccagccccacccccgagcctccccagcct

SEQ ID NO: 51295 - DNA, 462 bp, Homo sapiens
  chr14:58332055-58332517
  hyper
cggggcatgtatcccctagggctgactttccgctaagtgaacagccatgttagcctcctccgggcgtaaatccaccagggtgagccggccaacggcggtcaggagcgctcaccaggtcccctccgcacctccccccaaggctacgactgtttccaaactcctgggcgcacccagccgggccccttgccctctcacggttcagcaccgaggacagcggacatacttttctccccggggggtccccgccgccaggaaggcggtgttgacagcgtccgcagggctgcaggtgtccgtaccgcgcgcccgcccgtccgcatccccgcggcacccctgcgcgcccacctcccttccccgcctcgcgcagggcagccgcgcggcgtcttacttttctggctggagtaacctggataatagccatagtagccggtgatccgcaggatccggtcctcgatagtggccacc

SEQ ID NO: 51296 - DNA, 114 bp, Homo sapiens
  chr14:58332593-58332707
  hyper
cggggcccgggagctggtgcaggtgccggagccgctggtgctgatcttgcagctcctgctcccgcgcccgggctctgactccaccgcccggcgcagcaccggctccgcatcaca

SEQ ID NO: 51297 - DNA, 71 bp, Homo sapiens
  chr14:58332908-58332979
  hyper
cgaaaactagacaccccaaccccacctgatgaaagggatgtttggtcagtggggcgcgagaggagaaggcg

SEQ ID NO: 51298 - DNA, 30 bp, Homo sapiens; identical to SEQ ID NO: 9737
  chr14:58546605-58546635
  hyper

SEQ ID NO: 51299 - DNA, 30 bp, Homo sapiens
  chr14:58618178-58618208
  hyper
gagcgtcctccagccgcgtcctgggggacg

SEQ ID NO: 51300 - DNA, 36 bp, Homo sapiens
  chr14:58619015-58619051
  hyper
ctggcactgacagccgacgccgtcgcccacgccccc

SEQ ID NO: 51301 - DNA, 245 bp, Homo sapiens
  chr14:58711340-58711585
  hyper
ctcagataccacgacgccaagcggctcaaagtacgcgaaccgaaggaggagcctttgctttccccaaccccgcctccattgcttctgcacatgcgcgccgccagcctctcgcggcccgcttttttcccacaatactcctcgtcctgggggccggagccgcggaacgagccacagagaaaaaggttattggttggcagttcagccaatgagcgggcctgttactagtttgcggcatcctgtggtat

SEQ ID NO: 51302 - DNA, 30 bp, Homo sapiens
  chr14:58764368-58764398
  hyper
acatggcaagtccccgaaatgcacttccaa

SEQ ID NO: 51303 - DNA, 30 bp, Homo sapiens
  chr14:58764930-58764960
  hyper
atgggacactccgccgccaatcctcgtgtc

SEQ ID NO: 51304 - DNA, 30 bp, Homo sapiens
  chr14:58766447-58766477
  hyper
ttctttcccttggtcgctccccgcagttga

SEQ ID NO: 51305 - DNA, 30 bp, Homo sapiens
  chr14:58862985-58863015
  hyper
cagccagcatgtgccgtgttgtgttcgcag

SEQ ID NO: 51306 - DNA, 30 bp, Homo sapiens; identical to SEQ ID NO: 9739
  chr14:58893725-58893755
  hyper

SEQ ID NO: 51307 - DNA, 33 bp, Homo sapiens; identical to SEQ ID NO: 9740
  chr14:59931088-59931121
  hyper

SEQ ID NO: 51308 - DNA, 245 bp, Homo sapiens; identical to SEQ ID NO: 9741
  chr14:59931193-59931438
  hyper

SEQ ID NO: 51309 - DNA, 111 bp, Homo sapiens; identical to SEQ ID NO: 9742
  chr14:59931719-59931830
  hyper

SEQ ID NO: 51310 - DNA, 30 bp, Homo sapiens
  chr14:59932273-59932303
  hyper
ggccagataaagtgccgactggcatgcaaa

SEQ ID NO: 51311 - DNA, 30 bp, Homo sapiens
  chr14:60043274-60043304
  hyper
gagtgcctcctaagcgccacctctgaggag

SEQ ID NO: 51312 - DNA, 137 bp, Homo sapiens
  chr14:60097109-60097246
  hyper
ggtcccgggtttcccgtgcgcctcaggcatgcactactgaaataaagagaataccctgacttttccagttgctccacacacagtccatcttggtggaatcggcagtggcctgcatcgtgcgggctttgggggctcgc

SEQ ID NO: 51313 - DNA, 167 bp, Homo sapiens; identical to SEQ ID NO: 9745
  chr14:60097406-60097573
  hyper

SEQ ID NO: 51314 - DNA, 763 bp, Homo sapiens
  chr14:60385979-60386742
  hyper
cgatcatgggccctgcgagtctgtgggtagcggctcaccctgctggactgcgcagatccagagaacgacacgagacctgcggttgctttggtttgccttttactaagttcatttctcagcctctctgcccactctgaaaagtctcccctttccccccttttaattctactctattttgtaaattactgttgtctcctgaaaattttggaatgcttaaaaggcactcaaaagcctgtccgagatcgactagaagaccctcggaaggtccctctcttctctggacctcactgggcgttcgtttgcccgcgccgtccttccattcggcttgccgggcgcgcagcggcttgcggctgtggtcagccaccttcccgggaggcggtggtcgctggccgcgggaaggatgccgcgctgggggtcggggttcgtcccggctgtcacgccaccttgtgacatcacagggccatgccctcggggctcaaggccagagaggctccgcgcttccaggacccgagagctaaagataatgaatgggagagagcgagactggaggaggtaacgaataagtccccaccaccttgcccataacgcgttgctttcagtcacgttccgcgaactggcgaaggtaagtgaaaagataagcgcaggtacagaaaaacctgccagcgagaagctcccgccgtttcccaggagccccaggtggggtcttccggttggacccctgcttccgctgattggttggaggtcgccaccacgtgatgcaaac

SEQ ID NO: 51315 - DNA, 198 bp, Homo sapiens
  chr14:60558406-60558604
  hyper
aaaacattcattaccgtcggtgtgttgagtggtaacgccagtgtgcgaattcattaatggaaatcacgggaccccgagcggttggagatctgccacacccctctgcctgcgttaagacagcctgacccgacctctggtaaattaatgcgcaaaatggcggttgcacgtctgtttccccaccccggcgcacaatcctga

SEQ ID NO: 51316 - DNA, 437 bp, Homo sapiens; identical to SEQ ID NO: 9748
  chr14:60794450-60794887
  hyper

SEQ ID NO: 51317 - DNA, 102 bp, Homo sapiens
  chr14:60798392-60798494
  hyper
gggctgctctggggacttggccgctttgtcacccgtgccggaagctcacaggccccggagatcccgccttctgactgcatcgccctctgccttattttttct

SEQ ID NO: 51318 - DNA, 10 bp, Homo sapiens
  chr14:60951979-60951989
  hyper
gccaagccca

SEQ ID NO: 51319 - DNA, 224 bp, Homo sapiens; identical to SEQ ID NO: 9750
  chr14:60952195-60952419
  hyper

SEQ ID NO: 51320 - DNA, 116 bp, Homo sapiens; identical to SEQ ID NO: 9751
  chr14:60952516-60952632
  hyper

SEQ ID NO: 51321 - DNA, 181 bp, Homo sapiens; identical to SEQ ID NO: 9752
  chr14:60952729-60952910
  hyper

SEQ ID NO: 51322 - DNA, 30 bp, Homo sapiens
  chr14:60972838-60972868
  hyper
ttcccggcaagacccgagcctttgtccaag

SEQ ID NO: 51323 - DNA, 249 bp, Homo sapiens
  chr14:60973758-60974007
  hyper
cctcagcagctaggcgctgggatcggggtcggctctcggctcggctcgcgggctgtaaggtctccgcggaccccaccgcctcttctgcgcgctaagggtgagcgccaagcaatttcgcgagcaatagccggcaaagtaaccaccccgagagggaaaataaacctctgcaaactggagcaagggggtgctttcctcccctggccagaagctccgggatcgcagccctcccgggtccggcttcatccctgc

SEQ ID NO: 51324 - DNA, 59 bp, Homo sapiens
  chr14:60974077-60974136
  hyper
cgatgtttctttctaaaagttgtccttccggctgattcggaagtcgctccaagggaaag

SEQ ID NO: 51325 - DNA, 30 bp, Homo sapiens
  chr14:60974368-60974398
  hyper
tgccctgcactcaggcgtggcgtgatctga

SEQ ID NO: 51326 - DNA, 440 bp, Homo sapiens
  chr14:60975448-60975888
  hyper
ttacaactaaacttgcgaattctcggagcatttcagtttggcccagtcctctttgtcctctggagacctctcgaccgagacaacgcatcgccccaaagtgaattcctgaattcctgtggcatcactgcctatttggtgggaaaaagggagggaggggtagagcggggtgggggagggaggagtagtgaacgctgccgcactcgcctctctttttctcccagacactcgcatgtcttttcaacctccaggttctgcaaaatactgaagaaaagtccaggagctaacggcgggcgctgtcgagcacggggaggtgctgaaatagtcctggcgtgctgattcaagctttgattggcagagccacccggtgactgacagggggtctccatggcgcccgcgccgccaatccgcccaccccaatagcggagccagctcgcctgccg

SEQ ID NO: 51327 - DNA, 396 bp, Homo sapiens
  chr14:60976074-60976470
  hyper
cgctccgggctcagtgccctcgccgccgccggcactgcctcgatgttccagctgcccatcttgaatttcagcccccagcaagtggccggggtatgtgagaccctggaagagagcggcgatgtggagcgcctgggtcgcttcctctggtcgctgcccgtggcccctgcggcctgcgaggccctcaacaagaatgagtcggtgctacgcgcacgagccatcgtggcctttcacggtggcaactaccgcgagctctatcatatcctggaaaaccacaagttcaccaaggagtcgcacgccaagctgcaggcgctgtggcttgaagcacactaccaggaggctgagaagctgcgtggaagacccctgggacctgtggacaagtaccgagtaaggaagaag

SEQ ID NO: 51328 - DNA, 111 bp, Homo sapiens; identical to SEQ ID NO: 9756
  chr14:60976802-60976913
  hyper

SEQ ID NO: 51329 - DNA, 47 bp, Homo sapiens; identical to SEQ ID NO: 9757
  chr14:60977338-60977385
  hyper

SEQ ID NO: 51330 - DNA, 83 bp, Homo sapiens
  chr14:60977629-60977712
  hyper
ccgcggactcctgcccgacctctgtcgccttgccgagtaatcctcgccttaactgctggggtcttcggaagaacctctagccg

SEQ ID NO: 51331 - DNA, 410 bp, Homo sapiens
  chr14:60977879-60978289
  hyper
cgtcgccaccagcccggccgccagtctatccagcaaggcggccacttcagccatctccatcacgtccagcgacagcgagtgcgacatctgagttgcccatccaggatgctcagaagcagattccagtgtaaaaacgagaaaaacaaaatgaaagaggggaagaagatgagagacctgcaaatccagcgccacagaagccaggtgaccagggacccgcgggctcgggttgccgtttcccgccccaccccgcggccggcctggcttcactggcgccctttggccgcgaccacgggaaccagcggtgaggcctgacccagcaccacgttcttcttgctttgctttttcctaaggattttgctgcaaagtctccttcggaacccgaactgcaagctgagcgcctgcccagattc

SEQ ID NO: 51332 - DNA, 30 bp, Homo sapiens; identical to SEQ ID NO: 9760
  chr14:60981226-60981256
  hyper

SEQ ID NO: 51333 - DNA, 335 bp, Homo sapiens; identical to SEQ ID NO: 9761
  chr14:60981477-60981812
  hyper

SEQ ID NO: 51334 - DNA, 395 bp, Homo sapiens
  chr14:60981972-60982367
  hyper
cggtccgctcccaaagagaagcccagactgggcccacagtacccgggaaggtgagtccttactcgggggcccagatctccccacggaggccacagatctgggtccccgaggaaggagagccccccttttcgcgcacccaccttttccatccagcgccccgcgaactcgcggacgtgtaggcctcgagccactcctactgttgggctgcgtgactcagcggctcgaggagagaaacctctcaaaaccgggggaccgagacggggttcaatttaaacctaggtgggagaatgagcccacaagcgcgcgcccctgcagctgcggaggcgcgcgcccgcccaccctcgggcgcctgaagtcgcagcggttgcagagcctcgagcccgtggatgcggcgc

SEQ ID NO: 51335 - DNA, 15 bp, Homo sapiens
  chr14:60982573-60982588
  hyper
cgccggggttagcct

SEQ ID NO: 51336 - DNA, 208 bp, Homo sapiens; identical to SEQ ID NO: 9763
  chr14:60982798-60983006
  hyper

SEQ ID NO: 51337 - DNA, 315 bp, Homo sapiens; identical to SEQ ID NO: 9764
  chr14:61104241-61104556
  hyper

SEQ ID NO: 51338 - DNA, 359 bp, Homo sapiens; identical to SEQ ID NO: 9765
  chr14:61104623-61104982
  hyper

SEQ ID NO: 51339 - DNA, 30 bp, Homo sapiens; identical to SEQ ID NO: 9766
  chr14:61108312-61108342
  hyper

SEQ ID NO: 51340 - DNA, 30 bp, Homo sapiens; identical to SEQ ID NO: 9767
  chr14:61108572-61108602
  hyper

SEQ ID NO: 51341 - DNA, 30 bp, Homo sapiens
  chr14:61108991-61109021
  hyper
cctgtgcgggaagcgcggggcctgggaggc

SEQ ID NO: 51342 - DNA, 135 bp, Homo sapiens
  chr14:61109303-61109438
  hyper
ctctcaggcactccgcgggccgggccactaggccccctgctcctggagctgcgctatgatccgggtcttgagatgcgcgcgattctctctgaaccggtggagaggaggctctgccccgcgcggagcgaggacagc

SEQ ID NO: 51343 - DNA, 1001 bp, Homo sapiens
  chr14:61109703-61110704
  hyper
gaggaaggcccgctccgcgcgagttctgtgccaggtgtcccgttggccctcagcggacaagggagagccgctaataagggtcgctgctcagcaaactcagagctcatccataagtgccaacgccactgcttctttctggaagcttccactccggcccggggtccggccccagccacgctgtcctagcccagagaacaggttcaagaacggtggtgcccagccccagcggtgcccttctccgtccctgtagctcgctgggctcttgagcccctacccactaagccaaaaattcgggaaccgggagccaaaccccttggcctctgagaatttaggaagcttcgttttcagccaagaggtcaaggcgagcagagagtggggactcgaacaatcgcgtgtttaggtttaaaacgttaaaaaataaacatcactcgagtgttttttttttttttcatttcacttggcacaatgctgtatggtttcgtcctacaaactatttataagccgttgttcattacttttggctaccgttatgacatctgtagaggagaaacgaaaagtggctttagattcagttaaactgcgacgcccagaaggtaaactggaggtcccttaacagctggttctcgaagatttcctcgagggaagaaaaaaatatggttagtttcccctaatgatctctctgaaatgattgccaaaaaaactcaaagcaatatccagctttctcgcctcctcctgctcgccccttttacccagactgagccgaggatggcggaaggaggcacattgtgcaatttcttattaaacacatctggaatatgcgcgctctggatttagtgccaggggttttacaaagagtttatgactgtgacagaaaattgtccttttaacaagtttacaagcagtaatcacgggggcttttacaggaccagcgctcttgctcctcgccggatctgcagacatttccaagattcaccaactaagggagcaggaagtgggccggg

SEQ ID NO: 51344 - DNA, 2455 bp, Homo sapiens
  chr14:61113948-61116403
  hyper
gcttataggacggccgttttgtaactaaaggctaactgcaaccatacaatccctgttcctgtgttacttgctaactcttcagcccctcgtgtccccctctcaaacttcctaccaacacccaccccaacccatcctttctgggcaggggaaacttcgccgccccgcacaggctgccagcgggcgcggcgcgctggggcgtcagtccgggcactcggtaccggttaacttcaggatttcgcttccctcgccgcttccgccttccgagtgctcgtcagtcctcccgactcctagcgcctgtctgtctcctttctttccccttatcctcacagtctctgtctcccgacaagcccatttcagcagaatttatcctggctctggttttccaccaagacaagaaagggagcaagatcttcggcccctagtcttggaagcgaacaaaggaaaacctaaccggcccctgcgctcaggttttcccccaaactctttggcttcgcggagcgctctccccgccacagccacctccccaccgtccttctgaatctctgtccgaaacgctatagagaacagaaggagcctgcccaggtggccgaaggtgttgccccgaggtgggggaaagtagagaccaatttttaaaatattgccttgtgagctccagtgcgagagagggctgcgactggagaccctttcctcgtctgggcatgcggcgcggtcagccagaccgacgggctgcagtgccgggccacgcgcgagcgagcacggcgaggatcaaccctttcttaatttggggcgccggggagtaaatgcagcgccaactctccccaaagctctctttttgttgtatctttaaaagtctcctccatttgtccagctagtgagaaatgaagcaggctacctctaaaccaaaagactatcaagagagagctgtggagaaccaggcgggagtgggggcagagccaatgtctcaggccagcttcacccctctggggagcaagaggagagaggttcgcgaacctcagctcccaccaaacccctttccttgcgacaccaatcaacatttcactgcccgttgatttagaaactcactctccacccaccactcatagccgcggccagccagggaggcataaagaccaaatctagcgccaatatttcccgacactcacatcccagagaaacccacgcgcgggtgctcaaagcaaatgaggccccatccttagcaaggaacctcagagttcatgaactttcgctgcagcgccgcggagggcctgcgcgccgccccgtggacgggctccggccggcggggaggacttggtggctggtgcctgcgggggcgggagggggcggaggagaaaggacggcttcctagggtcgcccgagtcgcgggaagcacgccgcgtacctttccttggcctccgcggcccggtctctttgcctccggttcttaaaccagttgctgacctgggtggtggtgaggccggtggcctcggccagctcccgcttctcacgcggcgatgggtagggattgtgcgcgtaccactcccgcaggacacccctcgacttctccttgaagcagtagctggtctcctcgccgtcccagatggtgcgcggcagtggaaattttcggcgcacccgatatttgcccacggcgcccaggggtcggccgcgcagcttctcggcctccacgtaatgcgccttcagccacagttgctgcagtttggggtggttgtgaggcgagaactggtggctctccaggatcttgtagagctcacggaagttgccgcggtggaaggcgaccaccgccttggccttgagtacgctctcgttcttgtgcaggtggtcgcaggcgggcagtgaccacaggaacctgcccaggcgctccaggtttccgccttgctgcagaacctcgcacacgcacgccacttgctcctgcgtaaagccaaacgacggcagcatcgacatggctggggcctgccggggcgcacggcccaggcgcacgcggcagggagcagagccgagaggcagggggcggcggccgcagggaggggggcgcggctgttcctaacctcctccttaggctttgcaaaggcgaaaaccggagtcggaacttggcggtgggcggccaaggaagagaaggcggaggagtaggggaggttctggacacggaacggccggcgcactcagtagcctttaaggccttgctgcctccgacctcccgcccggtggatgctgctagttgccggggaacttggtttctgttctccccgcagcggccttaaagcgcgcagcgtccccggcacgctgattggctgccggcggcgcctatccggggctggccagccagcgcgccgcccggctgggcagagaggccgcaccgcccagagcggggagggcgaggctgcggagctgggggttgggggtgttgccggggctgcgcgggtagggagtggtgggagga

SEQ ID NO: 51345 - DNA, 106 bp, Homo sapiens; identical to SEQ ID NO: 9772
  chr14:61117129-61117235
  hyper

SEQ ID NO: 51346 - DNA, 1513 bp, Homo sapiens
  chr14:61118742-61120255
  hyper
cgggaacccgggcagaaaagaggtgctcttcctcggaggccgtgactgggccggccaacatttttcctcccgcttaatccaatagatcgcgtaactggaaagggaaagtgctatgcgctttataccaaggagtctacctgctatttcgatccctcggttaggggaaccaattgttataaatgttaattattggctcggatatataaggtttcccaaaatggaacctttcactgaaaaccgctgaaagaggtaaaatgacatgaatttacaaaccacctaaactaaatgatccattttaaatcgcacacagaaaggtttgagttgttctcgtaacataaaacctttgctgtcaatgcaaatcgcacgaaaagcagagatgcgttggagatttaaaggaaatgagcaactctagccagccggctgctgccctcgctgcagcgcggctcgggagggaacaccgctggcaaggagcgcccgatgccaggtttcggctctccagtgcctcctctgtgcaggtaacggccgcgtgcgctttagtcgatgaaaaagcattcagtgggacagcattagctgttgctagggtttctcggctgggttgacaggccttgatgcaaacacccctagctgggacccacttgtttcccttctggcttgtagcaagatagttaggggctcccgggccgctttcttggaattctttcaccatccagaacgacggtgaggattctactctacctacaaatatttggaaagggagggcatagagaggtgtttcttcaataaattcgtgtcatcgctctggggcagtgcggagactccccaaatccggctgaagtgccaaaattctttttcctctgcttagtcggaaactccgggtgccctcgacccttgggaactccggctccgatggccggcgtggcgccggagcagcagcccacctgctcctgggggacgccgctccccgcgaggtctgaataggcctggggctcaggcagagagatttgcggactcagagaagagaaacccaaaaccagtccattagtaaatgagttttgtgttgtcaaggttctttcccatccacttgctgttctgaaaaatagatcacgtttcgttatctttagtgggaatctgcaacgtgacaccggatccgcgcggcccccgcctccctccctgcctcgctctgcctggctgaggggagcaggcgggcctcctcagcttatttctgaacaatgaagatttgtctcttccccaagtgtatttatgtatgtatggagggaggaagttttctcctggaagcgggaagctcgagagcagagcctcctacttctttggtgcgaaaacgctgcgctggcccaagattcagggcgactgacgccccccaccacctccaccgcccacacctggacaaacagagccagctgtgagcctggctcgccgctgaaaaccctgccgccccgcgcggctcccgaaaataccatctccgtattgtctcgaggtcagggaagggagaaag

SEQ ID NO: 51347 - DNA, 193 bp, Homo sapiens
  chr14:61120572-61120765
  hyper
cccctcggctctgggcgctcgtttttttctctccgggactgggcgctgtgaggtttcacagagtgtgcttatgtcacccactgaggcagcgcaggtaagttctcttgaaagtagaccctcaagtctgggcggtgtagtaggccttacttggcgagaacctttcacagggagtggagggcgggcaatagatggt

SEQ ID NO: 51348 - DNA, 497 bp, Homo sapiens; identical to SEQ ID NO: 9775
  chr14:61123391-61123888
  hyper

SEQ ID NO: 51349 - DNA, 30 bp, Homo sapiens; identical to SEQ ID NO: 9776
  chr14:61124115-61124145
  hyper

SEQ ID NO: 51350 - DNA, 93 bp, Homo sapiens
  chr14:61124403-61124496
  hyper
ccaaaaactggaggcgttgggataaggacggcgacgcttcgctggcgaatgaggtgcctcaatttgcccgaggcgagcggggaaatcgggatc

SEQ ID NO: 51351 - DNA, 755 bp, Homo sapiens; identical to SEQ ID NO: 9777
  chr14:61188223-61188978
  hyper

SEQ ID NO: 51352 - DNA, 30 bp, Homo sapiens
  chr14:61190950-61190980
  hyper
tttccccccggccacgcagtcaccattaag

SEQ ID NO: 51353 - DNA, 515 bp, Homo sapiens
  chr14:61201375-61201890
  hyper
accaagccctagatgcaagaccgggggaactgactgccggaacgtttgtgttgcagcgcctcgccccttgccggtgctctttcgcgaagggaccgtctctgccaagcgcctgttggtaggaacctgcttggtcgcgtctgagggggcttgtaggtggctctggctgaaacaggcgcctgcgagagtctgtaggagggaaaccgccatggacgatcagggttgccctcggtgtaagaccaccaaatatcggaacccctccttgaagctgatggtgaatgtgtgcggacacactctgtgagttgggcggcagtggattccctgggggagagacgcgctgggtgggaggagaggaccgggagatgctaggcctcgtcttgggagcaaagggcgttgttagtttcaacactggggaggaaaatgggaaaagaaggcgttgtgactttaaatagactgtagccgctagccccgagcggctctggcctgctttgaactgcgggttctcagtgtggcatcca

SEQ ID NO: 51354 - DNA, 30 bp, Homo sapiens
  chr14:61447491-61447521
  hyper
ccagtaaaatgtggcgaaaggcttttgaaa

SEQ ID NO: 51355 - DNA, 30 bp, Homo sapiens
  chr14:61655904-61655934
  hyper
tacagggggaagcccgccggtgtttgggaa

SEQ ID NO: 51356 - DNA, 31 bp, Homo sapiens; identical to SEQ ID NO: 9778
  chr14:61736456-61736487
  hyper

SEQ ID NO: 51357 - DNA, 139 bp, Homo sapiens; identical to SEQ ID NO: 9779
  chr14:61747388-61747527
  hyper

SEQ ID NO: 51358 - DNA, 579 bp, Homo sapiens; identical to SEQ ID NO: 9780
  chr14:61747582-61748161
  hyper

SEQ ID NO: 51359 - DNA, 1365 bp, Homo sapiens
  chr14:61788092-61789457
  hyper
tcctttttggcctgcgcccggggtggcccctaacccgcagcgcacggccagacccagcgctacaaggagggcgcgcagggcggcgcaagcgggcactggcctcccgggggcttgcgcggggatccacccaccgcagggccgggccgcggaccgcgggccacgcccctggggtccggaaggcgcgggagcggacgcgggggttctgtgaacttggaacctggcggtgcgaggttctcgccggggatgcggcggcggcagctgcttcctggtttgaagctcgccgagtgggggagagcgtgagccttcggaggcgggggcaggaggagaagcaagaggaggcgggggaagagacgcttggggctggggctcaccggacgggtaggtccggctctccagggagaggagctgcccggccctggagaaggggcgagtcctgcgcgagtccccgggaggcgccgcgcgcttggaagggacggtcgggcttccccggcccgctgagggctcggcggcgggctcccctcctttccacctcgggagggagggaaggaggggagggaaaagtcccacggaggaggcagaatggccagtcgaggggcgcttaggcgctgcctttccccagggctgcctcgactcctgcacctgtcccgagggctggcctgagacgggactcccggttctcccgctgcgaagcagcgcggccccccggggccggggcagcggcgccggcatgtcgtctggcaccatgaagttcaatggctatttgagggtccgcatcggtgaggcagtggggctgcagcccacccgctggtccctgcgccactcgctcttcaagaagggccaccagctgctggacccctatctgacggtgagcgtggaccaggtgcgcgtgggccagaccagcaccaagcagaagaccaacaaacccacgtacaacgaggagttttgcgctaacgtcaccgacggcggccacctcgagttggccgtcttccacgagacgcccctgggctacgaccacttcgtggccaactgcaccctgcagttccaggagctgctgcgcacgaccggcgcctcggacaccttcgagggttgggtgagtagcggtgaccccttccctttgtgtccacccaacccccgttccccttatgtttttcaaaactcacccgggtcccgctttcccatcgctttgtggctgagggaattccctccagactttggtcttcgtccacgtggccgcggcactggtgacgcgaccgcggtgggtgtgtgcaggcgcaggtgtgtctccaggaagccggcctggacacgatcccctttcaggacagcggcttggcctaacgggaagtcgggcaggggtccagggcggtc

SEQ ID NO: 51360 - DNA, 109 bp, Homo sapiens; identical to SEQ ID NO: 9782
  chr14:61943722-61943831
  hyper

SEQ ID NO: 51361 - DNA, 260 bp, Homo sapiens
  chr14:62105860-62106120
  hyper
agcattaatcgtaaccgctaactgcatcaaattaactgtagtacatactgtactactgtcatcattttatagccatctcctgttgccgttgtggtgagctcaactgttgcaggtatccacttaaaacgcgtgtgttgctaatcgtctccaagtaagcagtttatctctctactagatttcttattgttgtaaaaagtgatcttgcggttctcctgtgtctttcatcctgtttagtgcaatactgtaaaccttgaataaca

SEQ ID NO: 51362 - DNA, 89 bp, Homo sapiens
  chr14:62161812-62161901
  hyper
tttgggaccaggcaaccgaaatcccttctcagcagcgcctcccaaagccgggcaccgccttccttcggagaaggcgcagagtccccaga

SEQ ID NO: 51363 - DNA, 641 bp, Homo sapiens
  chr14:62162323-62162964
  hyper
aggagaggctcggagccgggcccggaccccggcgattgccgcccgcttctctctagtctcacgaggggtttcccgcctcgcacccccacctctggacttgcctttccttctcttctccgcgtgtggagggagccagcgcttaggccggagcgagcctgggggccgcccgccgtgaagacatcgcggggaccgattcaccatggagggcgccggcggcgcgaacgacaagaaaaagtaagcccattccctcggcccgccgccttctcccccggcgaccccgcccgcctgcccgccctgggctcctgggccggcctcggcgttaatgggattggggggggcagcctttttgtttctgctgctgctcccctcccctctcttcccccaacctcgccggccgggctcccccgctgtccacgtcgccatcttgtcgtggggggtgggagacgcctcgaaagtgctttcaggggccggggtctgagccctgcttgccctccccgccggccgtgggggcctcgcgccgcccacctacccgcctcaaaaacccagcctgctctgtggccccatccggaggggactttacccagcctgaaaaccccgggaagagaaatgagctgcagctcggtagccgcggtttgcacccg

SEQ ID NO: 51364 - DNA, 40 bp, Homo sapiens; identical to SEQ ID NO: 9784
  chr14:62163204-62163244
  hyper

SEQ ID NO: 51365 - DNA, 177 bp, Homo sapiens
  chr14:62279298-62279475
  hyper
gctgggctctcaggacgccggcggcggccgcagggctggcggctgctgggcgcggggcggcgcggggcggcgcggcgcggcgggggcgcgcggcaggaggggctgtgcgcggcgcggcccccgagcgcaccgggcctgccgaggagcgcgcgcccggccgggctcggcgccggtttc

SEQ ID NO: 51366 - DNA, 333 bp, Homo sapiens
  chr14:62279519-62279852
  hyper
cgactgacagtgagtgcgctccggccgcggaggccaggggtggggggaggccgcggtgcccagggtgggaagttcgatttcagacgctgcctttgtgctggctcgcggcagcagcggccgggtccctctccgctcctcacccttggctgcctggcggggcttgaaagggcaggtggccctggcggcgcgccccgcgagggatgtggcagaagggcgtgcgcctggcgccgaggcggagggaccctcgatgccgtgtggcagcggggcctgccatcgcagcccttcgcgggcactgcccccaggcccagagccagccttcagcgagccgggcaa

SEQ ID NO: 51367 - DNA, 27 bp, Homo sapiens
  chr14:62279898-62279925
  hyper
cgagttctgggtcgggtttgtgcgtct

SEQ ID NO: 51368 - DNA, 211 bp, Homo sapiens
  chr14:62583658-62583869
  hyper
aaaaaacactgagccaaaccccgctgcttcctcagccgctgaaagtgccgccccacccctctccccaaacccgacctccgtaggggacaccgagccaaggcctgcagcgagtgacctgcccggggaggcgcgggaccgaggctcacctacccgggcccgcgagtctcgcccagccccagcctcccaacccactctgccggccccaacttag

SEQ ID NO: 51369 - DNA, 599 bp, Homo sapiens
  chr14:62583918-62584517
  hyper
cggcgttccagctctcaaccttgctcccagcagcccccgccggcgcactcgacctacaggaaagttgctcccgagctgtggaggggcgtcatcgcctcctagcaacgctcctagcaaccgggtaacatctgctccctgtggtccaatgcgagctgagaacagctgcgcgcccgcctagcgctgcgaacccggagtgagaggcgcttcagagactggagggacggacctgcaggagccagggctgcccgccgagctgcagttgccgctactgccgctgtcagcgcccgactgaagagtgacagccgcaaaagcaggagtgagcaccgaaccccgcgcttctacctaacaggtgcatgcgccgatctggtgagtggacccagctcacaaggtatgtctggattcatccagccaggtgccttcctccgagctcagaagggactcctttccttgagggggaggatagggacgtgttccgggatcccaccccgcccccaaccactgaagagtagccagctgctggtcccaaatgacctgattcgattttttaaatgtaaaccttaggattggttcttgggtgaagagtccgctgctcttcgcta

SEQ ID NO: 51370 - DNA, 182 bp, Homo sapiens
  chr14:63511824-63512006
  hyper
tccttaccactggagcgcctgacgatgttctccaaaaatgtgttctgcggtgccaccagccctctcttgccccccggcatcctgggtctggagagcagcggccaggatccgcggcgggggagggggggatgcaggcaaagaaggtggaggaagaggaggaaaaggtggaagagaagattgag

SEQ ID NO: 51371 - DNA, 645 bp, Homo sapiens; identical to SEQ ID NO: 9788
  chr14:63512063-63512708
  hyper

SEQ ID NO: 51372 - DNA, 457 bp, Homo sapiens
  chr14:63512740-63513197
  hyper
cgctgctaccgcccccctccgggctccggcgcctgaaaccttcctgaacactggcgctttccgcaccgcccttaccccaccccggagcgggagcgcgagccctgaagtccgagcgcacagccggcgcccggaatggcccctgcgacccgggccgggcttggcgtctgggggagcgtgcggccgcccaggggagtttcccccaggaccgctgagcgcaggaggcgatccgcgagcccgccaccgctgcaaagttgcgggaaaggttgcacttgatgtgaagagtaggggaagagggtgaataattcacacccgagagagggggagtgaggagggcagtgttagcgatggaaaaacggtaaaggctgtgggggcgaagatgcgccagggtggagcagggcacgaatcacctctaacaaaccccccaatttccaggcgttgagaacggacagcagcggca

SEQ ID NO: 51373 - DNA, 30 bp, Homo sapiens; identical to SEQ ID NO: 9790
  chr14:63670696-63670726
  hyper

SEQ ID NO: 51374 - DNA, 30 bp, Homo sapiens
  chr14:63670925-63670955
  hyper
aggctcgcaagcagcggatgaaacaggaag

SEQ ID NO: 51375 - DNA, 30 bp, Homo sapiens
  chr14:64108480-64108510
  hyper
ccatcccggggacccgcccagcctggccca

SEQ ID NO: 51376 - DNA, 30 bp, Homo sapiens
  chr14:64109143-64109173
  hyper
attgggtgaaaaagcgatcagtttgaaggt

SEQ ID NO: 51377 - DNA, 36 bp, Homo sapiens
  chr14:64182959-64182995
  hyper
ccagcactttgggaaacgggggtgagaggatagtat

SEQ ID NO: 51378 - DNA, 30 bp, Homo sapiens
  chr14:64319528-64319558
  hyper
gatgtcccaaaagacggggagaaagttgcc

SEQ ID NO: 51379 - DNA, 30 bp, Homo sapiens
  chr14:64319797-64319827
  hyper
ggcaagcggggcgccgacctcgggcggccc

SEQ ID NO: 51380 - DNA, 31 bp, Homo sapiens; identical to SEQ ID NO: 9791
  chr14:64320708-64320739
  hyper

SEQ ID NO: 51381 - DNA, 1006 bp, Homo sapiens
  chr14:64760752-64761758
  hyper
tgcagataaacacaccggccttgccttctctaaaatgcggacacgtgcttttcccgcattagggggggtctcccggcgcgcgccccgccgccacctgttgaggaaagcgagcgcacctcctgcagctcaggctccgggcgccagccctgccccgcagccccagagcccgtcgcagctcgggtggtccctccccggcccagcgctcgccgcctgctcttcgccctgcaagtttcaagaggcagttatttctcgcagcctccgcgcttgcaactgcctcctggcgggggagtgggtgtccaaaaagccagcagctggagaaactgaaaagatcacaagcgacttaacgataagccccttcttccttttaaagaccgagaggagggtagaggggagtagtgcctgagcccacgtgaccgagccagggagcccgacggtctcaggaacgcccgacgccgcgcgtgacctctaagtgggagcaccctcgaaccgactcctggtccacccacaaggatagtggcgcacagatggcgctccccgcagccccagtctcagatttaagaggtctggagtagggcctgagaatatgcatttccaaccaggtcctgggggatgccgacactgatacagccagtctggggaccacacttcgaggatcacgtcctcagcccctgactcacataagtgtcattcagaacagatgtctgattctaaggagccagtggtgaaaccagagaggctttgggtttgtcaaatccccagcagcaaacgtaacctcgggccctggagtggcaaagccgtggactagaggtggagggagtgggttctcagctctcaagaggtcactgggaaggcctttcgcgttagatcaaagatcccaggtacttcctcgaactcacttgaagtggcaccggggagacctgtgcctccggccacggcgcccttctccgctggaggcacctgcccacccctcttctcgggcgaaggcccctcgcgccccctggtggca

SEQ ID NO: 51382 - DNA, 30 bp, Homo sapiens
  chr14:64805106-64805136
  hyper
gaacgcggaggggcccgaccccagtctggc

SEQ ID NO: 51383 - DNA, 180 bp, Homo sapiens
  chr14:64805570-64805750
  hyper
tcagccagtcatcaccgacttcctccacgttttccttgtcctctccggccggcagtgtagcagcagcaactccctacgttgaagtcgtctccctccgtccccgcccttacttccttttcccttaaggacctcgcgcgcgcttccatattcagaggggcgcaggcgcggtagcgcggcctc

SEQ ID NO: 51384 - DNA, 30 bp, Homo sapiens
  chr14:64854516-64854546
  hyper
acaaagtatgagggcgcgccaagctctcca

SEQ ID NO: 51385 - DNA, 176 bp, Homo sapiens
  chr14:64931837-64932013
  hyper
gaggagaggagatgtgtaatgcgactgtctataatttgaaaccggacctcactatttagcgtctcagaaaacgcggggttcattgccctggtcccccccgccttcccccgccccccgaaccttccggctggctctcttgcggtccccgcctcggcgctgatgtggtctggcagtgg

SEQ ID NO: 51386 - DNA, 30 bp, Homo sapiens; identical to SEQ ID NO: 9795
  chr14:64970070-64970100
  hyper

SEQ ID NO: 51387 - DNA, 44 bp, Homo sapiens; identical to SEQ ID NO: 9796
  chr14:65005556-65005600
  hyper

SEQ ID NO: 51388 - DNA, 163 bp, Homo sapiens
  chr14:65005779-65005942
  hyper
tttcaaagtgctgaaactacaggcatgagcctccacacccgtccaggagcccatttatatgggagcctgcttctaaagattattacctggtgccagggtattttccagacctgtcctcacattcctgttaaacaggaggaagtgaatcgcgctccttttcatc

SEQ ID NO: 51389 - DNA, 5 bp, Homo sapiens
  chr14:65006697-65006702
  hyper
cagcc

SEQ ID NO: 51390 - DNA, 600 bp, Homo sapiens
  chr14:65006936-65007536
  hyper
ttcctccgcccctgcgtgctcagtgagtcggcaccctagcagtgaactgcatttaaaacctcaggaattgagcgaactctcccagtggctctcctcaccgggatccccttccacgcctcctccccgtgccgcgcctcagtccgcactgctcattggccgcgtgccctgccaatccgatgcacgtcggctagggcaaagaccgcgaaaaagcgcgtacacctggctctgggagcgcgcgcctaacgccagccagcagcaggaggcgcgcgaggcaccacggcctggcggccgagagtcagggaggaacctcatttacataacggccgcccctctgtctcctggcgggggccggagtcccgcccctcgtccaacttgaaatctgttgggtcacgggccagtcactccgacctaggcaagcctgtggtggagctggaagagtttgtgagggcggtcccgggagcggattgggtctgggagttcccagaggcggctataagaaccgggaactgggcgcggggagctgagttgctggtagtgcccgtggtgcttggttcgaggtggccgttagttgactccgcggagttcatctccctggttttc

SEQ ID NO: 51391 - DNA, 11 bp, Homo sapiens
  chr14:65007552-65007563
  hyper
cgcctttcagt

SEQ ID NO: 51392 - DNA, 587 bp, Homo sapiens
  chr14:65008387-65008974
  hyper
agcgcaccctgagctcgtccacgcaggcgagcatcgagatcgactcgctctacgagggcgtggacttctatacgtccatcacgcgcgcccgcttcgaggagctcaatgccgacctctttcgcgggaccctggagccggtggagaaggcgctgcgcgacgccaagctggacaagggccagatccaggagatcgtgctggtgggcggctccactcgtatccccaagatccagaagctgctgcaggatttcttcaacggcaaggagctgaacaagagcatcaaccccgacgaggcggtggcctatggcgccgcggtgcaggcggccatcctcatcggcgacaaatcagagaatgtgcaggacctgctgctactcgacgtgaccccgttgtcgctgggcatcgagacagctggcggtgtcatgaccccactcatcaagaggaacaccacgatccccaccaagcagacgcagaccttcaccacctactcggacaaccagagcagcgtactggtgcaggtatacgagggcgaacgggccatgaccaaggacaataacctgctgggcaagttcgacctgaccgggattccccct

SEQ ID NO: 51393 - DNA, 203 bp, Homo sapiens; identical to SEQ ID NO: 9799
  chr14:65008997-65009200
  hyper

SEQ ID NO: 51394 - DNA, 459 bp, Homo sapiens; identical to SEQ ID NO: 9800
  chr14:65016470-65016929
  hyper

SEQ ID NO: 51395 - DNA, 645 bp, Homo sapiens
  chr14:65170674-65171319
  hyper
ctgacttggaaaagcggacacggccggctctggtaggattaggatccccagatcgatcccggctggtcactcacttgggaaagccctcagcccccttcgcagggcccggtgttccctgtccatacaaggggtacgttctggcagtccatgctgtctcgggaggcggtgatagcaggtctgtgacaccagggtgaccccaccacgtgcgtcttggtatcctagagcatctaggctgcccgggggtgcgcgctcatcaccctgcgggcgttaatcgttaaccgcgcccaggcctcgccgccgccgcagccttaccccggctctggctcgccgcgccgcgaaggttgccccggcccccgcagagccgccaattgctggactgcagccgcgagctggagtctccacccacaggaaaaattcctggcccgcccctccctcgctccctcgctccctcgctccctcgctccctcgctccctcgctccctcgctccctcctgccctcccgctgcagctccggctccgctcgacttcctgccgggcgctggcaagccgcgcgctgcctggggtctccgggggccgcgcttgcagctggccgagtccgggccagctgaggggctggcggtgggcgggagcggtcggcggcctcag

SEQ ID NO: 51396 - DNA, 255 bp, Homo sapiens
  chr14:65171658-65171913
  hyper
ttttccctccactccggaaacaaaaggggcaaatgcgccgggcggctccagagaggctcagtttgaaatccaggaagcccgcgaggccgcgcgcgcccgagggctggtgtttggctggagctgtgggcctggcgggtggacccttctgcgcgaggacccgagcctcggctcctgccagccccggaggcgcctgcagcctgttccgggttggcgccgcacggtgctcgctgttgggaatctcggctacctgtccgg

SEQ ID NO: 51397 - DNA, 30 bp, Homo sapiens
  chr14:65346133-65346163
  hyper
ggcgcaatccccttcgctcccaggccgggg

SEQ ID NO: 51398 - DNA, 30 bp, Homo sapiens
  chr14:65347503-65347533
  hyper
ggaaatactagaaccgatggtgccaaaaag

SEQ ID NO: 51399 - DNA, 30 bp, Homo sapiens; identical to SEQ ID NO: 9803
  chr14:65381328-65381358
  hyper

SEQ ID NO: 51400 - DNA, 30 bp, Homo sapiens; identical to SEQ ID NO: 9804
  chr14:65438692-65438722
  hyper

SEQ ID NO: 51401 - DNA, 30 bp, Homo sapiens
  chr14:65565398-65565428
  hyper
atcagtgggattttgcgatgtactgaattt

SEQ ID NO: 51402 - DNA, 30 bp, Homo sapiens
  chr14:65569328-65569358
  hyper
gtccctctaacagacggcccgggtagctcc

SEQ ID NO: 51403 - DNA, 30 bp, Homo sapiens
  chr14:65569888-65569918
  hyper
agaatgaccgacctcgccgggcgaccgctc

SEQ ID NO: 51404 - DNA, 122 bp, Homo sapiens
  chr14:66869958-66870080
  hyper
agtagcaggcacaaacgtatagtacacatcctgaggcggagatattaggaacaaagctaaaaccctggcaggaaggaagtactccctggacgatttttttttaacctcggtaggttacagaa

SEQ ID NO: 51405 - DNA, 289 bp, Homo sapiens
  chr14:66974386-66974675
  hyper
ctgtcatagtagccaccgttctgccactcatgcagctttctaagacacctctcggttccccagcgctttcagtggggcggccggccattcccgagggttgcaagaggaggcccggggtgctgagccagcctcgctgcccccgcgtagaaagccggcccgccggcgagagccagcctaaggcgcggacaaccaacgaggtgtcaggctcggcaggggattgcttctgtctggggcccggccgaggttgcgttcgtgcctcgcgcgcacacgctccgcgttcactcagcca

SEQ ID NO: 51406 - DNA, 75 bp, Homo sapiens
  chr14:66974894-66974969
  hyper
cttgggtctcgcgctccgcagagcgttccgacactctccggcctcgttctgccgcctccgcgcgctctccccgtg

SEQ ID NO: 51407 - DNA, 430 bp, Homo sapiens
  chr14:66975357-66975787
  hyper
tgccttaggcttttcgcctgtggtggcccttctctgcggcctcgggaggagggaaggctgaagaagggaaccgcgggggtgcattttacaaccgctgagaaccgccggagattgggggtgttcccgcgggtcccctcccccaggccccaggagccggggtcgaccccgtgggatgttaggccccagcgccttcggaagcaaagtcctgggcccccggggaccgaggggccggtgcggagggcgctgcggggctccgcgctgtcggtgcaggcggcgggatcccggctccgcagtctgaagcatgccgctctcggctggcctgggcgcatcctccgctagtgctcttcagagagaggggggaatcccatctccacccccttcctctccttcccttccccccacctgggcggccccacgccagtatctgtgc

SEQ ID NO: 51408 - DNA, 30 bp, Homo sapiens
  chr14:67707447-67707477
  hyper
ccatgcccggagcacgggctgatctgcgta

SEQ ID NO: 51409 - DNA, 252 bp, Homo sapiens
  chr14:67825994-67826246
  hyper
cgaatgtctggctacgtaaactgtgagctctgtagggcagaggtggcgacggttcagttatataaatccagtgcccggctcaataagggtatgtggaatggatgaatccattaatgaataaagacagcagacctccacaaaagcccgccggccgggcgccttttcctaccggctgggatcgcttcgtccagcctgattcactcaggaggaatgcgcgaagaggccgtcaggaagcctcgccctagactcaag

SEQ ID NO: 51410 - DNA, 30 bp, Homo sapiens
  chr14:67826951-67826981
  hyper
ttcgtccttgttctcggaggacccagactc

SEQ ID NO: 51411 - DNA, 30 bp, Homo sapiens
  chr14:67827452-67827482
  hyper
tgagaatgccatgacgatggggcggtctca

SEQ ID NO: 51412 - DNA, 86 bp, Homo sapiens
  chr14:67878633-67878719
  hyper
cagagcatgcccgttccggggcgcgcgtctggccccgctctagggagccgcgtcggcggggccccacccgggcaatgtcccgaagc

SEQ ID NO: 51413 - DNA, 236 bp, Homo sapiens
  chr14:67878763-67878999
  hyper
cgccgtcctccatgtcgccgcccgcacgccagggccaccccaggtgcgccttccccgcgcctcgcgctcctcggcacccgcgcagcccgcgcagtccgcgcccacggcgcccaggaagcagctccgacgcggcagggcgacgcctccctggcgcgtgtccagagcctgaggccccggggcaggaagtcagaccaagtcgggatttctgacgtgacgtttccacccaaaggtgctcc

SEQ ID NO: 51414 - DNA, 30 bp, Homo sapiens; identical to SEQ ID NO: 9809
  chr14:67981500-67981530
  hyper

SEQ ID NO: 51415 - DNA, 33 bp, Homo sapiens
  chr14:67982131-67982164
  hyper
ggcggcggcggcggcggcggcggcactcaccca

SEQ ID NO: 51416 - DNA, 30 bp, Homo sapiens
  chr14:68000366-68000396
  hyper
cggtcagatccagccgctcctgggaagggc

SEQ ID NO: 51417 - DNA, 30 bp, Homo sapiens; identical to SEQ ID NO: 9810
  chr14:68038106-68038136
  hyper

SEQ ID NO: 51418 - DNA, 30 bp, Homo sapiens
  chr14:68067075-68067105
  hyper
ggctgatggttgtgcgttcttccgggccgg

SEQ ID NO: 51419 - DNA, 30 bp, Homo sapiens; identical to SEQ ID NO: 9811
  chr14:68141708-68141738
  hyper

SEQ ID NO: 51420 - DNA, 30 bp, Homo sapiens
  chr14:68161965-68161995
  hyper
aggctggtttaaggcgtggggaataagggg

SEQ ID NO: 51421 - DNA, 30 bp, Homo sapiens
  chr14:68162289-68162319
  hyper
tttccctcccgccccgcaacaagaattctc

SEQ ID NO: 51422 - DNA, 30 bp, Homo sapiens
  chr14:68283246-68283276
  hyper
tcacctgctcccggcgcccaaagcaataga

SEQ ID NO: 51423 - DNA, 30 bp, Homo sapiens
  chr14:68660412-68660442
  hyper
gaacacaagatgatatacctaatctcattc

SEQ ID NO: 51424 - DNA, 30 bp, Homo sapiens
  chr14:69034666-69034696
  hyper
tgatatgaatggggcccctggagttacaca

SEQ ID NO: 51425 - DNA, 31 bp, Homo sapiens; identical to SEQ ID NO: 9812
  chr14:69258877-69258908
  hyper

SEQ ID NO: 51426 - DNA, 228 bp, Homo sapiens; identical to SEQ ID NO: 9813
  chr14:69259277-69259505
  hyper

SEQ ID NO: 51427 - DNA, 30 bp, Homo sapiens
  chr14:69260638-69260668
  hyper
gggcgggtggggggcgccgcaaaaaaagac

SEQ ID NO: 51428 - DNA, 30 bp, Homo sapiens
  chr14:69262250-69262280
  hyper
ggagcaccatcaggcgccccagaatggcta

SEQ ID NO: 51429 - DNA, 30 bp, Homo sapiens; identical to SEQ ID NO: 9814
  chr14:69262502-69262532
  hyper

SEQ ID NO: 51430 - DNA, 30 bp, Homo sapiens
  chr14:69263088-69263118
  hyper
ggcctagtcacaggcgtcagcagggtaccc

SEQ ID NO: 51431 - DNA, 30 bp, Homo sapiens; identical to SEQ ID NO: 9815
  chr14:69281282-69281312
  hyper

SEQ ID NO: 51432 - DNA, 622 bp, Homo sapiens
  chr14:69444742-69445364
  hyper
cactggccactgtgcccgggtcccatcgccagctccgagcccagctcccgtggcggggcgcgcacccggcacaccgcgcctgcctgggatgcagctccgtggctaagtagggatccccagtgactggccccaaatatcccctaagactgaccctcgttctgcagcccctcaactcgaaccgagctgcccacctttcccgggggtcggaggggcaggacgtagcgcaagcccatgtcggggttacagcttccaacccactgagttaagcaataaaacggtctgctgtcctgaccccgcccccacagggcccgcgggggagcccgcgtacgccccccagttttctcgtccccagccgcactccagctggtccttctccaggcagatccggaggcggccgccgatctctccggcgctctcccctccgcctaaggggcagcagggtcccgggaggcccgccgctcaggttgaacccagggcggcccaggaagcggcgctgccaccgcacgccatatggagaggtggccaggggcggaagaaaagggaaaatcgatccggagcaagcagccccgagccggggtctcagccccagcctgaagaccaccgcccccgagcacagcccacg

SEQ ID NO: 51433 - DNA, 300 bp, Homo sapiens
  chr14:69445726-69446026
  hyper
tctggctgcatgtaatcgttggtttgctgagaatcataatggtccatgatggtgcgcgcgtgctagggtctggatttcttcctccaccttctctctgagcaacggctgctgccctggcgtggggagggagtagggctgggctgggctgggctggcggggccgggctcgctcccctgcgcccggttccgccgcggcgctgctggcgaaggctgctactggcggcgacagcggcggctgggctcgcggactgcctgcctctgggcgggcgcttggacctaatctccacgcacactgaactag

SEQ ID NO: 51434 - DNA, 562 bp, Homo sapiens
  chr14:69446237-69446799
  hyper
cggtgcccgttcccccgcggctcatgtgacgccagcttaagctgaacgggaccgaagccgggagacgcctccccgagctcggggactgagtggcagcgcgcttgggaaccccaggagccgccgggattggacccgttccccgccaccgttattgcgctcccacgcgcgctccaaaccccggggtgggagggggctggagaaaggacgcgaggaaacccgaagaacattcattttctctttcccagggaacctgggtctgggcaggtcggcaccctaggaaagggggcggagtggggcaatggaaaggaatttcttgggaatttcacgactccaccgccgccccccccggccccgccccaccccaccccaccctacaaggcgcgacccggctgatccctgccctgcaggaacccggtttctcgccagcgaactgctctcagaggctaccgagcgttcccgcctcgccgcaggaactcttctagctcgccctcgggctctggggaccgctccacagcggggcctcccggaattccctgccggtctccgcgggcacacttggctg

SEQ ID NO: 51435 - DNA, 31 bp, Homo sapiens; identical to SEQ ID NO: 9819
  chr14:69618276-69618307
  hyper

SEQ ID NO: 51436 - DNA, 96 bp, Homo sapiens; identical to SEQ ID NO: 9820
  chr14:69658737-69658833
  hyper

SEQ ID NO: 51437 - DNA, 114 bp, Homo sapiens
  chr14:69726521-69726635
  hyper
tgggtcggcaggaccgaccagggccgcgcgggggcagctgccgggcgttcggtcacctagcggtgggagccgaggctggctttggccagtcgccattccgccgcgggcgtctgt

SEQ ID NO: 51438 - DNA, 30 bp, Homo sapiens
  chr14:69727337-69727367
  hyper
atggcaacctctgccgggcggcggggctgg

SEQ ID NO: 51439 - DNA, 30 bp, Homo sapiens
  chr14:69728074-69728104
  hyper
ggcacctgttgaggcgggaggctttggcac

SEQ ID NO: 51440 - DNA, 363 bp, Homo sapiens
  chr14:69864915-69865278
  hyper
cggactcgggtagccgcggaggcctttctcaccatcgcgccaaactctcttcgctacagcagctgccgacaccgccgccgttacacgagcttaactacaacgccgctaacagccaatcctcgcgagaggagccgccggaagtcgtcgaaagtgcaacgcaaaagagccttttggatcatagaggcacagtcacttccggcagctagagcagctactgactctgtttcagccatcttcgataaaggcaaaaaggtaagggaaagtttccaagctttaggaagaattattttttttcaagacgctgtcttccgtactttcgttattaaacatacggctcaagtgatcaccggtatagacagtgac

SEQ ID NO: 51441 - DNA, 558 bp, Homo sapiens
  chr14:69951296-69951854
  hyper
ttggcgcccgaggccggcctcccgccggctcacctgccactcccagccaatcggggccaccagaattggggctgtcgccgggggggtgggtggctagggcgggaggggaggagatgctgccggcccgaggctgagccaccctccccgcggagttcccgcccggccctctgcaatccggagcccaagccgccggctacgcgccctgcgcccccttggtgccgcgtccagtgcccagcgcgctttgatgctgcagctccgggccgggccgctctgcttctctgctcgctgggacgctctccgacggctccgccctcgcctctcgccccgagtccctgctgaccccggggaggtggggtccgggccgggcacagccccgctgaggcaggatgttcacgtccaagtccaactcggtgtcgccctcgccgtccctggagcaggctgactcggacgccctggatatcagcaccaaagtgcagctctacggcgtgctgtggaagaggcctttcggcaggccgtcggccaagtggtcccggcggtgagtgcgcccccgcgccccaa

SEQ ID NO: 51442 - DNA, 30 bp, Homo sapiens; identical to SEQ ID NO: 9823
  chr14:70014858-70014888
  hyper

SEQ ID NO: 51443 - DNA, 396 bp, Homo sapiens; identical to SEQ ID NO: 9824
  chr14:70193412-70193808
  hyper

SEQ ID NO: 51444 - DNA, 30 bp, Homo sapiens
  chr14:70233584-70233614
  hyper
ttagcaggggcgaacgacgtcaacagatgt

SEQ ID NO: 51445 - DNA, 411 bp, Homo sapiens
  chr14:70346136-70346547
  hyper
gtccaacctgctgccgcctgggccccgccgagcggagctagcgccgcgcgcagagcacacgctcgcgctccagctcccctcctgcgcggttcatgactgtgtcccctgaccgcagcctctgcgagcccccgccgcaggaccacggcccgctccccgccgccgcgagggccccgagcgaaggaaggaagggaggcgcgctgtgcgccccgcggagcccgcgaaccccgctcgctgccggctgcccagcctggctggcaccatgctgcccgcgcgctgcgcccgcctgctcacgccccacttgctgctggtgttggtgcagctgtcccctgctcgcggccaccgcaccacaggccccagggtaagtgcgcccccagctttgcgcccacctgcggagggaggggaggttgcttc

SEQ ID NO: 51446 - DNA, 216 bp, Homo sapiens
  chr14:70346783-70346999
  hyper
agaggtgcctcctgcgtcggagagaagctcgctctccgctcatgcagggcttccctgtggtctcacgctggcgcccggtccagcgcgctggagttgttggcaggcggcgggggttgggacgggggcgggtgcagctctgcctggagagttttaggttacccgcgagccacacaaggaccttgtgttgttgttttaaaaagcgatcactgctcgtaa

SEQ ID NO: 51447 - DNA, 583 bp, Homo sapiens
  chr14:70653713-70654296
  hyper
cgggtcgccaggggccgaggaggcttcccttttggtgccccaccggaaggccggatgtgttcctatcacgtacccacattccacccccgctcaactccctcctccccccacccccttcgggtgtttcttgaccacccaggagcttggctgcgcctgctgcagtctgcgtttctgataaattgaaaccagttttaattcttctgcccgggagacctaaccgccgaatgcgttcggaggtatgttttttaatcgccaggaaagggggagagagagagaaagagagagagagagagagaggaaaggaggagagaagagaagagaagcggggggcggggggagagagagagagagagagaaggaagctgcgatgagcgggtaaatttatggtactgcattaaaggcatttcttctatttaaccccaccccgccaccaccaccactaccacaccgttaaaaataaaatacaatgaattaagacgaagaactgcttttttccccggagcaaattgctttcatcatctttcccagtggctcgggtcctctgggcaggtcagccagggcctgtaggagcagcagcgctagc

SEQ ID NO: 51448 - DNA, 1534 bp, Homo sapiens; identical to SEQ ID NO: 9826
  chr14:70654355-70655889
  hyper

SEQ ID NO: 51449 - DNA, 218 bp, Homo sapiens; identical to SEQ ID NO: 9827
  chr14:70655919-70656137
  hyper

SEQ ID NO: 51450 - DNA, 527 bp, Homo sapiens
  chr14:70826031-70826558
  hyper
ggagtgggggacagcggcggggaagtgggggtgtggaaaagactggtggaagagcttttaggaaagctctcaccccgtcgctagctccttcctagcccgagtgccagcccttaacttcacattttacagattccctcccaggtcttgatcctgccaaggaggagggtcccaccccttgcggaagatcctcctcactccactcaccaacatggggactccatagccgagagtcttgttcttgcgaaaagcacgcatcaccgcgggtgcaaacatgagtgaactcttccatcggctcagaactccaagcgggcctagcgcagactcccaaatctcagcagctcacgctctcaccaagacgagtacgtccttaactcacttccttttccttggttatttggtgctcggtccttagtgaatggtttccgctaggcaaaagcaatcgagccatcgtaacatacttgtgcgtccgcccagaaatgtgggcgtcagcgtttttggttccgtaacgtcggcgtgcaattgggatt

SEQ ID NO: 51451 - DNA, 30 bp, Homo sapiens
  chr14:71067787-71067817
  hyper
tgatcgtctgtgatcgtcaagaaaacaaat

SEQ ID NO: 51452 - DNA, 61 bp, Homo sapiens
  chr14:71108797-71108858
  hyper
cggcggcgggcagatcgcggcgcgcaccaggcgccggggcggcggccgaatggagagaaag

SEQ ID NO: 51453 - DNA, 30 bp, Homo sapiens
  chr14:71288526-71288556
  hyper
catcccagctgggacgccgggccctctccg

SEQ ID NO: 51454 - DNA, 30 bp, Homo sapiens
  chr14:71786796-71786826
  hyper
atgccctcttgaatcggcttaaaaattatc

SEQ ID NO: 51455 - DNA, 640 bp, Homo sapiens; identical to SEQ ID NO: 9828
  chr14:72398592-72399232
  hyper

SEQ ID NO: 51456 - DNA, 161 bp, Homo sapiens; identical to SEQ ID NO: 9829
  chr14:72399451-72399612
  hyper

SEQ ID NO: 51457 - DNA, 366 bp, Homo sapiens; identical to SEQ ID NO: 9830
  chr14:72399923-72400289
  hyper

SEQ ID NO: 51458 - DNA, 361 bp, Homo sapiens
  chr14:73358888-73359249
  hyper
gtttaccaggtggcatcagcccggttatgtgatttcggctggaaatggggaaactgaaaatcagttgtgggttcggtagaaacagcatcagcggtgttgcagcgaaagcaaccggcagcgaggatgcggcgaagttacgcccatttattctgccataaaacattttctttcttgggtgaaacgctgtggcgttcaagcgcagtgtatccgagcttccgagccagaactgaagccaggagctcctatctgatcagcctcagcttccaacgtcctcttaacggcagctttcatataaatatatttgaaacctggggccttcctacccctttccctatttctgatgggcgacgagctggcgcaa

SEQ ID NO: 51459 - DNA, 30 bp, Homo sapiens; identical to SEQ ID NO: 9831
  chr14:73359797-73359827
  hyper

SEQ ID NO: 51460 - DNA, 30 bp, Homo sapiens
  chr14:73360975-73361005
  hyper
ccttttgtagagcccgagagccagcaggtc

SEQ ID NO: 51461 - DNA, 30 bp, Homo sapiens
  chr14:73361810-73361840
  hyper
gatgtgacccgaggcgtccaatgagtctgt

SEQ ID NO: 51462 - DNA, 242 bp, Homo sapiens
  chr14:73393286-73393528
  hyper
gattcgagggctgccgcgctcccgctgcagagctcggggtgggagacaggcgcggcgaggaaggccagggaaaggggcggggaggggcggggaggagtgagcacgtggaacgccggcgccaccgggcctaggtggcagctgggccggcgcgctccgcccgttctggggcgcgtggggccctccggccggatcagtgctgcaaccgtaaacacgcagggagggcaccccgagtgtcgccgctg

SEQ ID NO: 51463 - DNA, 31 bp, Homo sapiens; identical to SEQ ID NO: 9833
  chr14:73485669-73485700
  hyper

SEQ ID NO: 51464 - DNA, 30 bp, Homo sapiens
  chr14:73925210-73925240
  hyper
ccgaccaactcaagcgccactgcctctacc

SEQ ID NO: 51465 - DNA, 8 bp, Homo sapiens
  chr14:73957466-73957474
  hyper
gattttta

SEQ ID NO: 51466 - DNA, 30 bp, Homo sapiens
  chr14:73957736-73957766
  hyper
ggccagtgcagggccgttgaggcgcgggcg

SEQ ID NO: 51467 - DNA, 30 bp, Homo sapiens
  chr14:74058471-74058501
  hyper
acttttgcctcagacgagtccggagcgccg

SEQ ID NO: 51468 - DNA, 30 bp, Homo sapiens
  chr14:74079518-74079548
  hyper
tgggcgttggagcccgagaaagccttggtg

SEQ ID NO: 51469 - DNA, 155 bp, Homo sapiens
  chr14:74111424-74111579
  hyper
agttgttagggggacgttttaaggtttttaactttaggcggacaagtcactacagatcagctgaaattgctttcggtcctgactactcctgtgcggggttaagacctaaggaagcaaaagggcagccagcaacagccggacgggaggaccccggc

SEQ ID NO: 51470 - DNA, 522 bp, Homo sapiens
  chr14:74180376-74180898
  hyper
agactgtggctcaccgtgctcctggccttagaacaataccagacactcccaccaagtaggcccgagggaggcgaccttcatgcagtcacgattaacaaagacagagtcctgatctcgcccttctctgcccccacagtcagtccgtaggtgcactcggagccgagctcggggacgctgaggcagtcacgcggccgtcgccatcttgcgtctgggtctgggtccggtcgggtccgccgcctgcagcaggggcgtcgcgtcgtcgtgcagcgggcgaggagcgacggcgggcggcgaaggcaggcgcgctgggccgagagccgccggggtgtggtcgcggggcgtggccgccgggcgctcgctgcggctcctggagaggatcgggcgttcgcggtcgcagcctggtcttcccgcgggcgaggagcggccgtttgggagactagccagagggagaaactgtgccgaagtcgcggcggctgcgggccagcggaaagcggcttcttggcgggcgcggggactcctctg

SEQ ID NO: 51471 - DNA, 30 bp, Homo sapiens; identical to SEQ ID NO: 9836
  chr14:74181270-74181300
  hyper

SEQ ID NO: 51472 - DNA, 30 bp, Homo sapiens
  chr14:74208210-74208240
  hyper
ttagcaaccccagccgctcccaggaaacca

SEQ ID NO: 51473 - DNA, 30 bp, Homo sapiens; identical to SEQ ID NO: 9837
  chr14:74225334-74225364
  hyper

SEQ ID NO: 51474 - DNA, 45 bp, Homo sapiens
  chr14:74225612-74225657
  hyper
tggtcctgcatgtgcgacttgggaggcgacgtgaccagctccacc

SEQ ID NO: 51475 - DNA, 30 bp, Homo sapiens
  chr14:74227005-74227035
  hyper
caactgtctcggggcggcctcagccagcag

SEQ ID NO: 51476 - DNA, 31 bp, Homo sapiens; identical to SEQ ID NO: 9839
  chr14:74238785-74238816
  hyper

SEQ ID NO: 51477 - DNA, 117 bp, Homo sapiens
  chr14:74252874-74252991
  hyper
gctacagttgcagtctcgccactggcccgggccgccagcccctagttactctgcaggaatgtcccaaacttctcagctgttctttaaaaaatcctgcgccacgaggctaccgagggc

SEQ ID NO: 51478 - DNA, 136 bp, Homo sapiens; identical to SEQ ID NO: 9841
  chr14:74253328-74253464
  hyper

SEQ ID NO: 51479 - DNA, 275 bp, Homo sapiens
  chr14:74254303-74254578
  hyper
aagaaaaagtttttccgtttggtgttggggctaaaagggtcatgtcagaaagcagtgtgctctatgtgttcttaatgcctaaagtgggccttaaaacaagggtccctgtccccacgttctctctaaaagtctgcatgatgtccctcgtcatttctacgggttataagtgagcaagacgtttaccacgtatcacacttctgggggctatttcaacgcccaagctggggctgcagaatggtttctgttctaatcctcccccgcgatttccacctctt

SEQ ID NO: 51480 - DNA, 30 bp, Homo sapiens; identical to SEQ ID NO: 9843
  chr14:74254822-74254852
  hyper

SEQ ID NO: 51481 - DNA, 391 bp, Homo sapiens
  chr14:74318398-74318789
  hyper
taactctcccctgacgttccgcatttcccttgcttctcccggaaacgtggggcgcccaggaatcctaaacttccaatccctaagcttccaaaccccgcccctgggaggggagggggcgcggagccgggcctagtcgcgcgcctgcgtactgcggtcagagggccgaggcctgggggcgagctggggtcgtgcagtacagcctctttccggcaaatcacgcgagatttcgttcacccgggctccacagggtcagtgacgcgcgagcggctcccgcgactgtggctcccgaagctgcttcgggccccagcggtgaggaagaagactctcaaccagggtgacttctaggcgtcctcccggagctaccggggacactggcgttattgcccgcaac

SEQ ID NO: 51482 - DNA, 30 bp, Homo sapiens
  chr14:74353509-74353539
  hyper
caaacttcctgtcccgcgctcgagctgctt

SEQ ID NO: 51483 - DNA, 30 bp, Homo sapiens
  chr14:74486145-74486175
  hyper
ggcaactacgacagcggagcccctggggaa

SEQ ID NO: 51484 - DNA, 254 bp, Homo sapiens
  chr14:74706142-74706396
  hyper
gggctccagagcattagacaccggagggggcacctgggaccaacttcgcgaagcgggaagcccggcgggggggtggggggagctaaagacctgcggcctcagcccctccaaagaacagggagatgacggggaaagcaggggaagcgctgagcaagcccaaatccgagacagtggccaagagtacctcggggggcgccccggccaggtgcactgggttcggcatccaggagatcctgggcttgaacaaggagccc

SEQ ID NO: 51485 - DNA, 604 bp, Homo sapiens
  chr14:74706940-74707544
  hyper
cgtggtgcagagtcgccggccgtgtcggagggccccagcaccgctgctccactgcggccccggcctggtgtaggatccgcactcctcgagcccgatgctgttccggctccggccccatccctggtgtccaaagttgtctgattcccaaatcccgcgctggtcaactggggtttatttttcacccccacgagctcagacaacccggccatcgcggcagctaaagcggccgccatcctctcccacgtaagcgccactatatactggagcccggggacgcgcgggctcggggaccctgggtgacctctccgccttctccccgcgctgctttccgggaggtgtgtcgcggcccgctcgaacctccgattcctgtttgagcttggcaattcccccgatttttcgttgcgttttactttgttttacgtggaaaggcaacgaaaaccagcgcgtcgcaggctctcgggcctcgagtagggacgcattgtgccgccttgcgaaaaggacggtgctcggcagcccccagtcttcccggagcccagctccccacgcctccgctccgctcctcgctcctcgaggccaactttccggcccggggcattggggctgg

SEQ ID NO: 51486 - DNA, 175 bp, Homo sapiens; identical to SEQ ID NO: 9845
  chr14:74707572-74707747
  hyper

SEQ ID NO: 51487 - DNA, 737 bp, Homo sapiens; identical to SEQ ID NO: 9846
  chr14:74707791-74708528
  hyper

SEQ ID NO: 51488 - DNA, 422 bp, Homo sapiens
  chr14:74708743-74709165
  hyper
aacctacccttctcccacccccgccctcattcccttccgcaccagccgcactgctaccagttccttgggtacatttgtaaggtggttttcaaggaaataaaggagaaagaaccaaaaatctgcctgcctttctgcgggtgctgctcgcaggtgctgccccggcgctcacctcggagctatttccccgcaccccactccgtccccatcaggtggggccgccacagactctgcgccctttcaagacatttctccactagggcgttctctggcacccccgccgccacatcgttttctcccaccctaatttgttttcagcctctttgcaccctctctgcgcttttctatgcttcgttcttccttggccctgggaaactccactgttgaccgccaccttttaaaacggcctatcctcaccccttagg

SEQ ID NO: 51489 - DNA, 30 bp, Homo sapiens
  chr14:74725026-74725056
  hyper
gactcttcttttgccgcctcctgaatagag

SEQ ID NO: 51490 - DNA, 141 bp, Homo sapiens
  chr14:74892971-74893112
  hyper
tcgcttccgtgctccgtgctcccttccacgctccggaatcagcccaccaggcactccggacccggctccggggcggggcggggcgggaagtcgggggagcccggaggaggcggcgaagcgaggggcgcgcagctggaaccc

SEQ ID NO: 51491 - DNA, 642 bp, Homo sapiens
  chr14:75078651-75079293
  hyper
cggggcggctggagagtggtgcgcgcgggcaccgcgaagagctttgtggtcggcacgctggacgcccgcgggctgttctcccggccccgcccggcggccagcttctctgagtctagggggccctgaagcggccgactgggggcccggctctcggcggaacgagggctgcgcgccccgagcctcgagtccgcgctcctactccagctgggctcgcacggctgctgcaccttcgcgcctcctccctgtgcctgcagccgtctgaaggggacccggacggttttatttttggaaacctcccccggctttttcgtctcttttatccacaccaggccccctcctcggagggacagctcagccccctcattaccggagagggagcgaggaattccagcaacacccactttggcaccgggaagccagcgggcggcgagcgggcggcgagggggattaacccgtgcggagcagggggcggcgcggggctgacccaggcgctggtcgggcagatggcgcctgccacgaccgggacactgggccgcctttctcctgctctgggcaagttcgaactgcagacctgccccgaatcgttctcccgcccctcgcctcagggaccgtctttggatcgggggacccaggctgcagcct

SEQ ID NO: 51492 - DNA, 30 bp, Homo sapiens; identical to SEQ ID NO: 9849
  chr14:75179348-75179378
  hyper

SEQ ID NO: 51493 - DNA, 101 bp, Homo sapiens
  chr14:75179844-75179945
  hyper
acgtagaagtattgcgccgttggtgattacggaagaaccaggagtttggcgtgaccatggtgagagaagacggtccaagaagggacgttatcaggccactt

SEQ ID NO: 51494 - DNA, 30 bp, Homo sapiens
  chr14:75229972-75230002
  hyper
ctcggtggttactgcgcagacgtagtcgcc

SEQ ID NO: 51495 - DNA, 30 bp, Homo sapiens; identical to SEQ ID NO: 9851
  chr14:75230399-75230429
  hyper

SEQ ID NO: 51496 - DNA, 46 bp, Homo sapiens
  chr14:75348428-75348474
  hyper
gctgacaggcagtgcggagggccccaagagcgccttagggttgcct

SEQ ID NO: 51497 - DNA, 261 bp, Homo sapiens
  chr14:75469452-75469713
  hyper
cgggggcgcgcggacgcccggttataactgaacaacccgagccccacgtctctgattggctcaggcagaggaagggggcgggagatcggcaacgaagggcgtagccggcttccactcaaacttgaggtttccccccatcccctcacagcggaagccgacctcgcccgccccggaagtgcaaactgtgtggtctggcaggtgtggattccgccggtgaaggctgaaggcagctaccttaaagatgccgggatccgcagcgaa

SEQ ID NO: 51498 - DNA, 30 bp, Homo sapiens
  chr14:75517986-75518016
  hyper
ggctccgaaagctgcgcgcagccatcatca

SEQ ID NO: 51499 - DNA, 30 bp, Homo sapiens
  chr14:75535862-75535892
  hyper
ttccaaagccttggcgaggacaagcaagga

SEQ ID NO: 51500 - DNA, 117 bp, Homo sapiens
  chr14:75536115-75536232
  hyper
agaaaagcctctcccgcccctccccggctccccaagggcagggctggaccgagctgcagagttggccggacactgactgggtcaagtgaccttgggctgaccgcacccccacccccg

SEQ ID NO: 51501 - DNA, 30 bp, Homo sapiens
  chr14:75593510-75593540
  hyper
cggcccctgactggcgctaggccccggact

SEQ ID NO: 51502 - DNA, 30 bp, Homo sapiens
  chr14:75643603-75643633
  hyper
cacgagtttaaaggcgagtgacaccatagc

SEQ ID NO: 51503 - DNA, 395 bp, Homo sapiens
  chr14:75743667-75744062
  hyper
aagtggcccagttccacgaatccccgcctcctgccctccccgctcctgccgggttggatctctaagaatggaggttagcgcacagcctcgcgcgggccgctcagcccccggacccggcggatgatgtcaggcgacgggagcggccgcggccgggccggggaggccgcggcccaggggagctgggagggagggtggcctcgccaggccgacggcgcgcccggccgcgcggcgttgcctggagacggccctggcggcgctgtgttgctgtaaacagccgcttccctgttactatctatagcaggatctcctggctcccgggcgcggcggctggaggcaggtctgcggtccggctccccgcgcgccccgaactatccgcccgccggcctcatcctgcc

SEQ ID NO: 51504 - DNA, 30 bp, Homo sapiens
  chr14:75745343-75745373
  hyper
acgagattaggacacgcgccaaggcggggg

SEQ ID NO: 51505 - DNA, 30 bp, Homo sapiens
  chr14:75746061-75746091
  hyper
tctgcactccaggacggatctctgacatta

SEQ ID NO: 51506 - DNA, 70 bp, Homo sapiens
  chr14:75894268-75894338
  hyper
taacacaggctgtgcgtgaaggggcttttgacttttcccccggctccggcctctcgcgtctctctcctag

SEQ ID NO: 51507 - DNA, 30 bp, Homo sapiens; identical to SEQ ID NO: 9855
  chr14:76044576-76044606
  hyper

SEQ ID NO: 51508 - DNA, 30 bp, Homo sapiens
  chr14:76127394-76127424
  hyper
cctgttggacctagcggaactccgggtttg

SEQ ID NO: 51509 - DNA, 30 bp, Homo sapiens
  chr14:76447996-76448026
  hyper
ggcaggcctctgagcgcagcagccccaatc

SEQ ID NO: 51510 - DNA, 30 bp, Homo sapiens
  chr14:76452168-76452198
  hyper
agcttggctacctccgtgaggaccaattcg

SEQ ID NO: 51511 - DNA, 762 bp, Homo sapiens; identical to SEQ ID NO: 9856
  chr14:76604775-76605537
  hyper

SEQ ID NO: 51512 - DNA, 99 bp, Homo sapiens
  chr14:76819084-76819183
  hyper
aacttttctatgtcctcggccccggttgctctgagctagctgattggaaagccctaaccctcgaactccgggctttctgggaacgcgggctctctcccc

SEQ ID NO: 51513 - DNA, 279 bp, Homo sapiens
  chr14:76842492-76842771
  hyper
cccagcctcctccacggcttcgcatcccctctgcccgctctctccggagcgtgcggatgagtggagagctgggctgtgcgcgcacggctctctgcctccctctcccccgccgcggccgcctcctcccactctgcgttctcgcgctcactgtgccctgcccgggctcgcaccttgcccgtgcccttcactcgctcttccgcgtgatttccccgccgtctttctctaccaactgggaatgctaaaacgggactgatggacgtgtccgaactctgcatcccg

SEQ ID NO: 51514 - DNA, 158 bp, Homo sapiens
  chr14:76843227-76843385
  hyper
cctggggaccaaaaatgatcccggcaagagagagaaaatcgaacgtgccgcggcggtttggaaactgcaggcggccagtgccgctctcgcctcgcggtctccgtggggcgccccgagggtgcgcacgtggcgcggcggatccagggcgcccgggggat

SEQ ID NO: 51515 - DNA, 262 bp, Homo sapiens
  chr14:76843732-76843994
  hyper
cgctccacctgctcgggtacctgcccgggtctccccttgggcgctgcgcaccccacggcgcccccggcgggtgtcccggaggcaggttgtgtgcgcgtgcaaagtggtccctcggaaggcttaataataataatacataaaactctaggttcttacggacagctttcctgcttaactttgtgctcgtcttcctcttttttttctgacgcaaactaaattctccaagtcagcgtttctccagttccaccgtgctttcatttgt

SEQ ID NO: 51516 - DNA, 130 bp, Homo sapiens
  chr14:77227530-77227660
  hyper
gctcagggcccctgcgaagaatctttttcaagaaattcccgaccgcaggaattccttctgcgctaggaatctccatggagtttgcgctccctctggcacgttgaaaacgtcctccgcagcttcgcaccgg

SEQ ID NO: 51517 - DNA, 212 bp, Homo sapiens
  chr14:77228493-77228705
  hyper
aggcggggaatgtgcgcgtcggcgcgcgccccctccccgctcccggccagctgcgagtcttggctcccggacttgtctcgtcgcgtcggagaaatcgccccccagcgccgctctcccgcccgggggtcttggttccgagctcgcgcggccgggagtcgcctcggtcttccttggggcgcgcgcagatgtgagcgtgcgagagttgtgtaggg

SEQ ID NO: 51518 - DNA, 315 bp, Homo sapiens; identical to SEQ ID NO: 9860
  chr14:77428165-77428480
  hyper

SEQ ID NO: 51519 - DNA, 366 bp, Homo sapiens
  chr14:77493393-77493759
  hyper
ggcctccgccaccccccgggttgggcagccccgtaaccagcccaccgtgcgttccacgccgagacgccaccgacgccgccgctgaagaagaattggggctctgacggttcagctctgggggtccctcctctggtgttggtttggggaagccgtttgggccccccaggccgttgggcagtcgcgcggtgtggctgctgcttcccaggctcaccggcggtggcgggtactcgaagcggctgcgctgttccaccgcagcggcggcggcggcggcggcggcggcggcagcgcttaggccgtagcgctccaggccagacggggccgccagcaccgcaggcttgctggaaccatcaacgtggttgagctgtt

SEQ ID NO: 51520 - DNA, 130 bp, Homo sapiens
  chr14:77499643-77499773
  hyper
cctaaaggagtaatcccggtatttgaaaaaaaaaaaaaaaaagtattaacttaggccagggcgtagggttacgcaagagccactcgagcatgaaatcccaggaacaacgtgattcgctgagaagccccgg

SEQ ID NO: 51521 - DNA, 30 bp, Homo sapiens
  chr14:77506690-77506720
  hyper
agtacttggcggctcgccaggcccggagaa

SEQ ID NO: 51522 - DNA, 30 bp, Homo sapiens; identical to SEQ ID NO: 9863
  chr14:77564277-77564307
  hyper

SEQ ID NO: 51523 - DNA, 767 bp, Homo sapiens
  chr14:77591100-77591867
  hyper
tgggtccctggaccgcggtggcacatgagggctaagaacctcccaggaggggctgggctcggagcgcgctctcggagacgcggtgatgcgcggggcccgggccgtggacaagactgcagtgtcctgcactacctgccgcccactcatcaggccgattctcctcaccttacgcttagatgagtttcgagtaagaccactgctggcatcaagagtctgggcccatgatctcgccctttcgggctaggcgaggcagacccaggttggctgcggcccgcggtccccgcgcagccaacactggcagccaagcgcggggcgcgcgcgccgggagagtggagcgcggaggcccgacggcgccccctcccggcgggcccgagccacggccgcgggctctggcgggtgccggggaggccacgcgcgacggcgtcgcagccggagcccagacagacgccccacgctgcgcggccttcatcccacggctggggcgatggaaaggtggtcccgacacgcgcaggggtctgaggaatcggcttcgggattctgtggtctttgtggtccgcagccggcaccactgcttcctgtaatttaattttctctcccgaaagcgttgctaattaaatcctttctccggcgagccgtcgccccccgcccctgctagtctgtttattaagtacccggcacctgcgagggaatttttgccctcggcggccggcgggtcaggtggaggggccgcgctgccccttagctgcgcctcctggcttccttcccca

SEQ ID NO: 51524 - DNA, 153 bp, Homo sapiens; identical to SEQ ID NO: 9865
  chr14:77600264-77600417
  hyper

SEQ ID NO: 51525 - DNA, 662 bp, Homo sapiens
  chr14:77605687-77606349
  hyper
agaggcagaacaggacgaagttgcgcatgttcctgctgccgatgcagttgccggtgaagaaacagtgatggtcgtgcctcagggtgactctggcgcacactcggcagaagtgggtgctaggtgaggggcatggagtcttcctggccgaggccccctggcaggcccccaggtcgtctggggagttctggatgacaaggacgtaattgcccagggcgttggccgagaggaataggaagagcgccccgtggagcagggcgggcgagaagagccgggcggccgcggggtcctcgcgcatgctgggcaggaagaggaagagctgcagcacgaaggtcaccagggagatgcacaagaagtaggcgggggccaccacgttgagcagccgcagggccagcatcctcgattacattcctgcggggcccggggtgagaagaggactgactgactacggcgtccagggggcgccctcgcccgctcctccgtgccgcgcgtctggggcactgcacgcgactccacgcccccaaccccctgtcccgcggatttcccctccccagttccctaaccccggatcaggcaggccagagacccgagcccgcagcggcctcgggtctaggccccacctgggggtgagtgttgcctggggttttgagcgagctcggcgcctt

SEQ ID NO: 51526 - DNA, 30 bp, Homo sapiens; identical to SEQ ID NO: 9866
  chr14:77606579-77606609
  hyper

SEQ ID NO: 51527 - DNA, 27 bp, Homo sapiens
  chr14:77606828-77606855
  hyper
cgatacactcacactcgctctcgggca

SEQ ID NO: 51528 - DNA, 509 bp, Homo sapiens
  chr14:77606921-77607430
  hyper
cgctggctgcccgggctatttctttgcgaagagcgttttcatttgaggcgaaattaaaatccccccttcgcgcccgcctcccgccctcctgctgagagaaacccaaacaaccctcatggcgccgaaatcctttccatgccgacaagcccgccctgggcgcacgagtggatgcttggccagcctttcctgggatcgaccccgccgccgtgctcagccctcaccacgtccccatcccaccccacgcctcacagccggggttcctggccagcttcggaagccaccgagaaataggattccgtgcgcccgagagaacttttccaggggctaaggaatcggccagccggaggcgcgagaaaagttctgggaaggcggttgcacctaggatgggtggatgccacggggcctccgtccaggctgtcccgtccgcacgggtcgactggtcaccttggaatcccctttgcaggtcccagcgccccccgggaacccgcagcctccgcggagagcgtggg

SEQ ID NO: 51529 - DNA, 34 bp, Homo sapiens
  chr14:77608284-77608318
  hyper
ctgcctggtttcagcgcccgttccagctgggaga

SEQ ID NO: 51530 - DNA, 32 bp, Homo sapiens
  chr14:77647940-77647972
  hyper
ggagcctgggtcttcgcgtaggatctgccagc

SEQ ID NO: 51531 - DNA, 30 bp, Homo sapiens
  chr14:77648268-77648298
  hyper
ggggctggtcgggccgggaagaaggggcgc

SEQ ID NO: 51532 - DNA, 31 bp, Homo sapiens; identical to SEQ ID NO: 9869
  chr14:77680058-77680089
  hyper

SEQ ID NO: 51533 - DNA, 138 bp, Homo sapiens
  chr14:77736728-77736866
  hyper
cagaccgctcacacgcgggcgcaggagctcgccccacacatctcccttccccggctctcggggcaccccagtaccctgataccggcagcggggtgcacccctgcagtcgctacctaaggaagacgcaggaggcacaag

SEQ ID NO: 51534 - DNA, 285 bp, Homo sapiens
  chr14:77736883-77737168
  hyper
cgcagggacggaggtccacccgcccagatgtggggagatccgcgggaggggatcccgcccggcccggtgagccccgctgggagagtggtgtgcggcgctggttggcaacaggcgcccacggtcgagagagaggcagaggggctgtgccacccgtcgccgcgccccgctcctctggcgcacatctggcaggcgccccagcgccccggcagcggccagttttccctccttcggggccggtcctgccgcgtgacccctttcccgccgaggcagcctccacccgcatcc

SEQ ID NO: 51535 - DNA, 360 bp, Homo sapiens
  chr14:77737210-77737570
  hyper
cgtgctccagcgggctgcggctcactgcccgccagctctgccggatcagctcgggctccgggcgctccatgctgtcccggggacgcggagcgcggggctgggaccctcagggctcgggtgccgtcaccgcacgtgccgcgccatctcctccgcgacgcggtcccctccgcccctcgtacgccccccgtgcctccgcccggcgggggccgcagccgctccttccctggcgcgggagagaaaaggcgcgcggccagtcgtaggtggagacaccccagctgtgcttccggggaccccgcttggccgctgcgccctgcgccccgcagccgccagagccgccccaccccgcgacgcctgggctgg

SEQ ID NO: 51536 - DNA, 30 bp, Homo sapiens
  chr14:77843605-77843635
  hyper
gtgcttgtgacagacgatttttaaagtcag

SEQ ID NO: 51537 - DNA, 502 bp, Homo sapiens
  chr14:77964629-77965131
  hyper
ggcgggactcctctccgagctagcgcgcacctggaaagggggctgcaggcgaggtccgctcagggcgaggaagcccggccaccgtggagtgtcggccacctcactccgcacagaagtcaaacttgtcacccggctggtccgcggcagcccggctcgcggtcacgcgcgaggagtggaagccccgaagtccggcgcacctgggcaacgcccggtgtccgggagcttccggccggccccggcccctctctccatcggggggtcgctgcctgtgtgtgtcccggtcccgctccccgcacggctggagccggcgggctggggaggtgggaccgacagcgcgctccgcagcccggtgccgccgccactcacctctgcgagcctcgtgaggctcccaggccgtggtccgcggagccgcggcttcttcacggggagccctagcgccgcctccagcagcgccgccagcagcagcacgcagaggaggagcccggctcggtcgcggagcgca

SEQ ID NO: 51538 - DNA, 30 bp, Homo sapiens
  chr14:77965376-77965406
  hyper
ccctcggcgctccccgacccgtcttgaccc

SEQ ID NO: 51539 - DNA, 30 bp, Homo sapiens
  chr14:78174727-78174757
  hyper
agcttttggggtcacgaatgcaccggctct

SEQ ID NO: 51540 - DNA, 56 bp, Homo sapiens
  chr14:78266693-78266749
  hyper
ccggcgcgcggccacgtggctcgggtgactcgcattgccccgcccccctgcagtga

SEQ ID NO: 51541 - DNA, 255 bp, Homo sapiens; identical to SEQ ID NO: 9872
  chr14:78432196-78432451
  hyper

SEQ ID NO: 51542 - DNA, 30 bp, Homo sapiens; identical to SEQ ID NO: 9873
  chr14:78624566-78624596
  hyper

SEQ ID NO: 51543 - DNA, 30 bp, Homo sapiens
  chr14:79033021-79033051
  hyper
tcctcccattttatcgagtccctctgagat

SEQ ID NO: 51544 - DNA, 30 bp, Homo sapiens; identical to SEQ ID NO: 9874
  chr14:79745139-79745169
  hyper

SEQ ID NO: 51545 - DNA, 30 bp, Homo sapiens
  chr14:79745564-79745594
  hyper
tgaatgggaagggccgggattccgggtcgc

SEQ ID NO: 51546 - DNA, 30 bp, Homo sapiens
  chr14:81407696-81407726
  hyper
ggccaggacctgaccgcggacacccctgcc

SEQ ID NO: 51547 - DNA, 30 bp, Homo sapiens
  chr14:81407973-81408003
  hyper
ccccacccggctcccgcggctaccagtgac

SEQ ID NO: 51548 - DNA, 30 bp, Homo sapiens
  chr14:81421282-81421312
  hyper
cctgaattgcctcgcggagccgcgggctgc

SEQ ID NO: 51549 - DNA, 30 bp, Homo sapiens; identical to SEQ ID NO: 9875
  chr14:81421585-81421615
  hyper

SEQ ID NO: 51550 - DNA, 31 bp, Homo sapiens; identical to SEQ ID NO: 9876
  chr14:81685635-81685666
  hyper

SEQ ID NO: 51551 - DNA, 30 bp, Homo sapiens; identical to SEQ ID NO: 9877
  chr14:81686842-81686872
  hyper

SEQ ID NO: 51552 - DNA, 426 bp, Homo sapiens
  chr14:81901991-81902417
  hyper
gttgcaccagaacacacggacgcgcacacacacgcacgaatgcacacacacgcacacgcgcgcgcacacacgcactctcatcttcaactcttcatcccagcgagaggcgggtgtcaggcaaattgcttggcaacgcgcagagaaaactccatccaagccccacgtccaggccgcctctgggcgctgtccagcgggcagagcgcctgaggccaagctggggtcctgcctcccgacaccccgaaggcggggcgcggcgccaacccggggtttcaggcgaggggagtgtaggggaagcaccgtccccagggacacctgttgtcgcctccccactcgggccgatgaagacatcctgggcgtcccaatctcgaagacacccgtcggccagaagtgtctgtgtatggggccaggtgtcgcaggagtcctcct

SEQ ID NO: 51553 - DNA, 528 bp, Homo sapiens
  chr14:81902633-81903161
  hyper
gcctcctgctgcggggcgtgggtgcagttacctgcgccgcggtccgcagggtccccggcgtccgccgaaaggtcgccgcggcaaagccggcttctctggccgcgggatacccacccggccgcactgctctcgccacgatccctcccggccgcagcgccgacgccggctccagactcgagctcgctctgcgcccgccggctcccggcgccgctcccgccgctcctgattggccgcggcgcgctcccgagccgcgccatgattgggcagccggggagccggggcggggggactggccgggcgccgccgggatctgctggccaagcttcccgcgccgcagactcgctttcccgcggctcccggggccccaaccagaccccgaagctgggattcttcccctctgcgcctagtggggccggccgtccaggcacgaggcaacacggaaagcatcgattcgagcgacatggaaatggcgtggaatggggagcgcatgggagtcccacccgctccgcctgcgggctggtagttgag

SEQ ID NO: 51554 - DNA, 30 bp, Homo sapiens; identical to SEQ ID NO: 9882
  chr14:82000011-82000041
  hyper

SEQ ID NO: 51555 - DNA, 30 bp, Homo sapiens
  chr14:82000297-82000327
  hyper
ccattgctccgccccgggggtcattcattg

SEQ ID NO: 51556 - DNA, 716 bp, Homo sapiens
  chr14:85996079-85996795
  hyper
gttgggggatgtggacgggggcggagagcagagaagtaaaggaataaaaccaacttcgctggcaacttcaataaatccggtaactggaggcaaaaaatagactccgagggctgggtctggtccggatgaaacgctagggctccttcccttccttgaatcttgggcgctggaagccagccacgggcgtcttgccacgcgagtgcccctagacagcaacacacccactggaaacgcacgtgaacaaagctctcgcccccgggagccgctgcctgcggtttcctagtcgatcccagcttctctagggagtgtcaggcgcacacagggttaagttagttccctccctggtaggagggagaggaggaggaggggaaaagcagcatactgtctcaggctgggtaccttgtagttagttgtacgttcgaaacctgtcgccgtcacttgcgcgtttggcattatccattgtcaccgcggaggaacgagcgctcgagatatcatcagtgcccgcaaatctccgcgccaaggcgctgagctactcctttccgaggtgcgcctctggtcctccgtccctggtgcccagcagcggcgaggcggcatctccgctcccgccgccgtgtccaccgagccctgggatcagggtggcagttctcaacgatgggcaggagggacctcggcggcgacccctaaaacaataccatgccccgggatccccgctgctg

SEQ ID NO: 51557 - DNA, 428 bp, Homo sapiens
  chr14:85997497-85997925
  hyper
cacgcctttctagagcgcctgcggaggtggcgaaggcttggagagcatacgaggcggaatccggatcgagtgagttccttgagccgcttgcgtgggacgcagggagagggcgaataacgccctcaggcgctgaatgcaggggcaaggagccagcgagggtggctggagcaggccttgccagctgttaccaagtctctccacaggcttgggggcttggggcctcctggaaagatccctccgccgcgctgaccagtacggggctcgctcccgcactttgaaggctgccgcggtctttcgtcatttataatcaagcccaagatcaaggttgcaagctgaggtcggggtactgacaacgggaatgaagccataggggaagaggataactgggacgggctggacccatacttgatacccgggaaactcctaga

SEQ ID NO: 51558 - DNA, 388 bp, Homo sapiens
  chr14:85998186-85998574
  hyper
cgcacgaaccgggtagtgtgcgcgtgtgtgtgctcgcgtgtgtgagcgcgtgtgccagcgtgcgtctccgcgcgggcgtgcgtctgggtggatccttgcgtggcttgggaggcaaatcgggcgtttctccaagtcgtcttaacatgatttaggctctcaaatacgtgaaagcggtagacacaacagggatgcgaaggaaataaaaaacaattggggaagtggtgccaagtcactcaggctttgaactgaggacgagtagtgcggtcgcgcctggggcgcgtccggaaatcatcctcagcctgtggcggccactgccccacttaaactcttctgcggggagagttgagcggatccctggggggttggtcctgggctagttttaaactct

SEQ ID NO: 51559 - DNA, 63 bp, Homo sapiens
  chr14:85999468-85999531
  hyper
aagtaggagggactccgggagagagggagggaatgagggagggagagaaagagggctccagga

SEQ ID NO: 51560 - DNA, 133 bp, Homo sapiens
  chr14:85999596-85999729
  hyper
cgcgaattcattactgtaaacatatccgggggtgtcaggaggggtaggggtgggggccgcggcgcctacattagcccggccgcgtcggattgaggcagtagtgtggtctgagcagcctccagacccacgccgg

SEQ ID NO: 51561 - DNA, 654 bp, Homo sapiens
  chr14:85999838-86000492
  hyper
cgccgagtcccgggatcctccaaatccgaggagctccggcgccgcggggcagctttctgccgccttccccgctcgctgtacttcttttggggttcgttggcttggcgaagcggagagggggaggcggaggaggagagaaggcgggggtcgcggcggccgaagccaagagaaagtggcatgcccgaaccctggaggcggtggtggcggaggacgggggaagacgatgccgcagctccgtaggggacgtaggcgagagcaagcgaggcgagctgggcgccccggccccggcccgctgcggggaggcgcgcgccgctctgaggctccggcctccgcacccccgcgccccgacgctgcgggcgacagggcttggctccagcagccgccgccgtcgccgccgccgccacccggaggacccagcaaaagtttggatctgggggagggcgcggcgctgagcgggattaccaccagggctggaaggagacctcgagaacctttgcaggtaacgcgcgcccccaaccctcttcttccatgccccgccgctgcgctcccgcttcctcccagagcccttcctggccctcgcgggtctggcagaaagtaagagggaggcgaagttcaagatcccggggatgagcaccgagcgctggcagatcacta

SEQ ID NO: 51562 - DNA, 376 bp, Homo sapiens
  chr14:88459273-88459649
  hyper
tcttgccgccccccgcgtatccccgcagcttgccgctcaccccgccgccgctgaccgcgccgatgccgtcgaactcccggcccagcccgtcggagtcgtcgagcacgtacgcgccgccgggcgccagcagcgcacacagcagcaagggcaccgcggcgcggcccgccgaacccgcggccgcagtcatagctttcgctcggcgttgccaggaagccgagagtagccactcagccattgtgtgggtcacatgactccggcgcccagggaggcgggtcccgtcgccgccacgatagatacgggcaggaggccgctgatgctgacgccgccgccgccattttgagtgcgggtcaagggcctctgacgcagctggcggagt

SEQ ID NO: 51563 - DNA, 270 bp, Homo sapiens
  chr14:88789501-88789771
  hyper
gaaggctggggctacggagaagcccactgcagtgtcactccagcccccgaaggcgtgtgcgcacacactcccgcacacacacacccgcacacacactcccgggcgcgcgcttgggcgggcacgtcagcctcgctcggccgcgctgagcgcacacgccccaccccggccgcggctcctcgcccccggcgacgccccccacttcccgctccccgaaagccattggatgtaggggtggcgcggcgcccgggcagcgcgcggcgagggcgaccc

SEQ ID NO: 51564 - DNA, 261 bp, Homo sapiens
  chr14:88789985-88790246
  hyper
cttactggctcggccggccggcgggcgggcgtggaggcggcagcggcgcgcttgctggagttgcagccggagacacgcttggttgcctggaaggcgctgcaggaggcggaggaagggccgctgcggctccgccgcagacctcggcctccgggtcacctcttctcaccgctctcaccctgagctctccctccttctcttttctcacttcattttttttcctcccgcgtctggctctctcgcctgagtcccgaacccacgtcc

SEQ ID NO: 51565 - DNA, 202 bp, Homo sapiens
  chr14:88790298-88790500
  hyper
cgctccgcatctgctgcgctctccccgcccggggaagctcgctcccaaggcacagcttggtcccttccccagctacctgcagccggactggggccgctggtcgttggctggaaaggaggcttgagagaggcacgggggcccccggaggaaagcggagttgccaagacccggcagctcccggaagcggcggccccgggatcct

SEQ ID NO: 51566 - DNA, 484 bp, Homo sapiens
  chr14:88792791-88793275
  hyper
aaaaacatccaagaaagatgccgctccaagcggttctgtctccctctgtgccgccgcaacttccatggctattgcttcaggcgggttaagtctggtggaaagagactgcctagcgttcctgcggcaggaaaacaaaacatcgtggcgcaaagtctccctgcactcgccggcccccagcaggagacccgggctggcggccactgcgtcctgggtgcactcggtggcaaagcgctgctaccgggcacgggtctctgcagctcaaaacctgcccggctggagcgcaccaatagttgccccaccactttaatgaatgccgtgtggcccggcatgggaaggctgggaaagcccgaaaaccccagtcatctctggcaacgaagtttccccgagttggctggctcccttaccccctccccacgctccagcccggggtagctgtgagaccggaggagacgatgcctgccgcgtggggagtctcagggtggct

SEQ ID NO: 51567 - DNA, 30 bp, Homo sapiens
  chr14:88852269-88852299
  hyper
gccgccccttggggcgcttcctacccctgg

SEQ ID NO: 51568 - DNA, 783 bp, Homo sapiens
  chr14:89020630-89021413
  hyper
acagtccttccctgcgccccttctcgccaaagttatctggcgaatttcacgtttatatattctgagaggcacaaatatgcctaacacatttaaaaccctgatccagaattaacccgcaacaatcggccagggcgttcggaatagaagttcaagactccttttagaaattactcaagtatatgagagcgaacctgaaaaacaagacttttctctttgttacgctcccgctacgggtctggccgccgcgccccattctccgggattccggggccgcgggcgcgctccggggtccgggcgagtggacacaccccaccgctcgggccagccgcccgcccctcccgccggccggggaccgcgccctcacctgctcccgctcccgctcccgcatcctcggggccgcgcgccccgctcagcgacccgcctcccggggccccgccgcgcggccgccgcagccgcacccgcacgccagcccgggccgcggcgcgctcatggggctcgcacgcctcacttcctgtctccaaaaacccggctcgcagaccattcccctgggcagagtccggcggtggcgacggcgaggggcgaggcctggaggtgggaccggccggcgaggagcgccgcacaaagaagccccgtgggggcggggggtggcaggaggacggacagaccgtcggaccgacgcgggacgcgcggccggagcagcggggcggccgggcccaggcgtccctccccctgagccgggcgggcggatccggggaggcggcggcggcccgtgacctcagagag

SEQ ID NO: 51569 - DNA, 145 bp, Homo sapiens
  chr14:89029587-89029732
  hyper
tgggcccgggtggacgccgcggcctggcctccgctggacgctcctggcgggctgcggctcctcctcgtccaggccgcctcggccctggggacatttgcggcctcggagcgtggctgcggctgaagtagccgccgggaaatggaag

SEQ ID NO: 51570 - DNA, 30 bp, Homo sapiens
  chr14:89258309-89258339
  hyper
ctcacaggatctaacggaataaagtgccac

SEQ ID NO: 51571 - DNA, 726 bp, Homo sapiens
  chr14:89290489-89291215
  hyper
ggtgggaaggacctcgagaaacagcggacaatttcaggatttaggactttaggtcttgatgggtggatggtactgtggaagctgtttacttgtttgtatttctagaatcggaaggtaaagcgaaagggatggaaacgagcgaatggaagaagtaggacagacaccagacagagatcaactccagggactcttccggacctgcagggcaggcagagcattcggttgctaggcagctgcgcctcctgggagggtgggggaccccaggggcaggtgtctaactcactacctttttgtttagccgcggtgccttcttttcaaaatcaatgaaacctgtagcctttaaaagtagacatctttttccaaccaagtttaggcaagccctgtagccgagttctgcttgcggttgtttttctttttcctgttctcaggcgcgctgcgggcacctctcggacaaggccccagccgtcgcgggttgccgggcagagtcggacgccgccagctcttcactccacgcccacctctctcctggagcgctgggccttcgctggccgcaccggcagccatgagctcggagatggagccgctgctcctggcctggagctattttaggcgcaggaagttccagctctgcgccgatctatgcacgcagatgctggagaagtccccttatgaccaggtaccggccagctcccgtcagcctgtgcatcctgacgctgaggctgcggg

SEQ ID NO: 51572 - DNA, 30 bp, Homo sapiens
  chr14:89291496-89291526
  hyper
ctttaagctctcagcgtgtgcgttgttaat

SEQ ID NO: 51573 - DNA, 30 bp, Homo sapiens
  chr14:89493374-89493404
  hyper
tgggtacaggagctcgggaagctctctgct

SEQ ID NO: 51574 - DNA, 112 bp, Homo sapiens; identical to SEQ ID NO: 9895
  chr14:89506987-89507099
  hyper

SEQ ID NO: 51575 - DNA, 207 bp, Homo sapiens; identical to SEQ ID NO: 9896
  chr14:89817834-89818041
  hyper

SEQ ID NO: 51576 - DNA, 244 bp, Homo sapiens
  chr14:89884047-89884291
  hyper
aagaggagattccacgtctccccagtgctgcgtcctgataggacccccagggccttccgagccctctcccagcgaccacctcgtgtcccggaggtaagcaccgcagcgtcccacccaggtggccgcgtgtctcccgagggagggccggtggccattacaagacaagaggcaccgtcctaaaggccacgccggtggggcctctcaagtgggttgtgcggaacgccccggccggcctagagagaaa

SEQ ID NO: 51577 - DNA, 31 bp, Homo sapiens; identical to SEQ ID NO: 9898
  chr14:89952768-89952799
  hyper

SEQ ID NO: 51578 - DNA, 494 bp, Homo sapiens
  chr14:90084100-90084594
  hyper
aacataaaggtatctcgagcaaactgcacccaaatgaaaaaccgaccctgcagaaatctgtgcacaagagggctatctgaaactacagcacgattttaaaagaaggttttgggtgactgttttcataagtctcaatctaactgaccaatcagtgtgagagttaaagtgggctccagtcattcgtgcagccttcagagctctgcaccctccgagctgctctcctctccaaggcagagtcggcgatcaatgaaaaacagggaacaaaaggaatataacaggatgtcttccttagctaaggaaaacgattccctttttcctcaatgagccagtcgcaccctgcctacgacagctccacacgggagcttccagcagaccagtcctttcgggtgaggcacattttacatttgcaatcatgtgtcccaactgctagcaaatgtgtcaccttaagcacagcctgtgacggagggctccccgagcccaaccaattgaaacta

SEQ ID NO: 51579 - DNA, 219 bp, Homo sapiens
  chr14:90085512-90085731
  hyper
gcgcccggcgcccgcccggggtcggcggcgcggctcccaccccggcctggagccctgctgggtcctagtgcgcgccgcgcgcccgcctcgcggcccggtctgcagcccgcaccgagggcaggcagctcccagcgccgcgagtctccgggcgaggccgccaccctctcggtcccttgcgaaagcggccgcggggtgtgcggatgaactggagcttaatgt

SEQ ID NO: 51580 - DNA, 360 bp, Homo sapiens
  chr14:90420658-90421018
  hyper
ctggctttgaaaggcgggagagatgcagactcaaggttaccattaatagactatatagagagaaaggagatggaacttggaggtagccgtagtcctggacggggagccaggagccctgcagctccaggatcagtcattaaccacgaccctttggacaggcagcccaggtcttatctgcacacccggcagagtgagacccagacacgggagaggaagcgagaggcccaggccaagctgaagtccgaggctcagtcgccctccggaaacctacttccacccacttcctgtgttccgagggactggcttcccacgtccgcgacctggctctggcctcggagaagaacatcgcgactacaacaa

SEQ ID NO: 51581 - DNA, 200 bp, Homo sapiens; identical to SEQ ID NO: 9902
  chr14:90421129-90421329
  hyper

SEQ ID NO: 51582 - DNA, 604 bp, Homo sapiens; identical to SEQ ID NO: 9903
  chr14:90422191-90422795
  hyper

SEQ ID NO: 51583 - DNA, 2212 bp, Homo sapiens
  chr14:90526594-90528806
  hyper
ggtttctgatgaaaatgcactcgccagagctgtgtttctttattcgaaatcacacggttttactcaacagggctcctagcccttctgtctctgctcctggtgcgtaagggcggtgtgtggggctctgcgcctgaaaccgctctctcggaaggtgggaagatgcccacgtatccattcctctccgcgtacagattcgctcccacacgcccgggcgggtgattccggagggccgcgcggggctgtgtgcgcgggcgggggcgggatgtgtctggagggggcagagcgccctctcccggccccggagggcccacgcggaccggctgagcgtcccaccagccggttctgcatccactacccagatctgcgcgccctggtgggagcaccgcagccccgggtcggcccttcgaacgccgagcgtctacccgcggagaccagcgcaggaggcgggcccgcgcgcaaggaggcgggcgacagggtggagtcgccgcagctggcagccgcacggctctacctgttgcagcgtcggagcgcgcccgcctgagaaggcagagcgcggtgcggacctgtgctccgcgcgccggctggcagggcagggccgcggctgccaggaggcccgggaacagtcccgacggagcggcgcggagagggcgctccccggaaggtgagatctgagcgcggcagcggcgccagcgcccgctacaaggcggggtctcggggagggggccccggcggtttgctggagagccttgctactgttctgcatgaggtgggggatgccttctgcgcggaccccgcgtccaggcaaaactctggaacgcactaggcagccaagcccggggggaagagatggaacgctccaaggtcaaggtctcctggccgcggagcccttccagcccccagtgtttggcctcctctccggaagcggggctggctcgcggtgcgcgcttggtccgggcggagcctactagtaggcgcagaggacgcccccgcgcaggatccagagaccaagggcgctctggcatggtcaaggcgagggaggctgcccgggggagaagcccctaacttcctttgctccctgttccaacctccctttctggtctcctctctccagcccgtccgcccaacggatgcgcagcgttggggcccggccggaggtcggagccctcggacgccgcagccctcggacgccgctcagcacagcccctctctccgtgcgcccgccctggaccccctccatccctaagccccggcagccgattcggagactcgggaggccacaggctcagcgcgacaccacgaccacaactaggaggcaccatcgtcgatctacctggggaggcacctacaaagccagcagactgacacccgtgtcctagccgtcggcggcctgcgaagcgatagtcaaaggaaccaggacccaggaccccggcgctctgcttacccgcagacctccggaccgcgccccccccccgccgccccgccccgccccgccccgccccgcgaccgtctctttgcgggaaactcgagttggctcgagcttgccctgaagacgcgccacgccccctcccctatctgagccggacagggagccggggtggaaactgcgcccgcatcccagcgccaagcagacgtgaactctgcgcccgttccccgggaccttcagcgttaaggagaactccgaggagagcagggggagtggaggggaacggcggcgacaaagcggatttgaaactaggagtcaaggaggacgtggggagctggcgccacaggagctaccgaggcggcggccgggggagcctcgcggcctgcgggagagcccggcggtcatgggcgagccggcggtggggcgcccgggagctggctgagcgccggggcccttatttcccgggggtgtgggcgagactccgccgacgcccggtgccgtgggcctgggggctgcccccgggggcccggccatggctggccggggtttcagctggggcccgggccacctgaacgaggacaacgcgcgctttctgctgctggccgcgctcatcgtgctctacctgctgggcggcgccgccgtcttctccgcgctggagctggcgcacgagcgccaggccaagcagcgctgggaggagcgcctggccaacttcagccgcggccacaacctgagccgcgacgagctgcgcggcttcctccgccactacgaggaggccactcgggccggcat

SEQ ID NO: 51584 - DNA, 232 bp, Homo sapiens; identical to SEQ ID NO: 9905
  chr14:90528869-90529101
  hyper

SEQ ID NO: 51585 - DNA, 30 bp, Homo sapiens; identical to SEQ ID NO: 9906
  chr14:90798553-90798583
  hyper

SEQ ID NO: 51586 - DNA, 59 bp, Homo sapiens; identical to SEQ ID NO: 9907
  chr14:90849380-90849439
  hyper

SEQ ID NO: 51587 - DNA, 381 bp, Homo sapiens; identical to SEQ ID NO: 9908
  chr14:90849476-90849857
  hyper

SEQ ID NO: 51588 - DNA, 660 bp, Homo sapiens
  chr14:90849897-90850557
  hyper
cgcttgacgggcggtggttcccccgagacagaaacttgactgaaaaataataccaaatacccgtgctgcggcccgtggccctccatagggccacctgaactagcctcgcctgtccccttgctctttgccgttcgtccttcgcgttttgtgaaaacagttggcgccgcagaaatgagataaacgcccctgagctcgaaacccgcactcgaactgccaccgagccgacccttcctgttttggaactcagggcccggccacccgagaagcaccctcatgggcactttgtttctacaagggcccgtttccatttccttcctaaggtttccttatcccctgcggcaggaggggcccgctgggctcgggttttcagctgcgttggagctgcagaggctgcggagtgaacgcggccaggagcccgcctgggagcgcgcagcgctctaggagccgagagccgctgcttggccctcgctggccgggtaaaccgaggggaagctcctggcctcctttcccttaagccccttattgcttctgtggggaaggccctcctaggtagaggcgaaggaccggggagataacctctcccatgggccacatccgctgccatggtctgtgtcgtgccagaaggtacctctcagccctcagtgccgtgaaaaatctgac

SEQ ID NO: 51589 - DNA, 30 bp, Homo sapiens
  chr14:90864966-90864996
  hyper
ggggaggaggttttcgttgtcgagaaagtt

SEQ ID NO: 51590 - DNA, 30 bp, Homo sapiens
  chr14:91129911-91129941
  hyper
cagccagtggtgccacgtctccagcccatc

SEQ ID NO: 51591 - DNA, 30 bp, Homo sapiens
  chr14:91224577-91224607
  hyper
gggcaccactgtcccggtggccgcggcagg

SEQ ID NO: 51592 - DNA, 30 bp, Homo sapiens
  chr14:91224963-91224993
  hyper
gcggcagctagcagcgagtcctagctgatg

SEQ ID NO: 51593 - DNA, 30 bp, Homo sapiens
  chr14:91282266-91282296
  hyper
aagcccgccctgcacgcttgaaccccaggc

SEQ ID NO: 51594 - DNA, 363 bp, Homo sapiens; identical to SEQ ID NO: 9910
  chr14:91580265-91580628
  hyper

SEQ ID NO: 51595 - DNA, 30 bp, Homo sapiens
  chr14:91581049-91581079
  hyper
gggttctgggctgccgcaggcacacaggcc

SEQ ID NO: 51596 - DNA, 30 bp, Homo sapiens
  chr14:91730729-91730759
  hyper
ggatttgaattttccgccccggtagctggc

SEQ ID NO: 51597 - DNA, 122 bp, Homo sapiens
  chr14:91755509-91755631
  hyper
ggtgtcggggttctcggcctgtgatctgagcggctgagaggccgccggcgaggcggggtctgaggactccagctgccagggagggctgtccacggtggattttaagcgttccctcgaaccct

SEQ ID NO: 51598 - DNA, 30 bp, Homo sapiens
  chr14:91841053-91841083
  hyper
tgcagtggtctctgcagtcaggctcattcc

SEQ ID NO: 51599 - DNA, 30 bp, Homo sapiens
  chr14:91883658-91883688
  hyper
tgaccactgggacccggtccgccccgaggc

SEQ ID NO: 51600 - DNA, 49 bp, Homo sapiens; identical to SEQ ID NO: 9912
  chr14:91976435-91976484
  hyper

SEQ ID NO: 51601 - DNA, 30 bp, Homo sapiens
  chr14:91976641-91976671
  hyper
tcaaaagcggcgcgcggggccacccaggga

SEQ ID NO: 51602 - DNA, 537 bp, Homo sapiens; identical to SEQ ID NO: 9913
  chr14:92040359-92040896
  hyper

SEQ ID NO: 51603 - DNA, 197 bp, Homo sapiens
  chr14:92302266-92302463
  hyper
gggctggggtctccaccgtccccggtcacgggtccccctaggcagagccgcccacctggccagcggggacctagcctcgccccgtcgcccacccctggtgccctccagaccaccgcgcttccagctgtcgcggggcctaaagctctctcaggcccccgcgacacaggcgtcgctgaggagacgtgggaacagcccct

SEQ ID NO: 51604 - DNA, 30 bp, Homo sapiens
  chr14:92303220-92303250
  hyper
ggcagtctttctggcgatgtttatgcacac

SEQ ID NO: 51605 - DNA, 241 bp, Homo sapiens
  chr14:92413691-92413932
  hyper
ccagaggggccgagcgagtcgtggagaggacacggggagagcgccggggtcctcccagccactgcagagccctcagcgcaagcacctggttttgcttagccctcttcagtaattcagcattaaaccaattggaggaggaatgttaaaaatgaacacttcattttctaagtatgttaaacaatgcaaatggggcctcagtctggacacagctggttcagattacagcgctcaccaactggct

SEQ ID NO: 51606 - DNA, 76 bp, Homo sapiens
  chr14:92414136-92414212
  hyper
gggaggggcgtgcacgcccgcgctgcgtggcaaggggacccgcgagaacgttgtcgcctccggaaggaaagggact

SEQ ID NO: 51607 - DNA, 30 bp, Homo sapiens
  chr14:92506125-92506155
  hyper
cgcgagacaggatacgataacacaaagctg

SEQ ID NO: 51608 - DNA, 30 bp, Homo sapiens
  chr14:92572258-92572288
  hyper
cctgtttaggggcacgccgggtttcctact

SEQ ID NO: 51609 - DNA, 16 bp, Homo sapiens
  chr14:92588311-92588327
  hyper
cgctagtctccagctc

SEQ ID NO: 51610 - DNA, 61 bp, Homo sapiens
  chr14:92789077-92789138
  hyper
ttgttagctctgcacgaccaattaattttctcctgcatcttccccccgtggtgggtggcgg

SEQ ID NO: 51611 - DNA, 452 bp, Homo sapiens
  chr14:92789369-92789821
  hyper
actactgaagagaagagtgcacgggggagtgcgccctacgggacgagtacacgtgctgggaagggcggggggtgagaggcgggcaggaggggaggagtagggaggcgagagcagcgggcgggaggcgccacggcctctcagacgctggcgcccgcagccgagaagccagagagaaagttcccggggagagctcgcccctgggagggccgacgtcgagcctgctcgccgcgagggtctcaggtaccgcgcgtccagccagccttcccgcggcgcgcactcggccgcccgggctcggctcgtcgggaagcaggggaacatcgccggctggcagccggggcggccgccgccaaacttggaggaggaggatgctgcgagtgggcgcggcggcgcggggcgcgggggcgcactgagtgctccctacggcgctgctgccagggctgtggccgggcgag

SEQ ID NO: 51612 - DNA, 139 bp, Homo sapiens
  chr14:92789959-92790098
  hyper
gcgggactctgagctccggccgcgtcgcgcgtccccaccttcccaaggggctcccccgccgacctcgccctcgggccatgaggctttggcccggagctcctcgcctctgagtcgcgcaccgcctgctccagccccagcg

SEQ ID NO: 51613 - DNA, 532 bp, Homo sapiens
  chr14:92790280-92790812
  hyper
cgtccggcctcttcggcagcttgggtgggtgctggtacgggtcccctcttcctggggagttgggggctttggctggggagtctcggggcggctgcgagatgttttcccctccttcctcatcaggttggtcccaagggttcatccagtcccctccccgccgggcaggtagagcgcgcccagaagagctgatggacgctctgggctgtggcgccggttcccctgagctacgagcggcccctgggggggctcaggacgcggctgcaggtgtgtgttactaagacgaaagcaagaaccgcttccgtcccgggagtgcgcccggaatgggcagcgcaactgcggggtgcaggcaggattctcttggtctggggtgggcgaaactgagtggcccgctttcctattctgcagagccgcaggaaccgccactgcgtctcgcccctgccctggttcaaaggggtcccctgggtgccctgaggtgtttgttcttcccaaaccctaaaggcgttggggcagtctgccgcggggggtagctgcc

SEQ ID NO: 51614 - DNA, 30 bp, Homo sapiens
  chr14:92979694-92979724
  hyper
tttcgaggctccctcgggcaaggctgtggc

SEQ ID NO: 51615 - DNA, 899 bp, Homo sapiens
  chr14:92980015-92980914
  hyper
cagggggctccgggccgcgagccgctgccgaatggcttttgacaaaaaaacccttgaccaccaaggccagcctcttcctgaaagccccgctcgctccgatacaggaagtagaagggagcgagagccccagagcgcggcggcagcggcggcctggcccttccagagggccagagccagggacatgcgggcgcccgggactccgcgttccgcgcggcccggcgcctgagcgcctccgttccccgtcccggagctgccggcggcatgatccgacacgccggggcgcccgcgcgcggggaccccacggggtaagtccgggcggccgccccctcctccctcgcgatccccacggcccgcgtcctggccgccccactccacttcttgtcccagagagtccttcgggcgcgtgacctcggggttgtcgggctgatacgggacccccaccgtggccgaggccagaacctggttctgcggggcagggggcggccctggtgactccgctggacccgatgttggctaaactttcaaggccaggcatttcactgggaacccagtgcacactttaggctgctggtggacggattacgagggagtgcgtcgctacctgtcagcgccggggctgcccgcgtggacgcggccccctccctggcgtctgccccgcctgaactttgcaaacaaaactcgcggtcccagccccgccagcctgctgcacccgctgctctgcgagtcgcagcgcgcgccctcgggtactagagccccgctgggcgtggggtcggagacccggacccccgcaactttgggtgcccgcggcccaacagctgaccggccctcctggaccgagggtccactgggcccttttcccgccgcccctctgccctggccgtagacggtgaccttcggac

SEQ ID NO: 51616 - DNA, 30 bp, Homo sapiens
  chr14:93104056-93104086
  hyper
taacagggaaagctcttggtgagtgactga

SEQ ID NO: 51617 - DNA, 358 bp, Homo sapiens
  chr14:93214735-93215093
  hyper
atcccagccctgaggtcgagagcctgagagagcagacgggaggccctggcctcgggcgtggggactgaacccggttctgtgctggggctcgcggttacctgtggcaggcgaccgtggtggcagtggtggcggcggcggcggtgagtgaccgcggtggtggcgccggcgggaccgtgagaactcgcggcggctcgcagcctcacaccaaacacccacgacgtcggcactgctgtgattgctgcgggcgccgccgctcctcgcttaagggccactgtgccgcggtgactggtggagctatggggcgtggcatctgccaaaaccaatgggaggagaggacgaggccggcgagccaaaggga

SEQ ID NO: 51618 - DNA, 137 bp, Homo sapiens
  chr14:93389556-93389693
  hyper
cgacagacggacgcacgccgaggcactgcgcccccagccccgcgccggtgccaccgcagcccgaccccggccgccagtccagccgcccctcgcccggtgcctaggtgcccggccccacaccgccagctgctcggcgc

SEQ ID NO: 51619 - DNA, 335 bp, Homo sapiens
  chr14:93389712-93390047
  hyper
cgccgctgtcctggctcttctgctctgcgccgggcaaggtgagcgagcgcggggagctcgcgggagagggttccgggcgcccctgcccaccttgaggtccgggcaccgcgcggcgccccgcacccctccacacttcccttcgggcgcggcgagttttcagcaccgcggacagcgcctccgcctcccgcctgaccctgcagtgtggcctccgcctgggacccacaagacacttgggcctgactcccaaccccccggggcaactcccccttgtgcccaccccttgtctgggcttggcgcctcggttgcatcagggccagtgccggttgcgcggtggc

SEQ ID NO: 51620 - DNA, 30 bp, Homo sapiens
  chr14:93552647-93552677
  hyper
tgttccagaggagaccgaaagacttcaccc

SEQ ID NO: 51621 - DNA, 148 bp, Homo sapiens
  chr14:93582646-93582794
  hyper
ggggccctcctaggcgtaggacgtgaccaccagttctcactctaggtccccttcactgaggggggaaggggcggggactggaggcgacagcgacaacagcggccgtccccggagaccccttcctcaggggtgcgggtcagcgtcggcg

SEQ ID NO: 51622 - DNA, 30 bp, Homo sapiens
  chr14:93799559-93799589
  hyper
gcattatttttgctcgtcggctgggagccg

SEQ ID NO: 51623 - DNA, 191 bp, Homo sapiens
  chr14:93896833-93897024
  hyper
cgtgggacgcacctgggtccctctctggtcaccctgctgaggctccgggggctgctccgggagcaggatttacaggcccggagaacgccaatgggagatccaaatggtcggggactccggcgctttaagaggcttttctctgggaaacacccgtcccctccgtgcgccttatgaatggaaatactcctccc

SEQ ID NO: 51624 - DNA, 276 bp, Homo sapiens
  chr14:93897078-93897354
  hyper
cggtctccccgcccacatcaacgcgggcagctccaggaggggacggacaggaagcctttggccgcctattaaatcccacccatttctccgggggcgatttcctaaccttccgggaccgaattctgcaatttgatgtgcgttttgtccgaatggtagcgacacgggcctaagggagggggaaagcgagggggtggggggtggggggtatgcactcttttcctcgcaacatcgctggcggagcgagggagctcacacgacacagattttggggcaaag

SEQ ID NO: 51625 - DNA, 127 bp, Homo sapiens
  chr14:94226381-94226508
  hyper
aacagctgccgtccccgagggctgcctgaccatatttagacaggagcagacggagaggcagcataaatcaagccccacagcctgggctgccagggggaacaaaacaaggcaacgtcttggcacaatc

SEQ ID NO: 51626 - DNA, 712 bp, Homo sapiens; identical to SEQ ID NO: 9924
  chr14:94254571-94255283
  hyper

SEQ ID NO: 51627 - DNA, 302 bp, Homo sapiens; identical to SEQ ID NO: 9925
  chr14:94255304-94255606
  hyper

SEQ ID NO: 51628 - DNA, 82 bp, Homo sapiens
  chr14:94406108-94406190
  hyper
ggctcggctggtcgccctgaccgcgggctgcgacgcggatcccaccggcagggggcgccgcgggtcaaccattctcacccca

SEQ ID NO: 51629 - DNA, 261 bp, Homo sapiens
  chr14:94492879-94493140
  hyper
cactatggtcagtgatcgtgggggatcgcgaagggggagcgggcagggggcgcggtgggcggggtcgctgccggagcgggtgcacccgcgggacgggggtcggacgcgaggctcagcccccagctcgcccccgccgctttccgaccccctgaaatacggagtccggacggatactgagggccaagtcgcgcccccctgtaccccgtggatgtgcagctgaggaggtccagctcggccccgagcccccgcccccagcgtgtc

SEQ ID NO: 51630 - DNA, 30 bp, Homo sapiens
  chr14:94547286-94547316
  hyper
caaggagcccaaggcgcggggaccgtggca

SEQ ID NO: 51631 - DNA, 30 bp, Homo sapiens; identical to SEQ ID NO: 9927
  chr14:94547573-94547603
  hyper

SEQ ID NO: 51632 - DNA, 17 bp, Homo sapiens
  chr14:94547811-94547828
  hyper
tcttagtgtagtttcgt

SEQ ID NO: 51633 - DNA, 30 bp, Homo sapiens
  chr14:94595899-94595929
  hyper
atggtgaggccgtccgggtcccaacttggc

SEQ ID NO: 51634 - DNA, 30 bp, Homo sapiens
  chr14:94640014-94640044
  hyper
tgggaggccttttccgaatgctgcccttga

SEQ ID NO: 51635 - DNA, 72 bp, Homo sapiens; identical to SEQ ID NO: 9929
  chr14:94640375-94640447
  hyper

SEQ ID NO: 51636 - DNA, 123 bp, Homo sapiens
  chr14:94889915-94890038
  hyper
cggaccttaccctcacaatgggccacaggaatttatatgtcccttgaaagacctgaaatgacacggcagtgtctgaacacacgggggcgcgctaatcacctcgttttagaagaagtcccaaag

SEQ ID NO: 51637 - DNA, 419 bp, Homo sapiens
  chr14:95233643-95234062
  hyper
tagtctccactttcatccccacgacggcctgggaaaccatacagagggcaggctcttgtcttcatccctggcccaggcgctcatgcgcaccgggggccttctccaatcgttcataaactgctcaccagcgctctgggcgcgttcccgggagctcccttctccgcccagctggtgcagaggaaagacagtctggggaagaagcaggaggtgtcggtactgccacctagaagtgaccccaccagcggtgcgctcttagacaagactggccttgagtgcatcacgtgcggccctggtcactccagatgcccagggagcagcacctggtcccggtcagccctagggcgcacagctcagaaatgccagagcagaaacgcttgccctgggggaagaggcaactcgcatgtggagctgggcagctg

SEQ ID NO: 51638 - DNA, 117 bp, Homo sapiens
  chr14:95235025-95235142
  hyper
cgcgcttcccccagtcccggggcacccggggagcttggtgtggcggcgggacaccccgcgcaggccaacaaaaggaggggagccgctcgctcccgcttccgcgttttcattcaactt

SEQ ID NO: 51639 - DNA, 88 bp, Homo sapiens
  chr14:95235513-95235601
  hyper
cggtaccggggacaccagcaccgaaccggggccctcgtagcctgcgacagagtggggcgcacggtcagccgcccgccctcgccaccgc

SEQ ID NO: 51640 - DNA, 1088 bp, Homo sapiens
  chr14:95235806-95236894
  hyper
ctgaattccagttttcgcgaactctggccaaaagtttgcagcaagaagtttgcaaactcctgcgcccgatcggcaaaagcggaggggggagttgcaagaggagcaaagtttgaggaaggtgaattaaccaaccggctccatgggctaaggaccgcagtgggcggcagaggccggagcgagcgcgaccctacctgggggcgtcgggacgcaggagcactgctgggcgcccagcggcggcacggccccgcagcaggccgggcccacgggcgccgcctgcacgtgcagctgcccgtagaagtagttgttgtagccgaggcgggagccgctgaccgcggccgggaggcccgcgccgccgggggccacggggcgcgggtagaaggcgccatagtccgaggaggcgccgccgctggcgccgtagagcgagtccccgtgcagggccgggaagacgacgggagccgccgcgctgtgcgccaccggcaacaccgagtccttgcagcgcggccgggcggctaggatgttgtcgatgctgaacatgctggcgggcatccccgagccccgcgtcgggaccggggggcggcgggaacgcgccgaggacagagccttaaagtgggggggtccactctcctccagccgccgaccaaaccgaaagagagcgccggcgagcgcgcagccctgcgcccctccccgccccctgcgtccgctctccctcctcccgccctcccctagccgcagcgttcgctgaactcaacccgcgggtaggacggagctcagaccagctgaacctcttgttggttttatactgagtcgacgtcatcctggatttagttcctggtaatatgcagatgacaaacagaaccagatttggccctttcttttcctttgggtgggggaagagggttggggggagggggagaggtgccaaggggagggggttacaaggcctgaaaagagattgtggattgcgaattaatgaaattaacctaatcttttccattcggcagccgggccgcgggccggccgagctgggcgggcggcctaattgccttggttaatctcattaattcctttgtgccgccgcagttaacaac

SEQ ID NO: 51641 - DNA, 67 bp, Homo sapiens
  chr14:95237575-95237642
  hyper
gtaggcctgcccttccgcctggcaggcccagagtggattccctgggccgcagtggcctggacgatgg

SEQ ID NO: 51642 - DNA, 348 bp, Homo sapiens
  chr14:95237782-95238130
  hyper
cgacggtacgcgcggaacaaaagcagtcccccagatcctgtggaccgggtgcaagctcccggcttgcaactcaggccactccaggggaaggggcagtacccgacccaggcgatacccccgagagccggagagggagatggggttgcgggagacctcgggtttcctgaaggaagtccgcctttaactcacacctatttttcgcgatttctctcaggctaattaaccaagggaccccgcaaagttgtctgaagtcgccgccgtaaggctaagtaagtgggctgcccactccccggctcaggggcaaaggggaaagcccacttgtcaatttctgttcgggtttcaaagagc

SEQ ID NO: 51643 - DNA, 20 bp, Homo sapiens
  chr14:95239328-95239348
  hyper
acacagctccagacactctg

SEQ ID NO: 51644 - DNA, 390 bp, Homo sapiens
  chr14:95239421-95239811
  hyper
cgcggaggcaggccccgggaaaggcagtcggcgctcggtgctcgcactgcgcctcggcgggcggaaactcacaagtgtcctcaacgtgctaaacaaaccatcagggccccgcatcgcctggcgcaattggaataacaaatgcgacgcacgcaaattgtccacctcgtgttgctaagcgattgtttgtcggccccgcacgcacagctcagcatgggaggaccgcgagcgtccagaggcagccggcgagcgcttaggtcggaaatgcagtaaacatgccgctgattttccctattatcacccaaacacgatttcacacaaagcaatcaccacgcagaagtctatgaaaatgtgtttgttgaggagtcactcgccccagtaatagtcctcatt

SEQ ID NO: 51645 - DNA, 252 bp, Homo sapiens
  chr14:95240089-95240341
  hyper
caacttcttacggttcgtttcaggaactttcttaattctctccgtctcctgcccggccacagagcagagttcacaatcggatgcgtttaagtcggatttttcgtgtcatgtgcaaaaagccggtgtgtccttttcaaggtacggagccctcatcggagggcgcattagcggggtcagaggaattaggagcaatgcgcagagccccctgcagcccgcgtgctgcgccgagacctcagccgtcctcactgagcg

SEQ ID NO: 51646 - DNA, 30 bp, Homo sapiens
  chr14:95624330-95624360
  hyper
caaacacccacttccgccccccaccccaac

SEQ ID NO: 51647 - DNA, 37 bp, Homo sapiens; identical to SEQ ID NO: 9935
  chr14:95864477-95864514
  hyper

SEQ ID NO: 51648 - DNA, 31 bp, Homo sapiens; identical to SEQ ID NO: 9936
  chr14:95932616-95932647
  hyper

SEQ ID NO: 51649 - DNA, 43 bp, Homo sapiens
  chr14:96001327-96001370
  hyper
gggcctccagggggcgggtcggactgccgcgggccggggagcg

SEQ ID NO: 51650 - DNA, 296 bp, Homo sapiens
  chr14:96152750-96153046
  hyper
agctggaaagctacacgtgtgagcctagaggcgggtcccggttgcagacttgccatggcctccgaagcttctgtgcgtctaggggtgccccctggccgtctgtggatccagaggcctggcatctacgaagatgaggaggggagaacctgggtgactgtggtcgtgcggttcaatccctcgcgtagggaatgggccagggcctcccagggcagcagagtgagtcctgggcacgaggggaggctgtggggagggctgcgcactgacccctgcccgtgtgggaccgcggtgggggtcag

SEQ ID NO: 51651 - DNA, 23 bp, Homo sapiens
  chr14:96342286-96342309
  hyper
aagccacattcgccacgctcccg

SEQ ID NO: 51652 - DNA, 363 bp, Homo sapiens; identical to SEQ ID NO: 9939
  chr14:96342879-96343242
  hyper

SEQ ID NO: 51653 - DNA, 115 bp, Homo sapiens; identical to SEQ ID NO: 9940
  chr14:96343319-96343434
  hyper

SEQ ID NO: 51654 - DNA, 31 bp, Homo sapiens
  chr14:96499773-96499804
  hyper
aacttttaaatgagcacgtagaaacctagta

SEQ ID NO: 51655 - DNA, 523 bp, Homo sapiens
  chr14:96505366-96505889
  hyper
caggctcgggataacgtgtcagccccaagagagcgctgcccacagccccgggtgggttgggttcaactgcacggggcggggcgccaacagctcaggacttgggttgcaggctggttcttgcaccaaccagcggggcggcctcgggcctcagtttccccatcccgcccacgaagggaggcgattgcgagcgcttggggtttctgacggaccccgccccgggggtggggcggggagtggtcacgtggaggggcgccccgtccgccgagccccgccccaccccgccccgcccgcccccgcgctcggggccctccgcctagtagagatctggagccagaagcccagagacagccgagtgcgccgtgcggtctccggacgctcgctgctcagcccgatccccgccaactgtgcaggcggctgacccgcagcggcagcggcagcagcgaggactcgagcgctggctgcagcgacaccatggatctctcctttatggccgcgcaggtaacggggcgtcccccccacgcgc

SEQ ID NO: 51656 - DNA, 30 bp, Homo sapiens
  chr14:96671005-96671035
  hyper
agagggtggcagagcggagagcgaaggtgg

SEQ ID NO: 51657 - DNA, 117 bp, Homo sapiens; identical to SEQ ID NO: 9942
  chr14:96678012-96678129
  hyper

SEQ ID NO: 51658 - DNA, 115 bp, Homo sapiens
  chr14:97050712-97050827
  hyper
gaaatgggggcttggttgggccggcctgtgggcagccgcaaaggaatcttcctggcttagcggcttggccggctgagggagccccggagcgggcgcagcactccctgctcttatg

SEQ ID NO: 51659 - DNA, 3 bp, Homo sapiens
  chr14:97499846-97499849
  hyper
ggg

SEQ ID NO: 51660 - DNA, 15 bp, Homo sapiens
  chr14:97499970-97499985
  hyper
cgcgtccagctcctc

SEQ ID NO: 51661 - DNA, 325 bp, Homo sapiens
  chr14:97684971-97685296
  hyper
agtgacgactggattcggaattttcctctcacttcgtggtagtgaagaatttaactacaacagtaacaacactaataattctaaaagccgtgggaggtcagagcgggcgctgcccggcgtcacccctgcagcgtccggatcgctccgcataggcaggggtggtgccccctccccggggcacagaaacgccacatcccgggggcgccgcccagaggctgtctctgtttctgtgtcccttcatgaggctctgtcccacaaaggcagcctgagccaggaccctaaagaggcctggtcatcgggaccggagggagttccgcttcccagg

SEQ ID NO: 51662 - DNA, 571 bp, Homo sapiens; identical to SEQ ID NO: 9944
  chr14:97685395-97685966
  hyper

SEQ ID NO: 51663 - DNA, 30 bp, Homo sapiens
  chr14:98978313-98978343
  hyper
ttccctcttagaatgcgctttggccatatc

SEQ ID NO: 51664 - DNA, 30 bp, Homo sapiens
  chr14:99325155-99325185
  hyper
ctgccaggccaggcacgggaggatttttaa

SEQ ID NO: 51665 - DNA, 30 bp, Homo sapiens
  chr14:99656310-99656340
  hyper
agcaggggtgtgggccgagcccaggaaatc

SEQ ID NO: 51666 - DNA, 561 bp, Homo sapiens
  chr14:99736019-99736580
  hyper
ttaaaatataacataaatattcggctctcggccgcccggcagccagtcctctgcggtgactgggcgcgcagccctctcgagctccgcgcgggcagcccggccccagcccggcgaggtgcgcggcggattgcaagcatataacctgcccgcggtctcgatggcacccagaggatgttttatttctattgcagttaaaaaaaaaaaaaaaaaaaaaaaaaaaaaaaaaaaggaacggcgacccaggcaccgcgagagaaagaacggcggggaaatgttcgcgcgcagcgaagaagccgccccgcgggctgcggcgggcggggagcgccgcaaagccaccttcccggtgcaagtgtgcggggactcggggcgggttcccctgcaaacaccgtacctggcccgctcgcgctcgcttttcccctctgctaaataaacccaacagggacggtggaagctgctgcttgtcttgccccgctgcctgactttgcccgcccagccacatgcttgaaatcgacacgatttcagccggtggatttccactgcgacctgccttgtttatttaga

SEQ ID NO: 51667 - DNA, 1180 bp, Homo sapiens
  chr14:99736841-99738021
  hyper
cccggcaaacagccgcgcagctggattattttgcaaatagcaggaggaggggagagaaaggcggctgcggaatcctaggactggcgcggccggcaccctgctgggccgggcgcagggaccggggacccggagccggcggccgcccctggccctacggctcccccagccggaacgcaccccgctctcctccgcccgcgccgtcagcgcggacccacgcgctcgccaacttttccccacttcccggctccccctccccctccgctcccccagccccctccccctcctctccaaaccccgccaccagcgccgccgccgccacacacgccgctcggaggggcgagcgtccagccgggctcggcgcgcacacacacacactcctccagcctgcatgccccctccccggcccggagccggctccgcaggcccccgagcccgaggcgcgtccggctgctcggcgccccaactccccgggctgcaaagaaactttcctatggcccccgccccccgccatgctccaggccgacgccgtagactctgccagccagcgggcggccccggcgcctggccaggctcggctgttccgggctcggtgtccccagccccagacgcccggagccccatctccggcccctcgcgcgcactccgcagacacttacgggtgatgagctccctctgggacaagtgctgcgggttgccctgtttgcggcgggacattgccccggcatctattctggcatcgcccggagagctgcactgatggggggagccgggggagggggtccgagccgccgccgcgccgctgccgccgctgccgccgccgccgccgccgccgcacctcctcctctgcccgggttggtgttttttttcccttcctctctttccctctcttcctcctcttcttcttctttattttgctctttcttctatgctgttttttgttttgtttgcaaaaagaaaaaaaagggaagaaaagcaagaaaaacctctcgatctaaaataagaaaaagaggcaaaaaaaaaaaaaactgctgttgctttccgcggactggctggtttctttaaaaatatattctttcgaaggaaaaaaaatctcttacacttcttcaaactgcttggcctcttgcacttgcaaatgtcttcttgaacttaaactgggttttgcaccggctcctgacacttt

SEQ ID NO: 51668 - DNA, 1528 bp, Homo sapiens
  chr14:99739684-99741212
  hyper
ttgtggggcctctccgtggcccggggacaaggccagaccacggcccccgtggacaccccccattccccaggctgtggccaactttgtcaatttgatgacctggcctccagggctgggcgcgccacgcggctggcctcctctcccttctcagggtttctctggaggcggccagggcgggtcggggcctggctccggctaggcttcgcgggcgagtccagctgcacccaccccactccgcccccaggcctggctccggcggcttcacccgggcgcatggcgaggccgtgacgcctcagcgccgcctccctcggggccttttcctcggggggcacacgggggtttttgttttcgtcccgaaggtcttgggtggggcgatggcaccaacaatttaacagcgcccagagtccgtgagcgagaacagaaagagatcccttccagtcccataccctaaaaaataataacaataaaatgtgccctggcttgcagttctgtaaactgtgggctccacggtgggcggacgcgaggccgagcggatggagaccgggggcggggcgcggacttgcacctcctcgccctggccgggcaggctgcacccggctgcccacccccaacaccccacctccacgtggtccaaagtctagtagggcctccctcttctgccatccctctcaccgggaaaatctttccaggaaagtggcttaaaaaaaatatgcccacacgcacctttaataaacttctttaagacattcataaactggccatccctactcgcccggactctaaatttgaaagatcaactcgcgctctctttctgagaactagcgatgtgaagcccagagagggtgagcactttgccctaggacacacagcgcgtcagggacaggtctggacccaaaacaccgcggcgtgcctgcagcccagcgccgccggcggtccgggactcgaaatcccgacccacgaccctcaccttcctggggttgattacaaggaaggcagaccccgccagtggcaaggcgggacggggaggacccctcaggaaaagggagcccctccgcgagcggcgcaagggctctcggagtcccagctgcagccgccaccccgcgtgcggtaaggggccgtgcctggggagggggcaccccctccccactcccagcaggaagtagctggcgtgggccggcgcgtgccccacggacccgaggagcacttcctcattggccccgcgctgccccgacggcgggaagagggacgcgcgggcgggcggacgcagggccggacacgccgccgcccgccggcgcgctccacctcgcggcagccggggagaggctgctctgcccctgcccagccttgagccggccccttcgccctcctcctcccccttttcctccgcatcttcctccccctcctcctccttctccccctccttcccctcctcctcctcctcctcttctcccgagaggcggccgggcgcaggcagggagcgatcccagctgccactccagtctcctctttttccctctgcccgtctggc

SEQ ID NO: 51669 - DNA, 80 bp, Homo sapiens
  chr14:99741277-99741357
  hyper
cgctccatgtctcacgttccaagccggatcaatagccgcctctcggccgaccttgacctctccctcgaccctgccaggct

SEQ ID NO: 51670 - DNA, 30 bp, Homo sapiens
  chr14:99787653-99787683
  hyper
ggacacacatgcacacgtgcatgcacactc

SEQ ID NO: 51671 - DNA, 1691 bp, Homo sapiens
  chr14:100069898-100071589
  hyper
cgcgcctcgagctcgcgcagcttctgctgcgagcgggccacctcgtgccacacggcgccggccgcgtggcgcccgaagcgctgccactcgcgcgccagcttgcgccccttctgccggtcgtcgtcgaggaagcagcagagctcgcgcagctcctggttgtcgtcctgcagccgctggttcacgtccttgaggccgcggatctccagcaggtgctgctgcagccgccggttcacgtcgcgcatcaggccgccgtgctccagcatgaggcccaccttctcgccctcggcgcgccgcagccgccgcgccagctcctccttgctccagcgcagcagctcctcgtccggcacctggctcagctcctccgacgccgccgccgccgtcgccgcgggcttagccatggcggggccgtcaccgcggcatcgccctcgccctcgcccggccggcgcttccccgcgccggggctccgctgggccggtccgcgcgcgggcggggggcggccgggggcgcgtgcggcccgccccgcgccgcctggcgcgtcctctcgccgcgcccgccggggccgcccgggagcccgcgcgcctcggggttgacgagcggaggcggctgctgcgtcggcggccgcggtgccgggcgctctcagggttctggagaagcaggcggaggcccgcccccggcccagctcccggagcccccgccgccccgcccaccccgggcggagagtgggcgggtctccgaggcccggccccgcccccgagggcgactggggagcagaggcgcggcccccgccgtccccctgcgcggtgcgcccgcccgtccagtgccctctcagaggcgcgttccggccgcggtcccgccctcccggccgggcgattgggccgctccgggggtgtgcgggaggggcggggcgcgcgcgggggaagctgcggcggtggtacggtccatccgcggggtttccgacccccgcccgcggccggctcccggcggttcaagtttctgcgcccggaggacgcggccttagccaatcccagggctacagggcgcttttaaaatgcaggtacggctgcggggagggggacggtgggaaaggtagggccgggcttcccttaaaggcgacgcgcgaaaatagcagtcgagccccctccccggcccgcgtccccggtcctcttccctctccccagataaacaaatacccacgatccgggcgacggcgccccttctccctcccgggggcaccagagttcagggcagtcggagacacagcgaacaataggactgtgacatgggggtcgctcttccccgcagcagggcggctctttgtccccttccctgcccccaggctcctccgcccccgtccccacccgggtcccctgccggagcacgcggcggggctgcgtctccactcctagcccagggctgagctaaacgctggcgtccgcgcccctgcagggccagggccttgccagccgcgtcccgcagcgcggtcagtactctctgccccgatggggcgagagctccgggaacctgccccctgcccggagcggcgctcggagccccgctccacctccgctcactcgaccgctaaatccctgggattcgggagataatctgcaattcgcggggtggaaaccactgggaagggtgggaaggtctcccactggggcctgaacgccggggtccgggggcgccgagcc

SEQ ID NO: 51672 - DNA, 30 bp, Homo sapiens
  chr14:100097094-100097124
  hyper
tggaggttggaagtccgagatcgaggtgtc

SEQ ID NO: 51673 - DNA, 30 bp, Homo sapiens
  chr14:100111325-100111355
  hyper
cggttaaaagaggtcgtgccgcattctgcg

SEQ ID NO: 51674 - DNA, 55 bp, Homo sapiens
  chr14:100111856-100111911
  hyper
agagatcggaaccccgcgggggcgagggccaagagtgggcggcggactcgggaac

SEQ ID NO: 51675 - DNA, 30 bp, Homo sapiens
  chr14:100149398-100149428
  hyper
cttggccgtctccgtcgcccctcagcccac

SEQ ID NO: 51676 - DNA, 1116 bp, Homo sapiens
  chr14:100149731-100150847
  hyper
atgggcaaggagacgcgggttacgacagagggggaagccctggtcattatttcgaaaataccttctcctccgctacccccgcctccccggcacatttcccgctttccctggagggcggacccagattttcatccctccaactccaactccttcgggcctgagccagcgcctcagatggggcttcgcctggtctaggagggtccgcaggcccccgagtctctgggagaacagcctccggccacgccgtgcgctctcggtcgcagacacaggcgtccctgggtcccgcaggatcctgccaccagcccgcgggccccgctggcggaccacgggcgctaggcgtggactgtccgggcggaggaggcgccccggggcaactggagaacaactttgggggtctggggttccaaggagaagtttgggaacagtcggcgttatgcggacttttgcaggctgggatggggtttccgggcaggtttgggggaaaaaggaaggggcctaagaccgcgcgcggaaagatgccgttatttggaggcgccgaagcgggcggagccagccagcaggacttcgcgccgccgccgggccagagcgctgaggatcggcgttgccagggacaacgcgttctgggcggagctgctgctggggcggacctgagtctgaagaggtgggggcggagcctggggggctgagccagaagcggagttgtgattggtgaagaccacatgctcggggtggggcctgggctggggcggtgtggaggttggggcggagctctggggggcggggcggggcgggggagggcccggagcgccggagccggaggcggagacgtggttggcggggactgtgcgccctgggaggggtcggagtcggcgggggcggagccgagcgggcggggagggtgctgggtcgcgcctggcctggggccgaggcggcgcgcggcgctgacagctgagtcggctcgcggcctcccggccccctcggcgcccggcccgaccctggcctggcctgccctgccccggagccatgagccccgggctgctgctgctcggcagcgccgtcctgctcgccttcggcctctgctgcaccttcgtgcaccgcgctcgcagccgctacgag

SEQ ID NO: 51677 - DNA, 914 bp, Homo sapiens; identical to SEQ ID NO: 9954
  chr14:100259386-100260300
  hyper

SEQ ID NO: 51678 - DNA, 30 bp, Homo sapiens; identical to SEQ ID NO: 9955
  chr14:100371996-100372026
  hyper

SEQ ID NO: 51679 - DNA, 544 bp, Homo sapiens; identical to SEQ ID NO: 9956
  chr14:100437405-100437949
  hyper

SEQ ID NO: 51680 - DNA, 1009 bp, Homo sapiens
  chr14:100438017-100439026
  hyper
cgagtctcaggcggacgcgcacgcgttcccgccgcccggaccccagccggctcgccccccgcccccccatcccccggcggcggcccccaggcacgcgcccgcgcacacgccggcccgggcacgcgcccgccaagatggcaggggccggggcccagctgtcagtcgccgccgccgcggcccttccccgcagctagcggccccgacgcccacccggagaagatgagcccccgctgccccccgcagcccagtcagacgcggagccgccgcgcccggggccggctcccccgctagcgcccgcgtcccgcgccccgccgccgccgccgccgccgccgggtcgcccctggcccggcgcgcccgtccccggcagcgacaatgaggtgagtcggggccggcgcctcgtgggaggtggcagcggccagcgtcggaggggctgggctgggggcccgcggtgcccccgagggcgggaggggggctccacgggcgcgggggcttccagagaaccgcgggggctctgcagagattcgggggcattcagagcgcgggaatggcttcgcgagagccgtgggggcgtctggagagccgggagggtctgcagggcttgtggggggcagtgttctgcaaggggcaggcggcgctggctttggctgcttgtggggtcctcttaggctccggggggcctgcggcggcctgggaggcagacccccgcgggcaggtgtggccgtgtcccgaccgcgcgaggaccgaagttggcggaagcccctgtgcggtgccttccagcccggaggaggctggcctgaagcccccaggcgttgccgaagcctccccctgccagcgcccagagccgcgtttgggcttttacaggtgtagtttcccctcgacttggagcccgtcaaccccttcgtctcctaattctcaaccccccttttttttcttcttgcacgccagtaaagtgcaaggcccccaaatgtaccgctcgttgatgtatcacccagctcgggagcctgctgat

SEQ ID NO: 51681 - DNA, 30 bp, Homo sapiens; identical to SEQ ID NO: 9958
  chr14:100613211-100613241
  hyper

SEQ ID NO: 51682 - DNA, 875 bp, Homo sapiens
  chr14:100625298-100626173
  hyper
ttgcttttttcaaagaaaacacgcgcgcctctcattcgcgtttgctcccttcccggcgctcatccgccctgaactccagcctggggcgcccgtggccgcgagacccaggggctctgagcgcagcaggcgcccagtgactgcgggtggaggccccgcgtcgcgcaagctgcctccgcgccagggagcgcgtgcgcctcgtagcgcgtcccggggccgcccctgcgccctcgcgtcccagcatcccagagccccggccctggccccgggagtggctcgcgaggaacagctgggacgcgctccctggcgctcggacccgtactggggtcctcggaatcctcaggtcccagggagtttcagacccggccagggtgggggaccctcggggagccggccggggaccccagggaggggagcggcaatggcggaacgcccactggaatttgggccagagctggagcggcccgtctgggctcgaccccacgacgcgactccagacgggccaacggggcggtccccaccggggtgggccccgcgcggcgctcacccagtatctccttgcgccgctgcgtgtgcggctggtcggtgtagacccactcgaagtcgctgcggctcgcgctgttgcccatggtggggcgggaggcgccgttcggagcgcggccggctcggctctgctgcacctgtcgcggcggccgcggcgcggaaccagctctgattagggcgggggcggggtcccggcggggcggggccaggtgcgccaggcttggggcggggcacctctggctgggcggggcggccgggccccggcgctctccagaccccggcgggtagctggcgctttgggaacctcagttgcctcggttggaaatggggctccc

SEQ ID NO: 51683 - DNA, 38 bp, Homo sapiens
  chr14:100626295-100626333
  hyper
cgtcgggtttttaccccggcccgttctctccgcagccc

SEQ ID NO: 51684 - DNA, 30 bp, Homo sapiens
  chr14:100704656-100704686
  hyper
tggggcgacagggccgccccgcacgcgcca

SEQ ID NO: 51685 - DNA, 30 bp, Homo sapiens
  chr14:100706273-100706303
  hyper
gcgcgccccggccccgggatgtttttgttt

SEQ ID NO: 51686 - DNA, 30 bp, Homo sapiens
  chr14:100707051-100707081
  hyper
ttttcgccttcctgcggtacctagtggaaa

SEQ ID NO: 51687 - DNA, 30 bp, Homo sapiens
  chr14:100751557-100751587
  hyper
gccagcacttagcgcgggcagccctgcccg

SEQ ID NO: 51688 - DNA, 298 bp, Homo sapiens
  chr14:100772012-100772310
  hyper
gggcggcgttccaaggcgtgactcggcgccagagtggttcagtgccctccaaggccagccgagtagggggtcggctccgtagccccaaccccgctggatggctgcgcgggacggggtggagtcagtcccgaaatatacggccgggggaggggaccctgctcccagtgcgcaacggatggggatgggggaggggaaggagatgagcccgggacctcggcgcggggggcagtggggcatcctcccggcagtcctggcctccgctcagccacggtgctgccccggcgccccagacctcccg

SEQ ID NO: 51689 - DNA, 371 bp, Homo sapiens
  chr14:100773261-100773632
  hyper
gcgaaactccgcgagcgggaatcgcccgtggggagcctctgcccgtcccgcctgcgcgcccgcggcggcggtggcctccggggcttccggactcctggccgaacccgccgggttctgggggtcggacgcgcacgggcgcttcctgcggagcctgaggctgggatttgggcggagagcagggaaccttaaaagggaaaggggccatgggcaaagggcgcagcaggccttcgggccacagctccttcccgaggactgcgggtcgcgggagccgcggaaggttgtggagagagggaggttcctggactgggctgcagagtggagtcgggccagatcgcagcgcctccgtcagcggcggccggacggggcgagac

SEQ ID NO: 51690 - DNA, 177 bp, Homo sapiens
  chr14:101033583-101033760
  hyper
actggctgatcccaggcctgccgcgcaggtggtcccgtgaagtctaccaaggcttaaagtttggcaccgggagggaggccgcgggggacactccccagaagctgtcgcgggattcccccaaaatggctccaagacgcggctgcctggtccagccgcgaggactccatcccccacccc

SEQ ID NO: 51691 - DNA, 30 bp, Homo sapiens
  chr14:101034221-101034251
  hyper
cgcggcacgggagacgctccactcacctga

SEQ ID NO: 51692 - DNA, 131 bp, Homo sapiens
  chr14:101053019-101053150
  hyper
gaggatagtacctgccgcgaggtactgaatgggatggtggtgtccgaggttcgtgcgcgcccacgcgctgcaaacgctcaatgaggcggccccgggtccagcctccttccggctcccgggcctttctccgg

SEQ ID NO: 51693 - DNA, 30 bp, Homo sapiens; identical to SEQ ID NO: 9961
  chr14:101192401-101192431
  hyper

SEQ ID NO: 51694 - DNA, 356 bp, Homo sapiens
  chr14:101543870-101544226
  hyper
aataaatgaagtgcgcgccggcggagtcagtaactcactgcgcggctcccggcaggcgggggcggagtgggggccgcagaaccggacgtgcctggcgaggttcagaggcgctagcggtgtggtgggtgggcagcgccgggatggctggagggaggggctacggggggaggcgctgccgatcccacactgatctggcggggaggagggaggggcggatggggtttgctggagaacttgaccttgcttcgctcccctcaaggggcagctgctgggagaccaagtgtcaccggctggcaatcagggccccaagcctggagacttctggacaagcggaggcaagccgaccatgacggctt

SEQ ID NO: 51695 - DNA, 30 bp, Homo sapiens; identical to SEQ ID NO: 9963
  chr14:101656894-101656924
  hyper

SEQ ID NO: 51696 - DNA, 30 bp, Homo sapiens; identical to SEQ ID NO: 9964
  chr14:101923606-101923636
  hyper

SEQ ID NO: 51697 - DNA, 178 bp, Homo sapiens; identical to SEQ ID NO: 9965
  chr14:101924065-101924243
  hyper

SEQ ID NO: 51698 - DNA, 142 bp, Homo sapiens; identical to SEQ ID NO: 9966
  chr14:101924295-101924437
  hyper

SEQ ID NO: 51699 - DNA, 334 bp, Homo sapiens; identical to SEQ ID NO: 9967
  chr14:101924457-101924791
  hyper

SEQ ID NO: 51700 - DNA, 214 bp, Homo sapiens; identical to SEQ ID NO: 9968
  chr14:101924857-101925071
  hyper

SEQ ID NO: 51701 - DNA, 1095 bp, Homo sapiens
  chr14:102026076-102027171
  hyper
acgttccttcgctgccgaaagcgattcgcccgcgctctaccgagcccagccagctcctacctcggcccgggcggcgagcgctgtctccgtcccgagaagaagtttcgcggctggtcccggggcggcaggcgcacgggacgctggcggcggcggcggcttccgacttgggctcagaccccgccgctccagacaagtccccgcgactgcgacagtgtctcgggcagttcagctccccagacgggagacagaccctcgcgacctggttcaggccttgccctgggggacactgcagtccaaggcgaaaggagacttgctcccggcctctgggtccctaggtcaaggcacctccccgccccgccgcccctgagcccaagtcgccaaccccgcgccgcgcgcagcgagggatcagaaggtctcggacgccgcggcagggccggccagggccccacgagttagggagttgccccgcacccctaaacgctcagcacccatttacggttgaaagtacgcacttgacgcgtccgggcgcctccgcggtgagtcgcgccgccgctctcggggtccgcgaaggtggctcagttcgggcgctccagtctcgacgttcccggggtagagagcaacgtccggggacgaacgggacgggtgcgcccagcggccggggctgcgctgggcgaggcaagcggcgagaggggagcgctccggcgttcaggcaacagctacccctagtgggagagccgcccggggccggcgccgccccgcgcccgctgccccgcgccccacgcccgtggcgccccgcgcccgggtcggctgggggcgcagggccggcgccgctttccccagctctccggtctccggcgcccggcggtaacccgcccgcgggctctgccctccgcacctctcagcccggccccggcggccgctgacccaggaaccgcggcgccccgctggaacgagatgggacggggcgggcgcggccagggcggcgcgggctggggcggcgcgcggcagcctcgggcagcggcggggggcgcggagcgcggtgtgcgtggcggggcggtgcggggggcggccgtgtgcgaggcgcgagtgtgagcg

SEQ ID NO: 51702 - DNA, 75 bp, Homo sapiens
  chr14:102027654-102027729
  hyper
cgctccgccctccgcccgcctgcgcccgccctcagcccaagatttctagggcattggccgcgctgctgggtgatc

SEQ ID NO: 51703 - DNA, 930 bp, Homo sapiens
  chr14:102029812-102030742
  hyper
ttttcttttccctctgaatagcggcaggaattaaacacaaatccctccctcgcgtccccatagtgaccttgggaagcgggacgggaaggagcctaggctggcaggggcgctggaggaggatggaggaggaagagggtctgcggcggtgcccggggcgctcctacaaccgcacgcacccacctggacggggaacttagctgcgggagaagagcgaggtagcggagcgccgcgggatcctggaaagcggcgggagaggcaagggggccctctcttgctcccgcgcgcgcacacacagaccgaacagatgcagctgcccctgcagccgccgatccaacttaactgagtatccggcggtgtgtggagggggttgggtgaggtggagggcgagaggggctttggacccggtacagcctggctcccgaccgctgcaggcaccactgcgcacctgactcctccctggcccccttccggcacctgcaaccttgcctcttgcccacccgctccaggcagctgaggtccgctggaggcgcgccttggcagaggggcgccctcactccagctgcggctcctactgccgggccagcgtgctgctgggtgcgccccctgcccaggacccccctcctcctgtccctcctccgcttccccaagctccagtcaaaccccaccacccgctccgtgctgggaagcagaggtgggaggccgctgggatgaagagagagagaccagggagaggtgaatggtggattccagggctggggcggggattcggggccttaggcacaggtcccctcttgcagtcacggccaggggctcgctctcgcgcaatccccgccctcactgtctcgcctgttgcgcccggagtgagggcgacccgggggacgcgggattagcttagcccgcagcccctgtgccagcgaaaccttgaacatt

SEQ ID NO: 51704 - DNA, 30 bp, Homo sapiens; identical to SEQ ID NO: 9971
  chr14:102030984-102031014
  hyper

SEQ ID NO: 51705 - DNA, 38 bp, Homo sapiens
  chr14:102031411-102031449
  hyper
ttggacgcgccaagcgacctctcctacccggaaagcct

SEQ ID NO: 51706 - DNA, 11 bp, Homo sapiens
  chr14:102031507-102031518
  hyper
cgcagcgccgg

SEQ ID NO: 51707 - DNA, 30 bp, Homo sapiens
  chr14:102414714-102414744
  hyper
caagggttttgctgcggagggaaacggcca

SEQ ID NO: 51708 - DNA, 30 bp, Homo sapiens
  chr14:102431407-102431437
  hyper
ggatgggcagagcccggcggccgcagacgt

SEQ ID NO: 51709 - DNA, 30 bp, Homo sapiens
  chr14:102431808-102431838
  hyper
gggaggaggtcgggcgggtgtcccagccct

SEQ ID NO: 51710 - DNA, 30 bp, Homo sapiens
  chr14:102553245-102553275
  hyper
cagcctccgccccgcgccagccgcccccag

SEQ ID NO: 51711 - DNA, 30 bp, Homo sapiens
  chr14:102605814-102605844
  hyper
ctttggggtcccggcgcccctcagggcagg

SEQ ID NO: 51712 - DNA, 33 bp, Homo sapiens
  chr14:102606250-102606283
  hyper
gctttccaagatggcgacggagggaggagggaa

SEQ ID NO: 51713 - DNA, 90 bp, Homo sapiens
  chr14:102771430-102771520
  hyper
ccctcgaaggagagcgttagagatcccgccgccatgttgtgtccctgtcaccctagcaaccgtcaggccctgaacgccatgagctgtcgc

SEQ ID NO: 51714 - DNA, 30 bp, Homo sapiens
  chr14:102780814-102780844
  hyper
agggtcgatcaactcggcttccttcaggag

SEQ ID NO: 51715 - DNA, 111 bp, Homo sapiens
  chr14:102829773-102829884
  hyper
gctgccggtctggccgcgggctctgctccttcgccttaagattgacgtcgtgttctgtcccccactcgcagcccgcgtcccttacatccgcccaccggcgcctggccccag

SEQ ID NO: 51716 - DNA, 378 bp, Homo sapiens
  chr14:102975680-102976058
  hyper
cccgccacctcctacccgtcccctcccggcctgcacggccagacgtcgggcggcggagggtcgcggggccgagcggggcgtccgcgcgcaggtggccggcgcagcgagggctgcacctgcgtgcgcgtgtgccggaggaggagggggcggcggccgcgggcgcggcgcgggggacggggactcaccatggggggcgcgggggccacaggccgggcgtccccgcccctgccgcggaccggagcgcgcgctgtcccccgcgggcgagcgggcaaaggtcccacgacggacgcacgggagggagccaccgccgcccgcgcccgccgcagccgcgctctgagccgccgcggccggatcgcagggcggcggtgccgtcgccgg

SEQ ID NO: 51717 - DNA, 775 bp, Homo sapiens
  chr14:103021344-103022119
  hyper
ctttgggtcttgtcgcgcccaggccagcgccagcccaggcttgccatggactggctcctgggcgttagatgaatgaatcgactcaacccgggccgccacgttgtgttcagaacaccgacagtcgctcccaggcaaccagcacctgctgcgccccgtttccagcgacctccccaaccgcgtggactcgcatccacgtgcccggcggggccgcagcagaaaggctcggaccccccaggacgatcggccggtgggggccggtggggccgcagactcggggggcggggggcgccaggcttccgggtcctgcccccgccccgtggggaacagcaggacggcgccgaggccgtttcgctttcctccgcgcccatttgccgggaggggaccccgtgctccgacctgaaggtgacggcagagcctgcgggaggcctaggccggtcccgccctacgggtcccgggggcgaccctcgcgctgacattggcgtccaggccgcggcccctgcctccgcgcccacccacgccgggcctggccctcgctcccccgggaaaagccccgccggcggccgcgagagcgcggaagcgcagccgtagtgaccgcgagacaaagacccggcggcgggggaggcggcggagagaccccgccagcgcggagaccccagggaagcttctctggaagacctggtgctggtccgctctcccgggacctcattttccttatgtggacaacgggggcggggtcacagcagcccctcgggcttatagccgggttgttctttcc

SEQ ID NO: 51718 - DNA, 232 bp, Homo sapiens
  chr14:103057880-103058112
  hyper
cctctccaaggcagcggctctcaggctagcctcagcctaccccacccgcccgcaccccgtgttctccctcgtgggggtgccggggggagtagggaggcggggcgggcggcaggtccggaaaagtggctgccctcgccccgaaagaagttgaccctcctcccgtgccgagagcttgggatgaaaatagcttcttcctctttacccttcctggacccccgccccaggacgactg

SEQ ID NO: 51719 - DNA, 174 bp, Homo sapiens
  chr14:103242389-103242563
  hyper
agctgtgcctgtggcgcagacgggggtgccactgtggcctggtgagtgtggctgtagaacaagcatctgttgggctaatggagccagagacatggtccaatgtctctgatgtccagatagacttccagcagccaggtcggactatctggggttctggaacgttccatgggtgaa

SEQ ID NO: 51720 - DNA, 31 bp, Homo sapiens; identical to SEQ ID NO: 9977
  chr14:103263057-103263088
  hyper

SEQ ID NO: 51721 - DNA, 836 bp, Homo sapiens
  chr14:103394621-103395457
  hyper
cgaggaccccgggcctgagctcgcccgggctccttccgtgcacagggtctcggcttctcgtcccaggggactgggggcggggtgggcgcggagcaggcccggacccccgcgtggcgccgcctcagcccgtgtctcttgcagctcctgccgctggatggggaactcgtcctggcttcaggagccggattcggcgtctcagacgtgggctcgcacctggactgtggcgcgggtgaggcggtcgggcaggggcggggctctggaaaggcatgttcaggggcggggactggagggaaggcgcgtcgaggggggcgaggaccggagggagggcgcctccgggggcgtggtttagggagtggcggaagtgtcccgaagcggggcttgggaggtcgtgctcagacgcgtggcgtggcgtggcgtggcgtggtgtggcgcggcgcttgttccgtggagctcagggatgtgctccggctcaggcgaacctgccgtcttccgcgactctgaccgcttctcctggcatgacccgcacctgtggcgctctggggacgaggcacctggcctcttcttcgtggacgccgagcgcgtgccctgccgccacgacgacgtcttctttccgcctagtgcctccttccgcgtggggctcggccctggcgctagccccgtgcgtgtccgcagcatctcggctctgggccgggtgagcactgaggggagggaggctcgggtcccctctccccacctcggcccgaccccgcccctcctggtctgcacacgttgggtctgagcactcaggtgaagtctcttcctcgggctggctccggtggggacccggctgcccgcag

SEQ ID NO: 51722 - DNA, 80 bp, Homo sapiens; identical to SEQ ID NO: 9979
  chr14:103430221-103430301
  hyper

SEQ ID NO: 51723 - DNA, 1487 bp, Homo sapiens
  chr14:103523057-103524544
  hyper
ggatgagggggcgggacgatcgaacgcggatgtcgagcctagggagggcaaggagggatgaaaagctagcggagggacgagggtgcaaggagcggctggagagagatgggctgcgggcctgggggcgctgccagagcgagaggaggcgaagcccacgagctgggtgggcaggagggcggcagggtctgtccgggcggggatgggcgggcgtggggatgcgcgggctggggcgcgggggtcgcagagccgcaggtccggccctgccggcgcgcacttaccccactcgaggaactcggccacgtacttgtcgcggcgcagggccgagtggctgcactcggtgtacaggcagacgagcacgtcgagcagcgtttccacgctcagggcgctctcgttgcgccagggcccgtccaggagcagctgctccagcttcttgagccgcaccttggccgacatggtgccgcgcggcccgctcccgacgcgccggcctctcaccgccggctcggccagtccgtcagggcgcgccctcgggggctcggcggctgcgagccccggcagcagcggcgcctcctcgccgccccgtccgcgtcgtcgcgccccggcctaggccgacatcttgggctccgtcccgacggcgcagagtctggggcgccgggccccgcgggtccatgggccgctctcctcccctcggcgccgccgccctcccagctcgggcggcccgcccccgccgccctcagccccgcccgcggccgcgccctccccgccgccgccgccgcagactaggagcggcgaggagcctagcgctgcgcaagcccggccggcgcccgagcccgaccccagccccgacccggcggcccagccccgcggcccgcagccaaccagggcgcggccagcaccagcgcagccaaccactacggggccggccgccgccgcgctgacctcagcgcgccgccccgccccgcgcccggctccctgctcccggcgggctcgggcctcgccgcttgccgtagggagccgggatgctgggaaggcagggccgggcctggggagcggcgcggggtgggggtggggggggcggggcggggcgagtgggccgctgagattgcggagcccgcgcatgcgcagagcgcgcctggtgggcgtgtgcgccttcgccctgcggacccggtgccttcagtattcggggtccgaccgcgcgcgtcgcggatcccggggccgaagacgaccccaagtatcggagaggcagagtcgcgatctcaggccgtcgagccccgtcccgcagtccgcgggcccatgttgcctgcggggcctcggacctgcccggccgaggtgggggtcgagggcggcccggcaggcgcagctctgatggcctcggcgggttgtgggctatttaaaacggcttgtcccagctcgaagcggtcctggaagactcgggccctacccctgactttaccgatgagagactgaggcccagacggtgtggggtcagg

SEQ ID NO: 51724 - DNA, 78 bp, Homo sapiens; identical to SEQ ID NO: 9982
  chr14:103541956-103542034
  hyper

SEQ ID NO: 51725 - DNA, 31 bp, Homo sapiens
  chr14:103542258-103542289
  hyper
gtggagcctcttaggacgacatccaaacacc

SEQ ID NO: 51726 - DNA, 84 bp, Homo sapiens
  chr14:103558065-103558149
  hyper
ctggggccaccgcccgggctcccacctcaaccctgcaatatggggttggggcagagtggtctgctgcccgctgcccgcagccgc

SEQ ID NO: 51727 - DNA, 30 bp, Homo sapiens
  chr14:103590180-103590210
  hyper
tcgggggatgggtgcgccttccacatcctg

SEQ ID NO: 51728 - DNA, 304 bp, Homo sapiens
  chr14:103593780-103594084
  hyper
ggaggacctggaggccgtggtggagcggctgaagccgctgttccccgccgagttcggcgtcgtggcggcctacgccgagagctaccaccagcacttcgcggcccacctggccgccgtggcgcagttcgagctgtgcgagcgcgacacctacatgctgctgctctgggtgcagaacctctaccccaagtgagcagaccaggggctgggcccgggccggcagggagggtgtcctctgtaggaggggtgtcgaggggtgtcgaggtgtgccgccggcagcttttagtgaggtcggtgtttgcagagt

SEQ ID NO: 51729 - DNA, 197 bp, Homo sapiens
  chr14:103655330-103655527
  hyper
cactggacgtcccgccggctgtacctggcgccccgtggcctcgctcccgaccgctgccccgcagaggcctcccgaccgccgaggccctcgccacgcccgggtgcccccagggggcgccggcttccacccacagagctccccaggcctgggcgggcgcagggagggcgcgaccggggcgcacccgcgcgggaacttgg

SEQ ID NO: 51730 - DNA, 36 bp, Homo sapiens
  chr14:103674215-103674251
  hyper
gttcccgggggtcacggccaagatccagcggaggat

SEQ ID NO: 51731 - DNA, 552 bp, Homo sapiens; identical to SEQ ID NO: 9984
  chr14:103739884-103740436
  hyper

SEQ ID NO: 51732 - DNA, 30 bp, Homo sapiens; identical to SEQ ID NO: 9985
  chr14:103745316-103745346
  hyper

SEQ ID NO: 51733 - DNA, 234 bp, Homo sapiens
  chr14:103745669-103745903
  hyper
tcgaggcgaacgcggcgcccgcgttgctggaggtcgtggacgcggcgggcgccgagcacctggtcacgctccaggacctggacatccgccacggcgacggctccgcggtgctcccgggcgtgtgcagcgaggcctcgttccgggccgtgaggccgccgagcaagcgcctgcgccggccgtgggaacccggggccgtcccgcgggtgctggtgggcacccaggccgacccggacg

SEQ ID NO: 51734 - DNA, 30 bp, Homo sapiens
  chr14:103851612-103851642
  hyper
ggtctggaccaagtcgcccctagcaacaac

SEQ ID NO: 51735 - DNA, 833 bp, Homo sapiens
  chr14:103988695-103989528
  hyper
cttggcgcgcagctccgcgtacagctcgggggtcagcaccttggccatgtggttgttgtgggcgctcaggtcggggaactcgtcctcggccgggaagcgcagcttcagtgcgttgtggctgttggagaagggcatggcggcggcgggctgcggggagacgcggggtcagaggggaccggcacgccggggttcccgggctcccgcgtaccactcaggcccccgccgccgggccccccggcgccccccgggacgcggccaaggtcagcggggtccgcagcgcgcgcggggagcgccatcatcgccggggacccccggccggtccggcgcgcgctccaggcgacgcgccccctttgcacgcagcgcccctagcccgggcgcggacgcccccggcccccgggcccactcaccgggcggccgggcgggggcgggggcgctccgtccgtcggcagctcccggagcgacgcaggcgaacagcggccgctccgcgctcccgcggctcttaaggggcacaacgcgggccgcccattggcggctatttatagcccattcattccattggcccgcgccgcggggtggtgccgccgctttgtccgccgcccgcagcccccaacaccctggccgcccacccgagctgtcccctcgctgggaccccgcgcagcctgcccagtcccccgcccaagacctcgaggccgaaacctcaggtccttggatatctggatcccctcgcacgcccttgcctctgggcgggaaactgaggcggagagcctccgggcactcgaggacgcttgggttcatccgcatcctcgagcctgcccgcctagtccagccagccc

SEQ ID NO: 51736 - DNA, 182 bp, Homo sapiens; identical to SEQ ID NO: 9988
  chr14:103989537-103989719
  hyper

SEQ ID NO: 51737 - DNA, 222 bp, Homo sapiens
  chr14:104029652-104029874
  hyper
tgccgccgccaccacgccggggactgttgacagccagaacctttaagcgtaacagagtcacctggcaagtttgtacctaccttatttgttcccgagaatgattattttttatttttaaagagctcttggcttaccgtgcgttttttttcgttgtgtgtgtgtgtgttttggctttgttacaattattagtgcttttcttcaagcggcgagcactttatcatc

SEQ ID NO: 51738 - DNA, 30 bp, Homo sapiens
  chr14:104181378-104181408
  hyper
cgatgcgaagccagcgcggtcccaggcgga

SEQ ID NO: 51739 - DNA, 30 bp, Homo sapiens
  chr14:104181914-104181944
  hyper
tgagaggggcggagcgtacccgggccagcc

SEQ ID NO: 51740 - DNA, 30 bp, Homo sapiens
  chr14:104312997-104313027
  hyper
aatgtctttctaggcgaaagcatccttaag

SEQ ID NO: 51741 - DNA, 30 bp, Homo sapiens
  chr14:104387797-104387827
  hyper
cgtactcaccttggcgcaggacagacggct

SEQ ID NO: 51742 - DNA, 235 bp, Homo sapiens
  chr14:104582800-104583035
  hyper
ctcaggcccttgctgcgtgagggggtagggcgtccctccccccgcgtgggaaatgaggaggcaggtacggggctacccctgtgggctgcggggtgggggttcagggtctgagaagcagaaacctccctccctccagtttcactttctctttacccctccccttccccctcccacgaagttccctttgaagtgagaggggctggggtgggtgtgtccagcccagcccccacaccca

SEQ ID NO: 51743 - DNA, 883 bp, Homo sapiens
  chr14:104583110-104583993
  hyper
cggccaaggtggagccccgggccctccgtgcgcccgagcacccccggcccagacgagacggttcgggcgtggcccggcggggacccagaacccgggaggccaggtgcgcccaggccaggcgctggaggctggggcgccggatggggcggggcggccgctgagtcagggccacccccgcgcgggcgcgcggagcaggtccccgggccgtggaggatcagtcgcgggacctatgggcccgggagccgccccgcccggaaaaaccggtcgggccagcgcggcgcgggcacattccggcgccgggaagggcggctgcgccgcataaaaggcgccgccgcgctggccaccgccgctcggagctcagccgccctgccacgcggggcccgcgggacgaggggacgccggggccagcgaggacgcggcggggctgggcttggcggctgggatcccccagcgccaggcgagggcgtctaaggcgtccggtacggcgtcggggccgggtggctgcagcagggcagggggtgcgcgaccagcggggatctgggcgcaggggccggtccccgggatccgcaggcgacgcgggcggtcccaagggcgtcgggggctcctctctccgcagctcggcgaaccgacggtgttggggactcgcgcgctgggtccagtggttcttaacagttcaacagttctgtagcgcaattgtgaaatgtttaggaccactagacccggcgggcgcggcgacagcgacggagcgtcccacgcgcggcctggagtcagagtcacagtcaggggtgcgccggcgaccaatccaggggagcccacggaccggctccgcgctccaggtcggccgccccatgcgccgcgccccgcagtccccagggcctggctg

SEQ ID NO: 51744 - DNA, 1492 bp, Homo sapiens
  chr14:104601963-104603455
  hyper
cgaggctggggcagcccacaggaggagcgcgggacccgggcttgagtttgcacccaggcagagcgcccacccccgcccctagcttcggaccctgaaagtaaagtcgtcgtgcccggcagccagcccgaatcttccagccctcagggagtcggggtcggggcagggaaggccacgggtggcggcacaatcgggatcctggagtggaggcgcagactgcgggtcccgctgcgcacgctccgtggtccggttggggtgggccttggaggtccataggccaaggttgaacgggggctctggagcgtgggcggggtggagtgcacaggtcactgggctctgagcgtttccatgggccaggaccccaacgcgccgtgtcctcaggacagattggagggggaaggggctgcgattatgccccagtcggaagggttttacagcagccgcgctgccctctccctgccggatacccggcagtagacaccgacgtctgggggctagcgaggcaggtgggcgcggaccgcgacccgattctggcttccaacctccgcccagtggcgcgcggggccgtcgccccacacctccagtccgcgtggctggtgtctggctcgccgccggggcggaaggggcgctgtcggcgcaggcgggcggggccggagcgcgggggcgcgcggcgcggagcgagcgcagggctcgggggcgcggggcgcggaggaccgggggcttgacgggcggccctgcgcggtgcggggcgcggcggcggcgggcgcgcggccagtgaacgcgcgggcggggcggcggtggcgggaggcactaggggccgctccccgcgcttccctcttccatggcgctgccccagccgcccgagccgccccgcggcgcgccccgcaaggctcccagcctgctggagatgggggcgctctgcctggactcggagatcatcctgggcttcaccagccacctcctgcggcgacgaggcaaggtgagggctgtcgggaggggggcgggcggcgtaggcgccgtcccgttactttgccgcgcggctcgcgcggccgggggtgctgcgccgggaaggagacggcaggtccggagccgcgtcccgcagcccgggctgggactcgctgccgcactttcccccattagcgttgtccaagtctccctctgccttcaaggctgtgtcccaaccggacccacccggaggctgtggctagggcggagagcgcagcgcagggattctcgggctcaccttgcgccttgctaggatgggcgaagtagggggtcggggcccctgactgatcgtgagcccccgaggtgactccagccttgtgcaccccgtgttctgcggatatgggatgtgagcttgtgcttcccgaagcgccgcggcggtagaagcgctgaagttgcgggtgtggctggccaggggcgcaggaccggtgctcccgaccgctgcgtgcttctgtgttgcgtgtgtgggtggggggacgggatatagagagtg

SEQ ID NO: 51745 - DNA, 1395 bp, Homo sapiens
  chr14:104603915-104605310
  hyper
cggagtttccgagtgcgcctcaggcctgggacgcgcggcgctgtctccccagtctcggagccgtgtgcgcagcggccggcagggggcactcgcgtcacggggagcccgcccgccgcgcccgcctggcttgacccgggctttggggctgacccggagcctggcccggagctgcctgcggccgcggatgccggcgacatttggggcccggctaggcacagagcaactggtcgccagggaagggcgggggggcggcctcccagccggagacaaacaagcaattaattccggagctgagttcccatctgccaggcctgctgacaacaggtccggcgcacgcccgcaggacctcccgcttcccgggcggcacggcgcgcacacccacttgcgggcacacgcgcggctgtaaagacacgtgccgttcgcagacgcgccgaggcacagatacgccggcgcggtcgctgcccggctcgaggcgcacaccgcggcgacactaacccacgcgcgacagttagacctaaagtggcccgcgacacgcagagtacgctgggcttgctggaaaggcgcctgggagtctcggggccggggtcccgccccttcctcggcccacctcgccgtgggccttgggcaagagcgtcccctccgcagcctcagttttcccgcctgtagagggaggggcgtcggcgcctcctgggagacgcgcagccctggtgtcccgggagaggggcgggaggcgcatgcgcgcgcgcaactagatcctcgccgccgcccccagcgcccctccccggggcagggactcacctaacaggttggggtccttggagtgcgcggggccgcgtggggaagcggggaccctaccccccccacgcgccgcccagcactgggcaagggcggggcactctctgggctcccgcccctcgccgcccgccccgggagcccgagccccgcccttccccggccccgccctcgcctcccgagcgcgcccaccggagccaccgcgctcctcgcgacactcgcaggctctgcgaacttccgagcggctgggccgggccatgggggcgcctcggggccggatcacgtagccgcggcgcccccggagagccagcgtggccgggagcgcctgccgggctcttcccgcgccccggccatggtcggccgcggcgtccctctgtgcgctgcgcagcccgcggtacgcgcggcccggcctggagagggaggcgggcggcgggggcccgggacggcgaagatactcgcggtgtgcgctggatccctgggggccgggcctcctgctgagggtagcggacccgcaggcgggacctccggggatggagggagtgggtgagcgccagggtcgtgcccagggctcctaactttggcaagagcgtcacgctggggcag

SEQ ID NO: 51746 - DNA, 726 bp, Homo sapiens
  chr14:105070704-105071430
  hyper
ccggggaggtgggtctgggggcgctgggggcatggaaggggcgccgcgccgggagcggcccccacttacccctcgtgtcccttgcagaggaagaagagcgtgcgccaggcgtgcgcggcggccagcagcagagacaggaggctggcgagcaggctgaagcggcaggcggccggcgggccccactcctgcaccgtgaagcgctcgcgctcctgcaccgtgaggttggcgctcagccacatgccctcggtgaagagcaggcagcggccgcggaagtcgtggccgttctcggacagcgggaccaccaccacgaagctgaacaggaaggccaagaagtagcaggcgcactgagcgaaaaggaaattgttgagcgccatggccggcccgggcgagagcggcggcgggaaggccgcgggaggctgcgccgggcggggaggccgcgggaggctgcgcagtggcggcgccggcaggtcccgcgcgcccctcccgggacgcgtgcgcatcggccgagcgcgggaagcgcctgcggtcagcaccgcggacagctcctggtgcgcgcgggccaggagcccggggtccaggggccagagaagggcggcctgcgggagatgcgggaattttaccaggtcggcctggagggaccgaccctgtgccgctaaagacttcgggagccacctgtacgggcctcacacaggccgactctgggtcgtcagttcctcatcagctcga

SEQ ID NO: 51747 - DNA, 30 bp, Homo sapiens
  chr14:105155745-105155775
  hyper
ggaccgcgagggggcggccaggttattcac

SEQ ID NO: 51748 - DNA, 30 bp, Homo sapiens; identical to SEQ ID NO: 9995
  chr14:105156551-105156581
  hyper

SEQ ID NO: 51749 - DNA, 30 bp, Homo sapiens; identical to SEQ ID NO: 9996
  chr14:105190143-105190173
  hyper

SEQ ID NO: 51750 - DNA, 30 bp, Homo sapiens; identical to SEQ ID NO: 9997
  chr14:105190462-105190492
  hyper

SEQ ID NO: 51751 - DNA, 15 bp, Homo sapiens
  chr14:105190900-105190915
  hyper
cgcttggatgccttc

SEQ ID NO: 51752 - DNA, 81 bp, Homo sapiens
  chr14:105195821-105195902
  hyper
gggagggaggaggtagcgtcggcgtgggggaggagcgtggcgtcggcgtcgtggggaggagcgtggcgtcggcgtggtggg

SEQ ID NO: 51753 - DNA, 36 bp, Homo sapiens; identical to SEQ ID NO: 9999
  chr14:105196123-105196159
  hyper

SEQ ID NO: 51754 - DNA, 30 bp, Homo sapiens; identical to SEQ ID NO: 10000
  chr14:105196508-105196538
  hyper

SEQ ID NO: 51755 - DNA, 40 bp, Homo sapiens
  chr14:105218313-105218353
  hyper
gtgggcgccgagagcgagcgagggctgccagcacgctgtc

SEQ ID NO: 51756 - DNA, 30 bp, Homo sapiens
  chr14:105243204-105243234
  hyper
cacccaccaggtcctgggaagccccatctc

SEQ ID NO: 51757 - DNA, 30 bp, Homo sapiens; identical to SEQ ID NO: 10001
  chr14:105246536-105246566
  hyper

SEQ ID NO: 51758 - DNA, 30 bp, Homo sapiens
  chr14:105293184-105293214
  hyper
gcaagctcagagggcggagacctcgggcgc

SEQ ID NO: 51759 - DNA, 30 bp, Homo sapiens
  chr14:105293745-105293775
  hyper
gaccttagcaccagcgcttcggtggggggg

SEQ ID NO: 51760 - DNA, 30 bp, Homo sapiens
  chr14:105310166-105310196
  hyper
aaatctggccctcccggttcagcacaaagc

SEQ ID NO: 51761 - DNA, 36 bp, Homo sapiens
  chr14:105310406-105310442
  hyper
aaagccgcatcgctcgaattccagaaacccttctcg

SEQ ID NO: 51762 - DNA, 169 bp, Homo sapiens
  chr14:105310485-105310654
  hyper
cggaggtggatttcggaactcaggagagaagaatgagacgctccctagtacccctagtcccccaggggtgggaggggactgtatctcaaaataagattctgcaactcgacttttataggggaaaccaggcacgcatttcaaaatcttctcatccgtccccacctccttg

SEQ ID NO: 51763 - DNA, 484 bp, Homo sapiens; identical to SEQ ID NO: 10002
  chr14:105330455-105330939
  hyper

SEQ ID NO: 51764 - DNA, 726 bp, Homo sapiens
  chr14:105330980-105331706
  hyper
cgtcgatgcccaccaccatcgcccccagctcagcccagagcgcccggggtcagaggtggagatgtcggacatacgcccagtctggccaggctcgggagggaaaatctgggagcggcctctggaactcaccctgactccttcaccgtccgctcctctttttggcttccggggccaaaggttggggactcgaggcgcggctggagcctacagctcctggagcgtagttaagcgttaacccgctggccctgggccagggcgcggggctgctgtgcgcacccggttccgcccgtcgagctggggccggaccgggaggcgaagcggggggcgctgccgagacgggagggcatggggtctgcgccgggtgcgagatgagccggggaggccagcggggcctgggcggtgggggaaggtgggcctggggcaggggcgggatggcggctcgccaagcctctgccgaccggaccacgcgcggggctaccggggcgggctcacctggcggccgcggacccgccctaacctggtttccggcggggcggcgcggggtgcggcgcggccgggcgggggcggggcgggcgggggcgtgcccggggcggggcgttccgggggcggggctgagcctcccgcagacgtcagggacccgcgcgcgaggccgccggcggccgctctgccgtgggctcggcccgggctgccacgagcgtgcgggcctcgccgggcatgtcctaggcg

SEQ ID NO: 51765 - DNA, 154 bp, Homo sapiens
  chr14:105331744-105331898
  hyper
cgcgagggcagggaccgagccgggccgagctggggaacaagccggggaccaagccggggaccaagccggggactaaggcgagccggagaccgagcccgaacagcaggtaggacgcgccggcccagcgctggccgcggcccgggcctcccatcgc

SEQ ID NO: 51766 - DNA, 200 bp, Homo sapiens
  chr14:105332328-105332528
  hyper
cctgccccgcccggctcgctgcccttccctgccctgggcctagccacctttccccgcctcacctctgactgtggcccttccggccggggcggctgaggggacaagtttggggcgtttattattcttcctcctagcaacgatggccagcccagccccgaggcagccgaaggccgttttggagcgtcgcgggctcccaggcc

SEQ ID NO: 51767 - DNA, 31 bp, Homo sapiens
  chr14:105399680-105399711
  hyper
gcgcctcagctagccccgggtccgcgagaac

SEQ ID NO: 51768 - DNA, 219 bp, Homo sapiens
  chr14:105433940-105434159
  hyper
ccaccgcactgggagcggctgttcctacactgcctgtagtggggatggagtgcagaggctcagcgagcggcagacctgcctctggccacagagctgcgcagtggggacccctccagtcactgggctggcaggagcctggcccaggaacacaaacaggaagggggaaatcctgcccgcctcgggataaggctgcgcagccaggctaccggcctcggaccc

SEQ ID NO: 51769 - DNA, 27 bp, Homo sapiens
  chr14:105434286-105434313
  hyper
cgcccggcctccggttctcccagacag

SEQ ID NO: 51770 - DNA, 137 bp, Homo sapiens
  chr14:105444788-105444925
  hyper
cggagcgcgctcgcgggcggtgccgtcggcctcattcagcccattggctgccgtcgccgcggccccgcccctcccagccaggccccgccccaccccgcgcccccggcccgcctgtcgcgtccgcagaattaactttg

SEQ ID NO: 51771 - DNA, 30 bp, Homo sapiens
  chr14:105486766-105486796
  hyper
cggagggaggcttgcgtctgacttctgcaa

SEQ ID NO: 51772 - DNA, 521 bp, Homo sapiens
  chr14:105511966-105512487
  hyper
cacacaaggcagtatcgcgtattttccacgagtgcctgtgcaggcaggtaaggatttaggaaaggtctggaaggatgtgcaaaatgttccgcctgcgaaggttccgcggtggcggggacactgctccggctccgctcccgcccgcccgagcgctcggatggggccgcctctgcactgcgtggccacaggcgcggcccggctgcccacgggcgccctttgcagctgctgccccctggcggccgcgggcggctactagcgggaaagcgaaacccgcccggtccattcaagccccgctgcctggcgccctctagggtcgttcttgggaacgggcggacctttcgtcaacactttgcctgcaagatcccccattgggggaaccgaggaggaagttaaaggaagatgtgtgtttttgagcgctgctttgtgccaggctcatcttaggtgtgggacgtgtactatctgaattaataccccaccaggcctgtgggacagtcactgtcaccattcgcaaattatggatg

SEQ ID NO: 51773 - DNA, 156 bp, Homo sapiens
  chr14:105647608-105647764
  hyper
tcccgacaggagccttcgggcgggcgcgtgaccgcggctctgagcatgctccgtgggcgcgcggggcggggcggccgaggtgggcggggcggccgaggtgggcggggctcgcaggtgccacctgtcgggtgccgcgcgcctcggggcgctggtcgc

SEQ ID NO: 51774 - DNA, 336 bp, Homo sapiens
  chr14:105662772-105663108
  hyper
ccacccgcccccagcgccgcaggatctggaggcgggagccccgccctcacagtgtccccctggaggggacatcccgctcctgcccccgccctgcagaccgcacaccgagccccagcctcactccccagcccccgggagccccgagccaggtctgccgtcgcctctgaccccaggctgggccggcctcctcgtctgggcctcggctcggagggtttcctgcccgcccgctcctagcctggcaggaagcggacacctcagaacaaagggaccggcggacaatggccattgaattgggccggggcgctcgcgcagggacaggccgccagctgcccgcgc

SEQ ID NO: 51775 - DNA, 30 bp, Homo sapiens
  chr14:105663387-105663417
  hyper
tctacctcccccgacgaactgaaccccctg

SEQ ID NO: 51776 - DNA, 184 bp, Homo sapiens
  chr14:105714257-105714441
  hyper
gaggccccacaaggagcgagcctgcgactgcgatccacaggcagagccacagaggcagggcgcgccctggggcccaagctccagggctgcaggcccagggccagatcctgacttgcccacccgccggctgtgtgaccttcagcgcgcgactaacctctctgtgcctatttcctcgaggaaaatg

SEQ ID NO: 51777 - DNA, 145 bp, Homo sapiens; identical to SEQ ID NO: 10008
  chr14:105715247-105715392
  hyper

SEQ ID NO: 51778 - DNA, 36 bp, Homo sapiens
  chr14:105715538-105715574
  hyper
cgtcgtggggcccccgggggcgaccaggacggtgcc

SEQ ID NO: 51779 - DNA, 181 bp, Homo sapiens
  chr14:105781804-105781985
  hyper
cggggcgcgcaggactcggttgtatcctccgtccagcgcgcggtggagatgccctgtcctgcggggcggggtcgtcctcgcgggtacctggttggcgctgtctctcatttagaggcgtcgccaagccagtactgctatttgcgcctcccagttgatcttgccattgcggaagactggctgt

SEQ ID NO: 51780 - DNA, 30 bp, Homo sapiens; identical to SEQ ID NO: 10011
  chr14:106326603-106326633
  hyper

SEQ ID NO: 51781 - DNA, 30 bp, Homo sapiens; identical to SEQ ID NO: 10012
  chr14:106326872-106326902
  hyper

SEQ ID NO: 51782 - DNA, 203 bp, Homo sapiens
  chr15:20478122-20478325
  hyper
ggaaggctgggcagggcgaggggacaatgcagctgtaagctgaacctggctctgcagcacagccatgctacggccaggtgagacccatcctgggggcatggaaagccgaattctgctgaaggctcctccaggctacgcagggtgggaagccaggtttgtggctgtccaggcaacaacaagaggaggagcgactgtcctgagtc

SEQ ID NO: 51783 - DNA, 31 bp, Homo sapiens; identical to SEQ ID NO: 10013
  chr15:22544585-22544616
  hyper

SEQ ID NO: 51784 - DNA, 290 bp, Homo sapiens
  chr15:22892152-22892442
  hyper
atttgtccctggttcccgcaggcaatggggccgcaggggccggccgggggggtccccagcgggctctgcgcgccgacctgcagctgggacccgcgcctggaaccctcccgacgagcgcaggtgagcgcctcctgccaagtggggcggcgccacacgggcgtcctgggtgtccccctgagctccttccgcagctcaggccaacccccgccctgacccggtggagccccgggacagggtgcggaccccgttccttcgcgctccgaaccggacggacccgcaggaggacccca

SEQ ID NO: 51785 - DNA, 31 bp, Homo sapiens
  chr15:22892733-22892764
  hyper
ggaaactcccagggcccgcccaggaccccca

SEQ ID NO: 51786 - DNA, 678 bp, Homo sapiens
  chr15:22893130-22893808
  hyper
ggcacagctccagtggcgaaggaataccttagtgtttgacgtttttgttggaaagtaaggagcaggcagattgttaatgttgcactaaggtcgcgcagcaagatctgaacccgtttttgtttcgtgcccctgtgaggagcggagggagcctggtccgcggagccattccgggcattcttggagagaggagttttgggctttgttaaggaggcgcgatcgttacggaggcagcactgtttcgcacaagcatctgaattgtgtattttaaggctgaaatgcgtgagcttaatttgcagcacattgtgggtgtgacaagaagggtgcaagaataatcgggaaacggggttgatggaacgtgttttaagctgagaggggcgtctggacggtgtcagctccgctattaagtccagtcagggagcggctgctgattgagcccagcgccgcgtggtcgccgctggggactgaggctcgggagcgtttgttttctggcggcggagggcaccgtggctgcgccgggagcggtggtgtttcttgcagtcgtccgtcggactccggaatgaggcgtggtcggagccgcggtgatgcctggtgcagtgcgcacattgctatgcttgacagcttggcggcagagtcccggccaggccgggacccgcgggggccccacgcatgctgcctttt

SEQ ID NO: 51787 - DNA, 147 bp, Homo sapiens
  chr15:25684073-25684220
  hyper
ggaaaaggccccgtcgtctcctgtagtcaccccgagcccagcgccaccatcttgggagacacacggatctcgcggccgcggcgcaagacgggaggactggctgggcgggccgagtatcccggcaggcagcgcgcgccgcccggccgg

SEQ ID NO: 51788 - DNA, 30 bp, Homo sapiens
  chr15:25684473-25684503
  hyper
aaacctgggacttccggaagccctctgggc

SEQ ID NO: 51789 - DNA, 127 bp, Homo sapiens
  chr15:26095658-26095785
  hyper
ccctgggggccagcccacaggcgaggcgagtccccaggcgccattctacgcggccagttttggagaactggaactgtgtagagcgtccggcggcagcggacccagcgctgctccattctccctccct

SEQ ID NO: 51790 - DNA, 284 bp, Homo sapiens; identical to SEQ ID NO: 10017
  chr15:26107459-26107743
  hyper

SEQ ID NO: 51791 - DNA, 143 bp, Homo sapiens; identical to SEQ ID NO: 10018
  chr15:26107845-26107988
  hyper

SEQ ID NO: 51792 - DNA, 12 bp, Homo sapiens
  chr15:26108171-26108183
  hyper
cgtcctgccctc

SEQ ID NO: 51793 - DNA, 78 bp, Homo sapiens; identical to SEQ ID NO: 10020
  chr15:26108248-26108326
  hyper

SEQ ID NO: 51794 - DNA, 290 bp, Homo sapiens
  chr15:26108548-26108838
  hyper
cggccccgccctcgttccgcgcccggactgggccacgccggatagcgggaaacaaaaaaagcccgagctggaaacttcagagaggtttagtttcgtttcccagaagcatcagttcggtcccaaaacgctgcaaacgcgcgctgcctgcagtaggagagaggaaaccgcgaagcgcgagaaaaggcgcccccgtccccaagcagcccgcgcgcccttccaggggccagacctgctccatcctggacggcgaaacgacctcgggagaccccggttaggaccttactccaggg

SEQ ID NO: 51795 - DNA, 345 bp, Homo sapiens
  chr15:26178856-26179201
  hyper
agaaggaagccactctctgcccgccccctgccccatctcaggccctagccctctgccaggagcgtctcctgaggctgaaagtgccccctcccgctctcagactctgcgctgccatctgccttgcttctctcggtaccacttcccctgctctcttttgaatcggattctctccttcaaactccagctgatccagcccgcacatgccaggcccgtatgtagattcgtctgttgccaccgtcctccaagccctagggaggggttgagctccgtggaaggcctctgatgggagggacacgactcggaggctgagcagcacaggacaccgtggtaaactgggattcttct

SEQ ID NO: 51796 - DNA, 176 bp, Homo sapiens
  chr15:26327387-26327563
  hyper
accgggagtcgaacccgggccgcctgggtgaaaaccaggaatcctaaccgctagaccatgtgggagatgacaagtaaccgttgaattctaaaccaattgaatcatttccgcctgcccttgctttccgccttctgccacgcctccgacaacaaatccctgtctgcgcctgcgcctgc

SEQ ID NO: 51797 - DNA, 292 bp, Homo sapiens
  chr15:26327610-26327902
  hyper
cgaaaggcggaggcagggctgggcgctgtggctgctggcactacccagttcttcagcagcgctgtgcctggaggcccccagcccctcgccccccggctcgcgggaggcggcaccagacctcctcaggccctggtccctaggaaactgcagcccggcctcagtttccagaaagctcctccgtgcgatttgggaagagcacggtttgaatggttgaaaatagaggggctgaagaaccgagccgcgcgggcctggctccggggctgagttccctagcgggcgccgagcggagcct

SEQ ID NO: 51798 - DNA, 127 bp, Homo sapiens
  chr15:27016781-27016908
  hyper
gcaaaagcccgcttcgcacctcggggtactgacctccgcttcccacaggtcagaatattgaatccagtctgcattcacagaagacctaagtgacactgtgtcaccagcctccgactctcccggtaga

SEQ ID NO: 51799 - DNA, 266 bp, Homo sapiens
  chr15:27016944-27017210
  hyper
cgctctctgaagcagcggaagcctgtcagcacctcggacagagactggcggtgccgggcccgggtctcccagtccaggaggcagccttggaaaaaccgcagagacacccctggaacgcacagaccactgtcttcgttcccctttcctgcagccagaatctctttccaaacgacaacaaaggaaaccttaagtacctcttacctagaatataggagccacccccacatctcgcctctcccggttccccagcgcctgttgctaaggag

SEQ ID NO: 51800 - DNA, 173 bp, Homo sapiens
  chr15:27018746-27018919
  hyper
gcctcccgacggtgcctgcagaacgccgggaagcccccgcctcacctgcggggctcagagcctcgggtccccagggtccaggagagccagatgggcagcaggagctccaggagcccggagcacatggcgctgttcctccggcctaacctgctgggatccgctctcccccctac

SEQ ID NO: 51801 - DNA, 88 bp, Homo sapiens; identical to SEQ ID NO: 10023
  chr15:27112034-27112122
  hyper

SEQ ID NO: 51802 - DNA, 49 bp, Homo sapiens
  chr15:27112889-27112938
  hyper
ggggctctgaggcgcgcggcgtcccggcgctgctcgcggggtggactcg

SEQ ID NO: 51803 - DNA, 182 bp, Homo sapiens
  chr15:27216061-27216243
  hyper
gtagaaatggctggaggaaggcggaccgcgggctcgctctcatggtgccaaccccggggacctttcttcaggctccctgcgggatccccagcctcccctccccctcggagctccgcccccttcctggcctcaaactccgagtccattcaaacctcgccttcctcgccctgcgcgttgtcagg

SEQ ID NO: 51804 - DNA, 216 bp, Homo sapiens; identical to SEQ ID NO: 10024
  chr15:28339716-28339932
  hyper

SEQ ID NO: 51805 - DNA, 629 bp, Homo sapiens; identical to SEQ ID NO: 10025
  chr15:28339954-28340583
  hyper

SEQ ID NO: 51806 - DNA, 326 bp, Homo sapiens
  chr15:28340882-28341208
  hyper
ttgttcttcgagttctttaaatatctgacataataccggcaaggaacgagaagcaccaggtttaggcgctgaggtgaaaatttggctgttgaaaggcagtccctctgcagccaactcccctctggtggacagtgtctaacatccagagaaaacacccgtcactgaacgctcccctccccacaaagcgctgcttggccccaaatcgtccctaatgcgctgctcagccccaaggcgtccctctgagcgagaaaccgcccctggctatgcttgcaggggcctggctgggtccacagggcatggctgtgtctctcggagcacggcccttc

SEQ ID NO: 51807 - DNA, 481 bp, Homo sapiens
  chr15:28341538-28342019
  hyper
gagcctggcggtgtccgcaggagcgatgctgtgaccgttgcatttgaagcattccttctagttcccggatcccagggagggggcaggagaagccctgcggccaagaaggcctgaagaagcccgtccaggggtcagcctcctcctcagccggtcctgggctgagacaggggtgtcccgctgagggcagtgtagggtgcggtgcccccaccccacttcgggcctggaccgagaccgcgagtgtgaccgtatatcccttcaggtggatttttcaacatgtgaacttggttaaaagcttctagaacgttaagccaaacatcgtggctttccatccgttttctgttcttgtttgaaagagtacgcctccttccagcctgggaggaggggcggggcccgggagagggcctcgggaggccgcgggtgggctctgccgagggccgcgttcgcagggccccccgggactggcggccccgcggcaggccag

SEQ ID NO: 51808 - DNA, 90 bp, Homo sapiens
  chr15:28344097-28344187
  hyper
acctcatggcccaccagggggcgactttttcctgggtcgcctggcagagagccggagggggtgctcagggggcagctgctgcaggcccag

SEQ ID NO: 51809 - DNA, 126 bp, Homo sapiens; identical to SEQ ID NO: 10028
  chr15:28344223-28344349
  hyper

SEQ ID NO: 51810 - DNA, 81 bp, Homo sapiens; identical to SEQ ID NO: 10029
  chr15:28344411-28344492
  hyper

SEQ ID NO: 51811 - DNA, 30 bp, Homo sapiens
  chr15:28344694-28344724
  hyper
cgtctaaggccacgccgccccggcgtcccc

SEQ ID NO: 51812 - DNA, 454 bp, Homo sapiens; identical to SEQ ID NO: 10030
  chr15:28351666-28352120
  hyper

SEQ ID NO: 51813 - DNA, 269 bp, Homo sapiens; identical to SEQ ID NO: 10031
  chr15:28352152-28352421
  hyper

SEQ ID NO: 51814 - DNA, 99 bp, Homo sapiens
  chr15:28352957-28353056
  hyper
cgacaggcggggagaaggcatggcccaccggctcaggagaaagtcctggaggggaggcagtccgcccctggggacaacgcggggggccgtattcggaca

SEQ ID NO: 51815 - DNA, 31 bp, Homo sapiens; identical to SEQ ID NO: 10032
  chr15:29107370-29107401
  hyper

SEQ ID NO: 51816 - DNA, 387 bp, Homo sapiens
  chr15:29130660-29131047
  hyper
ccgcgatccccgagagttcttcgctcgagggttcttcgctctagggtcccccattacagctgcgcggggccgagcaagcagggcgcggcggccggggcaaggtgcggagcctcgcgttcaccggctctacctgcggagcctcgcgttcactggctctacctgcgggaccagacccctgcagctccccagccagcacggccggggcacgcccgggaatctgtgtgctccccagggcccggggcgttcggggcgccgcgccttccagcgcctgggtcccagccccgatcccggagaccggcccggggggacccggggtcccgagtgcaccctcctgccctgcagactgtcccagcgccggggccagggggcgcaggacctcgcgcacgc

SEQ ID NO: 51817 - DNA, 98 bp, Homo sapiens
  chr15:29131532-29131630
  hyper
cgagcgctccagagcgctgccctcccgactcagcgtggctgcggggcggccgccgctgggatatgggggtacagcccggcggccccactcctctctga

SEQ ID NO: 51818 - DNA, 86 bp, Homo sapiens
  chr15:29131755-29131841
  hyper
cggggctgtccgctcgactcctgccgggctggccgggctgcttggcaccggcatcaagtccccgtgccgggcggcaactactgagt

SEQ ID NO: 51819 - DNA, 166 bp, Homo sapiens; identical to SEQ ID NO: 10034
  chr15:29248972-29249138
  hyper

SEQ ID NO: 51820 - DNA, 59 bp, Homo sapiens
  chr15:29432128-29432187
  hyper
aggtctgcagactacgcttcccaggctgccgtgcctgggctgccggcaggctctgcctg

SEQ ID NO: 51821 - DNA, 73 bp, Homo sapiens; identical to SEQ ID NO: 10035
  chr15:29562018-29562091
  hyper

SEQ ID NO: 51822 - DNA, 1110 bp, Homo sapiens
  chr15:29861981-29863091
  hyper
ggtggttaagagtctgaaaatcggtcatccttaaggtctggagctcagaaagcacgccgcccccccttgcctgccccctgccccaggacgccggatgcgggtcgcctgcccagtcccgtcgcccacaaaccacgccgttctgggcggacgcgggaaaccagaagtccccgaagccaagtcagcgagcgaccacaggggccgcccggccgatccccgatatccgggctgacccaaaacccgacgggaggcgcccctcccccgcccccccaccccaccccccacccccaccgcccccggtcagggccgccgcgagggtgagaggcgcgcccacatgctgctccgctccgggttcggctcccacctcctcgcctcggccgcggccgctcggatggcgaggtcgtgtccccggcgcgcgcggtccccggcgctccctccggccgctgcgggctcggaggacggcgggcgcctggctgctgtttcctccaagaaaagtaactccgggaatcagcgcaataggagcgggaacgcgatgctccgagagcggcgagccgggccctggagttattctgctcggagtttcgaactgcgccccgcgctgcagctactcggccccggcgttggccgccggaacttgccgcccgcggtggcgtcccggcggccgcagcgcctagcccccccggcccgcgcagtccccggagcccgtccccgcctggtcgcggacactcaccgagaagcctgcccagaaggggcaggagtggcggacgcgggccgaggtggtgagcgccagcgcggcgaagctgactgccacgatgaggcatccgagcgccatctgcgtggccccgagcgccagcacgatgcgggagcggcccgggcactcgcgcaggcgggacaggctgcggggcagcgcggcgggacgcggcgctcgggggccgccggccggaggcatcgcgccgggcgcccgcacgcctcgcccgctcccgcccggcccggcgcgcgccgccgcctctcctcacagagggtccgaggcaagttgcgccgggtgcagggacggcctcccagccggctgccagggctgcggcggccgcgcgccgggagcgggccgggccgggc

SEQ ID NO: 51823 - DNA, 344 bp, Homo sapiens
  chr15:29863319-29863663
  hyper
gcgggagccgggacccgggagccgggagaggggcggggaaggcgcaggtgcggtcctggcgtcccagcctccgcgctcacgcctcgcgccctggcggctgcaggtctgcggaaggagagcgggggcggcagcgcatcaagggcaacggcatcagcctccgcggcggagccctgggtcggctgcgcggaggggcccgatagcggcagcgggccagccgagccttcagagcctggggacggctcgggatgggcgcgcggggcgctgaggacggggagacgggctgggagcagacaggagggaaattccgagcgctgggccgcaggtgtggcgaacaggagcctctt

SEQ ID NO: 51824 - DNA, 59 bp, Homo sapiens; identical to SEQ ID NO: 10038
  chr15:29864125-29864184
  hyper

SEQ ID NO: 51825 - DNA, 46 bp, Homo sapiens
  chr15:29966981-29967027
  hyper
ggcgcggaggaaggggcgggcttccccctgccggcctcccttcctt

SEQ ID NO: 51826 - DNA, 658 bp, Homo sapiens
  chr15:30113644-30114302
  hyper
aaaacccgacctactacgcctcacaggctgagtggagtgttttgcagtctcaaagccttatcgctggcgtgcgcataccgcagggagtgacatcagatcgaaactacagggtttcgccggggaccaaccactcctccaaagacagcagctcccggccagcaggaggtggcaccccaagccccgacccgctgagagccggcttccagcccccgaaccctcactggagccgagtttctccgcgagggacctgttgcgtgtccccgccctcagcgagccgcagccaggcacaggcgccggcagctatgcacctgcccagtacggcggccgggcgcccgcagccccctccccggccgcccccagtgcggcccgcgccgcccccgcccgaggggctccccgcggcccgcggcccgcggcccgcggccccgcgccagccctgcccaccccgccgccccggggcccagacagccgccagcgagggagggcgggacgcgggccagatgccggtgggcgggcggcgacggtcggcccggtctggccctggcggccgcggaggcgctcaccttggcggccgcagctctggcggacatcttgtctctctccagcgccgcgcgaggctcctcggacccgaaactccgcggcgctggcccgcccgctcctc

SEQ ID NO: 51827 - DNA, 857 bp, Homo sapiens
  chr15:30114349-30115206
  hyper
cgggggcggccggaagggcccggcccagggggagggaattcaactcggacaaaagtccgggaagcgcccgccccgcccgggtcttctccacggggcgcgcccgaccggcacctccctccgagcgcggccacccactcggcctcccgcagctttcgcagcccggccacgtcggcctcgcccggtcgcccgcccgtcagcagcacccgtggcctcccggcgtctcctcggaagccggcttcgccacgtaacttcccgggaaccggcggccgccaaggaacgcggcgtccgctggctcagccggcgccggcaactcagcggccacgcaaacctgccggcccggcccactgagcatgcccggcccggcgggggcggggctggacgaggcgaggcgaggcgaggcggggagggggcggggccgcggcgggggagggggcgggacgagcggccggggtcccgaccccaagcgcggaaggaaaagccgggtaacccaagtaacttggaagacagtttccgctgccgtgcgagtcttcctgtttgtttttatccaaggtctggcagaattcgcccccaaggagaaagcgcctgtgcaccaaagctttccttaagagacttgtccacttgctcctcgacaagccacgcacatcatggggtgagccccatgcatgagtgcggctggaaaggccggcagagccgatacccgacagttgtttccttcactgggcaaacagcatggtcacggctgtcaccgcgtgcctcggcgttgttcccacggaaggcggaatgcattttctgcaaggcgcgtcatggctttcatctccgaggagctccggcagggtcagaagcgttgctctcgttca

SEQ ID NO: 51828 - DNA, 30 bp, Homo sapiens; identical to SEQ ID NO: 10042
  chr15:31507690-31507720
  hyper

SEQ ID NO: 51829 - DNA, 30 bp, Homo sapiens
  chr15:31508257-31508287
  hyper
gggcgcgcgggaggcggagaggatgggccc

SEQ ID NO: 51830 - DNA, 162 bp, Homo sapiens
  chr15:31508792-31508954
  hyper
cacagttcagcccgccggaggcgtgtgcgcttccagatgagagcacttgttcactgaatgaccgtgcgtacttggggggacatctggccccagaacctccaggagcagggtggctaatgctgagtgccgtggcctggcactgggaagcgccggtcctcagtc

SEQ ID NO: 51831 - DNA, 15 bp, Homo sapiens
  chr15:31620728-31620743
  hyper
aaaggaatgccctgg

SEQ ID NO: 51832 - DNA, 173 bp, Homo sapiens; identical to SEQ ID NO: 10044
  chr15:31620800-31620973
  hyper

SEQ ID NO: 51833 - DNA, 59 bp, Homo sapiens; identical to SEQ ID NO: 10045
  chr15:31621525-31621584
  hyper

SEQ ID NO: 51834 - DNA, 30 bp, Homo sapiens
  chr15:31733430-31733460
  hyper
ggaccctgtccacgcggcctccgcgctgcg

SEQ ID NO: 51835 - DNA, 202 bp, Homo sapiens
  chr15:31774932-31775134
  hyper
gggccacagtgaccaccagggcgtcagctggcggccaggtacccgccttctcctaggcctcgggatgggaggcaggtagagctcacagaggagcctccaccgcagccccgggtgcgcgctcgctctaagccctgggtactaccaaccgcgcacaagggaccgctacctggaagaggtcatcgctagggtaggagaaaaaaaa

SEQ ID NO: 51836 - DNA, 124 bp, Homo sapiens
  chr15:31775349-31775473
  hyper
ttaggaacgtttgaccaaacacgtacacggcactgacagaggaggcgccggccttccggtggaccagggcatgtaaaaaagacaccgacacaatggaaaagaaatcctcgaaggtagaacctcg

SEQ ID NO: 51837 - DNA, 154 bp, Homo sapiens
  chr15:31775483-31775637
  hyper
cgcgccgcgccgctcagggccgggccccgcgcgcctcgcgccgccgccgcagctcctcgcggtagcagtaggagcagtagtgctcggtctcggcgcgcccgtagaacgcacagttctcgcgctggcagcgccgctgcaccggccccgggccgcc

SEQ ID NO: 51838 - DNA, 104 bp, Homo sapiens
  chr15:31775678-31775782
  hyper
cgtcggcgaactccaggccgtcgcgcagggcgccgaagccgttggtgtaggtctgcgacttgtgctcggccgcccccgccgtccccgccgcgcccggtagggcc

SEQ ID NO: 51839 - DNA, 44 bp, Homo sapiens
  chr15:31776145-31776189
  hyper
ggagaggcgcgctccgggaccggcacgccctccgtctccggtct

SEQ ID NO: 51840 - DNA, 1047 bp, Homo sapiens
  chr15:32162229-32163276
  hyper
ccggtgcccggcgagcggcctcgcgcgcggctcggggccgggccctgcccggccgtctgcaagagccgcgggacccccgacgcgcgcgcacggaccgaggggtcggtcgccccacgcctggcatcacgttccagtgcggacagccaaagggctgagcggaggcagcagccccgacccagcggtagcgccgcgccctgcccgagagaggcgcgccacgccgggccggagccggtggcccgggagcccgcggggtccggagcggagcccgcaatgcagacgcgccggcgagcccagccggggcccgcgccccccgcgtccccgcgccccggccccgcggtcgcccggcctcaacgcccacctgcctcgccacggagctcgggaaggagacggcgccggccccgcgcccggagagcgcacctgcctggtccgcgggcccggccccgccgcccgccggcagcaccgcggccagcgccgtcttacctgccgcgccgcgccgctccgctccgccagcccgcagcgccgcagtcgccgctacccgacttccattttctctcgctttaaaggaaaaccagatcagctgttttgctcccgctcgggctccgcggccccctccccagctgccgctcgcggtcccggtggcctctcctcccccgcctcctcccgcgctccgctccgcccctcgcgcccctccgctccgcccgcggccgcgcacaacgcccgcctcccggctccgcctgctgcctccgggcgcgcgccctcctctgacgtcaccggtcgcgttcgcgccccgcccccgccccgcgcggacgtgcgcgcgccgcgcctgtgccccgcccccgcccctccggggccgggcacggagagcgcgtgctcgcggccgcgagccgaggaggggacgtacagcgcccgcgcgcccgcgagcccgctccggctctcccatgcttgcccctcggggtgctccttctgcgctctccgcctggactgcaggaaaaggctgcttaaacagcctgccttttcctgctgcctgactcgcgccatctgcggcca

SEQ ID NO: 51841 - DNA, 200 bp, Homo sapiens
  chr15:32322732-32322932
  hyper
ggcgcaggcccgggcgacagccgagacgtggagcgcgccggctcgctgcagctccgggactcaacatgcgctgctcgccgggaggcgtctggctggcgctggccgcgtcgctcctgcacggtaaagccactgcctccccgccctccactcctccgtgggatcccgggcacatcccgggcgcctctgtgcgccccgcgcct

SEQ ID NO: 51842 - DNA, 30 bp, Homo sapiens
  chr15:32994740-32994770
  hyper
gataagccattcttctgaacagaaaccata

SEQ ID NO: 51843 - DNA, 30 bp, Homo sapiens
  chr15:33009877-33009907
  hyper
tgaggggccgccagccggggggatttcctc

SEQ ID NO: 51844 - DNA, 113 bp, Homo sapiens; identical to SEQ ID NO: 10047
  chr15:33010128-33010241
  hyper

SEQ ID NO: 51845 - DNA, 395 bp, Homo sapiens; identical to SEQ ID NO: 10048
  chr15:33010280-33010675
  hyper

SEQ ID NO: 51846 - DNA, 982 bp, Homo sapiens
  chr15:33010720-33011702
  hyper
cgccagagcgcaggagcatccggacctgctagtcggccgctgactgcgcggcgagttgccttgagagggtcccatgtgcttggggcgccgcgctgggtctgggggcgtcttggggcgcccattggagtccgcgggttggagcatccggagaatccatgatgtgtgcatttgccgatccccgaggtgagatggagactggcaagggcagagccgctgtgttcagccacagcggaaaaccgaacggtgggtaatccgacagctgcggtgcggggcgcggccctggccgcggggtccagcgaacccgcagtgctcacaaggcagacaccacacgcgctcgcggaccggccacgcactcgcgggcgctcgcttctctactccagcctcttccccgccccgcgcacgcccgggctgaatggtagacgttctggcgccgggcagcggccaccggctggttcccacttccgcgcgcaccccttaaactgtgttctagaggccccagcctcgccttgcagcgcctcactagctcctgaggactagggactggcggctgaggcgggttggcggctgcaacgagctgggcgtctttcgttctctctcgctgcctggctggctccgctggcccctccacagcttgcggagcaaggccatagcaggggagtgggaggtatattggggctgtcacctccttgctggccggagttatttgtagactacagactccggaagaacagacgcgccaccgctctcgcttggcattgccttcggatcgcagctcctccttgggggtgccccagcttggcgtttatttgcctgcgccaggctctggcgacggtcaccgggccaggcggggagggacggacggcaggtgaccagcctctgctgtgaagaaattcctgcgcgcccggagctgtccctaatgcattcccgggtcgaatccgtctactgccttcccctcctcgaccgactccgaatctcggctctt

SEQ ID NO: 51847 - DNA, 30 bp, Homo sapiens
  chr15:33012486-33012516
  hyper
ccttttatgtcctacatctctgaatgaggg

SEQ ID NO: 51848 - DNA, 31 bp, Homo sapiens; identical to SEQ ID NO: 10050
  chr15:33420377-33420408
  hyper

SEQ ID NO: 51849 - DNA, 30 bp, Homo sapiens
  chr15:33487105-33487135
  hyper
atcagcagccgagccgttgggccaggctgg

SEQ ID NO: 51850 - DNA, 917 bp, Homo sapiens
  chr15:33602691-33603608
  hyper
acacaggcaaagtgggcaaagcgggcaaagcgagcaaagcgagagggttggtacccagtctgggcgcgctggagctaagcaactggcctttgtttgtgaattggagcagtttaggggacatcctccggtcgccgcggggcgcgcgcctccgctgagtgtgcggtgcggtacccagcggtgcgggggaggctccaccgcgccagcccagggcccccgcaccgcccccgccagctcgacgcgcccagcgttgcgctctccacggagcgggcggccgcagcgcacttggctggggcgagaggcgagaggggtgggcggactgcttggttggcgttggcgctctgcagtgcagtggagtgttagcccagctccctatatggtcggggattagcttggcgctgctgaggctgaggctgagccaggagctggaggaggaggtggaggacgaggacgaaaaggaggaggagaaagagcgcagcagcagtcagcgcacgccgagcggctgccgggggaagcagaggcgccggaggctggggcaccgccgacgcctcgggagccatggccgaagggggagaaggaggcgaggacgagatccagtttctgaggactgtgagtctccgcggcgggggcgaggccgtgggcaggtggggaggagcgcggagcgcggcgaggaggggctggctgcgctgcgccgcggtgccgggtgcccggtgccgggcgctttctccgcacccgcgggctgcagaggcggaccggccacctacccgcggggccgcgaggggctgcgtgggaaggggcaccatctcctgcctctcccttgttcccctaccgccacccctgccccaggccctccacctaggaccgctcgctctccaggcaacttgctacttggtctgaaacccttgatgcccaaacttcag

SEQ ID NO: 51851 - DNA, 142 bp, Homo sapiens
  chr15:33603647-33603789
  hyper
cgttggaagccctcgccccggggtcggccctctgacacctccatactccaccccagccccattcctcttccagggcgcccccacgcacaggggaacctccgggaaggagccagcggggcaggggggagtgtggggagccggg

SEQ ID NO: 51852 - DNA, 210 bp, Homo sapiens
  chr15:33603879-33604089
  hyper
cgccggcaactgctgctggagcctgacttgactgactgcctgtcgtgtgttcgagagctgtggcttctgctcctggctcccgcgagccccgcaggacagggaaaccccagtcagtggctccgcgtcactcaggtcccctccttgacacctgagggcgctgctccgtcccagatttgggggtgagggggcgaagtctgttgcagccacacc

SEQ ID NO: 51853 - DNA, 30 bp, Homo sapiens; identical to SEQ ID NO: 10053
  chr15:34331873-34331903
  hyper

SEQ ID NO: 51854 - DNA, 30 bp, Homo sapiens
  chr15:34517305-34517335
  hyper
agctgttgccatgacggcccaggggggcct

SEQ ID NO: 51855 - DNA, 30 bp, Homo sapiens
  chr15:34659289-34659319
  hyper
tccctggctcatggcgggagaaggtgggag

SEQ ID NO: 51856 - DNA, 22 bp, Homo sapiens
  chr15:34728766-34728788
  hyper
gtgctgcaggacaggcccctcc

SEQ ID NO: 51857 - DNA, 845 bp, Homo sapiens; identical to SEQ ID NO: 10055
  chr15:34728813-34729658
  hyper

SEQ ID NO: 51858 - DNA, 236 bp, Homo sapiens; identical to SEQ ID NO: 10056
  chr15:34729900-34730136
  hyper

SEQ ID NO: 51859 - DNA, 20 bp, Homo sapiens
  chr15:34806424-34806444
  hyper
gattacaggcgtgagccact

SEQ ID NO: 51860 - DNA, 981 bp, Homo sapiens
  chr15:34806507-34807488
  hyper
cgccggagccgccctgcaccgccctgtcgcggtctccggagcaggctggccgactgagggcgaccatgggtcccaagaaggctccggcagtcgcgggctcccacctcggggcgcggcgacgggggcctagaggggccaacagcccccaagcttacgccacgcgaggagtcggagagacgcgccctcccctctcctcccacccaagcctccggcagtcccgggccggggctgggccagttgcgggagaaaggggcggggaactggggcctctctggggaaggctcccctttgtcctgggactccgggcgccccctctctgccctcgccctgccccgcgaggccgccgccgggcgcctcacagtcatgttgcagtggagcgtgagcgggggctgcggctcctggttcttgtggaagatagtcccagaaacttccctttggccttgaaccctgacacggacatcttccactcatctacggcgggaggggcgcggaaggggagcctgtccggagccgctgtcacggccgcgactacccagcggggccgcccagccgagctttcgcgactctgcctctgcctgccgcctggacccttgtgggagcgcggctggaaaatggcaagggcacggaggccttggcgggagctgtgtggcggcctggggggctgctccctttgtaaccgactccacccacaggaggcgcggctcctgtcaagccgcagcttcaaagggcaacataaccactgcccccactaccgcctgggaaagggctgcccctaccctgcccccgtcaccctcacccctcacccctcaaccaggcgggccctgcgcgcaccagtttcggcgggtgcacgagtccagagcgtgcgcgcgctcccggctgccccctcctcccttgacccagcacctttctgcccgacccatctggttccttcctcacactcgccgactggaagctcagggcggcacagccactaactctctc

SEQ ID NO: 51861 - DNA, 30 bp, Homo sapiens
  chr15:34875123-34875153
  hyper
tgcctccaacccggcgcctgcagccccggg

SEQ ID NO: 51862 - DNA, 30 bp, Homo sapiens; identical to SEQ ID NO: 10058
  chr15:34903026-34903056
  hyper

SEQ ID NO: 51863 - DNA, 71 bp, Homo sapiens; identical to SEQ ID NO: 10059
  chr15:35014214-35014285
  hyper

SEQ ID NO: 51864 - DNA, 30 bp, Homo sapiens; identical to SEQ ID NO: 10060
  chr15:35045680-35045710
  hyper

SEQ ID NO: 51865 - DNA, 284 bp, Homo sapiens
  chr15:35046864-35047148
  hyper
aaatggggaaagaaatccaagcgcgtcccgaccgatggggcagttggcgcggtctagagagagggcacgaacctcgggcgccgtccggggttcgggtctggatcccgcggacgccgggacgaggggcggggcggggtggcagcctgcaggtcctccagcgctcgcccgcccaggagaagtctcagcgccgctctccgccgcaggttgggggccaggggagggtccgaacaccggctctgttcctgctacttcagcgggcacctggcgctccggcgcggcagcct

SEQ ID NO: 51866 - DNA, 404 bp, Homo sapiens
  chr15:35047296-35047700
  hyper
cggagcccgaggggccggggacgcgcgcggggggagaggggcaagagtcctggaggcccggcggggagcggggcgatttcgaaaggaaggactgcagcgcccctcggggcttctcggggagcccaggtaacctcacctgaccgccagacccaagcaggcggagggggagccgggagcggacgcgtgggtgagtggggaggggagtgagtaggtatcttctcttctctcggtgcatccctcaccttttcgctttttgcctcctggagacaactgaaattccttccctagatggagatgctggctgagggagggcgagtgggggcgaccacttttaaatctcccttaggggacagagtggctgagagtgcttctgcagagtggctgcggttcggtgcctctgtgga

SEQ ID NO: 51867 - DNA, 297 bp, Homo sapiens
  chr15:35087491-35087788
  hyper
cctgcgaggaccaacgcccaggacaaaacaagttagaaccaaatcaaaaagtgtgggctttaaaaaaaaaaaaaaaaaggcagtcgcagagcggcaggagctggggccttggctgaatgcgggccgggctggccaggtggcggcgcggggctggcgtccggcgcggcccgcggaccaggcgaggagtgaacgcggagggccgggcgctgactcaccgtcggcggggcgggtcggctcggctccggcggcagcgggctctgggtggctggctccaggagggccgctttatagaacgct

SEQ ID NO: 51868 - DNA, 30 bp, Homo sapiens
  chr15:35279815-35279845
  hyper
tagtaccattaaaacgatgtgaggatttca

SEQ ID NO: 51869 - DNA, 66 bp, Homo sapiens
  chr15:35280589-35280655
  hyper
ccgcgggtcccgagcggactgggactctggagacgtgcccccaaccccaccgccattcaccctgtc

SEQ ID NO: 51870 - DNA, 30 bp, Homo sapiens; identical to SEQ ID NO: 10064
  chr15:36053807-36053837
  hyper

SEQ ID NO: 51871 - DNA, 30 bp, Homo sapiens
  chr15:37176186-37176216
  hyper
tcgaaatgcttctacgtctcactttaccta

SEQ ID NO: 51872 - DNA, 97 bp, Homo sapiens
  chr15:37179588-37179685
  hyper
cacctagagaacctcgagccccgccgcggaagaggcaggagagggaagaaaagcctcgggcggccgaggtgggggtgggggcgaaaggggacggcca

SEQ ID NO: 51873 - DNA, 188 bp, Homo sapiens
  chr15:37180022-37180210
  hyper
aaaacaaaggcagcatctgggcgacaccccccttcctgcgttccccccagttatttactgggtgaccccgtcctttctcttcacctcctcacccagcgcctcggattatgagataatggattttgcgattgttcttgtcagggaaaaaaatctccacagaaccccacgttttcatctttcaactgttt

SEQ ID NO: 51874 - DNA, 30 bp, Homo sapiens
  chr15:37390651-37390681
  hyper
aaggagaaaagtaccgagcacaagttgagc

SEQ ID NO: 51875 - DNA, 453 bp, Homo sapiens
  chr15:37391162-37391615
  hyper
agcccaggctagtagtctaggcggcggcgcagcggctgcggcagcgcggccccagcggcggccccggcggcggctcctacgcagcccgtgcccgccccgagccgcgcgagccacggcggcagcggcgcagcagcggcagcaggagaaccgggggaatcgcgctgctggggtaaaagctggagcgaggcgaaagcgtgtaacgattgcacacgcacacacacacaccactcacacgcactcgccgcccgcccgctcgcacagcgctggaacacgcgcgcccagacacgcacacacgcacgcacacacactcgcacacacgcagaggcacgggagggaaagaagccgatgaataattttgctattttttaaaatactggccgccatcatcaagcagcgagcagcagcagaagcgttgaagggagaggaggcatcgggacaggcccctcttaggag

SEQ ID NO: 51876 - DNA, 31 bp, Homo sapiens; identical to SEQ ID NO: 10067
  chr15:37393697-37393728
  hyper

SEQ ID NO: 51877 - DNA, 116 bp, Homo sapiens; identical to SEQ ID NO: 10068
  chr15:37394739-37394855
  hyper

SEQ ID NO: 51878 - DNA, 118 bp, Homo sapiens; identical to SEQ ID NO: 10069
  chr15:37402968-37403086
  hyper

SEQ ID NO: 51879 - DNA, 369 bp, Homo sapiens; identical to SEQ ID NO: 10070
  chr15:37403115-37403484
  hyper

SEQ ID NO: 51880 - DNA, 30 bp, Homo sapiens
  chr15:38217644-38217674
  hyper
ggactcaaagcacatcgacatggaaaatca

SEQ ID NO: 51881 - DNA, 35 bp, Homo sapiens; identical to SEQ ID NO: 10071
  chr15:38365201-38365236
  hyper

SEQ ID NO: 51882 - DNA, 562 bp, Homo sapiens
  chr15:38543128-38543690
  hyper
ccttcattcttaggtcgcacaaatctgagaaggaagagaaaaacattgcacgcagggcgagacttatatctgggaagatgcgtcaggaacttgggagcacttgggattcagtcccctaaggtggttcatgtacaggctggttttctaagtggagaacagataatagaatttgcagagccaggagctctgactcctgtggctgggctgaccttaggctccagcccgcaaccccagtaggtttctgtgcaaaaatcttttgagatgaatgcatactttgtcttctaacaatgcattcgtgacagctgtctatccaatcggtccgcctccgttcagagcagttcgtgccacagaagcatctcctgcgctatagttatgcaacctcactcgcagcgggagttatttcctccgttctggctgcgccagattcatgtaacacgcctaccctgggcttcaatggaagtcgttctccattaacaatcactccagctttccgagatgaatgccctgatagcataccccttgcgcagtaagaatccaggcagcgaggcgaggtgttaaaaca

SEQ ID NO: 51883 - DNA, 31 bp, Homo sapiens
  chr15:38545321-38545352
  hyper
gctgctgttgctcccccgcctgctgttgctc

SEQ ID NO: 51884 - DNA, 30 bp, Homo sapiens; identical to SEQ ID NO: 10073
  chr15:38746855-38746885
  hyper

SEQ ID NO: 51885 - DNA, 31 bp, Homo sapiens
  chr15:39140581-39140612
  hyper
taggctgctggtgtatcgctaatttcatgac

SEQ ID NO: 51886 - DNA, 111 bp, Homo sapiens
  chr15:39873191-39873302
  hyper
gcttcctgcccggccgccgcccattggccggaggaatccccaggaatgcgagcgcccctttaaaagcgcgcggctcctccgccttgccagccgctgcgcccgagctggcct

SEQ ID NO: 51887 - DNA, 30 bp, Homo sapiens
  chr15:39873899-39873929
  hyper
tcatttcagcaaacgcggggtcaaagaggg

SEQ ID NO: 51888 - DNA, 30 bp, Homo sapiens
  chr15:39921485-39921515
  hyper
atctatcatcgccctcggaaggtttacact

SEQ ID NO: 51889 - DNA, 46 bp, Homo sapiens
  chr15:39958297-39958343
  hyper
aagcaagaaactctgcgttaatcaactatgtcgatctgtcattctg

SEQ ID NO: 51890 - DNA, 150 bp, Homo sapiens
  chr15:40074511-40074661
  hyper
tcctttgccgtttacggtctagtttaaatggctggtgatcagttctagatcttggtgggaagatccaaatctcgggaaagtagaagccttggttacaggtcctaatgttaggtgattcctggagaaatagcctccgcggaggcagaagcc

SEQ ID NO: 51891 - DNA, 319 bp, Homo sapiens; identical to SEQ ID NO: 10074
  chr15:40074996-40075315
  hyper

SEQ ID NO: 51892 - DNA, 67 bp, Homo sapiens
  chr15:40094249-40094316
  hyper
tgttatacaccagaacgtacaccaggtggcccaaggagttgctccagacttccgtgcaggtggacgt

SEQ ID NO: 51893 - DNA, 971 bp, Homo sapiens
  chr15:40211940-40212911
  hyper
ctctgcactttgccaggcacccgaaacccacggcggctgggcggccctgctcccggctctccgagcctgtaccctcggggaggcccggtccggaggcgccccgcgggaggcttaccgagcagcgagcctatgaagatgacgacctgcacggtggtggtgaactggcggtacagctgcgcctcgccgaactccccgagcgcgctgcggttcacacccgcagcctcggcgccggacgcgttgtgcggctcgctggcatttggagagatccagctcccgttatgtcccatggcgaggctgggactccggctccgcgcgccgcccgcctcggagccccgcgcggagcctctcctcctccgggtgaggagggacgcgcgggcgcctggcggagtcctggagaagccggagcagccgacgggtcccctcacgtctccacatcgccaaccccggcgcccgggaggcggggagggagggaggcgcggctgcgccccatgcccactccctcctggatcccagtcagcagccacaagaaggcggcacggtcagagcccgccgagcgtcgtccgtccctcctccagggtggtcagcgtggcccagcccactcgacaggaatggaaacacagaaggaggcattcgatggtcaaggagggcgctctccgctcccgctgcctccttcaaccgcgggtcctccgcccctcgagggctagggcatccctctccagtcccctcgggctgacgcactcgacccctctccttagcgggaggagaacgtttggccgaagctatttttcagtcctgttggcttcgaggctggatggcgatgtgaagccaacgtaatgcccacgccgagtggccggagccacgaggggacccccgagtgcccgacagcgcccatggcttgggtggaaagccctgagcgtccccagcagcctggccctgcgcccggccgcctgccaagacgcccgtgctgggtc

SEQ ID NO: 51894 - DNA, 30 bp, Homo sapiens
  chr15:40226071-40226101
  hyper
actatacaatgtggcgttttcattcctatc

SEQ ID NO: 51895 - DNA, 30 bp, Homo sapiens
  chr15:40322108-40322138
  hyper
aagaagtgttccaattaaggccatgagaag

SEQ ID NO: 51896 - DNA, 30 bp, Homo sapiens
  chr15:40364846-40364876
  hyper
ggcttcctttccagacggcgcagctttctc

SEQ ID NO: 51897 - DNA, 30 bp, Homo sapiens
  chr15:40383911-40383941
  hyper
agtgtcagtcctgcccgatgtccttcctgt

SEQ ID NO: 51898 - DNA, 30 bp, Homo sapiens
  chr15:40401048-40401078
  hyper
cactccgcacggtgcggtattgtttccaaa

SEQ ID NO: 51899 - DNA, 30 bp, Homo sapiens; identical to SEQ ID NO: 10075
  chr15:40452916-40452946
  hyper

SEQ ID NO: 51900 - DNA, 637 bp, Homo sapiens
  chr15:40544704-40545341
  hyper
ctgggttcgccgccgcgtcctacctgaggccacaccctgaaatcaaaatcgcggtcaggtgaagccggcgctgcaccaacgtgtaagcgcggcccctcctcggcgttcccgcgccgaggtccctcccgcggagggcgggcccggctcccacgacctcttcgagcgttcctgggcttcccgctccgcaggtgggttccccggctgccccggaggttcgcggcgagaggacgggcctcccaacacgcgcagcccccttcctgggtgcccatgccccgaagttcgggaccagccggcgccaggcgaggggccttgggcgcaggcatctggagctccgcgtccctggagcgggacctccctccgcgggcgcccgcccggcgcggggcattcgcgtccccgagagggcgcagcagtggggcctgcgagctggggccgggtggccgcgccgggtcggagtgtggctggagaggggccgccccggaagcggtgctgcgcccaacgtccccttctccccgtaagccccgcaaggagcctgccgcctcttgcacctgagccaggagttcagtcgggaggcgggcgcggagcggttcccagcgcctggacgtcagccagtcgcaacacccgcgggaacacttgctac

SEQ ID NO: 51901 - DNA, 58 bp, Homo sapiens
  chr15:40559554-40559612
  hyper
gtactcagagaaagttctgggcggccgcgcgtggtggctcacgtctgtagtcccagca

SEQ ID NO: 51902 - DNA, 30 bp, Homo sapiens
  chr15:40575416-40575446
  hyper
ggctgtcctgggagcggactgcgccgtcag

SEQ ID NO: 51903 - DNA, 30 bp, Homo sapiens
  chr15:40616159-40616189
  hyper
cgagggcgccgggccgccccctgcccagtc

SEQ ID NO: 51904 - DNA, 30 bp, Homo sapiens; identical to SEQ ID NO: 10078
  chr15:40651021-40651051
  hyper

SEQ ID NO: 51905 - DNA, 55 bp, Homo sapiens
  chr15:40698352-40698407
  hyper
tgacctcggcctcacgtctgtggagtgaagatttgagaccgtgggacagtactgc

SEQ ID NO: 51906 - DNA, 30 bp, Homo sapiens; identical to SEQ ID NO: 10079
  chr15:40729018-40729048
  hyper

SEQ ID NO: 51907 - DNA, 30 bp, Homo sapiens; identical to SEQ ID NO: 10080
  chr15:40734681-40734711
  hyper

SEQ ID NO: 51908 - DNA, 168 bp, Homo sapiens
  chr15:40762822-40762990
  hyper
gaccagcctccggcacgtctggactcggagagagcgctgcccgcctccctgcctccagacccgttgctggaggaagggctaggacaggcctgagtttgtggcgaatcccccttgtccacttccctgaggacacacgctgcaggagagcagcctcgagtcttttctgcc

SEQ ID NO: 51909 - DNA, 30 bp, Homo sapiens
  chr15:40987756-40987786
  hyper
tgtccgcgcccgaccgaccctcagctgctg

SEQ ID NO: 51910 - DNA, 57 bp, Homo sapiens; identical to SEQ ID NO: 10081
  chr15:41046992-41047049
  hyper

SEQ ID NO: 51911 - DNA, 30 bp, Homo sapiens
  chr15:41047345-41047375
  hyper
gcggcccccgaaggcgctctggcctggcag

SEQ ID NO: 51912 - DNA, 313 bp, Homo sapiens
  chr15:41055852-41056165
  hyper
ggcctggagaggcctccgtgaggacgccgtttgctctgggctctgcctggcaggggactttggaacctggcctgaagtgttcaagaagcgggcgcgggggcaacacgcgcgcggggacgcagtaagatcacaggctgcaaagaaaacagcactaagcgtcctggaggacgctggagcttcaggatagtgtccttccaggtcgtgggaccgccccctcctccccgcactccaccttcccgcaactggatcactcggcggaagcctcaggtgggccccggggtccaagtccgccgccgggagggcgggggcgggc

SEQ ID NO: 51913 - DNA, 30 bp, Homo sapiens
  chr15:41099761-41099791
  hyper
actctgagggaggccggcagtcgtgaatga

SEQ ID NO: 51914 - DNA, 30 bp, Homo sapiens; identical to SEQ ID NO: 10082
  chr15:41137004-41137034
  hyper

SEQ ID NO: 51915 - DNA, 30 bp, Homo sapiens
  chr15:41245691-41245721
  hyper
aggccaggtgtgtgcgtccgtcggtctttc

SEQ ID NO: 51916 - DNA, 30 bp, Homo sapiens
  chr15:41408390-41408420
  hyper
gccggcggcggcggcggccactttcactca

SEQ ID NO: 51917 - DNA, 306 bp, Homo sapiens
  chr15:41523077-41523383
  hyper
tagggttcccccccacgcgaagtttctctccgcaatccgtgccacctatcgagtaggattcctagtgttcgattcctgtgagaaaaggtagactacgctgcctgtcgcaggttagtttgttgtaaaactgttggtcaatgacgttgcccttttaattgcgtcgttagcgaccgagtggcatcgcccctttaaggccggtggcagctgcggttccgggggcggggtccgtcttcagcaggacttgggctggagctgggctgattcattcggggctggaactcgaacgctgacgttggctcctgagcc

SEQ ID NO: 51918 - DNA, 30 bp, Homo sapiens; identical to SEQ ID NO: 10084
  chr15:41576085-41576115
  hyper

SEQ ID NO: 51919 - DNA, 30 bp, Homo sapiens
  chr15:41624980-41625010
  hyper
agggttagaaaccccgcctttgaggcattt

SEQ ID NO: 51920 - DNA, 5 bp, Homo sapiens
  chr15:41694512-41694517
  hyper
cgcac

SEQ ID NO: 51921 - DNA, 30 bp, Homo sapiens
  chr15:41694775-41694805
  hyper
gacagcaaggaccccgtagcccagccaact

SEQ ID NO: 51922 - DNA, 30 bp, Homo sapiens
  chr15:41709139-41709169
  hyper
gactccagggcagtcgcgggtaaagccacc

SEQ ID NO: 51923 - DNA, 30 bp, Homo sapiens
  chr15:41709569-41709599
  hyper
gagccggagacggccgggcctggagccttc

SEQ ID NO: 51924 - DNA, 30 bp, Homo sapiens; identical to SEQ ID NO: 10085
  chr15:41709918-41709948
  hyper

SEQ ID NO: 51925 - DNA, 1117 bp, Homo sapiens; identical to SEQ ID NO: 10086
  chr15:41786423-41787540
  hyper

SEQ ID NO: 51926 - DNA, 104 bp, Homo sapiens
  chr15:41788033-41788137
  hyper
cgtcccgcttccctcttccgcccgcagggactcggcgaagtgcctgggagagggagtgcgctaggaggaggtcctgcggcccaagcctgggtgtagagaccgcc

SEQ ID NO: 51927 - DNA, 1989 bp, Homo sapiens
  chr15:41804115-41806104
  hyper
cggctcgagactccccgaggcagacgagctggctctccgggctaccctgcgggcagcgggggagggaatcggcggggcccgggagcctcccctcgctgtgctggtgacccggcaccgaggaaagcacgctcccccggcccccaggcagccctcgcccccggcgccggcgccgccccatccccactggctgcgctcactccgggacaggcgtcctctccctgctgccccaccaggatgtacagcgactccccgagaccgagggagaagattgctgagacgaagacgccatgcgcccgcgacaggtggttcttggcgcctttgccgcccgcggctccgtaggctgagatcctgcggggaacggacggtgagtccccggccttcggtgctcaggccggccgctccgggcagaagttggcgacagaggaggctccagaattattttttatctgagggacttggaggctgcaatcgactctgacgggatgggaagggtaggtttgcacaccgaaaaatcagatattacacttatttcaggagggttcgtggaaatgtggggaggctcaagcaccccttggcgccgccctggttgggggccttccgctcggtgtaagaggttccgggtaagggctaactcggtggcgactactgccaccttgaagggcactcaaggtggacctccccgcggaatagtccaagacgcaagtcggtgcgcacgtggacttcgttaccctgagggtgaaacctccaactagcaggtcactgtccaccctacctccgccgtgcacttacagatactggccagggcccggcacgcgccacagctgcacgcctctcagctgcccggcggcccccacggtcaccaccacgctggtccccgcgtacgccccgtcacattgtgtctgtgtgggcccatgccggccgctggccccgcaggtagaaaacagccaagacccctcggtgcctgagagcaaggagcgaggcaagggtcgtcgagcccctggctgggccagaggggtctggtatggtgagcgaaagaggaaggaggcgtctaaagctcacccggagaattcagcggggaggctggctccaagatactaggcggggcgctgactttcgggtcccgggggctgggacttgccagcggcaggggcgaggaccgcagaaaagtctcctgggaccccgggctagagcagagaatggcgcctgaaaggtgttgggagaaggcgcaggacgttaaggcgggtggaaataggatatgaaagaaagagagaaccccgcaacagctgcccttgcggtcgcggccacacccgtcacccggcccagccgcgctctcagcctggaagccactacccgactccggtcgcagaagccccgcgggtgcgcgctgataggtctgccagtttctctcctcgagcgcctttcccagtgaataacttaggggccgcaatgaatttggtcctgcagcctccccaatgctttcctcaacttagattggtggccccgccccaaggcggtgctgagaccccaaagaatgttcctccttcccaagctgcgtgatccagactctgggattcgcacgcacttggcgcttctcggcccgcactccagaagcacggaccggagaaatttggctgtgagagttcgaggcctctggaggaaccactgacacctggcctgttgaccggccacccccaagcctaggaaagtgcctcaggctggacggtcccctgaccgccagatagcacttacccgcggctccgaaccacaccagcagctgtccccagcagcccatccctgttgggtccacccggcaacaaaagcccttgcggtcgcggccacacccctgtcaacctaaagttgacagctcattttgccacggcagccctggccaccacttacaggggtgtgctgccgctggcgagacactccccggacctaaagctggtctggccacgcccacctcagaccccaggacgccagaggaggaaa

SEQ ID NO: 51928 - DNA, 30 bp, Homo sapiens
  chr15:41836561-41836591
  hyper
agcggactggtgagcgcggtgctgcgcggc

SEQ ID NO: 51929 - DNA, 30 bp, Homo sapiens; identical to SEQ ID NO: 10089
  chr15:41850597-41850627
  hyper

SEQ ID NO: 51930 - DNA, 30 bp, Homo sapiens
  chr15:41851949-41851979
  hyper
cctcggaaaccacacgggccggggctgggc

SEQ ID NO: 51931 - DNA, 1027 bp, Homo sapiens
  chr15:41913245-41914272
  hyper
ctgaaagtgcctggtatacctcgccacactcccataattacccaaaccgtctcattccaagcccaaggaccgggctttcaaggggacacgaaaggaacgcccgggaggtgagcgccaggagatcgggagaggtgcctttcccggcatgctctgcagcacaccgaggggcgccaggcgtatcccggcgtgcatcggggagcgcccaagggcgatggttcccggctcctggagaggcgtgcgaagttaagccggtaggtgcgagcttccttagctttgagcctctggtttctcgtttcctctttatgggtttaaatccataacggcagaaaaggatggccctctaactaccctccctctccgcgtgcgaacgactcggcgccgcttcgagctcggtgccaggtgattagcgggtaggggcgggcttgcgaccagcacgtgacccgaactggcagccaatgactagccgggtggtccagcagcgcgaggattccgggacccgcgagcggagcggcgcgtgggtcggttgcggtcggccccggcaggtatgcgcaggcgccttgcttgccacgcgctacgcccgtccccacgcgcctggtggcgtgttcttggcgcgaagtgttaagagtctgggtgtttttgtgcgttggggggaaggagagggtggcgggggcgggggggcgctgaggcgtcacgtggacgccacagccaatctcaggccgaggcgcacccacagctttccccggcgccccggggtgcgacgtgttcactgaggttcgaccgggccctgacggcctgagcggtctttcgaagcgcgtgtgcggcctgtaaattctggccgcggcttttcgtggcgtcctgctccgcggtgagcacagacgacaagttctcagcaaaatggctgctggaaagagtcgccaagcagggggagtgctggggccgcgtgaaggtcacatgacgaggttggcagcgcgtgctgctggcgcggggtagggggagggtggggggcgtggcgggtcacgtgccttcg

SEQ ID NO: 51932 - DNA, 923 bp, Homo sapiens
  chr15:41952407-41953330
  hyper
cttttctgggttgcagggacccggaaaagcagcggcttccactcggggggcgggtcccaagggtcttgctgctgctctggggccgtttggactcctggtgttgggggaggggtcagggaggtgctgctcgcgtctccttttgcgcctgcgcggcgggctccgagcgggtaggagcgcgtgcgcggtgacgtggacgtccggtgcgcgcgcgcaggctcttcagctggagcggacacacggtgtgcgaaccgaacagaataacccgcccccagcgggatgtgaaggactccgggtgaggccggccacgccccgcacggtaactctcgggcctgggtggagggcatcgcttagtactggcccgattggagtttttcgagagtttgaagctcttgtgtatttgaacggcgtgagaaacgttccgctgagagagcttcgcacgccctcgccaggccgggccttgcgcagggccgcctttggcgcgcccctgtggtccctgagcgaggctgcgcatgtcacctcgcgcgcgtccccggcctcacttccgcgtcgctcagctacctaactgggaacatcgacgccagagagagcggccacgaggcgggaggggtgagaagcgcccatggctcggccctgccctcgcgtgtgtggggtgccgctccgcgtggtacggtccgcgtgacgacttctcgcccggcgccgggctctaggtcgagagccacgcttacgcgcttttcagtttagagcctaggtctcgtggttctagaactccaagggaaacggtgtcggcgtcgcttttctgagaacttggcgcagcgttttgacacctgtgcaaacgtcttttctaacaagtaatttccggccaaattgtttgaggcaggacgtcaagtttaataaaggagggcgaggaagtgagctgtaggagt

SEQ ID NO: 51933 - DNA, 201 bp, Homo sapiens
  chr15:42112222-42112423
  hyper
tcaaggatccaaagagcggagatctggagaaacagttctaaagatcccggttaggaggtaagcggagaacttccagaatagttagagggaaaaggccatgaggggacccataactcagcgactgccctggggtggccaaagggggatcaaggtgttcagagcaagttcccaagcaccagtaccttccgttgtcagcaacag

SEQ ID NO: 51934 - DNA, 30 bp, Homo sapiens; identical to SEQ ID NO: 10092
  chr15:42119669-42119699
  hyper

SEQ ID NO: 51935 - DNA, 161 bp, Homo sapiens
  chr15:42119936-42120097
  hyper
tgtgcaggtcgcggcgcttcctgcctcatcctcggctgcatggggcgggggcgctgtttttaacgtgcccgtttgtactgatgtatgaacttgtcaataaacacaattgtttgttaaccctgggatgccggccagtggggcaggccgaagcgggcgctgcc

SEQ ID NO: 51936 - DNA, 37 bp, Homo sapiens; identical to SEQ ID NO: 10094
  chr15:42263897-42263934
  hyper

SEQ ID NO: 51937 - DNA, 72 bp, Homo sapiens
  chr15:42349321-42349393
  hyper
caggctacccggatcgtccagcgcgacatggagtctgtgtgtcctcaccagtgctgcgtgacaggagccggg

SEQ ID NO: 51938 - DNA, 30 bp, Homo sapiens
  chr15:42500327-42500357
  hyper
cactggctcgaaagcgtcgtgcatggcggc

SEQ ID NO: 51939 - DNA, 30 bp, Homo sapiens
  chr15:42565686-42565716
  hyper
ccgggtcctggaaacgtcgcggagcttgtt

SEQ ID NO: 51940 - DNA, 98 bp, Homo sapiens
  chr15:42841084-42841182
  hyper
cccgtgggacccggcgtccgcgcctaacggcgctgggctagtgctaggccacttcatagcttcggggatggtcaatcaggtacgtgggggtggcggtg

SEQ ID NO: 51941 - DNA, 30 bp, Homo sapiens
  chr15:42841507-42841537
  hyper
gttctgtccccttgcggaacaagcatttcc

SEQ ID NO: 51942 - DNA, 49 bp, Homo sapiens
  chr15:42868425-42868474
  hyper
gaggccgacacaggtcgcggtttctttctatgctcgacagctgatttaa

SEQ ID NO: 51943 - DNA, 376 bp, Homo sapiens
  chr15:42873542-42873918
  hyper
tcctggtgtggtggagaagagcgtcccctcgggcgtggtgcaatagtcaagaggtagctgcgcggcgtcgctgatggccacggtgtgggtggggaaggcgcggctctggctgggctggtggccgctgccagcggaggaggacatggctgtggacgcgggctctgggctttgtgtggcgggtaggcggcggcgccgggccggtctgctccagctcctagggcgggtggaaaagcgagctctgcgcactcctcgctcgcttcctctagttccctcgtctggctccgcccctgccgccagccgatcctcgggcctcgccagcagcctcagcagcagcagcagcggcggcgacgaccacgatgacaggaaacctacatag

SEQ ID NO: 51944 - DNA, 30 bp, Homo sapiens
  chr15:43213037-43213067
  hyper
acctgccctgccagcgcgcacgcccacctc

SEQ ID NO: 51945 - DNA, 31 bp, Homo sapiens; identical to SEQ ID NO: 10096
  chr15:43312163-43312194
  hyper

SEQ ID NO: 51946 - DNA, 149 bp, Homo sapiens; identical to SEQ ID NO: 10097
  chr15:43394929-43395078
  hyper

SEQ ID NO: 51947 - DNA, 102 bp, Homo sapiens; identical to SEQ ID NO: 10098
  chr15:43397759-43397861
  hyper

SEQ ID NO: 51948 - DNA, 30 bp, Homo sapiens; identical to SEQ ID NO: 10099
  chr15:43398420-43398450
  hyper

SEQ ID NO: 51949 - DNA, 30 bp, Homo sapiens
  chr15:43425868-43425898
  hyper
tccggcgccggccccgcatccagctctggc

SEQ ID NO: 51950 - DNA, 30 bp, Homo sapiens
  chr15:43477988-43478018
  hyper
gttcggcccccacacgccacacccacaagt

SEQ ID NO: 51951 - DNA, 31 bp, Homo sapiens; identical to SEQ ID NO: 10100
  chr15:43584165-43584196
  hyper

SEQ ID NO: 51952 - DNA, 153 bp, Homo sapiens; identical to SEQ ID NO: 10101
  chr15:43802597-43802750
  hyper

SEQ ID NO: 51953 - DNA, 30 bp, Homo sapiens
  chr15:43803489-43803519
  hyper
actaccaatgcatacgtctgcatctccatc

SEQ ID NO: 51954 - DNA, 30 bp, Homo sapiens; identical to SEQ ID NO: 10102
  chr15:43809674-43809704
  hyper

SEQ ID NO: 51955 - DNA, 158 bp, Homo sapiens
  chr15:44038551-44038709
  hyper
acgcgcagccaatcagcggctgccacacagcggcccaagccgggtttgggggttgggacctccggctgcaggtccgcctgggccagacgcgcgagcgcaagcagcgggttagtggtcgcgcgcccgacctccgcagtcccagccgagccgcgaccctt

SEQ ID NO: 51956 - DNA, 89 bp, Homo sapiens; identical to SEQ ID NO: 10103
  chr15:44068729-44068818
  hyper

SEQ ID NO: 51957 - DNA, 30 bp, Homo sapiens
  chr15:44069047-44069077
  hyper
gcgtgaagcagagccggagctgtcctctca

SEQ ID NO: 51958 - DNA, 30 bp, Homo sapiens; identical to SEQ ID NO: 10104
  chr15:44486469-44486499
  hyper

SEQ ID NO: 51959 - DNA, 927 bp, Homo sapiens; identical to SEQ ID NO: 10105
  chr15:44486763-44487690
  hyper

SEQ ID NO: 51960 - DNA, 30 bp, Homo sapiens
  chr15:44581415-44581445
  hyper
ggaaaagcgcaattcggacctcttgctgtt

SEQ ID NO: 51961 - DNA, 30 bp, Homo sapiens
  chr15:44829295-44829325
  hyper
tccgcgccggtcaacgagagcaaacccagt

SEQ ID NO: 51962 - DNA, 30 bp, Homo sapiens
  chr15:45003687-45003717
  hyper
ataagtggaggcgtcgcgctggcgggcatt

SEQ ID NO: 51963 - DNA, 136 bp, Homo sapiens
  chr15:45404102-45404238
  hyper
cggggcaaccgggcgtttccacgctcaccacgtcggaaagaacatggtagcctgcgggcatggggcgccaatacgtgacaaaccgtccgtattgcgccctccccacggccagggcggcctccaagtgtcctcagga

SEQ ID NO: 51964 - DNA, 30 bp, Homo sapiens
  chr15:45405088-45405118
  hyper
gggcgcgtgttccccgcagattccccgctc

SEQ ID NO: 51965 - DNA, 30 bp, Homo sapiens
  chr15:45406347-45406377
  hyper
tcaggacagacctgcgccagtgtgagcatc

SEQ ID NO: 51966 - DNA, 30 bp, Homo sapiens
  chr15:45406924-45406954
  hyper
tcttgccggggatccgtggccactcggtaa

SEQ ID NO: 51967 - DNA, 213 bp, Homo sapiens
  chr15:45421467-45421680
  hyper
ccaaacttctcagactgcacccgaggctctgcggcgccgcctccctctcccggcctggtacagagaagggctgggtgcgccaggacagtagtaccggggtctgccagctccgcagaggtccctccaatcccccctcctcctctgcgcccccccacccatgcccagcaatcccagcagctccagcgcaaacctagcgacgcagttccgggtctg

SEQ ID NO: 51968 - DNA, 243 bp, Homo sapiens
  chr15:45421706-45421949
  hyper
cggtgggacccccaagacctcacgaggatccccggagggagacgtgactccggggtcttagaggggtttaggtcggatgggtgacttgctttgacgcctggcctggtctgtgggtggcaggtgatcgatggccttggacttggagcccagacccgacggtgtcgagaggatctgaggagagtctcccctccccataccctctccgcctcccaccctctccccagccccatgggacttgtgaag

SEQ ID NO: 51969 - DNA, 107 bp, Homo sapiens
  chr15:45421997-45422104
  hyper
cggcaccgacggaacatctctacctgcgccccgggagccctcgccgtctcacctcgcgcgctgccgtccgctggaagcacctccgcgcctccccaggcgccagactc

SEQ ID NO: 51970 - DNA, 30 bp, Homo sapiens; identical to SEQ ID NO: 10107
  chr15:45427393-45427423
  hyper

SEQ ID NO: 51971 - DNA, 14 bp, Homo sapiens
  chr15:45427705-45427719
  hyper
ccatctatggttcc

SEQ ID NO: 51972 - DNA, 31 bp, Homo sapiens; identical to SEQ ID NO: 10109
  chr15:45459389-45459420
  hyper

SEQ ID NO: 51973 - DNA, 263 bp, Homo sapiens; identical to SEQ ID NO: 10110
  chr15:45479774-45480037
  hyper

SEQ ID NO: 51974 - DNA, 30 bp, Homo sapiens
  chr15:45491086-45491116
  hyper
gggctcccggtgagcgcagtgggagtttag

SEQ ID NO: 51975 - DNA, 161 bp, Homo sapiens
  chr15:45492781-45492942
  hyper
agcctatctccaccctcgcagccatctgagggcacgcaagagcattaatctctgctttctcgattttggtccacacttgcctgcgcaccagacacggtggccgatttctccaccgtggaggctgctcttggggttccccttacctcgcgcctcaaggaagt

SEQ ID NO: 51976 - DNA, 144 bp, Homo sapiens
  chr15:45493401-45493545
  hyper
tcgaatccgagtcacggcattgtggaaacaatggtacggcaagggcctctttttagacttagaaagccacacattcttctgggaagctaactctaaaagctgttacctggccagggctgaaattataacggacaatgaagtgtg

SEQ ID NO: 51977 - DNA, 224 bp, Homo sapiens
  chr15:45669905-45670129
  hyper
aggaagccagaatgtcggagcgattccagtactagaagcatgggagggtctgctgccagggcagccgagggcggggagcgcagaaactctgcttacaggctgcactcgccccgactcctctccagacgtgggatcccatgttatacttggagtgaatctggtcgctcgctccccgtccccgattcccactttgcttgcctcttctccccatccatctaccccac

SEQ ID NO: 51978 - DNA, 650 bp, Homo sapiens; identical to SEQ ID NO: 10114
  chr15:45670188-45670838
  hyper

SEQ ID NO: 51979 - DNA, 117 bp, Homo sapiens; identical to SEQ ID NO: 10115
  chr15:45670932-45671049
  hyper

SEQ ID NO: 51980 - DNA, 515 bp, Homo sapiens; identical to SEQ ID NO: 10116
  chr15:45722444-45722959
  hyper

SEQ ID NO: 51981 - DNA, 30 bp, Homo sapiens
  chr15:45814512-45814542
  hyper
gcatagatttgaggcgcttccacgcgccag

SEQ ID NO: 51982 - DNA, 104 bp, Homo sapiens
  chr15:45815254-45815358
  hyper
cgccgggggctgggcgttgctgctaggagttccctccaccgaaagtgtgtctcaggaatctcgggtcgggatctgggttgcgggtgctcggcagaagacaaacc

SEQ ID NO: 51983 - DNA, 30 bp, Homo sapiens
  chr15:45879208-45879238
  hyper
aaaaagctgtgccgcgtgagggctgaaagt

SEQ ID NO: 51984 - DNA, 6 bp, Homo sapiens
  chr15:47476233-47476239
  hyper
ttagag

SEQ ID NO: 51985 - DNA, 129 bp, Homo sapiens
  chr15:47476290-47476419
  hyper
cggcggagtaaccggtggaagtgtcaaagaggaaggagtggagggctgctgaggtgacagggtgtggtctgtgagggagcggacgaacccggagaagagagcagagagacccaccaggactaggaggca

SEQ ID NO: 51986 - DNA, 337 bp, Homo sapiens
  chr15:47476468-47476805
  hyper
cgcggaggccgggcggcaaggggagtttccagtcctcgataagtggagtccctgctctgcgctgcgccagcgccttccgcctgggcccgcggtgctagacacctgccgagtccgaagcgggagtcaggctgagccttcggcccccaagtaagtcttcccttttctctccatttctcctccgtcgcctttacttctttatctgcgaagcgaggagctgctgacggaggttctgcgcgaaaagcgcaccggggagctctggcggcgtccaggatgctccagcctcccggcgcgccgcggccggcgcagagacccgaccgcgaggcccgccgcccggttc

SEQ ID NO: 51987 - DNA, 104 bp, Homo sapiens
  chr15:47476876-47476980
  hyper
cgatcccggagctgtgccaggccggggggagggagcggaagccactttatggctcgtggccccacctcttgcccccaccccaaatcctccgggatttcaaaatg

SEQ ID NO: 51988 - DNA, 246 bp, Homo sapiens
  chr15:47477012-47477258
  hyper
cgcaagctgggcgagttggatccgggtcggcagccggctgaaccgccacgctgccccgctttttttattttctttttagatacggcatctaattggtgggtgctgggaggcagggctggttgggtgagcacgagtacctgggtgtagggaacgacctaccttcttgctttccttggggtttagaggggaaggggtgggggcacccagagccccgaagcccggagcgtcccgcgctagcgggcttgc

SEQ ID NO: 51989 - DNA, 72 bp, Homo sapiens
  chr15:47477354-47477426
  hyper
cgctcaccgggctgtaaataaaagtgacgacttggaggagtgggggtcaaggctgccgggagggaaaaggct

SEQ ID NO: 51990 - DNA, 462 bp, Homo sapiens; identical to SEQ ID NO: 10120
  chr15:48009298-48009760
  hyper

SEQ ID NO: 51991 - DNA, 997 bp, Homo sapiens
  chr15:48010109-48011106
  hyper
ctctctctgcctgccgtgcaagggacgcgcaaagggctagagaggtttggcggacgcgtcaaaactggcaaagctggcggcttagggggaggggcaagtggacttggaggccctcctccactgtgcacccccttggaaaaaaagcggagggggcatcaagtaaaagtttcttgccaggcagagccagctcggcgtcccccgcacatagctggggttagcaggggttgcttctctgccgggcacagcgtctccaggagccagccggggagagctgagccaaggccgaaggagccgcctgcgggcttagccgccccctcccgcccgttggccccagagcggacgctgggacgcccggggtctggcagctctgcgcccggctaggagcgggcgggcgagcattagcctgcgtcctggagaaggggcgcagcgccgcagttgaggccggagcagcccctcgcgggcgtaggatacctgtcagtgagcgcccggattgcacggcccccgggtagtgcctgccggcgaggggcgggagctcgggtgacttggccatccccatccccggcccaggcccggagggcggccgcttcccaccgtccctctccccttactggcagagcgcgctgcgggcggactcccgggcccggagcagcccaccggccaccccaccgcccacccggctcccggtgtctcctcccggccgctctacccagcaactttccgtgctttgttccccgactggaaatgctttacggaagcgtcttggacagggtctccgccaggcgacaagagctcggtgctgagatgtgttacgttctcatctccccatcaattatggatggaaacaaataaggaagagtcaattttgctgagccccttctccggcaacgagaggcgttctgcagccgggagggagccgccgctcgcgccggcagccgctggcaggggcatggtgaggaggaaggtagggaaacttttatttcccgtcttgacagcggcg

SEQ ID NO: 51992 - DNA, 30 bp, Homo sapiens
  chr15:48011381-48011411
  hyper
cggtatgaatcgcagcgtttgaggaactta

SEQ ID NO: 51993 - DNA, 209 bp, Homo sapiens
  chr15:48469936-48470145
  hyper
tcctgcaaaccgtggcggtcgctgagctttgctcaaagattctttaaccaaagtcagggaagaggggtgttcgctgtctcgggctagaaatcagggaagagcgctggtccccgggcccccagccccggctcccagaccacaggcggccaggcctggggcgggcggggaagggcctgggagcggcccagctgcacctgctcctcaggaag

SEQ ID NO: 51994 - DNA, 412 bp, Homo sapiens; identical to SEQ ID NO: 10124
  chr15:48470215-48470627
  hyper

SEQ ID NO: 51995 - DNA, 167 bp, Homo sapiens
  chr15:48483065-48483232
  hyper
taccttgctttcaacgtcggttaggtttagaatctacatattcaacactgtttagaaaacgtacctggcagctatctagagctttatcagagcgtttcctggctgctattttgttgtcttctagcttgtgttggggagacaggtctcaccacgcaccatttcagcac

SEQ ID NO: 51996 - DNA, 925 bp, Homo sapiens
  chr15:48936720-48937645
  hyper
cacagggagagtcatcctgcccgttgttctggatcttgaaacttgggagacccacaccaaaggagggaaccggttcctttaccctttaagcgcgtcgtgtcctccaccgcctcttctcttggcccgactggctctggtttccttcacgttcccagcctccaaattggcgtccgccccatggctcgtgtaggacgctaaaagcacggtaaatcccagggcgatctccagcagacgccctcgacgcatgatgccgagccgccaccggctcccgccgcctcttgccgcgcccggggctcggtctgcggccgccgctgcgccctgaagcgcaccgcgccgccggggtcccgctatcccgccgcccgtcccccgggccgggctcctcccgccttctccaggcgctgctcccacttcaggcggcccctgccagctgcaacacagagacaaatccccgaggcggggagactttcagggcatcgggatgctgaagcctcgcggtccccattcccaagcccaacccgtgcgccgcctgcgcgtggcgcagttaatttgggtaagggaagaccgtttggtccacagctggctggaaagcccaggcccccggcggcagcagccccggccgatccctcggcctcccgggccccgccagaagagcgcggcgcaaagtacccatatccccagcggtcctaagccccgggcgagctctctgggtttattttttttagcggcacgaattgcgcgcgatgcgcgctctgaacgccccactcctcagcctgccctctccgccaggctggaagccagccgcgccgtccccgccgactccgggcgatgccaccgccccccgaacatctgacgcggagcccggcaccaagagccccgggccaggaagctgtcaggcaggggagggccagcgccagctgtggacgtt

SEQ ID NO: 51997 - DNA, 888 bp, Homo sapiens; identical to SEQ ID NO: 10126
  chr15:48937709-48938597
  hyper

SEQ ID NO: 51998 - DNA, 30 bp, Homo sapiens
  chr15:49102692-49102722
  hyper
atccacaggctgagcgaatgaccttgagga

SEQ ID NO: 51999 - DNA, 30 bp, Homo sapiens
  chr15:49103165-49103195
  hyper
acggaggctgttaccgcgaggaaactctag

SEQ ID NO: 52000 - DNA, 208 bp, Homo sapiens
  chr15:49170051-49170259
  hyper
gtaaggttattttccggtttgcagcattacaagcagcagtagggttaagtaacacagaaactgttacgctcttgcatgcagggtccctagatacgaagttcgaatcgatggaaacgtagctcaaaaggcgacgccaacaccccggagaaaacactgagctactccaaccacagtggcgcgccaagtaggaggcggtacctgaggacca

SEQ ID NO: 52001 - DNA, 31 bp, Homo sapiens
  chr15:49254968-49254999
  hyper
gggtggggctctcctgcgacggcaaggtggc

SEQ ID NO: 52002 - DNA, 71 bp, Homo sapiens
  chr15:49255440-49255511
  hyper
ggcaccagtgttctcgccttggaatccttgtcgggagagcctagacccaggctcccggcggcgcgggtcgc

SEQ ID NO: 52003 - DNA, 30 bp, Homo sapiens
  chr15:49255860-49255890
  hyper
gtactactgacgggcgctgctccgcattgt

SEQ ID NO: 52004 - DNA, 30 bp, Homo sapiens
  chr15:49268321-49268351
  hyper
ttctccaggcacagcgactcggggggaggg

SEQ ID NO: 52005 - DNA, 30 bp, Homo sapiens
  chr15:49338361-49338391
  hyper
tgcggccgcaggaccggcccccggtcccca

SEQ ID NO: 52006 - DNA, 30 bp, Homo sapiens
  chr15:49448111-49448141
  hyper
cttgggactctggacgcatctcattccggt

SEQ ID NO: 52007 - DNA, 35 bp, Homo sapiens; identical to SEQ ID NO: 10127
  chr15:49448551-49448586
  hyper

SEQ ID NO: 52008 - DNA, 30 bp, Homo sapiens
  chr15:50475024-50475054
  hyper
tcaattacaacatccgcgcgaagtccctgc

SEQ ID NO: 52009 - DNA, 30 bp, Homo sapiens; identical to SEQ ID NO: 10128
  chr15:50647539-50647569
  hyper

SEQ ID NO: 52010 - DNA, 30 bp, Homo sapiens
  chr15:50978888-50978918
  hyper
ctagcagcagaagccgagtctttcataatt

SEQ ID NO: 52011 - DNA, 30 bp, Homo sapiens
  chr15:50979471-50979501
  hyper
tctcctgttgctgccggtaaatattcttct

SEQ ID NO: 52012 - DNA, 30 bp, Homo sapiens; identical to SEQ ID NO: 10129
  chr15:51058035-51058065
  hyper

SEQ ID NO: 52013 - DNA, 729 bp, Homo sapiens
  chr15:51385892-51386621
  hyper
agcgggtcctaggtgcgtagacccgtgggtggggggcggagcggaccggtggaggtgggcagagaccggcggcaagtcgacccacggctgtgggtggcttcctcctgttgctcagtatcagggagaggcgggggaggacattcattttttttcttccctaagtaagcatccacctattgctttaataactatcgattgtgaaaagccggcggggcctcttaaaggcgaagtcgggaggcgcgcgcccctgcgtctgtgttcggggaccagtccgcggggaccttctggaccttctccgccggctgcgcggcagcgatggaccctgtgcatgggctctcctagcagcctcgggaaccgcggccgcaagctgtggtttgacccctgccccaaccactcgcgaggccttttctgttcagagcccccagtcacgttcttggacccagtcacctgcgccgcagcgcagtcccggcgccccaggttcgaggacccggcccgcgctcggaaagttatttcaaaaggcagatgtgttgcaaccctctctgcagcaaactacagtacgcggattcccgaacccttccccgcccccacccagcccgggcgaccagagcccgccgcgggagactggcagcaaggagagccacccctaaatgcaccttccctccctcccgcgcgcccaagtgcaatggggttgggggaagccccaaagcaaactcacgacgcggagcaatc

SEQ ID NO: 52014 - DNA, 528 bp, Homo sapiens
  chr15:51559323-51559851
  hyper
ctctgtcactcccaagcagggcgaatcgagccagatttttgttggacgctttcaggagcaaaaccagctcctcgtattgtgtcccattcacagctggagcagctcgggcactaggcgaggcagggggtgcggcgagcggtctccagccggctgcctgcggtcggtgccgcccgcagaatctgcgcggcccagtgcaaaataaaaacgcggggccccgcgttcaaaaagcaggaaaaagcctttccctttctcccgtggtctttctgtccacctgtctcggcagggtttatttgctagttaagttgcgctggcttgagcacagggacgctggcgggccaaaggccgaccctcacaggcgacccagcgtggcggcgaggtcccttggctgtacgccgaggtctgcgccgcccccacgtccgtggccggccactgcccagggcggagggcagcggtgttcgccgggtgggggcccagaacctgtcccaggaagacgcaggagacgcgaccggggtgagacaagagtccaag

SEQ ID NO: 52015 - DNA, 300 bp, Homo sapiens
  chr15:51633850-51634150
  hyper
caagccctgccctgcccaaggcgcatagagcatggcccgaggcgctgagggaggccgtggggacgcgggttggggcctgcgtggcgccctggcggccgtggcgctgctctcggcgctcaacgctgcgggcacggtgttcgcgctgtgccagtggcgcgggctgagctcggcgctgcgggctttggaggcgcagcggggccgggagcagcgcgaggacagtgccctgcgctccttcctggccgagttgagccgcgcgccgcgcggggcgtccgcaccaccccaagacccggccagctcagc

SEQ ID NO: 52016 - DNA, 154 bp, Homo sapiens
  chr15:51634174-51634328
  hyper
cgagcccgcgccgcatatccgcgccgagagccatgacatgctgatgatgatgacctactccatggtgccggtaggcggggtctctgttccccgtggcgccccggccaggtgggcggctgggggtgtggggcgaggacgccgacgccctcttctc

SEQ ID NO: 52017 - DNA, 31 bp, Homo sapiens
  chr15:51812127-51812158
  hyper
acccagccctgaactacgttttaagggcatc

SEQ ID NO: 52018 - DNA, 238 bp, Homo sapiens
  chr15:51915458-51915696
  hyper
aaggacacccgtcaccgggaatttccacctggagatatcttagatatcttcagtcttttcgaaagtgcagtacataagatattttattttacataaacaatgtaggcatcttgcaactatttagagaagccatactcccctgaaagctaattattttgctcccaccttttgtcacggttattctagacagcaaaaagccgccttagagacgggtgactcctttcgactttttttcatg

SEQ ID NO: 52019 - DNA, 87 bp, Homo sapiens; identical to SEQ ID NO: 10131
  chr15:51973519-51973606
  hyper

SEQ ID NO: 52020 - DNA, 109 bp, Homo sapiens
  chr15:52029137-52029246
  hyper
tcagttgggctttgcgtaaatatagagtagtgtgatggggcctgcaaattgggtgaaggtggttcacggggatgccaaagccctagtcctcttcggcctccctcacgcg

SEQ ID NO: 52021 - DNA, 43 bp, Homo sapiens
  chr15:52029518-52029561
  hyper
ccgggccgcggcggcgcgccctgctcaccgtgacaccgtactt

SEQ ID NO: 52022 - DNA, 30 bp, Homo sapiens
  chr15:52043659-52043689
  hyper
gagaggacacctgtcggggaagggcggggc

SEQ ID NO: 52023 - DNA, 30 bp, Homo sapiens
  chr15:52044299-52044329
  hyper
gtgagctcctggagcggtatgcatctccct

SEQ ID NO: 52024 - DNA, 30 bp, Homo sapiens
  chr15:52121929-52121959
  hyper
cgacgcgggcggaccggcgggtgctgggaa

SEQ ID NO: 52025 - DNA, 30 bp, Homo sapiens
  chr15:52122374-52122404
  hyper
gcgtcgccgggacgcgatcacaccgagatg

SEQ ID NO: 52026 - DNA, 30 bp, Homo sapiens
  chr15:52274418-52274448
  hyper
ggctgatttagaatcgtgtgagaacacagc

SEQ ID NO: 52027 - DNA, 181 bp, Homo sapiens; identical to SEQ ID NO: 10133
  chr15:52404391-52404572
  hyper

SEQ ID NO: 52028 - DNA, 664 bp, Homo sapiens
  chr15:52587420-52588084
  hyper
cgaggcgctccagtcccgggagatggggacgcacgcgcgacccctgggcactggggattctaggccccgaggccggagcggcggagggggcggcccctcccacagggtcttcccacccacagggcacccaggcgcagcggagccaggagggggcttacccgcgggcagggacggagcacgccggggccctggaggggcgacgctcgctcgtgtccccggtccccgtggcccctccgcggcgcctccgcggcccccagcgcgcgcccgcccgccctgccgtgtcaggtgcgcaggtgtggcaggtgtggcccgggcgccaggtcgagtcagcgttagcagggccggctcccccacagcgctcccaggagcccagcggaccctcctacctgcgtgtacagctcggccaccgccatgggcaggaggggccggggccaggccggggctgccgaacgtgcgaggctcgggggctgggcctgcgccgcagaggccgggcgcaggagagaccgccgcggaaatcaccgccgggccatcttgcccaaagttttccaacggcctcctgttcccgttcccgagttggcggcgaggggagggggcagcggcgggattggtccctccaagcttggcccggctagtcggcgctgccattggccggggccgggcggct

SEQ ID NO: 52029 - DNA, 265 bp, Homo sapiens
  chr15:52820545-52820810
  hyper
ataccaacacaagacgttattttaagcgcgtgtccccacgagagaacccatccgatctactggagcaagcatctcccacccgccgggaattttccaaagccaagcaggaggggaggcacgcccgccctgctaaatccacatgggccccctttccactccgaagcccgctctgcccccagctcgagcagcgcggcaggggcctgggagacccccgaggcgggccaccttccgccgccttcaccatctcgcccgaaagaggaaggtg

SEQ ID NO: 52030 - DNA, 30 bp, Homo sapiens; identical to SEQ ID NO: 10136
  chr15:52821390-52821420
  hyper

SEQ ID NO: 52031 - DNA, 31 bp, Homo sapiens; identical to SEQ ID NO: 10137
  chr15:52972047-52972078
  hyper

SEQ ID NO: 52032 - DNA, 262 bp, Homo sapiens
  chr15:53075397-53075659
  hyper
cccctgtcacacccacagggacgcgaattccgattttataagcaggtgtgcacgtgcactcagatactcacacaaagccgcgtggagggacgaaaagatcaaccacccgatcgacgaggataggtttgatcttttcgattacctcagtgtgccagtgtatattcccggctgggcctagcgccctaagaaacttcggaactttagctgttaatttttgttttcttactatgacttcccaaagacattctatctgcctaccggg

SEQ ID NO: 52033 - DNA, 125 bp, Homo sapiens
  chr15:53075739-53075864
  hyper
cggcctccgaaggccctttcacccaccccacacaagaggaaacaaagacttctcagctcaaggcctcagggctgcctcctgactccggtcagtttgcaggaagaggaaacaacaaaacaaaggaa

SEQ ID NO: 52034 - DNA, 1015 bp, Homo sapiens
  chr15:53075985-53077000
  hyper
cggatacaaaatccaagtacgcatcttttttggggaggttagagctgaggtgtacttcggaagatgagaattttgttttcatgaattgggtaacacccaggcattgttaggtaccccgacagaccctctagatatccttctcttcctccttcacactttcttcctatcaaaatagttattgttttgaaattcactagaacaacgacgttctaaaaacaaaggcgcagcaagcatccctttcttcgctgccgcgggctgaaccacggacgctcgcgggtcgcccagccccgacggcccgcagggggcgcgcgccgcagccgcagcacagcccggctacccccagaaagggagccgaatggagggaagcagggagcgcggagggctcgaggcttgcagataaggagaggcgcatcctgggatttgggtcctctgctgctacaacacaaccgtgctattgttggcactgtccgacccaagtgtcggtggtaagcggcgatgtcggggctgggtctctagcaaccgctgtgccctgggtcaggctggtcgccccagctaccgggatccctctccggatgcttccagggcgataggtgctgcacccattgacgggatagccgcatacctccgaacaggtagtggagttcgtctctggcaggcatcctagctgcgctgacaccaaggtcgccacacaatagccatcagccccccttaagccccagaagtaggtttcccctgccccagccatagcggttccagtcgtcgccacgagcccacttcttatccccaagcgcacctccctctcctcacccgggtttatgcccgttacacagagagaactacacagggggaactatggtcctacaccctcgaggggacagacaccggccgtgagacaggcaccacgcagagccttctggtgactgtccgcaggagcgagaccttttttggttttgcagtcggctaggtgtgtgtgtgtgagggtccccagttgactaccgggatgcactgccacttt

SEQ ID NO: 52035 - DNA, 69 bp, Homo sapiens
  chr15:53077065-53077134
  hyper
cgctcccagctggcggcgcccctcgccccgggctcagaggcggacacggtcggtcgcgccctgctggcc

SEQ ID NO: 52036 - DNA, 590 bp, Homo sapiens
  chr15:53077594-53078184
  hyper
ggacgggaagggggcgccgccaactcccccgcggggtttggaggtttcctcgcctccaagtcccgcagggcagggtcggagtgcccaacacccacccccgcccgaacctcgggcctgcgcgccgccttcccctgggtccgcggtgctgcgcttgctgttgggtgtgtgtcgctgtctctttccgagccggcagctcctgctgtgtggccgaagccctctggaatctttaattggaaactaatcttggtcttgatagacgcccacgtcagaggcgcgccacccacccacaccccccgcctcatcccggaggagacgcggcgagaaccctgtcgctctgctctttaatggggcagcagcaagtagtacatggagggaacatatattgatttttaaaaggtagttaatttggtgggaatttcctcctgtcgcccttcttccaccagccgctgttatttcgtgaccggaaggcgcctccccaaacacagcgccacgtgcaagagggttttgaccctctgcaacaggctgccggcaactggaggacagaggggcgtggagaagccaccactctcccgctgcggagcgaaggaacc

SEQ ID NO: 52037 - DNA, 936 bp, Homo sapiens; identical to SEQ ID NO: 10142
  chr15:53078741-53079677
  hyper

SEQ ID NO: 52038 - DNA, 174 bp, Homo sapiens; identical to SEQ ID NO: 10143
  chr15:53079717-53079891
  hyper

SEQ ID NO: 52039 - DNA, 649 bp, Homo sapiens
  chr15:53079970-53080619
  hyper
cgaatcctcctgaaatccccggtggggttcgggctgggctcagctttcttctctgcctatccgcggtctcggggagccaggcgcggtgtctgcgctgcgccaaggagagcttccagctgaactcagaaacacctggggcttggggtttcgggcaggagacctctgctcctagacttgggggtcatttacacactctcatccccaaacccccctcccgcacggggattcagacgaaaatcgcgaagaggaataataaaacaaaatgcaaagtcctcagggagtcggcagcggagtcggtcccaggacatggctattgctttgcagctctcactgggaccttgggacggtcagcctccctctcctttccacagccaattccatgcgcagagagcgtcctaacccttacaactcgtctgtgctacacacccaccgcccaatggctctgaaactttttgcccatactcttagattgaggtcaccccagccagcgccaaaagaatgagcgcgggagggggtcacagcagccagttcggccaaacatcgacgctgctccggcacgctccagcccagcgcctgggatgtgtcagaggtacctgcgaggaacatttgcgtgcgattccacgcacgcgttgcatccctcttcccaaac

SEQ ID NO: 52040 - DNA, 254 bp, Homo sapiens
  chr15:53080736-53080990
  hyper
cgccgaggcccggccgcttagctctcggagccttccacagcccaacaccctgagccctggagtaggcaatttgctcccacagccctgtgctggcccttccaggcacagggagtcccccttctaggggtaggggcgggcgggatgaagcgcacccagccctctctcctacccttcctcctttggtcccttcggctttcgtgtaccttatctcccgcgcgcccagctccttggccggctcacctgctaagcggagc

SEQ ID NO: 52041 - DNA, 242 bp, Homo sapiens; identical to SEQ ID NO: 10147
  chr15:53081054-53081296
  hyper

SEQ ID NO: 52042 - DNA, 622 bp, Homo sapiens; identical to SEQ ID NO: 10148
  chr15:53081398-53082020
  hyper

SEQ ID NO: 52043 - DNA, 898 bp, Homo sapiens; identical to SEQ ID NO: 10149
  chr15:53082144-53083042
  hyper

SEQ ID NO: 52044 - DNA, 34 bp, Homo sapiens
  chr15:53083116-53083150
  hyper
cgttgacccggcacccttcgtcctcccagataca

SEQ ID NO: 52045 - DNA, 206 bp, Homo sapiens
  chr15:53090065-53090271
  hyper
atgatggaaaaaggaaaacaacggcccacccgacttagaaacttcttagccgctgaaaccccgcaataaaaacgggaagggggcaggaatcgggcttaagtgtaataagaaaattatttatgaaaccggataaatgacttcagagccttgatgcatttgaacctaacgctctcggctcctggcagccccggctccagctggggaga

SEQ ID NO: 52046 - DNA, 109 bp, Homo sapiens
  chr15:53090305-53090414
  hyper
cggggggcgctctgcttgcctaggcagcctccggcttgccgcccctcttcctccgtccccgccggaagagccctctagggcgctgctcgcagaagctttggaaagttgg

SEQ ID NO: 52047 - DNA, 121 bp, Homo sapiens; identical to SEQ ID NO: 10151
  chr15:53091057-53091178
  hyper

SEQ ID NO: 52048 - DNA, 491 bp, Homo sapiens
  chr15:53095559-53096050
  hyper
catttttaaaagataccaagacgtaaaagacgagaaaaacatcccgggtgctctgcataaaccacacgcaacgaaaaagctcaccgccagacagcttccagcactcgaaccaatacaagtaaagcacatttgcaaatgtgtttgactgtttttgtaggtttaagaagactacgtttttctgaccacttcaaaaaaacaaacacgaattcagccgctgctttaataacctctgaccagaggagctgattttgccaccgagttatcggtcagtgctgcgaggtcagtggcctgtgatcatgtttatagcaggtttggcttggatttggtgacacagccagcaaacctgggagattatgaaaccgtgaaccagcccagggaagtgtagtcaagtttcagtttgggcatttctccgggtgagggaatccggtgggctccatttctacaaggctcacaaacgcaggtgcagttcggccgccgcacgctgcctggcg

SEQ ID NO: 52049 - DNA, 78 bp, Homo sapiens
  chr15:53097777-53097855
  hyper
gggggccttttggggcgccttttaccccagagctcagaaagctccgggcagcggggtggtggcgggatggccagtagc

SEQ ID NO: 52050 - DNA, 72 bp, Homo sapiens
  chr15:53098516-53098588
  hyper
tgatgggggagccagggtcagcgaccccaggacaaaacggcctgctgcctcggataggagaagttcaaatgt

SEQ ID NO: 52051 - DNA, 30 bp, Homo sapiens
  chr15:54051732-54051762
  hyper
ggcgggaaggcgtgcggctgcaccagccag

SEQ ID NO: 52052 - DNA, 166 bp, Homo sapiens; identical to SEQ ID NO: 10154
  chr15:54270542-54270708
  hyper

SEQ ID NO: 52053 - DNA, 30 bp, Homo sapiens
  chr15:54270932-54270962
  hyper
ctgattgcacgagtcggatccctgggacgc

SEQ ID NO: 52054 - DNA, 169 bp, Homo sapiens
  chr15:55489220-55489389
  hyper
tgttagaccagatgcgaacacgactgtgcctccggcggccgtgtggtcaaatgcgctgccgtttgacgcaggcgcagagctgcagactagacctgttcgctgttactttggggaaatgtggttctgcgccaccttgtgaacttgctctcacagcgcctagttttttctc

SEQ ID NO: 52055 - DNA, 30 bp, Homo sapiens
  chr15:55581405-55581435
  hyper
ccaccagtcccgaccggagggcctggctgc

SEQ ID NO: 52056 - DNA, 30 bp, Homo sapiens; identical to SEQ ID NO: 10156
  chr15:55582233-55582263
  hyper

SEQ ID NO: 52057 - DNA, 30 bp, Homo sapiens
  chr15:55582555-55582585
  hyper
ggacacggcgtttccggggcaagggaatgc

SEQ ID NO: 52058 - DNA, 30 bp, Homo sapiens; identical to SEQ ID NO: 10157
  chr15:55611409-55611439
  hyper

SEQ ID NO: 52059 - DNA, 90 bp, Homo sapiens; identical to SEQ ID NO: 10158
  chr15:55699899-55699989
  hyper

SEQ ID NO: 52060 - DNA, 961 bp, Homo sapiens; identical to SEQ ID NO: 10159
  chr15:55879821-55880782
  hyper

SEQ ID NO: 52061 - DNA, 220 bp, Homo sapiens
  chr15:55880890-55881110
  hyper
cgacgctaccgggcccagctttcgcaaggaaagggcatctccgaacttcgtcggaggccacagcagcaggcgtctcggcctcgcagctagggatcggaaagatgaacgtaccatgcgaggaaactttgtaagcgggagctggagagttctcggcgggcatgtggggatccagattccccgactccgtgtccgcgtggccgtggtgtggacacctgtctgt

SEQ ID NO: 52062 - DNA, 265 bp, Homo sapiens
  chr15:56034457-56034722
  hyper
cctcctggctggatccagatccggcaagctggtgccgattggggttatgagttcacctattccctctcgcagccctaaaaagtgggggaactcccacaacagacacgggaagccgcgaggaaccgcggcgccccctgcacggcgaggctgccactaaggaaacaatataaataaagccacgtgcagccgcggcggccccggcgggctggcgacccggagtccggccggtcgcggaggcgcggacgcggccggagccgggacaatg

SEQ ID NO: 52063 - DNA, 374 bp, Homo sapiens; identical to SEQ ID NO: 10162
  chr15:56034885-56035259
  hyper

SEQ ID NO: 52064 - DNA, 284 bp, Homo sapiens
  chr15:56035304-56035588
  hyper
cgctcgcgagaagcaaggggcctgagagtccggctgggggcggagtgaggcggcggctgcagagggcgggggcggcggagtggacagcgccgcggccgcgggcctgggactactttctacatctggcccttggtctgggccagggaggtcggcgcggccggcggagggagacgctgggagggggccagtggcggccgggtcggagccctgggggaagggtacgggtcccgccggacaatgcacctgggggtcaagccccggctgagggtctccggcccgcgtcc

SEQ ID NO: 52065 - DNA, 488 bp, Homo sapiens
  chr15:56285863-56286351
  hyper
ggaggcgctccctcagcgacagcagcgcctcccgcggcgagcgggcactagcggcacccggcagcgcggcgggaaaaggccggcggcgcgcgctcctggggctgggcgggggcgcgcgtggcggggctcggggagtggggagggcgtgcggcggggctcgggtgggatgagcgcgcgcggcggggaccatggcgtggggagcgcgcgtggcggggcgcgccctcggtcccttcccgggaggtgggtggttgacgggcccgccggggagccagggagcgccgggaagcgccgggaagccaagctgcagtgttcctcagcaacaagtctcgctgagatccgacccagagttcggcctctgactagacgcctgggaatccgtgagcttaatccccgcttaaatcccaaacggaaaatcatagcgctttcttgtcggttaagggtgtcattcccataagaagctggacctggggaccgccagggaaagcctg

SEQ ID NO: 52066 - DNA, 30 bp, Homo sapiens; identical to SEQ ID NO: 10164
  chr15:56535818-56535848
  hyper

SEQ ID NO: 52067 - DNA, 30 bp, Homo sapiens
  chr15:56538396-56538426
  hyper
cacgaagctgcagccgcgggctgccctcta

SEQ ID NO: 52068 - DNA, 83 bp, Homo sapiens
  chr15:56657422-56657505
  hyper
tgcactaactaagtcgaatttgcagttaggaagccttcctgggttcctgggacagcgccgagtgctgcgagcaaaggccgagc

SEQ ID NO: 52069 - DNA, 30 bp, Homo sapiens
  chr15:56657797-56657827
  hyper
ccgttcccgccacccgttcagcaaccctct

SEQ ID NO: 52070 - DNA, 162 bp, Homo sapiens
  chr15:56757165-56757327
  hyper
accatcttggctgacgaaaaataccccctctcgtgggaccgcggccaccacctcccgccgcaaacgcagcagccagcagccccaaggagcgcacctggctgcgcgcgctcgggtgtttacgcggcgtcttggcaacggtggagctgcgcgccctccgctcga

SEQ ID NO: 52071 - DNA, 30 bp, Homo sapiens
  chr15:57210229-57210259
  hyper
tttgccctttctcccgcattcggctctgca

SEQ ID NO: 52072 - DNA, 30 bp, Homo sapiens; identical to SEQ ID NO: 10165
  chr15:57599111-57599141
  hyper

SEQ ID NO: 52073 - DNA, 662 bp, Homo sapiens
  chr15:57668532-57669194
  hyper
taggttcgtcccgacgggccgcgggcggattgaagggagggttgggcccgccggcagccccggcgggtccaggcccccggccagcccctgcccctcctcccaggagggcgggcggcgactgcggggcggggcgcgggctcgctcggcctcccggcggcgccgcggcccttgcactccggccgggctctgctggctgcggcgggagctggacgcgggaggaggcggcggcggcggtgagtgagctccgggctggagcggggcggggtgtgcgccggcagccgggtttcggggtgctaggggccgcccagggcggcgggacccccaggggttcgggctcagccaggtgcactgtgctcagtccgcgcgtccactctcggtgacccgcgccgcgcgtgtcctggggctcgaagatgcgacccggactcccgcgccgcgccccgccgagggcaggcgcagaacagatgcgggcgatccctggggaacccgcttcggggcggggtgggagggaggaggccctgcagaacctccctttagtgaagagggactttctgccttcgcacccctgcctggaccctccggctctagtgacagctgggagagactcacacgaagcagtttctgacctatcctgtcgtacacaagtcctcggcgtgctcggccgg

SEQ ID NO: 52074 - DNA, 66 bp, Homo sapiens
  chr15:57884033-57884099
  hyper
gggtcgggtgagcgcgctcggccccgccccggcccggcccggccccgcccccggccccacccccgg

SEQ ID NO: 52075 - DNA, 30 bp, Homo sapiens
  chr15:57998722-57998752
  hyper
tttgtataaaccgacgaacagctgatgacc

SEQ ID NO: 52076 - DNA, 20 bp, Homo sapiens
  chr15:58357799-58357819
  hyper
cggggtcggccttcacctcg

SEQ ID NO: 52077 - DNA, 287 bp, Homo sapiens
  chr15:58358503-58358790
  hyper
cgccctctcccccgaccccccgactcccctcagccgggccgaggtgcatggtggccagagggtcagggagaggtggcagtgggtgcgagtccccctcgcctcgggctcagaatgaggatccctgcgagcgggtcagcgcggggcggcccttgccaggcgtcgcccgcccagttgctgccctctgccggccgggaccgcccgggcggcttgcgctgtggcgggaggatatgggcagtgatcatccccggctcctccgaggagctgcatgcttcgtgggctcctttagt

SEQ ID NO: 52078 - DNA, 30 bp, Homo sapiens
  chr15:59041160-59041190
  hyper
aacacaacttcccacgagtctgcgcggcgg

SEQ ID NO: 52079 - DNA, 30 bp, Homo sapiens
  chr15:59041674-59041704
  hyper
tcacctcccatccccgccgcccaggagagg

SEQ ID NO: 52080 - DNA, 30 bp, Homo sapiens; identical to SEQ ID NO: 10170
  chr15:59042267-59042297
  hyper

SEQ ID NO: 52081 - DNA, 30 bp, Homo sapiens
  chr15:59062962-59062992
  hyper
taaaatctgcatctcgtaagaaatgcctta

SEQ ID NO: 52082 - DNA, 30 bp, Homo sapiens
  chr15:59063423-59063453
  hyper
acagagcggtagcgcgcgcccgcgcgcgtt

SEQ ID NO: 52083 - DNA, 35 bp, Homo sapiens
  chr15:59225883-59225918
  hyper
gctggcccctcccccggtccgccaccctagcgcaa

SEQ ID NO: 52084 - DNA, 30 bp, Homo sapiens
  chr15:59226394-59226424
  hyper
ggagaaaacatcatcgccctgcccatggca

SEQ ID NO: 52085 - DNA, 40 bp, Homo sapiens; identical to SEQ ID NO: 10172
  chr15:59396924-59396964
  hyper

SEQ ID NO: 52086 - DNA, 454 bp, Homo sapiens; identical to SEQ ID NO: 10173
  chr15:59397169-59397623
  hyper

SEQ ID NO: 52087 - DNA, 49 bp, Homo sapiens; identical to SEQ ID NO: 10174
  chr15:59664056-59664105
  hyper

SEQ ID NO: 52088 - DNA, 264 bp, Homo sapiens
  chr15:59664434-59664698
  hyper
ggcagccatagcaacccggccacagaaagtttcgcgacgcagaaaccgacttggaataaagttttccttggcccctcgctcgctctcccccggcccgggtttacggaaagcggcaggaaatcagagctcgcgacgtgccggctcccgcgtccaccttctccacccctggccccggcagcgcgcccaaggtgggtgcaccacgccggggtttcctgccccgtccccgggtccggcgtcctaggacgcggcgcggccaactcacca

SEQ ID NO: 52089 - DNA, 31 bp, Homo sapiens
  chr15:59664916-59664947
  hyper
ggcggggcgcatgctgcggagggcaagagtc

SEQ ID NO: 52090 - DNA, 237 bp, Homo sapiens
  chr15:59729538-59729775
  hyper
gatgaggcaaaggtcgtgtcccccgcaactccgctgaaatcctgcccaccgagaggaagcacaattatgagtgaatgggcttgtgcgtcctgatgagaatccaaaatcgagaggaaggtggaaagagccaggacgcgctgggaggggatgaagctgacgggagaagaaagggctgggaagaggaggggtgttcggggttcttcttctcgtcgtgtctgctgcgatgagacacgatcc

SEQ ID NO: 52091 - DNA, 30 bp, Homo sapiens; identical to SEQ ID NO: 10177
  chr15:59915561-59915591
  hyper

SEQ ID NO: 52092 - DNA, 541 bp, Homo sapiens; identical to SEQ ID NO: 10178
  chr15:60287044-60287585
  hyper

SEQ ID NO: 52093 - DNA, 97 bp, Homo sapiens
  chr15:60287643-60287740
  hyper
cgagtccagtgcccgtgccggggagcattccagcccagcttacctcggcaggtagaaagcacagcatcgaggctgcggaccctacatctgggctcca

SEQ ID NO: 52094 - DNA, 86 bp, Homo sapiens
  chr15:60288333-60288419
  hyper
aactcctggtattccggagtgttccttaaagactgtgaacccaaactgctttcaggggtgaagtaagtgacgagaaggtttccttt

SEQ ID NO: 52095 - DNA, 145 bp, Homo sapiens
  chr15:60288753-60288898
  hyper
gtcgggccagtgaacgacgtcagccgcaactctaagtggcaaagttttcgaaaaacctcgccgatcctctgaagatcgggttaatgatttaccccactcgccaaccacctgatgtagcctaccgctacgccgcggaggtgtgcca

SEQ ID NO: 52096 - DNA, 438 bp, Homo sapiens
  chr15:60289224-60289662
  hyper
tatttctggggcgtcggtaagtccttggggcaacctggttttcccctgctgacaagctgtgtcagttaactgcaacccaccaagagtcagccaacagcccccgcgctgctagagcgcccaaagcagaggccggccgcgaggagggccagagtgcaccgcgggggggtttgcaccgcgctggggttggcaccgcgcgctaggacccacgaagcggcgcgctagtcccaggtgagcacgaaatgagcggaaggactctgccgcggaggggcggcgagcgcctggctgcgctgcaggccccgccaagccccgccccctagccattcttagctgggggaggccagcacggatcagccgctttctttcttttctctctttctttttcaaacccgctttgtgggtggcaactcagcgggggacgcatggagacaagaaaacaaa

SEQ ID NO: 52097 - DNA, 340 bp, Homo sapiens
  chr15:60291979-60292319
  hyper
cccttgggcagtttgatttcccgccagactcagtcggagtggcctggaagagcgggctcaaactccaaaggcagtcgtgggagagtcgtagcggatacgtttcccctgacatgcgccgggtgctcgtctctgccccccacccgcccccaaaacccaaacctgcaagtcgatgttgtccggtgaccccgggaaaggagaactttctgagctagttccctctggtcccgaaatccagcacgttaaagccaggccttgcggtgctggggggctggtgggggaggcgcacagactccgaggacaaacagcccccaggacactcgggatggccatttttttaatt

SEQ ID NO: 52098 - DNA, 638 bp, Homo sapiens
  chr15:60295979-60296617
  hyper
tataacccatgcaaccaaccccgggtagtgctaagcgcaggaaaagggtcggcttcaggggaaagccgtgcctaaagttacctaacgatacaaaccggatacaacgcagaggaaacagaataccccagccaagcaatttccatgtcaaacatcatccgcgcggctgctccatctgtgaacgtgagtggtcgcctggctccctcttccgcggcggccgcttcctcataccttcacacggcgcacaccggccggcgcgtccagctgcctgcccagtggccgaggctcttccccctcgcccagtcttgagctggaagtgattcctattggccaaggtgtccatgtaaataggtgtgaaagaaaccagagctggccgggctctcccttctcgctcagtcccctccctctgcagcccccgctccccctcctcttcctcctcctcccaaggcgattgtcatatgatagctaagaagtggcacattaatgaagcgccgctacaggggtcttttctgctcctgtcaccgcttaaaactatcagatggttcgagggaggacatggaggcagccacctagctcagcggagacgcggagcccacagcagcgccctccggagccctaacacgtcgctgccaccatccgcg

SEQ ID NO: 52099 - DNA, 63 bp, Homo sapiens; identical to SEQ ID NO: 10183
  chr15:60296860-60296923
  hyper

SEQ ID NO: 52100 - DNA, 675 bp, Homo sapiens; identical to SEQ ID NO: 10184
  chr15:60297151-60297826
  hyper

SEQ ID NO: 52101 - DNA, 593 bp, Homo sapiens
  chr15:60297941-60298534
  hyper
cgtgcccattaagcccacgccggccgccgtgcccgcgctgcctgcgctgccagcgcccatccccaccttgctctcgaactcgccgccctcgctcagccccacgtcctcgcaaacagccaccagccaaagcagccccgccacccccagcgaaacgctcaccagcccggcctccgccttgcactcggtggcggtgcactgacccgcaggagcccacgccccctctcgttctcctccccaccacctcactcgccttccctggctcccagtcctgccggcccccacctgggaccgccaccctaacttgttcatttcaccttcggccaacccgccttgccccaagagaactttgttttggacccaggagaccaaacacaaacttgcagatgggccgagaggcgcgtgggagttgtcctcgcccccacatcaaggaaggccggggccacctgagccgaaccatcccctccctgaggccccgaaaccccctcctatttgaccggcgggggaaaccctgtcaccccctcttcgccgagaaaagcgcgtcttccctccgcccagatcggcggagccccgaactctgcgcagtttcaagacta

SEQ ID NO: 52102 - DNA, 39 bp, Homo sapiens; identical to SEQ ID NO: 10186
  chr15:60690304-60690343
  hyper

SEQ ID NO: 52103 - DNA, 269 bp, Homo sapiens
  chr15:60884622-60884891
  hyper
cgcggtgcggagagcgcagggagagcggatggtccgaccccggagccccctctgccgccgccgcgccgccgccgcccgagccacagcagcagctgccgcagctgcccgcccgccgagagccatcccgagccataagaggctccatgtgaccggctgacatcacggccgccgctctgtttacaccgcgcccctccgcttcctcccggggcgggaggcgggaggcgggaggcgggaggcaggcgcgccccagcgccgcgccccgccccgcc

SEQ ID NO: 52104 - DNA, 263 bp, Homo sapiens
  chr15:60885090-60885353
  hyper
aggctcgcaacccgacgccactctcccgctggcttgccggagcactcgggggcgataaatgcgccagctcgttggtggaaaagacaggtttggtctggggagctacggtcacccgcatttcctagagtgccccagctctaatcggaaggtacggcccacttctgggccgtggagaacgaagccactgggaccgtccggggagtggagtaagctcctccgaagtctttctggagagactcggcctgggcgggggaactccgccc

SEQ ID NO: 52105 - DNA, 573 bp, Homo sapiens
  chr15:61519471-61520044
  hyper
cctgttacataacccgctcgcattccaaatccaccgtctcagggtctaaatatactctttgcagccaaaagctccccgcacacaaactcaccgagctagcggcaggtccaggcccccagccctcatccccttcccttttgtcccagccctcgccgcccccctcccgctgaaaccgcggttcgccgcggtcaccctttggaaatcgcctttaattaaatgtttttcgcgtgtgtcatcctgatggcttttactgtactcgaattccgtgaatgggaaagcgcctggacagggggtgtggctaaggtggggggggggatactgtaaaacagccagcacatgatcagccatattcctacctccaactacaacatcgagaggaagggagcagttcctggggcccccattcgcctctacccagccctccccaaccgccgccagaagccgagtgcaagaggagggggcgcgctgggccggtacccaagccggggctggagaaatcctctccgtccccagctccaggcggctcgcgcgagcacgcttcctccggagtgacaggcgcgatttatacattat

SEQ ID NO: 52106 - DNA, 199 bp, Homo sapiens
  chr15:61520355-61520554
  hyper
atgcttggaacctccgagagggaaggattcccagagcagaaataagtttcggtgcttgcttttgtagacgctccctccggatgcgcgtggagcgccccacaggaccgccgccctctgcgcgttggcgcgcacacgccccccgccagcctgggcgccgggctccgaacccccggtctgcaaacttgcgcatctcccctcg

SEQ ID NO: 52107 - DNA, 717 bp, Homo sapiens
  chr15:61520576-61521293
  hyper
cgaacagctcgcccgcccgcaccccgcttccttcggcccttccttcaaatcccaaacgcaccgccgtgctccaaagaaggtgtccacgtcgcccccagaccccggagcgccccctctccacccccgggacttcccaggtcgctcactcctcccgccccccgcccagatctgagagggaccgaaaacacacccccgactcgggcagccagggccgaaactgtcaagaggagaaaaggtaaagcggaaggagggtggccataaacagatttttttgccccttcttaaaaggacactgccgctttaaaagtttctttcccgggcccccactccccgcatctccgtattttgggggagcgtatttaattgaggcaacgcagctttcctccagtgtttgcagaaaaatcaaagccaggggggtgagcccgccggctgtcaaccttcccgccgcctcccccgccccactctgctcccgcaagccgagaacgggctgcaaaagtttgcaacatttctggggggcggaggggggaggggaggggggtcctccgggctcggggcgccgccgcaggctcgcgcgcggccgccggaccccgcgccccgggcgcccgctcccggccgccccccgctccgcgcccgggctcccgccgccccctccccagcccctctccagcctcctacctctgctggtgctggaatagctctgtctgcgcaccggggcag

SEQ ID NO: 52108 - DNA, 309 bp, Homo sapiens
  chr15:61521311-61521620
  hyper
cggattcctggttcagcggggtctccctggagccggcggccgcgtccgcgccgctgctgcctggctcgctggcggcggggtcgggggctgccggagctgactccatgttttttcccaatgtagagatcgctggagatggcgagctccgagactccctctatcttctgttttcagagcaactctatggtaccaaaaaaaaaaaaaaaaaaaaaaaaaaaaaaaaaaaaaaaaaaagaaggagaaggcgaccggcgaaagcaggagggaaaaagcaggcggcggcgggcgggcaagcaaaagcgcgaggga

SEQ ID NO: 52109 - DNA, 282 bp, Homo sapiens
  chr15:61521656-61521938
  hyper
cgaaaggggacaagaggcgggtctggccacaggcagcgctagcgagagcttctccagccggcccccacacccacattccccaccctccagaccccagaccgagagccacagactggctgccaattttgggaggtggggaaaagaggggaggaggagaacagagcctcccgcgccccaatcctcccctctccccagcccagggacagaaattaaaatcggtgagatgattccgtgcctacttctgagactctctcgggaacagaactcgtccccatccgctgc

SEQ ID NO: 52110 - DNA, 515 bp, Homo sapiens
  chr15:62358991-62359506
  hyper
acctccacctgaagccggagagagaaagaactgggtctccaaaccttgctcagcaaatccagccacgtggcagagggacagggaagagcctggcgtcaggttaccaggcagcgcccctctgctcggcccactggcaagcgctcccagcggcaggtataaaagctcaggctggcagtccttgaacactggtgctgaaccccgccgcgcgcgctttgaatttcccagccgctaagcgcctctcctggtcggtgtcccaggcagaaaggtgcagagacccatctgacgcaggactccaggtattttaggagggacccatcggcttgcttaattccctgggggattcgtctgaggctctttgcctctgcaaggggagaaccagccacagtttcccggaaggaataacaattactttaattctagctgaggactagactgctatggtccaaagagtcaggaaacgattgcaaggcaatcgttggcacagagaacagagcgactgaagttacaatccagca

SEQ ID NO: 52111 - DNA, 360 bp, Homo sapiens
  chr15:62359733-62360093
  hyper
gcaccttgcgggactcgctctgacgatccttgtgcctttgtgcactgcaggtagacaagctccagcagagagtggccagatgtggtgcctggagcgactccgcttgggtcctgagtgccttcggcggagcggagactggcttctcccgggtcgggcccgcggagccaagtctcgcaccaccgccgcgtgcgcaaatgtgctcactccggaccgcatccctgagttctgcatcccgccacggctcatgccccgcctggccttggctgcgctccggaattcttgggtcgaagaagcagggatggacgagggcgccggccgcacagactgggacccgcgctcgcaggccgcgctgtcactgcc

SEQ ID NO: 52112 - DNA, 710 bp, Homo sapiens; identical to SEQ ID NO: 10195
  chr15:62456255-62456965
  hyper

SEQ ID NO: 52113 - DNA, 334 bp, Homo sapiens; identical to SEQ ID NO: 10196
  chr15:62457008-62457342
  hyper

SEQ ID NO: 52114 - DNA, 134 bp, Homo sapiens
  chr15:62683438-62683572
  hyper
gttccttctccggtgccggacactcagacctgccgatcccacgactgccctttacttggcaatctcgccacgggcgaactgctggccgctgagcgacgggggcagtgccgggccgagagcggggccaggctttg

SEQ ID NO: 52115 - DNA, 56 bp, Homo sapiens
  chr15:62684294-62684350
  hyper
gcggcgacagcagtagcgcccgcggctgcgtgttctgctctcgcagctcgtagagg

SEQ ID NO: 52116 - DNA, 212 bp, Homo sapiens
  chr15:63130455-63130667
  hyper
tggacagccacattgccgctgctagggatgcagggattccggtcactgcccctgccttcaagttgctgactgtccaggagggaacagccagccacaagcgtggtaaaggctgcagtgaagccggcacagcacactccaggcacacagagggagagggtatgggtagagctaagggagacaagcgaaagtgatgtctgcgccaagtcctcaag

SEQ ID NO: 52117 - DNA, 397 bp, Homo sapiens
  chr15:63334421-63334818
  hyper
cgcactgaccctgacgcggggtgcagcacggctgggaagcccccgggcctttggctaagcgcgccgggggacggcacaggggggcgacgcgcatccaccacctggtccgcgctctcccggcctccggcagctcagggcgggctcggttggggaccctaatggctgggtgccggccctgggagaagggcacgcggagggcggagggttgcgcctcggccccggctcggccccaacgccctctccctggcgcgcaggtttagaaacagggcggcctctccggccgccgcctcggcggctcgggtccccatatatagtcatatccaccgtcaactgggaggccggcggccggcagcgaatgggcgagcggcccccgcgggaggagcggggagggggcacg

SEQ ID NO: 52118 - DNA, 30 bp, Homo sapiens; identical to SEQ ID NO: 10199
  chr15:63335994-63336024
  hyper

SEQ ID NO: 52119 - DNA, 31 bp, Homo sapiens; identical to SEQ ID NO: 10200
  chr15:63341572-63341603
  hyper

SEQ ID NO: 52120 - DNA, 35 bp, Homo sapiens; identical to SEQ ID NO: 10201
  chr15:63448917-63448952
  hyper

SEQ ID NO: 52121 - DNA, 30 bp, Homo sapiens; identical to SEQ ID NO: 10202
  chr15:63449567-63449597
  hyper

SEQ ID NO: 52122 - DNA, 30 bp, Homo sapiens
  chr15:63449928-63449958
  hyper
ccatggcgagggagcgcccgcggccaccgg

SEQ ID NO: 52123 - DNA, 133 bp, Homo sapiens
  chr15:63674097-63674230
  hyper
ttgatgtcatcgtgcggggagggggtgggggaggagaacgccctgcccaccggagggctggcgccccagatcctaggtgagttgtagccttgacttcagcagcactctgcgggtccccggcgctcctctgggc

SEQ ID NO: 52124 - DNA, 858 bp, Homo sapiens; identical to SEQ ID NO: 10203
  chr15:63795379-63796237
  hyper

SEQ ID NO: 52125 - DNA, 30 bp, Homo sapiens
  chr15:63892795-63892825
  hyper
gcccgagtcctcctcggtaaatgagtccac

SEQ ID NO: 52126 - DNA, 30 bp, Homo sapiens; identical to SEQ ID NO: 10204
  chr15:63902646-63902676
  hyper

SEQ ID NO: 52127 - DNA, 30 bp, Homo sapiens
  chr15:64126195-64126225
  hyper
ttgggcggaactctcgcgcagccgggagcc

SEQ ID NO: 52128 - DNA, 30 bp, Homo sapiens
  chr15:64126714-64126744
  hyper
tgttcatgtctttgcgccttatgggactgc

SEQ ID NO: 52129 - DNA, 30 bp, Homo sapiens
  chr15:64443635-64443665
  hyper
ccgtccttggtaggcgcttaactcaggttg

SEQ ID NO: 52130 - DNA, 115 bp, Homo sapiens
  chr15:64454727-64454842
  hyper
aaggagagaaaggattcggaatccggcaggcgtgatctttcaccatctccccagcactgaggggtgtttgcaaaaagcctgctctgagactgccagtgtcggccccagatgggta

SEQ ID NO: 52131 - DNA, 222 bp, Homo sapiens
  chr15:64455777-64455999
  hyper
cttttttactgaggccgtcaagttactacccatttttctctcccttctgtaatcttgctgtgcttactgttgtgtatatcaatggacatcttattgtatacgctgttcttaacttcctttaccttttcccccaatagactacatttttttttttttctgcggaagggactgtgttgcatttactctgtccacagctccctcacagcgcggcagtactgagtg

SEQ ID NO: 52132 - DNA, 30 bp, Homo sapiens
  chr15:64648400-64648430
  hyper
gcagagtaccctggcgggcctaataggaca

SEQ ID NO: 52133 - DNA, 57 bp, Homo sapiens; identical to SEQ ID NO: 10205
  chr15:65067771-65067828
  hyper

SEQ ID NO: 52134 - DNA, 30 bp, Homo sapiens; identical to SEQ ID NO: 10206
  chr15:65068311-65068341
  hyper

SEQ ID NO: 52135 - DNA, 30 bp, Homo sapiens
  chr15:65118174-65118204
  hyper
tctcccctctagcccgcacacagaggctgg

SEQ ID NO: 52136 - DNA, 30 bp, Homo sapiens
  chr15:65128169-65128199
  hyper
ctgctctcggatctcgcccaacccaaagcc

SEQ ID NO: 52137 - DNA, 30 bp, Homo sapiens
  chr15:65185956-65185986
  hyper
cttcagcgccgaagccggggaggaagccgc

SEQ ID NO: 52138 - DNA, 221 bp, Homo sapiens
  chr15:65186315-65186536
  hyper
ctcccgagccattctcgggctcggccagccattgggctgggaacctgtcaatcctggttgatcttccaatgagctgtgaactggtcttccgggaggacttacaggaggctggaaacggggcctggcgcgcgcttccctctcagtgcgaggctgactggttggactcgccgggctctactgtgggccccacgctatgtttagacgcccgacgtgtcccattt

SEQ ID NO: 52139 - DNA, 508 bp, Homo sapiens
  chr15:65203767-65204275
  hyper
ccgagtcccgagaggcgcgaggaggatgagcctgccagatgccttgtgcgcatctatctccagggccggggaggctgggcgaactcccggggaggagactgggtcagggacacctgcggaactcggcgtggccccgacccgccggcctcgggcgcggaggggtgggcaggttaagagagcaggaggagggacctgcgtcctggtccgggactggggtggccggggcagctgcgctcctagcaggcggggcgtggagtctggaggagcgaccgccccgtcctctcggctccccgggccccgccccggcggacgcgcgcctcgcgcccgggcaccagcgcgcgcaggggctgcggagcggcaggatgcaggaggagctggcgtgggagaccgacggccgtgagtctgcctggaggagggaggggggcgggccgaggccgagaggacccccgcatccgtttggggagtgccaggggtgaggttggcgccctccgaacggccacctccgtgt

SEQ ID NO: 52140 - DNA, 80 bp, Homo sapiens
  chr15:65281789-65281869
  hyper
ggtcacaagcacaccgaccaccccacagcccagattcggccccagacacacactcacaagggcacgtgatcacgtgcgtg

SEQ ID NO: 52141 - DNA, 30 bp, Homo sapiens
  chr15:65282489-65282519
  hyper
cgcgttttctctgtcgtgtacagctttgga

SEQ ID NO: 52142 - DNA, 111 bp, Homo sapiens
  chr15:65321807-65321918
  hyper
ccagggaggcttctcgcggactctggagtcccggcagtcctcccagccgagtcgggccagtgctcgccactggggactcggcctcccacgcctggcgccatgagccagcgg

SEQ ID NO: 52143 - DNA, 34 bp, Homo sapiens
  chr15:65360351-65360385
  hyper
ccggtggagcctggcgggcggggccaccccaagc

SEQ ID NO: 52144 - DNA, 30 bp, Homo sapiens
  chr15:65425405-65425435
  hyper
cctcctccgcgcctcgcccacataggcagc

SEQ ID NO: 52145 - DNA, 30 bp, Homo sapiens
  chr15:65476693-65476723
  hyper
aggaaactacctcccggtcaagttgggaaa

SEQ ID NO: 52146 - DNA, 30 bp, Homo sapiens
  chr15:65578945-65578975
  hyper
gccggggtctgggccgcggctcgccgccga

SEQ ID NO: 52147 - DNA, 159 bp, Homo sapiens
  chr15:65647940-65648099
  hyper
gaagtggccgcagctgcgccccggcccgcggctaatccccgccgacgcgggcgtcccgcccccccgcccctcccgcatagcaatagtgtccgcgctgaatggcgctggctaattacctcgctcgcaccaccgcgggtgaatgagagaatccggcattgt

SEQ ID NO: 52148 - DNA, 173 bp, Homo sapiens
  chr15:65648136-65648309
  hyper
cgcacgccaaacgagggtttgatgtcgctggggcgagcgaggcaccatttcccgccaccccctcccccagagcctcggattccccagctgggcccggccccggcgcactcgcggcggcggagggaaactgaggaagcggtgcctgtctccccgaggaaataggcccttcacct

SEQ ID NO: 52149 - DNA, 30 bp, Homo sapiens
  chr15:65669008-65669038
  hyper
tattcaaacccctgcgcatcctccccatgt

SEQ ID NO: 52150 - DNA, 1338 bp, Homo sapiens
  chr15:65669326-65670664
  hyper
ccagggcaaggtctccgcgtgtgcacacttcggggaagggcaggggcacgtgagcatccccgcggctcgctcgctctcgctttcggtggcttctcctctccttcttggctcacgggctctgtcccgggtcgctccctagccacgcgccgccctccaggaatctccctcgtcttctcctgtctctcccgcgcactcctcagcccagtaccagctccaaatgcaggtcgtgccatctccgcccagtgcagccgtcagagtcccggtctccgctccccaggctgctgtcccctgtcttggctgcctcgggctatgtccacggccgggcacccagcaccccagctcgtccgcctcggtcagcgcttagccttgcggtctcccctggctcgtttccctcggtctccacgccagcccgccccgcttgctcccgcttcgctgcactccttgctcctcagtctgggctccgggtcctgccccagtcttcctccggggggttccgtcctcaacacgcccctagggcccccagcagtccggccttggtaccctctccccgtccggatccgcagggtcccccccgcgcggggtccgccctcaggtccgcgccgctctccccgggtccgcccctcgcgcccgctccctccctgctcgcccttcccctggctccgtccgcaaccgcccggtccggggcgctttcactcaccctcgctcggcgcgggcagcagcagcaacagcagcggcagcaggagccggggccagagcggggcgggcgggcggcgcggagacgcggcgcgctgcacagccatggggctctcggtcagctcggctcggcgacgcgcggctcccgggcctctcgcggctcacagcgtcccgcggggccggcgccggggccggggctggggctccggccggggccgagcccaggcggtgggggactggggccgcatgcctgctcagcagcgcggggggcgcagggggagcgccgcttgcgccatcttgcacccacccgggcgatctgtcagcctcgcccggggtgcgcgctccacactcgcaccgctcgcggccgccccgccctcctccccagcccgccgcccccctcctctctgctcccggtcccctcccccagccccctctccccggaggcccggtctggggaacaaaagagccggcgagcgctttaagcggccggacattcccggctgcgcggcggacgcgccccctgcgctttgaactgtggctggagcggccggcgccgtcccgggctgcagccgggtatcccctccccgcgggccagccggggacctggggggctgaggaagtggacaccagcggactggggagtgg

SEQ ID NO: 52151 - DNA, 30 bp, Homo sapiens; identical to SEQ ID NO: 10211
  chr15:65714802-65714832
  hyper

SEQ ID NO: 52152 - DNA, 30 bp, Homo sapiens
  chr15:65822628-65822658
  hyper
catgtccctgaagacgagtggggagagcag

SEQ ID NO: 52153 - DNA, 30 bp, Homo sapiens
  chr15:65903313-65903343
  hyper
ggccgccacggtggcgggaaggccaagcgc

SEQ ID NO: 52154 - DNA, 30 bp, Homo sapiens
  chr15:66084102-66084132
  hyper
acaggagccccccacgcgtccgacgcagag

SEQ ID NO: 52155 - DNA, 30 bp, Homo sapiens; identical to SEQ ID NO: 10212
  chr15:66084909-66084939
  hyper

SEQ ID NO: 52156 - DNA, 30 bp, Homo sapiens
  chr15:66162731-66162761
  hyper
ccatcacccactcgcgcacttgtcgcagtg

SEQ ID NO: 52157 - DNA, 30 bp, Homo sapiens
  chr15:66585519-66585549
  hyper
tcgtttggagatagcgagagcaacgaagag

SEQ ID NO: 52158 - DNA, 30 bp, Homo sapiens; identical to SEQ ID NO: 10213
  chr15:66586009-66586039
  hyper

SEQ ID NO: 52159 - DNA, 66 bp, Homo sapiens; identical to SEQ ID NO: 10214
  chr15:66586476-66586542
  hyper

SEQ ID NO: 52160 - DNA, 30 bp, Homo sapiens; identical to SEQ ID NO: 10215
  chr15:66648673-66648703
  hyper

SEQ ID NO: 52161 - DNA, 30 bp, Homo sapiens; identical to SEQ ID NO: 10216
  chr15:66679085-66679115
  hyper

SEQ ID NO: 52162 - DNA, 30 bp, Homo sapiens
  chr15:66797135-66797165
  hyper
agaggagacagccacgctcctctcagcccg

SEQ ID NO: 52163 - DNA, 31 bp, Homo sapiens; identical to SEQ ID NO: 10217
  chr15:66911653-66911684
  hyper

SEQ ID NO: 52164 - DNA, 352 bp, Homo sapiens; identical to SEQ ID NO: 10218
  chr15:66992919-66993271
  hyper

SEQ ID NO: 52165 - DNA, 31 bp, Homo sapiens
  chr15:66994355-66994386
  hyper
aacgcgaggcagaaagcgggccgcgggcgct

SEQ ID NO: 52166 - DNA, 1233 bp, Homo sapiens
  chr15:66994944-66996177
  hyper
ctccaagtgcatctagcgcctgggacctgagacggcgttggcctttcgtgcatgcaaatccagggatttaggttttgtttgggatttccttttctttctttccttttttttttctttttgcagggagtaagaagggagctgggggtatcaacaagcctgcctttcggatcctgcgggaaaagcccatgtagttaagcgctttggtttaaaaaaaaggcaaggtaaaggcagggctttccagacacatttaggggttcgcgcgagcgctttgtgctcatggaccagccgcacaacttttgaaggctcgccggcccatgtggggtctttctggcggcgcgccgcctgcagcccccctaaagcgcgggggctggagttgttgagcagccccgccgctgtggtccatgtagccgctggccgcgcgcggactgcggctcggcgtgcgcgtgttcccggccgtcccgcctcggcgagctccctcatgttgtcgccctgcggcgccccttcgacgacaggctgtgcgcggtctgcacggcgctccgcggcggagcttcatgtggggctgcgacccgcgcagccggcgcctcgctgagggaacggacccccggtaaccggagaccgcctcccccccacccctggcgccaaaggatatcgtatgttcaggtccaaacgctcggggctggtgcggcgactttggcgaagtcgtgtggtccccgaccgggaggaaggcggcagcggcggcggcggtggcggcgacgaggatgggagcttgggcagccgagctgagccggccccgcgggcaagagagggcggaggctgcggccgctccgaagtccgcccggtagccccgcggcggccccgggacgcagtgggacagcgaggcgcccagggcgcggggaggcgccggcgcgcagggggccccccgaggcccatgtcggagccaggggccggcgctgggagctccctgctggacgtggcggagccgggaggcccgggctggctgcccgagagtgactgcgagacggtgacctgctgtctcttttcggagcgggacgccgccggcgcgccccgggacgccagcgaccccctggccggggcggccctggagccggcgggcggcgggcggagtcgcgaagcgcgctcgcggctgctgctgctggagcaggaactcaaaaccgtcacgtactcgctgctgaagcggctcaaggagcgctcgctggacacgctgctggaggc

SEQ ID NO: 52167 - DNA, 31 bp, Homo sapiens
  chr15:67135310-67135341
  hyper
aaagagcattgggctccgggccagagcgccg

SEQ ID NO: 52168 - DNA, 196 bp, Homo sapiens
  chr15:67357336-67357532
  hyper
ctccgcacacgttcccgaggctctcggccggtgtgatctcaccgactagagaataaaaacagcccaggggcgccggcgccggccaagggccttgacggggatcagcaagcgcgaggccaagtgcgggccccaacttcctgggcccgggccttccgcgcgccccctctcgggctcgggtcctctccagggtgcactc

SEQ ID NO: 52169 - DNA, 199 bp, Homo sapiens
  chr15:67357544-67357743
  hyper
cgcttacttgctgcgagtccaaccctctccggcccgcaactccaaccgagccgcccgagtgtggactccgagagcggacgccacgggccgcgctcagccctcccgcccgaggcccctctcgccgtgtttcccaggacttcctccccgcgcccgcccgacttcaggtcggggccgcgcagggtcccgcgcgctccagcca

SEQ ID NO: 52170 - DNA, 62 bp, Homo sapiens
  chr15:67359190-67359252
  hyper
ggctgtgggtgaggagcgggagcctagtgattgacagattccttcttcgttctttctttgcc

SEQ ID NO: 52171 - DNA, 30 bp, Homo sapiens
  chr15:67386694-67386724
  hyper
cccaccatcccaccccgtggctcctcctga

SEQ ID NO: 52172 - DNA, 30 bp, Homo sapiens
  chr15:67466231-67466261
  hyper
tggtgatgcccccatcgaggctggacaccc

SEQ ID NO: 52173 - DNA, 30 bp, Homo sapiens; identical to SEQ ID NO: 10221
  chr15:67547279-67547309
  hyper

SEQ ID NO: 52174 - DNA, 230 bp, Homo sapiens
  chr15:67813117-67813347
  hyper
aaacaacgcagacccggggtcacgcctcgtcctgtttcaacaacaacacccaagggcttccctggagcccagggcgtgggagggagacttgggtttgagttctgcaccttgcggaggtggttagttatttaattgtcttccacctgaattttcctcaggcccaaattgatgagacctccccgaatccctcccctgcccgagttactaatgacggcgtgaggtcacacctg

SEQ ID NO: 52175 - DNA, 30 bp, Homo sapiens
  chr15:67835127-67835157
  hyper
gcctgcgcgcgccgcgccctgtgtctccgg

SEQ ID NO: 52176 - DNA, 162 bp, Homo sapiens
  chr15:68112677-68112839
  hyper
gaggcagcgcgggctcggccagtgggaggagaagcgcgcaaggcgcagctcgcatccagagtccggctttccgacccctggtgccaccgggaagcggataaaagagagagaatcttcaataatgggggtcaggaaggccaagggcagcgacgcctgcccgct

SEQ ID NO: 52177 - DNA, 797 bp, Homo sapiens; identical to SEQ ID NO: 10223
  chr15:68113276-68114073
  hyper

SEQ ID NO: 52178 - DNA, 255 bp, Homo sapiens
  chr15:68114319-68114574
  hyper
agtggaggaaaaggggagacacgccccagaggagttggaacgcaggagggaaaggggaccatacccggtagcccgagggaaaaacgaggcgagaggggagaaggcgaccccgcgctgctacccgcggaagatttatggcgcctcccgggttccaaggacaggctgcgttcgtcgctgctgccaccgccggtagtcgccgtggccgctgcgccccctgcccaggcggcccgtcgcgccccaggccatccctgccat

SEQ ID NO: 52179 - DNA, 30 bp, Homo sapiens
  chr15:68115216-68115246
  hyper
cccaggtccctgtcccggtctctggtgacc

SEQ ID NO: 52180 - DNA, 985 bp, Homo sapiens
  chr15:68115505-68116490
  hyper
ctggacgcaggtgtgcggccgcttacctggggcgtgcaggccttgggctgcggggaggcggcgggcgccgcgcgtggcccgcgggcgggcggacccggggagggcgctagcgactgcgcgggcggtgggtgtggcgccccggctctcagctgtcaggcgcgcctgccccgccactcgggctgtgaccgcgccgtccccgccgccgcgccatgcgctccaggcttcggcctcttcttccggccagtccccggcctcggggtcaacggctcagggttcgcatctccgcgcccggggtcccggcgccccgtgcccgctgagagcgggaggggccgcgggtgggagcgcggagaaccagggagcacggctgtgcgcgcgcgcggggaggggccgcgccgtcacccggagagcccggcggatcccggactcccgcccgccgctcctcccgccgcgcacctccgctcaccgctcgcccggctccagccgccgccgcactgtgagtacccacgtccggtagcccgccgcccccgcgctctgctcctgcagcttttttttcgtttagttctgatttgggctcctgtggctgttgtttttatgattatacctaaagacaccaccgcctcgctcccaccactgccagtctcccgcttcgctgccctccccaagctcgtccatctagctccgggagccgacgggggttcctcaagctgctctggctgctgctccttgtcgctgcatatggctcttcgcctgtgctttccgctttggcccccgaaattccgttcctttcctagggacccccttcttctgactccgggcccggacccccctcctctcactcagggaaaaccgcgcagggacccaggaccctcaactggggtacgctctcggctcgggcgctgtcttcactgtatgcgggccaggcatagttgccgatttcgagaaaccgagaagctgtcatttcccagcgctgcgcgccctccagcca

SEQ ID NO: 52181 - DNA, 118 bp, Homo sapiens
  chr15:68117447-68117565
  hyper
gtttatatatccagccgaaatctttctgctcaacgaacgcgggcgccagccgtgagaggagaagctcgggtttgtggaaactggcaatgttgtcccctgaagccggctcgggcaccaa

SEQ ID NO: 52182 - DNA, 241 bp, Homo sapiens
  chr15:68117901-68118142
  hyper
gcgcacggatctgggcgctgaaaaagccaggatttggcaatggctttgctgtgtggccttgggcaagtcactctgcgtatctgggtttcacttccttcccaatccgaaaacgggattgggttccttgcagcccgggcattcctgaggtctcctttaccccttctcctcccccaagccccgggggctgttgttaacggcgccaacatgggtctgagtaacaaaagacgcctgtccagggggt

SEQ ID NO: 52183 - DNA, 774 bp, Homo sapiens; identical to SEQ ID NO: 10227
  chr15:68119578-68120352
  hyper

SEQ ID NO: 52184 - DNA, 328 bp, Homo sapiens; identical to SEQ ID NO: 10228
  chr15:68120630-68120958
  hyper

SEQ ID NO: 52185 - DNA, 808 bp, Homo sapiens
  chr15:68121149-68121957
  hyper
cggttcattaaaacacgaatcattaaccggatgcgaaaggcgtcatttatgccgcggacggggcactggcgggagggaaaatgcctaaaaggaggcgggtgcagagggtggaggacactttgaacgcccctcggcttgggagccgctttgtgtttagagtaattttcccgagggcgctaacaattaccctgaatctacaagggggcaagggtgcgccgcgtgcgtcactgtgcccgctcaagtccagcgggcgcaccaacctttgccactccgtcggctttccctcttggccgcggggtagggctgggcgtctttgggccgccgcagggcgccaccctaatcgcctgtcatttctcggccgtcgcaggtgttcgcgcccgagagggatgagcacgtgaagagcgcggcggtggcgctggggcccgcggcctcctacgtctgcacccccgaggcccacggtaacgcctgtcgcggccgctggccactgtaatgggggaaccgcagacagagggccggggtcaaggaaggcctgcgaaggaagacaaggagagagacgcagagaaagagggagagggaaagaaaaataatgaaaacaaggaagctaagctagtactcccaacaacttccaatctttagttacttaaaaacaacagtgacaacgccctctccaccacacgcacacacatgctgcagtacacccagacacggcgttaaacccttaacaaaatcacgcccgacacggccttcaaatcctctcatttattcagcaagtgtgtttggccgcggggtcccctttggctaggccgga

SEQ ID NO: 52186 - DNA, 594 bp, Homo sapiens
  chr15:68125162-68125756
  hyper
gattagcctcagaatggcaagcgagcccagcaaacggcttgcaggcatcattacatggagtgattgaacttcttatcgcggcaatttccatggtttctaaattaaaaatcgaggcgtaaaattacctgggaagtaatgcctaagtttgctttaattttggttagatccatctgcctttaagcgccatcccaggccatttccttcctccgccagtctgcagttaggagctccggtaccccctcccccatccctggagttgtttctgcgcggagcttagccctggggagaggaggaagcccgggctgtgaccccggcctttcggagggtggtctgcgtttcctcactggcccctccccttgtcttccagataccctgtgtaacgaactcgaccaggagcggaaggcgcgctatgccatccagcagaaattgaaaggtgcggaagccgggaaacaaagataggaggggtgctgggtgccggccgtgctgtcgactgaatgaatgaatagtgggactagtgaggaaggccacgatccacgtggatcaggatctgtgagggagaaaagtgggaactgattttaacgggaagattattct

SEQ ID NO: 52187 - DNA, 537 bp, Homo sapiens
  chr15:68126031-68126568
  hyper
gtgagcctggagaggcgcccagagtgaccctcgcgactgtctccccagaagcccacgacgccctgcaccatttctcctgcaagatgctgacgccccgccactgcactggcaactgctccttcaagccaccgctgttgccctagggccggcctggccgcacccctgcgccctcaagccatgctgctccttgtaaatacccgctgctgcggtggccctgagcgaggaacaagccattcggacccgaccgatgtaaatacagccgcccgtccgcccgccttcctcccgggctccccggccttgcccgccccctcccgggcgtccctgtccagggccccggcttggtttccaagtgtaaataccgcctcgcgcctcaaatccccctaccccgtgtgaactctagggcatcggacctcaaggggttaactggacagacggggggcgggaggggagagcgccccctcccattgtatagccttgaacccgattgtgaatacaatgtagcaacttcgctggcgcctgccccgcactccccgtccc

SEQ ID NO: 52188 - DNA, 1742 bp, Homo sapiens
  chr15:68126899-68128641
  hyper
aagatgtcacttctggggctacggaggtgggagtgcaccggcggagcggggcggcggaacaccgtgcaacaggtgggggtgggagccgccccgcgggttctggggctcccagggtcagaatcgggcctgctcaagtgggcagcagcgagcactcaacctctccactgtgccctccagacacactcagttttcccccacagggcactccctctccgcgtttaggaccctcccttgggcccggaatggaggaggggcattacgtcacggtccttagcgcagcggtcccgggctctttcctcaagagctcgaaggcgccgagggttcatccatgcccatttccacgcctgccacaccggggaagttacctccggggcgctcacagacagggcgccctgccgggaatcccaggttcaaccagaattgtccctttagatggcgcgggcaccgccggcctggcctggcctgggagcgctgcggcagggcggaggtctcagggagtaaggtggtctccgccgggcaggcttggaaaggaaggcgggacttggagagctcggtcacagacggcctcccgtctgccccgccgctacccgaaaggagggagccccgtccgcattttctgttcggtccattttagttcgagaggggctaaggactcgccgggcctcggctggggcgtccgacgtccgggtcacggttggcaaggcctcccagcggcctcagtttccacagcgcacctcctgcttgggctacagacgacgctgcaaattgcagaacactctttgcagggaggagagtgtggatggagtgggagagagctcacggcacagggaatcattcagccttggctttcatttctcgccctcggctggctagtgggggtcccgggttgagcccttcttttatctttcctgggtctccgtttcggcctctatgaaataacacgcaggcctccgtccatgcggctcgtagaaggcgggcggcaggccccgcgccaccggccagcagctcgggaccgggagccctgggctgagggggccgggaagtttcgtggcgggttgtcttggtgggccttggacggagccggctagtaggggcgtgctctgggcctccccgaagctgtgcagacgaggagtcccgctgcgcggtacagccaggaagccagtccctagagtcctttgcgctgggggtcggagccttggagtcccaggatgttccgacggctaagaccagagcggacacaaaggagataacaatgaagagggcgccggcaaatggcgaagcatcgcctccggacaggccatctccgggcagggcccctctagggagcgggaacgtttcatatgcatgggacccaccagatccgctttccgctggaccggtggcgaaactgaggtccagagaggaagagactggagtctccaggccgcgccagggcccgcggaactgcgacggggcgggacagcgcgggtgtgggagtttgccggcccctttccccaccgcggattgcacctttggaagctgcacttttcttctctgtaaaatgggcatcaccattaccacccaggcaggaagttccgtggctgcggctcgacagaggagccaggcaaatgctccttcccacccttccttcccaactccccccaaagtggaaaagctcctaggcagctggggccctccggaagggacgccccatctgggcaggaatctctgcggactggagtcgtaggcggatccgacccaga

SEQ ID NO: 52189 - DNA, 30 bp, Homo sapiens
  chr15:68132781-68132811
  hyper
cagtgtctgcgcgacgcgaaagcatttttg

SEQ ID NO: 52190 - DNA, 72 bp, Homo sapiens
  chr15:68177207-68177279
  hyper
accccgcccgccctgccggctccccgtcgcccgccgcgtgtgcagacgcaatcgcaccggaggaattctctg

SEQ ID NO: 52191 - DNA, 280 bp, Homo sapiens; identical to SEQ ID NO: 10233
  chr15:68260480-68260760
  hyper

SEQ ID NO: 52192 - DNA, 30 bp, Homo sapiens
  chr15:68346415-68346445
  hyper
gggggcagggagaccgagggggcagtaact

SEQ ID NO: 52193 - DNA, 316 bp, Homo sapiens
  chr15:68347699-68348015
  hyper
agtaccaattactcacgcctcacgaaattagatgaaagggtgcccccttttccccgcttttctcccaccccaatctttacctgatgatggcttctttaccgtagcagatataccactacacaagcagttgggggagggggtggtggaacccttatgactggattgtgacaaatggggctccgcttgaataattttggtttagtagcaggcagttcttaactaacgcgtattatttcgaggctctgaacgcgatcttctctgtggcttcctgtgtgtgtgaacccagcagctggttatgtctcgacccagagaactg

SEQ ID NO: 52194 - DNA, 41 bp, Homo sapiens; identical to SEQ ID NO: 10234
  chr15:68521277-68521318
  hyper

SEQ ID NO: 52195 - DNA, 30 bp, Homo sapiens
  chr15:68569713-68569743
  hyper
gccctcccacatttcgggaactcagaaacg

SEQ ID NO: 52196 - DNA, 30 bp, Homo sapiens; identical to SEQ ID NO: 10235
  chr15:68570803-68570833
  hyper

SEQ ID NO: 52197 - DNA, 30 bp, Homo sapiens
  chr15:68598772-68598802
  hyper
ctccagaaagctttccggggatgtccctcg

SEQ ID NO: 52198 - DNA, 976 bp, Homo sapiens
  chr15:68723465-68724441
  hyper
tggagccggggagcccggtgtgggacggccggggccagggtaccctagggcggagagctcagggctggcttcccgctcccagccgcgcgcccctcgggccggaggttcctgccgcgccccgacacctggagtgcattaggcggcggcgcgcgtctaggcgacggcggctttccccagattattgaataattgcataattccgagcgcgggttgggaggcaatgccgggtccctaccccgggtgtcaggtaacgtttcgggggtcctgcgctgcgcgactgtgtcccgccgctgctggccgggcagacgagagctagcccccgcctaccggccatcgccccggggctttgctctgtctttggccggaggcactctgcgcagccctcacccccacccttcagccctccggggccgccgcgcccggctctccaaactttgagatgcttccccggagccaggcaggagggcagccagggcacactctcttggcgctgattcccttccccagccggggccgtgcgccctcggcgctcccgggacacccgagtgcccctggcagccgtgcgggaaccccggcatgggccttggaggcacctaaggcgcccaggagggccaccagatctgggagcttttcaactcaagcctcttcaactcttcccaaacacaccaaagagtcccggctttcaatagccttcgcacctccctctttagcgaaacttgactgaaccgctagactggggccagtccctgggggacccacgtccccaagagcagctgaggtctgaccctgggaggagggtcgcgtcccgatcctggccgctggatccaagccccgagggcccagggagggactccgagaggcaaggggaggcagagggtgggcacctacctggccacaggctgagcgcccaggccaccaccaggcccctgggcaggtccatggcccgcggcacggcggctgggtccggtgtgcagcg

SEQ ID NO: 52199 - DNA, 185 bp, Homo sapiens
  chr15:68724480-68724665
  hyper
cgcggcgcctgcagcctgcactgcgcggggcgccgggctccctgacagctgcggctcattcagaggaagtgggagggctcgagcggaggggaggggcgccggacaccactccggctcgggctctgggccagtctcggccgctctgccacctgggcaggcggcgcgctgcctcgacgcgcctgtgc

SEQ ID NO: 52200 - DNA, 30 bp, Homo sapiens
  chr15:68851670-68851700
  hyper
gactctctcattcccggagaattaaaagcc

SEQ ID NO: 52201 - DNA, 30 bp, Homo sapiens
  chr15:68870619-68870649
  hyper
ccttagggagctagcggccgagtggaaaga

SEQ ID NO: 52202 - DNA, 33 bp, Homo sapiens
  chr15:68871394-68871427
  hyper
acatcagcgacgagcggcgggcgagcgccgacg

SEQ ID NO: 52203 - DNA, 30 bp, Homo sapiens
  chr15:69059068-69059098
  hyper
aaatattatatgtgtttggtaaatgcacct

SEQ ID NO: 52204 - DNA, 30 bp, Homo sapiens
  chr15:69111496-69111526
  hyper
gggcgacaggccagcgcacggtgctgccca

SEQ ID NO: 52205 - DNA, 30 bp, Homo sapiens
  chr15:69112049-69112079
  hyper
catcttggggaagccggaaggagctggggc

SEQ ID NO: 52206 - DNA, 305 bp, Homo sapiens; identical to SEQ ID NO: 10237
  chr15:69114201-69114506
  hyper

SEQ ID NO: 52207 - DNA, 246 bp, Homo sapiens; identical to SEQ ID NO: 10238
  chr15:69136218-69136464
  hyper

SEQ ID NO: 52208 - DNA, 31 bp, Homo sapiens; identical to SEQ ID NO: 10239
  chr15:69351241-69351272
  hyper

SEQ ID NO: 52209 - DNA, 431 bp, Homo sapiens
  chr15:69366378-69366809
  hyper
gagatgggctgtggagggggacgttgggaactgcccgaccccattctcgccttttcccgctggatgtgcagctttcggaacgtgcaggggcgggagtgtctacaacctaagaaaagggccgcggtggggagcccggagcagggctgggtgcagggagcgctctcgctgcccggggcgctctgcgctgcgcgcccagtggggacagcacgccgccccgggagtctccaggcgcgggaggtcccagcagattttgcataaagggaggaatcgagtccagagaacaaacaagatactggaggtggtggcacggagaggattgattcggtttgcaaccctacgaggtcgtggccgctcggggcaggaaagcaggctcctgtctctccaggatccagcctcccgatcaccgcgctagtcctcgccctgcctgggct

SEQ ID NO: 52210 - DNA, 30 bp, Homo sapiens
  chr15:69452447-69452477
  hyper
tagacgcgggtaaccggagtgggtgggcct

SEQ ID NO: 52211 - DNA, 30 bp, Homo sapiens
  chr15:69452781-69452811
  hyper
gtcgtagtagactccgagtcctgccgcccg

SEQ ID NO: 52212 - DNA, 454 bp, Homo sapiens
  chr15:69453522-69453976
  hyper
ttagcaaggtttacaccggtgtaaaccttgtctctggaggcagatcatcggggtcttgggggttctttgagcgggcgtgggcgtccgtttcgcattgctgggatgaagaagcagtgtgtccgggttctggggagaggggtctgttcatcggtgtctccgggtgagagagcgatgtatccgttccgctggggccggggccgccttggggggttgttgggggctgagggtgtgtagcggcgaccagcgtctggccggggtttctgctttgcccggagcggggcggtaacttggcatggtctccagtcttttgggggcgacggggcgagttagctggcccccgggcagtctctcggggtgggcgcggctccgcaggcgctgggtccgctgagggcgggagagggctttggtgctaccgcgcaggctgggcagcatcctgaaacgtttttgttcaggt

SEQ ID NO: 52213 - DNA, 69 bp, Homo sapiens
  chr15:69591244-69591313
  hyper
accggcatgggtaggcgcggcgacccgcagggccaggtgcagggcccgcgagtccggggtcgccgcagc

SEQ ID NO: 52214 - DNA, 46 bp, Homo sapiens
  chr15:69591722-69591768
  hyper
cttatccttcctccaccgcccccctcccgccgcccccactttaata

SEQ ID NO: 52215 - DNA, 30 bp, Homo sapiens
  chr15:69744998-69745028
  hyper
accgtatttgcaggcgctgagaaactttct

SEQ ID NO: 52216 - DNA, 30 bp, Homo sapiens
  chr15:69745577-69745607
  hyper
cgcttgaggctgggcgctccggctccaaga

SEQ ID NO: 52217 - DNA, 77 bp, Homo sapiens; identical to SEQ ID NO: 10243
  chr15:70391278-70391355
  hyper

SEQ ID NO: 52218 - DNA, 1254 bp, Homo sapiens; identical to SEQ ID NO: 10244
  chr15:71054930-71056184
  hyper

SEQ ID NO: 52219 - DNA, 30 bp, Homo sapiens; identical to SEQ ID NO: 10245
  chr15:71056473-71056503
  hyper

SEQ ID NO: 52220 - DNA, 242 bp, Homo sapiens
  chr15:71146070-71146312
  hyper
tctgactcaggggctcggcccggagctgcttccccggcggcggggctgactcaaccccctctgcccgaggagttgtcgcgcgcagtcagcgccccgaactcgcgcgcggcccggcgccccctcggggcccacctcccgggccagccgccgcgcctacctgtgcccgcggctcggctcctcctcgctcgcgctgccccagccggggctgaggtaccgggccgggtccccggcgccccgagtct

SEQ ID NO: 52221 - DNA, 489 bp, Homo sapiens
  chr15:71146345-71146834
  hyper
cgtcctcggcctcctggatggcgacgcggatctgcaccgccgtcttgggcccgggccgagcctccccgccggactgggccatggctcgcgggactgcggcgccgccggggtcctcacgccgcaaggcccagccagccggtcggcagcgactgcgacgagggggcgggggcggtgcgagcgcgcctgccgctcggcccaggggagggacaggggtcgcggcgccccgccccgcgccgccgccgccgccgccgccgccgccaccaccccgaccgctagtggagcgcccgcgcaggcggggcctcggaggtggagggcggctttccggagctcctccgacggaggcccgtcccggaaggatccccgcgacccccgatcactccctccgtcttttcgccgctgtggggccccagcccgagaggaggtgtcagggctccctcctcctgcgccttctttcacggcgccgcagggatgggcgcagcacagctgact

SEQ ID NO: 52222 - DNA, 1126 bp, Homo sapiens
  chr15:71184310-71185436
  hyper
ctcccctcttaggtgccggggcgggcacccggtgcagggtgggcacggcgcctgccaccagcctcaggcgctgggagaagcgcaggttcttctggataaccgaagagacgtcaaaacaggctggggcaaagtggtcagagcagatgaccgagcggtcattgcctccgtaccagtcggcgcggcaaccccgcacgaagcggtcccagagcagccgcacggcccggtccttgggaaagcggaacagcgacttcccagacttggtggtgttgccgcagtgggcggccacacaacgggccggcatggcggccgtcttcggtgcgcgggagccgggttccctggaccttcgcccttgggcacgctcctcgcagcggcctcggcgaggcaagtcctcccctcctcacctgtccactccgggtcgggattgtttccttccctacctctggtcaccggaagtggcgatctggggcccccaatgggagggctctttgatatcttcctcctcctcctccctgcgctgctccccaggagccagtggacacaagcagagggatacaaatttcgcgcgggcagcgctgaggtgggccgtaaagaggaacggaccggaagtggtggtggttatagcaaccagtgtggccagcctcttccccagcttatcctcctcccaatactcccgctctgtttttatgaggctgggaaaatagaacgaggaagtggtgacgcactgggctctcacgaatacaactagaagctgcaacgactgtgtggctctatcgattcgggagaggtccagaccggaaatggtcgtttccatggtaaccctgagcaggttgcctgggagatgacctctttcgggtctctttgaatctccgctgtagcgtcacctggaaggcagatctaacagagaacctggactgtctcctatcatgattcccgggaaatatcgctctgtttctggccgggctgcgaacaacgtaagttgggccttctactttctctttcttcccactggtactctttctgactggcgtctttgtcctaggagatgggctgtattattaggaccggcaccgctgggtctactcaagctattgtctgaccagggtttgaggttcgtgggctggaccaa

SEQ ID NO: 52223 - DNA, 964 bp, Homo sapiens
  chr15:71407654-71408618
  hyper
cccgttgttgacctccggggtcaggggtgcggatgggggccggcccttcccgcggtcgccgccagggggcggcaggagcggctccagatgacagcgggaggccgcaagaggggagggaggaaggaccgagggagcgcggatcccgctctcggatcgcaaactctgagccagagctctccgcgcgcgcctgaaccgctggccgcccgcgcagcccgacgcggaatcggggcacagcgggagcccgtgcagggcgggcgcggggcggctgggcggcggtggcggccgtccatgcggcggcgctcggggctgcccggcgccgggaaccacgcgggggcgaggcgaggcgaggcggccgccggtcgctccgggacgcggaccgccaggtgagcagagccgcgcgccccgcgtcccctgcgcgccgcccgcgcggccccgacccggcttccgctgcccaggctccggctcccgctctctggccggcggggcgggctggcgcgggctacccagtgggtgtgtccggggcgccgcgggctgcgccgctccgggctcggggagccagcgcgcgcctggtccgtgcggacggctgcgcctccttctctggttctcttccttgctgggagtcttgctctgtgctggcgccggcgctcatccctccaccctcgactctagggacagtcttaaactctagggacaatccacctcagtcgtccccgggtcggggccccgtgctccccgggtcgggtcggaggggaccggcgagtgcacacccagcccgtgcgccccccacctcagcctcgcctccctcccgcctggggcccgagagccgggcaagtctcggtcagcgctccttgagtcctggcctggggcctcggatctgtgtgtctgtctgtctcagtttagttgctgcaacccagcgagcgcctggagcccgagtggatgggttgtttccgccaactctggacac

SEQ ID NO: 52224 - DNA, 232 bp, Homo sapiens
  chr15:72072596-72072828
  hyper
ttcttggcctgtgtacgggattgcctcatttcctgctctgaattttaaaattagatattaaagctgtcatatggtttcctcacaaaagtcaacaaagtccaaacaaaaatagtttgccgttttactttcatccattgaaaaaggaaattgtgcctcttgcagcctaggcaaaggacatttagtactatcgattctttccaccctcacgatgacttgcggttctctctgtaga

SEQ ID NO: 52225 - DNA, 120 bp, Homo sapiens; identical to SEQ ID NO: 10250
  chr15:72409509-72409629
  hyper

SEQ ID NO: 52226 - DNA, 30 bp, Homo sapiens; identical to SEQ ID NO: 10251
  chr15:72522192-72522222
  hyper

SEQ ID NO: 52227 - DNA, 53 bp, Homo sapiens; identical to SEQ ID NO: 10252
  chr15:72522449-72522502
  hyper

SEQ ID NO: 52228 - DNA, 802 bp, Homo sapiens
  chr15:72522951-72523753
  hyper
gaggggaaccagaacgcagtttcaatgagttacacagaaagcattagaatcaggggacacgcacagcttgaagaggagggggtggaaggaccagacttaaggaggaagaggggaaaacgagcacggaacaggcggcgcggagaaaggggaagcaagggtggaatcaatcacgagggaccgagagaaggcaggcgaggatggaggcgcattgaggattggggcaggaggaagaggatgggaccagaatgagggggtagggctggggcgggaaaggagccggcggacccgcctgatctggaaggaacggcgctggggacttctgaagagcaggccccaggcgtgaggagccgttctcctctctctgagctccactgcatcccagacgccctggatcctgcgccgccctgcctgcgtgcccggggccggccggcgcgccgggattccgcactagccgggcgactggcccttggtggggactgatggcgtagcctcctgcaccgctcacctccggcgctgaccgactcgggctacgctgcaaagacgaagagatccggagccacggcgcgtgcagctgctgtgcaaggagccactgcctcagcctcaaggttatcccgctgcgggccgccgcaatccctccgccgccccgccctctgcccaatcccggctccgggcgacccgggccccgccccctgcgtccccgcgggcgcagtcaccttcaggaggaagcgcggcggcggcggcggaacgcgcgggcaggttgccctttcggtgggactaaattctgcggcggaaggacacagat

SEQ ID NO: 52229 - DNA, 54 bp, Homo sapiens; identical to SEQ ID NO: 10254
  chr15:72523972-72524026
  hyper

SEQ ID NO: 52230 - DNA, 538 bp, Homo sapiens
  chr15:72564640-72565178
  hyper
tgggcccgatctatgccgcccggccgccgggcctgagtgaagcctgtccagcctaggaggggccctcagaacctcccggtccaagcctctcacttcgtccacccctgcggagacggggcgagccccgcacccttcccgtggcccggccgcaccgccctgtgcccgtggtggcggccacacaggccagcctggcgagtactcacggcgaccccgggccgcgcgcggccgcagccgacgggacgagcggcccgggacgccccgcgggggcggagcggcaggccaaggggcgggggccgggcctggcgggcgaggtcgcgcaccccacgcctcgtcgttccgtcacgggcgcgctcagccactctgcgcacgctcgcgcggtgacacgatggcacgtggcccgctcctgaccaacagcctgacggcctgctcctgggcgcgcctcagcagccgacgccagccttgagacgcctgcgcggcggtcgctagtcgggaaagggtgcggagtggggggtggcgcctgcgccgtgggtaggggagg

SEQ ID NO: 52231 - DNA, 124 bp, Homo sapiens; identical to SEQ ID NO: 10256
  chr15:72612097-72612221
  hyper

SEQ ID NO: 52232 - DNA, 493 bp, Homo sapiens; identical to SEQ ID NO: 10257
  chr15:72612513-72613006
  hyper

SEQ ID NO: 52233 - DNA, 30 bp, Homo sapiens
  chr15:72668398-72668428
  hyper
cacgtgaccagaggcggctctgcgcctgcg

SEQ ID NO: 52234 - DNA, 30 bp, Homo sapiens
  chr15:72766455-72766485
  hyper
ggtctacgggtttccgctcggccctcacag

SEQ ID NO: 52235 - DNA, 31 bp, Homo sapiens; identical to SEQ ID NO: 10258
  chr15:72827182-72827213
  hyper

SEQ ID NO: 52236 - DNA, 30 bp, Homo sapiens; identical to SEQ ID NO: 10259
  chr15:72827251-72827281
  hyper

SEQ ID NO: 52237 - DNA, 30 bp, Homo sapiens; identical to SEQ ID NO: 10260
  chr15:72978742-72978772
  hyper

SEQ ID NO: 52238 - DNA, 30 bp, Homo sapiens
  chr15:73075920-73075950
  hyper
agctccagagagagcgcagcgccgagcctg

SEQ ID NO: 52239 - DNA, 298 bp, Homo sapiens
  chr15:73344007-73344305
  hyper
cgggggaagcgcgcggcgacggcggcccggcttgggagccggaggtcagcggctgcgcggccggccccctcccacgggagccgcgccagggcccagcaagagtcgggcgggatcgctattgtttttggcgagcacataaatccccgggccgacccactgcgcacccaggtttcctcccggaggcctttcggtttcctctgaggccctatatagaggctccaggcccggactgtgcagaggtgcgcgcccacgccggcctcccggaccagcctgagctcggagcgcctctcgccctcag

SEQ ID NO: 52240 - DNA, 39 bp, Homo sapiens
  chr15:73611230-73611269
  hyper
cccaaggaagcaccaacgcctggccgcagggggcagttg

SEQ ID NO: 52241 - DNA, 282 bp, Homo sapiens
  chr15:73659594-73659876
  hyper
gtctccaatgcagcccagacccgagaagaccagtgactgaacccagaggaaagttcccccagcgcggtgcaggagggggcctgggggtgtctcggagcctagaggcgccctgcctctcttggagctcccagcgcaaggcaggaaagttaactccggctgggaggcagggtcaggaggaggcatgcctgccaccgcgcagggcacccacaggatcatcgctgtggccccttacctgaagtcactgtaggggtggataatccaaaatccggccgacttgaccct

SEQ ID NO: 52242 - DNA, 277 bp, Homo sapiens
  chr15:73660446-73660723
  hyper
cgagggcagtggccgcagccggatgctcctgcggctggggtcttggcggcccccggccccctcctcctcggcgtcctcttcctcgtccatgatccacgccttggcccccacctgctgcgggaggctgtagagccgcttgcgcatggacggcggcagcttgtccatggcgccaggggccggggtcggaccgggccgggggcaggagcgcggcgccgcggacgggctccaggtccgcccgccggtcagtccgcccgtggggacgcgtcctttgccgccg

SEQ ID NO: 52243 - DNA, 594 bp, Homo sapiens
  chr15:73660793-73661387
  hyper
cgagtccccgggctcgccgcgctacacctcctcccgggcccggctgggcgcggggaccccgcgctcccttcttgcctccctccctccctctggcgttcaggggcgcggcgcgccgcccggctccaggcgccccgcccccgcggggaacaatgggcgccggccggagaggctctgcggccgcggcgctcagggaaccgctccggagtgcagagcgcacggcccgcgcgggtcccgggcgtgcgtcccgcgggagggctggctgtccgtctgtctcgccgcccgggctttgtggctggccacccgcgagctcgcctcgcctcctctgccccggcccgtccggcccgtcccggggctcccgccgcaaccgagcggagcccagcgacccgccgggcttacatcagcggccgcctcccccgaagcgccctccggcagcgctcgggctcccgcgccccggaatattcatgaagccgccgcagctcgcgggttgccataggagcggctccagcagccgggcctgcctacctgggcttcttaaaggggcagcggcgcacgggccgggggctggaaaggggcggggggcgggcctggcaaggg

SEQ ID NO: 52244 - DNA, 147 bp, Homo sapiens
  chr15:73661637-73661784
  hyper
gaggcgaccgggttcgtctggatgcagagtcccggccttcccgcaaccctcctggagagggggcttccggaaatgcgccgcgtcggggaggctcccacggttttcctgtgacatgggcagggtgcgaaccccgcgccagtctttccc

SEQ ID NO: 52245 - DNA, 30 bp, Homo sapiens
  chr15:73661987-73662017
  hyper
gggagcggttgggccggttcctcggacgcc

SEQ ID NO: 52246 - DNA, 30 bp, Homo sapiens
  chr15:73926043-73926073
  hyper
ctttcatttgttagcgctcttggctacaga

SEQ ID NO: 52247 - DNA, 30 bp, Homo sapiens
  chr15:73928978-73929008
  hyper
tccgttgctgatcgcgccccctggtggaaa

SEQ ID NO: 52248 - DNA, 58 bp, Homo sapiens; identical to SEQ ID NO: 10263
  chr15:73976030-73976088
  hyper

SEQ ID NO: 52249 - DNA, 982 bp, Homo sapiens
  chr15:73976464-73977446
  hyper
ggtgggggatgggcagcgccctgctccgggagccgagggttttccccgccagggtcaggcctgggggcggggcggggcgggggcgggggccaggccgtgtgctctgcccagcgggctggctcaggcctcggtcagcagccgccaccgcggggccaatccggcctcagggacgcaccggagccgcctttccgggcctcaggcggattctccggcgcggcccgccccgcccctcggactccccgggccgcccccggcccccattcgggccgggcctcgctgcggcggcgactgagccaggctgggccgcgtccctgagtcccagagtcggcgcggcgcggtgagtgctggcgtggcgcgggcggcgcggggtggggcggcctttgtctgctgcgggccgggcctggatcccgcggaggtccgcacgttcccgctcagggctgcaggagctgagcagggcgccttccctccgggctcctgctcccctgccctcccccaggtccgggcggcccccctcgcacaggagtcccgggaaccgcgggcgcccctcctgccctgggctgtggggcccgcggagagctgggggctcccggatcctaccccgcccccctttcctcgggttgagaggggcccgggcgccgtcggacctgcagaccccggaagctgcggaccgggccgggtgggtgaatgcgcttttgcaggccccgggtctggagcgggcatgggggcagatctgtcccgtgttgaagcttaacgaagccaccggccggcgctgggaggttagcggggtctcgggtcctgcagaggaaaacgcccagctccgggaggggagcggcggggagggaaggcgagtggttaggcgtgtccactctgcagggcccagcagggcgaaggtgtgggcgactggtgcacttccacaggcagccgtgggcagcatgaggggtcagattccgggaaggacaggtagagacggctggcaggggcc

SEQ ID NO: 52250 - DNA, 24 bp, Homo sapiens
  chr15:74045074-74045098
  hyper
cgctcccacggctcagttcacgtt

SEQ ID NO: 52251 - DNA, 30 bp, Homo sapiens; identical to SEQ ID NO: 10266
  chr15:74045609-74045639
  hyper

SEQ ID NO: 52252 - DNA, 269 bp, Homo sapiens
  chr15:74219415-74219684
  hyper
ccgtccctgcccctgccggggcgcgtgggctcggacaccgtgcgcggccaggcgcggcacccattcggctttggccaggtgcccgacaactggcgcgaggtggccgtcggggacagcacgggcatggcccgggcccgcacctccgtctcccagcaacggcacgggggctccgcctcctcggtctcggcttcggccttcgccagcacctaccgccagcagccctcctacccgcagcagttcccctacccgcaggcgcccttcgtcagcca

SEQ ID NO: 52253 - DNA, 377 bp, Homo sapiens
  chr15:74219933-74220310
  hyper
ggaccgccgctactcgcacagtctgtacagcgagggcacccccggcttcgagcaggcctaccctgaccccggtcccgaggcggcgcaggcccatggcggagacccacgcctgggctggtacccgccctacgccaacccgccgcccgaggcgtacgggccgccgcgcgcgctggagccgccctacctgccggtgcgcagctccgacacgcccccgccgggtggggagcggaacggcgcgcagcagggccgcctcagcgtgggcagcgtgtaccggcccaaccagaacggccgcggtgagtacggccccggcgcccctccggccgcgcgtacccctggccactggaaactgctccgggccccccgggcccctccttaga

SEQ ID NO: 52254 - DNA, 30 bp, Homo sapiens
  chr15:74229274-74229304
  hyper
tctccaagtgtttatcgatctatccaacct

SEQ ID NO: 52255 - DNA, 191 bp, Homo sapiens; identical to SEQ ID NO: 10268
  chr15:74268223-74268414
  hyper

SEQ ID NO: 52256 - DNA, 30 bp, Homo sapiens; identical to SEQ ID NO: 10269
  chr15:74284466-74284496
  hyper

SEQ ID NO: 52257 - DNA, 30 bp, Homo sapiens
  chr15:74284717-74284747
  hyper
cccgcttccgccgtcgcatggctccccctg

SEQ ID NO: 52258 - DNA, 30 bp, Homo sapiens; identical to SEQ ID NO: 10270
  chr15:74287164-74287194
  hyper

SEQ ID NO: 52259 - DNA, 30 bp, Homo sapiens; identical to SEQ ID NO: 10271
  chr15:74392490-74392520
  hyper

SEQ ID NO: 52260 - DNA, 380 bp, Homo sapiens
  chr15:74420292-74420672
  hyper
accctctgcgctagcggcttggaaccttgtcaccctcccctcccccacccctacttccacacacctgattagttgtctgtttctttaatgatcaaagacgtgggcggcggcgggatgaggtcttggttcccggctccacagccctccctaactgtcattattaacgttataaacattagacccgcttctgcgcgccggacggcgccggacgaggtgcgcgcagtcttctagctgagctcggaggcagatccagaagtcgcggctcccaccccaggcctcggcggactctgcctggggcgactcgggctccagccctgcccgggcgggcactgggctctccagggtcgaaggcaggggtaaggggcgtctttcccccaggg

SEQ ID NO: 52261 - DNA, 229 bp, Homo sapiens
  chr15:74421724-74421953
  hyper
ggtattgatctccacggaagccccaaaccctcgccatcgagagacccccatggcccggggtgatggctgtggggcttggtgctcccagagagctcagtggctacagaatgggtggggattctgcgtgtctcccggagcctgaacccctttcctggttatggccggtagctgtctccagggctaacgtgggcagcgcaggggggcggaaaccgggttttagccaaatgcc

SEQ ID NO: 52262 - DNA, 971 bp, Homo sapiens
  chr15:74421979-74422950
  hyper
cgtcgctgaaagaaatgtcggggtttcatcagagctagggagcgacagtcgggaacagcgagtctgccgaagccggctgttgtgtgagggtgtgagacggcggggcggtgaggggccaccgcggcttgggggatagtgcgtgtggggttgaccgtgtgtctgcttgagaggctgtgaagatatggggggcagatatgggagaaatgctcgggcctgaagtccccagcccaccgtgctcaagagtagcggacgttttgccaccatccttgtctgtgctactgtctgctgcagcttccgtgccccgttctcctggagcaggcaagacctggagtgaggtgcttgggtgcgctcgagagagcttccccctgctccacctgtcccgcggtgcgcgcaggccaacgcgtcgggcagtgggcttcaagcgctggtttagccacaaaagaccagaagtaaagagttccggcttaagaggctgggcagggctgcggtgggctggggaggggggtgtcccttcccagcacgccctgcagggctgtgcgttctggtgtcgggttagactagcaggcggggcgggggggttggggcggcggggcgggggagactagggcttatatcagcccagatccaggcaaaaatggtagggagggtgcggcgctctgctaacactatcaattatgcatcatgttgaacgtggcttcggggaggaggcggctagcagcggggggtgcgggagggaagggtccgcgcgagctcggctgcgcgcagctcagcgggtcccgctcgaagtctgtcggtgccaccgcctgcatttgcaaaaagagtttaaaggcaaagacacgccttccccccccacttcagccgcgcgcctttccttcccccaaattcctcaaagatggtttgtctcacgtgttgcagggcgtaaaagcggcttgcattcaattagcagcgaagctcgcgggcgctggcgggac

SEQ ID NO: 52263 - DNA, 514 bp, Homo sapiens
  chr15:74428168-74428682
  hyper
cagaagccgggattcgtggcaacccctagtttttagttccaaagcctcctgccggcagggaaccaaatccttctgtcctcccacccccaccccacttctggccagttggagtccagcccggtgcctggggcgcctttcagctccgcgctcagattttcctgttttcgttgttttcaaagacagcgacatttcgggtctggtgctaacacccccttcccagcctctgggaaaatcgagtgtgtgtgtcggggggtagggagggaatgcgttttctgtcgtctctctcctaacttaaagcgccgcaggaccgcgcgccccttggcggctgagcctgtggacttggtcgcgggccaatttcgttgtccgtgtgttgggctttccggaggtctgtgcgcccaacagcgccgctcccgcggctccacccgacccagaccctagctggaaagcgccggaggcggaggaagctgactgtggcctcccgggccgcggctctctggagggctcgcgccctagt

SEQ ID NO: 52264 - DNA, 361 bp, Homo sapiens
  chr15:74428929-74429290
  hyper
aaggggaggggcgcggcgcggcgactcggggcggggttcttttttccattttgaaagaaagcgtcggggttggggtggggggagtttcagtcctcgggatcagccctctccgcgaagcgcagcacaagcgcgggcctgggacggagtagccccccggagcccgtgcccttttctaaacgcgtctgtatgcagtcaataaaacaatcgatttgaactgggctcggtgactttttgtcaggggacagagggaggaggcctgggcgatgaaggaggaaaccgcggaaggaaggagcccccccagagcctcccgttggaatcttttgagtgatttcctgtttgcgtgaccatcctgtgatttttt

SEQ ID NO: 52265 - DNA, 30 bp, Homo sapiens
  chr15:74473110-74473140
  hyper
gggagggcgcaccttcgtcttcctcccctg

SEQ ID NO: 52266 - DNA, 30 bp, Homo sapiens
  chr15:74583574-74583604
  hyper
tgttgtctgagcttcgcctacagctgaaga

SEQ ID NO: 52267 - DNA, 167 bp, Homo sapiens
  chr15:74658229-74658396
  hyper
agccagtgctccagcgcccccgtaacacctcaaagcgcacggagtccgtgttggggaacttggcggcagagtgactgggacctaggacctgcggtggggccgccgccgcctccgcggggccgagcgcctggacctcgccctgaggtaaacgcgggtcgacccggggg

SEQ ID NO: 52268 - DNA, 87 bp, Homo sapiens
  chr15:74658501-74658588
  hyper
cgcggcccgggcggcggcgtgcgctgggaggaatgctgggtctgtcgctagcgccaaacttgaccacgctgcgaccttttcactctg

SEQ ID NO: 52269 - DNA, 129 bp, Homo sapiens; identical to SEQ ID NO: 10276
  chr15:74685055-74685184
  hyper

SEQ ID NO: 52270 - DNA, 476 bp, Homo sapiens
  chr15:74725647-74726123
  hyper
gcctgcgccccgcgcgccagcagagcccgcagctcaaaaggagggtacccgggttggggtcccaggcggggaaaggtcctccgccgaagcccccgagccagaggacccagagtggctcggggccgagagaggggcccgccccctcccctggcgcccgggcgttgcggctcctggctgccagggacttggtgcgacttagccggggctccggcccccgccgctcgctcgccgcagcgttacagccggctctggtgtgccagcgtgtacactcacacacactcacccaaacccacacgctccacgcggggacagcgcggggacagcccgggacccgcagagctgcgcgcacgcactccctccgggtgcagcacactccgcacccgccccgcgcagcgtctgatcccgcgcctgaccggccgcgcggcgccgcctacctttccagacggcgaagatgcggggtccgctccttaggtggc

SEQ ID NO: 52271 - DNA, 30 bp, Homo sapiens
  chr15:74753772-74753802
  hyper
gccaggttggaacgcgctgctggacactcg

SEQ ID NO: 52272 - DNA, 30 bp, Homo sapiens
  chr15:74833616-74833646
  hyper
ggggcctgagctgccgcctcctccgccgcc

SEQ ID NO: 52273 - DNA, 30 bp, Homo sapiens
  chr15:74912312-74912342
  hyper
acccagctgaccagcgtccccatccccctt

SEQ ID NO: 52274 - DNA, 124 bp, Homo sapiens
  chr15:74988694-74988818
  hyper
cgtgacagcccctccgtgctaaactgcagctgtgggacttaataagtgcgacaaccccctgatggattaaagaaaacaagatattcctgccgtggtcgatcttcaaagcgtatcagcttcagcc

SEQ ID NO: 52275 - DNA, 138 bp, Homo sapiens
  chr15:75017909-75018047
  hyper
tgtacgtgtggccacgcctccttccctggagcgagctgagatggagggagaagcagcctgaaccgggctggtctctctgggattggagagaaaggtggcggagggcggcgggggtggggggtcgggtgggcaagaacc

SEQ ID NO: 52276 - DNA, 8 bp, Homo sapiens
  chr15:75018311-75018319
  hyper
cgggggcg

SEQ ID NO: 52277 - DNA, 30 bp, Homo sapiens
  chr15:75018675-75018705
  hyper
gcggcggggggccacggaaagactcgggcc

SEQ ID NO: 52278 - DNA, 470 bp, Homo sapiens
  chr15:75075796-75076266
  hyper
cccattttgtacacccgggaaccgaggctcaaagggagaagttgctaccccaggcctctagtggagttaggctggctgtcctttcatccccagctatacagggctggatggctgtgggtggaaggaaaccaggcaggcaccttcacccactggggacacaggcccccagcccggccccagagggaccttgttggttgagcacgtgcttccctgcagagggctggagggagtgaaagggcttccggctccagctgtggctgggtcagctagcaggagatgtggggaatgtgtggtgtatggccatctgtgtggtgtggcaggaaggtccggtcctggccccggctctgagttgaaacaacctggtggtcagtcctgacccagcactcgccacacctatggcccagctggcacaggagcagccaagttcaggatataaatggggtcacatgggaaccgtggaagctctgtct

SEQ ID NO: 52279 - DNA, 30 bp, Homo sapiens
  chr15:75119003-75119033
  hyper
cgcgtggtagcaggcgcccggtgccccggc

SEQ ID NO: 52280 - DNA, 31 bp, Homo sapiens; identical to SEQ ID NO: 10279
  chr15:75119483-75119514
  hyper

SEQ ID NO: 52281 - DNA, 30 bp, Homo sapiens
  chr15:75165609-75165639
  hyper
cagcgggcgaactccgcgaacgctgctgcc

SEQ ID NO: 52282 - DNA, 30 bp, Homo sapiens
  chr15:75198941-75198971
  hyper
atggagggtgcgcgcgtcaccatgtatggc

SEQ ID NO: 52283 - DNA, 321 bp, Homo sapiens
  chr15:75230420-75230741
  hyper
gagcgggcgggggccggacaggctcacagcgggcggagcacgtaggcccgcccactgcgactctggcgcgtgggcgggaggagccaccgcgcggccggcggcggcgggggctacggcggcgcgctgaggacaaactgttagcctcgcgtcccgccttgtctctggtcaggtgacgtgcagctgccatcctgtaagtaggaatggaggcgagggaggagcaaccgaccgtgatcttgttcgagtcaggcccaggagggcacttaatcacctcaaaataggaatgacagcaataacaacaaactataataaaaaatacgtact

SEQ ID NO: 52284 - DNA, 268 bp, Homo sapiens
  chr15:75248822-75249090
  hyper
gcccggcgccaggtctgcgaaggggccggagcccgggccgcctccctcggccccgcaccccgctggcgcctcttcggagcgcaccttacggaagttctccatgcgccgtcgtcgccgggaccgccggctttgccatggggcggcctcagccccggggctgcatggccgccggtcgcgccttgcaagggccagcaggggtaagggcgccggagcagcgcagacgccggcgggcgggctgggacggcgcgatctcggccccacttctctc

SEQ ID NO: 52285 - DNA, 30 bp, Homo sapiens
  chr15:75249899-75249929
  hyper
cccttcctcccaggcggaattcgctcaggc

SEQ ID NO: 52286 - DNA, 365 bp, Homo sapiens
  chr15:75251048-75251413
  hyper
tgggagtggctgcggcgactggaccttggcaccgcaatgtgtgaatggctgaccccctccccgtctcctggtgggatcaggaaccctcggggtatgctccgaaccgggacttcggtctcggtccagtctccatgggccccacacagcggtgggggctggaggcacagcagccttgggaagaaacaaagactgtccgcagcgcgtagcggggcgtggagaaccgagggctgtgtaaggtcaggccctgagaaaaagcccccgaaaggctggaagttacgttggaacgggctggttgtggaaggagcgagctctccgtccccgggagtatgcaagtttgggctgcacgatcacttggaagggattgg

SEQ ID NO: 52287 - DNA, 342 bp, Homo sapiens; identical to SEQ ID NO: 10282
  chr15:75251478-75251820
  hyper

SEQ ID NO: 52288 - DNA, 30 bp, Homo sapiens; identical to SEQ ID NO: 10283
  chr15:75315709-75315739
  hyper

SEQ ID NO: 52289 - DNA, 22 bp, Homo sapiens
  chr15:75471217-75471239
  hyper
cggtttccccatctgtgaaacc

SEQ ID NO: 52290 - DNA, 30 bp, Homo sapiens; identical to SEQ ID NO: 10284
  chr15:75495097-75495127
  hyper

SEQ ID NO: 52291 - DNA, 254 bp, Homo sapiens
  chr15:75640557-75640811
  hyper
cggccgcggggatgtccggtccgtggggcaggcccggttctcgctgcggccaagcggccgattcggccgctcccgccgctcccccgcgccaggccgagcttcgctctttccctcggtggtgagcggccagatccaggcgggtcctaagtgtggggggaggggggcgcagggaggggcggccacgcgatcctaagaccctttcagatggtgggagagcctggagaaagagacagcgtgtgcggagggggtgctcc

SEQ ID NO: 52292 - DNA, 30 bp, Homo sapiens
  chr15:75660374-75660404
  hyper
taggcctgtggccccgcccacccgctgggc

SEQ ID NO: 52293 - DNA, 30 bp, Homo sapiens; identical to SEQ ID NO: 10286
  chr15:75743121-75743151
  hyper

SEQ ID NO: 52294 - DNA, 31 bp, Homo sapiens; identical to SEQ ID NO: 10287
  chr15:75745114-75745145
  hyper

SEQ ID NO: 52295 - DNA, 30 bp, Homo sapiens
  chr15:75871792-75871822
  hyper
agggcccggcggagcgaggacgcagtccgg

SEQ ID NO: 52296 - DNA, 30 bp, Homo sapiens; identical to SEQ ID NO: 10288
  chr15:75932567-75932597
  hyper

SEQ ID NO: 52297 - DNA, 30 bp, Homo sapiens
  chr15:75933007-75933037
  hyper
tagtccccgccgcccgccagcgtcaggtcc

SEQ ID NO: 52298 - DNA, 356 bp, Homo sapiens
  chr15:75939284-75939640
  hyper
cccacttgcctcttctcgaagattctctacctgaccacttctctccttgctgccgctggctagcacagaacatccagtccccgctgctgtactaagcaacacggaaccgggtggcacctagacttgttccctgtcgctgcagatgtagagtagtgtctttccctccttccaagctagtcgcccagggcagggtcgccctgtctggctagggtgctgcacccgcagctctcggtatcttaggtcagacgcctggaacgcgcaggccgtttctgttcctccggaaaacaatctctgagctgcgccacgacccgtccctgcggagcaggagtggggaatgggaaggtgggaaggcgagt

SEQ ID NO: 52299 - DNA, 73 bp, Homo sapiens
  chr15:75939671-75939744
  hyper
cggcggctttccacgcacccccctccccccaccccgatctcccgatcctggctctggcgcggtgctccttgca

SEQ ID NO: 52300 - DNA, 220 bp, Homo sapiens
  chr15:75976175-75976395
  hyper
ggggccataatgttgcggggcaggaccccagcactaggcttctggagcaaacacaggtagatggcaccacctggtggctgtgctgccacacagccgtcctggcctgtggttccagagcactgtgtcccactctttggcggcttccgcaccaccaggccacccgctacgggcacatcctagaccaccaaggccccgcccccacccccgccccaggcacccc

SEQ ID NO: 52301 - DNA, 30 bp, Homo sapiens
  chr15:76005072-76005102
  hyper
tgggggccgcggcccggactgcatcccggc

SEQ ID NO: 52302 - DNA, 30 bp, Homo sapiens
  chr15:76050980-76051010
  hyper
atgggctgctggagcgggaatgagggggcg

SEQ ID NO: 52303 - DNA, 59 bp, Homo sapiens
  chr15:76136831-76136890
  hyper
gttgagtgtgtattcgtgtggcccctcccttgtgtgtaagcctcgaaaatggataggtg

SEQ ID NO: 52304 - DNA, 72 bp, Homo sapiens
  chr15:76627464-76627536
  hyper
aaaaaaaaaaaaaaaaaaagccggaccggtgagaagactagacctcctaaaggtggaggcggagctcaaaag

SEQ ID NO: 52305 - DNA, 512 bp, Homo sapiens
  chr15:76627575-76628087
  hyper
cgcggggccggtgaggaacgttcaccgtggaccatggtcgaataatgttagcgtgcactcggggcctcgccctagccttctgcaaagcctcggcctgcgccctcggctgcatccgtttcgacgccaaccaacctcatgctcttagtagaacggcagtagcgaccgcgccctcaggcccacaagcccgaaggtctgggcagggtctggaatggcggtggagacactttatccgcaggcgtttcacctcgcgccccacccaggcgcacaccaagttcttggtactccttttaatgggaaaacaagaacagacaccatggttggataaatgttatttataattcatgggccggtctttgaaccctttcaaacaaaacccacagcgatttctttgaaagaatgcctggactgtgctcagagctctcagattttctcaggaccaacgagccgccgcctcgcagataccactgtaaattacccagcgccttacgttcgtttctgattatttgcattgc

SEQ ID NO: 52306 - DNA, 699 bp, Homo sapiens
  chr15:76628326-76629025
  hyper
ggaggggcagcagcagcggcagcagcagcaaggatggagtcaggacccgtcccagtcccgggtgagcgcttttggatctgggttctggctcaacccacgtaatgccccaatctaaagttttctacgtgtgtgtggataggaaagtctaaatagagtttatcagaacccaggtggtcattctctacactctctctagcttggacccgaagaacaaaggcacatgagaggagaaaggtgaccagctggacgatgacggtcacgtccaaacggatcccccttgtcctcggctctctcgtcctgagagtgggtttaatttttttttttttaatttatataagaagggagctcttaaaggagagccatctccaccctcaggtatccatcacccagctccagcgcgcctgggaaaaccgccccgaaagtccaagaggaagctcagagttgtaacggccgcggagccagctcggcggtgacgcaaggtccagtccagattgccaggcccggggcatgagagaggatccttgtaggtttcggaggtgggggggctgcactccattgttcactccgggccaatcagggttggcccacttcctcccagccaatctcccttcacccccagcctccaacccaacccaccccgcccatcagcccctggatccccatcacctcccccgcatccccggcagttctggggaagct

SEQ ID NO: 52307 - DNA, 65 bp, Homo sapiens
  chr15:76629162-76629227
  hyper
gggcgcgcgaccctcgtccttctgcccctggccgcacactttgcgcacatctctttttctgcatg

SEQ ID NO: 52308 - DNA, 623 bp, Homo sapiens
  chr15:76629501-76630124
  hyper
gatgacttcgggctgcgaaatctgcttctgttttgcgcaaaggcaattaggtttgatttagggatgtgggtttttttttttttggttgttgtttgtttgcctttcggtttttcaaagctaggaagctttctttcgcttgctctgggatatttaaactaagaaatgtctgagaggatgagcggggactgccgaaagacgatgtgtctgtgttgggataggaggcagccgctgtgagtgggagtgtgtgagcggaaatgccaggacagcaccgttaggtgttgatatccaggcgtccgcagtgcctgtgtatttactctcttcttagtttcgtgtttgcgtttagtttcaagacacgtcgacaaaacgactgtcattaatgaatgtaataacgaaatatttggggtgggggacagaagaaaccttcagcaatccacaagatactggtttttcgtttccaatgccctggacctttagagagctcatcatctttccttatggtcgcaagtcttgaaagaaagagcaagagagcgagcgggttgggttggggctggagtagccgaggccggcctgggtccgggcagtcaggcctgacgcggccccgcgcccttccccggcagagaagc

SEQ ID NO: 52309 - DNA, 361 bp, Homo sapiens
  chr15:76630519-76630880
  hyper
ggagccgtagcagccagggagatgagggcggccgcaggcccagcgctgacaccgccgcaccttgggcccgcaggctgttcggcatcaagtgcgccaagtgccaggtgggcttcagcagcagcgacctggtgatgagggcgcgggacagcgtgtaccacatcgagtgcttccgctgctccgtgtgcagccgccagctgctgcctggggacgagttctcgctgcgggagcacgagctgctctgccgcgccgaccacggcctcctgctcgagcgcgccgcggccggcagcccgcgcagccccggcccgcttcccggcgcccgcggcctgcatctgcccggtaagcgcgccggggcctgtgccgg

SEQ ID NO: 52310 - DNA, 638 bp, Homo sapiens; identical to SEQ ID NO: 10294
  chr15:76632517-76633155
  hyper

SEQ ID NO: 52311 - DNA, 261 bp, Homo sapiens
  chr15:76634550-76634811
  hyper
gctccctggcggcttcgcccgggctcctagcggggaaaaggaaggggataactcagaggaacagacactcaaactcccaaagcgcatgattgctgggaaacagtagaaaccagacttgccttgaaagtgtttaagttattcgacggaggacagagtatgtgagcctttgccgaacaaacaaacgtaagttattgttatttattgtgagaacagccagttcatagtgggacttgtattttgatcttaataaaaaataataac

SEQ ID NO: 52312 - DNA, 267 bp, Homo sapiens
  chr15:76634842-76635109
  hyper
cgcggcgggagggccggcggaggccagttcaggggtcaggctggcgtcggctgccggggctccgcgtgctgcgggcggggcgggcccggtggggattgggcgcggccgagggggtggggctgggcgcatgcgcgctgagggccctcccagaagcaggagcgccccattggcgacccctgggcacctggcggcccaggcccgcgggcaggaggcgggacccgtttgggcgggaaacctgcggcacttgtggcggttgagcggcggact

SEQ ID NO: 52313 - DNA, 155 bp, Homo sapiens
  chr15:76635575-76635730
  hyper
gaagtggagggggtcgggggtggcccgggtgggagggagctgggaatggcccctggatatgccgtgcccaggtcacttggtgtgacatttcaaacccctgcgacttgttttcttgaaaactggctttagtgatcgcaggaaataaccgagagata

SEQ ID NO: 52314 - DNA, 261 bp, Homo sapiens; identical to SEQ ID NO: 10296
  chr15:76638235-76638496
  hyper

SEQ ID NO: 52315 - DNA, 378 bp, Homo sapiens; identical to SEQ ID NO: 10297
  chr15:76638855-76639233
  hyper

SEQ ID NO: 52316 - DNA, 30 bp, Homo sapiens
  chr15:77196825-77196855
  hyper
tgctcacaaacaggcggcctcatctcagct

SEQ ID NO: 52317 - DNA, 30 bp, Homo sapiens
  chr15:77224349-77224379
  hyper
ggagggccgggcctcgcaccgcggctgccg

SEQ ID NO: 52318 - DNA, 30 bp, Homo sapiens
  chr15:77362705-77362735
  hyper
tggtgacagtcagccggttctccacacaca

SEQ ID NO: 52319 - DNA, 30 bp, Homo sapiens
  chr15:77363284-77363314
  hyper
gcactggcccatggcgccggtggcccgcga

SEQ ID NO: 52320 - DNA, 210 bp, Homo sapiens
  chr15:77711491-77711701
  hyper
tctttaaaaaacaacgaatcgcaaaaagtaacatttaacaggccagaggcaggcgggggaggagggtctctcccggtgctctcagcaatctttaacgtagccaaaggaggaaaaaacgaaatcaagctcccagacggatggtgcatgcgacgagaggggagggggcagacgcggttcagacggcaagtccccatcgaaggaggaaagaaa

SEQ ID NO: 52321 - DNA, 30 bp, Homo sapiens
  chr15:77713607-77713637
  hyper
cttggtgccattcgcggagacattatcttg

SEQ ID NO: 52322 - DNA, 30 bp, Homo sapiens
  chr15:77789292-77789322
  hyper
gcgggaggacggcccgggacccagtgctgg

SEQ ID NO: 52323 - DNA, 143 bp, Homo sapiens
  chr15:78110976-78111119
  hyper
gcccgggcacgtcgccgcactcccccaactgaaccttggtgtcttcctcctgcctgcaaagacatcccaggccctgggcctgggagctgtccccgcgcggtcctgcctgaccctagcggggtcatagtagtctggcgcccgga

SEQ ID NO: 52324 - DNA, 41 bp, Homo sapiens
  chr15:78111195-78111236
  hyper
cgcacccctccgcccgccagacggcccggcccgcgcccccg

SEQ ID NO: 52325 - DNA, 322 bp, Homo sapiens
  chr15:78111546-78111868
  hyper
cggctccccggcctgcgcccctgcggccctggccccgctgcagcgtcccggcccggccacactcaccgtcccgggcgcgccgtccgcgcgcggctccgctccgggccggcatcccccggctcggctgcctccggtccccgctccggcctcggttcccgctccgcagggctcggctccgcgatggtggccgcggcggcgagcgcggcagggagggcgtgtgtatgcgcgtgagagcgcgcagcgtgtgcatgtgcgtgtgcgcgggagggtcccggctcccctgcgcgtcccgctcctgcctcctgctcgccacgatgcgatg

SEQ ID NO: 52326 - DNA, 131 bp, Homo sapiens; identical to SEQ ID NO: 10299
  chr15:78111916-78112047
  hyper

SEQ ID NO: 52327 - DNA, 31 bp, Homo sapiens
  chr15:78112409-78112440
  hyper
cgcggggcccagggttcgagcgcgcagtggg

SEQ ID NO: 52328 - DNA, 30 bp, Homo sapiens; identical to SEQ ID NO: 10300
  chr15:78112803-78112833
  hyper

SEQ ID NO: 52329 - DNA, 448 bp, Homo sapiens
  chr15:78236715-78237163
  hyper
ctgtcttacccgccccgtacccccgcccctgtctcgggagcggagtagcggtggacttttctcacgcccgcacacactgtttgcggagaggccagggcagacaacctccacccgtttccggagccactggcgccccctcattcccgctccagcagcccatgcctcgcttcacccctggtgcctcatcatcgcaccaggaagccagggcccgggaatttctttttccggtccgacagggtcaactgagtcgacgatcacttgacttggactaacggcctctgggagggcggggcctgctcgagtgaggccgggagcggaccgcagcccgctggaggtgccgggggcgaaatgctggcgtctcctcctccgtctcccagaatccttccctggaaaaaaacagcatccaccgtcagtttaactgaggaccgaattaaggcattaggaaaga

SEQ ID NO: 52330 - DNA, 30 bp, Homo sapiens
  chr15:78370171-78370201
  hyper
gaggcagggtcctgcgaccagcaccccgcg

SEQ ID NO: 52331 - DNA, 30 bp, Homo sapiens
  chr15:78441797-78441827
  hyper
gcaggcaggcaggccgcgagggctggcagg

SEQ ID NO: 52332 - DNA, 189 bp, Homo sapiens
  chr15:78556920-78557109
  hyper
cgtggaagtcggtccggcgcggggcggggggcgggcgggagctacaagcggcggcggcggcggcgaccgtgaccgtgacgcgcgagcgggcggcgggggcgcgggccaggggcgcgggccagggtgccggcaggggcgtccggggcgctctgaccggcctcgcccgccccccccgcagacacaagatgg

SEQ ID NO: 52333 - DNA, 111 bp, Homo sapiens
  chr15:78632557-78632668
  hyper
ggctgggagttgagcgcataccgagtaggggctgcgggggagcgggggcagggccggcggggcggggccagaagcccggcggggttgggggcgctctcctagtgactcaag

SEQ ID NO: 52334 - DNA, 193 bp, Homo sapiens
  chr15:78632683-78632876
  hyper
cgcaaagcgccagtctccgccttgcgagctcagagtgtgcccgctgcgccgccgctgtccgtacctgccgccgccgccaccgccaccatgcccaacttcgccggcacctggaagatgcgcagcagcgagaatttcgacgagctgctcaaggcactgggtaagctggtgcagagggcgcgccccgacggggaga

SEQ ID NO: 52335 - DNA, 30 bp, Homo sapiens
  chr15:78633077-78633107
  hyper
tgcggactttatctcgtgctagatcatagc

SEQ ID NO: 52336 - DNA, 30 bp, Homo sapiens
  chr15:78731089-78731119
  hyper
gtgttcgggtctcacgcagctagatgttga

SEQ ID NO: 52337 - DNA, 30 bp, Homo sapiens
  chr15:78799492-78799522
  hyper
tcacttccaggatacgtgcctccaacagaa

SEQ ID NO: 52338 - DNA, 30 bp, Homo sapiens
  chr15:78800230-78800260
  hyper
ccccagaatgaaagcgtggcacccgagaag

SEQ ID NO: 52339 - DNA, 30 bp, Homo sapiens
  chr15:78833161-78833191
  hyper
cgtcctcaggagttcggtacgtgaaagtta

SEQ ID NO: 52340 - DNA, 146 bp, Homo sapiens
  chr15:78912225-78912371
  hyper
gaagggtcccaggcaggaggtcggttgagagcgtatggcgttctgagtagtgcaggcctcggcaccgagggcggaaagcgctctgagctcacagccgcacgacagaccgccggcctgggccctccaggaattccctgcagccttgc

SEQ ID NO: 52341 - DNA, 586 bp, Homo sapiens
  chr15:78912441-78913027
  hyper
cggcttcccccagcaggctcctctggagagcgggaggaagacaggaggcgctctcccggtggagggtccctcagcgacgcagccaggagcgctaggaggctacaaccggaggagaggctggcgctccagctccagccccagtcccgaagcgactcccctcttcccgaggtggccttggccaagtcttcagccatctccgtcaaatgaggaggtgggcgggatgcagacggtggagcgggaggcttgggcgcgccagtttgggagccagtgcgcggggcagggcgacgggcagcgcggggacgcgaatccccaactcctgcgcccaagacgaaggacccggtctcgacctccccatcacccggcgcgtaccagcgcccgctcagtgactcccaggtttggtggtggctaggggtgggaggtgagccgaaagggaaaaagccaccccacccaagtcgccgccgggctggagccagtctgcgcgggttccgagtccccggcgacggcgccagccctctccgctcgcccgcgcggtgttctcgccggcagcccctccggaccccgcgccccttctcgggcgcccgtccct

SEQ ID NO: 52342 - DNA, 375 bp, Homo sapiens
  chr15:78913094-78913469
  hyper
cggcgacagcgccaggggcagcgagagcgggccagagcccatggctggtggccgggctggccgcggacccggacggtcgggagcgggcgcggcggtcgcagagacggcctctccccgcgcggctccagcgcagaccccagacctggagccgtgcgggcggagacgcgcggggctcctctccgcttcgccgccgctgggtttccagcgccctcggacccgcgggaggacaggaaccatccggagtgaagctgcgccaggcgcgggcgggcgggcgggcgtgcgcggggcggggcgtacgtgcggtaggggaaggggctccaggtcccagtccccagcgccgggcgagctccttctccgccgggctgggtgctccgg

SEQ ID NO: 52343 - DNA, 16 bp, Homo sapiens
  chr15:78913480-78913496
  hyper
cgaccagatctgagca

SEQ ID NO: 52344 - DNA, 30 bp, Homo sapiens
  chr15:78933615-78933645
  hyper
gccccgccgagccccgcccactcagggatg

SEQ ID NO: 52345 - DNA, 30 bp, Homo sapiens
  chr15:79103703-79103733
  hyper
ctgcgctcggtccgcgggcaacaaaggctg

SEQ ID NO: 52346 - DNA, 30 bp, Homo sapiens; identical to SEQ ID NO: 10305
  chr15:79125413-79125443
  hyper

SEQ ID NO: 52347 - DNA, 88 bp, Homo sapiens
  chr15:79237307-79237395
  hyper
gcagcgtggcccacatcgcagcgctggcggcttggctcttgcgctcagggtccgcggaggtggcggcccagagcgtcaactgggagcg

SEQ ID NO: 52348 - DNA, 1285 bp, Homo sapiens; identical to SEQ ID NO: 10307
  chr15:79382098-79383383
  hyper

SEQ ID NO: 52349 - DNA, 771 bp, Homo sapiens
  chr15:79383438-79384209
  hyper
cgccccaccgcggcgcactgtagacctggggttaagtgccagttgtcattttctcctccaaaggctcgccccccccccccactttatttctaatacgaggtggaaggaggaaggtgggtggcgaaatagagctgcaaaagcgtccagtcctagtctttgcatagtcagccgggtcacattgaattccagcatccggctgcactcccggcggcttccccagctacctgaggacagtacagggggtgagatggggtggtggttggtgaacgttggttactttattttatattattttattttgagagttgccataattaccggcgccaccccccgtgcaccctgaggtctggttggcgagccgctgctgggagttttctgcaaataccccccaaagcctgaaggcgggcttcaaacgcaggcgccggggaccatgggagccttcaaatagctgcgctggcgcaatgataccttaatgatagattttccgttcttatttttagctctcattcgcctacacagttacacggcatttatccgagaacgtcacagcgcccgcatgctgcaccgggagggcgcgcgggccgccgggcgagccgggagctggggcggggagcgcgcatcgctgtctgccgcagagggcagcgagctcgccccgacccggagcaagccgcgcctggcccgggcgctttgcagcggggatgggtgcccgcgcagccctgtgaaggaaagacaccatctttccgcacggaaactgcgtatacccctcccccg

SEQ ID NO: 52350 - DNA, 236 bp, Homo sapiens
  chr15:79502050-79502286
  hyper
gggcggggagggctcgccgggaaatcaaacgtccatttacatcttgtcctgcaaagcttcatcaaaacttctttgccggccagtcacgtccccttatcacttttccagcccagctttgtgactgtaagtgttggacggagaactgataagggtaggtgattgacactcacagcctccggaacccccgcgccgcctgcacttgcgtgatggggaaaacctggcgttcccgctctggg

SEQ ID NO: 52351 - DNA, 30 bp, Homo sapiens; identical to SEQ ID NO: 10310
  chr15:79551660-79551690
  hyper

SEQ ID NO: 52352 - DNA, 185 bp, Homo sapiens
  chr15:79574878-79575063
  hyper
ccgcgcctgctccgcgctcaccctcggggagtctaggagccccctgctaagttgctgagcgagtcggagccccaagagctagggtcgagggggtggggcagcaggcgcctctgccgaggctgcaggtaggcacttccccacccccgcggccccctccttcctccttcctcgcagctcgcacaccc

SEQ ID NO: 52353 - DNA, 5 bp, Homo sapiens
  chr15:79576086-79576091
  hyper
gagcc

SEQ ID NO: 52354 - DNA, 133 bp, Homo sapiens
  chr15:79576118-79576251
  hyper
cgagccccgccgcccgaggcgcacagtgagcgtggaacagcccggctccctagcccccggccaacgctgctctcagttcagggcagctacgtaacaccgcccctagctccgcgccagaaagggctctcgaatc

SEQ ID NO: 52355 - DNA, 111 bp, Homo sapiens
  chr15:79603181-79603292
  hyper
gggtggacctgggtcgacctggggggatgctcagccctgcgggtccgggagcgcgcagaacagcggggagggcttctccctcttctgggtaggggcgcgctaggtggagcc

SEQ ID NO: 52356 - DNA, 30 bp, Homo sapiens
  chr15:79723640-79723670
  hyper
caaagtgctgttaacgtgagcttccccagc

SEQ ID NO: 52357 - DNA, 144 bp, Homo sapiens; identical to SEQ ID NO: 10313
  chr15:79723975-79724119
  hyper

SEQ ID NO: 52358 - DNA, 209 bp, Homo sapiens; identical to SEQ ID NO: 10314
  chr15:79724351-79724560
  hyper

SEQ ID NO: 52359 - DNA, 81 bp, Homo sapiens; identical to SEQ ID NO: 10315
  chr15:79724606-79724687
  hyper

SEQ ID NO: 52360 - DNA, 91 bp, Homo sapiens; identical to SEQ ID NO: 10316
  chr15:79724701-79724792
  hyper

SEQ ID NO: 52361 - DNA, 743 bp, Homo sapiens; identical to SEQ ID NO: 10317
  chr15:79724863-79725606
  hyper

SEQ ID NO: 52362 - DNA, 1248 bp, Homo sapiens
  chr15:80215296-80216544
  hyper
ctgtacttgcaagcctcgaacccccaactccaactgacctcccctctgccagagcaagaccacgagtacccgccgagagcggacctggctggctacacaaagccaggcgcccgaccagagggatcctccgggacgtcctccgccaccggggcgtccccgcccagccccgcccggcgcccggcgctcaccagctctcctccccctcctcctagcctgacagacgctccaggtcgtctagcaagccgccctcccccgccgccagcaagaaggtggcgtctcgcagctcctcgttattcgtccgcctcgggtccatccggccccgccgcccgactttgcgctgagacccaaggggaagccccgaggggaccccgcgccgtaggagggagtggaggagccggcgaaccgcgatggagccggggcccagcacagcgcgagcggctcctcggctgttcgtgctgcttccccagcttcttcaccggcacctgcagcttccgcacctcctggtccgcgttcacgttagagttaacgtcctccatcccggccccgctgcctccgccgcccgcggccctctcgctctcgcagcaacaagggaagagccggaggaaagaggcgtccacgccgctcactccagccgaggcccccgcatatagcagggccaggccccgtcgccagggttcccccagcgcgggtcccgaagcaccgctggccacagatgaaccgcctcctcagcgcaggtccgggattcggggaggcagcgccaatatccggtctctgcagccatcttccctccgtccctccgcccaccgagggtcggccctgtaggtgacctcagagcgtcggggatgggcgtggccccgtcgggcgctaagaagacctagcgcagagaggaccgccgagctcccgacggggcggggccaggtgtgtgaggggcggggattggacccggaggggcgtgtctggactgccggcggaagtggaacgcggcctgacctgcgacggaaagccactgcaagcccggaggcgaacagaaggcattccgcgagccgggctgagttggtgaacacggtcctcgttcaccccgcctattggtctgggcgtgtggggtattctccacccacttatacggcgtgtgggaccgacgggcccgtcctgcccggctccggtccggatctcgagtaggcgctcaatgggattcggggagacgtagtttactttgttcagcaaatatttaaccgatgcctattttaa

SEQ ID NO: 52363 - DNA, 56 bp, Homo sapiens; identical to SEQ ID NO: 10319
  chr15:80285824-80285880
  hyper

SEQ ID NO: 52364 - DNA, 32 bp, Homo sapiens
  chr15:80351968-80352000
  hyper
ctctcctccgcggtcgcgtcataggccgaaca

SEQ ID NO: 52365 - DNA, 147 bp, Homo sapiens; identical to SEQ ID NO: 10321
  chr15:80352849-80352996
  hyper

SEQ ID NO: 52366 - DNA, 367 bp, Homo sapiens
  chr15:80543968-80544335
  hyper
gaggctcagaacagcgagggtgcctgagcacagcaccacactctcccggtttctgagccccgagccccgcagtggaactcgggccgctgcgacgcggctcccgtgcggctcccaccgaggctgctgtcccctgccgcgcgggtccggccctccccgccgaccgaggcgcgccccgggcgcagtgccgccgaggaggggatcggtcccagtgtccacgcgggtctcctcgccgccgcggcagggctcggcccgacttcagcgagcagatcctccgcctgcggccggtgacccgcgcgacgccccggcggcaccgacaatgctgtgctccagccccgcaggcgccgcggcagcgggtcccgggatgctc

SEQ ID NO: 52367 - DNA, 30 bp, Homo sapiens; identical to SEQ ID NO: 10322
  chr15:80654042-80654072
  hyper

SEQ ID NO: 52368 - DNA, 30 bp, Homo sapiens
  chr15:80987182-80987212
  hyper
tcccctctgcagatcggcccagctgtccgg

SEQ ID NO: 52369 - DNA, 266 bp, Homo sapiens
  chr15:80988125-80988391
  hyper
ggctcggctgcatgttcgtgcgctgcgcgccctccagccgctacacgctgctcttctcgcacggcaacgccgtggacctgggccagatgtgcagcttctacattggcctcggctcccgcatcaactgcaacatcttctcctacgactactcgggatacggcgtcagctcgggcaagccctccgagaagaacctctacgccgacatcgacgccgcgtggcaggcgctgcgcacccggtgagcctgccggggtcgccaggcctgactt

SEQ ID NO: 52370 - DNA, 31 bp, Homo sapiens
  chr15:81071386-81071417
  hyper
ccggggacttgctctccgcggtccgccgcgg

SEQ ID NO: 52371 - DNA, 31 bp, Homo sapiens
  chr15:81071672-81071703
  hyper
aaagtggctataaaagcggcctctcggctga

SEQ ID NO: 52372 - DNA, 463 bp, Homo sapiens
  chr15:81071922-81072385
  hyper
aggcgtgacactgtctcggctacagacccagaggtaagagggcctggctgggggcgtcagggatgagctgacggcccatgccacggaagagaggtaagaagtgggggcccgcgcctccacccggcacagggtaaacgttacccgcctcagtttctgtttgtctgtccaccctgtgctgtgcagtctacctctatctgtctgtttgtccatgcgtctgttgatgggcacacgctcttggcactgtcctctgtgggatttctctgagatcttgtgatgctttacaagctgcaggtgccggggggcgctggagtccccagagggcatccagagggggcagactcctgctttccgtagattttcccccttctgaatggcaccgggggcttgcgcccgggagagtgtctcgccgaggagggagtaccacaagggtcaggtctcggtgtcctgccgactgggagccagc

SEQ ID NO: 52373 - DNA, 30 bp, Homo sapiens; identical to SEQ ID NO: 10325
  chr15:81072918-81072948
  hyper

SEQ ID NO: 52374 - DNA, 277 bp, Homo sapiens
  chr15:81292772-81293049
  hyper
aacacaacaaagggcagggggcgttggaaaaccgggcgaagtcgcgcagaccgagacgacccaccggccccagcaaatcaccaggggccgaaatccagtgtcctcctcccttcagcccagaagccaggtcaccttttagacttgctctcttggcggggaggaagcgtggagccccctggtccggctaagagcttacgtaaggcccgcgggcggctgcgccccggtctcccatgggtgtgcgcagagcccccgggccggagcaggccttcccctgtcc

SEQ ID NO: 52375 - DNA, 120 bp, Homo sapiens
  chr15:81294106-81294226
  hyper
gcctgagctgcctcccgcgctcctccccgaggaaaggattttgatttcaaagaaaggaaggaaggaaggacaactcccagcttccccgtcccgccctccccgctccgagggccgcgccag

SEQ ID NO: 52376 - DNA, 30 bp, Homo sapiens
  chr15:81616529-81616559
  hyper
ggagctcgtagccccgcctctttccgcgcc

SEQ ID NO: 52377 - DNA, 1102 bp, Homo sapiens
  chr15:82336625-82337727
  hyper
cacgatgtacgtgtgcgtctgctgctggatgcgcttgattgtggcgcctttgggccccaccacgagccccaccacgcggtagggtacccgcacttggatggtggtctgcccgggcaggttgggcggcccaggcaccgcgccgttgagtgccgtgttcttattccgggaggcgcggatcatggagaagtgctcggcagcagagatgatctccctccgagccatggccacatcctccttcctgcccgtcacaacaaagacaggctcctccccgcgaactggggtcttgatgtaagtattggtcttcgcccgcagcgctttgattttacaacctacgaaccagggtgcggaggagggagtgggagagagagacagacacgcccattatcctggggtaaccgcggggaccggggacagcccgcgtccaggacagcgagacggcaggacaagagatgggcggaaagggggcgtctccctcactgacctcgggccgcgccacgggctgggcagcggatcccacccgcgaggcgctcgaggaacagcccattggctgcctggccctcccccagtgactgcagtcgtcccgaaccaaacccgagaatcccagaaaagtcatctggggagatgccgctgggatccagctgggcgcgccgtcagctctgaagacacggggaaggggctcggggaaggcagctgaagtcgcgatgcctcagcgctggtcgactgggggtagggggtggggtgtgagtcccgggacccattgttcctcctctgggctccattccgctttgcagaaatccagaatcctcctcccatcctatgctcactcctcctccttcctcctcccaaaggactgatcaaaggccccctcccccaagcatcttacatttaaattgtctttctggaggtgggctggttggggggcgttaggggagaaggcagtgattttagcagaagaaagtgcatcccgccagggcagcggcgcggctccgggagacagcctgcctgcactttctttgtctggggcgccggcccatcgcgcggctcttcctctctccccaaggcaccccacgccgcggatcccgatactgaacacgccttcccc

SEQ ID NO: 52378 - DNA, 25 bp, Homo sapiens
  chr15:82337802-82337827
  hyper
cgatctcggcgacatgctcagaact

SEQ ID NO: 52379 - DNA, 52 bp, Homo sapiens; identical to SEQ ID NO: 10330
  chr15:82338055-82338107
  hyper

SEQ ID NO: 52380 - DNA, 105 bp, Homo sapiens
  chr15:82338503-82338608
  hyper
actccggagggggacgagggaggcgcaacgtcacaggcgggagctgacaccacaatgctactgacactatcgctgggggaggcgattggcgcgcgccaggccggg

SEQ ID NO: 52381 - DNA, 572 bp, Homo sapiens; identical to SEQ ID NO: 10331
  chr15:82339663-82340235
  hyper

SEQ ID NO: 52382 - DNA, 278 bp, Homo sapiens
  chr15:83315056-83315334
  hyper
cttgcccctcttccccaccaacgacacagcccagtagttgactcaggtgccaggagagagcgcggggaggctgggcggtagccagggagaccaagggaagcggttgccagagaaatgcggcgtcagtcagggccggggctgcaggcgcggggcgggggaggagagacgcggcctcctcccaggcgggcctggcgggaggcaccccggcttctaagagcgaattcggctcccgactctcttcccccagctgagagcacggtgcaaggggccagggctgc

SEQ ID NO: 52383 - DNA, 844 bp, Homo sapiens; identical to SEQ ID NO: 10332
  chr15:83316231-83317075
  hyper

SEQ ID NO: 52384 - DNA, 699 bp, Homo sapiens
  chr15:83348912-83349611
  hyper
cgtcgcaggctcacccggcgcttgatggacatggtggccacgttctggagcacaacgtactgcacctcactgcggagaggacgggtcagagcaccccgggcccctcggttggggcaagggtcagcggatgaggggaaaaggtggggcaagtcgttgcggggagaggaccagtgcggagggcaggactacggtcagtgtggagcgggtgggcagaggtggaagcggctggtgggcgtgagggggcggagccgggcagcccgtggggcggggcaggaggcgagggagggggcggggctgggggcggagcgcacctgtggctgcgcagcaggcgcaccagcgccttggcgatgacgcccacttccgccttgggcgccaggtggaagtagagctgcgccaccgccatcaccaccgcggcgctgcggctctgcagcaggggtttggtgttgcgcagcagcagccggtggtcggggtccatgacatagggctttcgggagggggcggccgcggcggccgtctcctcagaccccgcgcccttggcctcgtcctcctctgagccgtagaaggctttttccgcgttctcctctagtagggattcctggacggggagaccgacgggtctgtgggcgcctccccgggacacacttcggcccgctctgcctgggctgggcccacttacgttctgggtggggctcaggaact

SEQ ID NO: 52385 - DNA, 1174 bp, Homo sapiens
  chr15:83377914-83379088
  hyper
gtacatccagggcccgccttcctgaagaggccccaggctcaagctcaagttcgctgactcagacccctcccccacatttttgggaagccaacccgcctagcacgaaaaaggaagggaacccctaacgcaacgccgcaaaccggagaaacacctggaaccggagggtttctcctctcgaaactgagctggcccatcccccgccagcccctatctgcccccctccgcgtcctaggccggcccctggagccggggtgccagcgctgcccgcgctgggccggggctccaggccgcaggagggggccgggcgggcttccggtcggcgcggccggggcggggccggcgctggggccgggcgctgtccatggtgcccgcgcgcctcgcccggtccccggccccaaccctcccgcgagcttcctggcgggctccctcaccgcttgtagtcggaggagaagatgccgccgctcgcggggtcgtggccgtactcgggctccccggggccagcggagccgcccttgtcttcgctgtaggcgggggcggccgacatggggcggccagggagacttcgccgaggaggaggttgcggggccggaggccggctggagcggaggaagggaaggcgggccggtccggtccgggctggcgaaggcggcggcgcggcaggggttcagcagaggctgcagtgtgcagcggcggaggctgcgcgcggatttctcaatcagggccgcgcgctgaggtcttaaaggcaccggcgccagccgagcggagggcgtgtccgcgaggaggcgacaggggcggtgcgtcagggcctggccccgcccatccctaggaaatgccctcttcagggcgtcttctgccctttaaagcgacttggctcgtctccagatctaaaggtgggcgagtctgctggacggacgctgggaccgtcttgcaggggatgtggaatagctgcccccacccccgaccacctggcctcggcgggacgggcctctggggctccgctctccccagacgcacgcgcggatgctcacccacgccgtggagggaaagcgggaactggaaagaaggctgtgcccgcaggctgggggttctagagcgggaaggggtcaccgcacccgaggaccggcctcagatacctaaggacgctccctttcccgccccacctttcctacaaaat

SEQ ID NO: 52386 - DNA, 30 bp, Homo sapiens; identical to SEQ ID NO: 10336
  chr15:83419390-83419420
  hyper

SEQ ID NO: 52387 - DNA, 30 bp, Homo sapiens
  chr15:83620936-83620966
  hyper
cctggagttgactgcgcccaggggcgaaga

SEQ ID NO: 52388 - DNA, 30 bp, Homo sapiens
  chr15:83627114-83627144
  hyper
gacttaaacaggaaacgacaagaatgtcca

SEQ ID NO: 52389 - DNA, 376 bp, Homo sapiens
  chr15:83654592-83654968
  hyper
tgtctactcttcaccgcctgctctcacctcacgttccccacgaagactccgggagcaggcggccggaaggagcccttccctcccttctccggtgattcccagaacttccgtctctacccgtcacctgctcccaatcaaaggagcttaatagacggcgacgttttcgactgcccagccaccaggcaggctgaaagtgcatggagggcatcatccacctttagacagctacttgcccacacctcatcgagctctgggcgttgtgccagcatttgaagaagcgatctgttgcaaagcgatccacacggagagccttagttatcgcgagacttgacaggcaccctcaactttagcccgccggaagcggaagtcaggtggt

SEQ ID NO: 52390 - DNA, 106 bp, Homo sapiens
  chr15:83655930-83656036
  hyper
agtgttgggattacagaggtgagccaccgcgcctggccttagagcacttttactccaattctttccttgaataagactcttatgcgccaccctcccctacaaacac

SEQ ID NO: 52391 - DNA, 30 bp, Homo sapiens
  chr15:83656501-83656531
  hyper
gagtgtcaggctgggcgcggtggcttatgc

SEQ ID NO: 52392 - DNA, 135 bp, Homo sapiens
  chr15:83680650-83680785
  hyper
ctcagaattggagagcgcggcaaggagtgcacagggccaggtgtcttctcgctcccacagccaagcagcagatgcagagtcccacgcgctgcctgtggccatcaagtcgatatagagcctcgtggcggcttggcc

SEQ ID NO: 52393 - DNA, 30 bp, Homo sapiens
  chr15:83695057-83695087
  hyper
ccaaggaggcatactcgatttcacaaaggt

SEQ ID NO: 52394 - DNA, 30 bp, Homo sapiens
  chr15:83722444-83722474
  hyper
aaagaggaaaaaatacggagatatcactta

SEQ ID NO: 52395 - DNA, 30 bp, Homo sapiens
  chr15:83735225-83735255
  hyper
tccataattggaatgcgaaacgcctttcaa

SEQ ID NO: 52396 - DNA, 30 bp, Homo sapiens
  chr15:83735850-83735880
  hyper
gcctcagcccccgacgcctgctccccagct

SEQ ID NO: 52397 - DNA, 86 bp, Homo sapiens; identical to SEQ ID NO: 10338
  chr15:83775915-83776001
  hyper

SEQ ID NO: 52398 - DNA, 115 bp, Homo sapiens; identical to SEQ ID NO: 10339
  chr15:83776022-83776137
  hyper

SEQ ID NO: 52399 - DNA, 149 bp, Homo sapiens; identical to SEQ ID NO: 10340
  chr15:83776157-83776306
  hyper

SEQ ID NO: 52400 - DNA, 384 bp, Homo sapiens; identical to SEQ ID NO: 10341
  chr15:83776332-83776716
  hyper

SEQ ID NO: 52401 - DNA, 174 bp, Homo sapiens
  chr15:83776768-83776942
  hyper
cgcgccaggtgcccggggtcacaggcgtcaatacggccatgcccctgccctggaggggcccaggggccggtggggagcggaacaaacacggacactacgaacctggccgtgtcagctcgtttgtgccttgttctttttgcatctcacgggaacgtttccatgtatggactttcg

SEQ ID NO: 52402 - DNA, 30 bp, Homo sapiens
  chr15:83777667-83777697
  hyper
gctgctctgggccaccgaatattacatgcc

SEQ ID NO: 52403 - DNA, 30 bp, Homo sapiens
  chr15:83801859-83801889
  hyper
tcacccgaggccatacggctggtttgtggt

SEQ ID NO: 52404 - DNA, 144 bp, Homo sapiens; identical to SEQ ID NO: 10343
  chr15:83875521-83875665
  hyper

SEQ ID NO: 52405 - DNA, 377 bp, Homo sapiens; identical to SEQ ID NO: 10344
  chr15:83875705-83876082
  hyper

SEQ ID NO: 52406 - DNA, 281 bp, Homo sapiens; identical to SEQ ID NO: 10345
  chr15:83876201-83876482
  hyper

SEQ ID NO: 52407 - DNA, 502 bp, Homo sapiens
  chr15:83876654-83877156
  hyper
cgctcccctccccttccctcccgcgcgggccggttaattcctaggtacacggccggctttcgcggagaaaccgagcgcgccagcccggcttctcggctggcgggcgggcggtgggcgcgtcctcccccagcaccgaagcccgcgccgggcgggcgggagtgcctactccggaggacgcccgccgcctgctctcttttgttcttggcccggagctgcctgccgcagcccagccaatcaccacccggccgcccccttcccctcccgtccgtgccactctgggggttctccccactcgcgccccccgctcccacgcccacctcccgctgactcgaccctctcctggctacccccagccagccacttccgcggctgctctctggtgagtgggggacaaaggcgctccaggcctgggggacggcggcgcgaggggaccctctgctgggcaccaagctgccggaaagagcaccgctccggagtcagcgaccttattggattcttgccc

SEQ ID NO: 52408 - DNA, 30 bp, Homo sapiens
  chr15:83912383-83912413
  hyper
cactcaagcattgtgcgataggtttttctc

SEQ ID NO: 52409 - DNA, 30 bp, Homo sapiens
  chr15:83950994-83951024
  hyper
actacaacaggaacacgttcaaccaacagt

SEQ ID NO: 52410 - DNA, 411 bp, Homo sapiens
  chr15:83951701-83952112
  hyper
agaggcctggctgagaccaggcgtctgggccgctttaaatgccctggccttcagaggactgaggcgagcacagccataaaaccaggggacgttaccgaacccccgagcgtctgatgccccccgccccccaaccacacacaacttcactcacacaattaaggctgggagatggcattccacttaactgtcagactcggagcggtggcagccccgcagccacaaagagatgccttaaatgagaagaacatgtttctacaccgcatttgtgaaagtttggctcggagctacgcgctgattaatatcagatctccttcactcgcctcgccacaatcttgtcacatctggctgacaaatcccgaggaactccggcaaagccaggcggcggcggggctccgggtctgggcggcggct

SEQ ID NO: 52411 - DNA, 280 bp, Homo sapiens
  chr15:83952768-83953048
  hyper
cgccccgttctccagagaaacaatccccggagagaaagacggccagtgtgaaatatcagctgtttcacaaattctgaggtaaaagaaaaaaaaaaaaagaaggggtcgacccccacaggtggaaacagcaagtcctaacgtcctgggctgaagcctggggtgcgggcggcagagagtggcgtgtagggtacccgccgagtgccgccgccgatttccacaggctggcccgccggcacctccgacgcgcccgcagatccggcgcggagaccgtttgccagct

SEQ ID NO: 52412 - DNA, 30 bp, Homo sapiens
  chr15:84006836-84006866
  hyper
gaaaggaggaatggtcggacatgtgattct

SEQ ID NO: 52413 - DNA, 73 bp, Homo sapiens
  chr15:84034425-84034498
  hyper
cctgccagatgtcggcgcccgcggggttaaccctttccggcagcgcagccttcccctgcgtccggccgcttct

SEQ ID NO: 52414 - DNA, 30 bp, Homo sapiens
  chr15:84042481-84042511
  hyper
cagagccagagcccccgttcctggcttccc

SEQ ID NO: 52415 - DNA, 30 bp, Homo sapiens
  chr15:84103752-84103782
  hyper
cacccatggcttcatcgtgacccgttcctg

SEQ ID NO: 52416 - DNA, 237 bp, Homo sapiens; identical to SEQ ID NO: 10348
  chr15:84115616-84115853
  hyper

SEQ ID NO: 52417 - DNA, 407 bp, Homo sapiens; identical to SEQ ID NO: 10349
  chr15:84115931-84116338
  hyper

SEQ ID NO: 52418 - DNA, 175 bp, Homo sapiens; identical to SEQ ID NO: 10350
  chr15:84116377-84116552
  hyper

SEQ ID NO: 52419 - DNA, 112 bp, Homo sapiens; identical to SEQ ID NO: 10351
  chr15:84116651-84116763
  hyper

SEQ ID NO: 52420 - DNA, 260 bp, Homo sapiens; identical to SEQ ID NO: 10352
  chr15:84116828-84117088
  hyper

SEQ ID NO: 52421 - DNA, 30 bp, Homo sapiens
  chr15:84178217-84178247
  hyper
tagaccagaacttctcggtaatttattgct

SEQ ID NO: 52422 - DNA, 30 bp, Homo sapiens
  chr15:84228139-84228169
  hyper
attgtaaaggatattcgagtggaaatctag

SEQ ID NO: 52423 - DNA, 30 bp, Homo sapiens
  chr15:84250230-84250260
  hyper
cccctgcagagagagcgggtgcagagacca

SEQ ID NO: 52424 - DNA, 43 bp, Homo sapiens
  chr15:84322553-84322596
  hyper
tccaggaagcgggcggaggagcgttccagccgagtcccgccgt

SEQ ID NO: 52425 - DNA, 195 bp, Homo sapiens
  chr15:84323017-84323212
  hyper
tgcggcgcaaggtgggtgcaccgagctcggcgcagggcggcccctcaggggtcgggggaaggcgctccccagagggagtaagacttggagcagtggcctctctaagcaagttgggggtctccaagcagagtcggggcgtgccacgcgggccccagggggcctcaggactggggtgctcctcactgctgggcacct

SEQ ID NO: 52426 - DNA, 30 bp, Homo sapiens
  chr15:84323521-84323551
  hyper
ctcggaaggctggtgcgagcaggcgagggt

SEQ ID NO: 52427 - DNA, 30 bp, Homo sapiens
  chr15:84573172-84573202
  hyper
gaaggagaggatgaacgcagctgtatttta

SEQ ID NO: 52428 - DNA, 47 bp, Homo sapiens; identical to SEQ ID NO: 10353
  chr15:84748572-84748619
  hyper

SEQ ID NO: 52429 - DNA, 627 bp, Homo sapiens; identical to SEQ ID NO: 10354
  chr15:84748678-84749305
  hyper

SEQ ID NO: 52430 - DNA, 30 bp, Homo sapiens
  chr15:84820321-84820351
  hyper
ctcagatggcctctccgaggatatgcagtg

SEQ ID NO: 52431 - DNA, 30 bp, Homo sapiens
  chr15:84862070-84862100
  hyper
gtgtgaccgacaccccgtaaccatgtgtgg

SEQ ID NO: 52432 - DNA, 30 bp, Homo sapiens
  chr15:85138337-85138367
  hyper
cagagccagtggactcggggcacacaacct

SEQ ID NO: 52433 - DNA, 30 bp, Homo sapiens
  chr15:85141961-85141991
  hyper
tttccaggcttgcttcgatgtagcaggctg

SEQ ID NO: 52434 - DNA, 185 bp, Homo sapiens
  chr15:85143716-85143901
  hyper
aaacaaaggggtgtgcgaagaccgggtgcatgtgtacagctgcaaactgggggaaaggcgccaggcttgggcgatgaggatttgttcccccatggattcccttcctgcccagggtccgctctcgccggtcgagggtgcctaacaatactccttgccacaaggttcgcagccgaaaaggtccttca

SEQ ID NO: 52435 - DNA, 85 bp, Homo sapiens
  chr15:85144153-85144238
  hyper
gcccggctgggtgccgtctccaccaacagaaaggcagaatttccagggccgttctcggcagccaatgagcgcggcggtgggcggg

SEQ ID NO: 52436 - DNA, 30 bp, Homo sapiens
  chr15:85173528-85173558
  hyper
agaaaatgcaccctccgctgcattgcattc

SEQ ID NO: 52437 - DNA, 30 bp, Homo sapiens
  chr15:85177510-85177540
  hyper
atccggtcaatggaacgggttatgtacgtc

SEQ ID NO: 52438 - DNA, 30 bp, Homo sapiens
  chr15:85189435-85189465
  hyper
gggactccagatcaacgacctgcagacttc

SEQ ID NO: 52439 - DNA, 30 bp, Homo sapiens
  chr15:85192532-85192562
  hyper
aaagctggtggtgagcggggaggttaaatc

SEQ ID NO: 52440 - DNA, 30 bp, Homo sapiens
  chr15:85198783-85198813
  hyper
ttgccttggaggggtcggggcagtagtttt

SEQ ID NO: 52441 - DNA, 30 bp, Homo sapiens
  chr15:85199264-85199294
  hyper
agactgataagagctcgcatctactaaggg

SEQ ID NO: 52442 - DNA, 184 bp, Homo sapiens
  chr15:85200332-85200516
  hyper
taattcctcccatgcaggatccggggatggccccagctgggccctcctgacattggagcaggggcccggctcacctggatttggggtgcggggcggctgaggctcacgcccagagccttctttagcaggaggattccgagcagatcatgactcagctgcagtcgctggtccctcagggaggtgt

SEQ ID NO: 52443 - DNA, 30 bp, Homo sapiens
  chr15:85201794-85201824
  hyper
atgagggtagaggtcgggcgaggagctctc

SEQ ID NO: 52444 - DNA, 30 bp, Homo sapiens
  chr15:85207731-85207761
  hyper
aaaaaaaaaaagtcacgcagcacagttaag

SEQ ID NO: 52445 - DNA, 30 bp, Homo sapiens
  chr15:85223340-85223370
  hyper
gaaatataaatataacgccatctctactaa

SEQ ID NO: 52446 - DNA, 30 bp, Homo sapiens
  chr15:85258868-85258898
  hyper
aaacctcgtctctcccgaaaccacctggag

SEQ ID NO: 52447 - DNA, 30 bp, Homo sapiens; identical to SEQ ID NO: 10356
  chr15:85259809-85259839
  hyper

SEQ ID NO: 52448 - DNA, 30 bp, Homo sapiens; identical to SEQ ID NO: 10357
  chr15:85290875-85290905
  hyper

SEQ ID NO: 52449 - DNA, 30 bp, Homo sapiens
  chr15:85292308-85292338
  hyper
cgaagagctgtcgccgtcacagggcagaca

SEQ ID NO: 52450 - DNA, 30 bp, Homo sapiens
  chr15:85328132-85328162
  hyper
agaccctcactgttacgggtatcgggcccc

SEQ ID NO: 52451 - DNA, 30 bp, Homo sapiens
  chr15:85358579-85358609
  hyper
gagaccctgtgaccccggcctctagcacct

SEQ ID NO: 52452 - DNA, 30 bp, Homo sapiens
  chr15:85399690-85399720
  hyper
tggggttagcacttccggaagtcaaggtat

SEQ ID NO: 52453 - DNA, 30 bp, Homo sapiens
  chr15:85412526-85412556
  hyper
ttccccaacttctctcgggctctttgctca

SEQ ID NO: 52454 - DNA, 30 bp, Homo sapiens
  chr15:85447871-85447901
  hyper
ccagtccagcaacagcggcgcctccatgga

SEQ ID NO: 52455 - DNA, 30 bp, Homo sapiens
  chr15:85524763-85524793
  hyper
tccctcggaccccgcgcctaaaccccggcc

SEQ ID NO: 52456 - DNA, 438 bp, Homo sapiens
  chr15:85525135-85525573
  hyper
tcaggaagggcatgttcggaggggcggcctcggcacgccacccgcctaagcgcccccttcccaccgcagccgccgccgccgcagcgcccgcaccgcgataaaaggggcggccgcgtttcctgacgcgagatccgcgctcgccgccgcccgcccaggcggcgatgacacggcgcccgcggcggcccggaggcgccgggtgggccgtttgctgaccggatcgcggctacccgccagcgtgtccgcggcgccgccgccagcatgggctgtgccccgagcatccacatttccgagcgcctggtggccgaggacgcgcctagccccgcggcaccgccgctgtcgtccggcgggccgcgcctcccgcagggccagaagacggccgccttgccccggacccgcggcgccggcctcttggagtcggagcttcgcgacggcagcggc

SEQ ID NO: 52457 - DNA, 13 bp, Homo sapiens
  chr15:85923532-85923545
  hyper
ggcggagaggaga

SEQ ID NO: 52458 - DNA, 30 bp, Homo sapiens
  chr15:86126228-86126258
  hyper
aataaaacttcttaacgggggttgaggctg

SEQ ID NO: 52459 - DNA, 220 bp, Homo sapiens
  chr15:88798433-88798653
  hyper
aagggatctgtaggcgcccagatgcagatgagggtggcaaaggggtgtctcggaaatgcccaaaatggggctggagagggcgggctgcaggaggggaagggaagaggtaggcgtccatgacggcctccacacgtccaaagtctccccgcgagcagccagctcgcaacttgtttacttgtcagcatgttttgctgtttccaaatggaaatagttaaacacc

SEQ ID NO: 52460 - DNA, 264 bp, Homo sapiens; identical to SEQ ID NO: 10360
  chr15:88798724-88798988
  hyper

SEQ ID NO: 52461 - DNA, 1265 bp, Homo sapiens; identical to SEQ ID NO: 10361
  chr15:88799036-88800301
  hyper

SEQ ID NO: 52462 - DNA, 596 bp, Homo sapiens
  chr15:88800412-88801008
  hyper
cgcgctacccggttttgctgcaatccggaccgcggtaggaagtgaaatgaacgtggcggaggtgattggggagtgctcccaagccttgggtggggggcgctcccaagcctgggtgggtggggggcgcaggctcacggacggcgacggggggtgccggagcgcacagacaccccagagaagcacccagagccggggaccgggaccgcagacgcgcagtccttggtctgaatgacactcatttccgtaatctagagtctggggctctggtcttggctgggaggggactgcgggacatggcacgctaggtgccccccgtgcccgctgcgctttcttggaggtgggttttgcattcggccttgagcaggcatggatcggggaaggaagaaacaggggtcgaaagggctgcgctggagagccgaggtggccccgggcgagctgtgcgtgcaagagaaatggccgggggaaattgagatgcaaggggcatattttggcaagcgccacgccagcaccgtcagaggccggcttctcgggctcagctctcgggtgagctgagctggctgccgggtgagggggcgggcgggctgctttctccggat

SEQ ID NO: 52463 - DNA, 272 bp, Homo sapiens
  chr15:88801088-88801360
  hyper
cgagagctcagatctcatccgggaaagaagtgtgtgtggggggggccccgcttttgcgctggtagggatttttttcttaataaaacataaagatgccaagtgtgagctgtttgctgaaaaaaaaaaaaacgagcattcgctgtgggaaaggagaagaaagggttaggggagtccgagcaggcagacacactacagcattcacacgcagaagaaagcagggttctccttcccgagcttggaggagggcaggcgaggaagcaaaatacattgaa

SEQ ID NO: 52464 - DNA, 105 bp, Homo sapiens
  chr15:89010953-89011058
  hyper
ggctgtgagaaacgcggggtcgcggttcctgcggtcctggacttggccccagacagccgggtaacaaatgactgccccctcgagcccaccgccacctccaggact

SEQ ID NO: 52465 - DNA, 30 bp, Homo sapiens
  chr15:89089572-89089602
  hyper
gggatgccaaggggcgggcacacataccca

SEQ ID NO: 52466 - DNA, 620 bp, Homo sapiens
  chr15:89147771-89148391
  hyper
catttgatgtgaagcgcggctcccccctctccactcgctttctccgctcgccttcaggatgacgtcatgaacatccgtggccctgacaggccacccgtgggttggtctcagctttaaagcagctgttctcctctggcccggcagccgcggcgactgtgtttgcacccggcggaccatgccaggactacggacccggacaggactgatggcctcagagaggcaagtattcaaggggcacttcacaaacagcttcctcaaaccccaccccctcccccgcactgcgctgctacttgcactgcggctcctggggggaagcaaagtaccggcagctgggtggtgaggggctttcttccagaaagaaacggagagcaagtggtcttcctccctagccgcggcgacccatgccaggtaaaaatcccagccgaggtccccggtcccgtcccctcctccaggtcaagggctcgggactggagaagcagccaactggagctgatattcgggaagctaagcctgaggctgctctggagggccggagaagcgagcggccaggcttggcacccgccaaatgtgccttgccaaaatgaagaggaaggaaggcgactccggagcccagcaggtga

SEQ ID NO: 52467 - DNA, 488 bp, Homo sapiens
  chr15:89148460-89148948
  hyper
cgcggaaacccagcttgcagtttgtttcgctcggtcccgcgcccagtaggagaaagacggccccacagcctcgcgggagccggctctcgcaacccagccgccccaagcccgccgtcgcccctcctcccgcgcttctcgcccctgattctagatgcagctgacttgttgcatgcagaagagcagctgggttcggcgttccaagcctctcctctttgctttgcctgccaccagatctgagcgccaggctggccagcacccagagagcccagagccgcaggaaaaaatgtgaaaagtaccaggagaccactgggtaatcgccccagtgcaaagggcctttcttcctacccaccgcaattgcagcaaataactccagggaggggaatcagaggcgccggggattgcgccctgggagagccctatctgctgaaagagagcgcctaatgccgttacttcccagtgtagcctttccactcggcagaccaagcgcc

SEQ ID NO: 52468 - DNA, 30 bp, Homo sapiens
  chr15:89182088-89182118
  hyper
agctccccacctgccggtagcccaggagat

SEQ ID NO: 52469 - DNA, 60 bp, Homo sapiens
  chr15:89248429-89248489
  hyper
gaggctgacgggggcgcagcttttcctcctgagtgttcgctgcccgggctggcggcgcgg

SEQ ID NO: 52470 - DNA, 189 bp, Homo sapiens
  chr15:89248747-89248936
  hyper
ccctcgggctctcatttaccccggccgctggcagcgggacccaggcgccttgccgcctcgctgcggccgcttggtccccacgccgccccctccgcaggcgacgaggcctgcagaccggactgggcagccactcgggcgcccgcggcggtgggcatcatcatgcttcccgggcaaacagcacttccagcc

SEQ ID NO: 52471 - DNA, 329 bp, Homo sapiens; identical to SEQ ID NO: 10369
  chr15:89345997-89346326
  hyper

SEQ ID NO: 52472 - DNA, 447 bp, Homo sapiens; identical to SEQ ID NO: 10370
  chr15:89346346-89346793
  hyper

SEQ ID NO: 52473 - DNA, 342 bp, Homo sapiens
  chr15:89346881-89347223
  hyper
cggacaggacgccggcaggaggaggggtgcgcagcgcccgcgcagagcgtctccctcgctacgcagcgagacccgggcctcccggccccaggagcccccagctgcctcgccaggtgtgtgggactgaagttcttggagaagggagtccaactcttcaaggtaactgtctccttccctccagagcgaggctctcccagggcgcccggcgagccaggaacgggactgagactgcacgccccggggctgggggctgcactgccttggtctccgccctagagctatgtgtgccgggggcgcagcacatccaccggctgcgtccgcggtggagttgagcaaactttt

SEQ ID NO: 52474 - DNA, 1308 bp, Homo sapiens
  chr15:89437677-89438985
  hyper
ggaggcagcatcgcccgcgaggtctgcacgagcgctgctcccagcgagaaatttgacatccctgtccctgtttgcacaaggcttgatctccgcctttgaaacctgcagcccccaggagaatgaaaaccggaggtgtttcccaatccgctggcccgggcggcgtcgagggagagaagccagggcccctctcaatcgctgccccctactccagggagcacaggcactcccgcgggtcagcgctggacaccaaggtcccaacaggtttacaggctgcctgtggcctgtggctgccaacgagctggtggcaggactgggtccaagtgccgtgctgtttccatactggctgcgcacaagcctacgtttctccctgagggtcgccatctcccacccagggctctgccctccaccctccctacccttctggcctcgctgtccctggggcaagaaccccggtgagcgaggtctggaacccataggcatcagttgcctttgccccaggcgcccagagccggccagctgcggtccagaggcgcaggtccgccagccgcctcgcaggttgccctcagcccctcccaggactcccggggcccccggagcatccaacagatacccaggggcagggcctggggcgccgcggacggcactggaggcagccgaccctggacagacgacaggggagagagccaagcggaccctggcaggaagggggctggaggcggacggtggtctcggaggccacggggtccgctcgggctctgctccctcacggtgggcacgagggtccggcgcccgcatccccgcgccgctccctccccacttgtgccccgggcgcccctcgcccgcgatcacagcccatctcagcccgggcctccgcagtgcccggcccacgcctcctgccccttccccggaccctgcccgggaggtgtggggacccgcagggcacccaaagcggtaagggaggaacccggcccgcacacagccccagaagcccagcgacccctaagccacgtaccgtccccaggcagctcctcgacggctagagctctcgggggccgcgagctgtcccggtccaaggcagcagtctgatttcggggaaattaaaagggcagaaaggaagcggcagcagaaaaacccccgcgctcccgccagaccagccccttaaaggaacacgcgcacctttccctcccaagggctgggctcgaagggaggagctgctgcaggcttgagcggtctccagactcgctgggaaccaccgcaaagagggtgtgcaagagttgaggccctcacgtcttgggaaaggagagtagg

SEQ ID NO: 52475 - DNA, 30 bp, Homo sapiens
  chr15:89787062-89787092
  hyper
gttcggacaggcagcgcccccctccgactg

SEQ ID NO: 52476 - DNA, 125 bp, Homo sapiens; identical to SEQ ID NO: 10374
  chr15:89902213-89902338
  hyper

SEQ ID NO: 52477 - DNA, 315 bp, Homo sapiens
  chr15:89903425-89903740
  hyper
acacagcccacaagaatcatccgaggctgcaccgtgaccagcccctcaagacagagcgagacccaaataacccccgcgggcggacccgcagcgttctgtgactccaccgcggagtccaaaaggcagctgagggtgggagcggaggggaagggaggggggccacaggcgctcgggcgagggaggcgcgtcaatgggccgcaggggccggatcggtggcctaatggattcaggcctgcacggcagaggcgcacccggcggcctgcccgcgctctcaatagcggacaatggagtcccggggtgacctgaacaaagaat

SEQ ID NO: 52478 - DNA, 788 bp, Homo sapiens
  chr15:89905399-89906187
  hyper
tccattcttcccaaagcagctcggatccctaagtctggagctgccagcgaggcttccaacccgctgcttgccatcacctcccaggtcgttggtggctccgagtgagtctggcagcgcggggaggagaggggggacgaatggcgttgcgactcccagggaaaagctgggaggcaagcggggcgtggggaggaaaggccaaggcacacggctgggcgcccctcacagccttcctccgccgcctccattccgcactggtcggggtgaaggggggggcggggggagccgcgctgacgtcactgcgggccgtgcccgcccgagaaggcggcgctgggagccgctcagagcccagagaagcggcgcgcggccaggagcccccgctccgccactgccgtgcctgcctcccgcagctgtctgccatgcgctcgccggggcaggggcgcccggagggcggctagagctgggcctgagcccgggaacgcgcctgatcaggggtggcggagccgcggtccccacagccgccccacccgcgccgctgcctcgctggggcccgggcccccttcccggtccgtaagtgccactgcccgctgtgtctcggcgaggctggggagcgagggctagggagtgagggcggtggcttcggccagggcagcgtcagggagctgggctggactgagagagggggctggggcatccctgcccggcccccttgggcagctcaggcagctggggcttccctttgccgctgggcgggatgagaggtgcgctcccactgcgggtgggaggcagga

SEQ ID NO: 52479 - DNA, 30 bp, Homo sapiens
  chr15:89907843-89907873
  hyper
ggctggctgctagacggagggccaagtgtg

SEQ ID NO: 52480 - DNA, 76 bp, Homo sapiens
  chr15:89908947-89909023
  hyper
catcctgcttaaatcacactccgaggggctcgttcctcgctccctcttccccctcgcttcctctctttcttccctc

SEQ ID NO: 52481 - DNA, 30 bp, Homo sapiens
  chr15:89912126-89912156
  hyper
acgccagccccgaccgggctgctcctgccc

SEQ ID NO: 52482 - DNA, 222 bp, Homo sapiens
  chr15:89913306-89913528
  hyper
gtgactagagtgtttcgggattcacgaggctatgggctgcatcccttgggccgtccctcccttcccaatgcacctgggagcctgtgtgctgatggtgacctcatttcggaggaaaccggagcagcacttcctgcccccttgccctgcactccctgccttcctccctcaccggccaacgggtgtgggcaaaccctgggccccgggcttcgatcttcccctccc

SEQ ID NO: 52483 - DNA, 218 bp, Homo sapiens
  chr15:89913750-89913968
  hyper
ttgatgcaaacctcccgcttcagagaaagatcgcggcagcagggctgcggagggcgatgagcatgccagttctaatctccaggagcccatcccacaccttccttaaacggccctcggagagaggccagaggccagaggccaacccatccgatttcggcctcctggtacgaatgcctgcccctactagagcaatgttcgaatcccctttggacacttaa

SEQ ID NO: 52484 - DNA, 157 bp, Homo sapiens; identical to SEQ ID NO: 10376
  chr15:89914292-89914449
  hyper

SEQ ID NO: 52485 - DNA, 360 bp, Homo sapiens
  chr15:89914866-89915226
  hyper
cgagccggcctgttcgctggctcgggcgcccggttccgggctgggcaaggagcgcttggccatgagccgcgggacagcccaggcgggacggatgcgccctccagggcccaggcgaggccgcgcggtgcagaaccgccgggatttctccaacccgggtatgcgcacccacagcagcggcctttggaggccgcggcgccattttagtggccttccttcccccttggcatctgtcgtgtatggtgtggctgggtgtccccagctccccccatcccgctctgactttggctgccccctccgccagcctggatagagtgaccaatcagctctgacctagggtgggatgcgcgtcaccatggcgac

SEQ ID NO: 52486 - DNA, 247 bp, Homo sapiens
  chr15:89921790-89922037
  hyper
tagctgggagtggcgcggctgcttcccgcccgcgcaggatcaggccggcccccgcgggcctggagctggatccagagctagggaaactggaaaaacaggcacaaactcggaagccgcggtacggcaagagcctaagcaaagaatcctttccaagattcacacctcgtctacaccagggcaccgcctgggcctacggccttccgaacccgaagcgcccgcagcccagagctggcatcaggccatcagg

SEQ ID NO: 52487 - DNA, 1203 bp, Homo sapiens
  chr15:89942571-89943774
  hyper
aaaggccccatcaacctagcccgggcccacgaccccaaatgaaacatctttcactcgccccccagcagcccgggccgcgtttgaccactagtagggcagaaccactgaccggcaggcggcgctccccggggctcccggctcgagccccagggcaccgggaggagtaaggaccccgagcgggagggagacgactggggggcgcgcggcacaaagagctttttattcaaatttgtttagagtttcgcgaatttgcatgaaaaatgtgtgagaaaagccagctccggtgacctcatccgcacctgccattaacgttcaattagcggctgaatagcggccgccgacgcgacgtgcagagaatccggcctgccccgcgcagcgagggcggcgggccaggcccgggatagggtgggaccgagggagggggacgcggcgtagggccccggcctactcctctggcccggagacccaggacctcgtccgcactccaactctccgagggaacgcggggatctcaggactcacgagcccaagattgtttggagcgcgccgggagccttaggatgcctggctccctctgggcgcagaaaagggcgggcttgcctcctccccaggacggaaggtggccggaagagccccgtcccagctcagatgggcttccccgccatcttccggacaaagtgtcaagtacaagttcaagttcagggccaggcccgggggggggcgctgagccttacccggccgcctttgttctctggcataatcgctcccacgtccccctcccgggcggggcccagcagagacccccgccccgccccgccccgccgcgccccgcaggagcctcctcctcccgccggcgcggcgcctgtgccctggtcccggtgtccccgctcggtgccaccgaaggatctaggggctcgggccggggagggggtggaggggggagtggaggcgcgatacgaacccgtgggagcctccccaaccccgcagtcccagcggcaaactgtgcttggtcggacggatgcccgcgcggaggtaagagccctttgcgggattcgcccgtatccctgtgccccgccccccgcctgggactacgcgggccccaaggagcggggcggaggatggtgtgctgaaaaccggctgggcagccccgctgggcctccggtggggtggggggcgcactgtcgctccagggctctggggagt

SEQ ID NO: 52488 - DNA, 80 bp, Homo sapiens
  chr15:89943816-89943896
  hyper
cgaggcccagtaagatcgccggcctttcccaaaggcgtttggctcacccatctctcctcggctagcctcttggtctcccc

SEQ ID NO: 52489 - DNA, 30 bp, Homo sapiens
  chr15:89945259-89945289
  hyper
aaagggaaagcgaaacgtttttctgcaaaa

SEQ ID NO: 52490 - DNA, 1120 bp, Homo sapiens
  chr15:89949616-89950736
  hyper
cggccctccgcggcttgccagactgtcctgcaaaccacctcacccgtctctttggcgcaggagactcaggctgtaaccggagaaaacacttcaccctggaaccctaactcaggtcctggcaaaagatgcgagaggaagacttgctctcttaataaatctcggccgcccgcacatctggcccctagacctgctcggtagaggactggctggtggatgcgcggtccaggccgtgggcactcgacccacctctattttccttcccgaggcgcccctggattaccactttcggtttgcgcttacatccgggatgtcgaatttcccagggaatcataattattttatctataatttattctaaccccaaggttccaagaaaatctgtaatgaacgttaatatctacagcctcctggtcaatctgcatcgggcgagagagccgtcgggttcttcgcagtgggtgacttcaggtccctgtgccttgtttcctatcactctgaaagaattttctccccaaaggaaatccaacttgtttgaaacaggtttctcctctctgactttctgcactggagaaaaatctggatctgcttttcgaaaagattttttttttttaagaggcatccgggcaggcctgaggagtcgggctgaaggtgcgccagccattattgcctcagacctccggacgctacgtaccccaagcacctgagctactagtggtatatcagacaagatttctgggagcagccccaggagtccctccgcccgctcccagtccgcaagcgcagaggatcctgcgctctgtcccccaaggtcttggcgtttgctgagctctctccgcgcgcgtcgaggagaggccgcctctcgtgagcaaaagctgggagttgttagagattccgcagccgctctgagggcgagatcgggtttgtcccacgacctcggcgccaggaagctgtagaaagagacagaccccaattttctccccttggagttgaaacaaaacctgaaagcccgaggttgcccgcaccgccagaggtggcgcctaggcggcgggggcgaccagagccgcgtgcccgcgcggttcccaggcctgggttctgtttcttcctattttagttagttacttag

SEQ ID NO: 52491 - DNA, 34 bp, Homo sapiens
  chr15:89951342-89951376
  hyper
aagctaagataaactcgcttttcttccggtaagt

SEQ ID NO: 52492 - DNA, 680 bp, Homo sapiens; identical to SEQ ID NO: 10381
  chr15:89951772-89952452
  hyper

SEQ ID NO: 52493 - DNA, 300 bp, Homo sapiens; identical to SEQ ID NO: 10382
  chr15:89952699-89952999
  hyper

SEQ ID NO: 52494 - DNA, 198 bp, Homo sapiens
  chr15:89954191-89954389
  hyper
gaccctgcttaactcccatgacgtcagatcaccacttagagcgtcttgatgcccaggctagaaggatctcggttgcaccagctttccccactgcagtttcaggttttgtcccgacagactttcagcaagcggcttagctcagccctggcgctgccttccaggaaagaggggcagcagcagcctcggctgagccgggtg

SEQ ID NO: 52495 - DNA, 251 bp, Homo sapiens; identical to SEQ ID NO: 10384
  chr15:89954590-89954841
  hyper

SEQ ID NO: 52496 - DNA, 52 bp, Homo sapiens
  chr15:89955001-89955053
  hyper
gggatagtcgcaccgacaaaaatcacaggaaggagcgcgcagttgactgtgg

SEQ ID NO: 52497 - DNA, 59 bp, Homo sapiens; identical to SEQ ID NO: 10385
  chr15:89956294-89956353
  hyper

SEQ ID NO: 52498 - DNA, 35 bp, Homo sapiens; identical to SEQ ID NO: 10386
  chr15:89956422-89956457
  hyper

SEQ ID NO: 52499 - DNA, 233 bp, Homo sapiens
  chr15:89959771-89960004
  hyper
caggcgctggggggcgccgtgaagtcaggatgactgggaagtgggggcttggagagggcgcagtgaggtgcttttgaaccaacgcagacctacagggccgacttcctgagggcgaatgtcgctttgctgcagcggggcacgggtttggttcccggcggggcctggcctgggaagcgcggggctgagggcgatgcccggccgctatcccgagtcggtgcgtgcctatgctgcag

SEQ ID NO: 52500 - DNA, 133 bp, Homo sapiens; identical to SEQ ID NO: 10388
  chr15:89962758-89962891
  hyper

SEQ ID NO: 52501 - DNA, 82 bp, Homo sapiens
  chr15:90016166-90016248
  hyper
ggagctgcaaatggtgtgtggcgagcgccaccttgtgatcgccgtgcggatcacatgccacggagagcagggtggtccttca

SEQ ID NO: 52502 - DNA, 527 bp, Homo sapiens
  chr15:90039452-90039979
  hyper
ccctgcagaggccggcgagatgcggagtccgcggctgcagggtagatcccctcctctgcccagctctgggccgagcccttggccaggtggggaccggcgcggatatgcctccgctgggcctgcaggcggcgagacttacttgggtagcgatagtagaattcgttctccatgtcgctcaagttcttgtgcgtcctctctgaccaccagtgggcgtcggcctcgaagtcgtagcgcacgaacaccccgaagagaatcaccataatcacctgcaggagcaggcaggtgagcggcagccgccagcggaggttggtgttccaggccatgctgcaggggtgcctggccgggctggcagcgggcggttcggacgctcggaggccggcggggcttttgagacccgggcaggggggcggggcggccacgtggggcacggagcagctgactcgggcaccgcccgcgcgctcgcccaactggcaggggcccaacccaagccgagggccccaaaagattccccgcgtcgggctggggga

SEQ ID NO: 52503 - DNA, 397 bp, Homo sapiens
  chr15:90198066-90198463
  hyper
cgttaattcaatcacccagcccctattgggctcccgaccctgggcacacagcggtaaactctgcctcgcaataccgtgtgggccttcgcgcacccctccgcgtgagcgttccgagcccggtgcagtcccggcttccgcgcgcccctgctctccgcacagcgctcccgctccgaaggtgctctgacaaccccgcaggcgctattcggagccggggcagggcagctggggctggaggcggcgggcgcgggacggagctccatgaaagttggaagaagtgattacaaatcgggacccgactctcgcagccttggcgctcgcccctccacgcaggcccgggatgccggcctcagcccccagatgtcgggaagacggcgccggccagtccaaggaagagctt

SEQ ID NO: 52504 - DNA, 30 bp, Homo sapiens
  chr15:90294553-90294583
  hyper
catcaaagtgggctcggggcttggaggggg

SEQ ID NO: 52505 - DNA, 450 bp, Homo sapiens
  chr15:90319562-90320012
  hyper
agcctcccagagcctgcagcccggccatggcccagtcgcctcctccgcagagcctcctcggccacgaccactggatcttcgcccagggctggggctgggccggccactgggactccacgtccccggcctcctcctccgattcgtcgggttcgtgcccctgcgacggcgcccgcggactcccgcagccacagcctccgagctgcagctcccgagccgcagaggcagccgcgacgacgcccagacgagcgcgcaccggaccagcgggcggacagcggcagagcgccagcgagcgggagaaactgcgcatgcgcacgctggcccgcgccctgcacgagttgcgccgctttctgcctccctccttggcgccggccggccagagcctgaccaagatcgagacgctgcgcctggccatccgctacatcggccacctatcggccgtgctgggtctca

SEQ ID NO: 52506 - DNA, 30 bp, Homo sapiens
  chr15:90357977-90358007
  hyper
agcccccgccctcccgccccacttgcctgg

SEQ ID NO: 52507 - DNA, 305 bp, Homo sapiens
  chr15:90455904-90456209
  hyper
ccacccgatcctgttgcggggttcgagccggggcaggggaggccgacccgaggccgtgagcccaggcctacccctggtgggcggcggggtcccaggcccctggcagccggacgctctgcaccgccttgttccggagcgcgccgtcgtggtagatgcggctcattctcccgaccgcccgggcaccccggcacagagccggcgcactgggctgggggcgcggcgcgggaagtgctgcaggacgcgcggggacccgcgattcccagccggcggatccgggaatggcgcggcccggccctcaggcgttc

SEQ ID NO: 52508 - DNA, 30 bp, Homo sapiens; identical to SEQ ID NO: 10391
  chr15:90627537-90627567
  hyper

SEQ ID NO: 52509 - DNA, 69 bp, Homo sapiens; identical to SEQ ID NO: 10392
  chr15:90628226-90628295
  hyper

SEQ ID NO: 52510 - DNA, 30 bp, Homo sapiens; identical to SEQ ID NO: 10393
  chr15:90630474-90630504
  hyper

SEQ ID NO: 52511 - DNA, 370 bp, Homo sapiens; identical to SEQ ID NO: 10394
  chr15:90631579-90631949
  hyper

SEQ ID NO: 52512 - DNA, 30 bp, Homo sapiens; identical to SEQ ID NO: 10395
  chr15:90633802-90633832
  hyper

SEQ ID NO: 52513 - DNA, 82 bp, Homo sapiens; identical to SEQ ID NO: 10396
  chr15:90634776-90634858
  hyper

SEQ ID NO: 52514 - DNA, 30 bp, Homo sapiens; identical to SEQ ID NO: 10397
  chr15:90645565-90645595
  hyper

SEQ ID NO: 52515 - DNA, 30 bp, Homo sapiens
  chr15:90744665-90744695
  hyper
tgtttcccacctcccgccccccaggtccgg

SEQ ID NO: 52516 - DNA, 30 bp, Homo sapiens
  chr15:90777187-90777217
  hyper
gccgcgtcactgcccggtccccgcggcaac

SEQ ID NO: 52517 - DNA, 218 bp, Homo sapiens
  chr15:90792592-90792810
  hyper
aagtcccatgatacaccggaagaatctggcgtcgaggccggccagctccaaagggcaaacgctgtctcccccacccaaggtagcctcggcccgcgcccaagtgggtgtggctgcgggaaagccccgcccccaggacgcttctccaatgggaactgccctcgtgtccatggcaacggcggcggccacgggcttgctagaggaagcgctgccccggcagc

SEQ ID NO: 52518 - DNA, 90 bp, Homo sapiens
  chr15:90891917-90892007
  hyper
gtgaaaatgcgttgacggtgtgtgcggtgtaaagtttctatatgtcttcaccttctgtctcctcacggtgggagccgccctctctttccc

SEQ ID NO: 52519 - DNA, 30 bp, Homo sapiens
  chr15:90895374-90895404
  hyper
cccagaaggctaggcgataattgacagctc

SEQ ID NO: 52520 - DNA, 30 bp, Homo sapiens; identical to SEQ ID NO: 10399
  chr15:90895795-90895825
  hyper

SEQ ID NO: 52521 - DNA, 30 bp, Homo sapiens
  chr15:90931975-90932005
  hyper
tgggggtctgggtacgcgggctctgcccgt

SEQ ID NO: 52522 - DNA, 30 bp, Homo sapiens
  chr15:91072782-91072812
  hyper
acctgctcgaggtccggtcgcccaggttcc

SEQ ID NO: 52523 - DNA, 31 bp, Homo sapiens; identical to SEQ ID NO: 10400
  chr15:91414432-91414463
  hyper

SEQ ID NO: 52524 - DNA, 77 bp, Homo sapiens
  chr15:91427391-91427468
  hyper
atctgcctggggcctcgccctgggctccccctcctgacccccaccttgcgccccttcccggtgttcccggggcgctg

SEQ ID NO: 52525 - DNA, 278 bp, Homo sapiens
  chr15:91427788-91428066
  hyper
ggggcctggaggagcggtgggagctgggggcgcggcaggcaggggcagagcaggcgttccgagggccagagacccacccaggtgggggtaggggccgcggaagggcggggatggccgcaggggcagggctcaggctgtgggcgcctgaggcttcagctggggcaggcttggcctgtcgaggacctgggcaagggtgtccctgtaaggggtggtgggtggaagggcctggggagggaggctccaggttggctcctgttcccgaacgtgcggaggagacc

SEQ ID NO: 52526 - DNA, 30 bp, Homo sapiens; identical to SEQ ID NO: 10401
  chr15:91475706-91475736
  hyper

SEQ ID NO: 52527 - DNA, 30 bp, Homo sapiens; identical to SEQ ID NO: 10402
  chr15:91477883-91477913
  hyper

SEQ ID NO: 52528 - DNA, 30 bp, Homo sapiens
  chr15:91537652-91537682
  hyper
acgctccaagcagccgtgagtccaggtcca

SEQ ID NO: 52529 - DNA, 30 bp, Homo sapiens
  chr15:91565598-91565628
  hyper
cccagatgggccctcgctcctcagcagcac

SEQ ID NO: 52530 - DNA, 901 bp, Homo sapiens
  chr15:91642936-91643837
  hyper
tcctgatgaggcaaacgagaacaaagcagtcgaacagcaccatgatcgacgatactttgggggcggcgtgatcagaggattccccttcccgggaacttgcgtctagtcctctgacgcatcctagttcggagtgggtggaagggcatgtggagtccacagcgccccctcgccctaggcggggtggagacagcgagacgacgcccatgatcagctggttacaaaactcgaggaataagaagtttaatatttattggtctgcaaatccggagaccttgcggcctcactggtcctccttccctctgagctatctccacacccagccttcgatcagaaggagatttagaagcagagctgcccgcagcgaatacttttaatgcccgggccgggaagaaagcgggttaggatctgatcccgctgagtagaggacccaggagcctcccgccccgcgtgctctgtagcgcgggggcgcgctgcgcgctgcgcctgggcggctggcgggggcggcgtgggcgcggtgatgcaggtgtgacacccgccggcgcctgcctccgcccggatcgcccagctccgcgttagccggagctgcacgcggggctgccggggcggacgctgctctgcctgcatccggaggcggccgccagcggatttgccacccaggtaggggactgcgttgctcgctgcggtgcaaccgacccagccggggcgcggaccccgcgtgcgccagggctcccagactcgcctgcctgggctgaaatatacacgctcgcacagctgagtgctgttcatagtaaatggcacaaaagatcggagagtcttgaaaaaccggcgcagaaaagcaaggacttgcccgctgcctggagctgtgcgcttctttgaaagcggcctccccaagggctgtttt

SEQ ID NO: 52531 - DNA, 30 bp, Homo sapiens
  chr15:92396225-92396255
  hyper
gctggggcagaaaccggcaggcggcagaag

SEQ ID NO: 52532 - DNA, 444 bp, Homo sapiens; identical to SEQ ID NO: 10404
  chr15:92459206-92459650
  hyper

SEQ ID NO: 52533 - DNA, 990 bp, Homo sapiens
  chr15:92936663-92937653
  hyper
tgcctggctgaaaccgccttctcgccgcgcgctgggggctgtccccaggtgttggtctttgtgtcgagaaaactttgcgaggaggcgagggagctggacaaagagcgggcgagggagggcgtttgccagcctgaggggtgcgccgggcggtgcgcgcacttccctgggctcagctccgtacccggtcgctcgcggtggccagagcccagtctctctaggccaggagtggcgtccggctgcatccccgcgccctcgggagctgaataaagccaggcgggagaagcaaaggctagcgcctggacgctggagttggtgggaggaggcgagcagaggcgcggagcaaagctgtcaaactgcgcgcggagccgggcgcggggcgggggaagggagaggagggagggaggggcaggcgggagccgggagggagcgagcgggctcgccgcgcctgagcaacccctgcctgtcgctgccgctgccgctgccgctgccgccgccggcccggactcgtccggagcgcagggtgtctgcccagctgcgcgcggcgcgcggaggctccggcgtccgccgctgcgccctccggcccctgctcctcgcgccggcccgcgtgggtcccggcgggcgcgaacccaccatgcagctgcagttccggagctggatgctggccgcgctcacgctgctcgtggtcttcctcatcttcgcagacatctcagagatcgaagaagaaatcgggtaaatagctgctcccaggcccgtgccacgagccctggcgggatctctccctccttctgtactctccaccctccgaccccctttgtgtgcgccgcgccccgctgtagctccgctggagagatggggacggtttggcagaaggtggcggcgacaggggcccgggacggtttggggagaggagggtgggggcgcggctgctgtggggtgtccccgggcggggttcacgggaagcccccagctggcccgcgtcgggaagcggac

SEQ ID NO: 52534 - DNA, 364 bp, Homo sapiens
  chr15:92937696-92938060
  hyper
cgccggggtcgagggagggcgccggggagtgtctcgggcgggcggaggggccgagagtggagggaggcaggagtttctttgtctccagcacggccgctttctcgccttggcaaagtgggcagggggcgcgcagggatctctgagctgggggaggggttcctggggccggagcggagggcggggttctgcatgggctactgggaagcggaatgtcccctgcacacacagacaggcacacgcgcctcccgccggcccgggagcccggcgtaggagctggcaccactagagaagggctcgcatagctggactgagaccccccgccctcgcctggctttggacgttcagccaagccacggcaaccccg

SEQ ID NO: 52535 - DNA, 171 bp, Homo sapiens
  chr15:92938122-92938293
  hyper
cgccgcccggtgggcttctgggccctcaggcgggcgatctggcgctttttttctcccgacctcgccagaggtagggtgggaccgcgagcccggatcctcccggctccggacttcctggagtgcgcacttgaggcgcgggacgcaccggctgtgtgtcccaggggctgagac

SEQ ID NO: 52536 - DNA, 56 bp, Homo sapiens
  chr15:92938315-92938371
  hyper
cggctcgccgggccgggcccctctccggaacctccaaagggcggtagacgacaggt

SEQ ID NO: 52537 - DNA, 907 bp, Homo sapiens; identical to SEQ ID NO: 10407
  chr15:93198353-93199260
  hyper

SEQ ID NO: 52538 - DNA, 30 bp, Homo sapiens; identical to SEQ ID NO: 10408
  chr15:93257898-93257928
  hyper

SEQ ID NO: 52539 - DNA, 116 bp, Homo sapiens
  chr15:93352979-93353095
  hyper
ttgctgcaaatccaacgaggcgagtcctcttggatcgaattaatgcattggctcttcccttcgcaacagctttgatgaccgtttcccgcctttgtgcaaagcgttagaacaaaccc

SEQ ID NO: 52540 - DNA, 144 bp, Homo sapiens
  chr15:93353295-93353439
  hyper
catttagacatcggtcgctgtgtattacaaaatgcaagaaataaagcacaatcgtcaagtgctgaaggcccacagcttccccttcgtgtccacggatctagtgctgaaagacaaaccctttgactccgccggggcagttggtcc

SEQ ID NO: 52541 - DNA, 30 bp, Homo sapiens
  chr15:93363651-93363681
  hyper
cggtaattttccaccgccccgccgacgcgg

SEQ ID NO: 52542 - DNA, 30 bp, Homo sapiens
  chr15:93427723-93427753
  hyper
ttgtcttcattctgcggagctcttgtgttg

SEQ ID NO: 52543 - DNA, 30 bp, Homo sapiens
  chr15:93443565-93443595
  hyper
gaggctctagatggcggctgtgccttagag

SEQ ID NO: 52544 - DNA, 117 bp, Homo sapiens
  chr15:93444269-93444386
  hyper
atttagttttttggtgcttaccgttgttgtgttataacaatatcgttaacatcgtcaggactttgttcctgataataaaaagcatcgatagaagccgggaccttacctttctttcaa

SEQ ID NO: 52545 - DNA, 753 bp, Homo sapiens
  chr15:93615625-93616378
  hyper
gtccgtgggtgtccccgcgtggccaaatgggtggaaacgagacgaggtctccggggagggggctgtcgggaactcggctgggacctcaggggcgaccctggctccacccctgggcacccggcaggtttgcaaactgctgggcgaggagctgaagaaagtgtccccagcaccgagggcgtgcctccccttctccccctcttcccgagcccctaggaggcacgttcccagccaccccctttctcggaaaaagggaagggagtgaggcaccccggcccctgcgccctccccacacggctccatctcacggcaactcgggcagggtgcccctctccgggtccccaagggcaggcatcgcacccacgacggggtgcgggagaaacaaaagacccgtggaaataggaggcggggtccggaggaggtccggagaacttgagcccggactcactcgcgcacatctggcccagcattgaggggcggcccagggacccggccccgcgcgcccggccggcagtgccttacctgcggggaagctgcagagaaggaaggcgagggtcggccagaatcccagggctgaacgtcctgcccctctccccatacccatccatccagctcggcctgttaccactagcctctccctggaagaagagttcagaaaaaaagaagaaaataaatcacgctgcgaagaaagggcagcctcgctccgccggcgggagcagcgagccgggaggctccgtccacctcggccgcgggcgc

SEQ ID NO: 52546 - DNA, 357 bp, Homo sapiens; identical to SEQ ID NO: 10410
  chr15:93616396-93616753
  hyper

SEQ ID NO: 52547 - DNA, 30 bp, Homo sapiens
  chr15:93631095-93631125
  hyper
gttctccctggtaccgtcgatactcagaga

SEQ ID NO: 52548 - DNA, 20 bp, Homo sapiens
  chr15:93631375-93631395
  hyper
tgggagaactgattctacct

SEQ ID NO: 52549 - DNA, 752 bp, Homo sapiens; identical to SEQ ID NO: 10411
  chr15:93631632-93632384
  hyper

SEQ ID NO: 52550 - DNA, 661 bp, Homo sapiens
  chr15:93632602-93633263
  hyper
gcggggtgcgggctcgcgttgccccgccccgccgcggccccaccctcccgcatcagcaccggctgggtgggtgcggagtgcgccagcggccaagtcaagactccttgaatgctcaggttagggggcgcgggcggcaagtgcggcgactccccggggcgcctccaactttccgaatcgcccgcagggttgcggtggagcgcacggtgtccttcagttaggcggtggtcgaggggagttcctctgagatttctggagaaggcggttacatccaagacaaatgctgttgcgctctgcggagacgcacctttgttctatagagattttgttgttgtttaagaatcttcctgaaaaaactaatacatatgtattacatgctaacacacgcatacattcttgcgtagaattgtacataactcaggagtgtctagagtgaaaagaccgtatcgcactccctcccacggccgcggctctcccacggccgcggctcccccgcggtaaccttcggtcagggtgtgctctgccgcggttctttccagtctctgcgcttttacatgcacacgcacagattgcgagtggaatctcctgggcttttcaaaagaatgttttcaacattaagcgcatgcacacagtggcttgaacacggccacgtcgggagcagtaa

SEQ ID NO: 52551 - DNA, 31 bp, Homo sapiens; identical to SEQ ID NO: 10414
  chr15:93655833-93655864
  hyper

SEQ ID NO: 52552 - DNA, 30 bp, Homo sapiens
  chr15:94774273-94774303
  hyper
tctgtggatctgggcgggcatcttccaccc

SEQ ID NO: 52553 - DNA, 30 bp, Homo sapiens
  chr15:94774835-94774865
  hyper
gcaggtgaggggcgcgcgcctgcccagctt

SEQ ID NO: 52554 - DNA, 30 bp, Homo sapiens
  chr15:94775179-94775209
  hyper
tccccggggcgctacggaggtagtcaccgc

SEQ ID NO: 52555 - DNA, 14 bp, Homo sapiens
  chr15:95387987-95388001
  hyper
agtcctttggagtg

SEQ ID NO: 52556 - DNA, 101 bp, Homo sapiens
  chr15:95388253-95388354
  hyper
gcgggcccagggccgccagtcccccgtcccccggtcgcccgccgccccctggccaggccccgccgccgccgcccgctgcttcctcccgctcttcctccctg

SEQ ID NO: 52557 - DNA, 71 bp, Homo sapiens
  chr15:95388665-95388736
  hyper
ggagaagaatatctcaagcccttcgtagaagttcctctttgtttccgtacggcccttgataccatttgtga

SEQ ID NO: 52558 - DNA, 30 bp, Homo sapiens; identical to SEQ ID NO: 10416
  chr15:96284567-96284597
  hyper

SEQ ID NO: 52559 - DNA, 237 bp, Homo sapiens
  chr15:96596584-96596821
  hyper
gagaagcagtaaatccattgtcgttaaacagcggggagccgctggcgctggcagcctgcccaccggcgacggtgaaccgggctggcaccgagcagggagccgggcctgccagcctgtccgcctcgcgagaggaggcccgggctcgccctctctgccctccagatgactctttgcattcttgtcaaatatatttagaacaagaggtgtccacttaaagagaaacgtttgttaatcact

SEQ ID NO: 52560 - DNA, 893 bp, Homo sapiens
  chr15:96864797-96865690
  hyper
ccctcaaagccttgctaacttcgtcaagccctgccagcctttactccttggccacttgggttcgcagtacccagccaagggccccgggcgggtttccatcgctgggggtggcctggtacccccaaagctgagttcccgcctaggagaggacgctgacgtcctggggcttcctcggtgcctgtcacccagccccctgccttcctcctcggcctcagatgtcgtcccacctgcccacgagcagggaacctggaacccactctcccggcagtccccagcgggttccgccacccggcggccgcccctgacaccgagtgggtgggaggaagaggcagctggcggggatgggccattgagacctcttgaaaaatattaaaagacaggatgggtagagatttctccgggagaaagttcgagggtgcatcgggtcgcggctgggaggagtacccgaaatgccagcaggagaaatgcaacctgtttaggccacaccttcaatccccgaggctgtctggagagactgcgtgcgggggacttgccggcgttcccacaccgcgcctgcaatccactcccgcggctgcctggcctctgccactcgcggcttgaagccagtggctctcaagccctcggccccgcggcggcccgcgcagccttcacccggcgccggcaccacgaagcctggccgcagtggactccccgcagctcgctgcgccctggcgtctcccgtcgaggagggagggacggaggcctgagccgggagctccctggcggtggtcgggccgccccccttgaggcctgctcccccctctcggcctcgccaaatccctgaaagcccagtcccccttcgtcaccccgggggcttctaatcactcggtatcgatttccctaactcttttcat

SEQ ID NO: 52561 - DNA, 30 bp, Homo sapiens
  chr15:96869855-96869885
  hyper
aagcgttaagactgcggagcctcctatctc

SEQ ID NO: 52562 - DNA, 31 bp, Homo sapiens; identical to SEQ ID NO: 10419
  chr15:96873708-96873739
  hyper

SEQ ID NO: 52563 - DNA, 325 bp, Homo sapiens
  chr15:96873742-96874067
  hyper
cccgcggccgccatggcggggccgccgcagtccggccaatgacggcgagggggcggcgcgcgcgcgcctggccaggccaaccccggctgctgccttataaggcgcgccgtcgccatggcaacgtgcgctaagttgcagcagtcgtgtcaaagttcactatatagagagctcagtgagctgatcgcggagaagccacttctgccagccccggcgcctataaatcgcattccctcccgcgcccccctttttagcatatttgatcactttgattctctgttcttttctctccgcggtgtgtgtgtgcgtgcgcgcgtgtgtgttttct

SEQ ID NO: 52564 - DNA, 36 bp, Homo sapiens
  chr15:96874394-96874430
  hyper
gctccggcggcagcggcggcccgggcggcccgcagg

SEQ ID NO: 52565 - DNA, 30 bp, Homo sapiens
  chr15:96875089-96875119
  hyper
caaaacaaacacaccgggccagacaagcca

SEQ ID NO: 52566 - DNA, 265 bp, Homo sapiens
  chr15:96876487-96876752
  hyper
cgctcggcgcggggcgcgggctccgggttggggcgagccaacgccggggtttctttgtgtttctgcgagagcgactctcccggtccggagtcagataacagcctgggcccgagcctcgccggctttccccggcccttacaggccctgcccaggctccgctagtgccggccgcctgctccctgcctctcccggcttcctctctctttagccggcctctctctctccgccctctccctccgtctctttctccgagcacactgattag

SEQ ID NO: 52567 - DNA, 622 bp, Homo sapiens
  chr15:96883977-96884599
  hyper
gagaacccagttagacgcgaaatgcaacaatagtgcaaggagagagaggggcgctcgctgcttctcgccactttcaaacaaacctgggggaagattgagcccgggggggattccagcctgctcgctcggctcgcggtcgccctgcctcggcctttcaccattagctctccctgggccgcgaggagctggggctcaaagttagcgggcgacgtccgaggcttagcctctagccggctgcagggacgggggcctggagttggcagctgctacgggaaagtgcctgccccccagcccccgcccccacttacgtgcggcagaattccgccagcgccccgggaaagtccggggtgccgggcgcgcggagctgcactcctgggatgtgcattaagcggcgacaggcggggggggcgagggcgggggcggggggcggtcagggggagctcgagcgtgtgaaactctgcctcgaatctcgcttttgacttggtcctatgagctgagccaacatggcgtctcccactgcaccgcgagcgccgggctgccaggctcggcagggccgggtaatagaaaacacattggttaccaaaaagaaaaaaaggagggcggggggcgctaaaggccattc

SEQ ID NO: 52568 - DNA, 708 bp, Homo sapiens; identical to SEQ ID NO: 10423
  chr15:96897392-96898100
  hyper

SEQ ID NO: 52569 - DNA, 755 bp, Homo sapiens
  chr15:96899903-96900658
  hyper
agacatctgcactggccgcagctgaatggccggaaatacacggggcccgaactagtggcttcctaaagaccacgtctcatttatcttctcctttctaggaaagcagctccccagcttgagtgactactttagacttggtgaaattgtgcctatatatttttctccttcttctgttattttcccttcatcccaatgcagccactgtgggatctgtcggtcacagataatggtttttaacccgtcagaagacctgtgcgttgcggcttctctgagggtttcgattacggaaaaagtccgggtgacgtacaattaggctgccgcaggctgggaggcttggcggcgtcattccagtttctgcagcgaggtggcgctccaaggtacggcagcgcgcccgggttttcgccaccgagcgcatccgccgccgcgtccacgcagcgaggcagcggccaccgagcaatgttaactcggggttcctaaagcctctgagcggaaaatcgggagcgctcagacccacctaggcggagcggtccgcagggtgggcgaaggcctgaggccacgactggggaaggctggcggcggcggggagcgctgtgatggcgagttccggagcacactccgcgcgccgccgctcgggggaaatcttcgaaattcccgggcggggcggaggctggggctgcaggtccccaggcacggcgagcggcgcgctggagtcagcctcggcccaggcacaccgagcaagcgcccaatccaccaca

SEQ ID NO: 52570 - DNA, 134 bp, Homo sapiens; identical to SEQ ID NO: 10424
  chr15:96903476-96903610
  hyper

SEQ ID NO: 52571 - DNA, 367 bp, Homo sapiens
  chr15:96911324-96911691
  hyper
acacagggctggttgggtcctcgggtggggctcgaggaacctgctttcaggtgaattcgttccgggcgttcggtgtccctgggcttgcctaggggtactggggacccttagtgggccagaacccgaagctgaacgtgaataagggacagggtaggacctgaaattgcagagacatagaaaatcaatacgtggtcgggagtcaactgcgcgcgaccaagggctctgccctccctctctccgttgatttggacgctgggaagctgcccgccgtccttccccaccccctttgcccagccttggcaagacctctccggaaacatactcgcgttaaggaactgggaaagcttcctggcccggagctaggagc

SEQ ID NO: 52572 - DNA, 39 bp, Homo sapiens
  chr15:96911763-96911802
  hyper
cgctgggatccatctcctcagccccggtttcccgctctg

SEQ ID NO: 52573 - DNA, 225 bp, Homo sapiens
  chr15:96952091-96952316
  hyper
tcaggaggaggccaagccagacgtccagctcaggggcacttggccatgctgaggactgcgcacctgggccacgtggtccgtgggacaccctggagctcgggatccctttgcaagggttggggagagataatgaaacccgcatttgcgcgctccccaacccgggccatctgattagtcatctgagttagcccttcacgtgcacacgtgggacagaaaaactccaac

SEQ ID NO: 52574 - DNA, 310 bp, Homo sapiens
  chr15:96952788-96953098
  hyper
aaaagggaggccgccgcggctcctttgctcggctgtcagttgaaaagagaaccgccgccctctggacttcaactcccgacggaaaaggcattttattatgggttatgacaagttgcagagagacgcggacaactcagtaagaaggagcggcgagcggaatcaaaaatgctcgagatgtttgcaagacagagcgaacacggcttcaaatgacaggtgttagcaggactccagacgggatctgcgggatcggccgggtgggagccgcaccgcacggcgccgggtcggggagagaacccggcctggggaggcc

SEQ ID NO: 52575 - DNA, 101 bp, Homo sapiens
  chr15:96953131-96953232
  hyper
cgcgcggcccggagccgaccccgcctcctcttccgaaagtcctaagtcaggacagcggcagatcgtcccagaaaatcagcgccaactccctctgctcaaat

SEQ ID NO: 52576 - DNA, 173 bp, Homo sapiens
  chr15:96959375-96959548
  hyper
ggcctttcctcttgtcgctctcgctttattacattagcgcgggcttccccgcgccggcgtgggctcagaagccgaggcgccgggtcacccatgacaaatgtccccgtgtctcgccaacaggccccgcctggccctgccactccatctgcccaacaggaccccggagagtgctt

SEQ ID NO: 52577 - DNA, 241 bp, Homo sapiens
  chr15:96959719-96959960
  hyper
cgaatttcggggcttgaaagcgctaccggggcagccagattactacctcccactctcacctccatccctccccgccccttgcccgtcccacgggcctcagatttgggcgtagggctgggtagggcgcctgggaggagccagagggggcggatcaggccgggatttggcgccaggtacccccacccgcccgcgtcccggggtcgccagctgactccatgtgagcccacttggcaccggcccc

SEQ ID NO: 52578 - DNA, 940 bp, Homo sapiens
  chr15:96960189-96961129
  hyper
cgtcaacacctcgagctgccccggcgagttatttcaacagactgggagagagccgtactatttgagtggcaggcgacgcctttccccactctcggtatttatgttgcaccgacggcacttaggagagcttagttttagatgcggcattaatcttcacttgttaagagatagtctgtcagcctttaccaggctctcccactcccgacgtgcaaggccctcccccagcgcgcggccacccccaagctggtcctcgcaaaggcgcgcggagccgcactgccgaggagaggagcccggggttaaactggggcaaggcgagcgagccgcggacgccaggcgcgagcgcaaggttaaagtcaaaagctctgcctgggccagcactcaagacggtcctggcaccaacgcctttcatttttgcctgtttgcaagcggggaaagtggagtcctcaatcatagcgaggagcttttcttaagccacaaagcacacgggcgcaaacatcctcgctgctaactcagggcaattgtcttcctattttctcgttcctgacccccaagtttcaccggtgggaagtcatcgaagatctcccttttaccaccagctctacggggtcgcttttctcttaagcgccctgtgagggtcctcccttttaaattatttcctgcccagttatttttcccccaattaatccagaatagttttctcatctgctccagatgcacgcaaactgcagagctgaaatgaactgaactaagagcggaattgaaatacaccaggggtttccctgcaggaattgttccaacgaggtatccacgggtttcaagatccgttgaaatgcttcaggtgtggtttgcattctcaccgaccctcgggccagttccctcgcccccaaccgccgttatttgttccccccacctacttcaatagttgcgcctcacccttcct

SEQ ID NO: 52579 - DNA, 119 bp, Homo sapiens
  chr15:97491100-97491219
  hyper
atggagatttctttaatttagcgaagactgcttcccgggctccgcctggcccgcgccggcccgcgtcctcggtggtctgggcgccccggctgagccgctagcgggtcactcgggcggct

SEQ ID NO: 52580 - DNA, 134 bp, Homo sapiens
  chr15:97491238-97491372
  hyper
cgcccgcgccgcccgcctccccgcgctgctgcccggctctcgggctctcgctttttttttttttttttctttccgcggcagtcttaggattcttgtcacatgatggcttcatcgggcccttctcctcctgatcc

SEQ ID NO: 52581 - DNA, 30 bp, Homo sapiens
  chr15:98061086-98061116
  hyper
gtagtgcaccatgatcgtgcctgtgaatag

SEQ ID NO: 52582 - DNA, 30 bp, Homo sapiens
  chr15:98447681-98447711
  hyper
tttgctgagtaacacgccaccttttatttc

SEQ ID NO: 52583 - DNA, 200 bp, Homo sapiens
  chr15:98503354-98503554
  hyper
tcattcattaaagtcccgatgcggccggcccccaagatctcaaaaggaaatattgccgagttccgtttcccagagcatctatttcccctcgagtattgcagatgtaatcataaacacaagccagttacagccacaacttcatgctttagcgagaacccagtggctcctgcaaagtccttacgctgctagaaaccccgccc

SEQ ID NO: 52584 - DNA, 267 bp, Homo sapiens
  chr15:98503609-98503876
  hyper
cgccccctccctgacagatactgtttcccactgtctgtccacatgggcgcaccgcctcactattggccagggctccaggactgtgcctggcctcagccagtaaacggcctgtgcacgtgcacgccggagcctcccgattggccaacactccctgatcacgcacggccttcctgcgcccacccacgcgtgggagcgccaatgaaatgactcagtgaccatctacaacaaatcagcaagaagcagggctcgcagctgaccaatggccgc

SEQ ID NO: 52585 - DNA, 737 bp, Homo sapiens
  chr15:98503946-98504683
  hyper
cgagccggtgccccatcgggtaccgcacggctgccgcggcggccttaccctgccgcgagcgcctgtgacagcggcgccgctgtgctcgcgaccccggctccgggcctctgccgacctcaggggcaggaaagagtcgcccggcgggatgggcggggaggctgggtgcgcggcggccgtgggtgccgagggccgcgtgaagagcctgggtctggtgttcgaggacgagcgcaagggctgctattccagcggcgagacagtggccgggcacgtgctgctggaggcgtccgagccggtggccctgcgcgcgctgcgcctggaggcccaggggcgcgccaccgccgcctggggcccgagcacctgcccccgcgcctcggccagcaccgcggccctggctgtcttctcggaggtggagtacctgaacgtgcgcctcagcctgcgggagcccccggccggtaagcgcaggcgagcgcctggggttcccccgccaggctgcggggccggggaggggctgggaggccgcgcaccctcgggatgcccacctggcaggtgagatcagggcgggcttccgggggtggggtccggcctaccctcgcgggtaaggagagaccgcaagtcctgggtgcgcagctcttcctggcgccccgcccctggcccgccgggcctgaccgggaccagtggctcgggattttctaggaccgcgacgggagggggccattgggtgcggtgggaacctgtga

SEQ ID NO: 52586 - DNA, 245 bp, Homo sapiens
  chr15:98836082-98836327
  hyper
gcaggggttccaaatggcaggcgtcctctcccctctgtcccacaaagaacagtccgtcccctgggctgggagctgggcccggagccccggggcagcccgcccggccgtgctcgctgcgcccccgggctgcgttcatcaagcgcaactccaggcgcgcgccgcaaccgcgcagggcaaccgggggctctcccgccgaacccgccctcacttacatctttctcgtcgcccttcaggggctgctagtt

SEQ ID NO: 52587 - DNA, 100 bp, Homo sapiens
  chr15:98965274-98965374
  hyper
gctagtgggacccccggtgcgccgccgccgatggggtcttagggcctgtctgtctgggctagagccggcccgggagcctgtttgcggggagtgcgggtca

SEQ ID NO: 52588 - DNA, 462 bp, Homo sapiens
  chr15:98971469-98971931
  hyper
tgtcttgtcacagcactgaaacgtggggatggggagaacgtagttccacgttggcacagatgagctgtttacatcgaggcggacgagcaggcaggagcgtgcagtccgtgcggctctgtttctttcccctgttaagcgcagagtttctagctgcagctaaagacgcccacccaggccgagcgcccttggattctgtgggagggcggccccgcgtccaccgcctgggggcaccgactcggggctgcggacctcggagcgcgcccggcgggctttggtttgggcaaggctgccatcgtgtggccgccgtgggtatttccctcggaaagcggccgggcagcgagcaggcgcccgcgcctcttctttttacgggagtccgcgctctccgcaagtctgtcctgagatcgccgttttctcccaccagccagaatggggctcactgctgcaacccgggtctcagtcttc

SEQ ID NO: 52589 - DNA, 564 bp, Homo sapiens
  chr15:99090963-99091527
  hyper
agccaggacagcctctgcatccgtgaccacctccccgcccccctcgcattcccccccatcccctggtgatatccttctagcgcaggctcgtgctctggaggcggggtggggccgggattctgcagctgtaaccaactcccccgctgggggcatggggctggtccctggggcgcacagagaagttgtgacagataattgacgtgatcgggaggggcgtccaggcagacctcatgtgacttctaaaaccaacccacaaatctgaagcgtggcttgcgtggtcagccgcctgcctggcacccggtgaacagtttctcccggactctctgcatctagccccaaagaatctaagattctttgtctagaaaagtgccctggtcttccctggcacccttcgcggtgggtttccttgactccgcataaactcccgttccagcccaaatcagaggcggtcgcagcagccgttcctcgtctccatcagcatccgcgttgccatttccccgtcctgagctgttgctcatatcaaatgtcactcggggatgactaagagccgatgttgatgaggag

SEQ ID NO: 52590 - DNA, 30 bp, Homo sapiens
  chr15:99091999-99092029
  hyper
cttgtaattggctccggttcctgcggctcg

SEQ ID NO: 52591 - DNA, 30 bp, Homo sapiens
  chr15:99190542-99190572
  hyper
gtttccgcagtagccgctgatcccgagtgc

SEQ ID NO: 52592 - DNA, 177 bp, Homo sapiens
  chr15:99191461-99191638
  hyper
ggcgggaggggagggcgcgtgcggggtggccggcgcagtgcggtgggggcgggagcgggtgggcacgcgcgcgtgtctctgtgtgcgcgcgggaggcggtggggcgggagatgggggcggcgcctcgcagtctcgcgccccacgcccgggctccgctccgcacgtcttggggaaccg

SEQ ID NO: 52593 - DNA, 1649 bp, Homo sapiens
  chr15:99192803-99194452
  hyper
aaaaggaatgaagtctggctccggaggagggtccccgacctcgctgtgggggctcctgtttctctccgccgcgctctcgctctggccgacgagtggagaaagtgagtatgtgcccgccgcccgcggccactgcgggaacttttcctccgaggggctgcgccctgtttgcgaaacccgagttgccaccgtcgcagctgtcgggcccccgggctcgggagcggcggggtggggcgcagggcggctctgccgggagggaggctgcagcggacccgggacccgggctcgttcgtctggagccccgcgggccctggctccgcgcatccccgcgcgggaagggcttttctctttctccgtcctgacagcccagccgtgtttcccggctaggcgcgaggactcggtagggaagttggtgccggggcgggctccgcggttcccgggccccgcgacccgcacctcgccccttccatgcgcaagagcctctccgcacacagcgctgatcccctgcggcgcgcaggcagcagcgacagcaccctgggccgcaccgcgtctccgctgctggggctgaccgggcagtggggagcgggcagccgcccggcccgcggggtgcgagttgccctcgaggggggaggtgccctgcggagaggccccgaagccccaggacacgtctccaagcgcccgtcgctgcctcccgtcgcccaacgtgcttttgcccctcgggctcctcgggttcctggccttgcccgtcactttggcccgctcctcgttgggttacctgcccccggcgtcccggggctgggcggtggggtgaggggaagcgctctctgggcagccccccgggaagtgcgaggccgggagtcttcctcagcttgtctcttccggggagcgccactgggtccccagttcagagggctctgggatggtctcccagtttctcccgggccgggggatggaggggtactagggccgcatccgagtgtgcgttggtgggtgtgtggtcggagccgacgtgcattccgacacacgtgctcgcagcgcggggtgtagtcgccgcctcacggggacacctagacgcccgtccctggcgagaggtgtcgtacgctgtggtttcagcgccagggtctgcggcggcgcggggagggtgttgtgttttgcgagcgcggagccctggccttggttttgttgtggtcggcgtcgtgtcgccctctcttctgccgccccgcacttcctttgtacgtagttaataagcagtgtcgctccacattcgctgtcttttgcaatctgatagcttttgttttggtggtgtcgggtgggggttagtagggaagcgcggggatgcggggagcgagaactccccccggtgtctacggccggaggaggtgggggttttattcttctgaaaaagttgaaagtgtggcttactggtacattcaagatggtagggtaatttgaacacgattaaaagtttaaatgtcgcagaactgggactgggaacggtgagggcgtgttggtgagtaatggttgccgagggtatgcaggtggtgccgattaactttgaaaaaatcacgactgagccttcacgagtgaggcggggaaggaggaggcagcggaggttgtatggccccatcaccggggcaattcagaaaggctgt

SEQ ID NO: 52594 - DNA, 39 bp, Homo sapiens; identical to SEQ ID NO: 10433
  chr15:99955138-99955177
  hyper

SEQ ID NO: 52595 - DNA, 31 bp, Homo sapiens; identical to SEQ ID NO: 10434
  chr15:100107046-100107077
  hyper

SEQ ID NO: 52596 - DNA, 61 bp, Homo sapiens
  chr15:100273843-100273904
  hyper
ctaccaggtctacccgcgcgggccctggcttgttttcgcgtctgttcggagtaataaggca

SEQ ID NO: 52597 - DNA, 337 bp, Homo sapiens
  chr15:100273945-100274282
  hyper
ccgcagctttctcgcccgtaaagaggcctttgaccccacttgtgggtaatgatctgtagctgtgactcggggtggattccagtagcgtggggtcccctgagccctcctgcggggaagggctgggcgcagatgggcgaggggtctttctgcggcgggatctgcgctcctgggcctttgagggccgcaccaggggaggcattgccccaccccgagaagaaaacagaaatccacgagtgtaaaacatggatgcggacaacagggaccaagaaaacttaagtcgtgtttatcaaatgtcaggtggccgaggatttcttaagatgaaaagtggtggaagaat

SEQ ID NO: 52598 - DNA, 21 bp, Homo sapiens
  chr15:100346213-100346234
  hyper
caggcggtagcggggacggtg

SEQ ID NO: 52599 - DNA, 683 bp, Homo sapiens
  chr15:100881160-100881843
  hyper
gcgccccacccccaccctccacggcgaccactctgcgtcgcaacagaccggacgggccgacccggaggtggcgcgggcagtaccaggccgccggcggcgccgcaggcgctgagcgagacgagggagccggggtggccgagcacacggcccgagtagaagcacagctcggcggggcggccgcggcgccgggccgcgcccgcctcctccacctcgaagcctcgggacaggaagcgcaggtcgcggcgcagctgaaggtacaggtcgcgcccgaaggccggcaggtgcagcagcagggcgcgctctccgggccgggcgcgcggggcggctgggggcgtgcgggggcgtcgccgccgtcggggcccgggggctgcgggcagcggcggcaggtgcacgtcgtcggggcgcacccgccacgggagcaccacctccacgtcggccgccgcgtcgccgacagctgcggggagagaggagacgcgtcagcgcggcggggcccgcccggacgcccgccctcccgctggccgccagccgcgccagcgcggggacagcgcgacccggagccggcgctgccttcccttccctcgcccggcacctccacgctggcccgcgccacccggggagggtctccggcgcagccgcgcgagcacctcccggaacggcgccgcgcatcggcgagcggagacccg

SEQ ID NO: 52600 - DNA, 520 bp, Homo sapiens
  chr15:100881966-100882486
  hyper
cgcagagggaaggtagccgcaggacgcggggtgaagagggctgtgggagggggcgctacctgtgcccgggtccagtccccaaaccagcagcagcagcacgggcaggacgagcggaggcagcagggcgccgtcacacatggtacccgggaccggcagcccccccggaccgtggcggcgaagcaggagcgcgctaggcggcggcgccagccggagtgaagccctccagcctttggaaaaagtaattagcgctgcggacaaacccaacgtggtaaaccccaagccccgccttcccctcggaaggcgggaggggattgggccctcgctttcctccgccccgcctcctccttccctactggttgggatgggtcgaaaccacagtgcgtagttaggttgtcagcgctttcttacacgtggtttctgggcagtggcggggacacggcaccaggtggcgcgcgggagccgaccggagccgtgggaccctggaagagctggaggatgcggggctggtcttcagagcttg

SEQ ID NO: 52601 - DNA, 178 bp, Homo sapiens
  chr15:100913417-100913595
  hyper
atctctcccagggcacccctccgacccccgctgcgaggggtttcccgcgggaggtggacgaagcgtgggccaggacaggcgcctggcactggggtttcagagccgcgagtaggccctgaaggccgggagggaccgccagtccccactggaagccgcttccgtgcagcccgggacaggt

SEQ ID NO: 52602 - DNA, 30 bp, Homo sapiens
  chr15:101142561-101142591
  hyper
acgaatctctgccccgttcggcacgcctcc

SEQ ID NO: 52603 - DNA, 19 bp, Homo sapiens
  chr15:101419292-101419311
  hyper
cggcgccagggctcctcgg

SEQ ID NO: 52604 - DNA, 30 bp, Homo sapiens
  chr15:101420170-101420200
  hyper
tgccgcgccccatccgcaacctggaggtca

SEQ ID NO: 52605 - DNA, 471 bp, Homo sapiens
  chr15:101458273-101458744
  hyper
catcttcacctgccgcgtcccctccagcgtctgcccgggccctgggcctgcgctccctcgcggtggcgccaggtggcggggctgcgcgccctggaggagctgcaccgccgtcgcggggctctctcagcactgaggacaccacgccctgcaaattgttgggaacttgtcggtggcaatcacactgctggctcctgcaaactggtgtgaggccctcaggggtgagaacaggattgcagaactgcgctcacccttttggaaagtcgtccagtggcagaagtagcctcccaggagcagagcgaagctgctcggtggtcccctctccaaccagggacccaagaagccgctcaagggaacacggccccgcggcgtccgggaggtcctgcaggagccctgcggctgccccggttctgtgaaatggcagtgagggtgggggagatgtgcgctaaatcctgggaacgtgcgagtcataac

SEQ ID NO: 52606 - DNA, 1208 bp, Homo sapiens
  chr15:101459064-101460272
  hyper
gaggatatgcaaattgcaggtcgttaacgctttagaacgacacatttctgtatcgccccgtgaagagctctacgcacatgaatgttccccgtctgtttaactgttacggccgcagtgtgtgggccgcaggcgcgctgggggctcatctgctgattttgctgcccctggagcagagggatagcgaaagcggggctgagcgcagcacggaccgatcccatcgccgcgctcgccccgcgtggaggcagccgggtgcccgaacctgaaggaggacccggtgccggaagggcccgcggaccccggcgtctcccggggcatcgagcgccatcgcccgcgttttacggccagggaaactgaggcggccgccgaggggacgcctcgcgacggttcctgggagagctggcggcggccttgctctgcgcgctcttcgcgccgccctccccgcccgcccgcctcaggattgaggaagtgcgtctgggcccggccccggcgcggggggcagacggcggtgggacggccaggccccggccccgccagtgtgtccgcccggccccgcgtcccggagcgcccgcacccggccccgccgccgcctcaggtaagcgccgctcctgccggcgccccccggcggcctggctgcctcccggccccgcccggggaacccagagcccgcgcccggcgcccgcggggagcctcggcctctgcctgcccgcgggcccctgcgctccgggcggccgcgtggtcgggcacggggggccgttgcgcaggggccgcggcccgaggggcgcggagggcgtgtggggcgaccccggtctcacgtccccgctgcctcccgccgcgcccggagcccagccagcctgtgggaggggagcgcgcggggcccgagcagggaaccccgaaaccccgtccgggcagggtcgggaaagctgggaagcggaggcaagagacacgagtcgggagacacgagccggggagcccataggtttcctctgcctttggagcgaacccagtcccttagcggggagcgggcggagtgtgagcgcgcgggtgagcccgtgccggggtgtcggcaagagaccgcccgggagcctctcgctggtccggggcttcctggggttgcggggcggcccagcgaggcttcaccctcctcgatgtctgggtcacgcttcttgcccaggtggtctctggctggcgcagatacaactgctctgtct

SEQ ID NO: 52607 - DNA, 30 bp, Homo sapiens
  chr15:101547268-101547298
  hyper
ggagtgttgaggggcgtaggcccagtcttt

SEQ ID NO: 52608 - DNA, 30 bp, Homo sapiens
  chr15:101834466-101834496
  hyper
gatttcccaaaggtcggcaagaaatctaag

SEQ ID NO: 52609 - DNA, 291 bp, Homo sapiens
  chr15:101835657-101835948
  hyper
tgtttaaaagttaaggcgaatgtggaaacacccgaggggaactttctcatgcattagcgcacctcgaggtgggaggggaagcggtgactgtcctccctccaccagccgtcgcgggaacccgtggggttcagtgaagggtccagcagttcaggtgcccgccccgggcctgggccttggctccgggctacagtgtgagatcccgggctaggtggcccgcctggggcaggtcgccgggacaaccccaccgccccgcaagtccagcccggcctcgggcacggtagggtttgcggt

SEQ ID NO: 52610 - DNA, 3 bp, Homo sapiens
  chr15:102029490-102029493
  hyper
cgg

SEQ ID NO: 52611 - DNA, 30 bp, Homo sapiens
  chr15:102192775-102192805
  hyper
ctcacgcccttggacgaggccctcacccct

SEQ ID NO: 52612 - DNA, 30 bp, Homo sapiens; identical to SEQ ID NO: 10441
  chr15:102515284-102515314
  hyper

SEQ ID NO: 52613 - DNA, 30 bp, Homo sapiens; identical to SEQ ID NO: 10442
  chr16:103516-103546
  hyper

SEQ ID NO: 52614 - DNA, 47 bp, Homo sapiens
  chr16:122247-122294
  hyper
ggctatttttgcggcgcgccgggctaggaatccggggctgggccgcc

SEQ ID NO: 52615 - DNA, 30 bp, Homo sapiens
  chr16:188848-188878
  hyper
gcggatgggaaaggcgcggggtcgagtcag

SEQ ID NO: 52616 - DNA, 406 bp, Homo sapiens
  chr16:204480-204886
  hyper
cgccaataaaccaatgaacgaagcagcgtccacctggtctctgttgtccgtgggcggcgggcgcttggggaggcggagcgggaggagggcgccccggctgtctcggggccactgctgggccgcagggatccttgcaccgaccccagggtctctaagaggcagagggatgtgcagctcccggggcgggagcgggggtcactcgggacccaggcgtggtggagaaggggtgcagttaggcctttgcggaggggggagcagtgctggcgcccacccgccgcggctctccctgggacctccgtggtcttccttctttatttctcccgaatgtgtactatttcctgatttcagaacgatcaggacgaagaggggagggatgggcgtctgcgctcactcattccttcttcca

SEQ ID NO: 52617 - DNA, 577 bp, Homo sapiens
  chr16:215295-215872
  hyper
ggagaagctgagtgatgggtccgggggcttcgcaggaactcggtcgtccccactgtcgtcgcggcctggggttcacttggggggcgccttggggaggttctagcccctgagcaccggagctgcggcccgggtggagcggagcagtcccgggccggcccgcggcgtctcctggggtccttgagtcggacgggcgtttgtgcgtctcccggcttcccatatcgcacaaagattgtcacttcactaagcgtattggaagcgtgtcggggctcagggaacttttccacaaagcctgacgtccgaatcccgggactctggcagctacgggggtccctgaggccggtccctccccgactcctaagagagtagggggtttcctgcccggtgttctctctccggttcctcccatgtgctccctcctggcagagcagtaactttacccgaggggagtaaacagatgcccctaaagtctgcagtaaaggtgcccacgcgcaacggcgtgggtcaatgccagaaaccctgggatcccggaggtcgaggcctccacacagacgggaacccgggctggttacgttccccg

SEQ ID NO: 52618 - DNA, 534 bp, Homo sapiens; identical to SEQ ID NO: 10444
  chr16:215912-216446
  hyper

SEQ ID NO: 52619 - DNA, 273 bp, Homo sapiens; identical to SEQ ID NO: 10445
  chr16:216505-216778
  hyper

SEQ ID NO: 52620 - DNA, 30 bp, Homo sapiens
  chr16:230581-230611
  hyper
tgcggcaggctgggcgcccccgcccccagg

SEQ ID NO: 52621 - DNA, 30 bp, Homo sapiens
  chr16:231134-231164
  hyper
caggcgaccttccccgtgtttgagtaaagc

SEQ ID NO: 52622 - DNA, 340 bp, Homo sapiens
  chr16:325254-325594
  hyper
agggcccagtgggaggcagggcgctcaccctcctccgagacgcagaacttctgggccaaccactgcacgacgtcgctgcctgcacgggagagacagaggtggagggaggccgaggcgcgcacgcacccccgccccggcgcgcctcacctgtcaccgcgtggggaatgacggtgaccagcaggcgctggctccgcatcttcacgccctggtcggggtcctgcatgctcacgaccacccgctccatctgggcggagggagtcgtcagggggtgtctggccgccccgcaaccctgattccctggcaccggccgggatgccccggatccgggagcgcggagatt

SEQ ID NO: 52623 - DNA, 36 bp, Homo sapiens; identical to SEQ ID NO: 10446
  chr16:330454-330490
  hyper

SEQ ID NO: 52624 - DNA, 30 bp, Homo sapiens
  chr16:347279-347309
  hyper
cccttcctcgtctgcgaggccccctcctgg

SEQ ID NO: 52625 - DNA, 14 bp, Homo sapiens
  chr16:374801-374815
  hyper
tgcagaggcagctt

SEQ ID NO: 52626 - DNA, 261 bp, Homo sapiens
  chr16:374858-375119
  hyper
cgcagggaaaggctctgcccaagccttcagggaggcagcagcgcccggtgcacagttcctaagggcgcagaactccgggatgaacaaaggcaaggaaacggctgtgtaaaaatcagctctactgacgcacggctgggtgctcagcggacccgcacagaaccacagtcctacctggcacgttctgacgcgcaccagatcacagcctcagccccgcgggcgcgccccaggaaaccatggcctcagccccgcgggcggccccgc

SEQ ID NO: 52627 - DNA, 30 bp, Homo sapiens
  chr16:401971-402001
  hyper
cggacgccggagcacgcggctactcaggcc

SEQ ID NO: 52628 - DNA, 30 bp, Homo sapiens
  chr16:431528-431558
  hyper
cctaggacacgaagcgccccaaagggccac

SEQ ID NO: 52629 - DNA, 30 bp, Homo sapiens
  chr16:432530-432560
  hyper
gggactgtagtacccgatcggggtggcggt

SEQ ID NO: 52630 - DNA, 84 bp, Homo sapiens
  chr16:475425-475509
  hyper
ccgcgcccgaagctcgggacccccgctctggcgaaacgaggaatatgacatacagcaaaacaccccttcgcggccgctgcactg

SEQ ID NO: 52631 - DNA, 252 bp, Homo sapiens
  chr16:577427-577679
  hyper
gcggctgcaggccccgcccctccgtgcccctcgcaaggccctctgggagttgtagttccagctcctcctcgggccgccccactccctgataatcctggagcgcggcgcctcccggggaccgaggcctcgggcccggccgtctccagcagcgagggcaggagaagtggcccgggcggtcggcggactgggagggcgccacccgaggactacaactcccggcctgcctcgcgcaggcaccgccccgagcttccg

SEQ ID NO: 52632 - DNA, 22 bp, Homo sapiens
  chr16:600998-601020
  hyper
ggtgagggtcccctgtcggtga

SEQ ID NO: 52633 - DNA, 30 bp, Homo sapiens; identical to SEQ ID NO: 10450
  chr16:619799-619829
  hyper

SEQ ID NO: 52634 - DNA, 30 bp, Homo sapiens
  chr16:638609-638639
  hyper
ggtgtggggctgcccgtcctggcgtccctc

SEQ ID NO: 52635 - DNA, 30 bp, Homo sapiens
  chr16:685770-685800
  hyper
gatgctgcaggaggcgaacgcttgggtggg

SEQ ID NO: 52636 - DNA, 51 bp, Homo sapiens; identical to SEQ ID NO: 10451
  chr16:717959-718010
  hyper

SEQ ID NO: 52637 - DNA, 277 bp, Homo sapiens
  chr16:725375-725652
  hyper
gcatcctcacaggcctgagcccgggaaggctgtgagagggcgaacggtcttgcatggggggttttaggtgccccccatccccgtgactccatttaccagcggctgccgtggaggtagtccagtgtgctggagctgcgccagagcgggggtgggggccggcgctgagacgcggtgctagctggaggcggttcctgtccggggtgtgcgtccgcgtgcagggtgcgcgcgtgtcttggccgcgcgtggcggcgtgtgcggcaggggcgggcaggcgggc

SEQ ID NO: 52638 - DNA, 30 bp, Homo sapiens
  chr16:729483-729513
  hyper
ccctgccctcggggcgggccgcccttcaca

SEQ ID NO: 52639 - DNA, 30 bp, Homo sapiens
  chr16:729748-729778
  hyper
gaatggcagcccagcgactggggtcctcac

SEQ ID NO: 52640 - DNA, 893 bp, Homo sapiens
  chr16:750433-751326
  hyper
agggccggctggggtcggcacatgattcgacctcacggccgcccttaggggtggaggggtcgctacctcaggtttggggaaggaacacgaggctctgaggagcgaatttgccccaggtgtccggggaggcctggcgcggggctgcctcggttccctcccagagccggggagaggggatatcgcaggatgccggcgcccgaggcggcagcaccaggcccacgggcgccccagtctaaatatcctccgtgcccctagagcggggaccctcgctccccagacccggaagcgccgccttccccgccagggacgcctgggcctccgcagaccccgccggccggcgcgccacccgcgccagcaccatggacagcggccgccccagccgcgcgctcagggccaggcccgggctggcttccaccgcggacggctgcggggtcggggcagccccgcaatcccaaatcccggcagcccccgctcagcagggaggggccccgggggcgaagagtgggggagaagccgggaaggatccggaggaggcggcgggggcggcgccaggggaggaataatcccggcgcagtgccgatttaggttgaaaacgctcccagtcatgggcctgcacgtggagcgccggggctgggggaggcattcgcggggctcctttcccgccccgctcgggagctcacgtttgccggcgcccacagtcccgtccccacctccaggcctcagggtcgagatggagaaaccaagccgcactttgagagcccacaggagggaggggacaggctgaggagcggccgtctgggtatgggtccggggcctggcttccctcatccacacccgcagcgctgccagaaggcgctgctctgcctgtggtcagccctcgacccgtgtgcttg

SEQ ID NO: 52641 - DNA, 105 bp, Homo sapiens; identical to SEQ ID NO: 10453
  chr16:755703-755808
  hyper

SEQ ID NO: 52642 - DNA, 30 bp, Homo sapiens
  chr16:756571-756601
  hyper
ctggcaagttccctcgggaataaactggag

SEQ ID NO: 52643 - DNA, 112 bp, Homo sapiens
  chr16:765206-765318
  hyper
tgctcccgccgccgcccggacccgcgccccgccggggcagcggtggtgagagccccgactccccggacgccgcccgccgtgccatggggttcccggccgcggcgctgctctg

SEQ ID NO: 52644 - DNA, 63 bp, Homo sapiens
  chr16:765585-765648
  hyper
gcctcacccaggagcccggcagcgtggggcagctggccctggcctgtgcggagggcgcggttg

SEQ ID NO: 52645 - DNA, 31 bp, Homo sapiens
  chr16:771483-771514
  hyper
ggtctcaaggtctgggcgtggccggggtgag

SEQ ID NO: 52646 - DNA, 30 bp, Homo sapiens
  chr16:790580-790610
  hyper
ggatgtgtgggagccgcctctgctgcctcc

SEQ ID NO: 52647 - DNA, 30 bp, Homo sapiens
  chr16:837881-837911
  hyper
gcatcctcagtccccgagatcagtccccag

SEQ ID NO: 52648 - DNA, 30 bp, Homo sapiens
  chr16:850865-850895
  hyper
ctgggctcacccagcggatggacatgcagc

SEQ ID NO: 52649 - DNA, 60 bp, Homo sapiens; identical to SEQ ID NO: 10455
  chr16:896899-896959
  hyper

SEQ ID NO: 52650 - DNA, 30 bp, Homo sapiens; identical to SEQ ID NO: 10456
  chr16:1021287-1021317
  hyper

SEQ ID NO: 52651 - DNA, 20 bp, Homo sapiens
  chr16:1030250-1030270
  hyper
aatgcaaagcagcaagggcc

SEQ ID NO: 52652 - DNA, 236 bp, Homo sapiens; identical to SEQ ID NO: 10457
  chr16:1030443-1030679
  hyper

SEQ ID NO: 52653 - DNA, 30 bp, Homo sapiens
  chr16:1031929-1031959
  hyper
acatgagcgaggcccgctcccagccgccct

SEQ ID NO: 52654 - DNA, 30 bp, Homo sapiens
  chr16:1032245-1032275
  hyper
attcatggtgtgggcgcaggcggcgcgccg

SEQ ID NO: 52655 - DNA, 24 bp, Homo sapiens
  chr16:1122922-1122946
  hyper
ggggtcccgccgtgcgcccccagc

SEQ ID NO: 52656 - DNA, 30 bp, Homo sapiens
  chr16:1153167-1153197
  hyper
ggggaaagccgtttcgcggagcacgcccgg

SEQ ID NO: 52657 - DNA, 31 bp, Homo sapiens; identical to SEQ ID NO: 10458
  chr16:1153581-1153612
  hyper

SEQ ID NO: 52658 - DNA, 40 bp, Homo sapiens
  chr16:1202546-1202586
  hyper
cgcgggcacacccgggacacacacgcggcggggaaggggc

SEQ ID NO: 52659 - DNA, 494 bp, Homo sapiens
  chr16:1203265-1203759
  hyper
gggcgagccggagccggagtcgagccgcggccgggagccgggcgggctggggacgcgggccgggggcggaggcgctgggggccggggccggggccgggggcggaggcgctgggggccggggccggggccgggcgccgagcggggtccgcggtgaccgcgccgcccgggcgatgcccgcggggacgccgccggccagcagagcgaggtgagacgcggcgaggacgcgcgcccgggaccctcttcaacttgcgcgaagcgggccggggagcccctcggggtgggggtggggccgctggagggagggagggggcgggcgggggcggggggcgcgtttgtctctaataagaaaagacaaagacatcccggcggccgcggctgttcccgcagctccgcgccgcgggaggcagggcgggggcgtcgccaccggccccgggtcaccccctgtcctctgcaggtgctgccggccgccaccatgaccgagggcgcacgggccg

SEQ ID NO: 52660 - DNA, 155 bp, Homo sapiens; identical to SEQ ID NO: 10459
  chr16:1203807-1203962
  hyper

SEQ ID NO: 52661 - DNA, 108 bp, Homo sapiens; identical to SEQ ID NO: 10460
  chr16:1204002-1204110
  hyper

SEQ ID NO: 52662 - DNA, 120 bp, Homo sapiens; identical to SEQ ID NO: 10461
  chr16:1204128-1204248
  hyper

SEQ ID NO: 52663 - DNA, 30 bp, Homo sapiens; identical to SEQ ID NO: 10462
  chr16:1360204-1360234
  hyper

SEQ ID NO: 52664 - DNA, 30 bp, Homo sapiens
  chr16:1381990-1382020
  hyper
cgcagaggcaggggcgtcactcccagaccc

SEQ ID NO: 52665 - DNA, 106 bp, Homo sapiens
  chr16:1382867-1382973
  hyper
atttttgagagctttttcgagactctgtctgaaaaaaaaagggaaaaaacgcagatcgcgcccccacccagacttcgggaccagcgggttggggacaggacccatc

SEQ ID NO: 52666 - DNA, 86 bp, Homo sapiens
  chr16:1384611-1384697
  hyper
aaggccaccggcagcgcttgttagaatgcagattcccggggttcgactggaatgagaccccggggagcagcgtttgcagcgggccc

SEQ ID NO: 52667 - DNA, 30 bp, Homo sapiens
  chr16:1402305-1402335
  hyper
tggtgagtgaggagcgctgttggccggcgc

SEQ ID NO: 52668 - DNA, 31 bp, Homo sapiens; identical to SEQ ID NO: 10464
  chr16:1420663-1420694
  hyper

SEQ ID NO: 52669 - DNA, 244 bp, Homo sapiens; identical to SEQ ID NO: 10465
  chr16:1429036-1429280
  hyper

SEQ ID NO: 52670 - DNA, 30 bp, Homo sapiens
  chr16:1524506-1524536
  hyper
agtctgggggacaccggagggaatgaacgt

SEQ ID NO: 52671 - DNA, 435 bp, Homo sapiens
  chr16:1660448-1660883
  hyper
ggcgacagccatagtccgacgagcgacctggaccccgcgccaagcccgccccagcctcgatgggactcgcgaggggccgcggggactcggcggcgccgggatcgtgggaggagacgggagggtcccgacgcccgccaccggtcacatcctcggccccaaaccccggcctggctcctaaggacctgggtcggccgccctagccctaaggccactcacctctgccaggccgctgagccgccgcgcgttgccgggacaacggcgcgccaggaacgcggaaatagccgaaggtgagcgaggcggccccgaggactcccgaagcgccccgagcggccggaaagagccgaaggcgatcgggcacgcacgtgcagctccgaggcccgagcgtcgggggccaggttattccgctctgcaagagagaagcgggacgagcttttt

SEQ ID NO: 52672 - DNA, 30 bp, Homo sapiens
  chr16:1662286-1662316
  hyper
ggtgctcgcccccgcgttcgtcgccccgcc

SEQ ID NO: 52673 - DNA, 122 bp, Homo sapiens
  chr16:1663979-1664101
  hyper
tccccgtgcgggcaggcgagcccgcgcttctcccgtcccggggtggatccggcctcctctgtcctcctccagggccagctctgggggccggcgcgtggggcaggtgcgcggggcccgggagc

SEQ ID NO: 52674 - DNA, 701 bp, Homo sapiens
  chr16:1664480-1665181
  hyper
ggggccgcggcgggctcgggcgggctcgggcgggccgggccgagccgccgagaggggatttggaacaaacaacggcggccatgttgagagcgcgtcggggccgctaaacttcccggcctgcgcccgcctcaccggccgcctcccctctcccggccgcaggatgacagtgaagttgggcgacggcggcagcggggaggacgggctcaagaagctgggcaagcgggcggccgatgaggagtccctggaaggagaaggggccggcggcgcagacgcggccgaggagagcagcggcacaaagagggacgagaagaccccccgggccggcgccgacggcccccccgcgccccccggcgcgccgcaggcgccgtccccgccgcagggcagcccccaggaccagcaccacttcctccggtccagcgtgcggccgcagagcaagaggcccaggaaggatcctccgagcgctgtggggagcggcaacgccggtggctcggggccccgcggaaaaggtagggcggcccgtccccttgggagaccccagcccctctccggggtgtgccgcgggggagaggaacccctcgccccagccgggctccaccctagctcacccatcccgcggcctacactgaggctctcaatttgggtggcacttatggggcatgtgtcccctctctccttcgaagaggctgcgactttctatattt

SEQ ID NO: 52675 - DNA, 189 bp, Homo sapiens
  chr16:1832739-1832928
  hyper
agacaaagctcgcgcgcacattggacccgggtgggaggtggtaccgcaggccgcgttgaccggaaagtaggtccgtgtcatcgtctgcgccggaacctgcgggaccggatcgagagctcctccggcaagctgattggctgggacagcaggattaggcctgtcaagaagagccacgggcgggcacgcact

SEQ ID NO: 52676 - DNA, 34 bp, Homo sapiens; identical to SEQ ID NO: 10468
  chr16:1875948-1875982
  hyper

SEQ ID NO: 52677 - DNA, 153 bp, Homo sapiens
  chr16:1877135-1877288
  hyper
gctgcgggggacagcgttccgaggcagttggtcctctccgggatgccgtaggcatcagctgaccggcccagcccacgtgactacaggggcacttgatgggaatcatggcagcatccaggccattgtcccgcttctgggagtggggaaagaaca

SEQ ID NO: 52678 - DNA, 16 bp, Homo sapiens
  chr16:1877332-1877348
  hyper
cgcagcgcggtgttga

SEQ ID NO: 52679 - DNA, 113 bp, Homo sapiens
  chr16:1877590-1877703
  hyper
ctggcgaagagcttcacggcgtcctgcccggtcagcgcgttcgtgcccaaggagaagatccctgaccctcacaagctgaagctctggctcaaggtcaacggcgaactcagaca

SEQ ID NO: 52680 - DNA, 30 bp, Homo sapiens
  chr16:1967766-1967796
  hyper
gggcccccacagggcggtcccaaccccact

SEQ ID NO: 52681 - DNA, 138 bp, Homo sapiens
  chr16:1968109-1968247
  hyper
tggacggagctggacggctcggagggcgcgggggccggcgcgggggcgcgggcggccggcgggcagcggccggggagggcgcagaggcagtaggcgccgagcaccagggccacgagcagcatcggcgcgcgggacgcc

SEQ ID NO: 52682 - DNA, 52 bp, Homo sapiens
  chr16:1968561-1968613
  hyper
acccgggcgcgactcgagctgccgggaccaccaggacgctcctgctccgaga

SEQ ID NO: 52683 - DNA, 23 bp, Homo sapiens
  chr16:2014613-2014636
  hyper
cgtcatccgccatttgctgggaa

SEQ ID NO: 52684 - DNA, 75 bp, Homo sapiens
  chr16:2033651-2033726
  hyper
gcccaggaccctagcgcgcgccgcaatctgtgcggtcacgcccggcccgcgttgagagagcgcttggcagccagc

SEQ ID NO: 52685 - DNA, 219 bp, Homo sapiens
  chr16:2040741-2040960
  hyper
gagcagcctagcccactggggcgtccctgggagggccctgctgctccttccctccggcaggggaggtggcagttgggtgccgagctctgggttttgtccaggtggcaacctctgggccagccgcacctcggcgcctgtcttggaggagggcggtgcccacggtggggcaggggctttggcctcccctgcggagtggctctgaccagaccgggaggcagg

SEQ ID NO: 52686 - DNA, 532 bp, Homo sapiens
  chr16:2040980-2041512
  hyper
cgcacgtcccgacttgtggcccactcttggggacaagtgcatgtcccggcttcccccttggctccactctcggagctggagcgggaaaggagcgaagggatgaggttgaggctggaggtcgtttcttggaaacacagggctgccccgtgcagcgctggttaaaatgactgcggtccccctcatgcctgtctcccggaactggtgggcaggaggcattgaggtttgacggaacctcagaggtcaacggtgtcatcttttcagcccaaacacttacaggtgatattaataatcagtcacgtgggggctgtcatccctcgggtacccaccacgtgcaggaagctgggtggacatgtctgtcccagcactgcatgagctgtgcccgtcaccctatttgcatgctagaaaacaggccagacagttcccaaccgcgcaggaagcaacagctccgctgcctccataccctccctcccgccccgctctgcctgctgcactctcacctccccttcgccgttccggctccagcctgggaatc

SEQ ID NO: 52687 - DNA, 599 bp, Homo sapiens
  chr16:2041581-2042180
  hyper
cggtgcagagtacctggcttgaatcaaccccggcttttgtcagccatgtgatcccggacaagtcacttcacctgttggggtcccaatgtcccccgcatttataaagagaataagaacaatggcgatcccacggggactttctgaggatttggtgaggggacgcatgtaaagtggctgtttaacacaatgtctgggcatagtagatgctcactaaacggcccgtgttgtcaataattactaaatacgcgagggttcgggaaagaaagaggtgacaccgccccccacccagatacgggcctgggaacgcagggacaggcccaggggcgtgggcgctcgaggcgggctcgcagaggtcgggtcgccgcagggccctgagcgccgcgccgcacgcaggtgttctccatcgccgtcttcgggcccatcgtcaacgagggctacgtgaacaccgacagcggccccgagctgcgctgcgtgttcaacgggaacgcgggcgcctgccgcttcggcgtcgcgctgggcctcggagccttcctcgcctgcgccgccttcctgctgctcgatgtgcgcttccagcaaatcagcagcgtccgcgaccgccg

SEQ ID NO: 52688 - DNA, 35 bp, Homo sapiens
  chr16:2042498-2042533
  hyper
ggaggcgggacctcgcgccacgcggcgagcccagg

SEQ ID NO: 52689 - DNA, 159 bp, Homo sapiens
  chr16:2058557-2058716
  hyper
tcctttgatgtaaacgtctacttaaagaaagaaaaggaaaaaaagaaagaacctacacctcaatactgctctgcatcacttctggggagaagaaagttagattcctggcagatgtcaccagccgaagccttctatgaacaaaccgggggaatttcacaa

SEQ ID NO: 52690 - DNA, 30 bp, Homo sapiens; identical to SEQ ID NO: 10476
  chr16:2060250-2060280
  hyper

SEQ ID NO: 52691 - DNA, 30 bp, Homo sapiens
  chr16:2070513-2070543
  hyper
ccttgctgtgttctcgttagagacttcgga

SEQ ID NO: 52692 - DNA, 30 bp, Homo sapiens
  chr16:2076715-2076745
  hyper
tcccctagccctgccgcctccccctgcccc

SEQ ID NO: 52693 - DNA, 171 bp, Homo sapiens
  chr16:2097195-2097366
  hyper
gcagaggccctgtccgtgtccctcactgctcactgcagtgcttggcccccagcaggtcctcaacggctgcaggataaatataataagtgccatgccctttcctgttttccctcagaggcaccctcccccgagctgggggagcaggcttctggctgcgtgtgtccttggcac

SEQ ID NO: 52694 - DNA, 30 bp, Homo sapiens; identical to SEQ ID NO: 10477
  chr16:2097895-2097925
  hyper

SEQ ID NO: 52695 - DNA, 30 bp, Homo sapiens
  chr16:2198464-2198494
  hyper
gtcgtgatcgggggcgggacggggcccgga

SEQ ID NO: 52696 - DNA, 170 bp, Homo sapiens
  chr16:2198818-2198988
  hyper
ccagcacccccgctgcctccacgctgcccaccgccaacggggcccgaccggcgcgctccgggactgcgctttccggccccgacgcgccgcccaacgggcccttgcagcccggccggccctcgcttggcggcggtgtcgacttctacgacgtcgccttcaaggtgagccag

SEQ ID NO: 52697 - DNA, 30 bp, Homo sapiens
  chr16:2205591-2205621
  hyper
agccaatcagacttcgatctgcaacataga

SEQ ID NO: 52698 - DNA, 35 bp, Homo sapiens
  chr16:2245972-2246007
  hyper
gtggggggggcatccgcctcgccctttgaaggccc

SEQ ID NO: 52699 - DNA, 30 bp, Homo sapiens
  chr16:2264579-2264609
  hyper
tgatgaagcccaggcgcttgccgcgggctc

SEQ ID NO: 52700 - DNA, 30 bp, Homo sapiens
  chr16:2301207-2301237
  hyper
aaacacaaaccgagcgtcgacagacgtggt

SEQ ID NO: 52701 - DNA, 229 bp, Homo sapiens
  chr16:2301866-2302095
  hyper
aggctgccggtgttcgtgaccgcgagctctcggccgggcccagctactgcagtatcggcgctggaaaggcgatcaaagcacggaacccctcccgagggggccgtcagggaggccaggggctgcctggggtgagcccggcctcctgcccctttgggaacaggatcagagctgcaggtttagtcaccgaaatgggggtgggggcagcagaacccagcggtaagaacaggcc

SEQ ID NO: 52702 - DNA, 273 bp, Homo sapiens
  chr16:2391769-2392042
  hyper
cgggagtggggaggtgggtcggggtgtccctgggccggaccgggtcgtgggactgggtcgccccaggcaggagagcctgggaggggcgggcccccttggcgtggcagggagaggtggagtgagggactcccgggctccagcatgagggcgggcgccgcgcggggccgacagttgccgcgggccggggccaatgggtccccgagcgccgccagcggccggaccacagtgaggtgcgtccgtggtcccggcgccccgggtgagggagggctgctg

SEQ ID NO: 52703 - DNA, 30 bp, Homo sapiens
  chr16:2478785-2478815
  hyper
ccggccagcatccccgcccagcagcggctc

SEQ ID NO: 52704 - DNA, 30 bp, Homo sapiens
  chr16:2479936-2479966
  hyper
tctgtggaaagcagcgttcggccccgcgcg

SEQ ID NO: 52705 - DNA, 197 bp, Homo sapiens
  chr16:2510305-2510502
  hyper
gccctggacgcctgcgcacagcgacaattgcaattggagcagagcctgcgcgtttgccgtcggctgctgcatgcctggtacgcggaccccggacccactggccagacctccctcgggccctcagagtcccgccccgagcgcccagggctgggagaccgggcgcagccgcccacttcggagctgtgggttgtcagtgc

SEQ ID NO: 52706 - DNA, 30 bp, Homo sapiens
  chr16:2521644-2521674
  hyper
ttccccaagggcagcgtcttggggcccggc

SEQ ID NO: 52707 - DNA, 35 bp, Homo sapiens; identical to SEQ ID NO: 10479
  chr16:2533374-2533409
  hyper

SEQ ID NO: 52708 - DNA, 30 bp, Homo sapiens; identical to SEQ ID NO: 10480
  chr16:2571000-2571030
  hyper

SEQ ID NO: 52709 - DNA, 30 bp, Homo sapiens; identical to SEQ ID NO: 10481
  chr16:2582582-2582612
  hyper

SEQ ID NO: 52710 - DNA, 30 bp, Homo sapiens; identical to SEQ ID NO: 10482
  chr16:2732188-2732218
  hyper

SEQ ID NO: 52711 - DNA, 30 bp, Homo sapiens; identical to SEQ ID NO: 10483
  chr16:2732709-2732739
  hyper

SEQ ID NO: 52712 - DNA, 30 bp, Homo sapiens; identical to SEQ ID NO: 10484
  chr16:2802466-2802496
  hyper

SEQ ID NO: 52713 - DNA, 30 bp, Homo sapiens; identical to SEQ ID NO: 10485
  chr16:2828287-2828317
  hyper

SEQ ID NO: 52714 - DNA, 223 bp, Homo sapiens
  chr16:2888901-2889124
  hyper
cgccaaactggagtgaaagcccgaccaccgtgtctcacagggaaactgacaccagatgcgaacttccaaatggatccctccctgcaagtgtggagctggcgctaccaggcactgctctggccatgcgtctaagacacaggcagagggcgctgcccaccacgctggcgacggcctcaaagcccctgttcatgcctgggacagcgcccaaggaccttgctcatgc

SEQ ID NO: 52715 - DNA, 30 bp, Homo sapiens
  chr16:2918165-2918195
  hyper
tgatctgaacttgccgcggatacccagcca

SEQ ID NO: 52716 - DNA, 31 bp, Homo sapiens; identical to SEQ ID NO: 10486
  chr16:2969679-2969710
  hyper

SEQ ID NO: 52717 - DNA, 30 bp, Homo sapiens
  chr16:3015077-3015107
  hyper
ttgcagggatggcccgaagcggggcctccg

SEQ ID NO: 52718 - DNA, 43 bp, Homo sapiens; identical to SEQ ID NO: 10487
  chr16:3016806-3016849
  hyper

SEQ ID NO: 52719 - DNA, 274 bp, Homo sapiens
  chr16:3017156-3017430
  hyper
cgctgcgcctgggcactgccgcgctgctgctcaccttccgaagcgacgcgcgcggccacgcgcaaggcttcgcgctcacctaccgcggtgagcctcagctcggcgcgccctgcccgctgttcccaccccgctctccccaccccgcctcacgcccctctccgcagggctgcaggacgccgctgaggacccagaggcccccgagggctcggcccagacccccgcggcgcccctcgacggggccaacgtgagctgcagccccaggcctggggctccg

SEQ ID NO: 52720 - DNA, 31 bp, Homo sapiens; identical to SEQ ID NO: 10489
  chr16:3018712-3018743
  hyper

SEQ ID NO: 52721 - DNA, 30 bp, Homo sapiens
  chr16:3020204-3020234
  hyper
gaggagcctcccagcgccgccgtcctgacg

SEQ ID NO: 52722 - DNA, 31 bp, Homo sapiens
  chr16:3053912-3053943
  hyper
ccaggctagctgagggcggggagcagctgcg

SEQ ID NO: 52723 - DNA, 30 bp, Homo sapiens
  chr16:3068325-3068355
  hyper
ggggtcgctgggcccgcctcgggctggcag

SEQ ID NO: 52724 - DNA, 34 bp, Homo sapiens
  chr16:3070230-3070264
  hyper
atgactgaactgagcgggcgccgcggggcggggc

SEQ ID NO: 52725 - DNA, 31 bp, Homo sapiens; identical to SEQ ID NO: 10490
  chr16:3071261-3071292
  hyper

SEQ ID NO: 52726 - DNA, 4 bp, Homo sapiens
  chr16:3078145-3078149
  hyper
gggc

SEQ ID NO: 52727 - DNA, 395 bp, Homo sapiens
  chr16:3078252-3078647
  hyper
cgatcaccacctgcatgtcgtcctgcgggaggccgtggtcggctcagcgccggtcccgccccttgccccgccccgcacacgggccccgcccctcacctgccaggcctccagctcctgcgtgagcgccaccttctggcggatggcgcgcagcagctcccgagacagggagtctcgctccagcgagacgcggttgagctgcagggacagctccagggccctaggcgggcaggagcagaagacgcgtttgagggcgctagggcctcagggagccggggtggcgggggacttctgtacccgggcgggaggagggctgcaaacacctagatcaaggaggtcagggggcccctgggtgggagtggggatcattataacccgtatcagaagaggaatcagga

SEQ ID NO: 52728 - DNA, 240 bp, Homo sapiens
  chr16:3086763-3087003
  hyper
gcccccggttccccggcgatcccggttcccctgcccccgccccggctcccccaccttctccgccgacgcggccggaccaggccctccccaggctcgaggggcccggccctcggcgtcccccaggctctcacccgaagccgccgggctccctccgaggtccccgcggtctccggtcccctcttccggaggcggctccaggtgtgcggccaacacaggtgaaggggcggggccgcgggaggg

SEQ ID NO: 52729 - DNA, 30 bp, Homo sapiens
  chr16:3096094-3096124
  hyper
acagctggagctggcggggcggagggcggg

SEQ ID NO: 52730 - DNA, 30 bp, Homo sapiens
  chr16:3096462-3096492
  hyper
ggcccgccccttgtcgctggacgtccgaag

SEQ ID NO: 52731 - DNA, 30 bp, Homo sapiens
  chr16:3108769-3108799
  hyper
tgggcatcagggagcggcggggcggggagg

SEQ ID NO: 52732 - DNA, 30 bp, Homo sapiens; identical to SEQ ID NO: 10493
  chr16:3156366-3156396
  hyper

SEQ ID NO: 52733 - DNA, 31 bp, Homo sapiens; identical to SEQ ID NO: 10494
  chr16:3156726-3156757
  hyper

SEQ ID NO: 52734 - DNA, 30 bp, Homo sapiens
  chr16:3184262-3184292
  hyper
cctgaaatcatctccgggtcgaggcgtgga

SEQ ID NO: 52735 - DNA, 30 bp, Homo sapiens; identical to SEQ ID NO: 10495
  chr16:3184679-3184709
  hyper

SEQ ID NO: 52736 - DNA, 323 bp, Homo sapiens
  chr16:3200662-3200985
  hyper
atacagccgcagggccgcgtggcctaatggataaggcgtctgattccggatcagaagattgagggttcgagtcccttcgtggtcgttgccatgttaacgttttcttccagctccacttaaaatttcttcacctgggactgcaccctgggcgactacgacactcgaactgagtgcgccggtcgctctcccctcacccccgtaggaacactgggacctcgccctgcgcctccagtcgcgaagctaaggacccagggccagaatagcagcgagggcgacttagagaacgccggcagggccctggcggactgcggagcttgaagcca

SEQ ID NO: 52737 - DNA, 30 bp, Homo sapiens
  chr16:3207631-3207661
  hyper
gccgccaggcccgtgcggtctgccgtcctt

SEQ ID NO: 52738 - DNA, 561 bp, Homo sapiens
  chr16:3208812-3209373
  hyper
ggggtaggggtggagtgaaggcggggtctgggggggtgcgcgtggacggggagagtggaaccgcgggtgtggacctccaagtacagacgtcagagaacgtttgtcgtcctggctcgttggtctaggggtatgattctcgctttgggtgcgagaggtcccgggttcaaatcccggacgagcccgcttttttttttttttctgaacaccatcattttctcgcggtgaagattgaggagcttcacggagtctcggccgcagggaacttggtctctccgtggcagctgcaggcgccggggccgatccgacttcccgcttccgtccggcttgcggcccctcgccttgcccggctacaggaaggactcgcctgcgcctcctgactggagccttccacctgggagttctgagtgcgcctaaggcctggcgctgaggcagtggaccccagatccgggacccgaaaggagggcaaacacctccaccgccgcgtctgcctctgcggacgtggccctagatcccgggtggccatggaacttggtctgggcgtgtagttttcctttgagtggg

SEQ ID NO: 52739 - DNA, 45 bp, Homo sapiens
  chr16:3209411-3209456
  hyper
cgaacttccttccttttttccttcgtttctctttcttttcttttc

SEQ ID NO: 52740 - DNA, 2 bp, Homo sapiens
  chr16:3220284-3220286
  hyper
gg

SEQ ID NO: 52741 - DNA, 118 bp, Homo sapiens; identical to SEQ ID NO: 10499
  chr16:3220438-3220556
  hyper

SEQ ID NO: 52742 - DNA, 302 bp, Homo sapiens; identical to SEQ ID NO: 10500
  chr16:3220590-3220892
  hyper

SEQ ID NO: 52743 - DNA, 559 bp, Homo sapiens; identical to SEQ ID NO: 10501
  chr16:3221141-3221700
  hyper

SEQ ID NO: 52744 - DNA, 679 bp, Homo sapiens; identical to SEQ ID NO: 10502
  chr16:3221786-3222465
  hyper

SEQ ID NO: 52745 - DNA, 331 bp, Homo sapiens
  chr16:3232685-3233016
  hyper
atacccctagaccaacgagccacacgccccgtagcctccggcttgtctttgtggccttcgtggagtcctcgtggccagaggtggggacccagcagagcagagctaggaggagactccgatttcctgaagtctggaagagacaagttcaagcgcgggtggacgcggagggagccctgagcccccgcttctccctgcgccgcacaaaatggggagcatcccctgtgcccccacaatccggggccccccgggccctcgcccgcctccgcctctcagccctgggctggggatccgcgcgtcacgccgcgtcgcgtagtgaggagctccagctccg

SEQ ID NO: 52746 - DNA, 132 bp, Homo sapiens; identical to SEQ ID NO: 10504
  chr16:3233198-3233330
  hyper

SEQ ID NO: 52747 - DNA, 669 bp, Homo sapiens; identical to SEQ ID NO: 10505
  chr16:3233434-3234103
  hyper

SEQ ID NO: 52748 - DNA, 196 bp, Homo sapiens
  chr16:3234164-3234360
  hyper
cgcacccaaagcgagaatcatacccctagaccaacgagccgccgcttcccctctgttttgttgttgttgttgttgttttttgacacgtccttccgcccctgacgcagagcgagactctctccatcgccccaatagctcagtccttagcgcgcgcacctgcgaatctgggcttttgggttcgcggccaccctcagat

SEQ ID NO: 52749 - DNA, 171 bp, Homo sapiens
  chr16:3237920-3238091
  hyper
atctgagggtggccgcgaacccacaagtcaagattcgcaggtgcgcgcgctaaggactgagctattggggcgatggagagagtctcgctctgcgtcagggacggaaggacgtgtcccccaccagaaaaaggaaaaaaaaaaaaaaaaaaagaaaaaagaaaaaaggaagcg

SEQ ID NO: 52750 - DNA, 1645 bp, Homo sapiens
  chr16:3238150-3239795
  hyper
atcccggacgagcccccttttccttctcttttttcccatttcgcattttcagcaaggacaggagactaggaaggcggagggaggctgctattggcagggcctcagtggagacctcccggggtcccgggacgcagacggacgggcctgaatcgctcgccttggtgaaatgggatccagcgctgccaactgcggcaactgcggttaaaggagacgaccccgtgcagcaggaggaggttatttagaataaggaagaatgcgccgggctcattggtcgctacaggggcataaattttttctaggattccagagtatggctgctccagtcccaggtgagccctcctccgcttaaaattccagtttattcggagaaggggagaataccggaagcgggggagaagggaggggagtgagtgagaggagggaggcggggaagaccgggcatccgcgggcagcacttcagtcggccctggcggggtgggggtctcggcccttgtccccacccccagaccccggggccttcccactgagagcgagggaattcgcggctttgatctggaggggacagggagccccttttagcccagatctgctggattctcgggagtcaggtgaaatctggatacagggaagggcagagtgacagtaaagggtgccccggaaccgatgcccgacgcctgctgccccacggccttcattcttgctcctcctcacgtcctggggactggaggtcccgccagctccccccagtgaagggcaagggggcgcatcgcagaatcgcccctggtgcgcagcgtagttggtggcctaagccgtcttctccgagagctcagccatcctgggcacttgaggccaggcaggcgctgcggggctggttcagtcgatggagaaaagagactctcagcgtcagcctttagggttcgaggcccacgtgggaaactcgctttctgggttttggcttccctggggagaagggaggaccggagccggagaagcgtgaggtgcggcgaggtagggtgcctggtagctggtgtctcgtgcactccgtcaggcctttattgaacacccattggtgccacgctgagggactgcagcgtttccaaggcgagcttgcagtgatcgaggctcgcagaccctcagcgcagccgctgcctgctattgggaggttcccatgtcctgcggaagctggagctcctcactgcgcgcctcggagacgccgaatccccaactcaaggccgagtggcggtggcgggcgaggacccagggcccttctggattgtggtagcgccagggctgctccccattttgtgcgtcgcggaggaggggccggggctctgggcttccgccacacccatcctcacttgaaattgccccttccaggcgggtctgaaataagattctactcactgggtcctgctgggtccgccccagccgcccccaggatgctaggacgcccacaaagataaccttaatgcgtaaatcgtgtggctcgttggtctaggggtatgattctcgcttagggtgcgagaggtcccgggttcaaatcccggacgagcccggcttttggtgcagggtaaaagtcgtttcctgctcttttttagattcggctcgacttacagacctcagcgcaggacgtggacgccctgca

SEQ ID NO: 52751 - DNA, 30 bp, Homo sapiens
  chr16:3241419-3241449
  hyper
gggctgattcattacgtcacttagtttcta

SEQ ID NO: 52752 - DNA, 30 bp, Homo sapiens
  chr16:3332884-3332914
  hyper
gcgaggccgcgccgcggactgcatctccca

SEQ ID NO: 52753 - DNA, 125 bp, Homo sapiens
  chr16:3355108-3355233
  hyper
tcctcgaggaggcggcgacgagcccagcaacagctcgagcacggccggccgggccgcgggaagcccgagaacgcggcgcgcgcagctgggaggcgacccttacccggcgaggctcccgggaccaa

SEQ ID NO: 52754 - DNA, 582 bp, Homo sapiens
  chr16:3355250-3355832
  hyper
cgcagaacagacgcggcagtgcgacgcctcccccactggggacacgagacagcgacagccacgcggtgagccggtacaaggccctctaggcttcagcgggtctggatactcggtggcattaacccttccctaccgccggggaagacagcagtttctctggcgaggaagtaggccgggctcaggcgccttagccagagggcgggcctgcgccaccctcggaaagcgtcacttccacttccggccggcgctctggctctgtacctggacagggctgcggtaggccagcggtgggctggcggttgcgctcctcagatcggcggcctttcgggcggtggcttgcgtttgagcctcagaaagcgaggagcggcctccacggaagccaagctggccgaggtaaccgagaagcggcttcccctatggcttcgaccctggagccgctggagcggcggcggccgcagggaggcagccattttccgtaggcggtggccgcggcgcttccgggccgcgcggctggagcctgaggcggggccaccgtcgggcacgagaaaccattctctccccgcttttcgcagctgtatccca

SEQ ID NO: 52755 - DNA, 30 bp, Homo sapiens
  chr16:3450813-3450843
  hyper
ctgtcccaaggagacgcccatcggggccgg

SEQ ID NO: 52756 - DNA, 30 bp, Homo sapiens
  chr16:3451129-3451159
  hyper
cccttggcaggaggcgggccctgtcagtag

SEQ ID NO: 52757 - DNA, 742 bp, Homo sapiens
  chr16:3550752-3551494
  hyper
tactcagaacctgtcacccagcgcgaaacgtccgcaaagcgtgtaaacagacgcccagaagctgggaagcttgcagccctcatagacgccggtatcgccacgccctctgccctcggcgtctcaggagcgctctctgccggcccgctctccccgtgcgtatgcacgtgccgccgcgtcttcgcttcgctttttgtttgtccctgaccgtgcgccgtccaagggtccattggttgccatagagatcgtcgagcgctgggcctgtgatcgctgaggggcgagcagttgcgaccctgggctcctggggacctgagcgttatgtctttccgcgacctccgcagtaaggcagccccgcgcccctgtgacctgcgggtcttccagagattcagggctcccgcccgccgggtcccctgtgtaggcgatccctgaggcttgcgctgccggaggctcctttcgggcctctgcgcctcagggaccgcctgacccgcggctgcaacccggccgagcgtcccaggcccttcttcggccatttctagcgaggatggaaagttctctatctgccactggccgcgtgtggctcagaacgcttgaaatgtggctagtgcagatgaataactgaatttttaagtgtaatttatttctgtttgtgtagctgcatgccgctcttcgctaccgtattggaaaatgcatggagagtttagagactattttttgagttgggttagcttagcgcttagaaaaccga

SEQ ID NO: 52758 - DNA, 64 bp, Homo sapiens
  chr16:3766892-3766956
  hyper
gtccccagaacctgcacggcgccgggcactgagcgggcgctcacatgtgcgtccaatgaacgaa

SEQ ID NO: 52759 - DNA, 30 bp, Homo sapiens
  chr16:3767712-3767742
  hyper
ccgtgaccttggatcgcgttgtcaagggcg

SEQ ID NO: 52760 - DNA, 1165 bp, Homo sapiens
  chr16:3781397-3782562
  hyper
agcagggggtcggggtcgacgatggggggcagggtgttgatgacaggcccagcgtgcaggtggatcacgaagaagacctgcaggagaggaggggctttagtcccacacaagggacatggcacctccagtggtgagctcagggcaggcgcagccacccagcctgcagaataggcaggtggctgagcctgatggccctgatgccttgggatggaacaaaattggtgacacgttgcatgatgtcacccaactggtccacttggtttcctgggggccacttccctcccaccacagacctgcacacgggcccacgcccgccagctgcgagtctttccctcctcccggccagaggcacggctgcagcaccgcagcccacgcctacctccttgtgcttctccatggtggcatacagcttctgggacaggtcattggacacgttgggcatgctgggcttcttcttgttggcgcggctgatgctgcttttgttcttgttggttttcttgttgttcttcttcttggcattcttgctgtcgccctgactgccctgcaacaacacgcaaggctgtgagaccaggcaagtgcccctccacacttggcacggacgcccagctcccaggccgtgggcatcaggaagctcaggccaaagtaggtcaccaccaggcagaccccatacgtgaacggctacaggtggctgtaggtgctgcagccttcgggacagagcagggcctgtcctcggccaggctggtgtcattatcagctttatgccacgctgcctctaaaggggaaaagagacccagagtgcgagttcagaaattaacaaatgagggcagtgggggctgtttccactgtgccacaaccagatgcggaagattccacgtcacaactgtggtcagcagctgtctgccttgaggaaggctctacacacccgagaaagcatgagagcttccaggagacaggaaagctgctgatgggaaaagcagctgccccatcaagagcagggactctgaggcccctgcggggtccactcaaggcccacggagagcaggctggctccctgctggggccatcagtgctgcgcctgactggctgaaggtgggcttgctctcagcccacaggctcctcctctggaaagaacgcaggattaccactcacttacactttaacagag

SEQ ID NO: 52761 - DNA, 220 bp, Homo sapiens
  chr16:3931081-3931301
  hyper
gacgccagcccgggcccgcccgtcccgctggggcggcgctgcgtgttcccagctcctcgcgtccccttccccagaccctcctaggtggcgtcggtcgggaacggtcggggcgaccccagcccaggccgcgccactagccttcgccgccggccagggaagtggaatggcctctgcaggttacagaccgcccttgggtcctgccgacgaggtgggcggatgg

SEQ ID NO: 52762 - DNA, 30 bp, Homo sapiens
  chr16:3989146-3989176
  hyper
tgcccaggccacgctcgctcagtcccggag

SEQ ID NO: 52763 - DNA, 30 bp, Homo sapiens
  chr16:4106772-4106802
  hyper
gttgttataattcggcatgacgatggaggt

SEQ ID NO: 52764 - DNA, 1109 bp, Homo sapiens
  chr16:4165871-4166980
  hyper
ccgcgagccgcctgcgcacaaacaactccgctggcggcgcggagccctccatcctgcaggagccgcgctccgatgcgtcaaaggcggcgcgcggccggccccgggcccggaccccgacccggagcagcgagcttcggcgggcgcccccggctcgcgctccccggccgccccccgcgctccgggccggccctgcccgcggcggcgggcgctgggggtgggggcgccccgggctgcgagtgcgcggagcccgtcggcgcggcccgtctagtggggcctgcttccccccgagtgcgccgccgctcccgccgcggccgcagctgtcccgggaccgagcgcgtggaaccacggacgcgggcccctcgccgggcggcggtgcagacgctgccgcagagccgggctcccgcgacgccggccgggacgcccgcccgcccgcgcccacgccgggggccgcctccccgagctagagatgcggccgccgccgcgcccgccgccgtgtcccccgcggccgctgcctcatgtcggaagagctgccgccgccaccatctccggcccctgccccgcccgctgtcactgacagacgcgcgcccgcgccgcccctcgcccagccgcagcgcgcacgcgcggcccgcgctcgccgccaccgcctcctggccccggacacgcgcacgggccgcgcgccgccccgccttggtgcgcgcgctgggctggggctgcggggcggggcggggcggggcggggcgcgcgctcggctccgccccccgccccgggcggcgccgcttctaggcggcgggctgtggccgctgtccgcgctccgggcgctgtgggcccgccctccctcggcgtcccagaggccgcgcgccgcccggggtcccgaccctgcggagagacctgaaggcgcctgccgtggaagaagccgctggccgcaacgtttgggaaatcaaaatgttgccttcccactcggcacgcctttgggataaatcgaagtttccaaccgttggatttccctcccgggaggctccccttgctctgtaagcaatgaatgcgggccccggggcactcggcctgccctggacctgctcacggggcgaccttcacgggcctagcctcca

SEQ ID NO: 52765 - DNA, 30 bp, Homo sapiens; identical to SEQ ID NO: 10515
  chr16:4233231-4233261
  hyper

SEQ ID NO: 52766 - DNA, 81 bp, Homo sapiens
  chr16:4233704-4233785
  hyper
cccgggagctgagtccgcggcgtgaagcggcggaggtcagcagcgagggggcagggccggcgctggcggccacggagcttg

SEQ ID NO: 52767 - DNA, 92 bp, Homo sapiens
  chr16:4234086-4234178
  hyper
tgagcggccgcgagatcggtccctgtccgcagggtcgggtagtggccccctcggggacagcgtgtgaggattcgggcgcgaaggacggggtc

SEQ ID NO: 52768 - DNA, 31 bp, Homo sapiens; identical to SEQ ID NO: 10517
  chr16:4291946-4291977
  hyper

SEQ ID NO: 52769 - DNA, 30 bp, Homo sapiens; identical to SEQ ID NO: 10518
  chr16:4304209-4304239
  hyper

SEQ ID NO: 52770 - DNA, 30 bp, Homo sapiens; identical to SEQ ID NO: 10519
  chr16:4322735-4322765
  hyper

SEQ ID NO: 52771 - DNA, 402 bp, Homo sapiens
  chr16:4363850-4364252
  hyper
tttgctaacagatttaaactagcgtctcctgtaccttttttctacacacctcgaccccagggctgcagttctgcctgcctgaggtcggatgcggtcggctgcagggcagggctccgggctgaagcgcagcgattcccgccgccgtgagggggcgctctgcgggcctcggcctcggcccttccggacgcccgcacaggtcgccggacccagagagtcggcccttaatagccccctcctggaagcgctaggtcccgaaactggccttcccccggggcccatctcccggctaatgtttaacccggccacactccacattatccacactcaggagaccggggtgaggtgagggtggaggctgggggaggtcacctccaaatcgccaacttccgagcctttgctcca

SEQ ID NO: 52772 - DNA, 30 bp, Homo sapiens
  chr16:4364717-4364747
  hyper
gcagcatcaaatgcacgaatgaagacggac

SEQ ID NO: 52773 - DNA, 31 bp, Homo sapiens; identical to SEQ ID NO: 10521
  chr16:4366576-4366607
  hyper

SEQ ID NO: 52774 - DNA, 90 bp, Homo sapiens
  chr16:4378092-4378182
  hyper
gctgcgcccggggagcatccacggggtgcccccacctgaccgagagccggctcctgccctcgggaccccgcagtaattagcacccaggcc

SEQ ID NO: 52775 - DNA, 644 bp, Homo sapiens
  chr16:4421673-4422317
  hyper
cgcaggtcaggtggccgcagggtgagggccagggcaacccggcccacgagcccctcggtggggaaggggcgtgtctccacgcggctccgccccggccaatggggagaggccccgcccctgccgcggcgggcccgccccccgggactcttaaggcgcgacctgcctccagcgagccgactccggagcccgagcccggggcgggtggacgcggactcgaacgcagttgcttcgggacccaggaccccctcgggcccgacccgccaggaaagactgaggccgcggcctgccccgcccggctccctgcgccgccgccgcctcccggtgagtttctgtggggctggggggctgcgggcggggaagggggcgccacggccaggctgtgcacacgcgcggggaccgccgccgcgcgcacacacgcactctcgggcgggaccgcggccccagccccacacggtcacctgggccgcccggcgggcaggccctgtacgctccctcccccgccgtcctggggcgccgacagccccgcggccggccagggtgcgcgcctgagtgtgcggtgagcccgcgaggctgcaagcagacaaaataaacaccccgtcccatgcttcctcctcccacggctgggcctccggcatgaccagttt

SEQ ID NO: 52776 - DNA, 30 bp, Homo sapiens; identical to SEQ ID NO: 10522
  chr16:4465716-4465746
  hyper

SEQ ID NO: 52777 - DNA, 30 bp, Homo sapiens
  chr16:4475540-4475570
  hyper
gcgacggaggaccgcgttgtatgctgggac

SEQ ID NO: 52778 - DNA, 30 bp, Homo sapiens
  chr16:4526750-4526780
  hyper
tctccccgggggcgcggggaggcctgaatg

SEQ ID NO: 52779 - DNA, 107 bp, Homo sapiens
  chr16:4588399-4588506
  hyper
gaccctcagccccgcgcggctttgcgcgcacaacgaaaccccccaacccaccgcccaccccaccgcccagaggcttctaggacttgtagtccgcccggtcacccccc

SEQ ID NO: 52780 - DNA, 135 bp, Homo sapiens
  chr16:4666534-4666669
  hyper
acagctagtgaggctttagcccgcttcgagcgcccgggggcggtaaggcgcgatcatagcagctctaggtgaccttggtccggctccttgcgccccctggccccagcctccttcgttgagacactatttgttgag

SEQ ID NO: 52781 - DNA, 30 bp, Homo sapiens
  chr16:4743269-4743299
  hyper
ccattgcggatggacggggccatgcgggcc

SEQ ID NO: 52782 - DNA, 30 bp, Homo sapiens
  chr16:4784425-4784455
  hyper
tgtttgtcctgctccgtccccgccctccag

SEQ ID NO: 52783 - DNA, 30 bp, Homo sapiens
  chr16:4817330-4817360
  hyper
ggtgaccgcgcgagcgtgcggcgactctgc

SEQ ID NO: 52784 - DNA, 146 bp, Homo sapiens
  chr16:4852810-4852956
  hyper
gcgggagtgaggctcgctccgcctggccagggacgcggccggcggctgcacgagtcaggcttgctccggctggccagggacgcggccggcaccagcctggggcgcccgcttgggggcggagctcccggggcgcccccaggatatga

SEQ ID NO: 52785 - DNA, 30 bp, Homo sapiens
  chr16:4853160-4853190
  hyper
catctcgccgaggacgagggaagcaggact

SEQ ID NO: 52786 - DNA, 30 bp, Homo sapiens
  chr16:4986232-4986262
  hyper
cacccctgcgaaaccgagcttcgaagagga

SEQ ID NO: 52787 - DNA, 908 bp, Homo sapiens
  chr16:4986645-4987553
  hyper
ccctctgcgcaagagcgaccctgggacacgggggtgccctgtacccccagctcagctgcccgtgccctaggccctcaaggcaatgctccctgggctcccggagtcccctgtgttatgctccccctcggggaccccagccagtcccttcccacctggcggcgcttcccagcttcagggtggcctcggtcccgcgttcccgagagtcccgcactccgggttcagttcccggttcctggacccccgtaccccccattcctacactgcccgggaggtcttccaggtcctgtgcgcccacaggggcaagagcgtcccggagcggagctgtgggcgcctcctcacctccgggtctgcacagtggggctgtatttgcctttgtttctcttcctgaagagcgagttcatggtggcgctcggggtgcgggcggcggcggctggcgggccgggcgcgcaccgaggggcgggcgggagcgcaggtgagcgagcggcggcgcggggagcccggactgcggcgcggcagtggctccgggtccctactcgctgggggcggggcgcccgccggccactggctctgcgggccgctccccgagaaggtggtgcttaccttcccgaggaggggccaccgcgcgggcggggcttggacgcgggggtggggacactgggtcttggccggacgccgcccacccccagccgggggactccggaggccgggcaggcactggggcgcaaaggccgccggggcgagcgctcgcagccccaccctcctcgggcccggcgcgcctctggccgaggccttcacctggttctgcgctaccgcggaactcggcgctcctggtgctttggcggacacccagctgggccccgcaagacaggtgcggcagagacccgcacggattcatgtgccctagtagc

SEQ ID NO: 52788 - DNA, 682 bp, Homo sapiens
  chr16:5007928-5008610
  hyper
atgtaaacagtactgtcggccagacgcagggtccggggcgggtcggcccggactcagggtctgcttggaggcagagctagattagggcggggtcgtcctgtggcctaccattccccgaggctgagggccttggagggcggggccagtgaagggggaggggacttcctgaggtgtgaccaatctagagaaaggactgggctgagggcgtggtcaaacaagcgacatctaaaaataaggggcggggctagaaccagggggagttcgcctggggcggggccagagtggggcgggaccagttagggggcagggccaacctgggcggggccatggccggggacgtgggcgggaccaggtcaggggcggggccaggccaggatctccgctgtcccgggtcctggagctctctcggcccggcaggtttcgctcccgcccctccggccttccacagctgtcctggccgcagggtgttcaaggcgggacacaccaggctagagatccgcgatcgggccccgcctcaggtactgcgctccaggccaggcgggcgcgggtaagcgctcagctcccgagccaggcgggcttccagggcacttcccctaggctgcattcccaaaggctcccgagggcgagggtgagcaaagctgcggggacctgtgtgtgcatgcgtgtgcgattgcctctacgt

SEQ ID NO: 52789 - DNA, 30 bp, Homo sapiens
  chr16:5037555-5037585
  hyper
aggcctacgagaagcgtttccccacgtgcc

SEQ ID NO: 52790 - DNA, 31 bp, Homo sapiens
  chr16:5121975-5122006
  hyper
cgtgggccgcagcccccgtatgcagtaccac

SEQ ID NO: 52791 - DNA, 30 bp, Homo sapiens; identical to SEQ ID NO: 10528
  chr16:5666484-5666514
  hyper

SEQ ID NO: 52792 - DNA, 33 bp, Homo sapiens
  chr16:6068893-6068926
  hyper
taggccaggagaccagggtaccgggtcgcgtgt

SEQ ID NO: 52793 - DNA, 119 bp, Homo sapiens
  chr16:6068936-6069055
  hyper
cgcccgctggaatccagggctgcacgcgtgaccgcggcggcggcggcgctggcgaggggaagggggagggggcgctccctcgcgcaccagattatttttggctccgcagccggggctgc

SEQ ID NO: 52794 - DNA, 61 bp, Homo sapiens
  chr16:6069094-6069155
  hyper
cgcacacacacacatgcacacattttctcgcgctctctccggctctcctttgtttattttc

SEQ ID NO: 52795 - DNA, 20 bp, Homo sapiens
  chr16:6069531-6069551
  hyper
cagccccgggaacagcagag

SEQ ID NO: 52796 - DNA, 107 bp, Homo sapiens
  chr16:6069577-6069684
  hyper
cgcgcctccggggctgaagaaggaaggagtgagccgagccgagcaccccacatctggaggggacagccagccgtgggccccgccccggcgtccggagcaggagaact

SEQ ID NO: 52797 - DNA, 490 bp, Homo sapiens; identical to SEQ ID NO: 10530
  chr16:6069963-6070453
  hyper

SEQ ID NO: 52798 - DNA, 30 bp, Homo sapiens
  chr16:6533685-6533715
  hyper
gggacgggggcgggcgacagggggaggagt

SEQ ID NO: 52799 - DNA, 418 bp, Homo sapiens
  chr16:7354239-7354657
  hyper
agagagagacagcgcgagccaccggtcattgacttagataaccagcaaaattaaaaaagaaaaaaaaaaattgtagcgcccaggcagagagcaacgtgattgcattcaagcgtccccactcgggctcggcgggcgccagagagacatgatgcagcatcctctgacgggggccacctgcgtggcgctccccaacgtgggcatgtgtccccagctttcgtgtgccttgacttttatgtacttacagcaggtaaggcgcgcgtctgccctcggtggctgctttcctggggctgggccagatgggtccccgcgcgtactgggctgcgcttcggtgccttatgtaggttctgaggagggggctcccgcgttgcgatggaaagggtggatggaagcctcctgctctctgtggagcccgggcacc

SEQ ID NO: 52800 - DNA, 45 bp, Homo sapiens
  chr16:7354699-7354744
  hyper
cgcctgatgcccagcctgggcaccggaagtttgaaatggaaaact

SEQ ID NO: 52801 - DNA, 31 bp, Homo sapiens; identical to SEQ ID NO: 10532
  chr16:7615184-7615215
  hyper

SEQ ID NO: 52802 - DNA, 30 bp, Homo sapiens
  chr16:8223298-8223328
  hyper
aagctgggagagttcgaggtcgccacctag

SEQ ID NO: 52803 - DNA, 737 bp, Homo sapiens
  chr16:8767885-8768622
  hyper
cacctctgactcccagcgccctgtttgtcttccggagcgctggggccaggcggaggaaagtagctgggagcaagaagggctggcagggccctgagcgccgagatggggagtgaggtggggagggcgggatgctccttcccttctccgcaaaggaaccccttctgattccgactctggagctccagagaccggatccgagacgcgggtggaggtggagttacactcgcctgcagccctgagggtgtaaatggcccattaagatccaggttaaatcaacctatggagctgccccccagagggtcagggtccccacaacttgacgggggtcctcagccgtctcctccccagtcccaggactccctcccagccctcgcggtccctctggtgggtcccgccccagcccccgtctcccccgcccccggaggctggactctgcccccgccccgcctgccacctccctcctgggggcggtggcccgtggcgggcgcacccattggctgtggcgaaagcgagggccggggctggcggcgctgattggccgggacgctcggcggagccagggagtccggcgagtcgctgggggaagtcgagcagacacccagcgctgccggaactcggggcgcgcatcccgcaagtcggaacccggcggatcggatcccgcagatcggagacggggcctggaggtgagcgcgaggcgccgggtggcttgggacgggcccttccgaggggagccgaga

SEQ ID NO: 52804 - DNA, 31 bp, Homo sapiens; identical to SEQ ID NO: 10534
  chr16:9022848-9022879
  hyper

SEQ ID NO: 52805 - DNA, 30 bp, Homo sapiens; identical to SEQ ID NO: 10535
  chr16:9053896-9053926
  hyper

SEQ ID NO: 52806 - DNA, 215 bp, Homo sapiens; identical to SEQ ID NO: 10536
  chr16:9056292-9056507
  hyper

SEQ ID NO: 52807 - DNA, 30 bp, Homo sapiens
  chr16:9186591-9186621
  hyper
cctccctgcccccccggtcctcacactggg

SEQ ID NO: 52808 - DNA, 328 bp, Homo sapiens; identical to SEQ ID NO: 10537
  chr16:9186866-9187194
  hyper

SEQ ID NO: 52809 - DNA, 63 bp, Homo sapiens; identical to SEQ ID NO: 10538
  chr16:10133418-10133481
  hyper

SEQ ID NO: 52810 - DNA, 147 bp, Homo sapiens
  chr16:10274393-10274540
  hyper
caggataggctgctgggatcacggactccattccgagtccccgacgccatccacatccctcgatccatctctaactctatccacaactccaattcgagctaattctccatcccccagccccttctcgcatccagcttcctcatcccc

SEQ ID NO: 52811 - DNA, 146 bp, Homo sapiens
  chr16:10274832-10274978
  hyper
ccctacgagcccgtcgtgtgcaccacacactttgctctacgcccagccccaactacagacccggctcctctcagtcagagtacaccccaagtgcttgggagtgaggacgctgcctggtgggcccaggctccgctgtgcctggggaa

SEQ ID NO: 52812 - DNA, 30 bp, Homo sapiens
  chr16:10275395-10275425
  hyper
tcaggtggtgcacacgcatgaactgcggca

SEQ ID NO: 52813 - DNA, 197 bp, Homo sapiens
  chr16:10275752-10275949
  hyper
aggatgcagtggggcgcgctgcgcgcacgagcatctcggccgcctcagcagccaccgggtttagcgggttcccgcatgctgcggccccagcgcgctcccctggctgtcccgcgctgtccgcatcgcccccacggggggcggctatcccagccggaggctctgcagcagggctctaacggggcggaggagagaaggag

SEQ ID NO: 52814 - DNA, 818 bp, Homo sapiens; identical to SEQ ID NO: 10541
  chr16:10276232-10277050
  hyper

SEQ ID NO: 52815 - DNA, 357 bp, Homo sapiens
  chr16:10277071-10277428
  hyper
cgctcaagcccaagaggcttcgagctccggcgggcgaaagcgtctcctgcccgcagcctctctcctaggtgggtcgagacagaccccgcagtccctcggcggcgacgcggagcgcggccacccgttccgagagcgcacggcggcaaataaggccaggataggtggctggctggcgacgggggcgcctgcggcggcgcgcgctgctgtccgtggtgttggaaccacgctctccgcccgctcccgggcgtctggtgcggctgaagaatcaattattcagatctctgctaccgcttcctcctcccccagtgcctcgcgctgggtacagttatccccctccacgcacaggcgcgccgacac

SEQ ID NO: 52816 - DNA, 690 bp, Homo sapiens
  chr16:10479684-10480374
  hyper
tgcgctatggcgggtaagccccggtggctgaccggaagaagcgcccacggaggcgaaccccaggcgcccctcagcctacttccatttcccctcgcgacccttcgccccgcccactctagctggctgtgcctgactggctgggctgccgcatattcgcgctgccattggtccataatcagctgggggtgggcgtagggagacctacttcagcaggtcctggccggaccagcattgttaacggctgcggttcgaagtggctgtgggtattgctgcggctggtgcgtcgtcgctctaggtacgttggggccgggcgagtgtcctgcgagagcggcgattggcggggtggcggctctaggagcgtcggtcgcctctctgagggccggccccggaggcctcggagcgccgggcctaccggacgtttgcggcgaagctgccctgactgaaaagcgtccgcggggccgtctgacaggtccgggaagaggcccctgaggggcggacgggcgcgtctccaccgttttcgcagagggatactggtgaagcgggagtggtgtgcggcctcaggtccgggcggcactggggttagggactgcggagggaagtggtgcgtgttttttgtcctgaggggtaagtaaaagctcgctcttgtccggaatgctttcagaaattaacggataaatctccacctccacc

SEQ ID NO: 52817 - DNA, 645 bp, Homo sapiens
  chr16:10674032-10674677
  hyper
gtctggggacgctgcccgggaatccctcacgcgacctggggatctccctggactccaagagccccgggtgtaagtccggcggggcgaggggaggcgccctgactcctccccaaacttttcccgcctgcttcggctcaaaaggcgtgggaagctgtcccgggatggcgaagtggaattctggggccggagcgagcgtggcgcagaccagaggtcggcggcatgggtggcacctcggccctcccgttactgtcaccaattccgggggctgctcccggtccagtaagtggaggggtcgcgtccctgctgcccgggcgtacacgatcccggggcccccccgatgtcgccccgcgccctgggtgcgcccacaactcacccggcgctggcggctgcgctggcagctggatcgacggactggctgggggtgcgaggcgaggccgccgggctgttttgaagctctgggctgggactgcgcgccctccctccaccctctaggcggcggggcccctccttccccgatcccgcctcccgggccgtgacgccaggagccgggagagccgagtgggaggggccgccggcgaaaggagggggccctggagggaaaggccgaggccgggagcgccctggcgcccccgcaccaccgttccc

SEQ ID NO: 52818 - DNA, 30 bp, Homo sapiens
  chr16:10837590-10837620
  hyper
aaggttcgcgcgtgcgcacagccccctttc

SEQ ID NO: 52819 - DNA, 115 bp, Homo sapiens; identical to SEQ ID NO: 10545
  chr16:11035551-11035666
  hyper

SEQ ID NO: 52820 - DNA, 30 bp, Homo sapiens
  chr16:11038654-11038684
  hyper
gtgagtgtggggggcgtagcgggaggcctc

SEQ ID NO: 52821 - DNA, 30 bp, Homo sapiens
  chr16:11439273-11439303
  hyper
cttctcaaagttggcgggaaagcggaggcg

SEQ ID NO: 52822 - DNA, 30 bp, Homo sapiens
  chr16:11439518-11439548
  hyper
tagtgatggcggaccgcggcgaggctcggc

SEQ ID NO: 52823 - DNA, 194 bp, Homo sapiens; identical to SEQ ID NO: 10546
  chr16:11762782-11762976
  hyper

SEQ ID NO: 52824 - DNA, 151 bp, Homo sapiens
  chr16:12211190-12211341
  hyper
gaaccgtggaaacaggcgtggtcaatacgtgcttcagtgcggacgaaccgtggaaacaggcgtggtcaatacgtgcttcaatgcggacgaaccgtggaaacaggcgtggtcaatacgtgcttcaacgcggacgaaccgtggaaacaggctt

SEQ ID NO: 52825 - DNA, 565 bp, Homo sapiens
  chr16:12897344-12897909
  hyper
aaggaggctcctagaccagatcgctctctcggcctcgcctctcaactgcgcccctggaatccctaagagcaggctttgatgcagctatggcggctcccaggccccggtgcagccccggatggtgtccgactggcggagcgcacacctgaacaaaaggttcccccggcggaaggttccgcagccccagagtcccctccccgggtgaggggcgggcagtacctgcgggaaacgcggccagggtcctgcccctggctctgtggaaaacaccccccgcctctgcagccgacatggcgagcgagtttctggccttcacttagaacactgcgtgggtggaagccgcgcgacttcacacagaacaaccgctggacctgtcccgctttgggcgacgccctttgatctcggggcgggactggggcgggacggggaggggcccggtggctcggggcgccactagtgctgcctgggcggagcggaggcgccagcggcccctctgggatcgacctgcgcgcctggcgagtggagactgtctagggcacgcgtgggcggggataaggctttggggtca

SEQ ID NO: 52826 - DNA, 1239 bp, Homo sapiens
  chr16:12994564-12995803
  hyper
ctccagagaccgatgcgcgggctccaggtccgggagggtggctgaggctgggtgcccaggccttgcgctgcgccagatccgggagcgcagaggcggcgccgcggtgttccctcctgtggagcgcagaaaacgctgcgggggcgaagagggacagaaagcggcaggttcgagaggctgggggacttccaaggaaagaccttccaggacacgccatagcctcggccttgttcggctgtcccctcttacccccgaccttctttgattcgttcatcccgagcccctctcccccggagggtgcttatccctggctcaggggcttgccacctgtccttcccagctccgcctgggtccttgcttgggcccagagagttgagccatgcgggttgcgctcagggctggagggcgcagccgggaagggcaaggaggccccgcacgcctgggaggggcgatcctgaccagactgcacccagtctgtcttggagtgaaagccatttagtctgtccccatcctctccgagtcatccttcccctgatgcacagatttcggccgccgctcctgcacacgcaccggtgaaaaagctacgagctgagccgcctctgcgctctggacagggctgagccgcgcctcctacccagagagggcgcgggaggtcctgccgcggttttccacctgcctggaaatccgagcggctcctctagcctcggctgctgccgagctcgctcctccccgtccgctcgcctggctcagctctgcacgccccccagctagctcccgctctagtcacctcttccccgcgcccccgcccctctagagctcgcgcccgcccccccccacccgcgcctcctctgcccgccctcctccccctcccccttccctcctgccctcccttcattccacaagtgtcgcttcgctctcttcagcgcacttggcgagctggtgaggtgagagggatactgcgagagggctaggggcggccagtccggggctgccggccaaggctaggcgctgccagcccgattctcctctgctctccacccccgcctcacccagtggccggccggacctgcaccccgcgcttgaccccgctcatcctccccccgcccggccgggcgcgctcctccccggccggcccctcggcgcgcggcgcgctggaggcgaacgcgggctgaggcgaacgcgggctgagccgagcgcagtggccgccgaccaccgagcgccccgcgccgctccctgcatgtg

SEQ ID NO: 52827 - DNA, 1203 bp, Homo sapiens
  chr16:12996073-12997276
  hyper
cggagaggccagcgagggcgctgaggcatcggacgcgcccccgacccgggcgcccacgccggacttctgccggggctacttcgatgtcatgggccagtgggacccgccgttcaactgcagctcgggcgacttcatcttctgctgcgggacttgtggcttccggttctgctgcacgtttaagaagcggcgactgaaccaaagcacctgcaccaactacgacacgccgctctggctcaacaccggcaagccccccgcccgcaaggacgaccccttgcacgaccccaccaaggacaagaccaacctgatcgtctacatcatctgcggggtggtggccgtcatggtgctcgtgggcatcttcaccaagctggggctggagaaagcgcaccggccccaaagggagcacatgtccaggtgggctgcctccccttcgccctcccctcggggcttcgctctccctgctctctcctccccaccttcccccaggcaatggcgctccccacggtccccgctccccgcatcccagcctctccgctgggggatgtcaccgggaagccaacttcggcttggaacacggagaaggggcgctgggctcagcacaggtgtgggtctgagcgtgttcgtgtgtgtgtgagcgtgtgtgtgtgtgtgtgtgactctgctccctcaccctctggccgcctcctcccgctggtgactgaggcggacttgagacacgtagcctgggagcccgtggccccgaaatcttcgggtttggggagagggtccatggcacccctcggattccaggtgctagctttttggtaaacaggggcaggcgagcccgaaaggggaggggggcgtgtgtgagcccgagcgcgcgtgtgtgaaggagggagggtcagagtgagtgccgcctgcaactcgtacgactcgcgaaaaggagacgagggaggtggagtgaggggagggcgagaacaaaagccttgcttggagcggccgcctcgctttcccagagcttcgccgtccctggatttgggacctcagctgcccccgcccctttacccacctcatccctttctctggccaccacttctccctgcccggggccgtggccatcgctgcagattgagccccttgccctggctggcgtggactccgggggcccgagccccctcctcgcgcgccctcacttccaagcaccctgatttcgtcaactttcgggtt

SEQ ID NO: 52828 - DNA, 180 bp, Homo sapiens
  chr16:12997519-12997699
  hyper
tgactagcggcctgcgaacagctggatggttggggcataagctttaactgtcccctttcagagtctgggcaacgaagtcgctgtatttttctctaccctctccccaccccttcttccgcgccccctctgccgggggcctgtgtgtgtgcgcgcgtgtgtgcacgcgctccgtgtgatgcc

SEQ ID NO: 52829 - DNA, 19 bp, Homo sapiens
  chr16:13648595-13648614
  hyper
gcttcggcctcccaaagag

SEQ ID NO: 52830 - DNA, 178 bp, Homo sapiens
  chr16:13877529-13877707
  hyper
cacacagaccaaccctcgtacaacgtgggaggaggtcatctttgagtgtgaataccaggaggccagggtcactggttccatctttgagaacggctaccaaatgttgggtccattattattctttagtactcacttgttttggaaacacacacgtgctgagtgacgcttttgaaaagga

SEQ ID NO: 52831 - DNA, 40 bp, Homo sapiens
  chr16:14164835-14164875
  hyper
gcgagcactcaggacgggtggcagcggtcacctttgtcgc

SEQ ID NO: 52832 - DNA, 10 bp, Homo sapiens
  chr16:14379225-14379235
  hyper
ttcagcccgg

SEQ ID NO: 52833 - DNA, 56 bp, Homo sapiens; identical to SEQ ID NO: 10553
  chr16:14396709-14396765
  hyper

SEQ ID NO: 52834 - DNA, 30 bp, Homo sapiens; identical to SEQ ID NO: 10554
  chr16:14397059-14397089
  hyper

SEQ ID NO: 52835 - DNA, 30 bp, Homo sapiens
  chr16:14724238-14724268
  hyper
tggcctaatttgtgcgggctttcacttcag

SEQ ID NO: 52836 - DNA, 30 bp, Homo sapiens
  chr16:14727224-14727254
  hyper
ggggaaccacggggcgcctgcccgccagga

SEQ ID NO: 52837 - DNA, 30 bp, Homo sapiens
  chr16:14727904-14727934
  hyper
catcccagcttccgcggaaaacagagtgag

SEQ ID NO: 52838 - DNA, 30 bp, Homo sapiens
  chr16:15528743-15528773
  hyper
agctcagggggatacgcagctctgcgcagc

SEQ ID NO: 52839 - DNA, 30 bp, Homo sapiens
  chr16:15529100-15529130
  hyper
agcttttcctccctcgccttccttgggtcg

SEQ ID NO: 52840 - DNA, 30 bp, Homo sapiens
  chr16:15737264-15737294
  hyper
tcacgttgtggagtcgaaaggaaccttgaa

SEQ ID NO: 52841 - DNA, 30 bp, Homo sapiens
  chr16:15952259-15952289
  hyper
aaaaagggcaggcgcggactccttcctgca

SEQ ID NO: 52842 - DNA, 75 bp, Homo sapiens; identical to SEQ ID NO: 10555
  chr16:16043202-16043277
  hyper

SEQ ID NO: 52843 - DNA, 104 bp, Homo sapiens; identical to SEQ ID NO: 10556
  chr16:16155949-16156053
  hyper

SEQ ID NO: 52844 - DNA, 30 bp, Homo sapiens; identical to SEQ ID NO: 10557
  chr16:17481113-17481143
  hyper

SEQ ID NO: 52845 - DNA, 30 bp, Homo sapiens; identical to SEQ ID NO: 10558
  chr16:17563812-17563842
  hyper

SEQ ID NO: 52846 - DNA, 30 bp, Homo sapiens
  chr16:17564905-17564935
  hyper
gaagggggtgggggcgatcagagaagacag

SEQ ID NO: 52847 - DNA, 30 bp, Homo sapiens; identical to SEQ ID NO: 10559
  chr16:18178839-18178869
  hyper

SEQ ID NO: 52848 - DNA, 30 bp, Homo sapiens
  chr16:18801530-18801560
  hyper
gggaccagcctcctcgcaggacaccgagac

SEQ ID NO: 52849 - DNA, 235 bp, Homo sapiens
  chr16:18812905-18813140
  hyper
gccgcccttcccgacggcccccgcgacgctcgctcctcattggacagaccgagcttacgcctcaaggaagccgggccaaccgaagctcagcgcatggcttgaaatcgaggtcaaaggagacagaggcagcgccgggccgagggggaggggacacggagtgcccaatcagcgcccagggactgcgcgacgccccgcccagcgctgtgggaagcggttcaaccgcctctgcaggggg

SEQ ID NO: 52850 - DNA, 389 bp, Homo sapiens
  chr16:18995158-18995547
  hyper
ctgcttgtcgccaccgctggatggagccttgccggatctcccgggctctgcagcccctctgcggtccctgatgctcggctcctcgcgggggcgccccactccggcttctgtgatgtcagcgccggaacctggaatcccggctccgcgagggaaggccggggaggcggcggcggcggcggcggctggagagggtcctcggcagcctctgaggagcgcggggcgcggccatgagcgagtccagcggcagtgcgctccagcccggcaggcccagccggcagccggcggtccatccaggtagggcggcagggagcgcgcgcggggacggtgcccctggggtccgagggcgcacggagggagccgggtgctggaggctcggcctggccgctgtt

SEQ ID NO: 52851 - DNA, 30 bp, Homo sapiens
  chr16:19078967-19078997
  hyper
gctttttttagttccggcaatgagttgcgc

SEQ ID NO: 52852 - DNA, 31 bp, Homo sapiens; identical to SEQ ID NO: 10562
  chr16:19097801-19097832
  hyper

SEQ ID NO: 52853 - DNA, 30 bp, Homo sapiens
  chr16:19098052-19098082
  hyper
gggtcattgctgcgcgttatatatggtaca

SEQ ID NO: 52854 - DNA, 30 bp, Homo sapiens; identical to SEQ ID NO: 10563
  chr16:19179913-19179943
  hyper

SEQ ID NO: 52855 - DNA, 694 bp, Homo sapiens
  chr16:19421881-19422575
  hyper
agaaagaatgaatgcagactacgggcggtgaatagaggtctcggatgccagcaggcgtcccaacccagcaggaactggctcaattctcagaagaaagcgatcggccccgaggcaggaaggccggctccggtgcagggagcgccgcctgcgggctgcttcgggccagggtcgacccgagggccagcgcaagcagcggcaacaggagcgccaggaggtgaggcgggttcgccaggagtggggccagcgcccgggctgccagcctagcaggggcgtcttggcggagccccctcgccggctcccagagaggctgggaagaactgggaggggtgtccccaatgcggggcgcccaagcgtggcagcacgggctgggagcggggagccagcggggtgcggcgccggagtgcggggagaaccaccaggcgccggaattggggagcacgtggagggggcagcggctccagccccagaccgccgcgctctgtcactttgcattaagaaagcttccggggaatgcacacggcctggccgccgccttcgtgcagcccgccctgcaggtgcaggaagaaaagaataatcgcacccgtttctcaggtgcttacttcaccatgtccgatccggtaagttttttatctgagcagcggcctgggtgagagcgaacatgagctttggaagcgcactatttgtgtgttgtgca

SEQ ID NO: 52856 - DNA, 814 bp, Homo sapiens
  chr16:19566587-19567401
  hyper
tttgcgtcttcgctccgccgccttctggagtcctttctgcccctagaggacgcaggtgagctaagcagcagtcatgccctttaccatcatgacgcccgcaggcgggaccacccggcactgtagacagctgccctttacaatcatgactcatagaaactacggcactctggccgtggccgacgttgctcctccgaagcatggcgccggcgggagttgtaacccgggctgtccggagcggggagctgcccctcacaagcatggcgtcagctgaaaatgaagcctgtgctgtgcggagcgtcgcctgcccctcacaagcatggcgtctgcagaaggtgctgtgcggccgctgcggggcggccagctgcccttcacaaacatggcggccgaggggtgcggggagtggcggggtaaggatgggaagccgagcagacggccccagaacaagcggtcatgtgactgggaagatggccgtctttccttggtaaggaagcagcggcgggtgggctttggagaggggctgtccttacttgtgatggggtcggcctgggtctgagagtgtgaattcctctctgtcgggttctggtggtcgaccggccacccccaagttgtcttgaccgtagaatccctggccgctaccgcggtccagcggagcaatctgaagccagactggcgggttcttggttctctccccgtctgctgcctctctgcgccttccacgggcccctgtccattcattccctaaagaaaacttgagtttccaggcttccgcgtccccagaagttggcgcgggttctggggtcgctggatgagggta

SEQ ID NO: 52857 - DNA, 30 bp, Homo sapiens
  chr16:19729624-19729654
  hyper
ggccatggcggcaccgcggcaaatccccag

SEQ ID NO: 52858 - DNA, 30 bp, Homo sapiens; identical to SEQ ID NO: 10565
  chr16:19895306-19895336
  hyper

SEQ ID NO: 52859 - DNA, 30 bp, Homo sapiens
  chr16:19896331-19896361
  hyper
tctgcatgcacccccggagcccaagctcgt

SEQ ID NO: 52860 - DNA, 43 bp, Homo sapiens
  chr16:20084540-20084583
  hyper
acatgcccagcccatcgcccgccgtcacagtcatcacacacac

SEQ ID NO: 52861 - DNA, 256 bp, Homo sapiens
  chr16:20084642-20084898
  hyper
cacagcaacttcctttccccccgtgtggaaatatccatagttgcccttaaagcttaaactttttccgagggggcgccagggaacgcacgggggaggacgggggattctgggtagggttgcccggcacttggggttcctggcttccctccctctcccccacgcccctcacctggtaaaccgaggcacagcaagaggctgtagtagaccacgggcacgaaacccaagccgcaggccgagccgggggaccaccaagaca

SEQ ID NO: 52862 - DNA, 165 bp, Homo sapiens
  chr16:20085303-20085468
  hyper
cggagtgtgtgtggggtgggagggatgcggaagaggagggggtcccagccgcctcgcttggctccactttcaggggagaagatgcagttagacctgggagccccgaaggaagaccggagtggaaaacaggctatccccaatctccaaccccgagggaggggcgtg

SEQ ID NO: 52863 - DNA, 30 bp, Homo sapiens
  chr16:20085668-20085698
  hyper
gttgtcggttttcctcgacaagggaagctg

SEQ ID NO: 52864 - DNA, 37 bp, Homo sapiens
  chr16:20753257-20753294
  hyper
cccgcctcctgccccgcctcccgactgcaacctgaat

SEQ ID NO: 52865 - DNA, 212 bp, Homo sapiens
  chr16:20817421-20817633
  hyper
actgtcacgtccagtcgtttcccaaggcctaaaataggcaggcactggctcaaggccacacagtcaaggccccagggttcgtccgcctcgggctcctgtcaccctcgggtagaaggtggcccaaggctgaagaccgaggtccagggaggcgcctttccaaccgtgccagagagggcaggtcgcagacgccggggctgcggggaatagaggcc

SEQ ID NO: 52866 - DNA, 30 bp, Homo sapiens
  chr16:20911812-20911842
  hyper
agattgcgtcacgacgcacataaagacgta

SEQ ID NO: 52867 - DNA, 30 bp, Homo sapiens
  chr16:21289540-21289570
  hyper
gccgcgctcaggaacgctggtacccggctc

SEQ ID NO: 52868 - DNA, 30 bp, Homo sapiens
  chr16:21289932-21289962
  hyper
gctgtctaggtcaccgtgcctgggaaagaa

SEQ ID NO: 52869 - DNA, 328 bp, Homo sapiens
  chr16:21294967-21295295
  hyper
tcttgggagcatgcgcggggtggggcggtggggggactgaggtggcgctcccggctcctccgcgcgcccccggcaccttccgcgcgtccccggctccccacactccgtccccggctccccacactcccaccccggtctgccccgggcgcccccggttccccacctcctggtgtgcctctggcgggtccgcgcaggatcaggctacagactcgcccgcgggcggctgcgcggcgggccgttggggagggtgttgggatgaggagccccaaccagatggacgcgcaccccgcagcggcggaggcggcggcgaggcttgagcagtgagtgc

SEQ ID NO: 52870 - DNA, 184 bp, Homo sapiens
  chr16:21295340-21295524
  hyper
cgctggccgctgctccagacgccagggggcccacccgctgcccgtggtcggcgcgcggagctcgaaagcgcgcgcctctaacaaatgaaaacccatagggacttagggttgaattttaacttttttttttttttggcttattgtttagtgctagatagaagggtttgagcggtgtagtcaattt

SEQ ID NO: 52871 - DNA, 217 bp, Homo sapiens; identical to SEQ ID NO: 10568
  chr16:21531390-21531607
  hyper

SEQ ID NO: 52872 - DNA, 30 bp, Homo sapiens
  chr16:21610444-21610474
  hyper
cctctttgcgcccccggggttaactgcacg

SEQ ID NO: 52873 - DNA, 30 bp, Homo sapiens
  chr16:21611595-21611625
  hyper
agactgaagagacccggccagatccattac

SEQ ID NO: 52874 - DNA, 430 bp, Homo sapiens
  chr16:21831534-21831964
  hyper
cacatcctttcaatccgctcctctaagcgcggtcctgagctttggtcccagacgcgcagaaggaagcggcctgaatcttacccagtcctcgacgcgcccagcgtcttgactgcagaggacgaagcggccgcatctcccgacaaacaacgtgtgaagcagcggtgccgccattgggccgaactaacgcgaccgctgcgcctcaggccggatgcccagctccttccagccacagcctctgtcccggaagttgcgcgtgccagcgcaaccttcagacaatcaggggccccgtgtggggagggcgtatgctctcggcgggctagagcgccgctaaaacgcgctcttcgttctacttggaggacttgttccagccagcgtgagtgcgcgagtgtaaggagagacgggaaggatcggctccatccagccctgagga

SEQ ID NO: 52875 - DNA, 30 bp, Homo sapiens; identical to SEQ ID NO: 10570
  chr16:21964474-21964504
  hyper

SEQ ID NO: 52876 - DNA, 30 bp, Homo sapiens
  chr16:21964777-21964807
  hyper
gtgagctcaggtggcgggtttgggaaaggg

SEQ ID NO: 52877 - DNA, 30 bp, Homo sapiens
  chr16:22173698-22173728
  hyper
aatgcaggtgctcccgcgccgggagtgggc

SEQ ID NO: 52878 - DNA, 30 bp, Homo sapiens; identical to SEQ ID NO: 10571
  chr16:22200964-22200994
  hyper

SEQ ID NO: 52879 - DNA, 233 bp, Homo sapiens
  chr16:22203710-22203943
  hyper
tggcctaaacacaacacgtggtaacttctactcttctacactctggccatgccaaggcttgcggttgaactctggtctcgttctctcagagccgcaaacctcggaccatttgaagctggcggtcctggggcttcctttcctctcgataacatgtttacatccaaactcacttccttcctctctttcttctccctgctaatcctgggaaatctgttcttcgagcaggaaaaaca

SEQ ID NO: 52880 - DNA, 30 bp, Homo sapiens; identical to SEQ ID NO: 10573
  chr16:22207233-22207263
  hyper

SEQ ID NO: 52881 - DNA, 231 bp, Homo sapiens
  chr16:22217231-22217462
  hyper
tacatacaaacaagcgatgggcttggatcactaatgattttggaaaggacaggaatacaggaactaagcgagaagcaggcgagaatggcgaggcgcggcgggagaggacggaagttggtcactccctcgaattgccccctcgctgccggatgctaggccagccttgagcaggagaaccggacactgtgtactcagcagggggagccaagacttagcgctaaccattgcacc

SEQ ID NO: 52882 - DNA, 30 bp, Homo sapiens
  chr16:22308577-22308607
  hyper
ctggctcagttttgcgcgtgccatcagcgc

SEQ ID NO: 52883 - DNA, 30 bp, Homo sapiens
  chr16:22385293-22385323
  hyper
aacggtgcctggctcgtccctggcccccac

SEQ ID NO: 52884 - DNA, 30 bp, Homo sapiens; identical to SEQ ID NO: 10574
  chr16:22385985-22386015
  hyper

SEQ ID NO: 52885 - DNA, 481 bp, Homo sapiens
  chr16:22824595-22825076
  hyper
aagccctcctcactcagccctcggcgaccctctggtaccctggacagctccccggggagcagtctaccgctaggcggcggctgctaagagaggaaccctcctgacgcggagtctgccgctccggggctcgctctccggcaggcccggggagaggtggggtgacaatgggttggggtgcgcgcgtgcctcataggtgcgagacagagcgagccgccggggtgtgagtcagcgcgctgggggctaagaagctgggtgaatagtcacggaatctcactcacgctcggctcctccacccatcccgtctacagcgcgtgtcccagtccagggcgtgcgtgcgctcggtgtccgattccgggctgtgtgtgtccatttggcgagatgtcgagagcggggggagtgtccttgtcggtgtatctgggcccaggttaggggacttctcctccccacccccgcgtgggtgtgggggtgtgtccgggctagg

SEQ ID NO: 52886 - DNA, 312 bp, Homo sapiens
  chr16:22825157-22825469
  hyper
cgtctgggtctgtctggtctgcatgtcggcgcgatctcgacctggattcgtgtccctggatgtcgagaggccagcgtggtgggggtgtccagcctcccggaggagtactatgccttgacaccttcgtttcaccgccccaaagctggcctggggctccgtagggagtggcctgcatggggagggcccgcgtgctgtgtttctgggaggggtaagagagtgggggcgcagggggcgggccaggtccctgggcgcggcgcgggctcgggggacccgcgcggctgacgtcaggccactccttaaatagagccggca

SEQ ID NO: 52887 - DNA, 465 bp, Homo sapiens
  chr16:22825885-22826350
  hyper
ggtgccccctcggaaaccatgacccccggcgcgggcccatggagccatggcctatagggtcctgggccgcgcggggccacctcagccgcggagggcgcgcaggctgctcttcgccttcacgctctcgctctcctgcacttacctgtgttacagcttcctgtgctgctgcgacgacctgggtcggagccgcctcctcggcgcgcctcgctgcctccgcggccccagcgcgggcggccagaaacttctccagaagtcccgcccctgtgatccctccgggccgacgcccagcgagcccagcgctcccagcgcgcccgccgccgccgtgcccgcccctcgcctctccggttccaaccactccggctcacccaagctgggtaccaagcggttgccccaagccctcattgtgggcgtgaagaaggggggcacccgggccgtgctggagtttatccgagtacacccggacgt

SEQ ID NO: 52888 - DNA, 60 bp, Homo sapiens; identical to SEQ ID NO: 10578
  chr16:23159922-23159982
  hyper

SEQ ID NO: 52889 - DNA, 203 bp, Homo sapiens
  chr16:23193695-23193898
  hyper
ggcaggcacctgccatctggacgggagtggaaggaagtcgcggggcagtaatagggggcagcaggcgctttgaggcgccttggggtaagtgccgcagagacccagcgggaatgcaggatggcagggcggcctcggggcggcagcaggcactgcgcggtggcccaggaagacgcagcgcggccgggctggggcgcagggcggct

SEQ ID NO: 52890 - DNA, 204 bp, Homo sapiens
  chr16:23194200-23194404
  hyper
cagggcgtcggacgccgtcagcgcggtgggtggccgagccagcatcagccggtggcggcttcccggtgcccgggatgctgggacaccttgcccgggcggtagcggccagctctcccgggtctacccacgccgtggcccggagcacgaagccagtcgagagccactcagagtccgggggtctgggggtcccgggccacacctggc

SEQ ID NO: 52891 - DNA, 30 bp, Homo sapiens
  chr16:23194607-23194637
  hyper
ccacaggacagcgcccgctcgctccgcgca

SEQ ID NO: 52892 - DNA, 361 bp, Homo sapiens
  chr16:23313377-23313738
  hyper
ggacatattcgtggcgcatgtgggtatcgctggtgtcccgaggtggggagggagaatgcggagcgcgtgcgtgcggggggcgtccagtgtccctgaacctggcgtgtgggggctggagcttattgggaggcgagggaggtggccaggggagccgggaccgtgcgtgtggccaggccggtagcgcccagtaagctccacccgcgggcgctccccgtgcttccccgcccctgaacctgctccctcccagtcggtctcgccgcgctcgccgggtgtcccagtgtcaccaacactcggccgccgccgccagcttggcgcgcaccgccgcctccgccaccgccgacagcgcgcatcctccgtgtcc

SEQ ID NO: 52893 - DNA, 297 bp, Homo sapiens
  chr16:23313779-23314076
  hyper
cgcacccggtctcccgcgcgctgcccggagtccctgcgcgcgcgccttctcctgcccaaccccggcccgcgagctcctgtcccggcctcagtttcccacgggagggcgcttgggtgcctgtctgaggcgcctgggacccggcctggggactgaacgggttgggggcggaggggagagctggaggctgggaaaagcccccagggtgcagaaggcagacggggccagggtccccggcgtgtctgggacctcagagacggcggcaaagtcctggcatagagtgggcggggcaagaagttg

SEQ ID NO: 52894 - DNA, 30 bp, Homo sapiens
  chr16:23464124-23464154
  hyper
gccagggccccgagcggctcaccctccacg

SEQ ID NO: 52895 - DNA, 93 bp, Homo sapiens
  chr16:23464613-23464706
  hyper
agagctcccggcaccgacaaatatcccatgtctgctaacatttgccgaggactaaactatatgcttactataaagccctgacatacattagcg

SEQ ID NO: 52896 - DNA, 30 bp, Homo sapiens; identical to SEQ ID NO: 10580
  chr16:23521209-23521239
  hyper

SEQ ID NO: 52897 - DNA, 30 bp, Homo sapiens; identical to SEQ ID NO: 10581
  chr16:23607377-23607407
  hyper

SEQ ID NO: 52898 - DNA, 30 bp, Homo sapiens
  chr16:23652253-23652283
  hyper
ccacgtgagcaccacgctatttccacattt

SEQ ID NO: 52899 - DNA, 30 bp, Homo sapiens; identical to SEQ ID NO: 10582
  chr16:23652900-23652930
  hyper

SEQ ID NO: 52900 - DNA, 580 bp, Homo sapiens
  chr16:23765897-23766477
  hyper
ccccataggccacccgccttccagcagggcgtggtctctacagaggaggtcaggtctcccaggcttcctcagcgtcgacgccggggagcgccctggggttgggagcgcccggggcccgcgaaggaggaggtggctcaggtgtcagggcgcaccgtgggaaccggccccgggggaggcgtggaaacgcggggcctgggactcgaccagcctctcccgtgcggatcgcaaaatctcggagctgaaacagcccgttgttcgcagcctccctctgacccgccaccctgcacattgttttccattcgcccgggtcgcgggtgggaggagaggcacgccggggttctggagcttggccgcgcgccaggcttgtggccttcgtccccctggggccactggggcggccacgcctctccggcgggaggagagaacgcgtgggtccgggtggctgctccggcccttccgcctccagctcggccatggggtcgcgcagctcccacgccgcggtcattcccgacggggacagtattcggcgagagaccggctgtgagtgcgcccgcgtcggcggctgcggaggggacggggc

SEQ ID NO: 52901 - DNA, 291 bp, Homo sapiens
  chr16:23846762-23847053
  hyper
agagacatataaaataaagatcgctcctcccctacctctgcagaacgtgtgtgtgtatgtgtgtgtaagtgtgtgcggccacaagcctttccgaatgagtgacagcgggagcccatccctccaggagacgcgtgcagaatgaccaatgggatggatgggggtggatgggtaccagtctccgcagaggccggggtggaattcgctgcgccccaccccttccacccgctccccttcgccccgtaggtctttccactctcgctcctcccctgggcacatctcctgaacgcagcc

SEQ ID NO: 52902 - DNA, 201 bp, Homo sapiens; identical to SEQ ID NO: 10585
  chr16:23847310-23847511
  hyper

SEQ ID NO: 52903 - DNA, 86 bp, Homo sapiens; identical to SEQ ID NO: 10586
  chr16:23847788-23847874
  hyper

SEQ ID NO: 52904 - DNA, 544 bp, Homo sapiens
  chr16:23847933-23848477
  hyper
cggcgtcgcgggagcctttgctccacctgactaggagcgcgcggggtctgtgcctgccctggagggcagcgcctcgggtgctctccgacccggggttccctatctctccgcctgcttccgggcgcgaggagccctcgccccccaccccttgtttccggggggggcggcgccctgggtgtccttctctatctccctgcgggcatgggacatcctttctcactcctctgtgcctccgggcagcgccctgtgttatctcccattgcccctccccgagggcctgggttcccctttccactcctcggtcacatcactgcgggcccctttcttccccagtccctccagtagtggggcatcctttcctccttcccagtccccctcccagaggacaccaccgccgcggggtcactctcgccctccctctgaatgcgtctttatctcttctcttttcccgagggtgctcggggcatctatgggtacatctgtcgcctgccttcagcccctaccccgacggaaacgctccccactatcccgccacctggtggtc

SEQ ID NO: 52905 - DNA, 125 bp, Homo sapiens
  chr16:24267019-24267144
  hyper
aaagggaggattgaagaatgccgcgttgggtgggtgctgagggagcgccagagtgcgctacgggcttcgctccccttcccctttccttaacccttcctagagcggaggaaccgggtcgtgctgca

SEQ ID NO: 52906 - DNA, 327 bp, Homo sapiens
  chr16:24267220-24267547
  hyper
cgagccggctggctgacccgggaaggaacgggggaagggcggggtgagggaagaaagaccctttagcaccccgggtttctagcccgggcggcggtgtgcagctgcatgagggagctgtcccttcggcaccacggaccttaaagcctaggcgttaagacgacggaggcggggcaacaggcggggagctgtcccttcagcaccacggaccttggcgcccccagggaaaccagccggcccccgccccaggactctgtcttttctccagtttgagcgggggtgtcgggagcaggcggagagctttcctgcgaggctgtggaagcagtgaac

SEQ ID NO: 52907 - DNA, 45 bp, Homo sapiens; identical to SEQ ID NO: 10589
  chr16:24354627-24354672
  hyper

SEQ ID NO: 52908 - DNA, 30 bp, Homo sapiens
  chr16:24551670-24551700
  hyper
ggtgacattgtgcccgttggcggattctcg

SEQ ID NO: 52909 - DNA, 30 bp, Homo sapiens
  chr16:25026512-25026542
  hyper
ctgcccggcgcactcgcctgcccacggtct

SEQ ID NO: 52910 - DNA, 30 bp, Homo sapiens
  chr16:25078080-25078110
  hyper
agaacgggggtcgccgcccagctcggcctt

SEQ ID NO: 52911 - DNA, 30 bp, Homo sapiens
  chr16:25268872-25268902
  hyper
ggatgtgcaggccccgcccggcgccaggtt

SEQ ID NO: 52912 - DNA, 575 bp, Homo sapiens
  chr16:25702789-25703364
  hyper
gcttcaagagaagatggggggcggggggcggtggctggaaagatggaagttgggatgggaaagcggttgtagaaaaggattcactcctggaccgaaggcaggaggatatcccgggcgagagaagggagggtcggggatgggctgagttggagtcccagaggaaaagcggaagcgagagcttcgtcacccgctgtcttccagctcccggtgcgcggcaccggaggcaggcgttgggctttacctctctaaaagtactggggcaaaggaatggagaacacggcgtcccgagctcccaagggaggggagtaaacgaggtggggtggggaacaccccaagtgcgtgcgtgctgggggctggggggcacgatctccgttctcccgggtgccccagccctagcgcacgcctccgctcccccgcccccttcgcaggcgcgcgcgaggcgcaccccccttccctcggcggcgccgggcgcgcgcccggccccctcctcctcccctccgcgcctctcctctctcccggcagaaagttagcagcggggaaggaactccgggctgcaacagcgcgcggcggcggcg

SEQ ID NO: 52913 - DNA, 495 bp, Homo sapiens
  chr16:25703627-25704122
  hyper
cggcggcggcggcggcggcggcggcggcggcgggggcggcggctgaaaccatgtccgggcagcgccgggggctgccgccgccgccgccgccgccgcgagccgggagccgcgatggcccggtggcccgcacctcctccgcctccgcctccgcctccacctctggccgcgccgccgccgcccggcgcctctgctaaggggccgccggcgcgcaagctgctttttatgtgcaccttgtccctgtctgtcacctacctgtgctacagcctcctgggcggctcgggctccctgcaattccctctggcgctgcaggagtcgccgggcgccgccgccgagcccccgccgagcccgccgccaccctctctgctgcctacccccgtgcgcctcggcgccccctcgcagccgcccgcgccgccgccgctggacaacgcgagccacggggagccgcccgagcccccagagcagccagccgcccccgggaccgacggctgggggctg

SEQ ID NO: 52914 - DNA, 343 bp, Homo sapiens; identical to SEQ ID NO: 10592
  chr16:25704389-25704732
  hyper

SEQ ID NO: 52915 - DNA, 144 bp, Homo sapiens; identical to SEQ ID NO: 10593
  chr16:27121250-27121394
  hyper

SEQ ID NO: 52916 - DNA, 30 bp, Homo sapiens
  chr16:27215019-27215049
  hyper
tcagaggcatagaccgcgcaggcgtcatgt

SEQ ID NO: 52917 - DNA, 30 bp, Homo sapiens; identical to SEQ ID NO: 10594
  chr16:27215266-27215296
  hyper

SEQ ID NO: 52918 - DNA, 259 bp, Homo sapiens; identical to SEQ ID NO: 10595
  chr16:27280120-27280379
  hyper

SEQ ID NO: 52919 - DNA, 30 bp, Homo sapiens
  chr16:27324985-27325015
  hyper
actgcagagttctccgctgggcgtgacctc

SEQ ID NO: 52920 - DNA, 30 bp, Homo sapiens; identical to SEQ ID NO: 10596
  chr16:27413510-27413540
  hyper

SEQ ID NO: 52921 - DNA, 30 bp, Homo sapiens; identical to SEQ ID NO: 10597
  chr16:27413771-27413801
  hyper

SEQ ID NO: 52922 - DNA, 14 bp, Homo sapiens
  chr16:28074027-28074041
  hyper
ggaggagggggcga

SEQ ID NO: 52923 - DNA, 149 bp, Homo sapiens
  chr16:28074076-28074225
  hyper
cgcccctccgaccggcagcgggggtgggcgccttcccggggcgcgggagcgtccccaaagccgcggggcgtccgcagcgggtaggagctctgccttgcacctctccacggcggggcgtcccgcacgtccccccatgctggtccccggcc

SEQ ID NO: 52924 - DNA, 519 bp, Homo sapiens; identical to SEQ ID NO: 10599
  chr16:28074417-28074936
  hyper

SEQ ID NO: 52925 - DNA, 299 bp, Homo sapiens; identical to SEQ ID NO: 10600
  chr16:28074955-28075254
  hyper

SEQ ID NO: 52926 - DNA, 30 bp, Homo sapiens
  chr16:28223137-28223167
  hyper
gaggcccgggggcccgcgctgtcctcgcag

SEQ ID NO: 52927 - DNA, 30 bp, Homo sapiens
  chr16:28303456-28303486
  hyper
gtctggggcagtctcgtcccgcagggccca

SEQ ID NO: 52928 - DNA, 30 bp, Homo sapiens; identical to SEQ ID NO: 10601
  chr16:28304288-28304318
  hyper

SEQ ID NO: 52929 - DNA, 130 bp, Homo sapiens
  chr16:28503045-28503175
  hyper
gaaaagcgccgccgcgagcctgcacagcctcccatcgcatcaagttcaggtcccccgagggtccagggtcatagagtgtccaaagggggctcccacgggagggatgagggtctgcgacaggtgacaagga

SEQ ID NO: 52930 - DNA, 30 bp, Homo sapiens
  chr16:28565737-28565767
  hyper
gggtcacgaagatgcggacagaggatgggc

SEQ ID NO: 52931 - DNA, 9 bp, Homo sapiens
  chr16:28834071-28834080
  hyper
cggcttcta

SEQ ID NO: 52932 - DNA, 30 bp, Homo sapiens; identical to SEQ ID NO: 10602
  chr16:28875090-28875120
  hyper

SEQ ID NO: 52933 - DNA, 541 bp, Homo sapiens
  chr16:28891385-28891926
  hyper
tgatgatgactccaaggagcccggcgcccggtcagggagggcactggcatccctcattacccgcccagcctggccttagcccttccccgcgctccctaggcacccccacccccgcagggcatctccagggctctgcctcctctcccgccctgggggctactccccatcccgcggtccatctgcatgtcgcgggttcttccgcagcatgtgagcctcgctggggactctggaggcaacgaaagcctccctgtgccttggtctccgaacgcaggccccgtcgcgttaagcacaagctggcagggcctctcctctcccttctcagatttgctccttgacatttgcctgctgcctggcggtggcaacagctggggcggggcgcgcgcaggaggccccgtaaccctatccccgctccggctccctcgtgaaaccggagcttccctgccttggccgagggggagggctgcgggggccagaccgcctgcgaagaccacagggtttttcctctcgggttttggctcccgtgggatggatgtggctgtgc

SEQ ID NO: 52934 - DNA, 30 bp, Homo sapiens; identical to SEQ ID NO: 10604
  chr16:28936698-28936728
  hyper

SEQ ID NO: 52935 - DNA, 30 bp, Homo sapiens
  chr16:28947871-28947901
  hyper
gaaccagtacgggaacgtgctgtctctccc

SEQ ID NO: 52936 - DNA, 30 bp, Homo sapiens
  chr16:28962157-28962187
  hyper
gggcgcatgatgagcgggtacagagaccaa

SEQ ID NO: 52937 - DNA, 30 bp, Homo sapiens; identical to SEQ ID NO: 10605
  chr16:29110443-29110473
  hyper

SEQ ID NO: 52938 - DNA, 80 bp, Homo sapiens; identical to SEQ ID NO: 10606
  chr16:29606231-29606311
  hyper

SEQ ID NO: 52939 - DNA, 118 bp, Homo sapiens; identical to SEQ ID NO: 10607
  chr16:29607009-29607127
  hyper

SEQ ID NO: 52940 - DNA, 30 bp, Homo sapiens; identical to SEQ ID NO: 10608
  chr16:29624399-29624429
  hyper

SEQ ID NO: 52941 - DNA, 538 bp, Homo sapiens; identical to SEQ ID NO: 10609
  chr16:29624653-29625191
  hyper

SEQ ID NO: 52942 - DNA, 31 bp, Homo sapiens; identical to SEQ ID NO: 10610
  chr16:29653961-29653992
  hyper

SEQ ID NO: 52943 - DNA, 36 bp, Homo sapiens
  chr16:29691805-29691841
  hyper
tggctgactaaactggcgccccgtaaacccttccac

SEQ ID NO: 52944 - DNA, 30 bp, Homo sapiens; identical to SEQ ID NO: 10611
  chr16:29801931-29801961
  hyper

SEQ ID NO: 52945 - DNA, 30 bp, Homo sapiens
  chr16:29802859-29802889
  hyper
ttcactggagccctcgttagcctcgtgggg

SEQ ID NO: 52946 - DNA, 16 bp, Homo sapiens
  chr16:29816729-29816745
  hyper
cgggggcgggaccggg

SEQ ID NO: 52947 - DNA, 30 bp, Homo sapiens
  chr16:29817089-29817119
  hyper
ccctgtctcccgcgcgcccaccacctgcgc

SEQ ID NO: 52948 - DNA, 31 bp, Homo sapiens; identical to SEQ ID NO: 10612
  chr16:29822267-29822298
  hyper

SEQ ID NO: 52949 - DNA, 217 bp, Homo sapiens
  chr16:29822514-29822731
  hyper
tcactaagaactgccgccaaccccaagggtttcttctcggcctggtgtccgtcaatccagccttgctctgccctgtgaggctgtgaggttctggctccgccctccccaggggcagccttactggcggcagcacagatacagggcggggccaaggctgtggctgtggagagcaagttccaggtctctggggaattcccaactcggacaggcccagaat

SEQ ID NO: 52950 - DNA, 232 bp, Homo sapiens
  chr16:29827280-29827512
  hyper
gtggtatacgcatgcgacttcccggtggccatctttactgtgggctgaagcctgtgcgcttactcgcgcatgtgcaagccttccctcgctttcctcttccaagtagccttgcctagagcggagcctcccgcgccatttctgtgcgcctgcgtagcgtgaccctgcgcagcctgggaggcgggtcttagctccaggtgcgtacggcatctgacttgacgtggcccacaactga

SEQ ID NO: 52951 - DNA, 30 bp, Homo sapiens; identical to SEQ ID NO: 10614
  chr16:29828583-29828613
  hyper

SEQ ID NO: 52952 - DNA, 137 bp, Homo sapiens; identical to SEQ ID NO: 10615
  chr16:29836030-29836167
  hyper

SEQ ID NO: 52953 - DNA, 166 bp, Homo sapiens
  chr16:29874652-29874818
  hyper
gaaggaaccattaacgtcaagcaaagttagaaacggaaaaggaaagggtaaaagagaagaccgaataaaaatctctgctttccttttgtggagggtatgacttcctggaggcaaagataaggcgataaaattcctcctcctgagtctttgcgtccccaagaggcca

SEQ ID NO: 52954 - DNA, 335 bp, Homo sapiens
  chr16:29888511-29888846
  hyper
tgagccaccacgaccggccacctcccgggatctctggcctgcccgacccctgcccatcccgggactctatccctcagtacctttgaagtgcaatacgaagccctggcccaggcctggatttgggggcccgggcggtgcctgaaactgcagtgtgaggtcgggcccagaggagagaaggcggcggcgcggctgaggtccccgcagctgggccaagactcgggcgctgggaccgtccccgtcgaacagcgtcagcatgtccccttcccgcacattcaatctgcagggggtgagaccaggcaatggggcggggctgcgactggcccctcccatccagc

SEQ ID NO: 52955 - DNA, 30 bp, Homo sapiens
  chr16:29910296-29910326
  hyper
agcagctggggaggcggcgggtgctgggcc

SEQ ID NO: 52956 - DNA, 169 bp, Homo sapiens; identical to SEQ ID NO: 10617
  chr16:29910604-29910773
  hyper

SEQ ID NO: 52957 - DNA, 63 bp, Homo sapiens
  chr16:29910887-29910950
  hyper
cgtcagatcctggggacgggcggagggaggggcctgggatttatttgacggggagggaggagg

SEQ ID NO: 52958 - DNA, 187 bp, Homo sapiens
  chr16:29985286-29985473
  hyper
gagggcgcggggaccgtcagcagcaccttagctacaatcgttcagctattctcggaagagagaagggagagggaggaggccggggcgggagtgggggctgtcaccctcggaccccggcgtgagaggggccgtgcggccggacgtcctcggggtgggcccccagtcggtggccgaagacctacagctc

SEQ ID NO: 52959 - DNA, 343 bp, Homo sapiens
  chr16:30006504-30006847
  hyper
ccagtttgtcttccctggaagcggcttcatccacctgtgtgtgcgccaagagggcaaactatgcaccaaggctgcgctcaccgcgccccgtcaggcccctcctcctcagcagcaagccccgcctccgcctcccgcggcccaggctccggcccggcacacctgcatcttcagcagctcctcctccaccagccgcttcagtgcctgcttctcctcgggctccaggtggctgcggcccgagtgagctaagtacctccgccgcacgatggaatgcgtaagcgtgctgcagggacatggtgtcaggacggagtcccgacccacccgcgccctttccaaccccatctcc

SEQ ID NO: 52960 - DNA, 31 bp, Homo sapiens; identical to SEQ ID NO: 10619
  chr16:30022360-30022391
  hyper

SEQ ID NO: 52961 - DNA, 30 bp, Homo sapiens
  chr16:30023013-30023043
  hyper
gctggggagcctcacgatctgagggaggag

SEQ ID NO: 52962 - DNA, 30 bp, Homo sapiens
  chr16:30032538-30032568
  hyper
cacgcgcagatacacgcctggctttagggg

SEQ ID NO: 52963 - DNA, 30 bp, Homo sapiens
  chr16:30042315-30042345
  hyper
agcggaggagcagccgggcaagcggtcagc

SEQ ID NO: 52964 - DNA, 30 bp, Homo sapiens
  chr16:30064591-30064621
  hyper
agtggcctggggcgcgctggagcctgcgag

SEQ ID NO: 52965 - DNA, 211 bp, Homo sapiens
  chr16:30075773-30075984
  hyper
caaccaagggcctccgtctggatttccaaggaagaatttcctctgaagcaccggtgagtgggcaggggctccctccccatcaatagggccgacccaagtcttcctcccccttcccccatgccgggccccacgatagtgtgaatgtcaggggcttcaggtttccctaaatataggtccctgccagaggatccgtggcgggaaaagggcaggg

SEQ ID NO: 52966 - DNA, 326 bp, Homo sapiens
  chr16:30077526-30077852
  hyper
ccccttagccctggcggggatcctaagaggcagtgaggggtgggggccggcccatgtacagccccagggttctcgcaagtgggagcttggtttctgtcctgggaaacggggcgcccttcgcgaggagggaaacccctccgcggtgcttgatgcccccttaacactttccctgtctctccttatcgggcgaccttgattctgagcccggaacagctgcagccatgcgaagcgacgggagcatttttcaggggaaggcgcttgctcctccacgttcttgccccgtaggaacagtgacgatggcaaagcttaccgctttcctcgcctcg

SEQ ID NO: 52967 - DNA, 30 bp, Homo sapiens
  chr16:30103609-30103639
  hyper
tcccggattacacgcgagcctgagctgtct

SEQ ID NO: 52968 - DNA, 30 bp, Homo sapiens; identical to SEQ ID NO: 10621
  chr16:30366420-30366450
  hyper

SEQ ID NO: 52969 - DNA, 120 bp, Homo sapiens
  chr16:30380168-30380288
  hyper
ccctccagaatatccggcctgtagctggagttccccatcaaagagcagggatgacctcaggtatcatctcattcaatccactttatagaggaaaaaactgaggcacggaaatggggaagc

SEQ ID NO: 52970 - DNA, 30 bp, Homo sapiens
  chr16:30382554-30382584
  hyper
gcacggagaaggggcgggggcattagtgca

SEQ ID NO: 52971 - DNA, 810 bp, Homo sapiens
  chr16:30411404-30412214
  hyper
taaataaagaggttgtcttggcgtagtcagcggctttctagctccgacgtctggttcaaaaacggccgccagctccatcagccgatgccccaggcctgaggtctggctgcccgcaggcaccacctacgccacagcatccagcgcgacccttaaaaggaaaaccgcgcggcgctgcagagacaaggcagcaaggaggaggaagagggggcgtgtggggggcgttgttgctatggcgacggctgtcggcgggaggcagcccacaggtctggaaccggcgtggaaagcccggacgccggcgcgccgcccaccgggacctgggaaacccgacacccgagaccctttttatgcgtcgggaaatgagtcattcggctgcacagcccaaagggagggcaaacggtgctccttcacccccagaaaagcccgccggatttcccggcgccccgcggggcctgggaagcaggtctgcaatccctagcgttttcacaaccactggcctgatcggccagggattaaagaaaaaagaagtccagggcggttctccccgctaaacaatgaaggcaacgaagtacagggtcgcaagttcccgcccccggctctccccgatctccgtgcggaaagaatccctggacgggttctcgcgagatcgtaagcactggcctggcttccctagaaaccgaccagggctggctgcagtgcggctcctcccgctccgcccgccctttccaaattgatgcgctctcaaaaccctagaaccctgcgttcagggctggggctcttgatggcctgagcggagccctttggggcttctgg

SEQ ID NO: 52972 - DNA, 195 bp, Homo sapiens
  chr16:30428810-30429005
  hyper
ggagacccaggtctctggctccggggcctgccgctaagggctgacctatccccctctccccgcaggtcccgggcgaggcgcccgcgccgtccgccgacccggcgcgtccccacgcgtgccccgactgcggccgcgccttcgcgcgccgctccacgctggcgaagcacgcgcgcacgcacacgggcgaacggccct

SEQ ID NO: 52973 - DNA, 98 bp, Homo sapiens
  chr16:30429060-30429158
  hyper
cggccgcacgcacacgggcgagcggccctacgagtgccccgagtgcgacaaacgcttctcggccgcctcgaacctgcggcagcaccggcggcggcaca

SEQ ID NO: 52974 - DNA, 30 bp, Homo sapiens
  chr16:30457322-30457352
  hyper
aaaaccgcttgcaacgggattgcagaacgt

SEQ ID NO: 52975 - DNA, 221 bp, Homo sapiens
  chr16:30545485-30545706
  hyper
gtccccatgggactgagcacccgatactccacctgggtccgcttctgtcggacacttcgccacctccggatcctgggcagccggatcccacagttcggccttctcctccacccaggagatgagcgccggcttgctgcctccgactcctgggggagaagaacgcaaaccccacgctgcgaggaggccgcctgcccggccccggggcccccaactccacacgc

SEQ ID NO: 52976 - DNA, 178 bp, Homo sapiens
  chr16:30583153-30583331
  hyper
attcacttcatggccgcttggacatagacacccgggttaagggacccggaaggtgccttctgaaaatatggcgaccacccttcaattgtcacaggctgctcttaagggcgccattatttgaccatatcaaatatggagcctttctgacttctctggcctcatcgtcccacttgccctt

SEQ ID NO: 52977 - DNA, 30 bp, Homo sapiens
  chr16:30583744-30583774
  hyper
cagtagcttagctgcggagtccacccagcc

SEQ ID NO: 52978 - DNA, 310 bp, Homo sapiens
  chr16:30596383-30596693
  hyper
tgagtgagttgggggcgggggttggggcttctccacggctacttatccaaatgaagtacctgcttcctgtccttggcccctgctgaaagctgcagagctctcaccgtcgggatcctgggcctccgggctccacgcctccacttctccttccacccacgagataaaagcgggtttgggaactgaaaatcctgcgaaggagaaacaatgggctcggctgagcgcacgggaggggagaatgagactgctccctcggcgccccgcttccagcccactagcctctggggacaccgatcaccgcttcccaccgacg

SEQ ID NO: 52979 - DNA, 188 bp, Homo sapiens; identical to SEQ ID NO: 10624
  chr16:30620878-30621066
  hyper

SEQ ID NO: 52980 - DNA, 905 bp, Homo sapiens; identical to SEQ ID NO: 10625
  chr16:30621123-30622028
  hyper

SEQ ID NO: 52981 - DNA, 30 bp, Homo sapiens
  chr16:30662709-30662739
  hyper
ggtgccaggcagggcgcgagtgatccgctg

SEQ ID NO: 52982 - DNA, 30 bp, Homo sapiens
  chr16:30669853-30669883
  hyper
tgctggagctcccccgctgcccatcggccg

SEQ ID NO: 52983 - DNA, 223 bp, Homo sapiens
  chr16:30670363-30670586
  hyper
tggcctctttgagccggaggacttgagacacttttaaaggggaggtctgcgtttcggggcgagctttcggccccttttaaaggggtggcccttcctcttcctcggggagacttgcatcgacccctggcagggggtggccaccgcactaggccgccggacactgtcgggtcgtcttaaaggggccgggagctggacaacttggggcctcgccttaaagggacgg

SEQ ID NO: 52984 - DNA, 30 bp, Homo sapiens
  chr16:30710897-30710927
  hyper
tcactggaaaggcccgcaggcaggtagcac

SEQ ID NO: 52985 - DNA, 30 bp, Homo sapiens
  chr16:30773575-30773605
  hyper
gcgcctgcgccctgcgcaccgttggggggg

SEQ ID NO: 52986 - DNA, 77 bp, Homo sapiens
  chr16:30786650-30786727
  hyper
gggagagcgtggtggtcgtcgcggagccgcctgtcctgctcccaccgaccccggtctgaccacgtccttggctgtca

SEQ ID NO: 52987 - DNA, 230 bp, Homo sapiens
  chr16:30787246-30787476
  hyper
ccggcggcggcgggcacgctggtggaagcgcgggccgcggcaggggaggacatcgggccgcagagaaagtgccgatggcctggggcagcggtgcgagggtgggaaaaacgcaggatattgcatcatagagacgcggccaccttcgcccctggagagcgccagtctcaggagcgccgcaccggtcacgggtggaggtcagccaggcctccgtaagcgcggtccccttccag

SEQ ID NO: 52988 - DNA, 308 bp, Homo sapiens
  chr16:30797728-30798036
  hyper
gggttaatgacagggccgacacagagcatggacgtgggaagaccgagggaggccgaggcgctgggagcccaggcgccaggcacgccagcctgagacctcgcgatggccccactgcagagggagggaatgaggagccgcctcccgagagatgtggggaacggcccagggtgaccctgacatggaggcggcgggaatgcggccgcccggcccggcccccccaccgcttggctccggacttctgctcccccggagccgcgacccccgtcccgctgctgatacagagcctgggcatccgcccctgccccggc

SEQ ID NO: 52989 - DNA, 295 bp, Homo sapiens
  chr16:30798318-30798613
  hyper
cccccgggaacccaggcgtccccaactcacggctctggggtctgggaaaagccggaaggcggaatccagccccaggggacttaaccccttcagtgccctgcctcgggggacggactgggcgccgaggactctggggtccttctcaaggggtgattccaggctgaggacccggggaccagttcagggtgactgggacggagcaggaagtgaccccagcttcccgggcccctctagcctggagtcagagcatcagctctatgggatttaaccctttgcctcccgcagcctggggaaa

SEQ ID NO: 52990 - DNA, 397 bp, Homo sapiens
  chr16:30816841-30817238
  hyper
cgcggcgacggcctcccggagctgaaggggttattcccactgagacgcggtcgcctccgctcctagagaggcccacggagggcgccgcacttccggcctgggtccagctttggctccggctcccgctcctgacctgctgcttcccgggctggcgtccgggccggcgtccgggcccaggcgaccggggcctccgagctcagaggcagtgccgaggaccgaaggaggggaagggattccccaaaggcatccctgactcccgaattccagcaagggagaatcaggcgctggggaggcaaggagagggccgcggctctcctcgggggccgcggggcgcgactcttccaggacctcggctgcttttcccagtaaagcccaggcggcccgaggctggccgagg

SEQ ID NO: 52991 - DNA, 30 bp, Homo sapiens
  chr16:30886822-30886852
  hyper
gggcctctgggtgccgagctgcagatgcct

SEQ ID NO: 52992 - DNA, 30 bp, Homo sapiens
  chr16:30905062-30905092
  hyper
gggtggagatacaccgaacacccggggccc

SEQ ID NO: 52993 - DNA, 30 bp, Homo sapiens
  chr16:30913341-30913371
  hyper
aacagccccctgcccgtgctccggggcccc

SEQ ID NO: 52994 - DNA, 30 bp, Homo sapiens
  chr16:30934681-30934711
  hyper
cccgctgtccccagcgtcctattgttcccc

SEQ ID NO: 52995 - DNA, 101 bp, Homo sapiens
  chr16:30935542-30935643
  hyper
ccccctggaagggccgcgccgcagcccgtgggagggcctcgcccccggcgccccccatctccactcgccgccgtcccggcctccgccggagggaggggccg

SEQ ID NO: 52996 - DNA, 30 bp, Homo sapiens; identical to SEQ ID NO: 10633
  chr16:30953481-30953511
  hyper

SEQ ID NO: 52997 - DNA, 207 bp, Homo sapiens; identical to SEQ ID NO: 10634
  chr16:30959909-30960116
  hyper

SEQ ID NO: 52998 - DNA, 31 bp, Homo sapiens; identical to SEQ ID NO: 10635
  chr16:30964524-30964555
  hyper

SEQ ID NO: 52999 - DNA, 268 bp, Homo sapiens
  chr16:30964612-30964880
  hyper
actcatggtctccacgtgtctgctgccccacattgaagctgtgagcaacatccacaacctcaactctgtccaccagtcgccacaccagagactgcaccgctacgtggagctggcctggggcttctccactgccctgggcacctttctcttccttgctgaagttgtcctggttggttgggtcaagtttgtgcccattggggctcccttggacacaccgacccccatggtgcccacatcccgggtgcccgggactctggcaccagtggct

SEQ ID NO: 53000 - DNA, 30 bp, Homo sapiens; identical to SEQ ID NO: 10637
  chr16:31008559-31008589
  hyper

SEQ ID NO: 53001 - DNA, 30 bp, Homo sapiens; identical to SEQ ID NO: 10638
  chr16:31008945-31008975
  hyper

SEQ ID NO: 53002 - DNA, 30 bp, Homo sapiens
  chr16:31044529-31044559
  hyper
cgtcccagagacggcggtgacagagccggg

SEQ ID NO: 53003 - DNA, 31 bp, Homo sapiens; identical to SEQ ID NO: 10639
  chr16:31075213-31075244
  hyper

SEQ ID NO: 53004 - DNA, 30 bp, Homo sapiens
  chr16:31084649-31084679
  hyper
gggatcttgcagcgcgggccacgcgaccgg

SEQ ID NO: 53005 - DNA, 33 bp, Homo sapiens
  chr16:31085564-31085597
  hyper
ttagcgtgcaaagacgccgcgttgtgacctacg

SEQ ID NO: 53006 - DNA, 228 bp, Homo sapiens; identical to SEQ ID NO: 10641
  chr16:31117072-31117300
  hyper

SEQ ID NO: 53007 - DNA, 30 bp, Homo sapiens
  chr16:31119635-31119665
  hyper
cgcccgggacggcacgtcctcagaccaaac

SEQ ID NO: 53008 - DNA, 30 bp, Homo sapiens
  chr16:31128845-31128875
  hyper
aactcgcggggccgcggggacggccacaga

SEQ ID NO: 53009 - DNA, 272 bp, Homo sapiens
  chr16:31153836-31154108
  hyper
cagggcagagcgcgtgcggcgggtctccgggcagcggtactgccgccccctggcggccgtacaggcagtggcaccaccagccgcctaacagctccgcctccagcagcgcgcctgggccaagcgcgggttctggaagggaaaaggcagggagcccgcgctgcggcccagacggcccctgcaccgcccggtgccgcccggcccagcgccggtccccagctcacccccgcggccccagcgggccaggcggcagcggctcccgggcaggaagtagt

SEQ ID NO: 53010 - DNA, 30 bp, Homo sapiens
  chr16:31191844-31191874
  hyper
attctccgtggcctcgcctcccccaactcc

SEQ ID NO: 53011 - DNA, 640 bp, Homo sapiens; identical to SEQ ID NO: 10643
  chr16:31213545-31214185
  hyper

SEQ ID NO: 53012 - DNA, 40 bp, Homo sapiens
  chr16:31227396-31227436
  hyper
ctgctgttgtcttacgcgactggtgcgcgcgtggggctgg

SEQ ID NO: 53013 - DNA, 88 bp, Homo sapiens; identical to SEQ ID NO: 10644
  chr16:31228309-31228397
  hyper

SEQ ID NO: 53014 - DNA, 28 bp, Homo sapiens
  chr16:31276465-31276493
  hyper
agcatgagccaccgcgcctggtcctatt

SEQ ID NO: 53015 - DNA, 30 bp, Homo sapiens
  chr16:31454155-31454185
  hyper
ctgggagctggaggcgtcctggcccggcgt

SEQ ID NO: 53016 - DNA, 30 bp, Homo sapiens
  chr16:31454581-31454611
  hyper
ggacattgggtcaccgggatgggtggaatt

SEQ ID NO: 53017 - DNA, 44 bp, Homo sapiens
  chr16:31483757-31483801
  hyper
gatggaacgggaggtgcggcgcccgcgggcgcccgggcgcgggg

SEQ ID NO: 53018 - DNA, 616 bp, Homo sapiens
  chr16:31498606-31499222
  hyper
agctgggctgtcccctgaccccggcctgttgcaggagggctggccgcgctgatgtacacggacacggtacagaccttcgtcattctggggggcgcctgcatcctcatgggttacggtaggggctcgcctaccagggaggggcgcggagggcatggtcgcggagctctcggcctgcgcgcggggccgttgcgcgtctccggtctgagggtcctaaggagggtcccctgacggccttgcccggcagccttccacgaggtgggcgggtattcgggtctcttcgacaaatacctgggagcagcgacttcgctgacggtgtccgaggatccagccgtgggaaacatctccagcttctgctatcgaccccggcccgactcctaccacctgctccggcaccccgtgaccggggatctgccgtggcccgcgctgctcctcggactcacaatcgtctcgggctggtactggtgcagcgaccaggtgcgggtatagggctgcgcctgcagtgaggccggggcggagccgagacgggcggagcctgagtccctccccgccttccccacaacggtctaaggcgcagtctgaggggcgggaacccctcgggttggtgctaaaccagaca

SEQ ID NO: 53019 - DNA, 143 bp, Homo sapiens
  chr16:31580595-31580738
  hyper
cggtggctaaagaggcggcggccgcggtgcccgtggctgcgggggccccgtccccacccgggtttcctgcgacgagggcggcgggcgccggggccgcggcttggggtgcaccgctgcccacccggctcttggtcgcggggtcc

SEQ ID NO: 53020 - DNA, 604 bp, Homo sapiens
  chr16:31885056-31885660
  hyper
ccgtccaatcaggagtgaagccggagagcaggggcggcttccgggatttggcgggggccttcgtcggctccagttagagctcgggtctcctcgccacagctccgagtctttcgttctgggaggcccaggcggcttcgcgttctgagaataaacagaacctctgttgctctgcgacttgcaggcactgggagattcgtagctaagacgccagggcatcccggaagctgggaaatggtgagtgtgcggggtcgggggtccccagagggagggagggcggtggtcggaagcggcgggaacccgctgtaggggcacccgggcctccccgcagtcagcctcggggtctgggccccgagtcccaactggtgcagctcggccctcggtcccctccgctgcaagatggcggccaggccggcagccgggaccccgcgtgtcctgtcccatcccgaccccgcagagcgacctcgtccctggccggagccctctctgggcagctccgcgtcgcagccccgcgtctcccccagattgtgcggtgaggacgggagcgtctcaggggagacccaggttcggtgtgtgggaagaaaccgtgccctgtggggtcctcagt

SEQ ID NO: 53021 - DNA, 30 bp, Homo sapiens; identical to SEQ ID NO: 10646
  chr16:46723151-46723181
  hyper

SEQ ID NO: 53022 - DNA, 30 bp, Homo sapiens
  chr16:46723405-46723435
  hyper
gttcaccgcatctgcgttggcgattgcgct

SEQ ID NO: 53023 - DNA, 30 bp, Homo sapiens; identical to SEQ ID NO: 10647
  chr16:46865504-46865534
  hyper

SEQ ID NO: 53024 - DNA, 30 bp, Homo sapiens
  chr16:46918418-46918448
  hyper
gccggttgggtgtgcgttggtgcttcagcg

SEQ ID NO: 53025 - DNA, 30 bp, Homo sapiens
  chr16:46918941-46918971
  hyper
ggtccttcccacgacgtccacccccatggc

SEQ ID NO: 53026 - DNA, 86 bp, Homo sapiens; identical to SEQ ID NO: 10648
  chr16:47175852-47175938
  hyper

SEQ ID NO: 53027 - DNA, 810 bp, Homo sapiens; identical to SEQ ID NO: 10649
  chr16:47176766-47177576
  hyper

SEQ ID NO: 53028 - DNA, 118 bp, Homo sapiens; identical to SEQ ID NO: 10650
  chr16:47177628-47177746
  hyper

SEQ ID NO: 53029 - DNA, 624 bp, Homo sapiens; identical to SEQ ID NO: 10651
  chr16:47177805-47178429
  hyper

SEQ ID NO: 53030 - DNA, 30 bp, Homo sapiens; identical to SEQ ID NO: 10652
  chr16:47495526-47495556
  hyper

SEQ ID NO: 53031 - DNA, 95 bp, Homo sapiens
  chr16:48399754-48399849
  hyper
ctgagaaggaagtgcgctccctgagccagctcaagagttactgcaggagcctgcctgccgggagagccatttggagcctcggccggggctgggcc

SEQ ID NO: 53032 - DNA, 30 bp, Homo sapiens
  chr16:48643290-48643320
  hyper
ggtggacgaggctgcgggcccagcaacagg

SEQ ID NO: 53033 - DNA, 541 bp, Homo sapiens
  chr16:49308919-49309460
  hyper
aagtgcagggcacacgtccgcagttcagggtctttagccttccattgggtccgccccgccccaggacccaacctgcaatctgtgggagagtcccacaccttccctccgcgccgcactatcccccaccaccacctcattaaggcaacaattaaggagaggggtgaggctccctctccatctgggtaattgtgttctcattaagagcggatgcgcccgggctctgagcattagcgctccagtgcagcttggaaggcatgctcccagctcggctaatggtggaagcggcggccgggcagcaagcgagctggggggcaggcgcggggcccagcgcaacccagcgctgctccgcagacagcagacaccacagtgatcaccctcggctcctcgcctgcgcggctcccggggcgcttagcgcggtgtggagaacccgggcggagaagccaggtctgggcttgttgggtcctagaagcctccctgagttcccctcacagtacctttaagcctggctgggtgccggaaacgctgcgcagaataggaaaca

SEQ ID NO: 53034 - DNA, 30 bp, Homo sapiens
  chr16:49311517-49311547
  hyper
catgcggagaagaaacgggcccgggtttca

SEQ ID NO: 53035 - DNA, 202 bp, Homo sapiens
  chr16:49311787-49311989
  hyper
ggctcccgacctccccgctgccgaagcaactgggtcagcctttcagacttaaaacgaagtcgtttatttcatttttgctttcacattatgttccgatacaatcaaaactcctggacgaacctcttgaataaagtcctgtgaatgagcggaatcataggtcctgggcgcccgagtatgcggcgggtggactccggattcagag

SEQ ID NO: 53036 - DNA, 525 bp, Homo sapiens
  chr16:49312032-49312557
  hyper
cgcggtgggagacatccggggacagaaggcctgaggagtctgccgctccaggcagggtcgtttgggtcctcaaactgggactattcctgatgcatttggaatgcaaagaaaaaaatcaaacttcgctcctgggccggcggccgcgcctggcctagcaagatttcggccacatttcttacgtttccgccaaagctgtgaacacaggcgaatgcagtgctggtccccggcctggcgcaggaaggagcgcaaggccggctttgcaaggaagccctcgcgcccaggcctttctatggttgcgttcccccaagtctcctgcctttcggaacctcgccctttggcaccccagacccccaacctcgcagctggggaagatgcggattttagaaagctgtttcagaaaaataaaagtcccacttcgactttattagattaaagcaaaattaaaccttgactattcacacgtatgttacagaggaagaggaggcgtccggaagaagctccttggcgtttcgtggagtcacagag

SEQ ID NO: 53037 - DNA, 30 bp, Homo sapiens; identical to SEQ ID NO: 10655
  chr16:49313292-49313322
  hyper

SEQ ID NO: 53038 - DNA, 805 bp, Homo sapiens
  chr16:49314016-49314821
  hyper
gtgatttgtgattagaagtctcgcaccgagcggcacaatgtatttcctccccaaaccacgggctcaattccctcccccatccagccgcgcccgccaccgcctggttttgcccctgtggtggcaccgtcagccaagggcctcgcgccctctccccagctgtgcgtcccacctctctcggcgcccaagggaaacctggacatctttggggacccggagagccggcgagtgattgctgggacacggctggagccgggagagagtagcactacgccccctccctccctcctctctctacccctcaccctccggggctaaatgctgctagctcaaaaacccacagtccgcacggggtggggattggggacaagtgggagaaaacgggggccccgtccgtggtgctgaagacaagcacgcaagccgcatcgcaggcttctgagccggggcaaggggtagggtgtactgtcgcggtgcttcctggggagtccgggaaggcttcccaagcggcagctgtctggggcgctaacaacagccgttacaaggaagtccctgaaatccagggaacccttcggagaggcccggaaggcagaagcagaaaattctgtctctcgggggatggggctggatcccaagagccagagacagggaaagcagaggacagttgaagccacagaactgagaggccccgctatctgtccctccaagcagcccgaagtacatgcagccgccacttctgcctaccacctccggacagcccgagcacccctgaggccagtaacccccctacggggccagggcccggcacgag

SEQ ID NO: 53039 - DNA, 69 bp, Homo sapiens
  chr16:49314959-49315028
  hyper
cgagacgggaacgaaggggagtgggcaggaatcggtcccggactgtcgtccccgcgcctccgcagagcc

SEQ ID NO: 53040 - DNA, 794 bp, Homo sapiens
  chr16:49315521-49316315
  hyper
cactccgggactagcgtcccctccgcgactagcgtcccctccgcgctgtgttcccggagcccctcccgggcctcaggggtgccgcggctgcccagccgcacttggatgcatagccgctgctgctcggtcccgctgctgccgccgcctcctgcccgcacccgccgctgccgccgccgccgccgctctgaattattgatgcagccggcgctgcagccggagcgggcggagagcgcgcgccgggcacaaaggcgcggacctcggcctggccccgcccccgccgcctcccggcccgcctccctccgaggccctgcccccgccccggccgaggccacgccccccagccaatcctgacgcgccgcgctccccaccgagccaatggcggcgctgtccgcgctcggccacctgaccccgggcgccgttgttattaggcgcggcgaggcgggtggcgcgcggcagcagggttgggctctcgccgtgagtcgacgaagggagcgcgggcgcgcgcccgcgtccgcgcactgagagtcgcctcggccgctcgctttctcgactcccgcctcgcgcctcgatcctgttccgcctccctcggccctcctgcccgcccccactcgtcggccctcaggtaggaggcggcgcgccccggggtcgggagtggaatcgctggaggctgcgagtcgcctgcccgcctgtgggcgcgcccgttgggaggggagcgccccccagcgggcgcgggcgcgagggcagccggcgcgctgggcgagcctggctcagggtcccggcggccggggtgcagg

SEQ ID NO: 53041 - DNA, 267 bp, Homo sapiens
  chr16:49316508-49316775
  hyper
gactgctctgccggccgcggaggtcggatcgagcggtcattcattcatttgttaattcgttcacttattcaggggagatcattgaacccctacggagtaccgggtactgggccgggcgctgaggacgcggggctgagcaaaagcagccgaggcccaccttcgtgccccttaaaacccagcgtgcggggcggcaacgagtactgcttttctgttttgcacttaaaatttacattttgcatccgtactttttatttactgtgcaccctt

SEQ ID NO: 53042 - DNA, 432 bp, Homo sapiens
  chr16:49316844-49317276
  hyper
cgatttttcgagaataatttttaccctaagtggattttcgtgccacgcatggacttggaactacacacacgtagtccaaaacgtgaaagtcaaaatgcagctttgccaagtggcagggagaaaggagagctgagaagatgaggagaggaagggcgcgctccaggctttccagcccgggtgcggtagacgtagccctgaaggatgaacccaggctggtagtagggcggcgggagggcggggggacctgtcagtcaagtccaaagcagaaacgcggcgccggatcccagtcagaggccggctggaacgcttcccacaggctcctggcgctccggtccccaccaggcgaccttgatcctggcgtgctcagcggagccagcgcagcgtcgggagctggagagacgcggggcgccggctgagcgctcctgccctctg

SEQ ID NO: 53043 - DNA, 30 bp, Homo sapiens
  chr16:49888929-49888959
  hyper
ctgcgtcccgccggcgccgtgcagacaatg

SEQ ID NO: 53044 - DNA, 30 bp, Homo sapiens
  chr16:49890969-49890999
  hyper
tcctcctcccgatccggctgctggggctgc

SEQ ID NO: 53045 - DNA, 30 bp, Homo sapiens
  chr16:49891614-49891644
  hyper
gcacttcctctgtccgactgtaaaaggaac

SEQ ID NO: 53046 - DNA, 30 bp, Homo sapiens
  chr16:49891994-49892024
  hyper
ggtgcacggcgcggcgctgggggttatcaa

SEQ ID NO: 53047 - DNA, 30 bp, Homo sapiens
  chr16:49892481-49892511
  hyper
ggccaggaccgagacgtcccctaactagac

SEQ ID NO: 53048 - DNA, 30 bp, Homo sapiens; identical to SEQ ID NO: 10659
  chr16:49893107-49893137
  hyper

SEQ ID NO: 53049 - DNA, 110 bp, Homo sapiens
  chr16:50188125-50188235
  hyper
cgggaccccgtggaaacggaggaactacaaccagggagtcgtggggtgagtgctggctctgcggcccgatggcctggccggtgcgaatgcgcagccgggcacacgcccac

SEQ ID NO: 53050 - DNA, 30 bp, Homo sapiens
  chr16:50279722-50279752
  hyper
tggggccggcctggcgctccccagcacgtg

SEQ ID NO: 53051 - DNA, 249 bp, Homo sapiens
  chr16:50581535-50581784
  hyper
caaacaaacccttgggtctggcgaactgcagcggggagcggaaaccaaggaagatcaaagactcagcggttacccccttccgggccgcgcagtttggcagcgcgccccgacccgggcgggcacccacgggcccccggacgaggagatcccagagactggctgataacggggcgctttggacatttgtcgctgcctggagagggctgggctcacactggcccggggtgcgctgggggctcctcctggact

SEQ ID NO: 53052 - DNA, 212 bp, Homo sapiens
  chr16:50582041-50582253
  hyper
gttctgtcccaatacgcctcctggacaagccgccccgccgggtcgccagccctggagctcggcccccggccccagaccgcggcagggagcgcggactgtgtcccgcccctcccgtcagcgccccgccctcgtccccgccctgccccgcctccggccccgcccccgccgcaaccagccttgcctttgatgcgccgcaccggccaatgggcgcg

SEQ ID NO: 53053 - DNA, 67 bp, Homo sapiens; identical to SEQ ID NO: 10661
  chr16:50773733-50773800
  hyper

SEQ ID NO: 53054 - DNA, 467 bp, Homo sapiens; identical to SEQ ID NO: 10662
  chr16:51183963-51184430
  hyper

SEQ ID NO: 53055 - DNA, 356 bp, Homo sapiens; identical to SEQ ID NO: 10663
  chr16:51184601-51184957
  hyper

SEQ ID NO: 53056 - DNA, 237 bp, Homo sapiens; identical to SEQ ID NO: 10664
  chr16:51185054-51185291
  hyper

SEQ ID NO: 53057 - DNA, 422 bp, Homo sapiens; identical to SEQ ID NO: 10665
  chr16:51185542-51185964
  hyper

SEQ ID NO: 53058 - DNA, 303 bp, Homo sapiens; identical to SEQ ID NO: 10666
  chr16:51186025-51186328
  hyper

SEQ ID NO: 53059 - DNA, 793 bp, Homo sapiens
  chr16:51186595-51187388
  hyper
gggacgaggtggcggcgcagagccggaaagcggggtggggggagggcggtggggaggtgttctgtccgaggctgcctggcggcgccgaagctcgcctccactttttgggcacttgccgagcgcggcgcccgaacttttcgctctatcaccatctccctcaagctgagatgcaacctccctaccctcgccccagagcccagagccaggagcccgatccctctgccgggctcaggcgcccgcgaacctgagactcggtacgcggctcagcctagctctttcccctcgcgcctcggggtctcctcgctccaaggttctcgaagtcttgcgcccgaaggactaaactaaactaaacttcggctgagtaatgggggaggaggggggtgcagatacacaatccctgccctatctcacgatcaggaaaggagagggctcataaggacgccccaattcgcgagcgcccttgagtctggccggtgccacggtcggttcgcgcgaagtgggcaccggtctcccgagccgacttcgtgtactccggacctgtactgcgctccggtagaggacccttccctttctcttagcttcttaaatcttttcttttaaggtgtaaatgtgtgtgtgtgccgatgaatgtttctgtttttcatctgctgactttatttttttttattggtataacttctcccttctctctccctgctcgtccgttttccaccttttctcttacttatcttctgccctcgctcactccctaacacacacattcacaccctctccgcctcgctctcccgttctc

SEQ ID NO: 53060 - DNA, 30 bp, Homo sapiens
  chr16:51189177-51189207
  hyper
tcagtccccagctcaaggccccgctggccc

SEQ ID NO: 53061 - DNA, 150 bp, Homo sapiens
  chr16:51189282-51189432
  hyper
cggcgccccgggggcgggggacgaggcacatcgatggtatcaacattattgatggggaaaagttcggggcaggagcccggagatcaggttcccagtccctcccctgcccggaggtgggtgggacagagcgggtggccagctgtgtgtgtg

SEQ ID NO: 53062 - DNA, 258 bp, Homo sapiens
  chr16:51189779-51190037
  hyper
acctctcttagaacactggagcggcttcgaacccgaagtatggagcaggcttgggtgggtacctcgcccctggccaagtctacactgtgcgccctcggcgcactcgctctccagcagttcaataccagcagcaaaacgcaggtttttgggggaactcccgccgcccgccaccaagggctatctccagacgggcgccgggtgcagcgccgtgaccgggcgccctggcgccggctcgggcgcgaaattcagcggtggcaa

SEQ ID NO: 53063 - DNA, 370 bp, Homo sapiens
  chr16:51190121-51190491
  hyper
cgcttggagggctgttcctacaccggtattaagaaaccgacttcgctagcgactgcaagtgcttgcgattttgactttccgtccacagttgagcgtcttgcacttaaattcactgcgccccgcatgcaacagtgcctcgccaaggggcctctgggtatgaaattcctcccagaggaaatgtcccgacgtagagaaagtggaaaaggctaatcgaatttataaaaagaaaatctttcctccttttggttaaatccctttgcggttttctgagcgcgaaaaaaaaattatcaccatgtaatagagtgtagctaattcttagaacctagtagtaggatgttcaggaagcccagcaggacgcacagattcccat

SEQ ID NO: 53064 - DNA, 31 bp, Homo sapiens
  chr16:52579312-52579343
  hyper
gcactagagttgggaacgcagtataaacaaa

SEQ ID NO: 53065 - DNA, 1539 bp, Homo sapiens
  chr16:52579633-52581172
  hyper
tttcgacaaattcggcgctgggggcttcagggaggacagaggacaccggatggtgggggggaattccgcgcggcccgggtaccagggctgcgactctcgcccgcctcgctgctccgagcgacgcccgctgcccttctgaggtccacctcgccacctggaacgctcggtcctcgaagttggcgcagggggaggtggagaaggtggagtgaccccagggtgtggtgtggaggtctccaatcccgatctccccgaaatgcaaaacttagcccccccaaaaaaatgagaggaaagaagccacttactctaagcggggaggggcgggcaccccggttccgaggtccaaagtgccctaacgaaagggcagcaaaggccacctgcggggtcccaccacttccccccactcccctgtccaggcatactcaaaagtttgttcctttccgtccgtaagcggccccgaggccggctctggagtaggtgggggaggtaagaaggactgggggtgggggagggcaagatcatcggaccaggagatcagggacccctgcgtagcccccactcagtccaggggggctgcgatcgtgtttactaataacagcaacaaacaatcacacgccagcccttctttcagtcctcgggctctcttcgctttttgggggcagcaaaggagagtctggcggggaggtgggagggagcggaggggctgaggagagcgccggctgggggacaaaaagcggcgtgggatggggcagaaagagaagcggggagagctggacagagacgaaggctcaaaggtagaagagacatgggaggaaagaggccaaagaaaagtgcagcaggcggtgagcccgagcgcggggcgcgcccaggatggggaggtggcccccgccccccggcccaccggcccagcccggtcaccttgctgtagccgtagtaccccaggcactgcgcgaagtccaggctggcagggtccccggccgccgcggggtagaacctcacatccatgccgaagctgggcccggggccgggggccgggactggggttcgccggggccgggacccgcctcctcgccgccgctagatccaccgtcgagggcgcccgggggtggcgcgtgggactcgcggccggaggggcgccgggacccagagcccgaggagctcgggagccgcggccgccgcacacaaaggcgcggccacgcgagccgcgggagagcgggaggcggccggggggacgcgccccgccggggcaccgaggcagcgctgcgcgcgggccgggcgccgggggcgcggggcgcggcgctggggcccgggtcggcgaggcgagttcaggtgcgctgggcgaggctgggacggcggcggcggcggcggctggccccgctcctcctcctcctccccgggcggactgaggagacgagccgcggagacaaggggcccggcccctcccctccttctccccctcctgcctcagccgccggtcccctccccgcgccgccgccgctccgcccctcccaccgcgggcagctggcgcgccgcccgccccgc

SEQ ID NO: 53066 - DNA, 33 bp, Homo sapiens
  chr16:52581387-52581420
  hyper
cccaccctcctcctgcgcgaccacagcttcccc

SEQ ID NO: 53067 - DNA, 30 bp, Homo sapiens
  chr16:52586325-52586355
  hyper
ttattcttcgctaagagacagctatagagg

SEQ ID NO: 53068 - DNA, 30 bp, Homo sapiens
  chr16:52599172-52599202
  hyper
atttgtagtgtttgccgattattgtgatgt

SEQ ID NO: 53069 - DNA, 34 bp, Homo sapiens
  chr16:53468697-53468731
  hyper
acacgctggaggtgcgctcgcgggcggaggggcg

SEQ ID NO: 53070 - DNA, 30 bp, Homo sapiens
  chr16:53537010-53537040
  hyper
cacctcagccctcgcgtacccaccagcctg

SEQ ID NO: 53071 - DNA, 30 bp, Homo sapiens
  chr16:53537522-53537552
  hyper
cgcacagcccacagcgcaaccgccatgcgc

SEQ ID NO: 53072 - DNA, 30 bp, Homo sapiens
  chr16:53738219-53738249
  hyper
ggcgagcggatgcgcggtgttaaactaagg

SEQ ID NO: 53073 - DNA, 30 bp, Homo sapiens
  chr16:53813351-53813381
  hyper
ttggcacacagaaactgttttaatttaaca

SEQ ID NO: 53074 - DNA, 30 bp, Homo sapiens
  chr16:53855275-53855305
  hyper
cctcagggacttgctaagaaagtaaccagt

SEQ ID NO: 53075 - DNA, 130 bp, Homo sapiens
  chr16:54318634-54318764
  hyper
agagagctgcagggcggaaggcgcgaccgctgcccccggtggagacccccccgcgccgggaggcgagcggcgcgggttgtccgggcttgtggcagtctccgcgagggaccagatcttgggcttctgcagg

SEQ ID NO: 53076 - DNA, 2623 bp, Homo sapiens
  chr16:54318853-54321476
  hyper
cgctggagccagactcaggaccggtagtggccggtcctctaagccctcagagctatcttccgagtcgctatttttggagtccgaaatgggtcccaggcctaggtcgccatccctgcgcgccgccccagccagggacagctcaggctcggtggccgcgccgtctaagttctccaaatcgatctcctcgtcctcgtcgtcgtcagccaggccctcgccccccgtgtcctcctcctcccccccgagctcctcctcctccagctctagctcgcgtttgccgtcctcctcgtcctcctcttcgtcttcctcctcgcgctcgctcccataagcgtttccctcctcgtcagtgcggctgcgaggcgcccaagtcatcttattctccttcttgaggcgccggcgcgcgttggcgaaccaggtggacacctgggtgagggtcatcttggtgatgatggccagcatgatcttctcgcccttggtggggtaggggttcttgcggtgctcgttgagccaggccttcagcgtgctggtgctctccctggtggcgttcttgggacgggacgggtccccgaactggtactggccatacgggtagaaggcggggtgcgggtgcggaaacgcggcagccgcggccggatgctgcaccccggggctgtccttcagctcatactgcgcgccctgtacgcacatggagaaggaagggacacgcgcggagggagcgcgagtgagccccagccatcgctgcctcccccctcctggcctgcacccctctagtccggcccccgcgcgctcagctcgccctgcgccccagcgccaacccctccttccctggctccgcgggctcttaccagctgcgggaagatgggcagctccgcggcgtagggcaggaaggcgccgtagccttgggcggcggcggccgcagcggccgcggcgtagggcgccccgtacacggacgagagcacgttggacagggaccccgaggcgttcagctccgaggctccggcacccaggccgccccgggcccccgcgctgccgccgctgccgccagcggcccccgggcgctcggacgggtaaagcgggcggatgtattggtatcccagctgggggaaggacatggtggcccgcggggcacggacggagaggggggccgacccccgggccgcccagctcagcgccgcccgcgggctccggcgcgcatcgggggctgggccgggcttggggccgcgctgccgcccgcgctgcgctgtgctccgcgttcgcctattgatctgctccgcggcggcgacggcggcggcgagggcggcggcgaggagccaggtcaggtccgaacagattggcggagattcccggggctccgggctctgattgacatttctacggggcgcaagcccctcctctctgcgccgcgctccctcctctcggccgccggagctgcctctgcccgctcctcgctcctcactgccctcctctccccagcagtgtcgcgcctcgcttccttcgccctcctctagttttcactccccctcctcgcccttcctctcccctcccctctccgcactcctcttccccccaggatcgcttccgctgcttcgggctcctgcactgccctggacgctatgaaactctcctttctcctctccccttctctttccctttctcacgagggcttttgctctccggtccgttcccttcacttcttcctttctcactacttctattttgtaaatctctctctttactcacacgatactccccgcgacctttccagcctctgcgccctgggctaagtaaggcagccaaaagttgtggacacttagggtgccgcgcggggggtgtgtgtcggtgtctgtctgtccatccccgcccttccaccccctccctcgcctttccccaaatctcgggtctgacgtcgcgccctcttattcgacttttccccgcgtctcttccccgagtcgccaatcgcctgggcgccttacgggcgaggccgcccacccccgcggatcccgcgcgcggggcggggcggggcaggggcgggagccggagcgccgcgagtccctgcccgccccctcctgctcgcgccgggcgggggagcgagaggcgcggggactgggtgagtgcagggtcagctcgcccctcccgcctcccgcccctccgagcctgtccccaggctgaggcgcgggacctgggccgaggctggctccgggagctcccctgtgcccgggccccttttacagctcgcacctctcgactcccggccactttcagcagcttagggagggagctagcagccggcgtgggggtggggagcgagggagtgcgtcctaacagagtctccagaggccacctcgctgccttgcgggggcgaggcagcccccaacccagcaggaccaaacccagagattagccacttaacgccgcccccgggtccgtgtgcgaatcccttactaaaaatggcgggctggctccgggggctgaagggtggcagcccgggggcactggaagggtagggagccgccacaaatcggtgaagcaggcccgcgccccaggcggctgggaatgggggaggagcagggcgccgggggacggaggccctaggaacttttggagagctcttcgagaagtttctgta

SEQ ID NO: 53077 - DNA, 30 bp, Homo sapiens
  chr16:54961986-54962016
  hyper
ctgctaatcatgatcggccgttccctttct

SEQ ID NO: 53078 - DNA, 94 bp, Homo sapiens
  chr16:54962470-54962564
  hyper
gtggacagaggagccacgcccacgcgcgcccgccccgaaccccgacacccggagaggctcgaccggcgccgacgcggcccgaggcccaggccct

SEQ ID NO: 53079 - DNA, 170 bp, Homo sapiens
  chr16:54963084-54963254
  hyper
agcgcgatcgagaccccgcccctccccgcccctctggcgccgagactcggaggaaagcggggttacgtcaccagggggcggagcccagggaggccagcgcccaatcataggtgaaggaggtgtcaggcactgggctgggcggacccaggggctctcggagaatgtagtct

SEQ ID NO: 53080 - DNA, 88 bp, Homo sapiens
  chr16:54964044-54964132
  hyper
gtcggtagaaggaaggcgaggcggagacgtgcagacgtctgaggcctgtctctcgcccacctgctgctgccggcgcagaggggcagtc

SEQ ID NO: 53081 - DNA, 422 bp, Homo sapiens
  chr16:54964873-54965295
  hyper
ggaaaaaaagcccagctggggcgagcgaggcgcgcagaggagcgggcgcggcggtcgcagccggaggcgcgcgggaagccagcgaggaggcgccgcgggccggagccccggagccggggccagaggagcggcggcccagggcagccagaggccaggtgcccgcccgctcgccctcgcagggcgccgcccggctcgttggcggccgcggcgcggcgcgccccatgcccgtgtgtggccatgtcctatccgcagggctacttgtaccagccgtccgcctcgctggcgctctactcgtgcccggcgtacagcaccagcgtcatttcggggccccgcacggatgagctcggccgctcttcttcgggctccgcgttctcgccctacgctggctcgactgccttcacggcgccctcgccgggctacaa

SEQ ID NO: 53082 - DNA, 393 bp, Homo sapiens; identical to SEQ ID NO: 10681
  chr16:54965775-54966168
  hyper

SEQ ID NO: 53083 - DNA, 605 bp, Homo sapiens
  chr16:54966659-54967264
  hyper
cgcgccggcgcctcaagaaagagaataaaatgacgtggacgccgcggaaccgcagcgaggacgaggaagaggaggagaacattgacctggagaagaacgacgaggacgagccccagaagcccgaggacaagggcgaccccgagggccccgaagcaggttggtggacatgggaaagggcgtgttgggcgggagtaaaaaggaaaagagaggcctggagggggcgcgcacggggcctggaggttgggggcaggggtccctgcctttgcgggcgggaaccgggtcccgccgcgcggcctctgcgcccctgacagcctgggtttcgcccgcaggaggagctgagcagaaggcggcttcgggctgcgaacggcttcagggaccacccacccctgcaggcaaggagacggagggcagcctcagcgactcggattttaaggagccgccctcggagggccgcctcgacgcgctgcagggccccccccgcaccggcgggccctccccggctgggccagcggcggcgcggctggcggaggacccggcccctcactaccccgccggagcgccggcgcccggcccgcatccagccgcgggcgaggtgcctccgggtc

SEQ ID NO: 53084 - DNA, 504 bp, Homo sapiens; identical to SEQ ID NO: 10683
  chr16:55090596-55091100
  hyper

SEQ ID NO: 53085 - DNA, 72 bp, Homo sapiens
  chr16:55357500-55357572
  hyper
ggagtgagggggtggtcagaccgctgggcccagccgggcgtccaggaggagcgcagggaatgggccgccctc

SEQ ID NO: 53086 - DNA, 329 bp, Homo sapiens; identical to SEQ ID NO: 10685
  chr16:55357611-55357940
  hyper

SEQ ID NO: 53087 - DNA, 359 bp, Homo sapiens; identical to SEQ ID NO: 10686
  chr16:55357991-55358350
  hyper

SEQ ID NO: 53088 - DNA, 109 bp, Homo sapiens; identical to SEQ ID NO: 10687
  chr16:55358566-55358675
  hyper

SEQ ID NO: 53089 - DNA, 460 bp, Homo sapiens
  chr16:55358784-55359244
  hyper
cggaccccacgggccggaggggcgccttccggagcgcagggctcggcagccgggctgccctcggctctgcctccactggggccaaccaggcgaaggaaccggcgctgggcatccgcagcggtgtaaggaactgagacacctcactgctgggggcgcggaacagctgggctgagacgggaactcgacagggaagagagagacgggccagggacagccaccatgtccttcccacactttggacacccgtaccgcggcgcttcccaggtaagaggcgcctctatgggggataggggacagactgggtggagggagtgcctagtgcacggcgcctgcctctgatcatcctcctcttgtgttctgggggaagccagaaggagcaaggaccagggtaatgtgtcacagcctcctctgacatccccagtccctaaatgagaacgtttcaccccggagtgcacgctgg

SEQ ID NO: 53090 - DNA, 301 bp, Homo sapiens
  chr16:55362962-55363263
  hyper
cgacagccagcgctgttgaaggtgcacccccagcccggcctaggccacgaagtcctgagtgccgtatgattcctggacagcctcctgcctctgcccggcgactctcagtccccagagactccgcgtgcgacgagtcttcctgcatacccaaagcctttggaaaccccaagtttgccctgcagggactaccgctgaactgtgcgccgtgcccgcggaggagcgagcctgtagtgcagtgccagtacccgtctggagcagaaggtagtgggcccccagcggcgctgggagtatctatgcaaaa

SEQ ID NO: 53091 - DNA, 391 bp, Homo sapiens
  chr16:55364827-55365218
  hyper
gcgcctgcagctcagcggactaaccgctgcgtaaccaatccgtggagccaagctgaccacctcgcgggtcctgcgcatgggaagtggtgggacttgtcaggatgtttatctggaaactgcatctgtttccgggttcgtatttgggttgtaagtttactgggggaggggtgacgaggaccgcgctcctccgatcgaactgaacctaatggggaggtcaggcagctttcagggtcggtgtgaggcgagagggggcattcttcccgttttatcaaaagtgtcagcaaacacttccggtacaggccaaccaatgggaactgacgggcagggaaggggtctttgtcccccttgctaggagtgtcgagcgaccgggttgggggtaagagatttaaag

SEQ ID NO: 53092 - DNA, 113 bp, Homo sapiens
  chr16:55365434-55365547
  hyper
cgtttccaacgccgggtcccggccaggccaggccttccaggccagcgcggaggccagactatcagtcactgaaatccaggcgagcatagtccgcctcctgggcaggatgattg

SEQ ID NO: 53093 - DNA, 30 bp, Homo sapiens
  chr16:55365862-55365892
  hyper
acccctctttgctttcgttttgttcctggg

SEQ ID NO: 53094 - DNA, 480 bp, Homo sapiens
  chr16:55404802-55405282
  hyper
attttagatccttggacagatcgcagcctcacctacgggaagatctacatcccctcctccagggctctaccgagggagaaccaaggtagaaaagcatgcctttccggctgctgcttttgcatcttatacggatagccggctcatggcaatgtgactcaagctggcaggggtctttgagcatcaaacgtgtcctccttccctctacctacttcggctccggtttctctcccgaagcctaaataaagaaggtaacagacaacacctctattggcagaggcttctgccttttccgtcaggctggctgcagcacatccgtaatccttatgtcagcctgcactctagcgttgccggcccggtccagcatctgacagccgcgaatccaaagctgccggcctctcgtttctaagcagcagctcacagcgccagccgccctcccgcagaaggggaacaaagcccggcggactagctcactatcttctg

SEQ ID NO: 53095 - DNA, 139 bp, Homo sapiens; identical to SEQ ID NO: 10691
  chr16:55499095-55499234
  hyper

SEQ ID NO: 53096 - DNA, 428 bp, Homo sapiens
  chr16:55512935-55513363
  hyper
cggccggggaaaagaggtggagaaaggaaaaaagaggagaaaagtggaggagggcgagtaggggggtggggcagagaggggcgggcccgagtgcgccccccgcccccagccccgctctgccagctccctcccagcccagccggctacatctggcggctgccctcccttgtttccgctgcatccagacttcctcaggcggtggctggaggctgcgcatctggggctttaaacatacaaagggattgccaggacctgcggcggcggcggcggcggcgggggctggggcgcgggggccggaccatgagccgctgagccgggcaaaccccaggccaccgagccagcggaccctcggagcgcagccctgcgccgcggagcaggctccaaccaggcggcgaggcggccacacgcaccgagccagcgacccccgg

SEQ ID NO: 53097 - DNA, 199 bp, Homo sapiens; identical to SEQ ID NO: 10693
  chr16:55513482-55513681
  hyper

SEQ ID NO: 53098 - DNA, 507 bp, Homo sapiens
  chr16:55513946-55514453
  hyper
gggctcttgccaagcgtctaggtaagcctttggcaaacagctacaggggtcgtttttgctaatgtaggactttgggaacggtgctctggcacacaatttgggtaaacttatgcgcgcataaggatgggagggagcttggtcaaagcggggcttggcaaatttctaggaaccttcggcacagatccggagagggacctttaaacaaacagctcgagggggccatttgggaagtgattggggcaggagggaagcagagagcgcatcttttttctcctggcttaatggacaaattggtcaagggctgggcctcggaaagtttcctcgaacttctccaaagggtcggagaaaagaaggagagagctggcccggcaggagggaggaggagtggggcaggcgctggagggcccggcgcgtggggcgggggcggactgcgctccgctcgggtcggagagcggccagagagccctccttcctggctgggctcccaaaccgcggttcagatgttgt

SEQ ID NO: 53099 - DNA, 30 bp, Homo sapiens; identical to SEQ ID NO: 10695
  chr16:55542906-55542936
  hyper

SEQ ID NO: 53100 - DNA, 192 bp, Homo sapiens
  chr16:55689585-55689777
  hyper
gcctcctttctgacgcgacgcagaccccagttctggagagtctgtcactcgctccccgtggtgggagatcagaggcctggtgtccttgggagcggcgagcggtgctcggcgcaggatagaaagggagtgcgcgcccgagtcccccagatccctgggaacccgcgccaccctcccgcccctgcccatccccgg

SEQ ID NO: 53101 - DNA, 527 bp, Homo sapiens
  chr16:55689852-55690379
  hyper
cgttacctggggcgcaggctacattaccagcccggcccccgccaggcacggccagaaccagtcagcccgcgccctgccggccgccccgcgcctccagctcttccccggccccgcccgaacgccacacggcggagcccagccccagcccgcgccctagagcctgccaaggcgccgccggtcgggggccggcagggcgcaaggcaccagggatcccctcgccgccggacacgtgagtgcgccctgagcgcgggacagggctaggtctgcctgggaggcccgggccgagacgcgccagcagagggctagcgagtttgtagtgcagtgacgttaagtgtccgagaaggctcctgtggctgttgaagtgtcgcggacctgagctggggagggggtcggcacgctgccctcagcctcggtgagttcaatcccagccatttggggcaggcgagagtgggtgaacgaggaaaagtgctgcagggtcttcagccgcccccagagggctgtcagaagtctccaactcttgagttccg

SEQ ID NO: 53102 - DNA, 123 bp, Homo sapiens; identical to SEQ ID NO: 10697
  chr16:55690453-55690576
  hyper

SEQ ID NO: 53103 - DNA, 100 bp, Homo sapiens
  chr16:55690761-55690861
  hyper
cgcgcagccccgggagacctggggcaagaagatcgacttcctgctgtccgtagtcggcttcgcagtggacctggccaacgtgtggcgcttcccctacctc

SEQ ID NO: 53104 - DNA, 350 bp, Homo sapiens; identical to SEQ ID NO: 10698
  chr16:56224482-56224832
  hyper

SEQ ID NO: 53105 - DNA, 1491 bp, Homo sapiens
  chr16:56224880-56226371
  hyper
cgggcgacaagatggagagccggcccgagagggacagaggccgcgctggcagcgagctggggggcccacctgaccgtcctgcgggcagcccggccccgcgctcccattgacaaggaggtccgcgccgccggcgcgtggggcgggggcggaggcggggtggggcgccccggcgcgcgcccggccccactccccgcccccgccagtcccgcaagcacccaccccgggggagccgcgggccgggagggcgctggggggaggggcaggccgctccgcgagcgcgtgtgcgcgccgccgccggctgacgcgaactccggcgcgcgcctcccccgccccgcgccctccccgtcccgggggcccggcgcgcggccctgctgacgtcagctggcggcccgcggagccgggtgcgcagagccgctggcgcactcgcgcgctgcgctggcctcctccccgccccgggcccaggcgcgcgcgcgcttgttcgctctcccattttttttttcccctccctccctgcctctctctctctccctctccctcgagctcccggctggctgcggctccctggcgctctccctctctctccggtaggctcaccgagcgatgcgagctctgggagacagcgacgccgcctcccgctagagacctgcccctcggcccggccccctgcccaaccctgcccagcgcgcgggggtcggcgaaggcgccgcggacgcaccgacggctgaagagcggcgatgcacatgcactagcagcaccccctaactcactccctccacatcccgcgccgccgccgccgcctcctccacctcctcctccgccgccgccgcctcctcctcctccggcagccgcggcagcaggacccaccctgccccccaccccaccctctgtcggctccggctgcggctccagcctcgactattattttatttattttgggtcgtgcacaagcctcagtgcctgcagtccgcgcctcctcggcccgcgggcgcctcctcccttggctccggagccccagaccccggccaccctcgattcgacaaccccagacccctgccagctgccgcgagtctccgctgctggaatcttgttagcggctgtctttttggagggttctggtttcccgacatttttgtttccagcccaggagaggatatcgtgattttccccccttgagcccaggctctgctctctgggggggtggggggcgctccaagccggggagccgtgccagccgagtcgtgcgggctgtggcagggaaggggccaccatgggatgtactctgagcgcagaggagagagccgccctcgagcggagcaaggcgattgagaaaaacctcaaagaggatggcatcagcgccgccaaagacgtgaaattactcctgctcggtaaggaccgccgctgctacccccatcccccgaccccggccactccgcaccccctgccaccagctcccccaccccactcgcgcccgggagacctggtccccaagtt

SEQ ID NO: 53106 - DNA, 56 bp, Homo sapiens
  chr16:56227983-56228039
  hyper
gcgggttctaggcggcgccatgatggtagggagtagcgactcggagacaattttcc

SEQ ID NO: 53107 - DNA, 137 bp, Homo sapiens
  chr16:56228279-56228416
  hyper
tctcccgaggggggacgttttaaaacttcagaagtctgtaatcagcagtggcggactcggagcccagtagaagccccagccacctgagctggatgaggtttcaggcgttgcaagtggtggacagcgcccagccgagg

SEQ ID NO: 53108 - DNA, 36 bp, Homo sapiens; identical to SEQ ID NO: 10702
  chr16:56228577-56228613
  hyper

SEQ ID NO: 53109 - DNA, 30 bp, Homo sapiens
  chr16:56459202-56459232
  hyper
tgggccaggggaagcgctcgaggaagagca

SEQ ID NO: 53110 - DNA, 30 bp, Homo sapiens
  chr16:56459705-56459735
  hyper
gcagggcctcagggcgcggggcaccctggc

SEQ ID NO: 53111 - DNA, 30 bp, Homo sapiens
  chr16:56485039-56485069
  hyper
gatgtacttgttgccgaactgagtgacccc

SEQ ID NO: 53112 - DNA, 30 bp, Homo sapiens
  chr16:56553515-56553545
  hyper
agccacaaggtgctcgccgaccggttgccg

SEQ ID NO: 53113 - DNA, 30 bp, Homo sapiens; identical to SEQ ID NO: 10703
  chr16:56553765-56553795
  hyper

SEQ ID NO: 53114 - DNA, 30 bp, Homo sapiens
  chr16:56623200-56623230
  hyper
gagtgggtcgtgcacgcggatgcggggtgg

SEQ ID NO: 53115 - DNA, 218 bp, Homo sapiens
  chr16:56642230-56642448
  hyper
gtacactgtgtcctcccgctgcacccagccccttccgcgccgaggcgtccccgaggcgcaagtgggccgccttcagggaactgaccgcccgcggcccgtgtgcagagccgggtgcgcccggcccagtgcgcgcggccgggtgtttcgcctggagccgcaagtgactcagcgcggggcgtgtgcaggcagcgcccggccggggcggggcttttgcactc

SEQ ID NO: 53116 - DNA, 475 bp, Homo sapiens
  chr16:56659264-56659739
  hyper
cgcactcagcggatcccgggacggcagcaggtgggctgcacacggactctgggacaagtcgagctgaaaaccgcggagctaggggtggggtggagacgcccgcgacgccaaggctggggtcccggaacacgctgggaggagggtggaaggcaacctcggggaaactgggaaaggcggcctggacttcgggaacaccgcgtacctgcgggggcacagccccacccgagcgaacgggctccaaaggggaggtcccgcggtgcccaccgcgcagagctcagggggtggtgcgcccggcccttctgcggcgcacagcccagcccaggaacgcgggcggtgcggactcagcgggccgggtgcaggcgcggagctgggcctctgcgcccggcccgacctccgtctataaatagagcagccagttgcagggctccattctgctttccaactgcctgactgcttgttcgtctcactggtgtga

SEQ ID NO: 53117 - DNA, 634 bp, Homo sapiens
  chr16:56666027-56666661
  hyper
tgtggacagggacaggcaaggcggggaaggaggagaaacgaaagccacattggtggcgggtgctctgcacacgactcgctccctaccacacgccccccgctccgcacacgaccgatccggggactggagcaggagggctgcaccgggactccgggacaggcccagttgaaaacggcggggcgagggggtggggtggagacgcccgcgacgccaaggctggggtcccggaaagcgcggggaggagggtggaaggcaaaggcaacttcggggaaactgggaaaggcggccgggacctcggggacactgcgtaccacccggcgcacagcccctcccgcgcaaacccgagccaaaggggcggtcgagcggcgcactcggagcggagctcaggggatggtgcgcccggcacttatgctgggctcagcccagcccagcccaggaccgctggcggtgcgaacccagccgggcgggtgcaagcgcggggcagggcctctgcgcccggccccctcccctgagtagaaaagcagccgcaggctgtggcgctccaccacgccgtccgggtgggcctagcagtcgctccatttatcgcttgagatctccagccttaccgcggctcgaaatggaccccaactgctcc

SEQ ID NO: 53118 - DNA, 224 bp, Homo sapiens; identical to SEQ ID NO: 10706
  chr16:56671948-56672172
  hyper

SEQ ID NO: 53119 - DNA, 164 bp, Homo sapiens; identical to SEQ ID NO: 10707
  chr16:56672221-56672385
  hyper

SEQ ID NO: 53120 - DNA, 103 bp, Homo sapiens; identical to SEQ ID NO: 10708
  chr16:56672513-56672616
  hyper

SEQ ID NO: 53121 - DNA, 30 bp, Homo sapiens
  chr16:56677570-56677600
  hyper
gcctcctaccggcccgcctgttttttcgcc

SEQ ID NO: 53122 - DNA, 30 bp, Homo sapiens
  chr16:56691559-56691589
  hyper
gccggggggcggggcgaaggccaggatctc

SEQ ID NO: 53123 - DNA, 30 bp, Homo sapiens
  chr16:56692018-56692048
  hyper
tgcctggggatgctcgattcccagacacca

SEQ ID NO: 53124 - DNA, 386 bp, Homo sapiens
  chr16:56701842-56702228
  hyper
ggcatcccaaggcacagaacccgggcgtcccttaccagcggcacaggagcagttggggtccattgcaacccgaggcgagactagagttcccaagcgagaagggaagaggcagtgggtgcacgtggaaggcggagtggagcccaacagccagcggctgtttttatagtcaggagacggggccgggcgcagacgccccgccccgcccttgcacccagcccgctgagtccgcaccgcccgcggtcccggcctgggctgtgcgcaggagatgggccaagtgcaaggtcccttgagcgcagctgggcgcacaccgcaggacggcccctttcgcaccggctcgcgagggaggcgctgtgccccccgtgtgcggcttctctcaccctgccagg

SEQ ID NO: 53125 - DNA, 32 bp, Homo sapiens; identical to SEQ ID NO: 10709
  chr16:56703366-56703398
  hyper

SEQ ID NO: 53126 - DNA, 121 bp, Homo sapiens; identical to SEQ ID NO: 10710
  chr16:56703438-56703559
  hyper

SEQ ID NO: 53127 - DNA, 237 bp, Homo sapiens; identical to SEQ ID NO: 10711
  chr16:56703621-56703858
  hyper

SEQ ID NO: 53128 - DNA, 115 bp, Homo sapiens; identical to SEQ ID NO: 10712
  chr16:56709777-56709892
  hyper

SEQ ID NO: 53129 - DNA, 107 bp, Homo sapiens; identical to SEQ ID NO: 10713
  chr16:56709949-56710056
  hyper

SEQ ID NO: 53130 - DNA, 30 bp, Homo sapiens
  chr16:56763982-56764012
  hyper
agttcatttggcgtcgcaccgcgcgagggc

SEQ ID NO: 53131 - DNA, 30 bp, Homo sapiens; identical to SEQ ID NO: 10714
  chr16:57023340-57023370
  hyper

SEQ ID NO: 53132 - DNA, 361 bp, Homo sapiens
  chr16:57126698-57127059
  hyper
tgcggtgagtggggcccgggcaggcggggcagcttggcgtgagtgcccaacttcggccttggggctgggctctttgatccagctgcgggtccgaaggaacccgggttccgcctcggggggctgcggcgctctagcccccgccgccagcgcgaacccggactccggcgcttcggtgactcagctccgacccggccacgcgggggcgccccgccggctcccggactgcggggaagggcgggcggggtccctggggaggggggcgccctcgggggtccgagcccagctgctttggggacccttccacccgccccgaggggcttggagggcgtacgggaggtggagacccgccgctgccgcagct

SEQ ID NO: 53133 - DNA, 31 bp, Homo sapiens; identical to SEQ ID NO: 10715
  chr16:57127432-57127463
  hyper

SEQ ID NO: 53134 - DNA, 456 bp, Homo sapiens
  chr16:57318161-57318617
  hyper
agcgccctaggggtacgcgcagcgcgtcggtgacagtgtgagcccgggtggggagcgcaaggttcgcgaaaaatgaacgcagcgccggagtccctcacccatcctggccggaccgggagcccccggccaaccccgtgggcccgcgcgtgctctcaccagctgcagcagcatgagcgccccgaggcgggagcgcacgaagcccaggtccgggcgcagcgccgacaccgaggcttcggcgccctgcgcaggactgctggtccgcgtgctaactttcgacgggaactcggccatggcggctccgcttgcctcccgaggtcgctacggccgccgtcgccgcccctccagcggtgggtgccggctcccgcgccgcttttcccccaggctccggatccctgtgtggctccaggcgctgcaggaggcgtcggggctgggagcctggggcgccaggtgcggccg

SEQ ID NO: 53135 - DNA, 30 bp, Homo sapiens; identical to SEQ ID NO: 10718
  chr16:57481675-57481705
  hyper

SEQ ID NO: 53136 - DNA, 312 bp, Homo sapiens; identical to SEQ ID NO: 10719
  chr16:57519802-57520114
  hyper

SEQ ID NO: 53137 - DNA, 30 bp, Homo sapiens
  chr16:57570762-57570792
  hyper
tcaggtttcctcagcgccaactacgtacta

SEQ ID NO: 53138 - DNA, 30 bp, Homo sapiens
  chr16:57769283-57769313
  hyper
gttttccaataatgcggacgctgattggtc

SEQ ID NO: 53139 - DNA, 30 bp, Homo sapiens
  chr16:57769540-57769570
  hyper
gtactgaggaaaagcggcagaagcgcctgc

SEQ ID NO: 53140 - DNA, 30 bp, Homo sapiens
  chr16:58018865-58018895
  hyper
agccgagacgtgcgcgcggatctggaggca

SEQ ID NO: 53141 - DNA, 30 bp, Homo sapiens
  chr16:58019108-58019138
  hyper
gcggagggtctcagcggctacgcggtgcgg

SEQ ID NO: 53142 - DNA, 30 bp, Homo sapiens
  chr16:58033695-58033725
  hyper
actctaagccttctcgggacagagaggggg

SEQ ID NO: 53143 - DNA, 749 bp, Homo sapiens
  chr16:58059828-58060577
  hyper
ccccgtgcaggaggcgcgcgctccgggcagcgcccggccccgggcatggacagagggagctgggcgcgcagggagcgccgcgggaccgggcggccggagcgctgagccagacaaaggctccggagttgcgcttgctctcgggagccgggccccaggcgctgggcgccgaggctgcggaacctcgccgggggcagctccggtcggccccctttcccgccggctggttccgagctcccggacctgccctgcccgcttctcctcgggcttgggaatttgccgaggcgacctaggcggctccggcggggaccgggagcccgaggtccgcggcgcgcctgccgggccaggagccagggagcgtcgcaagtttccaaggcgcgtgcgaggatccggcgtgcagtgttccgagctgggctgggcgccgagagcatgggcagcgacccgagcgcgcccggacggccgggctggacgggcagcctcctcggcgaccgggaggaggcggcgcggccgcgactgctgccgctgctcctggtgcttctgggctgcctgggccttggcgtagcggccgaagacgcggaggtccatgccgaggtaagacccccgccctgccctttggctgcgggctgggggcttggagggagaggcgccacgtccgcaggctgggacttggaggtggagggagcggagacgcgccccctgttctgggccgtggcggggaagcaagcggacttggcagtctgcccctccccagc

SEQ ID NO: 53144 - DNA, 662 bp, Homo sapiens
  chr16:58060638-58061300
  hyper
cgctactcctacagccctgttctgggcactgagcccccaccccgacccccttacattcagcctgtgtcccgggagccgcttccgccgcccccagcccttgcctcccctccttccttccctccagggcagccgattcctcgagagcccggctggcgcgcagtggcgctctttgcgagtggggagggggctgctctcggggacagccacaggcggagcaagagctgggcggctgggcaactgcgctcctgcccaggtggcctcccgtctgggtgataccgagccgcgcacggcgggccaggatggaggcggggggatgggtgcaaacggctgaggcagcggactcgggttgcgggggcgctttggcgactttctgcgcttttgcgaggaagcctaggcacgcccgggcggggtcctaaggacggaccctgcctcccacagcgcttcctcccaacagcgcccctacgtcgaagccctggattcgagagggtggaccccgcgcctctcttcgctaggagcccgcttggcgtccctcccggggccccgctctggatgggtcccgcgggtgaccaggcgcgacatcccggcgtagagccgagtccagccagcgccccagctccatggtgtctcccgagcgaggacaccgaaggcgccagctttcttgc

SEQ ID NO: 53145 - DNA, 30 bp, Homo sapiens
  chr16:58283894-58283924
  hyper
ggcaggggccgcttcggcagagtgatgact

SEQ ID NO: 53146 - DNA, 30 bp, Homo sapiens
  chr16:58284259-58284289
  hyper
gtgagggtttcagccggaggagtctctctc

SEQ ID NO: 53147 - DNA, 68 bp, Homo sapiens
  chr16:58426316-58426384
  hyper
tgcctgggcggtaccgcccgaattgactgctcctgtctgatgcgtccccgggcgcgggaaacgagttt

SEQ ID NO: 53148 - DNA, 122 bp, Homo sapiens
  chr16:58497213-58497335
  hyper
gtctaaacaaagactacggcagcgccgtcccctcccccgggaacccgacgccgcgcggccacagggggcctggaggggcgggcagggcctcgcagcgcacccagcacagtccgcgcggcgga

SEQ ID NO: 53149 - DNA, 1300 bp, Homo sapiens
  chr16:58497469-58498769
  hyper
cgcggtccgtccgggactagccccaggcccggcaccgccccgcgggccgagcgcccacacccgccaaacccacgcgggcacgcccccgcggcgcaccgcccccagcccggcctccgcccctgcagccgcgggcacgcggaggggctcctggctgcccgcacctgcacccgcgcgtcggcggcgccgaagccccgctccccgcctgcgcgtctgtctcgtccgcatctccgcggtgagtcggcggcgccctcgcccctgagcccagggccagcttctctcgccgccgcggctgctgcgcgcgtccccgcccagcccagcccagccccgagcacgaccccagccccacgcacgaccctagccccgcgagtcccgcaccgactcgctcccgccccatttcgcctccgcgggggcggcgccccctcctccccgcggctcccgctctccttcctcgccttcccggccgcgctggggacccccagccgccgtccgcgaccccccaccgcgacgcccggaggcggcggggtctctttgttcgggcggcgggcacgggggaccacctcccacggtgtcaccgcacccaccccgcgcccttcctccgcctcctggagttcaccgggaccaggtggcggcgggtgcctttttgggggtgcgcggccatgcaattggtggatttttttaaaccgttttggaggggggagcgcggcgttgggggcgggagagcgctcctggctgtgagctgctcctgccgcttcgctccgcgctctcctgccgctccgctccgggtctcccgcgctcctctccccggctcggccgagcgcgctgccccgacgccgccacccagagccgggccgcgccgggcgccgagatgaaggtgctgggacaccggctggagctgctcacaggtaccgcccgcctgccccgcagccggccgccactttccgagttggagcggactccgggcgcggcggccggggactggggcggctcgggtctgagcaggaaggggtgcggaccccaactaagtcctagttttgtgctacctgtttgtgtgcggagcccagccccgggagaggacttgaggttgtggcgagtccctggcgctggcgtccgggctgcgggagcaccggtcagggggtggccccatggggtctctgaccagcggagctcggattaggaccctgaaagctagctcagggctcctgccctccaatcagtgtcgcttgtcccctaagaaaggacccgtgggcttctggcaggacccgcgccatggacctcttatttctgcgccctgtgacaatct

SEQ ID NO: 53150 - DNA, 1005 bp, Homo sapiens
  chr16:58548938-58549943
  hyper
atccaggagccctctaggccacgccactctgaaacacacacgaaaactgctctgaacgaataccaccagtaaaagggttccatggccatcggcaacaaggggtcgagatcaggaggtcgctcgccgcccagttgcgtcgctcaccaccggccggccaccagaccctcggcttccgatccagaaaccgtattttgttcttgcacccagaccgcaagaagcctcagccctcggggacagaccgaaggccagggctgtacctggctcagaaccaggcgccaagcggcacgggactctccttctgcactcgcagcgcgtgagtgcaattggagatcctggactcaagatgttttcatgaggaacgattccagcccgcggtaactccggccagtctgcagcgtggacgacaaaacaggcaccacgtggttccggcgccggggcggggccagagacgccggaagtgaccgcgcggtgcgccggcccgcgaggaaacgcgctcttagaccatggcgacccaggcgaagcgtccacgggtgagtggcgggcgcggggtccagccttttcctccgcgcctcaccccttctccgttcgcagaaccgtccgcctgcgccccctccgctccctcccgcgggtcccgcgcccctctccgctcgtcccctcctccacccaaagcccgttctgcgctcgcgccgcggtctcctgcagttcccagcggcctctctgggggtcggacctggtcactgcgcgcacttatctcaggtggcggggcccgtggacggcggcgacctggatcctgtggcctgcttcctgagctggtgccggcgggtggggctggagctgagtcccaaggtgagcgagcgagccggcgggcggaggacccgcggcggggcgcgggctgccctgaccagccctcctgctcaggtggcggtcagccggcagggcacggtggccggctacggcatggtggcccgggagagcgtgcaggccggagagctgttgttcgtggtg

SEQ ID NO: 53151 - DNA, 30 bp, Homo sapiens
  chr16:58767848-58767878
  hyper
atcactgtggggcacggacgctcaatcctc

SEQ ID NO: 53152 - DNA, 31 bp, Homo sapiens; identical to SEQ ID NO: 10725
  chr16:61445875-61445906
  hyper

SEQ ID NO: 53153 - DNA, 651 bp, Homo sapiens
  chr16:62068432-62069083
  hyper
tcggatctgctttgcgatggtaccggatgcgagaggacagtactctcgcttaccttccctagcgtcccctcgttcccattgtcagcccccagatatcatgacgccaggtgaaagaaagcagctgatctgattagcagctcgggcgcgctaagggattgtcgaatcatgcctcctaaggaggaaactcttgtggaatcttcaggaaagggtggtaaagttgaaaggacctttcctccctcccgctgtcttggtgataagctctatcgtttaattggtgctgaagtgagcagctgccagcccgattttccattacggactaatattgtgcgtttgcaacaataaacaattaatgtggtttgatttcttacatttagcaacccaagcaaacagctgccatctccgctggtggaggcaaacggctagtccttgacatgccgccggctccgtgcctgcgggggaagggtcaaccgcaaggaaactttgaggattctgccagactgggtgggggaaggctctggtgtttgggaggaataagcggaggaaattgtggatacctgttggcatcagcgttggcggcagcacgtttttttaccgtttcccagccttggctggatcctgggagaaccggagtaggtcccttatgaacctctt

SEQ ID NO: 53154 - DNA, 137 bp, Homo sapiens; identical to SEQ ID NO: 10728
  chr16:62069136-62069273
  hyper

SEQ ID NO: 53155 - DNA, 776 bp, Homo sapiens
  chr16:62069336-62070112
  hyper
cgcagggcgactccggagcccggcaagtttgtagcgggcaccgcacctcccagagctggagctgccacttgtgggaaagcctcgcgctggggctttcgcagctgagccttggcccgcagccctgccgcgggggtcgccctccctcgcctcggagatgaggcggtgcagaaaaccagccatagaccactcgggccccctcgcctccttttttccctggcttgcaccctccgcacagcgggctgcaggtgcttcccattcaccgcacggaccccgcagtgaaggcgcgcggctgcagccgcgcctgcctgcgttgggaagcggcgaaatagccaagtcgccgcagggaaggaaaccggcaggaaaactggaggggcacagcctggagcttgctactctctaggatctgttgtcaaagcagtttgcaaaaacagtcaggcaaaaccttgaggcgtacgtacgttatcacccacggatatcgcgaaagacacagcttagcccagagcctatgctaagaaccctcatccaccatctgaggggcaggaggcgcgcaaggtgtccgaaggggcatgggaattcctataagaaacggtcccttctggatagtcggaacatagaggaaaacgggggtgggttaggggaacacttactcttgtggggccctgcgctggcgaatgtcaagcctccaggttcacaaatggctggaggtgctcggggttagctcccgagggcggcaagcgccgaccggtcctcgctcgctaggcaggcgcctccggatt

SEQ ID NO: 53156 - DNA, 22 bp, Homo sapiens
  chr16:62070245-62070267
  hyper
cggagcttggaggaggcaggga

SEQ ID NO: 53157 - DNA, 1189 bp, Homo sapiens
  chr16:65154642-65155831
  hyper
gaaaacctttcacccgggagaggcaggcgcggcgagccccgggcgaaagcagggcctcggcaaaaaaacggacaaggaagccggacccgcaagcctcccccgaccccactttctctggggactccgcttcacagcgtgaggcgggccctcctacagttcctctgggttggggaggggggagaagggagctctcctcgccgtcctccccatctggccagcttctcagtgcttcccacctcccggctcgcgttccggggcagagcgcagggagggaggccgtgcgtgccgggagctagagaggcttggcgcgctccgagaagcggcgcaggtttcgggaaggtgtggttctcaaagttaacgttgaccctggcagctttcgccaatcccaagccagaggcgagcccgagtctgggccgctcatggacctactcctgcgctggtgggagcttacaaacgggcgccagagctcccgcagagactcgggctggagggctgtagcgcaccgcagcctgctgccccagaaccacagtcggcggccccaaacccacgctattaaagtgcgggcaatctccttccggagctggggtctttccgttttcccgggcttacccggcagtctcgactgcagggactaagccccggggagctttcggcagggatccgggaggatggagtaagaaccccgcagagcgcggtcatgtcgccgctttggggaagcggcgcagggctggcgggcaccgcgccgtgggcgactttccccagagatatgaccggggacagtcggcgtgtccggaggtctgctctgcagtctcttgccccagccaggtacaaaccccctctgctgtggcctcggcgcagaccccacaggaggccggagccagggagagtcgtggagcgcacatctgaagcctccgtcccctgctttgcccgcgcccacagctggctcccttctccctttctgatttttaaacaaatctctccctcccttttgctttgcgttagtgaagccttctcgactcagataccaccgtccccctcaccaccccgccccgccaagacattctcttcctgagaaaatcctgccccccattccaagaagccccaaccaggcgagaggaagggactggcggcgcacctcacctggggcccttgagggtggacgcaacctccgagccgccagtccctggcg

SEQ ID NO: 53158 - DNA, 67 bp, Homo sapiens
  chr16:65156106-65156173
  hyper
ggctgcgagaggcagcgagatgggcctcgcagaggctgcgggggccgaccccgtccgcgcccctccc

SEQ ID NO: 53159 - DNA, 30 bp, Homo sapiens
  chr16:65157413-65157443
  hyper
aaggaaccccagtgcggggctaaggcaaga

SEQ ID NO: 53160 - DNA, 30 bp, Homo sapiens
  chr16:65157648-65157678
  hyper
gtccgcgtcctgcgcggagaggatgcctct

SEQ ID NO: 53161 - DNA, 172 bp, Homo sapiens
  chr16:66460704-66460876
  hyper
tccccgctcgcgtccgtgtgtcattccctacacacgcctgtgtgtcctcttcacacgtctgactggagcgtcggcctcccgcatttcccggcctcctcgccgccctgccccgcctgctgctgtgtgggtgtcgggctggctgtgcgcaaaggggcgcggctcggccctcccc

SEQ ID NO: 53162 - DNA, 30 bp, Homo sapiens
  chr16:66586322-66586352
  hyper
cccacctctaggtccgctaatatgtgccca

SEQ ID NO: 53163 - DNA, 285 bp, Homo sapiens
  chr16:66612810-66613095
  hyper
aagattcctgggagtcgaagttgaaaggaagctttcccccgccaaggacgcctaccccgaaaccggccccgacgccccgcagaggcccgcctgaagccagcccggcgccctagcagatgcacgtgtctgtcgaatcgctgcctccgagcccacccccgagctcgcatgctgtcacccattccagcctaaatgtgaccataaaattagggctgctgcttttatcgagaacacctgcttcctctcgttgccttgtgtgaaagtcgcgttgtattttcctgcgcttgg

SEQ ID NO: 53164 - DNA, 28 bp, Homo sapiens
  chr16:66638193-66638221
  hyper
gggtggccaagaaagtcgcaagaaaact

SEQ ID NO: 53165 - DNA, 185 bp, Homo sapiens
  chr16:66638268-66638453
  hyper
cggccggggtctttgctgtttagacgcctgggttcccggatcccagacacgcgcacgggcaggaagttagaccggagacagcgagtatagacagcccttctggataggggcagacgggtgggagctccgaaggggtgccggggcggtgatcgggaggtctccagcggcccgaaccagggtgaaga

SEQ ID NO: 53166 - DNA, 298 bp, Homo sapiens
  chr16:66730082-66730380
  hyper
ggctgcagagtggtcccgggaccccacgagggagagggggcgcgaggagcgggctccggcctgggcaagcgggtacgcggcggaggccccgcagcggggcggggagggaggcgtgcggctaggccgccctcgggcacctggggccccgcccggcacctaccacttgggcgaccttgaggcggccgagcgcgccgcgcaggtagtcggggtcgcagcgcaggccggccagcccgcggcgctggctcaccggctcggtggtgggctggtacgggctgctggcgcccgagatcatggaggt

SEQ ID NO: 53167 - DNA, 30 bp, Homo sapiens; identical to SEQ ID NO: 10735
  chr16:66878795-66878825
  hyper

SEQ ID NO: 53168 - DNA, 30 bp, Homo sapiens; identical to SEQ ID NO: 10736
  chr16:66959387-66959417
  hyper

SEQ ID NO: 53169 - DNA, 30 bp, Homo sapiens
  chr16:66968461-66968491
  hyper
gctggagcagaaggcgctgagaagggacca

SEQ ID NO: 53170 - DNA, 30 bp, Homo sapiens
  chr16:67062672-67062702
  hyper
atctggggttactccgcgcacctggggaac

SEQ ID NO: 53171 - DNA, 30 bp, Homo sapiens
  chr16:67144404-67144434
  hyper
aaatgcctaatgcccggccctgctcttttt

SEQ ID NO: 53172 - DNA, 71 bp, Homo sapiens
  chr16:67184511-67184582
  hyper
acggttgagccccttgcgttgttctcctcctcccggccgtgtcgcaccgccgggaccggcagcctgaaggg

SEQ ID NO: 53173 - DNA, 633 bp, Homo sapiens; identical to SEQ ID NO: 10737
  chr16:67189017-67189650
  hyper

SEQ ID NO: 53174 - DNA, 206 bp, Homo sapiens
  chr16:67193000-67193206
  hyper
agtttcgcatccgccgactggcagctcttcttacgtgttctttcacggaagcccctccttgggaagccccgcgccccacccaccaggagtcgtccctttttgggcggggctgaggcttccaggctgggtcctgagaaagtttggtggccggagactgtggggcgcttaggtaccgacctaacaacttctgcgcctgtttccaggga

SEQ ID NO: 53175 - DNA, 1461 bp, Homo sapiens
  chr16:67197558-67199019
  hyper
gaggagctggcggcgcgctgcgcggccctgcgcgaggtgcattgtttctgcgtggtgagccactcggtgctggacgccttccgcgcgcactgcccgcgcctgcgcacctataccctcaagctcacgcgcgagccgcatccctggaggcctacgctcgtggcgtgattgggcgacttctctcccccgtccccgtggacgtaagcgctctgagagggaacggggggggtgtccaggcgcgccccgagtgctagtgccttcttttgggattgttgccccccgggtctttaccgagttgggaactgtgatggcatcgggaccagtcctgggcgccctgagaccactcgctgctctcaccctctgcagacgccccacccgctcggtcctggacacactgcccccctctcttgcctccacccctctgcggactctgcagctccgcggccccggcgcagggagagggagggcacgggcgcgggccgggcctcaagggtgagtgtgaaataaacaaatcctgcagtgtttctgcgtcctattaaaggcggggtcggatctgaaagggaaggacagggaacgcgcggggtaccggaggagccatcccggcagaggttgggtttcctcaagagcctctggacgacacagctgcggggggtcagggtcggggcactcacacccttggaatgactacgtcccggggttcggcgggagggggcgtgcttccctgcccccccttcctatctgcttgccctgcctggggcttcactgtgcctctggccattaccttctaggacttgcccagcccacaccaggtcgcgcaccggcgatttctcctgtagaacaaagaaggaaatagagggaccgagaggggtgggactcgaacccaagtctcccactcatctcaccccaccccaccccactccaccccaccccacccctccactccactccactccacacatcccatccagccagccttttctgcctgctggtgcctcggccgctgtccgagccccgccccgcgggcttgcacgtggcccccgcctgacccggcgccccggggcggagtagggcggagcgggcggcaaacgcagcactttccgcggctttgacgagcccgcagcggccgggcccgagcgcagagccgggccgagactgcaccatgcaggaagcgccagctgcgctgcccacggagccaggccccagccccgtgcctgccttcctcggcaagctatgggcgctggtgggggacccaggcacagaccacctgatccgctggagcccggtgagggccggggcccctcgattccccctgtggtcccggggtccctccacgtcagtgaacacccatgcccgcccaaccccctcctgagactgggccgtggatccccggatttggccattcagagaagttcaccttggagggggtgtgcgagaggggggtttcctctgcggccgaagaagggt

SEQ ID NO: 53176 - DNA, 247 bp, Homo sapiens
  chr16:67199343-67199590
  hyper
gagcgcaggactggccgtgagcgggcaccgctcaccctcctggtctccgcccgcacggtgggcgggcggcgttcttggtagagcgggaccagtttcctcgtaagcgaccagagccgtttcgccaaggaagtgctgccccagtatttcaagcatagcaacatggcgagcttcgtgcgccaactcaacatgtgtgagtccctacggccgggcggggagcggggatgggggactcggtgccggggatggg

SEQ ID NO: 53177 - DNA, 2 bp, Homo sapiens
  chr16:67199959-67199961
  hyper
cg

SEQ ID NO: 53178 - DNA, 31 bp, Homo sapiens; identical to SEQ ID NO: 10739
  chr16:67203649-67203680
  hyper

SEQ ID NO: 53179 - DNA, 804 bp, Homo sapiens
  chr16:67204017-67204821
  hyper
gggctggcgcggggccgctgcaatctctgggaagcgggggcttctgggtcgcgctcagctctgcaatgcatgcgttctgtgatcctggtgagttggtatccttctctgaacttcctctgtgacaggcagagaagaggggtcgatgacaagatagatggaaagcacctggaaattggcaggccctgagtgggcgctggacgtgtggggccgcgggccgaactgccccctcctggcctcatctcctggtgcgccccgggtggggagggaaagctgactacatgcacgtccccagccagcgcgcggcctccgcggtgtggctcctagtgcccggggaagaaccctcaccctccctattcccagcagccctggccgccccgcccccgccgcagctgctgcacccacccccaccctgcccggccctttctgcaccgtcatctcctgccccgccgaggcttgacccgtgagtggggacgcccaaaacgggccagaccgggagccccactcccggctgtgggagggaagggaaaccgagattgggcagaatcagcgccccaccacccgctgcggcgctcgggggtcgggggggcggggtgggtaggactgtgggccccgccctgccgcaggactctcaagctctgggactgggtggagggaggtaaggggcggggggggaaaatccgtgcagtcgcacatgcgcaaaggctcttcactgtcccaagaccctggcttcctggccaaagagcccgcgcagcgaggtggggttgggggctgggacccagctccgtgccccgccacctggctctc

SEQ ID NO: 53180 - DNA, 30 bp, Homo sapiens; identical to SEQ ID NO: 10741
  chr16:67208232-67208262
  hyper

SEQ ID NO: 53181 - DNA, 30 bp, Homo sapiens
  chr16:67212442-67212472
  hyper
ggcgttcggggacccgcctgcgagcccagc

SEQ ID NO: 53182 - DNA, 30 bp, Homo sapiens; identical to SEQ ID NO: 10742
  chr16:67217709-67217739
  hyper

SEQ ID NO: 53183 - DNA, 30 bp, Homo sapiens
  chr16:67218163-67218193
  hyper
cccgtgtaccaggacgggagccaggatact

SEQ ID NO: 53184 - DNA, 30 bp, Homo sapiens
  chr16:67218569-67218599
  hyper
tctggcccccagtccgcacctcacgtcggg

SEQ ID NO: 53185 - DNA, 102 bp, Homo sapiens
  chr16:67225900-67226002
  hyper
acccaggtagttttcgtcttattcggaggctggacatttgctactggtccctgaagttttgcggctgcacccacagacagcaatagcgccacgttccctgga

SEQ ID NO: 53186 - DNA, 30 bp, Homo sapiens; identical to SEQ ID NO: 10743
  chr16:67261066-67261096
  hyper

SEQ ID NO: 53187 - DNA, 216 bp, Homo sapiens; identical to SEQ ID NO: 10744
  chr16:67280007-67280223
  hyper

SEQ ID NO: 53188 - DNA, 75 bp, Homo sapiens; identical to SEQ ID NO: 10745
  chr16:67280818-67280893
  hyper

SEQ ID NO: 53189 - DNA, 458 bp, Homo sapiens; identical to SEQ ID NO: 10746
  chr16:67281139-67281597
  hyper

SEQ ID NO: 53190 - DNA, 30 bp, Homo sapiens; identical to SEQ ID NO: 10747
  chr16:67360790-67360820
  hyper

SEQ ID NO: 53191 - DNA, 297 bp, Homo sapiens
  chr16:67427324-67427621
  hyper
acgcaggaatggaccgatggacgcgggagaccaggcggctccgcagctccgctccctgccggctcccgggtgggactgcagcccaggcggctccgccgtattatcccctgtttctcggtctccatagagacggcgagtcccacccccgaggctgtctcggcgggagagtgaccaaggtcacgccggccccgcccacgaggccccgccctccccgagactctccgggagccgcatcccgcccctcccccgcaactccgcggtcctcgcgacggcgagaccagcgctctgcagttcggg

SEQ ID NO: 53192 - DNA, 126 bp, Homo sapiens
  chr16:67433375-67433501
  hyper
cacagcgcgattggccggctcattccccgctctgcggcccggccggtcggggtggttgagtggggtctgtggagggaccaagcgccaggcctgagacagccccgagcgaggcgacgaggagcgcgc

SEQ ID NO: 53193 - DNA, 8 bp, Homo sapiens
  chr16:67464885-67464893
  hyper
cggggcgg

SEQ ID NO: 53194 - DNA, 346 bp, Homo sapiens
  chr16:67465266-67465612
  hyper
cgctgctggccgcgctcgactggctgtgccagcgcctgctgcccccgccggccgcactcgccgtgctggccgccgccggctggatcgcgttgtcccgcctggcgcgcccgcagcgcctgccggtggccactcgcgcggtgctcatcaccggtgagtgcgcgggtcgcggagcgcggggactccaggctcgagggcgggactggacactcaacaggactgactccccatgggcacagccaaggcgggctcctcagcgcaagagtgggagagttctccacccctgggtgcagggagcgagccaaatagggagcgccgggcacctccccaagcccgggttcactacctg

SEQ ID NO: 53195 - DNA, 30 bp, Homo sapiens
  chr16:67515329-67515359
  hyper
ggtaaagaagggagcgagcccttctcaagc

SEQ ID NO: 53196 - DNA, 146 bp, Homo sapiens
  chr16:67564102-67564248
  hyper
gcccctctgcgtcgccgctcggactcagccctggccaggcccggcccgggggaggccgcctggctcccagcgcgcggccagggaatgtaaccagctgaccagggagggggccggcaggaagtgaggccacccgacagcctccgccc

SEQ ID NO: 53197 - DNA, 30 bp, Homo sapiens
  chr16:67564457-67564487
  hyper
gggcggggctagacccggggactcccagag

SEQ ID NO: 53198 - DNA, 320 bp, Homo sapiens
  chr16:67571310-67571630
  hyper
ggcgggctgagtcaggcggcaggaactgggcggggggcggcgccgggaggagccgaagccgagccagagccgctgggagcgagcccggagcccagccgggcggctcgaagtggccagggccggaaggtccgcggggggcgagcgcgggtcgggggccgtcccggacccaccatgaacaccaagaagagaggtaggacccagctcggggctgcgaaagctcagggactggccccaggggaagcaggccgggtttgggggccaggagtgtgtgtttcgccgaagcggggtgggggtctgccgaggagctctccccgccgatg

SEQ ID NO: 53199 - DNA, 120 bp, Homo sapiens; identical to SEQ ID NO: 10752
  chr16:67571883-67572003
  hyper

SEQ ID NO: 53200 - DNA, 289 bp, Homo sapiens
  chr16:67678717-67679006
  hyper
ccagccccggtgggccgcggggatccccaggcaggcagcgtcccctggtgttcgcggcagggactgcggggcggggtggaagccgggggcaaggacccgctggaggcccgccacacccgcgaccctcccggccacgccactgcccaccccgacgtctaccctggcggagaagctcctgggcgacggggcgggcgggcaggtgggactcggcccccctcccacaaccccgctcccgggcaagctctcgagccgcgaggccggggcggggaggggccgggccgggggcggc

SEQ ID NO: 53201 - DNA, 30 bp, Homo sapiens
  chr16:67700712-67700742
  hyper
gcttgtagtttcggccgagggtgggctccg

SEQ ID NO: 53202 - DNA, 81 bp, Homo sapiens
  chr16:67700945-67701026
  hyper
gaggagcccggcagcgctcagacctccgaggtgaccgtcaggctgtttaaccttcaaacacagggccgcagcgctctgaga

SEQ ID NO: 53203 - DNA, 31 bp, Homo sapiens; identical to SEQ ID NO: 10754
  chr16:67707950-67707981
  hyper

SEQ ID NO: 53204 - DNA, 30 bp, Homo sapiens
  chr16:67867209-67867239
  hyper
gggaaccctcgggacgcagaagttcagggc

SEQ ID NO: 53205 - DNA, 30 bp, Homo sapiens
  chr16:67867773-67867803
  hyper
cgggccctcctaaccgcccagccagctgca

SEQ ID NO: 53206 - DNA, 40 bp, Homo sapiens
  chr16:67876116-67876156
  hyper
aggcggcaggaatccgcacacacccgccccggaagtgagc

SEQ ID NO: 53207 - DNA, 30 bp, Homo sapiens
  chr16:67880239-67880269
  hyper
gacatttgagtctccggcccaagaatagcc

SEQ ID NO: 53208 - DNA, 30 bp, Homo sapiens
  chr16:67907358-67907388
  hyper
cgggtaagggtggacggggattgactgtgc

SEQ ID NO: 53209 - DNA, 206 bp, Homo sapiens
  chr16:67969395-67969601
  hyper
agcatctgaagtcaaccgctgcgacgccgtttggagtgaggccaaggtcacaggggcagagttcgaggagaagggacagaagcgctcacccagggctgtgaagggcagacggctgtaggagccatggggatgcacaccgtagagctgcggtccagtcaggtctacgccgcccacgatcagcgatgcacccacgtggccctggtacc

SEQ ID NO: 53210 - DNA, 30 bp, Homo sapiens
  chr16:67970759-67970789
  hyper
cctgctttcgctttcgcctttacccttcct

SEQ ID NO: 53211 - DNA, 30 bp, Homo sapiens
  chr16:68002894-68002924
  hyper
ggggcagggtaggccggaccggcccaggac

SEQ ID NO: 53212 - DNA, 30 bp, Homo sapiens
  chr16:68057150-68057180
  hyper
gcgccgcgacctcgcgtacggtggctggcg

SEQ ID NO: 53213 - DNA, 8 bp, Homo sapiens
  chr16:68057764-68057772
  hyper
ctactccc

SEQ ID NO: 53214 - DNA, 342 bp, Homo sapiens
  chr16:68118297-68118639
  hyper
accccagaccccaggaggaggcgtcttgggccatctcgggaaggctagcttgctcgggaggggcagatcacgaaaacggttctttaggcagtgtcacttcctctccactgccagccacccaatttaggcggctccatccctcccgctttcatggatatgcagcaggatgcagagagcacagagctgtgattggcacgagctcacaacgggctttcccgctcaatctactcaacttccagcaagggacaggccctgcccattggggttcgctgaggcctcaaacgcgcatgctgtcaagggagcagctgcgggggcccgctagtggggacaaaggcgcagcca

SEQ ID NO: 53215 - DNA, 311 bp, Homo sapiens; identical to SEQ ID NO: 10758
  chr16:68118759-68119070
  hyper

SEQ ID NO: 53216 - DNA, 72 bp, Homo sapiens; identical to SEQ ID NO: 10759
  chr16:68269812-68269884
  hyper

SEQ ID NO: 53217 - DNA, 111 bp, Homo sapiens; identical to SEQ ID NO: 10760
  chr16:68269896-68270007
  hyper

SEQ ID NO: 53218 - DNA, 281 bp, Homo sapiens; identical to SEQ ID NO: 10761
  chr16:68270022-68270303
  hyper

SEQ ID NO: 53219 - DNA, 487 bp, Homo sapiens
  chr16:68271017-68271504
  hyper
gaggctcctttatggcgcgtttcccggccgttccttactttcccaaactctcccagggaggtgactgagaaactgaataagtgactgagaaactgaataatccagcaggaaggagggggctccagcgtggcgggaactgagtcacgcggttgcctagcccgactcgagactgagacgggagccgcaccacgcgctttcggacaaggagggtgctgcggcccggcccctggacaatggagagagcggggcacccgggcgcatcaccagagctcatgcccgggaaaggggcgaggcccggggggagagagctcagcgtagctccacttggcagctaaagaaacaggcgcccgggacggaaatgactcgcgcccggacacggcgacagggagagcatgggaagtgcttccttcgcccggcgggttcgagcgagtagcactttactttccctacaggtggaggcgggccttggtgcgcggctgtccatctc

SEQ ID NO: 53220 - DNA, 58 bp, Homo sapiens; identical to SEQ ID NO: 10763
  chr16:68298828-68298886
  hyper

SEQ ID NO: 53221 - DNA, 71 bp, Homo sapiens
  chr16:68344846-68344917
  hyper
actgtgggagctcgcggggtgtgatgggatagctttccagttctgctttaggacccgccccccagcacgct

SEQ ID NO: 53222 - DNA, 810 bp, Homo sapiens
  chr16:68481955-68482765
  hyper
cgccaggcacagcgggagggagggtccaagcctcctcgctctcccaggagagatggggggtgggggtgacccccagccctcgcccctcatacccaagagccttctccatgataaaacgaaaactaacccaagctgctccgacctccggcgcccggccacgggaggcccctagtcagtcggcggctgtccgggacccgcggtcctgagagcaacgagaacacgtcccgtcaactccccagcccctcacgcctcggttcgcccgctccccaagaaaacaaaagcgaattcagcagcactgacctctgacggcgggcgggagggcggtcagcgcccggcagcgcaccccgctcctcccggctcctcacagcccgggctcccggccgcagatctggcggcggccgcagcggcggcggctctcgcggctctcgggtccggagcctccctcagactcagcacctggagcggcgaacagctccgcgcttcattcctctgaccccgcctccctcgcgccgccggagccaatggtgacccggaccccgcccaggagtctgcccattgggggcgtcctcccctctccctccggccccgcccgcaggttcctgggtctctccttcaagaccacatcccccagagaccggcggagtttcgcacagccttctgggacttatagttctttaaggacgcggagtgggctcacgccgcgggtaggcaaacagagcgggactgcatttcccagagtgcactgaagacacggaggcgcggagcagggcgggaggaccgtttccatagcaaagacgaccagccgaggat

SEQ ID NO: 53223 - DNA, 336 bp, Homo sapiens
  chr16:68503999-68504335
  hyper
ctaaaactttccaaaatgctgcgttctgtgcagttagtggtagcgtttgccagaaaaaaataatagattgtaaaggaagcaacacggaacaaccacgtttttgttattcgaaatgcagctacacgtgtttacagtccttaaccatttcatctgacagcctggggagacagacttctaatttgtgttttgataaactgagagtgacagagcggttgttggccctgcttggaggtggagtgatggtgtggtcagaagggaagccggagggaagttacactcgtggggtgtgtgttatgtgacctttgtttaatacacgttcttatttgatcttcacaa

SEQ ID NO: 53224 - DNA, 92 bp, Homo sapiens
  chr16:68564223-68564315
  hyper
agcggagaagagaggtcggtgcctccaacccggggccgcggtcgaggggcgcgcgtcgttgctctgggactcactgtcgaccaacccccatt

SEQ ID NO: 53225 - DNA, 219 bp, Homo sapiens
  chr16:68573157-68573376
  hyper
ggggttgcaggagcgaggctccgagtgcgcaggcgcacttccagttctgccccaccgctgcggccattgtccgaccccggtgcggctgaggcccctttgggcagcccctccgcagatcagaattggagataaccgaggcttcggcgggggcgggaggagctgcccgaggctctgggtgggccggaggtcgcgaaatccggagccccccagaggcggtga

SEQ ID NO: 53226 - DNA, 21 bp, Homo sapiens
  chr16:68631269-68631290
  hyper
ttttttttttttgagacggag

SEQ ID NO: 53227 - DNA, 202 bp, Homo sapiens; identical to SEQ ID NO: 10767
  chr16:68676402-68676604
  hyper

SEQ ID NO: 53228 - DNA, 63 bp, Homo sapiens
  chr16:68676841-68676904
  hyper
cgtggtccacccccagcctcagtcccagccccagctgctgggctcacccgccggctaagggaa

SEQ ID NO: 53229 - DNA, 236 bp, Homo sapiens
  chr16:68678826-68679062
  hyper
gataacagcgcctccgggggataatgaatgcggagcctccgttttcagtcgacttcagatgtgtctccacttttttccgctgtagccgcaaggcaaggaaacatttctcttcccgtactgaggaggctgaggagtgcactgggtgttcttttctcctctaacccagaactgcgagacagaggctgagtccctgtaaagaacagctccagaaaagccaggagagcgcaggagggcat

SEQ ID NO: 53230 - DNA, 70 bp, Homo sapiens
  chr16:68679273-68679343
  hyper
tctgcagccatggggctccctcgtggacctctcgcgtctctcctccttctccaggtactccacagcctcg

SEQ ID NO: 53231 - DNA, 903 bp, Homo sapiens
  chr16:68679362-68680265
  hyper
cgctccctggggggcgggcggggtccgcatggggcagtggcgtcggggagagcgcggggctgcgctccctggggccaagggagtcccggaaggcccgtgaggaccctgcggtgtggggagtgcagggccgggcacgcctggacccagcctccttcactctctgccctcgggcgcaggtttgctggctgcagtgcgcggcctccgagccgtgccgggcggtcttcagggaggctgaagtgaccttggaggcgggaggcgcggagcaggagcccggccaggcgctggggaaaggtaagatcctcagggtggaaccgcagggtaggggccgcacgtgaccattttggtgtggaccgcgcgaggggtgttcgggccggggcaagggactcctggcgccacctcagttcccggggaggcgcagaacgcgcctcgggggctgggattgggggtggtggctgacggagaaggctgggcagcagagcgcctatgacatccagccccttgtccggtagccactgcttaccttgaccccctcctccgagatgccggatggctgagcccctcacccagtctcgacgtgggaagttctcccccgctggccccagcagaggaatgcgccggccacattcttcccccaacccgcgcgcaggtgtggggatgagccgtgccccgggcagcccccttcgcccctctcgggccccctttgtgaaccgtgctttgtgtctccgacagacagaccgggtctgtttcttttctccgagcttccctaccccgccccccttcttcctcggcagctggaatgcactcttaaccctgctcttcccggagggcctgcgcccttgtagcctgcctggaaactgggccctggcacacctgggctggggccatcacgtacgggaaccaccc

SEQ ID NO: 53232 - DNA, 759 bp, Homo sapiens
  chr16:68771019-68771778
  hyper
aggctagagggtcaccgcgtctatgcgaggccgggtgggcgggccgtcagctccgccctggggaggggtccgcgctgctgattggctgtggccggcaggtgaaccctcagccaatcagcggtacggggggcggtgcctccggggctcacctggctgcagccacgcaccccctctcagtggcgtcggaactgcaaagcacctgtgagcttgcggaagtcagttcagactccagcccgctccagcccggcccgacccgaccgcacccggcgcctgccctcgctcggcgtccccggccagccatgggcccttggagccgcagcctctcggcgctgctgctgctgctgcaggtaccccggatcccctgacttgcgagggacgcattcgggccgcaagctccgcgccccagccctgcgccccttcctctcccgtcgtcaccgcttcccttcttccaagaaagttcgggtcctgaggagcggagcggcctggaagcctcgcgcgctccggaccccccagtgatgggagtggggggtgggtggtgaggggcgagcgcggctttcctgccccctccagcgcagaccgaggcgggggcgtctggccgcggagtccgcggggtgggctcgcgcgggcggtgggggcgtgaagcggggtgtagggggtggggtgtggagaaggggtgccctggtgcaagtcgagggggagccaggagtcgtggggacgatcttcgagggaaggagaggggcatccgtagaaataaaggca

SEQ ID NO: 53233 - DNA, 30 bp, Homo sapiens
  chr16:68820930-68820960
  hyper
tctgaattccacaacggctttcctgtgttt

SEQ ID NO: 53234 - DNA, 1079 bp, Homo sapiens
  chr16:69139466-69140545
  hyper
cttaaagtcatcagcgccccactgcggaattcaaagctaagctgtcacaattgttaacaccttctttgaccagcctttttacatttgacaattctcttcagcgcctctttcctgccagcaggaaggttttgctgccttggctttcgggagccccctagacagcgaactgccccttcgcgtgcagaagtcggggaagagtgctctcagctcgccttccttgcagggtgagtaggttttgcgggttagagagcggggcgtgggggcggggagggagagtaacaattttggaagtccctgcgtggtatctggaaagttaacgacgcttcaggttctaggttgagcccaatgaccgtcttgccttggcagctggtcccagggcgattgcagagccgcgtggccttcggccccactcgggggacccagcttcggagagggcgcaggggctgcgagtcttgcgagccggagccgcgtccacccgggactaggcgtccccgccgagcgctggcttgtggcgctccctgggaccgcgcggggtcgggggtgcgcccgcgggggccctcccactctggtcaactttcccggccccagggccgggggaggcgcctctcctggcgggcacgcgccgggtacttaagggcggctcggctgggcaggcggcagtcggagcgcgcggcggcgcggagcggagcgggaggaggggcatggagccgccgcgggcctgctgagctccggagcgcggcagccggcggcacggtgagcgcgggccggccggcacccaggaggggagggccgcgcggggctgcgccgaggccggggcgcgccgggtggcaggggtgcctctcgccgagccccccgcacccggccagctcccagccctgcgggcgccgcgtccggcgcggggaggcgggttgggggcggcggcagccccgggcttcccggcggccgttcctgcagccccctccccactgacccctcctccctttcttcctgcatcctctcctcttccagcctcgcctccctcctccccggcggctcctgttttgtgaatgaattaggaggcggacgccggtgcggggctc

SEQ ID NO: 53235 - DNA, 90 bp, Homo sapiens
  chr16:69373054-69373144
  hyper
cctttagcgccaggcgcgtcgcacctgcagctctgctggaagctgggcaaacggtcgagcaggcggccgagcgacgcctccacgtcgcca

SEQ ID NO: 53236 - DNA, 38 bp, Homo sapiens
  chr16:69373651-69373689
  hyper
ttgccggggagcagcgagcgaccgacttccgtttccag

SEQ ID NO: 53237 - DNA, 30 bp, Homo sapiens
  chr16:69419542-69419572
  hyper
cgaaaggcccgcagcgcctcgtggaagtag

SEQ ID NO: 53238 - DNA, 30 bp, Homo sapiens
  chr16:69458314-69458344
  hyper
tggagggggctgaacgaccctaattggtta

SEQ ID NO: 53239 - DNA, 30 bp, Homo sapiens
  chr16:70323034-70323064
  hyper
cccgtgcccccacccgcccctaggggatta

SEQ ID NO: 53240 - DNA, 30 bp, Homo sapiens
  chr16:70380543-70380573
  hyper
taaaataaaataaacgttggcttatttcag

SEQ ID NO: 53241 - DNA, 30 bp, Homo sapiens; identical to SEQ ID NO: 10775
  chr16:70414252-70414282
  hyper

SEQ ID NO: 53242 - DNA, 30 bp, Homo sapiens
  chr16:70414801-70414831
  hyper
ggtgaggaggcctccggcccagggagaggc

SEQ ID NO: 53243 - DNA, 417 bp, Homo sapiens
  chr16:70415391-70415808
  hyper
ggctgggagaaacagaagctccgcccgaccgcagcgcagattggtgccaggcccggccggtcccccagtctcgtgattggcggggcacagcagacgcccctgggctgcagcatgattggtcgcgggttgctggtcctgggtcccgggccggagccccggtgcccgatagatgggccggaagggtcgcggcgaggcccggctcagttgccccggtagacttcgatcttgctggccttggccagcatgtcgatgatgtgggcctcgaagtccgcgtcgtgcacgccagtcttccggaactcgcccgcgtaccggttgttctcccagtagtggtgccagttgccccggctgtcggccccgaacccgtacacgttcacctgcggggaagcgcagcggagcgtcaccccaggcggggacctg

SEQ ID NO: 53244 - DNA, 377 bp, Homo sapiens; identical to SEQ ID NO: 10776
  chr16:70472226-70472603
  hyper

SEQ ID NO: 53245 - DNA, 30 bp, Homo sapiens
  chr16:70473633-70473663
  hyper
cgggggtttggcctcgctggactttgtgtt

SEQ ID NO: 53246 - DNA, 1174 bp, Homo sapiens; identical to SEQ ID NO: 10777
  chr16:70719196-70720370
  hyper

SEQ ID NO: 53247 - DNA, 30 bp, Homo sapiens
  chr16:70835020-70835050
  hyper
actagcgggactcacgagacagcggccatg

SEQ ID NO: 53248 - DNA, 34 bp, Homo sapiens
  chr16:70835270-70835304
  hyper
tgggcttctgtagacgttcgtaagaccgaatggg

SEQ ID NO: 53249 - DNA, 30 bp, Homo sapiens; identical to SEQ ID NO: 10778
  chr16:71323302-71323332
  hyper

SEQ ID NO: 53250 - DNA, 30 bp, Homo sapiens
  chr16:71392733-71392763
  hyper
ggccgagctgacggcgtcccagttcctgga

SEQ ID NO: 53251 - DNA, 132 bp, Homo sapiens; identical to SEQ ID NO: 10779
  chr16:71459956-71460088
  hyper

SEQ ID NO: 53252 - DNA, 231 bp, Homo sapiens
  chr16:71460270-71460501
  hyper
cgcacaagcccggggtgagaccagaagctgctgcctgcagagcccgaccttgcgtagatgactccgcgagtgcaaggggctgcaggcattttcttacaggaggtagcaagcttgtctaagcagaggccctcttagcgcagtgggcagcgcgtcagtctcataatctgaaggtcctgagttcgagcctcagagagggcagctgttttgttgtgctacgaatgcagcaaatgt

SEQ ID NO: 53253 - DNA, 32 bp, Homo sapiens
  chr16:71496368-71496400
  hyper
ggaccagtggatggcgcgctgtcacacccaat

SEQ ID NO: 53254 - DNA, 930 bp, Homo sapiens
  chr16:71659877-71660807
  hyper
cggctgtgggtcgccccgcccgggtttccagcagcagcaccccagcccccacccagcacacaggcacccctcccgcccgggccccagacgcgctcaggccgccccctgagggcgcccgttctcaggtgagctcccggactagcgcgcatgcgcacaggtgagtgcccgccccgcccccgggcttggccacctgcccaagaaacttgttggttgttgccctcaggtcgctcccgggcggggacacggaacccggccatggaagatccgtcgggggctcgcgagccccgggcccggccgagagagcgggacccgggacggcgcccccacccagaccaaggccgcacccacgatcgaccgcgggaccgacccggggacccgcgcaggaagcgaagcagcgacgggaaccggcgaagggacggggaccgggacccggagagagaccaggagagggacgggaaccgcgaccggaaccgggaccgggagagggagagagagagggaaagagacccggaccgaggcccccgccgggacacacacagggacgcgggccctcgcgcaggtgaacacggagtttgggaaaaaccgcgccaaagccggacgcgggacggagcccggggactgacctgggacgcagccgcgcctcctgggcccgcgccctgggaagccccggagccgccgcagccgcagaggaagggagaccccgggcgccgcagacccgaaaggtgagaggggccggggcgctgcgacctccgcgccggggacacctgtggcccaggccggcccgcgaggccctggcgtccccgggttctcgtcctaggagcccgtttaaatgaacaaatgccgtttctcccttctgcgctctcagaggcgacctggcagggaaggaaaactttagggttcccccttctcgtggcctgaacccaactaaca

SEQ ID NO: 53255 - DNA, 31 bp, Homo sapiens; identical to SEQ ID NO: 10783
  chr16:71668363-71668394
  hyper

SEQ ID NO: 53256 - DNA, 30 bp, Homo sapiens; identical to SEQ ID NO: 10784
  chr16:71880017-71880047
  hyper

SEQ ID NO: 53257 - DNA, 30 bp, Homo sapiens; identical to SEQ ID NO: 10785
  chr16:71918391-71918421
  hyper

SEQ ID NO: 53258 - DNA, 30 bp, Homo sapiens
  chr16:71928796-71928826
  hyper
taaattagggaaatcgccagagactgtggt

SEQ ID NO: 53259 - DNA, 30 bp, Homo sapiens
  chr16:71929894-71929924
  hyper
agagcttccagtgccgcgagaggcggatgc

SEQ ID NO: 53260 - DNA, 30 bp, Homo sapiens
  chr16:72127995-72128025
  hyper
gcggctctaggcggcggatattggtcccct

SEQ ID NO: 53261 - DNA, 209 bp, Homo sapiens
  chr16:72699009-72699218
  hyper
acggcttccgggtgggcggcttgaggtggcttccggccgccaggcgagactccgcgggaaaactccctgctagagagactaggagatttggggctgcggccgtttcctccggagcacccacgggactgtgtgctggggtccctccaccggctgtgtcctttattcttctttctcacccaacgatttacctgaacggttataaagtgcac

SEQ ID NO: 53262 - DNA, 328 bp, Homo sapiens
  chr16:73091556-73091884
  hyper
cgcagccccgagcccccgggagcccctagtgtccagggcagagtcccctctgggcgctcgcggcgctgccagtggggcagggcggagagcgcacaggtagaggatcgcgcggccgcctcgccccctccgggaccccgtggctccgaacgggctcccgcgtcgccggcaagtcgagccccagcgcggaaggcgctcgcccggccagcggtggcggccgcggcagcagcagtggctgcgaccgcggcgactgctccgggccgggtgcgcgccccgcgcggctgctcagcccggggccccggcgcctctcggggtggggcaaagttggggg

SEQ ID NO: 53263 - DNA, 217 bp, Homo sapiens
  chr16:73091900-73092117
  hyper
cgggggcactcggcaccgcggacccccccatactccccccaccgccggccgccgcctttgtctccgagctggtaccccggccgccctcccgccctcggcccgcgccccggccggccctgcctggcggcgcctccaaactcgccgcgcgggcctcgccccgggcgcctccaccctcccgggggtcgccggcggccggcggcggcggcgcggggccggg

SEQ ID NO: 53264 - DNA, 66 bp, Homo sapiens
  chr16:73092480-73092546
  hyper
cggcggcgggagctggcggcgcttttaatcccgaaaagaggcgctcgggccgcggagcccatcaag

SEQ ID NO: 53265 - DNA, 14 bp, Homo sapiens
  chr16:73099956-73099970
  hyper
gctagccgggctac

SEQ ID NO: 53266 - DNA, 27 bp, Homo sapiens
  chr16:73100271-73100298
  hyper
cggagccagcgtgcgcgtccctaatgc

SEQ ID NO: 53267 - DNA, 64 bp, Homo sapiens
  chr16:73100575-73100639
  hyper
cgccccagcagtggtctggaaaggagagggcgcggcgaggggcgcacctcgcgcccagggccca

SEQ ID NO: 53268 - DNA, 30 bp, Homo sapiens; identical to SEQ ID NO: 10790
  chr16:73104801-73104831
  hyper

SEQ ID NO: 53269 - DNA, 30 bp, Homo sapiens; identical to SEQ ID NO: 10791
  chr16:74330522-74330552
  hyper

SEQ ID NO: 53270 - DNA, 98 bp, Homo sapiens; identical to SEQ ID NO: 10792
  chr16:74352095-74352193
  hyper

SEQ ID NO: 53271 - DNA, 214 bp, Homo sapiens; identical to SEQ ID NO: 10793
  chr16:74659411-74659625
  hyper

SEQ ID NO: 53272 - DNA, 167 bp, Homo sapiens
  chr16:74700793-74700960
  hyper
gctcccgccagagccgccggcaggcatgctcctattggacagaagccctacgctgtggccaatacccactcttcttcttcaatgggtcccccgatagctgaagcagcggtgctctcattggctggtagttcgtcctgacgaggcgggaccgcgcttgaggaagcctc

SEQ ID NO: 53273 - DNA, 30 bp, Homo sapiens
  chr16:74808663-74808693
  hyper
cgcagctcccagcgcgcagcccggcgtctg

SEQ ID NO: 53274 - DNA, 41 bp, Homo sapiens; identical to SEQ ID NO: 10795
  chr16:75018962-75019003
  hyper

SEQ ID NO: 53275 - DNA, 30 bp, Homo sapiens
  chr16:75019006-75019036
  hyper
aatcagccccgacacgccccgtgccctggt

SEQ ID NO: 53276 - DNA, 30 bp, Homo sapiens; identical to SEQ ID NO: 10796
  chr16:75032743-75032773
  hyper

SEQ ID NO: 53277 - DNA, 30 bp, Homo sapiens; identical to SEQ ID NO: 10797
  chr16:75033369-75033399
  hyper

SEQ ID NO: 53278 - DNA, 39 bp, Homo sapiens
  chr16:75033798-75033837
  hyper
ggggcaccggcgactccgagagggcgcccggcggcggag

SEQ ID NO: 53279 - DNA, 37 bp, Homo sapiens
  chr16:75267947-75267984
  hyper
cgcacacacacgcacacgtggacgcacacacacacta

SEQ ID NO: 53280 - DNA, 51 bp, Homo sapiens
  chr16:75284494-75284545
  hyper
ccaacatcttccaggccgtaagcccctcaccccgcacccctaggcaaatct

SEQ ID NO: 53281 - DNA, 66 bp, Homo sapiens
  chr16:75284629-75284695
  hyper
cgggtcccccaaccatggactccaaagccttcatgtccacactgcagaacccggccctggccccct

SEQ ID NO: 53282 - DNA, 42 bp, Homo sapiens; identical to SEQ ID NO: 10799
  chr16:75285012-75285054
  hyper

SEQ ID NO: 53283 - DNA, 110 bp, Homo sapiens
  chr16:75285278-75285388
  hyper
gtccggcaggaaatgccgctcgcttaaccccttccagcccgctgccgcctccaagcccgtacgcggcccggccccacctggcgccctcaccaggtggttcatggtgtccg

SEQ ID NO: 53284 - DNA, 306 bp, Homo sapiens
  chr16:75285434-75285740
  hyper
cgggccgcgtgccctcggggctccgagcgcgccgcagccgccccggtgccgccgcgcagctgccgcctcggccacccagagccggtccagccgctctccgcctgccgccacggcccagccggcccagcccgatcccagcatgcccggccgcgcgcgcccattggccgccgccgctctccatgcaaataagccgcctgtcgggggcgcgggcgcgcagacagaagcccgcccagtaggggccgccccccgccccgccccccacctccaaccccgaggctccaggcccctgcccgaggccaggcttcc

SEQ ID NO: 53285 - DNA, 245 bp, Homo sapiens
  chr16:75299144-75299389
  hyper
tcccatccagccaagccgtcctgggggaggggtggctccggcgactggcagagaccgcgccccaacctggccaccccgggggagtcccgggagcgccgcagggcagcaatccgagggaggtcttgcgggacagcacaggcctcccaccccctcatccggcccagcagtcccggaggggagtcgcgggagcggcagagacccctccccgctaggcctagccgtcctggtgcggggtcctggcgggc

SEQ ID NO: 53286 - DNA, 306 bp, Homo sapiens
  chr16:75299750-75300056
  hyper
ggggcctggcgggcagcggcgccagcgggctgggggctcgggtccgcccgcgccgctcagaggccccgcgaggggtcccggcgctttccggctcctccggctcctgagcgttcccggacgccggactgtccggccgctccagccgcgccgcgcatgcgccgcccgcgccgccccccccaccgtctccgcggccagggacgcgttaaaggtgaggaccccggacctaggcctttttctgtcggcccaacgcggcggggaggcgcggtctcctccgctcctcgccgatccctcgcgggccacctccag

SEQ ID NO: 53287 - DNA, 30 bp, Homo sapiens; identical to SEQ ID NO: 10802
  chr16:75497814-75497844
  hyper

SEQ ID NO: 53288 - DNA, 70 bp, Homo sapiens; identical to SEQ ID NO: 10803
  chr16:75528798-75528868
  hyper

SEQ ID NO: 53289 - DNA, 112 bp, Homo sapiens; identical to SEQ ID NO: 10804
  chr16:75528922-75529034
  hyper

SEQ ID NO: 53290 - DNA, 96 bp, Homo sapiens
  chr16:75529238-75529334
  hyper
ctactccccgcgcgccggccggcaaccctcggcgctgcccggtgcagcccgcccgagcgcacacaatgaggcgctttcagacgtggctgcggtccc

SEQ ID NO: 53291 - DNA, 177 bp, Homo sapiens
  chr16:75529726-75529903
  hyper
cagtgtcccaactgggaagagcggagagaccaggtggccttaggagctgggtccgcagcttttcccctcctcctgcgcattccctgccctagcctaggcccagaggcgcaggttcatagcaggtccagataaagacatgatacgtttcaataaataagatatttccggccagggctg

SEQ ID NO: 53292 - DNA, 30 bp, Homo sapiens
  chr16:75589452-75589482
  hyper
tgtcagggcgcacacgctgacagcatggct

SEQ ID NO: 53293 - DNA, 30 bp, Homo sapiens
  chr16:75590230-75590260
  hyper
aaaggagccagtggcgggggcggggttagc

SEQ ID NO: 53294 - DNA, 85 bp, Homo sapiens
  chr16:75599999-75600084
  hyper
agccagacgttttccgccaccaacgctcccgagaccccactcctgtcaccagttccccgaacattcctgcgagcaatgtcgcaga

SEQ ID NO: 53295 - DNA, 30 bp, Homo sapiens; identical to SEQ ID NO: 10807
  chr16:75681562-75681592
  hyper

SEQ ID NO: 53296 - DNA, 30 bp, Homo sapiens
  chr16:76311035-76311065
  hyper
tcagaaggctccaccgccttgtcccttccc

SEQ ID NO: 53297 - DNA, 31 bp, Homo sapiens; identical to SEQ ID NO: 10808
  chr16:76507679-76507710
  hyper

SEQ ID NO: 53298 - DNA, 1029 bp, Homo sapiens
  chr16:77245983-77247012
  hyper
aagaggacggccaaacggggaggcctcctctttgtcctcgcagatgctggagcagcgactggcccgggagatccgtgccctggagagaagcaaggagcagctgctctcggagagtgagcctcccgcgccaggtgggcggggggagggggatgtgcccgggcctcggccctgcccctgacgcccgcccaccgacagggaggctggtgcgcgccaagctgcgggaggtggagcggcggctgcactcgccgcctgaggtcgagggcgccatggcggtgaatgacgggtgagaggggaagggaggagtgggcgaggagggcaggggcagggcggaggggaacccgcccaggtcccccgctccgcccccgactgccgcttccccggcctgtgcctccctcggcgtcgtcgggtctccgcgtctcggtggcttcctcctcgtcccctggactctcgctctcttcctcctgtctcctcggccccttctccgcaggctgaaggcggagctggagatattcggggagcaggtccggagcgcccccgaggtcggggccggcgagggagaggtagggagcccgaggaagggaggcggggcgggcagggaccgagtcaggagagagcgggcgggggtcctgggagcggcccccgagagtggggtctgtggggagcagggcggccccggggacagaggaagccgcggtggaggcctagggcagacgcgggcggacgcgaggagcgtaggaacctggtccgcagcctcacccagcccccggcaggccggacctgagctcccccgcgctcgcgacgaggaggatcccgagccgccggtggctgcccctgacgccctctaggccagcaggacccgcccgttcccgaccttccctcgagacccgccaagaaataaaggcgatgatttccgaccatgctcgcgttctccgcggagtctgtgctacaccgtggagcggggcggggcgtgctgggatctcgaggcggggcctctgccggacccctcccaccagtcgagccccgggcgcc

SEQ ID NO: 53299 - DNA, 413 bp, Homo sapiens; identical to SEQ ID NO: 10810
  chr16:77247376-77247789
  hyper

SEQ ID NO: 53300 - DNA, 202 bp, Homo sapiens; identical to SEQ ID NO: 10811
  chr16:77468255-77468457
  hyper

SEQ ID NO: 53301 - DNA, 153 bp, Homo sapiens
  chr16:77469028-77469181
  hyper
gggctcgtccgagcccccgggctggtgcaagggcgtgggattcccggctccagctctgagggagggggcgaagggggcggggaggctgggtgggagtgatagggagggagggaccgaccgccatgagaaggaggggagcgcccagggtcaggc

SEQ ID NO: 53302 - DNA, 30 bp, Homo sapiens
  chr16:77547051-77547081
  hyper
ggatattacacaccacggcgtagaaaggaa

SEQ ID NO: 53303 - DNA, 30 bp, Homo sapiens
  chr16:77579671-77579701
  hyper
ggcaacgaagagctacgtgctcaaggctgt

SEQ ID NO: 53304 - DNA, 30 bp, Homo sapiens
  chr16:77586643-77586673
  hyper
tagaaaggacaccaccgggctgccacagca

SEQ ID NO: 53305 - DNA, 30 bp, Homo sapiens
  chr16:77587954-77587984
  hyper
ccatgagcaagcgtgcgtgcacacacacac

SEQ ID NO: 53306 - DNA, 30 bp, Homo sapiens
  chr16:77602331-77602361
  hyper
tgggtcactggctcacgcatttgtacatta

SEQ ID NO: 53307 - DNA, 30 bp, Homo sapiens
  chr16:77616137-77616167
  hyper
aaggtctgctcttcccgggtgttttgggat

SEQ ID NO: 53308 - DNA, 30 bp, Homo sapiens
  chr16:77648978-77649008
  hyper
tatcacgggaactaacggaacaagaaatca

SEQ ID NO: 53309 - DNA, 30 bp, Homo sapiens
  chr16:77671843-77671873
  hyper
agagacgcaactcaccgtactgtgaaagat

SEQ ID NO: 53310 - DNA, 30 bp, Homo sapiens
  chr16:77724574-77724604
  hyper
cacctcctacaatggcgattgcaattcaac

SEQ ID NO: 53311 - DNA, 256 bp, Homo sapiens
  chr16:77747178-77747434
  hyper
tactcatgctattctcgcgatctttccgctaatagcagtcaatcacagtggctgtacattctgtgtgtacaccctgtgatgttacgcaggataccctcgcaatctttttactaatatctatcaatcacaatggctgcacaccctgtgtgtacaccctgcgtgtataatctgtgatattatgcatatttatgcatagtatcctcacgatctttttgctaatgtcacagtaagtgtacacctgcgatattaactatgg

SEQ ID NO: 53312 - DNA, 745 bp, Homo sapiens
  chr16:77756210-77756955
  hyper
cccggccctaagtcccgccccgcgcctctccccacctcaagtcccgcctctggctataagccccgccccgccccgatcccggcctccgatcccagatctcgcaccgccccgccccctgtctccgccccagacaccaccccgcctcgtgctctaagccccgcccctctctctggctttaggccgctcccaagcccagagctgctctgcgcaagcgcgaccgaccgagcagctccgaggagtccgcccggaaacaaacattccccagggcaatgtcacgacttggtcttcccgaggagccagtcaggtaaaggctttccgggccctggcaccccgagcttggtcaggcccggccttgatcgtagcggaggccaccggggccttttggccgggactgattttgcagctcccgccagtccacctgcgagcgccggatgggggagcactcgcctccagcaacccgcagggtccccgaacctttgcactgctctggccaggaacagagccggcttaagccagtatggtttacatacacgctgctccccttcccagccggcttggctgttctgcaatccgcgtctccagagttggaccccaggacccccgacagtggcacagacccgcagcaggcagccccggattcaagtcccccggtggctactttcagttgtgaccttgggtctgtcagtttcgtaaactctctgagcctggaggtgaccctgtgatcacttgccgggctgttgtgagg

SEQ ID NO: 53313 - DNA, 30 bp, Homo sapiens
  chr16:77762427-77762457
  hyper
ccagcctgcaaagttcgtaaatctcttaat

SEQ ID NO: 53314 - DNA, 30 bp, Homo sapiens
  chr16:77763011-77763041
  hyper
aaaaaaataactgaccgcttttgtgcttag

SEQ ID NO: 53315 - DNA, 1201 bp, Homo sapiens
  chr16:77822119-77823320
  hyper
agggcaaccttgtcgcggtaaggcatcctccaggcccagacattagtctcggtccatttcaaggcacccgagcctgtgccgtatataaccaagtactgggcccacaggaagggggatgacagggtggtctctctaggctcgttttagtcacagatcttcggcaaatttgggtttagggccgcgatcccgaccctaacttgggactatttcaggaactggagttgaggcttcgttgggacaggaaagaagggtggggcgggggtgaagcgcttagggcacggctcttgtgaggattacggcggaggctgtggaccgcggcggcgctcgcagaggctgcagccattgcacagccgagcatcccacattcaacaggaggaacccgcgggagaggagccccactcccccagcgccgcagccaccgcagccaccgcagcccgtgcgccccgcgccctcgagcgccatggccaaggaaggcgtggagaaggcggaggagacggagcaaatgatcgagaaggaggcaggcaaggagccggcggagggcggcggcggcgacggctcgcaccgcctcggggacgcccaggagatgcgcgcggtggtgctggctggcttcggggggctcaacaagctgcggctcttcaggaaggccatgcccgagcctcaggacggcgagctcaagatccgcgtcaaagcctggtccagtatccgcgcctttctcgctttctctctttttgcgcgctgggcgctggggagggggtgggaaagctgcggctgggatgctgcccgggtagaaccgccgcgcgcaccccctccgcgccctcacccgggtctcagagcctccccgggccaaagctggggaggatgcagaggggcggcctccccaagccagatctaggggtgacgggaggagaatgtgagctcctgggcgcggggagaatgctggcgcccaggcaccccgggtctggaagattgcgctacgggagttctccgtctgagaggacaactcagctttcgcacgggagggttgatgcttaacagaattaaaaatatatgtattaagaaccgcaagcccactgtgtgccagccgccgttggtagttttacacgtgcgatcttatttaatacttcctgggacctaatgagtcaggtgccatcatgatccgtttacaggtaagaaagccgccgctcagcgagaatgagtgatt

SEQ ID NO: 53316 - DNA, 30 bp, Homo sapiens
  chr16:77823708-77823738
  hyper
ctcagctgaaattcccggggagagtttaag

SEQ ID NO: 53317 - DNA, 30 bp, Homo sapiens
  chr16:77899998-77900028
  hyper
gtttacacaaccctccgtcctagcaaacct

SEQ ID NO: 53318 - DNA, 30 bp, Homo sapiens
  chr16:77927454-77927484
  hyper
gaataattactactacgactgctactacta

SEQ ID NO: 53319 - DNA, 30 bp, Homo sapiens
  chr16:77962994-77963024
  hyper
gccaccgtgcctagccgctctattattttt

SEQ ID NO: 53320 - DNA, 30 bp, Homo sapiens
  chr16:77971144-77971174
  hyper
tcatcgtcctcctcacgcaaatcagttgaa

SEQ ID NO: 53321 - DNA, 359 bp, Homo sapiens; identical to SEQ ID NO: 10815
  chr16:78079827-78080186
  hyper

SEQ ID NO: 53322 - DNA, 30 bp, Homo sapiens
  chr16:78105624-78105654
  hyper
ctccaaactggatgacggagccaaacctgg

SEQ ID NO: 53323 - DNA, 30 bp, Homo sapiens
  chr16:78136813-78136843
  hyper
aagatgcacatgacccgcttccggcttcct

SEQ ID NO: 53324 - DNA, 30 bp, Homo sapiens
  chr16:78139042-78139072
  hyper
tgcccaaggcagccccgcaacaaagaatga

SEQ ID NO: 53325 - DNA, 30 bp, Homo sapiens
  chr16:78139972-78140002
  hyper
acaggcgtgagccaccgtaccccgccactc

SEQ ID NO: 53326 - DNA, 30 bp, Homo sapiens
  chr16:78162151-78162181
  hyper
agtgaaccggatgtccggtaacagggttgc

SEQ ID NO: 53327 - DNA, 30 bp, Homo sapiens
  chr16:78190461-78190491
  hyper
tagtctggcgaaatacggagattggagggt

SEQ ID NO: 53328 - DNA, 30 bp, Homo sapiens
  chr16:78211269-78211299
  hyper
cccctaaactgtcatcgatgccagcgcctg

SEQ ID NO: 53329 - DNA, 30 bp, Homo sapiens
  chr16:78224740-78224770
  hyper
ttcatgtcatgggttcgctatactttagtt

SEQ ID NO: 53330 - DNA, 30 bp, Homo sapiens
  chr16:78232227-78232257
  hyper
cccatcccccgcatccgatacacatgcaag

SEQ ID NO: 53331 - DNA, 17 bp, Homo sapiens
  chr16:78244367-78244384
  hyper
cctgacacacacacgcg

SEQ ID NO: 53332 - DNA, 30 bp, Homo sapiens
  chr16:78279709-78279739
  hyper
acccaagtgcctgggcgcttccaggtcata

SEQ ID NO: 53333 - DNA, 30 bp, Homo sapiens
  chr16:78305114-78305144
  hyper
acagatggtttttttcgtccacctgagttt

SEQ ID NO: 53334 - DNA, 30 bp, Homo sapiens
  chr16:78315504-78315534
  hyper
gaaaacaggcataaacgacatgtaaaggag

SEQ ID NO: 53335 - DNA, 30 bp, Homo sapiens
  chr16:78322867-78322897
  hyper
caagcaaaactaacacgcagtgggaaggtt

SEQ ID NO: 53336 - DNA, 30 bp, Homo sapiens
  chr16:78353748-78353778
  hyper
aggcatcacctcacgcgtcttttctgcctg

SEQ ID NO: 53337 - DNA, 30 bp, Homo sapiens
  chr16:78389209-78389239
  hyper
gtgtatggtgctgggcgcagtggctcacgc

SEQ ID NO: 53338 - DNA, 33 bp, Homo sapiens
  chr16:78425002-78425035
  hyper
tactgtggaaccacccgccgtctgccttctgtg

SEQ ID NO: 53339 - DNA, 30 bp, Homo sapiens
  chr16:78426875-78426905
  hyper
tcggccagtgtgtctcgggtcaaattattt

SEQ ID NO: 53340 - DNA, 30 bp, Homo sapiens
  chr16:78427365-78427395
  hyper
ggcaacgtagtgagacgctgtctctatatt

SEQ ID NO: 53341 - DNA, 30 bp, Homo sapiens
  chr16:78440058-78440088
  hyper
tttgcaaaatcactgcgtcagtttactatt

SEQ ID NO: 53342 - DNA, 30 bp, Homo sapiens
  chr16:78469105-78469135
  hyper
gcacaatgaattggacgaaggttgcaactc

SEQ ID NO: 53343 - DNA, 30 bp, Homo sapiens
  chr16:78472794-78472824
  hyper
ttcgtgaaagccaaacggggtaattctgcc

SEQ ID NO: 53344 - DNA, 30 bp, Homo sapiens
  chr16:78498424-78498454
  hyper
cttgaatcttcatgacgatccttcaaggga

SEQ ID NO: 53345 - DNA, 30 bp, Homo sapiens
  chr16:78536379-78536409
  hyper
gaaagtttatccctgcgacagcatctacca

SEQ ID NO: 53346 - DNA, 30 bp, Homo sapiens
  chr16:78553779-78553809
  hyper
atactattttgggatcgcagcgtgaatgga

SEQ ID NO: 53347 - DNA, 31 bp, Homo sapiens
  chr16:78601896-78601927
  hyper
tctgttcactactccgcgaattgaaggcggc

SEQ ID NO: 53348 - DNA, 30 bp, Homo sapiens
  chr16:78623286-78623316
  hyper
taccttgttggtatccgcagaggttgtctt

SEQ ID NO: 53349 - DNA, 30 bp, Homo sapiens
  chr16:78630606-78630636
  hyper
ctagtagaaagtaagcgaagccctttcatt

SEQ ID NO: 53350 - DNA, 30 bp, Homo sapiens
  chr16:78642781-78642811
  hyper
tgaatggtctgacctcggaaacttcctata

SEQ ID NO: 53351 - DNA, 30 bp, Homo sapiens
  chr16:78654270-78654300
  hyper
ttcctccaacagactcgtgtagaagtttct

SEQ ID NO: 53352 - DNA, 30 bp, Homo sapiens
  chr16:78669362-78669392
  hyper
tgcacaattagaagtcgtgcacctgggttc

SEQ ID NO: 53353 - DNA, 30 bp, Homo sapiens
  chr16:78765279-78765309
  hyper
tgcacactaatactacggctccttgggaaa

SEQ ID NO: 53354 - DNA, 30 bp, Homo sapiens
  chr16:78769948-78769978
  hyper
acagggattcggcttcgcttgctttatcaa

SEQ ID NO: 53355 - DNA, 30 bp, Homo sapiens
  chr16:78781892-78781922
  hyper
ctccaagtccatctgcgccgaagagtattg

SEQ ID NO: 53356 - DNA, 30 bp, Homo sapiens
  chr16:78791482-78791512
  hyper
gtgtattttgaaagacgtatgtaaaaacat

SEQ ID NO: 53357 - DNA, 30 bp, Homo sapiens
  chr16:78859167-78859197
  hyper
cagcagcatgatggccgcgcgaatttccaa

SEQ ID NO: 53358 - DNA, 30 bp, Homo sapiens
  chr16:78923314-78923344
  hyper
gtctgcaatgaaacgcgagccgacttgatg

SEQ ID NO: 53359 - DNA, 30 bp, Homo sapiens
  chr16:78949111-78949141
  hyper
tcatttgggttgtaccgattaagagggttc

SEQ ID NO: 53360 - DNA, 30 bp, Homo sapiens
  chr16:78974715-78974745
  hyper
agaagaggttgatcccggtgtaatgtacag

SEQ ID NO: 53361 - DNA, 30 bp, Homo sapiens; identical to SEQ ID NO: 10816
  chr16:79048507-79048537
  hyper

SEQ ID NO: 53362 - DNA, 30 bp, Homo sapiens
  chr16:79125383-79125413
  hyper
gggatttatgatcttcggatttggctcttg

SEQ ID NO: 53363 - DNA, 30 bp, Homo sapiens
  chr16:79128792-79128822
  hyper
gatcagcgtcgtgggcgatttttttcactt

SEQ ID NO: 53364 - DNA, 206 bp, Homo sapiens
  chr16:79632610-79632816
  hyper
gcccacacccgagccggacccccgcggagcacttatcagggtggctagctggaatcgcgtgtcagactcacatgaaaaactcgggagaggacgggttgtcgctgctcgagccgttttctcggaagccgctgctcaccaacttctcgtatttctccttgtacgcgtccctctcgcgcaccagcctggagatctcctgcttgaggtgg

SEQ ID NO: 53365 - DNA, 320 bp, Homo sapiens; identical to SEQ ID NO: 10818
  chr16:79633073-79633393
  hyper

SEQ ID NO: 53366 - DNA, 285 bp, Homo sapiens
  chr16:79633613-79633898
  hyper
cgtgctcatgggggtggaggacagcgagcccccggcgatgagacggccgcactggctgatgatgcggtcggtctccaccggttcctttttcacttcaaacttcatcagatcgaagtcattaacatattccatggccaggggactggtgggcaggtcggagttgctcattgccagttctgatgccattctcctgccgccgccgccgccgccgccgccgctccgccagatgggctgcaggagaggggccagcgggctgtgctgggtggccagcgggtgagccagctt

SEQ ID NO: 53367 - DNA, 240 bp, Homo sapiens; identical to SEQ ID NO: 10820
  chr16:79634184-79634424
  hyper

SEQ ID NO: 53368 - DNA, 777 bp, Homo sapiens
  chr16:79634970-79635747
  hyper
gacaggcctcccatccggagccccagctcgctgggggctcactcggctgggattggcctgattcccctcccctgcctgccctccacccccaggattgtgaattcgcctcccagcttttcctcctcgcaccaactctggtacccaggtgtctgccggggaccttccttccctgagcctggccgtgcccggcgctcaaacttggccccaactctttgtccgtctctcgggcgcccgtgcggggaagggaccgggaagggagggatgcagtggggtgtccggatcggggctgcgggctgggcgccgcccggccatgcgcctgcccagaaggctgggcatccgtggagagggaaagcccattttatccctctctttacaacgaggtaaaataagttgtttagaggccattcttcacggagaccggctgcccgctggcgtcgcgtgcccttggacagagcgagcgcctatgcgagataactccggggaagctcaaagtcaggtcagccgggctcagccttccggctcctgactggccggagtttggcctttgagactcatattgcgcgctcgctctctctctctcttacacacacacacacaaacacacacacactcacactcacccgtccccttacgaaatctgacctctgtttatcagggtcaggcgcgccctttgcacttttacgtttcctttaattatttcggacttgatcgtggcagggagcaagggggaaaaacaataccccagccctcaccagctaccctcgaagggttaaattt

SEQ ID NO: 53369 - DNA, 104 bp, Homo sapiens; identical to SEQ ID NO: 10822
  chr16:79636190-79636294
  hyper

SEQ ID NO: 53370 - DNA, 134 bp, Homo sapiens
  chr16:79804423-79804557
  hyper
ggtaaaccttccaccggcccgagctccgcgacgccgcgcccccagccccgccccgccttaaaaaaaaaaaaaaaaaagaagaagagaaagagccgccgggagaagcgcggacgccgccgcttcccgggctccag

SEQ ID NO: 53371 - DNA, 102 bp, Homo sapiens
  chr16:79804596-79804698
  hyper
cgccattggtccatccgcctagcaacagccgcggccggaccaatgggagccgcgaagcggccggccccgctccagaaacttggctgcggagaagttcgctgt

SEQ ID NO: 53372 - DNA, 30 bp, Homo sapiens
  chr16:80471689-80471719
  hyper
gggaaattgcacctccgctgttgagattta

SEQ ID NO: 53373 - DNA, 608 bp, Homo sapiens
  chr16:80574537-80575145
  hyper
cttccggtactgtttcgtgcattttgtttggtgcattttgtccgtctccctggcacctggtgggtggtgaatcagcagtttttgaacgaataagtggttatcacattaattcgtgcctcaatgaatgaatgaatggacaaacacaggccgggagcctgacccacttccctcttccctcccgggacccactgctccaggattgggcgaacctcaggtgagcgcctgctcccctcttccgcgaaccttcgcctacggcggccgggaggcatcaggagcgcggtcagggcgaaaaagccgactcgcgagcgcgcaggcgcagccctgacgcttccgtggggccacttccttttttgtctcctagcaacggcgggtagcgttgttgacatcccgggaggctgtgccgccggcctgagcccagagtttcgcggcctccgcgatggtaaatctggggtctccgtccacgccccgccgttccaagcacgccgaccgtcaaggaccttcgcacccagcttctggggcccacccaggcacgggcggtccaggggccgcggcggaggctggtggctccaggatcttcctggaggggcgagagggagaccttggaaagg

SEQ ID NO: 53374 - DNA, 30 bp, Homo sapiens
  chr16:80650789-80650819
  hyper
gatgagctaataggcacagagagatccatg

SEQ ID NO: 53375 - DNA, 65 bp, Homo sapiens; identical to SEQ ID NO: 10824
  chr16:80837506-80837571
  hyper

SEQ ID NO: 53376 - DNA, 40 bp, Homo sapiens; identical to SEQ ID NO: 10825
  chr16:80838371-80838411
  hyper

SEQ ID NO: 53377 - DNA, 31 bp, Homo sapiens; identical to SEQ ID NO: 10826
  chr16:80838938-80838969
  hyper

SEQ ID NO: 53378 - DNA, 299 bp, Homo sapiens
  chr16:80966018-80966317
  hyper
gggggagtcggcagcgccgcctgggacagagcttgccgcacgctgacctactttctggggccgatgtgtttgcagccagaggtaccgcggagccaagcccggagcctcggggagccgccagcgagcgcagactgggagggagccggccgggctccccgccaccccttcctccgcgcgccaagacctgtcagtttcacccagcccggcttccctggaaaggcgggatccctctgcagatttccaggctcttggaagaggaccggcgcgtctattaaacccgagtcgctccacgggctctc

SEQ ID NO: 53379 - DNA, 30 bp, Homo sapiens
  chr16:81040002-81040032
  hyper
aaggtccattttaccggcgaggaagccccg

SEQ ID NO: 53380 - DNA, 30 bp, Homo sapiens; identical to SEQ ID NO: 10828
  chr16:81040585-81040615
  hyper

SEQ ID NO: 53381 - DNA, 446 bp, Homo sapiens
  chr16:81110795-81111241
  hyper
agagctactcaggtcgctgccggatgggccgttgccttgggttacgaccacgctgggggcgggaccgcggcggaagtgacgtagcccaacaaagcctagcactggcgaggcggttcgtggcatctcctatccgctccgggcgctgccgccggaagggccagcgacggagggtctcagatggcggggcttgaggcccacccgggctctcgggtcggcgagtcccgttggggagcccttgtgcctgctaggatatttagcagatgccaggcggccagaaacgtcctcacttttctccctcggccctctggggaaccgccgtgagcgtttcccacggacacaaacttaacaggcccagaacgtccagggaggacgcgttgtgagcctcaaagagcccacttacgtgaccgacagcaccaggccgacgggcactcgctgaactgctggcc

SEQ ID NO: 53382 - DNA, 30 bp, Homo sapiens
  chr16:81348357-81348387
  hyper
acatccctccatcgcgggagcgacctatct

SEQ ID NO: 53383 - DNA, 30 bp, Homo sapiens; identical to SEQ ID NO: 10829
  chr16:81437109-81437139
  hyper

SEQ ID NO: 53384 - DNA, 30 bp, Homo sapiens
  chr16:81477849-81477879
  hyper
ttcagtcgggaaggcgtccccgtcccacgg

SEQ ID NO: 53385 - DNA, 31 bp, Homo sapiens
  chr16:81625940-81625971
  hyper
cattccagaccagggtcgcacaaactctggc

SEQ ID NO: 53386 - DNA, 356 bp, Homo sapiens
  chr16:81779772-81780128
  hyper
gtggcacaaacaaggccggcctgctggataaagggaggtagaaacgctttcagccctccccggtgcttcccggtttataacttcatctactcgtgacacgtgggggtccgccgccgccactggcagggtgccttgagtgcttgagttttcgcccccagcacaggtggagaacccaactcccagaaaacatctggggcggaaacggaagcatggccgcagcggtgaacgcactgcattctgggaaatgtagtcgaaacggccgctggggcagagtgagcacccacagtggtgccttctggggagggtcgttttcacgtagtccaagagccaggggtgggaaccgcggggctctcacc

SEQ ID NO: 53387 - DNA, 162 bp, Homo sapiens
  chr16:81812591-81812753
  hyper
acctggactgcggccggctctccaggaatgccatgatattggggaattccctttgcacctggccaagtggcctcgggcaggtagcctcccctcgggttgcctcagtttcttctttggcacgcagaggcggggctccaggcctgggccgctccatggcgggga

SEQ ID NO: 53388 - DNA, 31 bp, Homo sapiens
  chr16:81813435-81813466
  hyper
cttccctgtctcacttcggtggttgcgggtg

SEQ ID NO: 53389 - DNA, 1001 bp, Homo sapiens
  chr16:82660410-82661411
  hyper
aagcaaatgggatgccacctccgcggggctcgctcctcgcgaggtgctcaccccgtatctgccatgcaaaacgagggagcgttaggaaggaatccgtcttgtaaagccattggtcctggtcatcagcctctacccaatgctttcgtgatgctgctgctgatctatttgggaagttggctggctggcgaggcagagcctctcctcaaagcctggctcccacggaaaatatgctcagtgcagccgcgtgcatgaatgaaaacgccgccgggcgcttctagtcggacaaaatgcagccgagaactccgctcgttctgtgcgttctcctgtcccaggtagggaagaggggctgccgggcgcgctctgcgccccgtttctgcattcggatcgcccggcacgggcagggtgagggggctttcggggggtcggggcctccggtcgcggcggcgaagacagatcggggctcggtagggaggtcattccgagcccagagatcctaggcaccccccacacacaggctcccactctggcgtgcgtgtgtgtgtgtgtgtgtgtgtgtgtgtgtgtgtgtgtgtgtgtacgttcgttaacgggaggaggagagagctcccagtccttttttgctagcaggggcgacattctcgcccacatcaagtggggtaactttggttccctcctccggaggctcggtgcattggagaaagactcagttagaggcgactccaacgagccgcggttttccccagcccaacgcccagcggccgaagcgctgctcgggtccggattgcgggatgcggggctggagaggccgagcaggcaccaccgacttcccagggcgcccgggccccctggtacagcccggctgcccgctggaaggcgcctcggggcagcagagagcctcagcccggctgctgctgtcgctcaaaggcgccggcgccggccgcacccgcatcggggtccttttgctcccagaccccgggcccgaaagggccggagcgtgtccc

SEQ ID NO: 53390 - DNA, 365 bp, Homo sapiens; identical to SEQ ID NO: 10833
  chr16:82661468-82661833
  hyper

SEQ ID NO: 53391 - DNA, 30 bp, Homo sapiens
  chr16:83841740-83841770
  hyper
tgagggccggaggccgcggccttcccgggc

SEQ ID NO: 53392 - DNA, 30 bp, Homo sapiens
  chr16:83986687-83986717
  hyper
catgaggcaggcagcgtgacacccgcccag

SEQ ID NO: 53393 - DNA, 30 bp, Homo sapiens
  chr16:84151073-84151103
  hyper
cggtgcgtgcgaaacggaggacctttgtaa

SEQ ID NO: 53394 - DNA, 30 bp, Homo sapiens
  chr16:84178198-84178228
  hyper
aactcaaaccaaatcgttcagaaatgagaa

SEQ ID NO: 53395 - DNA, 178 bp, Homo sapiens
  chr16:84179010-84179188
  hyper
aaagctgcggggcgttcggtgtcgccgaagtaaacatgcaccctgagccctcggagcctgcgacaggtggtgcagcagagctggattgcgcgcaggagcccggcgtggaggagtctgcgggtgaccacgggagcgcaggccgagggggctgcaaggaaggtgccgactgccccccagg

SEQ ID NO: 53396 - DNA, 174 bp, Homo sapiens
  chr16:84328193-84328367
  hyper
ccttgggaggagaccgccccagcctgcaaggaagtgctcattatggagagtggagagtgacaggccactcccggccacgtctccaagcaagccggtgccccctcctcctgctgccaccgcccactgagctgcctgggctgcagacgccctggttggagcgtctggggccagatg

SEQ ID NO: 53397 - DNA, 675 bp, Homo sapiens
  chr16:84401740-84402415
  hyper
ccacctcgctcccggcgccttagagccgcccaccctgggttcctcaagaggatcacctggggctcgttaaaaacccagctcccggcggctccaaaccgtgactgggcagggaggggtctgggaatccggattttaaaccagcatttgctcctccacctcccccactccaggtgattcttaggatctgtaagtttgggaaacagcccaagccctgaggcgacgcagcctctccctgggcctttcatggccagccggcgctgtccccagagcccctggggtcccaggcgagctcgcggggcggggccgggtgagccggcacctccctgtgcgcagccccgccccaggggcggggcctcacctgccgcgggcaggtagacagctacctggtaaccgggtccggcccaggaggcttgggcgcgcgcagccatcccgggcctcgccggggacctagggacgcaggcaacgcctgcgcccgctcaccatggtcgagggacgcgtctccgagttcctgaagaaactcggcttctcgggcgggggccgccagtaccaggcgctggagaaggacgaagaggaagccttggtgagtccccgcgactccgcgccgggcgtgcgacccgaccccccatcccctccgtcgtaaccgtccccggcccgagaccccgcgttcgcgctgcg

SEQ ID NO: 53398 - DNA, 30 bp, Homo sapiens
  chr16:84538316-84538346
  hyper
tccaatcgtggaagcggaggtgtggggcgg

SEQ ID NO: 53399 - DNA, 856 bp, Homo sapiens
  chr16:84650975-84651831
  hyper
cctcccacgccatgcgccaggggcaccccatgtggccaccggttcctcccgggttcgctctggccggggctccccgggtgcagacaacctcccaacgaccgcgcatccgcccggcaggcgcgcctccctacctgtgcactgctggatgaagtgctggtactccgctccctgctcgccggggacgatggtggagccgtcatatttaaaagtcaccctttgggttgggagaagaaaaaaacacacacacacatcagcgctggtggccgcgcgacgcggcgcttgcagaggacaatctaacagacgcgctggccacggagaagcccgcgggggcctggcacgccgtcccggaataaggcgaggaagacagcgcgggaggcccgaatccgtcccgcctggaggccggctcggtgcacgaggccccgcgcgagcccggggagcggggcgtggagacgaatgaaaagttcctaccagatgacggccgagccgtcgtcgcgcaccaggttgtacgccgcccggcaagcctctttgtcgatcttggtggccatcgccgcggagccgcagcgggacactgtccggggcggccgagcgcgcccctggccggcggcggggatgggagcgcggcgggtacgcgccgagggcgcacgggctggcggcggtggcgacggctacgcggcgcctgcaagctgcgagcgcggcggcggcttccactgcggacggagagcgcgcggggaccccaggccgtggcccgccccgcccccccgcgcccattggccgcccaggcggcggcccgcctcttcattggccgtcgggctgcgggggcggagcgtcttgattctctggcggccaatcccagacc

SEQ ID NO: 53400 - DNA, 31 bp, Homo sapiens; identical to SEQ ID NO: 10837
  chr16:84652627-84652658
  hyper

SEQ ID NO: 53401 - DNA, 30 bp, Homo sapiens; identical to SEQ ID NO: 10838
  chr16:84682716-84682746
  hyper

SEQ ID NO: 53402 - DNA, 62 bp, Homo sapiens
  chr16:84733967-84734029
  hyper
gagggcgtggagggcgccgaaggggttaacctccctggggctggaccgcggggcgagcccgg

SEQ ID NO: 53403 - DNA, 500 bp, Homo sapiens
  chr16:84853365-84853865
  hyper
tccttgtccctagccggccctggaggccagcggccccgccttcctcgcccacccggcgcccgcgcctcagctgccccccgcctccttcagcccgctgagcctgcggggcggggccgggggcggggccggtgatgctcggtcctaccagcgccgccagcgatctgggggcgtggcctccgggctccggggagcctacaagaggcggtacgctgagccccggcacccactcgcatcccagggcgtctccggctgctcctattgagctgtctgctcgctgtgcccgctgtgcctgctgtgcccgcgctgtcgccgctgctaccgcgtctgctggacgcgggagacgccagcgagctggtgattggagccctgcggaggtaagtgtgatttccatgcttctcccttttgcaaactgttacccccccgagaagctggaataactaggacagatgccacctcgcagggctgactgtgtgctggcaccacaccgagtgctctgcttg

SEQ ID NO: 53404 - DNA, 30 bp, Homo sapiens
  chr16:85045103-85045133
  hyper
ccttggctggagagcggggcggtgcgagcg

SEQ ID NO: 53405 - DNA, 65 bp, Homo sapiens
  chr16:85143909-85143974
  hyper
ggagttggcaaagtcgatgagctgcttgaccagctggtccgccttgtcccgcagccgggccgtct

SEQ ID NO: 53406 - DNA, 267 bp, Homo sapiens
  chr16:85202617-85202884
  hyper
cgcagtttgggacgcggggggaggcggcggcgggcgggagggaggcaggcttggaggaggagggcggggggagggagcgcgcggggagggattcccccgcccgccgcgcgcccgccctccgcccctccccgcccctcccgcccgccgccgccccgccccctcctccccaattaaatgaccccacgccttggcaggcgccggagctcgcacatgcggctgccgctccagccgcccgggccccgccgccgccgccgccgccgccgccgc

SEQ ID NO: 53407 - DNA, 152 bp, Homo sapiens
  chr16:85205737-85205889
  hyper
gttcggggcatgtctgtcatccgcctgataacattggtaattagtccagccgtgcgggtcacagagaggtctccgtgctcacccggtttgaaacacatcagaggtggaagttcctctccgttctagctcccgtgtggcttggcttttccaga

SEQ ID NO: 53408 - DNA, 110 bp, Homo sapiens; identical to SEQ ID NO: 10840
  chr16:85482268-85482378
  hyper

SEQ ID NO: 53409 - DNA, 30 bp, Homo sapiens
  chr16:85496157-85496187
  hyper
cacttgaactgtcacggcggagccttaatt

SEQ ID NO: 53410 - DNA, 806 bp, Homo sapiens
  chr16:85589832-85590638
  hyper
agcgccgtggcttgaacggtgctttttgttcattcctgggttttaatattattttccttcttcatccctctctggccactatggaattctaatttgaaccatgtttggattgaagccgcctctgtattacttaccaggtaagcgagccgtgcgcctccctgggtcccgcgcggcgccggcgcgcccgggaccctccctcacccgacccccctccgccagacccccgagccagggtcggggcattgggtccgccggtgccccccgcagacgcgcgcggcctcggatcctcccgctgcggtcaagcccgcggtgtgcgcggctacgtgcggcggggagcgcccacctggcccgccgcccccatcgcgccgccgccgggggttgcgcgtctcgctccttttgtctgccgggagccggctccgccgcggcggcggagcgagcggccgaggcacttaaaccttccaaggtgaagtaagcgccgagtgtgaagttactttcctgcaggccgccccgatcgggtagcatgccccccccccccccagtcctggggtttatttccctctccctccagccaacccccttgcgcggtctcggcgcgagcgtggctcgccggcccccccgccgccccccttcctgcctgggattccctggaaggttttgttccgccgaggtcggaggagggggccggggaagctcaggagggtatttggcgtggcttcctgtttccttaaccttcctgcgcggtgacagccgcttgccctgtaactttctgtttcggggcaagtcgcgctttcagcctggaggggagg

SEQ ID NO: 53411 - DNA, 30 bp, Homo sapiens
  chr16:85646174-85646204
  hyper
cccccgcagcggcccgcaattgtggccttc

SEQ ID NO: 53412 - DNA, 30 bp, Homo sapiens; identical to SEQ ID NO: 10842
  chr16:85722649-85722679
  hyper

SEQ ID NO: 53413 - DNA, 861 bp, Homo sapiens; identical to SEQ ID NO: 10843
  chr16:85932119-85932980
  hyper

SEQ ID NO: 53414 - DNA, 778 bp, Homo sapiens
  chr16:86320339-86321117
  hyper
gggcagcagccgccgcggcggtctgggacgcgggtgtcgccttccacgggacttgggtccagggacccaagacggggatctgggaggagggggatgcccttggggcctgagacccgggcggtttccgaagcgaagtagttacccagaaccgctccctaccttctccccgcctccctgtctttctgcccctctgtcccctgcagctgctcggccctccctcctctgaaacccaccgcccgcccaaggctcactccttcctgctgttcccgcccgcgaagctgttgcagggacggtgcgcccttgggctgcactcaccaccgcccctcgcccgcgacgtcctggccccctaaccccagctttcccgccgccgctcactcccgcgctccgctgcagctcagcccggtctgcaactctccctctgttttctgccccgctcctcagttctgcgctctcctcttctccaggcttccctctcctcctccttctgcctctcccctgtccccgttccattctcctgcgcccctcgccagcgcgctcgcagcccatcggctcctgccggggcccctctggtgccagccgccttcaggctgtgggtccgtccgctggtggaggggaaggtcggggctggccccgggccccgcgctgctgggccccatggtcagtggagacgcctcctggtctcccttcagagctcctcgtcgtcgtcggagtcatcggaggaccaggaaggaggaccccccaccagctgccgcagcctctgctgcgaatccccccacac

SEQ ID NO: 53415 - DNA, 484 bp, Homo sapiens
  chr16:86334430-86334914
  hyper
gcaaataggattttgtttccccgacgtccaggctgagtgcagccagatgggatgacttgacaaagtcacaaacgctgacaaatcccggcgggggagttgtggcttcctccaaaggaaggtaggtctgtgtttgtcaattgatcagctcagcggtggccctgagtgaggccgtgaggaaagtaactccgtagttttaattctgatgattacttcctgaaaaaggaccctgcaatggtgggtccaacctcctccttccctccgtctctgccagtcgctcggtctctgtctgtgctcccctccagctgcctgtccctccccctcaatgggggcttaggggcccagctcaccactcacgctcccacaacgtccagcgtccatgcctgcagcctgtttcctgggaatttcagtccatgtggagcaagaggccagtctcctgctctgagcccaggagggcacgtcctccgccagctctcagcactggctc

SEQ ID NO: 53416 - DNA, 30 bp, Homo sapiens
  chr16:86478175-86478205
  hyper
gagggggcgaagtccggctgttggccgcca

SEQ ID NO: 53417 - DNA, 52 bp, Homo sapiens
  chr16:86530940-86530992
  hyper
ccgcctgccgagccccgagtcccggcaacgcgccccgggtgctccggtccac

SEQ ID NO: 53418 - DNA, 272 bp, Homo sapiens
  chr16:86531016-86531288
  hyper
cggccgaggtggcttcgggtggctctgaagcctcggtcttcccggctcccaggacgccccccccgcccccgcccctccattcagcctgtcatctcggccctccgccgcctccggagccccgacggaggtgctgagttgtcaacgcaaattcctagttaagccacttgttgataaaccctctaggcaaattggttccgtctttacctgcccgccccgcccccgcccccggccccagccggcgcgcccctaattgctggaggagctcgacgccg

SEQ ID NO: 53419 - DNA, 106 bp, Homo sapiens
  chr16:86531374-86531480
  hyper
cgggaggtgagacgcagcctgggacctccggcctggggttggaggcccacgcttgctggggtgggcttttggtggaggaagagcaatcatgcggagggctctgccg

SEQ ID NO: 53420 - DNA, 128 bp, Homo sapiens
  chr16:86531527-86531655
  hyper
cgttccctggttcacaaccaccccacccccacgcgcctgtgcacatgtccctcccgccgcgcagggtctccgcgggcgcgccccgccccaaatagagcttactacagtaacccgggagtctcacatct

SEQ ID NO: 53421 - DNA, 243 bp, Homo sapiens
  chr16:86531701-86531944
  hyper
cggcccgcacccgaccaaattttaaaaattgggagggttttggggactgcaatggaaaatcagctggccccggccccagactccgtctacactggcacagacaggtggagtacaaagccggcttcctggatgattcaggccccaaatcgtaggtagaaatgtgcaagtaatggaccttcgatctgctttccctcccttagcacataatccgtagtattcgctgtttcccgttgcccctataga

SEQ ID NO: 53422 - DNA, 5 bp, Homo sapiens
  chr16:86532207-86532212
  hyper
tcccg

SEQ ID NO: 53423 - DNA, 443 bp, Homo sapiens
  chr16:86532408-86532851
  hyper
cgttgcagctctggcgttcctggaccccgggcgctcaggcgcgcacccctcccctgggctggtgaaggtataataaacacggcgttcacgccggcaggacccatcattagcccaaaccgcggtggaaaggagcgctcggttgcagagctagaacagcagttaccagccggggctgcctggcaccctcccgccgccgccggcgccttcctggccgccgagctgcctcgcagccaggtcccaatgccgaccccaaggcgtgccgcccctggaacccgcgggggtcccaggtccacgccaaaagaaacgcgctctgcttctcccgggcgtcagatgcaccgcctcggccggacgccagccctggacaaatttttccgggaaggcgacgtaaagaatgtcagacttgcaaaaccagagtgcgcctcggttgcttaaaatggagagag

SEQ ID NO: 53424 - DNA, 30 bp, Homo sapiens
  chr16:86539007-86539037
  hyper
gtatctcaggtatccgtacacagatcttct

SEQ ID NO: 53425 - DNA, 63 bp, Homo sapiens
  chr16:86539363-86539426
  hyper
gctgccctcgcggtgggtggtcggcggccccctgccccgcccgcgcggccggcctgggctccc

SEQ ID NO: 53426 - DNA, 43 bp, Homo sapiens
  chr16:86539463-86539506
  hyper
cgctctcggcccgggcggcttcgcttaagcaattagctagtaa

SEQ ID NO: 53427 - DNA, 30 bp, Homo sapiens
  chr16:86541751-86541781
  hyper
cacactacgggtcacgtcccacactcattc

SEQ ID NO: 53428 - DNA, 30 bp, Homo sapiens; identical to SEQ ID NO: 10846
  chr16:86542407-86542437
  hyper

SEQ ID NO: 53429 - DNA, 79 bp, Homo sapiens
  chr16:86542774-86542853
  hyper
gtggcgtgtgtacgcgtgagtgggagtgagtgcgaacttaagctcctgtgggccttaagcttccgtgtcaacgagtgca

SEQ ID NO: 53430 - DNA, 396 bp, Homo sapiens
  chr16:86543368-86543764
  hyper
cagggctgtgcgcgtcggggaaggccccggcccagggagcgtttcccgccgcgccgcccgggcggggaaggcggggtccagcgcgcaccggggctgaaccgcgggcggagggcgcattaacacttgctcgccaggttggtggaggcggggcggattctgctggcggccgcggggcggcgagagtgggggctctttaagcgcccaccaacgcgggggcccgaggggggcagggacggagggagggaactccgggagggtcttaggccgacccgcgagacgcagccgagcggagatggagtgaaggctgcctcgcccggaatctcggagccgagcgccgcgggcggcggggactcagggctgctcccggctggggcgcacggccgtaagacctggagg

SEQ ID NO: 53431 - DNA, 585 bp, Homo sapiens
  chr16:86543972-86544557
  hyper
gcgcgggggcgggcgcgccgcggctcgctcgggagaagtggccgccgatgacggcagaggtgcagccagccccgcgcgcgcagccccctccccttcgccctcctcccccccgtcgtcctcttcctcctcctcctcctcctcctcccggcccgtccgcggcgcagagcagcggcggcagcggcggcggcggcagcagccacccgatgtcttcggcgcccgagaagcagcagccaccgcacggcggcggcggcggcggcggcgggggaggcggcgcggccatggaccccgcgtcgtccggcccgtccaaggccaagaagaccaacgccggcatccggcgcccggagaagccgccctattcctacatcgcgctcatcgtcatggccatccagagttcacccaccaagcgcctgacgctgagcgagatctaccagttcctgcagagccgcttccccttcttccggggctcctaccagggctggaagaactccgtgcgccacaacctctcgctcaacgagtgcttcatcaagctacccaagggccttgggcggcccggcaagggccactactggaccatcgacccggcca

SEQ ID NO: 53432 - DNA, 53 bp, Homo sapiens
  chr16:86549502-86549555
  hyper
ggttgcgcgtggctttggcgccgctggactagcgtccagggcggcggcaaagc

SEQ ID NO: 53433 - DNA, 88 bp, Homo sapiens
  chr16:86549624-86549712
  hyper
cggggcgggaggcacccaggggggcttgtgcaggaaaaccggtccggattgcccgaggacggtgaccggcctcggtcttccggcctga

SEQ ID NO: 53434 - DNA, 30 bp, Homo sapiens; identical to SEQ ID NO: 10847
  chr16:86567476-86567506
  hyper

SEQ ID NO: 53435 - DNA, 78 bp, Homo sapiens
  chr16:86599306-86599384
  hyper
acttggaggctcccagggggacgttgccaggagcaggaggcagggacagcgccctagggtcggtgttagcggccggcg

SEQ ID NO: 53436 - DNA, 433 bp, Homo sapiens
  chr16:86599480-86599913
  hyper
cgggtttctcctcgcagggcccaggaactcggctctgcctggcccgggtgggtcgctgcattgtcccggtcttctgggagtgcggggtcagcttgttagagggaatttctacctgggaaaagggagacgagtttcgaagctgaagttggtaggctgcgagtgtccacgcgggagacgaaagggggaaatagcagagtcacttcacccttttccccaaaccccacaaaactgctcgcagcgacgcggatgatctaccgaattccccgcgaattcggaggattaagttgtcagtcagcacgttgctaccttcccctctatgcactccgctgcctggctcctcggcggggagcgagggaaactcagtttgtagggtttacctctaaaacctcgataggttatccttgacgaccccgagcctggaaactccctgttg

SEQ ID NO: 53437 - DNA, 383 bp, Homo sapiens
  chr16:86600294-86600677
  hyper
ggtcttagagccgacggattcctgcgctcctcgccccgattggcgccgactcctctcagctgccgggtgattggctcaaagttccgggagggggcgtggcccgaggaaagtaaaaactcgctttcagcaagaagacttttgaaacttttcccaatccctaaaagggacttggcctctttttctgggctcagcggggcagccgctcggaccccggcgcgctgaccctcggggctgccgattcgctgggggcttggagagcctcctgcgcccctcctcgcgcgggccgagggtccacctgggtccccaggccgcggcgtctccgctgggtccgcggccgcccgcctgcccgcgctgccgccgccgggtcctggagccagcgagga

SEQ ID NO: 53438 - DNA, 928 bp, Homo sapiens
  chr16:86600888-86601816
  hyper
cccccggccgcagtccgtgcgcgagggcgccggcgagccgtctcggaagcagcatgcaggcgcgctactccgtgtccgaccccaacgccctgggagtggtgccctacctgagcgagcagaattactaccgggctgcgggcagctacggcggcatggccagccccatgggcgtctattccggccacccggagcagtacagcgcggggatgggccgctcctacgcgccctaccaccaccaccagcccgcggcgcctaaggacctggtgaagccgccctacagctacatcgcgctcatcaccatggccatccagaacgcgcccgagaagaagatcaccttgaacggcatctaccagttcatcatggaccgcttccccttctaccgggagaacaagcagggctggcagaacagcatccgccacaacctctcgctcaacgagtgcttcgtcaaggtgccccgcgacgacaagaagcccggcaagggcagttactggaccctggacccggactcctacaacatgttcgagaacggcagcttcctgcggcgccggcggcgcttcaaaaagaaggacgtgtccaaggagaaggaggagcgggcccacctcaaggagccgcccccggcggcgtccaagggcgccccggccaccccccacctagcggacgcccccaaggaggccgagaagaaggtggtgatcaagagcgaggcggcgtccccggcgctgccggtcatcaccaaggtggagacgctgagccccgagagcgcgctgcagggcagcccgcgcagcgcggcctccacgcccgccggctcccccgacggctcgctgccggagcaccacgccgcggcgcccaacgggctgcctggcttcagcgtggagaacatcatgaccctgcgaacgtcgccgccgggcggagagctgagcccgggggccgg

SEQ ID NO: 53439 - DNA, 372 bp, Homo sapiens
  chr16:86602037-86602409
  hyper
cgtcgcccctgagcgctctcaacctcgccgccggccaggagggcgcgctcgccgccacgggccaccaccaccagcaccacggccaccaccacccgcaggcgccgccgcccccgccggctccccagccccagccgacgccgcagcccggggccgccgcggcgcaggcggcctcctggtatctcaaccacagcggggacctgaaccacctccccggccacacgttcgcggcccagcagcaaactttccccaacgtgcgggagatgttcaactcccaccggctggggattgagaactcgaccctcggggagtcccaggtgagtggcaatgccagctgccagctgccctacagatccacgccgcctctctatcgcc

SEQ ID NO: 53440 - DNA, 257 bp, Homo sapiens
  chr16:86609789-86610046
  hyper
aatctctctctgtctctttctcgctctcttttttttttttttttttttgctttactatcggtgccccgcccaccagcctcccgtgtctccgcccacgtcccgcccattaccaaatcgggcagtatttatcaccgtacaaattcaagctcggatttgccttagagtttagaagacgcgccgggacggcgggagtttcggtagaggcagggatgtgcgtgctggacttcgggtgccgcgtggggagctccaggaggggc

SEQ ID NO: 53441 - DNA, 30 bp, Homo sapiens; identical to SEQ ID NO: 10851
  chr16:86775107-86775137
  hyper

SEQ ID NO: 53442 - DNA, 30 bp, Homo sapiens
  chr16:87312450-87312480
  hyper
cagaacccagcagccgcctcggacgtcctg

SEQ ID NO: 53443 - DNA, 30 bp, Homo sapiens
  chr16:87350810-87350840
  hyper
caacgccgcggggacggtggggaccggctc

SEQ ID NO: 53444 - DNA, 442 bp, Homo sapiens
  chr16:87417757-87418199
  hyper
ccgtgcgtcccgcttccggcgcccgaaactgtgccgcgccggccggtgagtagaaagatgcgccttacagcctccaaatacagaggcagcagccagaaccccaaagggcgcctagaagcccttttgtccattgaaacaacgcgcgttccatcgtctccgccttatggtaaccaaaaggcccgagctgcggagctctgcagggaccttcggggatcccgagctccctgcggaagccccggggagggcttggaggggcggcggccggcgcggcccaagagatccggggatgcgcgcccggtctggaaagggaggccctgccatgcggcgccgcccaaagggcgcctgttcctgcagctgctgggagccgcgcacgcctgctccagctgggctccgccgaggccgctgagcggggtcgtctcccaggtccgcgggtggtgaccgc

SEQ ID NO: 53445 - DNA, 62 bp, Homo sapiens
  chr16:87525617-87525679
  hyper
gtgaggctgcccaggtcggccgggttgttggccttgatctccgagtcgcgcagcgagtggta

SEQ ID NO: 53446 - DNA, 1093 bp, Homo sapiens; identical to SEQ ID NO: 10854
  chr16:87525991-87527084
  hyper

SEQ ID NO: 53447 - DNA, 30 bp, Homo sapiens
  chr16:87622463-87622493
  hyper
tttgcgggtggaatcgcacacacgggaatt

SEQ ID NO: 53448 - DNA, 30 bp, Homo sapiens; identical to SEQ ID NO: 10855
  chr16:87635195-87635225
  hyper

SEQ ID NO: 53449 - DNA, 171 bp, Homo sapiens
  chr16:87635642-87635813
  hyper
gagtcaggggcaggcggggcagatccgagcccggcgggaggggcgaggcgcgggggcgggcaggggcgagggtaggggcgctcagctggcaggtcctgctctgcaggcctcaccgcccagctcccgggagggggccgagggcgccctgagtgctgcgcgccttcccatgac

SEQ ID NO: 53450 - DNA, 30 bp, Homo sapiens
  chr16:87636088-87636118
  hyper
ggtgcgggcgcgcgccgcgcggcccgagcg

SEQ ID NO: 53451 - DNA, 118 bp, Homo sapiens
  chr16:87636372-87636490
  hyper
gcgcggcgccctccccgcggggctgccggcgaggggccctctcgccgctgaggtggagccgcgggccccgccgccgccgctcctgccccctccctccctcctcccctccccctcccct

SEQ ID NO: 53452 - DNA, 701 bp, Homo sapiens; identical to SEQ ID NO: 10857
  chr16:87636626-87637327
  hyper

SEQ ID NO: 53453 - DNA, 30 bp, Homo sapiens
  chr16:87695341-87695371
  hyper
aggccgccacggggcggggagagaattcat

SEQ ID NO: 53454 - DNA, 1037 bp, Homo sapiens
  chr16:87723126-87724163
  hyper
ttcggtgagtgggaagcgcctctgctgccctgaggttccctctggcgccctggcccggggaccgcggcctcgctgtggaatgtgctgggtaacgccgtctggcgtcgtcttgtgtccccatacagggctggagtaccagaggccgaagcgtcagacctcctgtgacgacatcgaggtgctgtccaccgggacacccctgcagcaggagagccccgagctgtaccgcaagggcaccactccctccgacctgacccccgacgacagccccctgcagagcttccccaccagccccgcggccaccccgccgcccgcgcccgccgccaggaacaaggtcgcccacttctcgaggcaggtgtcggtggacgaggagcggggcggggacatccagatgctcctggagggccgggccggggactgcgcccgcagcagctggggcgaggagcaggccgggggctccaggggtgtccgcagcggtgccctgcgcggcggcctgctcgtggatgacttccgcacccgaggttcgggccgcaagcagcccgggaaccccaagccgcgggagcggcggacggagtcaccccccgtgttcacgtggacttcccaccaccgggccagcaaccacagccccggaggctccaggctgctggagctgcaggaggagaagctgagcaactaccggatggagatgaaacccttgctgaggatggagacgcatccccagaaaagacgctacagcaagggcggcgcctgccggggcttgggggacgaccaccgccccgaggaccggggcttcggggtgcagagactgcggtccaaggcccagaacaaggagaacttcaggccggcctcctccgcggagcccgccgtgcagaaactggcgagcctgcggctgggcggggccgagccccggttgctgcgttgggacttgaccttctccccgccccagaaatccttgcctgtcgctctagagtccgacgaggagaatggggatgagctcaagtccagtacggtgagtgggcggccaccaggctggtcccagt

SEQ ID NO: 53455 - DNA, 30 bp, Homo sapiens
  chr16:87799119-87799149
  hyper
gaaacgcagaaaaacgcccgtgacaccaca

SEQ ID NO: 53456 - DNA, 30 bp, Homo sapiens
  chr16:87811640-87811670
  hyper
gtcagggcagcagccggccggcagggggcg

SEQ ID NO: 53457 - DNA, 30 bp, Homo sapiens
  chr16:87813006-87813036
  hyper
acagaagcatctggcgtcctttctggtcgc

SEQ ID NO: 53458 - DNA, 131 bp, Homo sapiens
  chr16:88031993-88032124
  hyper
aataggttaatagcttctctgcgtgggctgctgtctgtgccatctgcgtgggctgctgtctgtgccatctgcgtgggctgctgtctgtgccgtgaaggtgctgccgacccggctcctgaggctccatggcc

SEQ ID NO: 53459 - DNA, 45 bp, Homo sapiens
  chr16:88061031-88061076
  hyper
ctcctggtggctgtcccgaacaggcctcaccgcttctccttggat

SEQ ID NO: 53460 - DNA, 30 bp, Homo sapiens
  chr16:88449374-88449404
  hyper
cggccgccggccggcgtccggccttcccag

SEQ ID NO: 53461 - DNA, 30 bp, Homo sapiens
  chr16:88449981-88450011
  hyper
gtactggcgagggccgcggagcgaggggct

SEQ ID NO: 53462 - DNA, 50 bp, Homo sapiens
  chr16:88450226-88450276
  hyper
gggggagaccacgccgcacccccgcccagccccgcgcacccccagaggct

SEQ ID NO: 53463 - DNA, 30 bp, Homo sapiens
  chr16:88509561-88509591
  hyper
acccaggatgtggacggcccccgcctggcc

SEQ ID NO: 53464 - DNA, 30 bp, Homo sapiens; identical to SEQ ID NO: 10859
  chr16:88519207-88519237
  hyper

SEQ ID NO: 53465 - DNA, 30 bp, Homo sapiens
  chr16:88522569-88522599
  hyper
tcctcccctgtggccggtggtacagtccgt

SEQ ID NO: 53466 - DNA, 30 bp, Homo sapiens; identical to SEQ ID NO: 10860
  chr16:88636429-88636459
  hyper

SEQ ID NO: 53467 - DNA, 30 bp, Homo sapiens
  chr16:88637208-88637238
  hyper
gcccgagctcctcgcgcgctgcctccgcgc

SEQ ID NO: 53468 - DNA, 30 bp, Homo sapiens
  chr16:88729465-88729495
  hyper
gccagcggcttctccgaggccatggtccca

SEQ ID NO: 53469 - DNA, 144 bp, Homo sapiens
  chr16:88729839-88729983
  hyper
ctgctggtgctgtgcgggcttgtgcggggctgtgcggcagctgtgtggggcccgtgaggagctgtgcggggggctgtgcgaagggctgtgtgaggcgctgtgctgggggctgtgcggagaccttgaggcgctgtgcggggtccg

SEQ ID NO: 53470 - DNA, 30 bp, Homo sapiens
  chr16:88730479-88730509
  hyper
cttggactgggttgcggcgcttgtgtgtgc

SEQ ID NO: 53471 - DNA, 30 bp, Homo sapiens
  chr16:88752792-88752822
  hyper
tcaccaggaaggagcgcggcatgttcccct

SEQ ID NO: 53472 - DNA, 30 bp, Homo sapiens; identical to SEQ ID NO: 10862
  chr16:88839824-88839854
  hyper

SEQ ID NO: 53473 - DNA, 33 bp, Homo sapiens; identical to SEQ ID NO: 10863
  chr16:88840132-88840165
  hyper

SEQ ID NO: 53474 - DNA, 30 bp, Homo sapiens; identical to SEQ ID NO: 10864
  chr16:88840445-88840475
  hyper

SEQ ID NO: 53475 - DNA, 30 bp, Homo sapiens; identical to SEQ ID NO: 10865
  chr16:88850740-88850770
  hyper

SEQ ID NO: 53476 - DNA, 115 bp, Homo sapiens; identical to SEQ ID NO: 10866
  chr16:88851817-88851932
  hyper

SEQ ID NO: 53477 - DNA, 508 bp, Homo sapiens
  chr16:88878526-88879034
  hyper
aaagtgcgagtcaaggcgcccttccttgtctcgggctacgcttctgactgcagccaggcagctgtgggccggggccttggcggctggaggaggggcgtgagctggtctcgcccacgcacctggcgcgcgtacgggccgcgccctttctcctttattggccgagatccccacgctgcgcgcgggaggctggcgcgcggggtggagaagggcgtgaggaagcggtccaagtagcaggagggcggtgcagggcccggagggagcagcccagggcggaggcggcgggcctgggctggaccggccgggggcgctggcctctcgcggatgggccctgccgttgaggcggctcttccccgcccggacccgggggagggaggccggaaggtgtggccaggccagggcgcgcatccgcgagggcagaagcccttctgtccgcctgcagaggccaggtgaccccttagccttggggtggggagctgtgaaccccctggccgcccgaggactggtaccc

SEQ ID NO: 53478 - DNA, 31 bp, Homo sapiens; identical to SEQ ID NO: 10868
  chr16:88938185-88938216
  hyper

SEQ ID NO: 53479 - DNA, 382 bp, Homo sapiens
  chr16:88950010-88950392
  hyper
cgtggctgtgcccatgggagacgtgagtgacgcccggcagtggccgactcttctgcggtggctgcgcccacgggagacgtgagtgaccccggcagtggccgacttccacggtggctgcgcccacgggagacgtgagtgatgcccggcagtggccaactcttctgcggtggctgtgcccacgggagacgtgagtgacgcccggcagtggcttactctttcgtggtagctgcgcccacgacttctggagacatcagaggcttccaggccccactgttttctgcatttggccactgcccacgcttctggggctgaggtctccctcttggggcccttttcagcccctaaagatctcctagcctccgaacctgaaatggctccccca

SEQ ID NO: 53480 - DNA, 1437 bp, Homo sapiens; identical to SEQ ID NO: 10870
  chr16:89007176-89008613
  hyper

SEQ ID NO: 53481 - DNA, 30 bp, Homo sapiens
  chr16:89189064-89189094
  hyper
tgtggaggagtgagacgccccgtggctgtg

SEQ ID NO: 53482 - DNA, 506 bp, Homo sapiens
  chr16:89189484-89189990
  hyper
ctgctgacagcaggcccgggaacatttccagttcagccaaggagtcggtgcagcaggtggagtacagctgccctgcggggcctggctccaccaggggccaagacccttcgtggggaggagcacagcctgagggcctcagggtttgtgccctccgacacctgagattcagggctcccagaggggtgggtgggcgccccaggacaaccaggtgatgatgggcgctgtgaactctgaaaagccccagcatcagagacctgctgctctctcatgtgaagggactccccaccccacgctcacactcgcagacgcacttggtactttcatctgagtctcacgcagtagcccttctctccacagcatcccagaacccgagggtgcccctcactaccacggtcccggatccacgtggctcaagtgaggctgtggccgacagctgggctgtccgatccactcttgtctgtgccgaggcgtgggtcccggccagcgtccctccccagaaggtctcc

SEQ ID NO: 53483 - DNA, 30 bp, Homo sapiens
  chr16:89190315-89190345
  hyper
cacacacatgcagtgcgcgcacgggtatca

SEQ ID NO: 53484 - DNA, 41 bp, Homo sapiens; identical to SEQ ID NO: 10872
  chr16:89266728-89266769
  hyper

SEQ ID NO: 53485 - DNA, 422 bp, Homo sapiens
  chr16:89267402-89267824
  hyper
gctccaatcctccagcgccccaggccgccccgcgcctggcagctcccaggcccagattcagcccccgcccggcccctctccgcgggtccggcccgtgcgcgcccgtctgcggcaccgtcgggccggcggccgccccggagcaggaagcccaggaggacggccggggggcccgggtcagaggcgccaggtaggatggagaaaggacacccagggcctcggcgggctgggggcggggagggctgcggggcagcagggacgggggcgcacctgggtgaccgggctttgcaggaggccggcgccgggcagcgcgtagagccagccgcgtgtgcagggccgggtgccgttgcgtgcgggcgcggggcgcgggcccggggcgggtgcagggcgcgggatcggggtagcgcaggagcaggcaggggctc

SEQ ID NO: 53486 - DNA, 147 bp, Homo sapiens
  chr16:89267957-89268104
  hyper
cggagctcagcaccagccccagcactatgcagggtacccacgaggcggaggccagcaggcgccgggcccggccaaagccgcccgcagctctcagcacccgcgcctcctgctccatcggtcgcaggctgcgctcgggacggggcgggg

SEQ ID NO: 53487 - DNA, 30 bp, Homo sapiens
  chr16:89284368-89284398
  hyper
tgagaatctggcttcggctttgacgttttt

SEQ ID NO: 53488 - DNA, 599 bp, Homo sapiens
  chr16:89323411-89324010
  hyper
gaaagcgcattccgtcgtcaaaatacaccacgaggtcccgggtgccctcaccgccctccccttcctcgccctctcgtcgttgctgttgggacgggctctcgtcgcccgcgctggggcgcagtgactcagtgtgactcaggcctcgcccgcgctcgggctcacggagcagctgggacgacgggcgtgagcgcagaagccgcagagcccctcgcgcgcctcgcgggggtgtggtggggggtggccgcctccggggacgggcgggctgcggggctccgaccccgcggcagcgtctcgcggcgcctgaggccccggtgggcgtgggttccaggctgcacggctggtttgccgtctgggggtggtttgtgctgggacccccgcctcgccgcaaggaccgacgctttccgtatcccgggttcctgcttcggtgtaccggcagaatctgatcacgcgtggcctggagaatgcgcccagggtcgtattgcctggaaggagctctcagccgctgggggagccggaagggagacggttctgccctggacgcgggctgctcggcggccccggctctcctccaaccggccaaaccccgcctggtcccgccg

SEQ ID NO: 53489 - DNA, 226 bp, Homo sapiens
  chr16:89614906-89615132
  hyper
gggctgctgccgcccgtggctgtggagggacagccgtgctttcagcgcagcaggggctctgcggagaggtgtggatctgcagcaccacctctggtgaaactcatggtcccgaccgtcagtaggaacgggagatgagttttggtgacgggtgaccggtgggctgaccgcctctgactgccgttccgtggctgctcagtgtggggtctgcgacgtctgtgaggagaga

SEQ ID NO: 53490 - DNA, 30 bp, Homo sapiens
  chr16:89626746-89626776
  hyper
cagaattcctcgggcgtcgcccgttcgccg

SEQ ID NO: 53491 - DNA, 154 bp, Homo sapiens
  chr16:89627716-89627870
  hyper
acggttcggtaccacacgaaggtgcgcgccggccgcggcttcagcctggaggagctcagggtgagtactggcagcgctgcggtgtcaggaaggccccgaagtcccctctgttggcctcagtcgcgtgatgacattctccggaatcgctgtacgg

SEQ ID NO: 53492 - DNA, 113 bp, Homo sapiens
  chr16:89641241-89641354
  hyper
tgcctgtgctgcctcccgccggcggggccctgagcctcctcgccctgtcggcggcggtcccctctgaccgcagggtcttcttctagagtcctgatcgccgaggctgagcggag

SEQ ID NO: 53493 - DNA, 36 bp, Homo sapiens
  chr16:89641697-89641733
  hyper
tccttccagccccagacgagcgcggcgcctgcacac

SEQ ID NO: 53494 - DNA, 30 bp, Homo sapiens
  chr16:89723964-89723994
  hyper
ccggaggacggccgcgacctcttaccgtcc

SEQ ID NO: 53495 - DNA, 30 bp, Homo sapiens; identical to SEQ ID NO: 10876
  chr16:89724282-89724312
  hyper

SEQ ID NO: 53496 - DNA, 30 bp, Homo sapiens; identical to SEQ ID NO: 10877
  chr16:89768615-89768645
  hyper

SEQ ID NO: 53497 - DNA, 30 bp, Homo sapiens
  chr16:89778232-89778262
  hyper
gaccccgcccccctcgctgggctcctccta

SEQ ID NO: 53498 - DNA, 30 bp, Homo sapiens; identical to SEQ ID NO: 10878
  chr16:89786954-89786984
  hyper

SEQ ID NO: 53499 - DNA, 30 bp, Homo sapiens
  chr16:89788865-89788895
  hyper
cctggagtccgggacgccctgtgctcagga

SEQ ID NO: 53500 - DNA, 30 bp, Homo sapiens
  chr16:89882313-89882343
  hyper
ggcttcgcaggaggcgcacagctgattcct

SEQ ID NO: 53501 - DNA, 238 bp, Homo sapiens
  chr16:89894334-89894572
  hyper
caccccagccaccctgcgacaacccctggaggtcaccttgcccggggctcggggaggccactgcgggctttgtctgctcagctcctcccggctccctcccgcgttcccagcggcaaacctcccaggccccccgcggtcaccgcagtgtcccgggctggatgccggcccgggcttttgtgggcatcggccgtctgggtctgcgggggagcgccgggggtgtcaccgcgtgtccgagcgc

SEQ ID NO: 53502 - DNA, 44 bp, Homo sapiens
  chr16:89927372-89927416
  hyper
tgctggtctggggccgtggtctctgctgccgcctgctggggccg

SEQ ID NO: 53503 - DNA, 30 bp, Homo sapiens; identical to SEQ ID NO: 10881
  chr16:89939433-89939463
  hyper

SEQ ID NO: 53504 - DNA, 30 bp, Homo sapiens
  chr16:89984502-89984532
  hyper
cagcggaaatggcgcgccgcccggggaggg

SEQ ID NO: 53505 - DNA, 30 bp, Homo sapiens
  chr16:89985147-89985177
  hyper
tgggtcctgcacgccgcctggtggcaggcc

SEQ ID NO: 53506 - DNA, 30 bp, Homo sapiens
  chr16:89988237-89988267
  hyper
ccacccctgactgccggcctcagaactggg

SEQ ID NO: 53507 - DNA, 30 bp, Homo sapiens; identical to SEQ ID NO: 10882
  chr16:89989273-89989303
  hyper

SEQ ID NO: 53508 - DNA, 168 bp, Homo sapiens
  chr16:89990061-89990229
  hyper
ggtgacctcgggctgtcgaggcgcagctcacgtcagtcgcgaagcctcagccccctccacacctgcgccccctccacacctgcaccccctccaccgggcctccgcaggtgcagctgggagccctgtctgggcgtggccctcttttttggggccgcggcatagccttga

SEQ ID NO: 53509 - DNA, 258 bp, Homo sapiens
  chr16:89992767-89993025
  hyper
ggcgggaaccgcattcgggtcctggaggggcttggaggccccagtctcgcagccccttcatcggggacccccgctcccacctgccttggccactgccctcaaagcccggccccgctttccccaggaccccaagcgctgcgcgaggtcagcaccaaggacagcgcccgggccgagcgcctggcctcgaacgccgggttctgctttgtgtttccaggtttttgtttttggttatgagaggaggcctggctctgtcgcccg

SEQ ID NO: 53510 - DNA, 124 bp, Homo sapiens
  chr16:90085455-90085579
  hyper
gccacccaccaaggagcgtgccgggcacggcttcccgggccgggagcgcagagaacaagggggcggagactcggtccgtgtgcccccagccccgcgcggggaccgcgcccgggaggtgcccctg

SEQ ID NO: 53511 - DNA, 72 bp, Homo sapiens
  chr16:90086126-90086198
  hyper
cgcactcacttggcggccgcgcccgctggcgtcctcttgttctcttccaggtacttgcgtgtggggcgccga

SEQ ID NO: 53512 - DNA, 529 bp, Homo sapiens
  chr16:90088769-90089298
  hyper
tggtccttcatcagcacgtctttactgagcacgtgctgtgtgctgttctaggcgctgaaggatagaagtgaagggttcccccctcgtggagcttaggttccagcaataagcaaaacatgccctgcagcgaaaggcttctgggctgccggcgacattttcccaacgttcacaaccgggttccttccggacgcccgtctctagggacgcactcccgcctttggcagggccgctgcccggcggagtctcgcgaggatcttgtgacttatcgcggcatcgcccagcggttgccgggaaacggcgtggcttccgggggcgggcgccctggtcccggagtcgccgctgggcctgtccgctggcgtcatggtgagcaggggcgggagcggggctggggtcctcggcaggggcccggagacctcggggcagggaggcctcggtacacggagaccctgggaatgggaggcctggagcgctgggtttctggaattgagagctcggtgctcttgtgggggtctccgtggggcaaactcag

SEQ ID NO: 53513 - DNA, 384 bp, Homo sapiens
  chr17:523543-523927
  hyper
ccagcccgattcacccgcttcacctgctctgaggctggtctcatgggacaaagagggaattgcactgaagtctcagggttttaggaccagaagggtaggagctagagaaggtggcagaggtgaaggttgaacaagtgagtgggactccaggtacaagtcccagcctgcccccggcttcaaccacagtagctcagtttcacggtcttacacattagctccgtggcctggagtaagtttcaaatgagcacagcgcctacttcctatggctgatgaagcacagtgactgactgcaggtaaacgcacctaatatagcgtgggtcaccaagtggatgttcaaagcatgacagctatgggtgtttcagattctacattctattttttttt

SEQ ID NO: 53514 - DNA, 468 bp, Homo sapiens; identical to SEQ ID NO: 10887
  chr17:576351-576819
  hyper

SEQ ID NO: 53515 - DNA, 79 bp, Homo sapiens
  chr17:635475-635554
  hyper
caggtcggggaggggcgcgtccgctgacggaacagaagccgggagccgcggcccttcccgcctccgcctgggccccgcg

SEQ ID NO: 53516 - DNA, 138 bp, Homo sapiens
  chr17:635797-635935
  hyper
cggagggttgaaatcgcgcggccgggccggggcgcgccgagccgaacccagccacgcggcgccagcgaggcggccggacccgcagccccgatgctgctgacgctggccgggggcgcgctcttcttcccggggctcttc

SEQ ID NO: 53517 - DNA, 299 bp, Homo sapiens
  chr17:635959-636258
  hyper
cgctcccagcccggatggagccgcaccgactgcgtgatgatcagcaccaggtaccggcgccgccgagacgccccccgaggcccggggcgctgcccaccgcaccccacccggccgcggggcccagggcggaaaaggggggcggcaggaagcccgggggctgctccctccgcgtcccggcggcccgagtttccgaagcccctccgcgtcctcccctggcgggagcggggccggggcgggcgggaatggccgatgagcctccggagcccgctccccacatctgcctgcggctggggagagtc

SEQ ID NO: 53518 - DNA, 30 bp, Homo sapiens
  chr17:655940-655970
  hyper
cccagaaaatgcgccgtgtgagcccaaaca

SEQ ID NO: 53519 - DNA, 30 bp, Homo sapiens
  chr17:800577-800607
  hyper
tgggctgccccacactgtttacaggacaat

SEQ ID NO: 53520 - DNA, 30 bp, Homo sapiens; identical to SEQ ID NO: 10889
  chr17:873368-873398
  hyper

SEQ ID NO: 53521 - DNA, 30 bp, Homo sapiens
  chr17:881934-881964
  hyper
ccacggtcaccggccgcctctcctgacctc

SEQ ID NO: 53522 - DNA, 85 bp, Homo sapiens
  chr17:883201-883286
  hyper
ggtggccagagctctccgcccaggcggggtccgcagctgccggccgcggtgcgcggggtgactgcttgggcgagaagccggaccc

SEQ ID NO: 53523 - DNA, 30 bp, Homo sapiens; identical to SEQ ID NO: 10890
  chr17:899767-899797
  hyper

SEQ ID NO: 53524 - DNA, 227 bp, Homo sapiens
  chr17:900016-900243
  hyper
gaggcgcgagagcacgcgcaacgcttcctgggaaatgtagttgggtgtcggattagaactacaaatcccggtactcaccgcgctgcagccccgaccgtgagggcgctttctggtgaatctgaatctcgtttgtctgtgacatggggaaagctgtccaagcccaattccattttcacaagaggctttctttttggaaacatgatagcggtctcgctggtgtgcgcacc

SEQ ID NO: 53525 - DNA, 30 bp, Homo sapiens
  chr17:900476-900506
  hyper
tggtgggtgacaagcgtcagccccggctcc

SEQ ID NO: 53526 - DNA, 31 bp, Homo sapiens; identical to SEQ ID NO: 10892
  chr17:914942-914973
  hyper

SEQ ID NO: 53527 - DNA, 213 bp, Homo sapiens; identical to SEQ ID NO: 10893
  chr17:1011775-1011988
  hyper

SEQ ID NO: 53528 - DNA, 30 bp, Homo sapiens
  chr17:1012273-1012303
  hyper
tccagcaagcctatcgcctcctcttcctcc

SEQ ID NO: 53529 - DNA, 30 bp, Homo sapiens
  chr17:1026524-1026554
  hyper
ggaaggcaggtgcgcggatgggacctttgc

SEQ ID NO: 53530 - DNA, 147 bp, Homo sapiens
  chr17:1082870-1083017
  hyper
tggggtcccgatcccgatcctggggtcccgatctccatcctggggtcccgatcccgatcctggggtcccgcccccgcccggcacacgtactgctgtagagggtgtcgatccaggacaggcgcggcaggccccggtggctgagcggct

SEQ ID NO: 53531 - DNA, 16 bp, Homo sapiens
  chr17:1083490-1083506
  hyper
cgcagacccaggtccc

SEQ ID NO: 53532 - DNA, 30 bp, Homo sapiens
  chr17:1131863-1131893
  hyper
cattttcatagagtcgcccgagcttaacgt

SEQ ID NO: 53533 - DNA, 31 bp, Homo sapiens; identical to SEQ ID NO: 10894
  chr17:1133188-1133219
  hyper

SEQ ID NO: 53534 - DNA, 30 bp, Homo sapiens
  chr17:1163330-1163360
  hyper
tgaaaacggggcgacggataacaaggaccg

SEQ ID NO: 53535 - DNA, 92 bp, Homo sapiens; identical to SEQ ID NO: 10895
  chr17:1390868-1390960
  hyper

SEQ ID NO: 53536 - DNA, 31 bp, Homo sapiens; identical to SEQ ID NO: 10896
  chr17:1391199-1391230
  hyper

SEQ ID NO: 53537 - DNA, 30 bp, Homo sapiens; identical to SEQ ID NO: 10897
  chr17:1420194-1420224
  hyper

SEQ ID NO: 53538 - DNA, 30 bp, Homo sapiens
  chr17:1552955-1552985
  hyper
ggcccgaaacggcgcgccagatcctgcagc

SEQ ID NO: 53539 - DNA, 30 bp, Homo sapiens; identical to SEQ ID NO: 10898
  chr17:1553187-1553217
  hyper

SEQ ID NO: 53540 - DNA, 30 bp, Homo sapiens
  chr17:1561598-1561628
  hyper
aacagctgccctgtgcgtgggttgaagatg

SEQ ID NO: 53541 - DNA, 184 bp, Homo sapiens; identical to SEQ ID NO: 10899
  chr17:1588081-1588265
  hyper

SEQ ID NO: 53542 - DNA, 604 bp, Homo sapiens
  chr17:1613423-1614027
  hyper
tgccagcggtcccgagcggccgattccggcgtgggcagccgccgcaacccccagtgcagcccccggaacgcgaggaaggaggcgccggccaccaggagccccgtgggcgccatggcctggcggttggggggttgcggggagtccgggtcggtcccctcggcgcccgcgctctcggccgggactgggaacccgtttcccggcagggctggggccccggctcccctccccgccgcgcctttgggatcagcaggaacttttccccgttcgtccacgcccagtccctcgcctgggcggtgattggagcagccgcggggccgccgcccccggagccttggccaccgattgcgtcttgctccagccgggggagcggttcgggggctccgggcagtagaccatgccctggagctcggggggcctccgggatgttcgccaataggggtcctccccagctccaagcgtcctgaagcgctggagttgcagacctgggtctccagtctaacctcaactgacactcccgggccccacccacgaaccttgacctcttcccggctcccgcgactttcacctgctgagcgtcatcaccacccaccgccacaccctgcaa

SEQ ID NO: 53543 - DNA, 30 bp, Homo sapiens
  chr17:1811610-1811640
  hyper
ttaggccgcagccccgagtcctggagcagc

SEQ ID NO: 53544 - DNA, 30 bp, Homo sapiens
  chr17:1812081-1812111
  hyper
ggggcgcggcgggtcggggtgtctaaagtc

SEQ ID NO: 53545 - DNA, 236 bp, Homo sapiens
  chr17:1901487-1901723
  hyper
gtttggcctttgggggaggggcggggagggctgtcgcattgatccggagctgcagggcgagggcggtgcccagacccggcgccccaaggcctcccgcaggccgacccgagccgagcgcgccctttgggcaccggccccgcccgggagggtcttctcgctctagagccgggggcccgcgctgagagatcggggttaccgcgcggggagccgcggccgcgctgggatccgttccctct

SEQ ID NO: 53546 - DNA, 30 bp, Homo sapiens
  chr17:1927517-1927547
  hyper
cggcacggctttcgcgtccctccgctccca

SEQ ID NO: 53547 - DNA, 30 bp, Homo sapiens; identical to SEQ ID NO: 10901
  chr17:1928182-1928212
  hyper

SEQ ID NO: 53548 - DNA, 296 bp, Homo sapiens
  chr17:1929077-1929373
  hyper
agtccgctccctgccccgtctcctccctggccagcgccccttctcccagtctcgacggctcttccccgcactgaacagctccagcgaacccggctgccccgcaccccgagtcccaggacactgttctttcgtggggagaggaggggagcaagcattcggaaagggccagctgcaaattccagggagaaggaaggacccgtgcgggttcgggtgggccgtctccgcctgggtggggtggcggcggggggtctctgatctcccttggtccacacagaccccgccggggggttcgcgga

SEQ ID NO: 53549 - DNA, 30 bp, Homo sapiens
  chr17:1933456-1933486
  hyper
gcaggtgatggcggcgctggtcgtatccgg

SEQ ID NO: 53550 - DNA, 31 bp, Homo sapiens
  chr17:1945164-1945195
  hyper
ctcaggtatcagcccccgctctgggtgcgcc

SEQ ID NO: 53551 - DNA, 153 bp, Homo sapiens
  chr17:1957560-1957713
  hyper
cccctgttgtttccttcgggcgggtgggttggagaagaagtccacgcgggattcttcaaaacggcgtacagggggattctagggccccatggttacttctttggaccccccggaggcgctgtccagccacttccagtcgccctgatgactcgt

SEQ ID NO: 53552 - DNA, 30 bp, Homo sapiens
  chr17:1958075-1958105
  hyper
gggcaggacttttccgaactggggctgtgt

SEQ ID NO: 53553 - DNA, 15 bp, Homo sapiens
  chr17:1959132-1959147
  hyper
gggggagaaggggcc

SEQ ID NO: 53554 - DNA, 61 bp, Homo sapiens
  chr17:2014967-2015028
  hyper
gattacaggcatgagctactgtgcctggcccgaaaggtccttagagcgggtttcttgggtg

SEQ ID NO: 53555 - DNA, 30 bp, Homo sapiens; identical to SEQ ID NO: 10905
  chr17:2206902-2206932
  hyper

SEQ ID NO: 53556 - DNA, 30 bp, Homo sapiens
  chr17:2240952-2240982
  hyper
ggaccgctcggcgccgcctcctgccacacc

SEQ ID NO: 53557 - DNA, 51 bp, Homo sapiens
  chr17:2302238-2302289
  hyper
gtcgccccgactaggccgccggccccgcagctcccccgccccttgcccgct

SEQ ID NO: 53558 - DNA, 30 bp, Homo sapiens
  chr17:2415344-2415374
  hyper
catgcgttcgaattcgcgagaaaacttatt

SEQ ID NO: 53559 - DNA, 20 bp, Homo sapiens
  chr17:2415865-2415885
  hyper
ctgagcgaaagagcaagact

SEQ ID NO: 53560 - DNA, 30 bp, Homo sapiens
  chr17:2496638-2496668
  hyper
agttcagaaggggccgcaagtcagacgagg

SEQ ID NO: 53561 - DNA, 222 bp, Homo sapiens
  chr17:2627361-2627583
  hyper
gattgtcggctttcccggggaagggcgtggcccccgcccctcctgtctcacaggcaggtgggaccaggccaggatcgggacggcgagtcctctcggtagagaaggtgcccccgctcggccccgcggaggaactctcgcgcgaggagagggctcgaagctttggaaacgtcgggaagtacaaaaggctggcggttcggggatttggggggagccggggccgcc

SEQ ID NO: 53562 - DNA, 538 bp, Homo sapiens
  chr17:2627798-2628336
  hyper
cgggcgctgggccgcagcggcctgcgtgcatagaggaagagcgcggggtcgggcatggggtcggcgtcgtcgagggcgccggccccgcggtcccaggcggcccagtcccggccggggcccttggcggcggcctcgtgggcagcaggcgggcggcgggctcgcagtgcgcggcggcgtggcctgggctcggcggtggcgccggggcccgggcgcggggcctgcagtctctggcgcgccgcgtgcagctggcaggagaggtaggcggccgcctcggtgtgcttctgcagctcggtgcccagcacggtggcgcggtggctgcggcggcgcagctcctccaggaagcggcgctcctcggtgcgcaggctgcagcgcagcgcggacaccagcgcctcgcgctgcgccacctcccgccgcagctccgcgttggccgcagcacgcgcctccagctgcgactccagcgcgcggcacttgctctccagctcccgggacgccgcctctggaacggggcagaggccagaggtgacggtctccccctggc

SEQ ID NO: 53563 - DNA, 30 bp, Homo sapiens
  chr17:2653173-2653203
  hyper
caaactggggaacccgccggtgccttggcg

SEQ ID NO: 53564 - DNA, 109 bp, Homo sapiens
  chr17:2658618-2658727
  hyper
agtagtttacttctttaggcatcacttcctgggtagaacgggtttcctaagggagtaaggcacagaacgaggcaatgggccgcctggtctctccgcgcgtcagtaggac

SEQ ID NO: 53565 - DNA, 30 bp, Homo sapiens; identical to SEQ ID NO: 10910
  chr17:2680268-2680298
  hyper

SEQ ID NO: 53566 - DNA, 974 bp, Homo sapiens
  chr17:2756326-2757300
  hyper
ggaagcggggtcgccgtgaagttggttattgaacccatgtggagtcaaactcccagggccgggagagccagtgttcgcggggagccgaccccagcccactctgcatcccagctcggcgatccttgcgccgactctgcggggaggcgggggcagaattccgcctcgttcctcccatccgcaagctcccacccggggacccgggcccgggagctgcgagccggggcgggcgccgggctcaggtgccccctgtaagcgctgggcggccgggaggggacggggaccgcgcgcgggcagtttcgtttggacggaggaggacgcgcgtttcctcttggtgcctgttttctctccctctgttttaaaagcagtgacagcatcggggaagtatccggggccgggccggggagggcggcagccgcctctgcctggggagggagctcggggccgccggcgggagtgcgggcggggaccagaaggagcgggcgaggggaggcagggccggggccggggagggcgcctgggagccgggcaggggggtcccgggagcgctgtccgcctcctcctgcgcttcgcccgctccctgtgccccgcgtcctccaccatccgggcggccgaggccggggcgcgggaggcggggccggggcgggtcccggcgcgggcggcgcgtctgagcgggagccgggagccgccggcccgggccgcgccccgagcgagcctcggaaatgcccgcgccgggggagcggacggcggctgccccgcgggccccgaggagacgctgaaggtcgccgggagggaggggagagcgcgcggtcacctgacccccggggcgcacctaggcggggcggggcccatgcgaggcggaggccgggggccggggcgcgggctcaggggccgggtgcggagcgcgcggagccggggctgcggggacgcgggcgggcgaggtcgggcaccgcgggcggcctcgccatgtcccagcc

SEQ ID NO: 53567 - DNA, 30 bp, Homo sapiens
  chr17:2757508-2757538
  hyper
tcctctccaggtaccgtcgtgcgaaccgag

SEQ ID NO: 53568 - DNA, 30 bp, Homo sapiens; identical to SEQ ID NO: 10914
  chr17:2952081-2952111
  hyper

SEQ ID NO: 53569 - DNA, 30 bp, Homo sapiens; identical to SEQ ID NO: 10915
  chr17:2952357-2952387
  hyper

SEQ ID NO: 53570 - DNA, 31 bp, Homo sapiens
  chr17:3554659-3554690
  hyper
attacaggagccaccacgcctggccaaagtg

SEQ ID NO: 53571 - DNA, 30 bp, Homo sapiens
  chr17:3571906-3571936
  hyper
cgccccgctcggcccgccccctcatgaata

SEQ ID NO: 53572 - DNA, 30 bp, Homo sapiens
  chr17:3572321-3572351
  hyper
gggggagggggcggcgtgaacccaactcac

SEQ ID NO: 53573 - DNA, 141 bp, Homo sapiens
  chr17:3599031-3599172
  hyper
ggctcacagacccccagctaccgggaaaaccgcgtgcacgcctgcgaattccaggaccctggagaaggacgcggcggctggcacccgccctgcccctcccccgccttcccaaaagtccgcggagaacttacacgaccaggt

SEQ ID NO: 53574 - DNA, 429 bp, Homo sapiens
  chr17:3599244-3599673
  hyper
cggtcttgtagtcgaacagcgacaggcagagccccttgcagcccgcctgccccatggcgcgctctcagccgggcttgcggaccgcccggcccacgtgcgctcatggggagcactcggtccctcggtccctgcgcgcccggcgcccgcctcggcccgtctgcgcccgctcagctgcagcccggggtgtccggcagggctgcggggcgcgggggcgggtcggggcggccttttattgacgcggttgagaaagcctcggctgggagctgggcggcggcgagcaccggaacctcagaccgcgaccttgccgctacctcttcttcctcctcctcctcctcctcccctgacacagtgacacccctgcaacctactccccagccaccggtctgggagcgcagccccccggatgcgcaggaccgccctgtgctgttg

SEQ ID NO: 53575 - DNA, 156 bp, Homo sapiens
  chr17:3778890-3779046
  hyper
ctggatactcacacgtgtccaaatgcctctcacccacagcctccctggcagtggggtggctggcactccataggtgaaacagccatgtgcccagggaactgcgccagaccgtgtaacctcttgttcagacaactttgcctacgctcctgtcactta

SEQ ID NO: 53576 - DNA, 243 bp, Homo sapiens; identical to SEQ ID NO: 10917
  chr17:3866999-3867242
  hyper

SEQ ID NO: 53577 - DNA, 81 bp, Homo sapiens; identical to SEQ ID NO: 10918
  chr17:3908048-3908129
  hyper

SEQ ID NO: 53578 - DNA, 30 bp, Homo sapiens
  chr17:4046208-4046238
  hyper
cctggctctgcagccgccgccgccgcctcc

SEQ ID NO: 53579 - DNA, 30 bp, Homo sapiens
  chr17:4046848-4046878
  hyper
aaagtcgcagacagcgagcttttcgccagt

SEQ ID NO: 53580 - DNA, 30 bp, Homo sapiens; identical to SEQ ID NO: 10919
  chr17:4167301-4167331
  hyper

SEQ ID NO: 53581 - DNA, 30 bp, Homo sapiens; identical to SEQ ID NO: 10920
  chr17:4402758-4402788
  hyper

SEQ ID NO: 53582 - DNA, 30 bp, Homo sapiens
  chr17:4544272-4544302
  hyper
gaatttgggctttcgcggaagaaaaaaagt

SEQ ID NO: 53583 - DNA, 506 bp, Homo sapiens
  chr17:4544583-4545089
  hyper
caattccaaggagatcgggtagcggcaacatttattgagcgcttactgtgtgccaccgactgccctaaagccccccacccccgtggcctccgcgcgctttgagcccaatgcgcgggcccttggcaaagagaatcggccagaggccaacgggggcgcatgtcctccccggtatttgactgactcggagccaggggcgcagcccaccccgcccggctctggggagctcaccttgccccgtgcgggccacagtcgcttcccgagcgccgcctccccgtgctggccgaccagccacagctgcacctggttgttggaaccggcatagagcgaggccccagtggacacgcggatgcggtagagacccatcttgctcaaagatgtttcgctccttctggtggagaagggtggacgagctaaataacccagcctgagaccccgccctctcggaggtcgcttggggtcggaatgtgggtggcaggtctccaatcaactccgcctaccgctggggc

SEQ ID NO: 53584 - DNA, 30 bp, Homo sapiens
  chr17:4607725-4607755
  hyper
tcttgggacatcttcgctgtaggaatcaat

SEQ ID NO: 53585 - DNA, 32 bp, Homo sapiens
  chr17:4614405-4614437
  hyper
atccactccagactcgcgccaagccaatggaa

SEQ ID NO: 53586 - DNA, 30 bp, Homo sapiens
  chr17:4634619-4634649
  hyper
tgtagttcatcaagcggaccgaggaggcga

SEQ ID NO: 53587 - DNA, 31 bp, Homo sapiens; identical to SEQ ID NO: 10922
  chr17:4642753-4642784
  hyper

SEQ ID NO: 53588 - DNA, 30 bp, Homo sapiens
  chr17:4643242-4643272
  hyper
gcccgctgagccggcgagggctcgggcagc

SEQ ID NO: 53589 - DNA, 43 bp, Homo sapiens
  chr17:4647511-4647554
  hyper
agtcactgaagatccacgtggtggaggccgggaaggagtttga

SEQ ID NO: 53590 - DNA, 30 bp, Homo sapiens; identical to SEQ ID NO: 10923
  chr17:4710005-4710035
  hyper

SEQ ID NO: 53591 - DNA, 30 bp, Homo sapiens
  chr17:4736688-4736718
  hyper
ctccggggagatagcgcctgtcagtcggtg

SEQ ID NO: 53592 - DNA, 30 bp, Homo sapiens
  chr17:4842904-4842934
  hyper
cgggggttgtgcaacgaccctgcatgcagt

SEQ ID NO: 53593 - DNA, 30 bp, Homo sapiens
  chr17:4850275-4850305
  hyper
tgaggactgtgggacgttagtgcagaaaaa

SEQ ID NO: 53594 - DNA, 30 bp, Homo sapiens
  chr17:4850695-4850725
  hyper
ggcaggccagctctcgggtctaggtacccc

SEQ ID NO: 53595 - DNA, 30 bp, Homo sapiens
  chr17:4852095-4852125
  hyper
ccagactttggtatcggggcagggagtgag

SEQ ID NO: 53596 - DNA, 329 bp, Homo sapiens; identical to SEQ ID NO: 10924
  chr17:4853392-4853721
  hyper

SEQ ID NO: 53597 - DNA, 30 bp, Homo sapiens
  chr17:4871303-4871333
  hyper
gtttaatggcaattcgtataaaccaagccc

SEQ ID NO: 53598 - DNA, 359 bp, Homo sapiens
  chr17:4890352-4890711
  hyper
gagatgggaggaggcccgtcgggctcggctatgtgcagtgaagctggggttggggtaaggactccgccccagggcgcaggtgcgcagtcctggctaggcagcctgccagggtgcggagcgggagcgggtccttgggctgcacttgggcggcgccggatcggacgcttggcactctgggcggccccccggcggagtggtggtcccaggagaacctccgaggtgggagggtcccgcccgcatagagggatgttctggagaagccgggagcagagtccgcgggcacgcggtgggcgagggacagtgcaggtgccgggtgcgggggtctccgggacagtccccggcacgcgctggtccgccgt

SEQ ID NO: 53599 - DNA, 31 bp, Homo sapiens; identical to SEQ ID NO: 10926
  chr17:4900808-4900839
  hyper

SEQ ID NO: 53600 - DNA, 30 bp, Homo sapiens
  chr17:4901066-4901096
  hyper
tgctcgcccttctgcgtccgcagctcggtc

SEQ ID NO: 53601 - DNA, 119 bp, Homo sapiens; identical to SEQ ID NO: 10927
  chr17:4901560-4901679
  hyper

SEQ ID NO: 53602 - DNA, 170 bp, Homo sapiens; identical to SEQ ID NO: 10928
  chr17:4981378-4981548
  hyper

SEQ ID NO: 53603 - DNA, 89 bp, Homo sapiens; identical to SEQ ID NO: 10929
  chr17:4981951-4982040
  hyper

SEQ ID NO: 53604 - DNA, 534 bp, Homo sapiens
  chr17:5000401-5000935
  hyper
gagcagcctcagcagcgcaggtggacacagtcgtcaaccactcgctggccgcctgcgacgtgaagcacctgcgctgggcgcggcgggtaagcgccgacactagcgggcgcctgaacagtccagcggcgtcagcgctgcggagcaggaaagggtcccaaacgcagggcggccatgcagcgtggcgcccacctgtccctctcctcgaagcgctgagccagcacgatgcacataagggaaggaggaaggtggcttgagggcagtgaccgagcggacagcggaagcccatttcaggagccccggtacccgagctcgggcccctttccaatcccccaggcgtccttcccatgtccttgtctcctagtcctgggaatccacggccactccactctcctgcagtaccgcggacaagaacaccatgtactcttcacaggcaggtgtcttctggtggacccaactctgttggtacttgtcgtctccaaaaagtccccaaatgcgctagaggccagccagcccggtatccgagaggtaagagcc

SEQ ID NO: 53605 - DNA, 30 bp, Homo sapiens
  chr17:5015067-5015097
  hyper
ctcggggaagccgccgccaacactcacctc

SEQ ID NO: 53606 - DNA, 31 bp, Homo sapiens; identical to SEQ ID NO: 10931
  chr17:5019613-5019644
  hyper

SEQ ID NO: 53607 - DNA, 30 bp, Homo sapiens
  chr17:5323125-5323155
  hyper
ccaccaagcaggggcgtcaccaagggaaag

SEQ ID NO: 53608 - DNA, 30 bp, Homo sapiens
  chr17:5323790-5323820
  hyper
cttgtttttggattcgattttgttttgaat

SEQ ID NO: 53609 - DNA, 30 bp, Homo sapiens
  chr17:5342013-5342043
  hyper
gaaatatgatcatacgtgggtttagcccgc

SEQ ID NO: 53610 - DNA, 30 bp, Homo sapiens; identical to SEQ ID NO: 10932
  chr17:5389577-5389607
  hyper

SEQ ID NO: 53611 - DNA, 35 bp, Homo sapiens
  chr17:5390232-5390267
  hyper
cttagacagctcaactcgccgagatgacctgggca

SEQ ID NO: 53612 - DNA, 30 bp, Homo sapiens
  chr17:5972433-5972463
  hyper
cccttttaggaagacggagtaagaggcacc

SEQ ID NO: 53613 - DNA, 145 bp, Homo sapiens
  chr17:5973406-5973551
  hyper
tgagcgtcatggtgcgtgtgttagagcccgtggggccccggtgaaaggctgtggctctgggtgactggtgtgtgtgtgtgtgtgtgtgtgtatcagagtgggtggcggcgtctctgctcggcagtggcgcgtgtggcccgccccg

SEQ ID NO: 53614 - DNA, 44 bp, Homo sapiens
  chr17:5974049-5974093
  hyper
caagtttgtgcagacgcggttgggagcgcggcggggctgcacct

SEQ ID NO: 53615 - DNA, 164 bp, Homo sapiens
  chr17:5974433-5974597
  hyper
cggagggtttgctccgtctcttggtgaacttgaacagaggcagaggcaaaagcaaaacgtatgtattttgtccagaaaattacctagtgtagagctttgcgtcttcgtaggtgtggacggagactcacgactgaaggttgctaaattgcgtttttcttggctac

SEQ ID NO: 53616 - DNA, 134 bp, Homo sapiens
  chr17:6347034-6347168
  hyper
agagaggcaggcattccgctggagagagggagggatgcgtggggcaaggcgggggcggggagccggtgtagacgggtggagggcagaccggtactctggtctatccccgcttccgggacgcgttttctagggag

SEQ ID NO: 53617 - DNA, 523 bp, Homo sapiens
  chr17:6347511-6348034
  hyper
tagcaagggcagtggcgcgagcgggacgcaggatacaaagcccggagccacgaggctggcggcggggcgggggccggagcgatgaatgggcacggccgggccaatccaagcgcagcatttgcagccgcgagagagggagccaatcggatccccggggcggtggcggtggcgggggcggggacggaaccaatcagctgtgaggacggggccgggggcggagccgcgcagagtttcaaatcggctgcggtgggcgaggagcagctgtgctgcggctgtgctcggccttagtggtgtcgggtgagtgcgggctgggcacaagtttcgcccttgttgcccaggctggagtgcaatggcgcgatctggactcaaaacaatttttttgttcggaggggagggcatcaggttctgttcacaggggagggcatcaggttcggacacgcacggcctgtggggtcgtctgggtaccacaagaagtcggatcgaaatcggggcgtctggtgggaaggccggggtctgggcgggt

SEQ ID NO: 53618 - DNA, 71 bp, Homo sapiens
  chr17:6399732-6399803
  hyper
agagtcccagcaaatgttccccgggcctgggctcttctctccactgccccgtgaccagataattcccacag

SEQ ID NO: 53619 - DNA, 30 bp, Homo sapiens
  chr17:6458737-6458767
  hyper
accagccaacgtcacgggttgggtgtgagt

SEQ ID NO: 53620 - DNA, 603 bp, Homo sapiens
  chr17:6459171-6459774
  hyper
cggggcggccagcagccggcgcggcacggggctcccctccttcccgagaaggaatctgggtctctggactgagctggtgacgggggctggggcggggggttgtggcgtcctggatggagagagctgcaggagcagggggcgcgtcccggtttgcgttggggtgtgggacgaagcggcggccgcgggacatccccttcggtggcgaagcccgggtctgcccggggcctccgcggggtgcagagggctcccaacggcgggactggcccggggcgccgcagacctggccctttccggcggggccgtggagaaggggacgcggtgtcccccgaggtgaccgggggcgcaggaaggacggggggcgcgcggagccccctctccacgcgcgggaggtccagccccgctaccgccccctacgccctcccgggacctccgcccacctgcgcgaggggttcacctgggccggcggcccctcctctagacgcgcgagtccctcccccgggccccggccctgccctccccgcgcccgccctcacctgcacggcccgccttggccatgtcccgggcggcgggctccggcggcgctacgcgcgctcctcgcgcttc

SEQ ID NO: 53621 - DNA, 31 bp, Homo sapiens
  chr17:6459791-6459822
  hyper
cgcctccggccccgaacggactccgagcgcc

SEQ ID NO: 53622 - DNA, 193 bp, Homo sapiens
  chr17:6460088-6460281
  hyper
cccaggggctcagagacgcggagacagcccgagacactgcgggccagagacggggccctggactgggagaggggcgcacagactattagacagcgctggagagagacgctcctagggccagaacgccgaggtggagggagagagagagaaattcagaggagaccagagacccagagcccggctccggctccgg

SEQ ID NO: 53623 - DNA, 30 bp, Homo sapiens
  chr17:6544251-6544281
  hyper
tcgtcagaggctcccgtagtctttagcggc

SEQ ID NO: 53624 - DNA, 30 bp, Homo sapiens
  chr17:6554827-6554857
  hyper
catagcgacagcagcggccataacaaacga

SEQ ID NO: 53625 - DNA, 30 bp, Homo sapiens
  chr17:6555187-6555217
  hyper
gctgtagggtgccccgaggcctccctggcc

SEQ ID NO: 53626 - DNA, 643 bp, Homo sapiens
  chr17:6616496-6617139
  hyper
ttagtgggcacaggacgccgggtgtccgaagggctgcctggagatgcaactgaccttggcgggcatcagaatgacgagtggcagcagcaggagcggggtgacgaacaagatcacgaaggacttgaacttggagacatagctcagcgccgaggccatcgcgcgggagggagactggcgggcgagacgagtgaggggcagctagaggcgccgcgggcttaagaaggggccacagtccccggggattggggagggggcggtgacaactccgccccgcacgggggcgcctccccgcggccctggggcggggccacccctcggggtctgtgggacgcgcctgcccccaattctgccacccggcggcggtgggaggcgtctttggactccaacgcttcgggccagccctctaggggcagcctgggccctagcatctcgcgctgtccaagcctctcctgcgctgccgaggcagaggtgcgtcccggggctgccaagcggggcgtgttttggtcactggtgctgcccgctttggcgtaaggcgccctcccgcgtccgcatctgctctttcctgggctctgaagggtcccggatgaaactctctgcaggcctctgggtctctcaggtctatctccccgatctccctctcctt

SEQ ID NO: 53627 - DNA, 406 bp, Homo sapiens
  chr17:6679324-6679730
  hyper
cgtgccatcctcacccggagcgccggccgagcctcccgcctcccaacgcctggccagggccccgtctcgccctctgcacatgggatccactgaccaggcaactgcaggtttggggctctgcgacccgggggcaggaacagagccttgcaggcggcagcgcgtcacaaaggcggccggagcttggcatttagcttgggccagagcaaggcgcagacccggggcgcccatggagttggcgtcggagcaacagctgcgcgggcggagcaggtaggcgcgctccagtccctgcagcccgagcggggttcagcgaacgggtaacgggagaatgcgggccggagcaggctggggtggcggtgggatgccccgaggcccgcggcggggaggcgggctgctctcatcaccccct

SEQ ID NO: 53628 - DNA, 242 bp, Homo sapiens
  chr17:6734925-6735167
  hyper
ttgcgggtaggggtcggtggggtggggtcatggtttacttacctcagcgccacacagaaccactacgcaagctcgggatgggagcctccttaccccaactggagcttccagctcttgcagaacagagaggtaaacaacgcggtctccatgacaacaagtgacgcgttgccagggcaaagagggctggttccgccactgagcagcctggccaaaggcttagcgcaggcgcaaattctgcggac

SEQ ID NO: 53629 - DNA, 30 bp, Homo sapiens
  chr17:6916080-6916110
  hyper
gtgaggggactccccggcaaggatcggaga

SEQ ID NO: 53630 - DNA, 130 bp, Homo sapiens
  chr17:6939680-6939810
  hyper
agcagccctgttaccgcttagatggcgcgcaggacagagccccccgacgggggctggggatgggtggtggtgctctcagcgttcttccagtcggcgcttgtgtttggggtgctccgctcctttggggtct

SEQ ID NO: 53631 - DNA, 282 bp, Homo sapiens
  chr17:6945870-6946152
  hyper
acagggggtgaggtggagggtgatcgcgccgaggaggagcagagcgccccgccagccgaaagtatcgagaagaagctgcaaggcgggcgccaggagcagcgaggaggccccgttgccggtgagcgccagccccaccgccaagactcgacggcgggagaagtaacgcgagagggtgcctagggcgggggcgaacaccagggcccaaccaaagcctgcgaatgaataggaggggatgggggccggcactggggacgcccgccccagcattcccagcccggctct

SEQ ID NO: 53632 - DNA, 22 bp, Homo sapiens
  chr17:6946175-6946197
  hyper
cgctaccccagatcccaacaag

SEQ ID NO: 53633 - DNA, 30 bp, Homo sapiens
  chr17:6946512-6946542
  hyper
ctcttttctagagccggttgccctttctca

SEQ ID NO: 53634 - DNA, 32 bp, Homo sapiens
  chr17:6947308-6947340
  hyper
aatccggcaagccgcgcgtgaggccagacgcc

SEQ ID NO: 53635 - DNA, 30 bp, Homo sapiens
  chr17:7120469-7120499
  hyper
ggggggcctggccgcggcggcgggtaaggg

SEQ ID NO: 53636 - DNA, 30 bp, Homo sapiens
  chr17:7137318-7137348
  hyper
gtgcccctccatgtcgcccaatccactcta

SEQ ID NO: 53637 - DNA, 166 bp, Homo sapiens
  chr17:7137842-7138008
  hyper
ctctcctcatgtcacgtgacttaaaggcagccaccccgcgctcctcagccgccctccgtcacgtgatcccctcccaatcacgtgaccgtctgactccgcctagtgcccccgccacatgatcgctgccttcagcaacggtctcccagcccccaaacgtgtaccccag

SEQ ID NO: 53638 - DNA, 30 bp, Homo sapiens; identical to SEQ ID NO: 10941
  chr17:7142931-7142961
  hyper

SEQ ID NO: 53639 - DNA, 30 bp, Homo sapiens
  chr17:7145924-7145954
  hyper
gtgggctacgcaggcgacgtagcaaagacg

SEQ ID NO: 53640 - DNA, 190 bp, Homo sapiens
  chr17:7146324-7146514
  hyper
gcggaggaacactgcgggacttgagttaaatcatgtgatctcaaagagggcggagcgtcacgtggcgggtgcgcgaagtagggccggcttgggagggcgccggggaggcggggccggctgggcgacagctgggagggggaccgacgccttcccggacagcggaggtcggggcgccagccacctgggggca

SEQ ID NO: 53641 - DNA, 15 bp, Homo sapiens
  chr17:7146549-7146564
  hyper
cgaagcccggtttct

SEQ ID NO: 53642 - DNA, 30 bp, Homo sapiens
  chr17:7154230-7154260
  hyper
gctttcttaaagagcgccccacccaccacc

SEQ ID NO: 53643 - DNA, 30 bp, Homo sapiens
  chr17:7155269-7155299
  hyper
aggcgccattttaccgtccaaaggactccc

SEQ ID NO: 53644 - DNA, 564 bp, Homo sapiens
  chr17:7165741-7166305
  hyper
tccgaggctgcggtgcgcagcagaggtggctcggaggtgagccagcaggtgcgggcggacaggtggggcgcacctgagtatatgtagggcgtcgggggcgcggcccgcgcgccccgggagcgcgggagggggaggcgggaccggaggggcggccgaggatgacctgacgtcaccgaagggacactcacctgaaccggaagtcgtggcccccacccctccttgcccaggtgaggaggaagaaacctgagcaccagggtcacgccccttcgcttgcccggttttgaccgccgctggggaggaggcggtggctccccaggagtcccaagctccgagtcagcccctccggactggatttccctcgaacaccgggaagccccttcctttcttcccaacaggtgcgcctgggacgctgcggggcgcccctgacaagcctcggcgccgccctttccccgccgggttctgtccaaagtgctctctcctcggccctgctttcgcccccacccgctgctctccttttttttcctgtctcctaccctggtcgatcccaccttcgggggccctggc

SEQ ID NO: 53645 - DNA, 357 bp, Homo sapiens
  chr17:7166376-7166733
  hyper
cggcttagcgtggctccccaacagccccaccttcctgtgcccccattccaacccaacatgacttacagcctgaaccctttgcactcaacctccccacctaccactgtcccctccggcatcaaggctcctaactggaggaagaaaccactgggacctaaagccggccgagggtggggagcagggtgagggctaggtcagagtcttggccacacccatcgttcccctcccttagagtcttttcagacctatcctccacctttcccacccctcccccacactcgcccgtttctctttccctcccgggcctgggcttggactgccaattgctgtgcactctgtcacgcctcactgttccgt

SEQ ID NO: 53646 - DNA, 30 bp, Homo sapiens; identical to SEQ ID NO: 10944
  chr17:7184884-7184914
  hyper

SEQ ID NO: 53647 - DNA, 30 bp, Homo sapiens
  chr17:7198332-7198362
  hyper
gcagtgagtagcaccgctcgcctccaccct

SEQ ID NO: 53648 - DNA, 204 bp, Homo sapiens
  chr17:7199819-7200023
  hyper
tccgcgtctccttcgccgccagctgcccgcagcagccgcagtcgcctctcccggtcccggcgcgccctctgccggccgctcccggaggccgccggattccgcttcctcgctgaccctccacttgctatctatcgcccgccgcacccctccggccctttcagagttgaagattcggatttccggggcatcgggcacagtggacag

SEQ ID NO: 53649 - DNA, 30 bp, Homo sapiens
  chr17:7210181-7210211
  hyper
catagagaccaatacggactgagggtttaa

SEQ ID NO: 53650 - DNA, 30 bp, Homo sapiens
  chr17:7232754-7232784
  hyper
gcaatgaagcagcccgcgctaggagctggg

SEQ ID NO: 53651 - DNA, 30 bp, Homo sapiens
  chr17:7233838-7233868
  hyper
aggagtgcccgcagcggtcacaggagtcga

SEQ ID NO: 53652 - DNA, 1358 bp, Homo sapiens
  chr17:7254484-7255842
  hyper
gcagtgcccgcggcgcgcacgttcccacccaggctcggagcgcgaggtccccaggtgggccccaaccgccggatcctgcccttctgcactggggcccagccgcctcccggcctttcctccctcccccaggagatgagacgtatcttgacatcttccgcgacttctccctcatggcgtcagacgacccggagaagctgagccgtcgcagtcatgacctccacacgctgtgacccgaggcccacggggcccgcgcctgcctcccttccccgccaccgggccctctgccattaaagcctccgtgcttcgctcttcccttctggttcacttcttgggcgccaccttcgggcccgtagggtgttgggcgctgcggctcccgaggtgcggggagcagctgggggtttgcgagctccagtccagcaaggtgcgactccggggagcgaggcggcagcttcggccgcggcctgagcgcagggcgctgcggggcgggggctctcgggctggggcgacgtggccagcccagtcctgccgaggggtggggctggccctggggctcgctggccccgcgccgccgcggagagagcgcgcccgggccaccccggctggaaggcatccccggaatgcggcggctcagcacccgccccctcgggaattccccgggggagccgctgggagggactcggctcccgggctgggccggccgggcctcgggctctgagcggtgggattagaggctccagccccgccgacttgcagacgtgagatcgggcacacctgagcggcggcggggcggtcgtggccacatccggggcgacgtgcctgagtcaccccgtcccgccagcgtctgccagtccagccagtccgcccagtctctcgcgtccgagactcgcctccagcctcccacctccgcccgggccgcgcgagcctcgcgggggcgggggcggggcgccaaggggcggggctgtctcttaaagggccccgggccgctgcccttaggccacttcctgggggcggagaggacctcagcggctgcggcgacacccagggaaggcggcgcggccgggtcccgaaactcctggctgtttccatcagagccctcggacactcccagcccgggctgagcacgcatcgtcgctccccggcggatacaagggggctccgccatccgctcccgtcagttcggcctccatctcctgggacccgcgccggcagccaggccaggcctctgagtggccccagagccctggctggactcgtccacggcggcagcgatctgcccggggtctcggaggccatcccttcagagtcggccctgtgctcgccaccgtcacctgctggttggattccggaaacccactgtc

SEQ ID NO: 53653 - DNA, 492 bp, Homo sapiens
  chr17:7284207-7284699
  hyper
gggggcttctcacagtcggggcgatctggtctggaggagggaggggccgccagtcgccctggggaccgtcaccttgtcccactagggaactcggggtgcggccctcgccggccccgggccagcggccaggtccccgccctccgcgggatttactcctgtcccgcctcctcggatttagcccaggcagcctgggaggttccgcagtcgccgcttccgccttgaccaggtgagggtccggaccgagcagggggcccgggctggggagagccggcggagcagccgtcgctgggggcgcgtccggggggcgctgggcctgtcctcttctcctgcgtccttccctcccgcagccgcgcttcctcctgtctcccttctgcgctccccgcttcccaccgagcgcgcagggccgggtcccccagggtcctgggctttctccttcccaacccaaccctgttcgcgcccggttctgagtccacctgcgcgtttccaactagg

SEQ ID NO: 53654 - DNA, 31 bp, Homo sapiens; identical to SEQ ID NO: 10948
  chr17:7307051-7307082
  hyper

SEQ ID NO: 53655 - DNA, 30 bp, Homo sapiens
  chr17:7307455-7307485
  hyper
cagccaatcccgaccgcccatgcaaataag

SEQ ID NO: 53656 - DNA, 30 bp, Homo sapiens; identical to SEQ ID NO: 10949
  chr17:7308564-7308594
  hyper

SEQ ID NO: 53657 - DNA, 30 bp, Homo sapiens; identical to SEQ ID NO: 10950
  chr17:7338603-7338633
  hyper

SEQ ID NO: 53658 - DNA, 30 bp, Homo sapiens
  chr17:7338875-7338905
  hyper
aggtagacaaggggcggcagcggaggctgg

SEQ ID NO: 53659 - DNA, 30 bp, Homo sapiens
  chr17:7339935-7339965
  hyper
tttcagcgtccgagtcgcctcagcatgacg

SEQ ID NO: 53660 - DNA, 519 bp, Homo sapiens
  chr17:7340251-7340770
  hyper
gatcccagtggtgtccgtggcgggctggcccgagggggctcggagccactcgtgggccggtccgctggcctctgagtcggcttccttctacctggtgcccggtggcggcaccgagcggccgtgcgcctccgcctggcagctctgttttgcccgccaggagctggcgctcaaagcgcgcataccagcgccgctgctgcaggcgcacgcggcggcccaggcgctactgcgcccgctggtggccgggacccgggcggcggcgccctacctcctgcggacgctgctgtactgggcgtgcgagcggctgcctgcgctctacctggcgcggccagaaaatgcgggcgcctgctgcctcgggctgctagacgagctcggccgagtgctcgaggccgggacgttgcctcactattttctgaacggccgacagctccgtacgggggacgactccgctgcgctgctcggagaattggcccggctccgcggggacccggcccgggccctccgtgccgcggtggaggaggc

SEQ ID NO: 53661 - DNA, 30 bp, Homo sapiens; identical to SEQ ID NO: 10951
  chr17:7343090-7343120
  hyper

SEQ ID NO: 53662 - DNA, 716 bp, Homo sapiens
  chr17:7348599-7349315
  hyper
tcggaggcggagggtcgactccgggagaaacttttctctggctatgatagctccgtgcggccagcgcgggaggtgggagaccgtgtcagggtcagcgttggtctcatcctggcgcaactcatcagcctggtgagggcgcgcggggggtggaggtcaggccagccgaccggccgggggcgtggctttaggcaaggccggaccagggacaggctgggggcggggcctgggacgagaccaggctgagatggaccagcctttggtgaagattggatcgaaatcagaccaatggacaagctctggccgtgggtggtggacgggcctggagtagaactgggtagggtgaaggacggacctgtgatcggaccttaaagtggggctggggacgaggcaggggctgggggacggacctcgacgtagggccacatgagtcctgagtgcccagggtggggcggagcttggtgctcaggggtcaataaatggcagcgggtggaggttcggggctgggtggattatgagctgaaggcagggccggggacagagctaggcggagggctaggcaggggcgggtctggtaggttgataggctgggagtgtagacggcaggaagaggtgtttctgagatagaggcaggtcttaaactaacgccgcttctgggaggtggacttggacccgagaggatggggctcagaaaaagggggcggcgttcccaggagaga

SEQ ID NO: 53663 - DNA, 31 bp, Homo sapiens; identical to SEQ ID NO: 10953
  chr17:7461585-7461616
  hyper

SEQ ID NO: 53664 - DNA, 59 bp, Homo sapiens
  chr17:7475919-7475978
  hyper
accggcgagaaaggcgggccctccagccaatgaggctgcggggcgggccttcaccttga

SEQ ID NO: 53665 - DNA, 154 bp, Homo sapiens
  chr17:7486365-7486519
  hyper
aaggtgccctttcccaagcagcgctgcagggtccactcggcctcgccgaagtctctgcccagcacgtggtgcgccctcgggccagcggggagggggcgaatcccgggactgcctcgccaggcctcggctccccggagactcttgggggtctggg

SEQ ID NO: 53666 - DNA, 30 bp, Homo sapiens
  chr17:7487234-7487264
  hyper
cctgagaaatgctacgaccaacttttcgtt

SEQ ID NO: 53667 - DNA, 30 bp, Homo sapiens
  chr17:7530983-7531013
  hyper
cagggcctcgcaaacggcaactagacccct

SEQ ID NO: 53668 - DNA, 30 bp, Homo sapiens
  chr17:7554125-7554155
  hyper
catatgtatgaggtcgcctgggccagtggc

SEQ ID NO: 53669 - DNA, 344 bp, Homo sapiens
  chr17:7554498-7554842
  hyper
tttgcaccccatttcgttttgtttctagacggtttggtggggggtgaagctgcattcataccccttcctcttgttattctcccctgctctgacagcaccccttttcatcgcagttggggggcctaggatcggtgcatcttccgccgcgctgccagcaccccgcagcgcgtggtcgtgcaccccggaatctgcagcagctgcatatctgaggggggtctcctttgcccgcgccgccttcgctccccgtgcttttgggtgtgtggagggcttcagcgcgcggcgcccccgcttctccgcaaccccccgccccgcgcccggactcgccccgcgccaccaagatggtc

SEQ ID NO: 53670 - DNA, 54 bp, Homo sapiens
  chr17:7555283-7555337
  hyper
cccttccctccctccggctctcactagctccgcagccccgtctatttttagctc

SEQ ID NO: 53671 - DNA, 166 bp, Homo sapiens; identical to SEQ ID NO: 10956
  chr17:7571718-7571884
  hyper

SEQ ID NO: 53672 - DNA, 825 bp, Homo sapiens; identical to SEQ ID NO: 10957
  chr17:7572183-7573008
  hyper

SEQ ID NO: 53673 - DNA, 112 bp, Homo sapiens; identical to SEQ ID NO: 10958
  chr17:7573921-7574033
  hyper

SEQ ID NO: 53674 - DNA, 622 bp, Homo sapiens; identical to SEQ ID NO: 10959
  chr17:7576545-7577167
  hyper

SEQ ID NO: 53675 - DNA, 122 bp, Homo sapiens; identical to SEQ ID NO: 10960
  chr17:7577495-7577617
  hyper

SEQ ID NO: 53676 - DNA, 559 bp, Homo sapiens; identical to SEQ ID NO: 10961
  chr17:7578174-7578733
  hyper

SEQ ID NO: 53677 - DNA, 692 bp, Homo sapiens; identical to SEQ ID NO: 10962
  chr17:7579248-7579940
  hyper

SEQ ID NO: 53678 - DNA, 254 bp, Homo sapiens
  chr17:7590693-7590947
  hyper
cccaatccagggaagcgtgtcaccgtcgtggaaagcacgctcccagcccgaacgcaaagtgtccccggagcccagcagctacctgctccctggacggtggctctagacttttgagaagctcaaaacttttagcgccagtcttgagcacatgggaggggaaaaccccaatcccatcaacccctgcgaggctcctggcacaaagctggacagtcgccatgacaagtaagggcaagtaatccgcctgccggaggaag

SEQ ID NO: 53679 - DNA, 36 bp, Homo sapiens
  chr17:7591549-7591585
  hyper
ctcggtagggggagcgtaggcgcttctcgccaagat

SEQ ID NO: 53680 - DNA, 139 bp, Homo sapiens
  chr17:7591823-7591962
  hyper
ttcgcctctcctcccgggagtcttctgcctactcccagaagaggagggaagcacaggtgggtttctttagctctgcgtcggatccctgagaacttcgaagccatcctggctgaggctaatctccgctgtgcttcctctg

SEQ ID NO: 53681 - DNA, 30 bp, Homo sapiens
  chr17:7608732-7608762
  hyper
ctggtggggctgagcgctctgccgcggggg

SEQ ID NO: 53682 - DNA, 30 bp, Homo sapiens
  chr17:7621530-7621560
  hyper
ccccacggtgcatgcgcctcaggctctagt

SEQ ID NO: 53683 - DNA, 49 bp, Homo sapiens; identical to SEQ ID NO: 10964
  chr17:7739846-7739895
  hyper

SEQ ID NO: 53684 - DNA, 50 bp, Homo sapiens; identical to SEQ ID NO: 10965
  chr17:7744963-7745013
  hyper

SEQ ID NO: 53685 - DNA, 30 bp, Homo sapiens
  chr17:7747076-7747106
  hyper
cccgggagccgagtcggctccctacctgcg

SEQ ID NO: 53686 - DNA, 56 bp, Homo sapiens
  chr17:7748402-7748458
  hyper
accccgtccctctgaccggccttttggttccctgccacacacgtcctgactcccag

SEQ ID NO: 53687 - DNA, 39 bp, Homo sapiens; identical to SEQ ID NO: 10966
  chr17:7761564-7761603
  hyper

SEQ ID NO: 53688 - DNA, 30 bp, Homo sapiens; identical to SEQ ID NO: 10967
  chr17:7790164-7790194
  hyper

SEQ ID NO: 53689 - DNA, 42 bp, Homo sapiens
  chr17:7791234-7791276
  hyper
gacgcctgcccaagttcgggaacctcccgctggggtggggag

SEQ ID NO: 53690 - DNA, 200 bp, Homo sapiens
  chr17:7905913-7906113
  hyper
ttaagggctctggccggctgtacccacgcccccgccctggcctgggctggcaaggaagacctgtgggcgggcgtcaaaagggggaccggccctgtgacccctcaccgggggccgtgggcccgagcccccggacttccctgtaaatgtcagaggcccctccgctgggatagggtcggtctgagggcgcaggcgagtccctg

SEQ ID NO: 53691 - DNA, 30 bp, Homo sapiens
  chr17:7919392-7919422
  hyper
cccatcccgggccgcggctgcaaacctcag

SEQ ID NO: 53692 - DNA, 30 bp, Homo sapiens
  chr17:7982655-7982685
  hyper
cggaggagcattcgcgcacacagaggctca

SEQ ID NO: 53693 - DNA, 30 bp, Homo sapiens
  chr17:8021861-8021891
  hyper
ggtcataaatcacacgtgactgcagccaca

SEQ ID NO: 53694 - DNA, 30 bp, Homo sapiens; identical to SEQ ID NO: 10968
  chr17:8022389-8022419
  hyper

SEQ ID NO: 53695 - DNA, 30 bp, Homo sapiens; identical to SEQ ID NO: 10969
  chr17:8023623-8023653
  hyper

SEQ ID NO: 53696 - DNA, 30 bp, Homo sapiens; identical to SEQ ID NO: 10970
  chr17:8023946-8023976
  hyper

SEQ ID NO: 53697 - DNA, 30 bp, Homo sapiens
  chr17:8026398-8026428
  hyper
ggttgatgcggtcccggcgccgcttctcca

SEQ ID NO: 53698 - DNA, 778 bp, Homo sapiens
  chr17:8055128-8055906
  hyper
ttcttcccctactccccgtccaaccacacccctactactgagcattttctgagcgccaggggaaaagggaaggttgtggccaacagcaggaaccagcgctgggaacgggatgttctagtccgaagtgggctgacatcacaggcggcgcagggccagggactggagaacagagacacggggagcgctgaaagcctaatagggtcctggtaccggggcaaacctggggcccctcgagtaacgagcaagaagaccggggcatgcccgctgagagtcggctgtggggccgggaaagctgggacggggaggtggggacaagctggaggtaagatgagtgggtcaggagtgcagactcccggtgcaagatttcgaggaggacttcggtccttgggggcagggagagggtgggtagcggtaaggacgacagtgtgccctctgcctgggccgaaagtagcccatcagattggaagtggcagcggtccggctcagggacggagatcggccccaggatggccgcagagatgcctacctggtcgcaggagtgtcctccgcacgcctgcccgccgccgctccagcccgcagccgagtggaagctccaccgggcgggcggggaggcgggttgcataatgccgggcactgccccctcattggcctcttgccgacggagccgcaggccccgcccccgattggctggggatctcttcccggcgcctgattggctagtggtctccactaaggtcagggctgtgtcacacacacgggcgcacgtggacctgggtgc

SEQ ID NO: 53699 - DNA, 30 bp, Homo sapiens
  chr17:8062189-8062219
  hyper
cctagaccacagggcgcaccgggcttagag

SEQ ID NO: 53700 - DNA, 30 bp, Homo sapiens; identical to SEQ ID NO: 10972
  chr17:8093365-8093395
  hyper

SEQ ID NO: 53701 - DNA, 30 bp, Homo sapiens; identical to SEQ ID NO: 10973
  chr17:8093752-8093782
  hyper

SEQ ID NO: 53702 - DNA, 30 bp, Homo sapiens; identical to SEQ ID NO: 10974
  chr17:8152395-8152425
  hyper

SEQ ID NO: 53703 - DNA, 30 bp, Homo sapiens; identical to SEQ ID NO: 10975
  chr17:8191805-8191835
  hyper

SEQ ID NO: 53704 - DNA, 636 bp, Homo sapiens
  chr17:8230115-8230751
  hyper
aaaccctccatactcgcaggttcagctacagaggtaactgcaggctcaggttctccagggtggccagcccaccagcccaccgtcccggtgcagcagtgcctctccagcgacagctccaccgcgagcctggcgggctcccgaccttgctccccagcacgtcgtctccaagccacggtctcaccaccctccatcagcctcgggcgacaccaaggggaacagagcgctggagctcctcgaagtcctcccgaccttagcggggctccgttcatcctcccggacgtggccaggccccgctctggccccgcgcccgcccctcccgcggggctgcccctgtctctctgccggagacccggactcagtgagtgagcgcagcgcggccatagggcttcctgcagcggggtctcagcacgtcttctggctggactctggggtctcctggcctggctgtgtctcctggttctcagcgctcgcctcccacgcggggcggagtatgggagtgggctgctcccgcggaagaatcctggggaagttgaggcactggctcccgctgttcagaacactgcccgacgtccccagagctagccactcctccttcccacccacccgcagcactctcgaggtcgcaacggcagtcac

SEQ ID NO: 53705 - DNA, 44 bp, Homo sapiens
  chr17:8280079-8280123
  hyper
ccctagaggcaccgcggacaccgtgcagcgctgttcacccagat

SEQ ID NO: 53706 - DNA, 30 bp, Homo sapiens
  chr17:8287231-8287261
  hyper
tcgaaggagccaggcgagaggaagcctctc

SEQ ID NO: 53707 - DNA, 203 bp, Homo sapiens
  chr17:8533203-8533406
  hyper
ttccccggcgccggcggagtccgaccctccccacgcccgcggccggctccggagcccctcacccgccgcgcgcttccccggccgcgcagagccaatgccctcctgtccctccacccacgggtcgggcgcgcgccgcccgccttccaagcccatggtgaacccctctggtgctgcgggggaccggtcgcgccaggcctaaccca

SEQ ID NO: 53708 - DNA, 837 bp, Homo sapiens
  chr17:8533985-8534822
  hyper
ggtggcgcgggcgcacgtccccagccgcgaccacagatccagcgcctcagtcccaaacccaccgctgcctccgccgggctcctttagcactgctgctcggggctgccccacccacccctaccctcattgggccagctccacgcccatcaccgccgcccccagacccactggttggtttgcgcgcccatctccaagggaagacgttagcaacccgaacgaagctaccttcccgagtccggctccctccacccacctggaatgacgctcattggctcccgctcccagcccaggccacagaggccccaatctcatgggctggctcttacgcccgtcataggctccgggaggtgcggccggggcagtggcgcgggattggctggctcgtgcgtagatggacagctgaggctggctgaacgcccggcgatcccgcgaggctgcgggtgcgggccccgcggcggccggcgcgctgcgctgacattggctgtgcgggccgcggggcaggtgggccgcggcaggaggctggcgctctgactgcagactcctcgtcctagcgtcaggcagccgccgcagccgcagcacattcgagcgcccggtcgccccctgtgcttgcggcagccggcatgtaccgcagcgggacggggttccaccgcggagtcgcgggccctcagcgttgcctgcaggggcggggcggagcgcggtccagagtcctgacgtcacccccggggctgcgcggggttggggccgcggcgctgcgactcacctgcagtgggggaaggaacgcgggggagggcgctgctccgcccatgcgcacagggtttggcccgggacccggctgcg

SEQ ID NO: 53709 - DNA, 91 bp, Homo sapiens; identical to SEQ ID NO: 10980
  chr17:8649034-8649125
  hyper

SEQ ID NO: 53710 - DNA, 34 bp, Homo sapiens
  chr17:8759639-8759673
  hyper
caggcgtggtggctcacgcctataatcccaacac

SEQ ID NO: 53711 - DNA, 634 bp, Homo sapiens
  chr17:8868814-8869448
  hyper
cggagcccactctccccgacggtccccagcttgctccagctctgcctggagctcccatgcgtgccctccgcatccgccctggccgcccagtcacacacctgcagtccccgccgggcgccgagcccctctccagcggcgactccctgcgattcgggtgaccgtcgggaccaccgcgccccagctggagccgcgcggcgagccgcagcatctgcccagcctgggctcctccggcgggcggggcggagcctgtcagggggcggggcctaatggggcggggctgaccgcggagccggcctctccagccacctggcggcccggcagcgtcagccaggtgcgcgcccggccccacatcctctgggtcacgcccccgaggccgcaaggcgtctgagaagcagccccggctctgacccgccagccctcggaagaagcagaccctggccggtccatggcagtggcccgaggggcaccagcgcggagcaccagcgacccccaaggagtaaggggaggttaggcccccgcgtcggaagcgcggctttggccccgcaggagggctgggcggagcaggggggcaggtctggggtaggggcttaggggaaagacgagaaagaggaagctccgacgagctgcttccttc

SEQ ID NO: 53712 - DNA, 121 bp, Homo sapiens
  chr17:8901448-8901569
  hyper
ccaagcccagcatttactgtgcgagccacctgggggccatttttgttgcccgaggtggtgcgcctgcgccacctggtggactacgggaaagtagcagatcggtgagatgggttgaggcacc

SEQ ID NO: 53713 - DNA, 1545 bp, Homo sapiens
  chr17:8906182-8907727
  hyper
agttgtgtgtcccaagttacacgcatcctatcttggcccagctccactggagcccgagcggcggggcgcagggtgcgagcgggaggctggtgttctgcccgcgatgggcaggggagccgggtggccgcggggcgaggagccgcgagggccgggccggcgtgacaccacctggcggagtctcggggaagagtcttaaaggcgcgcgctcctccgtgccccgcgcactcgaacgggagccgcggagagctcgcctcccgctgccgccggcgcctcggggaggtaagtgccacccgcggatcccgagtcgcggccgggtgggggcggcccgcggctgccccgcgctcgggaagctctggctggggctgcggtcggagggcggcgcccaagttttcttgaaggcctcggagggcagctggagcggcgtagagcctgcgcggggatggcgggggtggccgcgggccggggccgtctgggggcggccatcccgggcggtgcgtggaaaagtaggcactggtgcgcggcgaggggcgcacgccagagccccagccccgcgtcctgcgcacttggcgcgctctggccgcggtcccggcgagccccagcctgctccgggccgcgaccccggctccgcgccttcctgcccgcccgggtcctttgtagcccgctggccccgcggtcgcgcacggtcacgccggcaggtcgcgctcggcggccggccaagccagccccggccctgccgcgcccgcgccccgggccaccccgcccggccccctcggcgctgcacccctcgctttccccatctccagccgctcgctattttcacacctcccggtgccccggccccggcgcctgattcagtgcttagtaattaatttggcgtttcagaatggtcagcgggctggataatgggtgcattcatcccccgggctaatctgaacagaggtgggaagaaaggctttcacagacagaaaatgccattcgccgagcgctcaaaggggctgtcactcccagaataaatcgccgccgcgcccgccggctcctctggccatttccatacagctccggcccgcgccgcggacccgccggcctcggcctcggctcccgggaatcactcactcgagtgccttcgacgggaaagtcgggcgagagctggacccaggcgggggccgagggaaacggggaaactggagactcgggtgaaggccgcaggggacaaagagattgattagaaaatcaaacgcgcatctagaaggaggcgcaggcgactgctcaaggcgcggacggcggagctggggctcgggagcgtccgtccaaaacccccgaggttcgccaaagaggagggcccgcggcccagaccctccggagcgtgcccgaggcgacacggcaagcttctggggctcccaaattgtgaatggagttcaatgcacaagcatagatagtagaaacagggtcgacctgcacagactttttattccgagttccttgtgctatcagccccgtcgccctcgcggcctggaaggtgacacggtgtcttccccggcctcctgc

SEQ ID NO: 53714 - DNA, 241 bp, Homo sapiens; identical to SEQ ID NO: 10983
  chr17:8907776-8908017
  hyper

SEQ ID NO: 53715 - DNA, 30 bp, Homo sapiens; identical to SEQ ID NO: 10984
  chr17:8925737-8925767
  hyper

SEQ ID NO: 53716 - DNA, 281 bp, Homo sapiens
  chr17:9548105-9548386
  hyper
tccaggtcgagttccggtttccctgcttacggatcgggcggcctccctacgttgcgataacctctctgagcccccttccttgccgattaaagcaagggtgatcaagtcttgcaagtttttggaaaatgattctaacccaatctgtggtgtaaaaaagcaaaccacaaccactcgggggcttttttcacagggcaacacgtggctcccagttcaggtcccgggttggcgggtgcaggcacagactctgcctccccccaaggggcagacggtctggaaggagg

SEQ ID NO: 53717 - DNA, 787 bp, Homo sapiens
  chr17:9548724-9549511
  hyper
aggggtaggggtggcccggcgctgccctggagggggctggtcgtgccgccggattcccgcgcggggcggggctgccccgcccttggctccgcctccgccccgtccccgcacacctggcccgcaggtagccggcaccaggagccttagagaagctgtagggcctgctggccgctcgtccgcctcgcgcccgggggctccgcgcctggagctgcgccggcggcagccatggacctgggccccggggacgcggcaggagggggaccgctcgcgccccggccccgccgccgccgctccctgcgccgcctgttcagccgcttcctgctggcgctgggcagccgctcacgccccggggactcaccgccccggccccagccgggacactgtgatggcgacggtgaggggggcttcgcctgcgccccgggcccagttccagcggcccccgggagccccggggaggaacgcccgcccggaccccagccccagctccagctccccgccggcgatggggcgcggccgccgggcgctcagggcttgaagaaccacggcaacacctgtttcatgaacgcggtggtgcagtgtctcagcaacaccgacctgctggccgagttcctggcgctggggcgctaccgggcggctccgggccgcgccgaggtcaccgagcagctggcggcgctggtgcgcgcgctctggactcgcgaatacacgccccaactttccgcggagttcaaggtaggcagcgctgcgccgccgaccgccctgtccccctggtttcgcctcttgaaaagtg

SEQ ID NO: 53718 - DNA, 268 bp, Homo sapiens
  chr17:10101179-10101447
  hyper
cgccagacccttcaccggcccctgccactgccgggaacgctcccgcctgctccttaactcacacaggcaacaagttctcgcttcctcagagcagccacggtgtgctccggaggcccggcgcaaggtggaagctccccgcgagtccgcgttgcccacgccccgaggggcgcccgctgccgtcgctgccccccaggagcgtggagctacaggtagcgccggcaagggctgccccccggggcgcccctccgaccgggacgctgcggcatcc

SEQ ID NO: 53719 - DNA, 342 bp, Homo sapiens
  chr17:10102264-10102606
  hyper
cggagggctgcgcgctccctcgcagaggggcctgtcactggggagaggggctcccactcgcgcccccaccgccggggaccgcgggaatggaaacgcccctctgttctgtgcctgctttgtaggcctggcggcccgtggcgtgcgggcggcttcttcgaggtgtctgcgagggatcgtttgtggttgtcattgtagtggttgaacctggggttgaacttgtctcaccggaaactgaacaatgggtgaaagacaggtttgaagcctggcgcctgagcccagcagcctggtggcagcgtggcacgctggagggacggaatggagagaagacggggtcggagttga

SEQ ID NO: 53720 - DNA, 42 bp, Homo sapiens
  chr17:10600736-10600778
  hyper
aaaactcgagtccgcgaggcaagaagcgccaaagttggccac

SEQ ID NO: 53721 - DNA, 802 bp, Homo sapiens
  chr17:10632843-10633645
  hyper
ctgggaagttccacgcgcggaaccagccccttccagggtgtgagccctggtatgggactcgcttccatgaacacatccgcgtctcttagacgggggagaaagtgggggctccccaagcagaaagcccaagtcccgtcctccccactaactgtgcgcccctgcgactctgcccgctagtcagttacacggcccgctaggccagggggcggagctgggagccgggcgggtccccctcccaccgcggccgcctgacctgcaccaaggccgccagcgcgaagaaggcggccatgagtccgttgcaggcccgccacagcgctggcgccatggctcggagaacacggcgcggggcggtgagtcctgccacgtgcggggcggtgagtcctgccacgtacggtccgccttcctccttgcgcggagggaccgagacccccgcctcggtttcggtgccttggggacactgccgtggccgtcgctccgcccgggggcggggagcgaagggcgtgggtgtagcccccactcagcgacccattcagcccgccccgaacgccgcggggtgtaggcggcgccgtcctggtttcgcggatgggaaagcgagtccctcagggagcgcaggtctcggtggtggacggaagtcgaatttgaacccgtataggttcaactccaaaccctgttttcactaaagctaccttcctcacaaaaaaaaaaaaaaagaagaaagaaaaaaaagaaggaaaaaaggaaggaaggcaggcgggaggggagagaggaagaaagagaaagaaagaaaaagaaagaaggaaag

SEQ ID NO: 53722 - DNA, 30 bp, Homo sapiens; identical to SEQ ID NO: 10993
  chr17:11901016-11901046
  hyper

SEQ ID NO: 53723 - DNA, 30 bp, Homo sapiens; identical to SEQ ID NO: 10994
  chr17:11924904-11924934
  hyper

SEQ ID NO: 53724 - DNA, 30 bp, Homo sapiens
  chr17:12490863-12490893
  hyper
aaataaagatatatgcgtatggttagacaa

SEQ ID NO: 53725 - DNA, 30 bp, Homo sapiens
  chr17:12569189-12569219
  hyper
tggtggcgattctccgcaatcgccggcagc

SEQ ID NO: 53726 - DNA, 687 bp, Homo sapiens
  chr17:12692677-12693364
  hyper
ccttctcccacctccgcactccactgtccttgcaaactttggacagaggaaaggtgggcacggggcgcgaaactacaagtcccggcatgcacggcgttctccgcacaggcgcacggggaccgccgggccagccggccagccagcctgcggagactcccgggtccccgcgccggactgggactgggagcaggcagcccgggcggagcgggccggtgccgaggacggccccaggcattgctctgccccgggcattgcgcggcgcgcgtgagggggatgcggcaggaggcggcgcggcgggaggagtaggcggcggcgccctcgggagggagctgcgcgcgggccagacggcgcccggaggctccgcagtgccgccgccgtcgcccgggaggctccgcgcgggagccatgtaaccctgcggcgggctccgggctgctccgtccttccccagctcccgggctagcgcggcagcggggccacgatgaagaagcagttcaatcgcatgcgccagctggccaaccagacggtgggcaggtaggtcacccgcgggcaccgctgtcggtgcgcgcccgcgaggctgcatccgcaggggcgcgcaggtgatggagcccgcccagcctccagtcctccttgcctcagtcctttcccctgcaccagctccctccaggcgccgctcgcaggcgcgacccc

SEQ ID NO: 53727 - DNA, 134 bp, Homo sapiens
  chr17:12877185-12877319
  hyper
cgctcttgccaggactgggctgcccagggctgtgtcttggccgccgggagcagccagggtgctgggagcacagcccccaatgcatcgcttcccgggcccccggggtgctaaagctgcgctgctcttctcccaac

SEQ ID NO: 53728 - DNA, 131 bp, Homo sapiens
  chr17:12877650-12877781
  hyper
gggcgggctggtgtgcggtgcagggggtgtctgggttggccgcactggaggcctcttggatttcgtcgtttcccatgcccccgcccccatttctaagcattcatatttggcttctgcgtcgcgctggcacc

SEQ ID NO: 53729 - DNA, 108 bp, Homo sapiens; identical to SEQ ID NO: 10997
  chr17:13503836-13503944
  hyper

SEQ ID NO: 53730 - DNA, 575 bp, Homo sapiens; identical to SEQ ID NO: 10998
  chr17:13504194-13504769
  hyper

SEQ ID NO: 53731 - DNA, 686 bp, Homo sapiens; identical to SEQ ID NO: 10999
  chr17:13505001-13505687
  hyper

SEQ ID NO: 53732 - DNA, 308 bp, Homo sapiens
  chr17:14200598-14200906
  hyper
ccgcctctggccaggggttcccgcgcctcgagcagcgccctgggcccttctacgggaagaggggatcgcggcgcccgcgacacccaggagctcggacgaccgcagcctcaccactaacccccaacaaaggtacagcgggagtccaggccgagataaagttcccttcccagtccgctggggagacaactggccgcggctgccctctgctccgctcccggctgtcccgcagctgcgaggccggggccagagcgctcccttccgggcgggcatcggagccgctgcggcgccgaccgcccttcgcgcccggg

SEQ ID NO: 53733 - DNA, 285 bp, Homo sapiens
  chr17:14200930-14201215
  hyper
cgcagctgctaacccccgaggggccgcctcgctggcgaggggagcgggaggaaggtccggattccggtggcaggaactggggctctgggccaccggttcaggctgccccaggaaatgcctgctttgcggtgccgcagagggtatagaggagctcggccccagagggtggctgttggggaggcggagctggccgcaggctggagcagctgcggagcctcccatcccgagcctagaatcggagaaatttcaggcggaaaatactgcggggatggtttggctcaagtc

SEQ ID NO: 53734 - DNA, 30 bp, Homo sapiens
  chr17:14202901-14202931
  hyper
ggttccgctgcgcccgccgtcgccgacagt

SEQ ID NO: 53735 - DNA, 30 bp, Homo sapiens
  chr17:14203174-14203204
  hyper
gcaaagcgcagcaccgctcacccgcacttc

SEQ ID NO: 53736 - DNA, 996 bp, Homo sapiens
  chr17:14204005-14205001
  hyper
tcccaacatctgggcaactaccgccaaggctggcttctagggaacgagtgcggaaatgcgtgcgggtgtgggagcgcaccactcagtagggtaggacctctcccagcgctaggtcactgcagcattcttcccaccatctgctcctgtcaccagcccctaactccgcccctttgggcccgccccttgttccgaagccaatagcaacccctgaccgccctacaccgcccagaagcctttccacaccccctcgtcctgggagcgggttggctgctgagctctcggagaagcgcctgtatttgcatggcgttcggggtttttggtaggtagagcagcccgtcactctggaaggccgggaccgcccactccacctcggtccacagctctcttcctgcgcagttcgcctctgcagcctctgcggggaagtgccggggctgctcgaggctcagttcttaggactgcaaggaggcagccccggcgtgcggcggtgcgcacagtctagagtggccagggcgcgagagtgcaacgtcctcctggccccgagcgcgtcgtcgcgccccgggagcagaccctcgcccagcagttaccgccgtcccgactttccgttccagttgcagctcctgccgggcaacatgtcaagagccgccgccgctacagctgccgccgccacctggggaagagcagcagcagcagcggcggccgcgggcacacgggggcaataaaccgagccacccgggcgtccagcgtgccggggaaccctctctgcgctcactgcccggcgggacccacgccatgtgctgagccatgtccctggccgcgcccgcgggcagcgcatggggcagcgcctgagtggcggcagatcttgcctcgatgtccccggccggctcctaccgcagccgccgccgcccccgccgccggtgaggaggaagctcgcgctgctcttcgccatgctctgcgtctggctctatatgttcctgtactcgtgcgccggctcctgcg

SEQ ID NO: 53737 - DNA, 1098 bp, Homo sapiens
  chr17:14205182-14206280
  hyper
cgaggtgccggactccccaagccccatctccagctttttcagtgggtctgggagcaagcagctgccgcaggccatcatcatcggcgtgaagaagggcggcacgcgggcgctgctggagtttctgcgcgtgcaccccgacgtgcgcgccgtgggcgccgagccccatttcttcgatcgcagctacgacaagggcctcgcttggtaccggtgagtttccctgccaggggcagggtctccatcgtcgattcagaccctgagctaagggagacatggcgtatgatagggaattggcagggttacagcttcggaccacccggggtagggcagggaaactacggcagattgcgcagcgcatcctgtccgggtgcggtgagggttgcgctccgcttggttctcgtcacaacccacagaaagttctcgcggagcactggtgcccttgaattcatcaggcgacctcgccgcaaagaagaagggcagcgactgagaccgccctcagcaaagcgagccaccctctaaccatgggggtatccgactcgaatcgtattttatgactcgttttaaattttttcctcccggagcccgagacgctgggaatgttctgagcccctttggtcggtctccgccctcaaggaacttctagagcagcttctgcttcccagatggggagagggggtgggggccgcggcgtcccggcgaggccgcagagtctgttaactttttgttacagtccgcctggttaccggaaccccaagggtgtcagacccgcctcgctcgcgagccgcctgggctcgggagggtgagccgggcgggtggcccggcgcctccgcctggcgggcgggcggcgcgcggagcgtggagctgtgctggtccctgtcgggcaaaggcgcgcactgcaaccggctggagcggcgcgaggctttgaaggcgtccgggcctccgggcaccgccgcccgtttccgcctccctgccctcggtgctgggatagggaaagcaaggacgcgtgtctccgcggggcttttacacgtccggagcaaagaatattcggggcccattgattgagaaatgagggttgcttcgaggtcgcggcttccggaaatt

SEQ ID NO: 53738 - DNA, 30 bp, Homo sapiens; identical to SEQ ID NO: 11003
  chr17:14940884-14940914
  hyper

SEQ ID NO: 53739 - DNA, 37 bp, Homo sapiens; identical to SEQ ID NO: 11004
  chr17:15164612-15164649
  hyper

SEQ ID NO: 53740 - DNA, 894 bp, Homo sapiens
  chr17:15165788-15166682
  hyper
cacaaactcgggtgcgttggctccgctgctggcgccgccaaagctgcgctgcggggctgcgcgcgcgcgaagcaagggggcagtgggaggctcctggcgttcccctttaacgggaacaacgccctgtttgcgtcgctgcagtagggtgtgtccctgggtcagcgtgtgcgggagggcgggactcagggaggagagggggcaggagagagggagggcaggagacagtcacttggccttaaatgcgcctcaagaaaaagtcggtccctgcaaaaccgcggcgacttttactcgaaaccagaggcggctgagctttctcacctcccacctcccttctcccctggccccgtggagacctagtgttgaccgagaaactggctcctcagcccactctgggaagacccagccaaatgtagctcagcggatgcccagggctgggcttctgggcccgccgacgccgaccgcgcccgcgcggggctgaggctggattcctttcccactaatagagggcagcgggcgcttgagcgctggaagaagtccctctcctctcgggtcctggagcccctgccctgtcctggcgtcttagccggacacacctgccccgcgccggtccccgctattactgtctgcacctacgaagcatgccagcttcctaggattggcggggattgatctagcgggctcctcttgggtgcgaattaggggaagaaaagtccggccgactactggatagcatggtctgggattgggctcctcctagcctaggcaaaaccagactaccaccgaataagctctaggcaaagtgttcctgcagcagtcgggcttggctgtcagccttggctggagtcctggccatggggtttggcgggcgggtgcgaggtggccatttgaggtggg

SEQ ID NO: 53741 - DNA, 566 bp, Homo sapiens; identical to SEQ ID NO: 11007
  chr17:15244285-15244851
  hyper

SEQ ID NO: 53742 - DNA, 159 bp, Homo sapiens
  chr17:15244987-15245146
  hyper
cggccgccccggccggctcgccggagctgactggccagttataggagaggcgggagctgtcaggccaggagggaaacccgtcgggcggcggttactatggacgcgctcacgcttagtaaccgaggctccccgccctccgggagacctccttggtttggg

SEQ ID NO: 53743 - DNA, 650 bp, Homo sapiens
  chr17:15848768-15849418
  hyper
gggcttctgcactgacttctacggctgcctcttcctcgcctgcttcgtgctggtgctcacgcagagctccatcttcagccttctggccgtggcagtcgacagatacctggccatctgtgtcccgctcaggtgaggcgctcggcgtcgcccgaactcggggccccgtcggagctccgaaatgggtcgtcttctccaggccggggttcctccctcgggggccccagacgggccaggctgggggcgcgcggggcgcttggagggctggttcccagcctggccaccccgcaacgctagaccagtgcgcccgggcacccaagacatcccagatgcgcgtcgctctaaggagatctgcgtagggacagctctagggggtccggggagtgcggtccccggcgcccggggaggcgccgtggaaaccccggggaaagcgtcacccccggggaaagcgtcacccccgtgggcgggtggagcccggggcgcgggagttttggtgatcacatctccactcctgccacgaaggccgttcctaacactcgcccgcagcggcggtgcagcggcagtcccgtgagtgctgcggctcccggaggcccgggaggttcccactaagggcaaggcaactttggacgctgggcattcgcaccgtcagaatg

SEQ ID NO: 53744 - DNA, 117 bp, Homo sapiens
  chr17:16120413-16120530
  hyper
cttccggagcatgtcggcgggagggacttaacagcggaacccaacattccccggtgaagttttccagccggagtcagggtcagaggcagcctttcctactgcgcaggctcagtgctg

SEQ ID NO: 53745 - DNA, 103 bp, Homo sapiens
  chr17:16256922-16257025
  hyper
cccggccgctgggacgcacctgcctgttcagtcccgcaggcagaggggctgcgcctgggcctacgctcgcgatacccagaatccactcgcacctgcgaaggcg

SEQ ID NO: 53746 - DNA, 52 bp, Homo sapiens; identical to SEQ ID NO: 11011
  chr17:16283874-16283926
  hyper

SEQ ID NO: 53747 - DNA, 1162 bp, Homo sapiens
  chr17:16283956-16285118
  hyper
cgcctgtgcggcgcacgcgcgctcagttacttagcaacctcggcgctaagccaccccaggtggagcccagcaacaacagagccaccgcgtcccccaccaatcagcgccgacctcgccttcgcaggcctaaccaatcagtgccggcgctgcaaggaagtttccagagctttcgaggaaggtttcttcaactcaaattcatccgcctgataattttcttatattttcctaaagaaggaagagaagcgcatagaggagaagggaaataattttttaggagcctttcttacggctatgaggaatttggggctcagttgaaaagcctaaactgcctctcgggaggttgggcgcggcgaactactttcagcggcgcacggagacggcgtctacgtgaggggtgataagtgacgcaacactcgttgcataaatttgcgctccgccagcccggagcatttaggggcggttggctttgttgggtgagcttgtttgtgtccctgtgggtggacgtggttggtgattggcaggatcctggtatccgctaacaggtactggcccgcagccgtaacgaccttgggggggtgtgagaggggggaatgggtgaggtcaaggtggaggcttcttggggttgggtgggccgctgaggggagggcgtgggggaggggagggcgaggtgacgcggcgctgggcctttccgggacagtgggccttgttgacctgaggggggcgagggcggttggcgcgcgcgcgcgttgacggaaactaacggacgcctaaccgatcggcgattctgtcgagtttacttcgcggggaaggcggaaaagaggtagtttgtgtggtttctggaagcctttactttggaatcccagtgtgagaaaggtgccccttcttgtgtttcaatgggatttttatttcgcgagtcttgtgggtttggttttgttttcagtttgcctaacaccgtgcttaggtttgaggcagattggagttcggtcgggggagtttgaatatccggaacagttagtggggaaagctgtggacgcttggtaagagagcgctctggattttccgctgttgacgttgaaaccttgaatgacgaatttcgtattaagtgacttagccttgtaaaattgaggggaggcttgcggaatattaacgtatttaaggcatt

SEQ ID NO: 53748 - DNA, 421 bp, Homo sapiens
  chr17:16290016-16290437
  hyper
gacagagccagaacttgtctcaaaaaaacaaaaaacaaaaaactggccagtgtgtgaggggcgcgcgattttttgagatgtgagagggaattgtgcttcacggtcaccaccaggtgtcgcgacatcaggtgccgcgccgtcccgcttctgaggcgcggtggcctgagaaactggttgcagagcccgctcttcctagcctactgcccgaaaacgcagaatttggggaattggaactttggaggcgggagcgaaagacctctccttctcccgccggaaatacccctcttttgggaagcgcgcccctgccttccggaaaggaagaaacgtgatcacgccgctgcactcaagcctctgggtgatagagcgagaagaccctgtctccaaaacacaaacacacaaacaaacaaaaaggtaatggggg

SEQ ID NO: 53749 - DNA, 30 bp, Homo sapiens
  chr17:16310344-16310374
  hyper
cccgggtcggcctccgccctccaagccgga

SEQ ID NO: 53750 - DNA, 30 bp, Homo sapiens
  chr17:16343384-16343414
  hyper
gaagcgataactgacgaagactactcctgt

SEQ ID NO: 53751 - DNA, 30 bp, Homo sapiens; identical to SEQ ID NO: 11013
  chr17:16394884-16394914
  hyper

SEQ ID NO: 53752 - DNA, 58 bp, Homo sapiens
  chr17:16395228-16395286
  hyper
gttcgcgtcgggggcccggcgcggcgccggggctggctctctccgccaggctgccctt

SEQ ID NO: 53753 - DNA, 102 bp, Homo sapiens
  chr17:16439047-16439149
  hyper
gataggggtcttcagccgtgcgcgtgtggagcagggccacggcgcctgcgcagcggaggctgtggaccacatttcccaagaacactgcgttcctgggcccgc

SEQ ID NO: 53754 - DNA, 321 bp, Homo sapiens
  chr17:16440042-16440363
  hyper
cgaaaaggggactcacttcggagaagctgccctctctgcaaacttatttgagtaagggactgaagactgaagttagggagaggaaagggatacacgtctgttagtgcgagttgcgtgtcttgttagtgcgaactggaacccaagtttcctttgggaagactttggcgaaagagtacaggaacaccagccactccagaaagagaccgctcctcttgaacccgcccacttaactcctcccgcaggctctacgttcgaatgcctccaccctgattttagaaggttataggcgcacaatcaaggaaatgtcgacagagggcgtcc

SEQ ID NO: 53755 - DNA, 761 bp, Homo sapiens
  chr17:16472053-16472814
  hyper
tgcctcttactcctcttcagccgcagggtcgaggtcgagggcagcgggggagtcggggaccgtgcgacgcgcaacgctgggactgggcccacagcagcctccaccccgtctttgccctcccgcaagccacgagcacgggagcccgcgcgtggacgggctcgggctgtcactgatcgcgcggacactcgcgcgctgcgcccggacatcaatacctgtcgctgggacccggccgacgggcagccggagcggccctaaggccacaggcaacaatggcgacgctggcacaggcgcctgcgtggcgggctcagtcccgagcggcagcggatcctcgggctccgccacttcccttccccgcaaagcacagagtgtcccggccaggagctgcacgttccagcccggtcctgagaagcccggcccagaaaccccggcgcctctgcttagccgcgacctcgcctcggcgtcactgcgcatgtgcgccagaggaacgctgcgcgcccgcagagccaatcggagcccaagctgccgcctccccctcccgcgcctctggccctggacctgtctccatggcaacctcctccacccatcgctctgacttgcttgtcagcctgcgaggttccgaagggaacttcaaagtttccccgggcagacgcaggtctggtagacgtcttggaggccagggaggtgccagtagctggaggagcgccgggagttgaagccccgcgccaactacgcagagaaaactgggcgccagatttcctaga

SEQ ID NO: 53756 - DNA, 30 bp, Homo sapiens
  chr17:16556544-16556574
  hyper
aggaaaagctgcctcggttactgagtagcg

SEQ ID NO: 53757 - DNA, 31 bp, Homo sapiens; identical to SEQ ID NO: 11015
  chr17:16570443-16570474
  hyper

SEQ ID NO: 53758 - DNA, 30 bp, Homo sapiens
  chr17:16946232-16946262
  hyper
actgcttcaagccccgcgagtcgcatctgc

SEQ ID NO: 53759 - DNA, 134 bp, Homo sapiens
  chr17:17140478-17140612
  hyper
cgccgacacccaggcgcgtgactccctgagccgtaccaccacccaacactgcggtgggggtgcgggagccgtccgagcgcgtcctgcaccgcgaggagagccgggcctccctagctctcgcaagcccaggaaca

SEQ ID NO: 53760 - DNA, 30 bp, Homo sapiens
  chr17:17184593-17184623
  hyper
ctcgcgagcggcgacgtcacttccgctggt

SEQ ID NO: 53761 - DNA, 774 bp, Homo sapiens
  chr17:17398362-17399136
  hyper
tggggcgcaccgggccgttggatttgacttaacaaaaaggtcctccttaggttgtgtcgccagcgcggcggggctcctagctgatgacgcagcgctccttgtccttggcctggctgccggcgctggccttctcgcggatgtacatgaggtcgctgtgtacgctgggccggcgcgcgaagggtgccacgatgccaaaggcgtcgcccgggtcgccgccgccgccgccgctgccggcccgcagcagcttcttgttccgcagcgccttcttgtgcagcacgtcgcagtactgcaccgagaccttgcggtgcaggtctgggctcatctcgctgggcagcttggccatggcgaagagcgcgcggaacatctggtccaggctgctgttcttcttggccgagatctcgaagtaggcgcagcgctgggggtcgtcgcccaccagctgctcgatctcgcgctggtccacctcgcggtagaagtcgcggtcacccttgttgccgcagatgaccaggggcacgtccacgttctccttggttttgttcttgaggcaagacttggtgtcgaggatctgctgcctgagccgctgcacctcctcgaaggagtcgcggttgtccagactgaacaccaggatgaaaacgtctcctagagggggcacagagagcagaaaaggagaaggtgagggtggccgcccaggggacaagtcgggctgactttgaggccgcgcggggcgcgctagcctctctaagcgcgaagcgcactactcggcgcgcggcagccgga

SEQ ID NO: 53762 - DNA, 537 bp, Homo sapiens
  chr17:17399419-17399956
  hyper
gatagcagttcttggccgggatactcagctccgagtcgctcgggcacatcttcttgatcatcgcggccagtttcattgggcagaggggccgcgagggcgggcgcggggccgagagaagggcagagagcggctgagggtcgctggggtggcacgcggggtgagcggctggagggctctgctcgggctgggcgcggctcgggcttggggctccggctccgctcgggctgggctcgggctaggctgggctcggctggggttctcccaggatctgggcacaggccgcttgctctggctttggcgcccggccgccgcccttatatgcagcctgctcggctgccccgccccggccctcccagctcggtgcgtcacgccccgcggggcccgcctcccccgcaccggctcccagtcccggcgacctcgtcacccgctgccgggctcctgctctctgggcgcgggggctggggggagcagtccagggtcgggctgaggctggaggcgctcggactccgcttttccactgccgcgggctcggcggcc

SEQ ID NO: 53763 - DNA, 30 bp, Homo sapiens
  chr17:17655149-17655179
  hyper
cagagcactcagtcgcggtgtaacgccctg

SEQ ID NO: 53764 - DNA, 439 bp, Homo sapiens
  chr17:17655443-17655882
  hyper
gagagggctgcccagcgccccgcaggagcctcccgcccggcatacccacgggccagtgccgggactgggcgcggggcggcgcgcgggcgcaggtagccatggtgacagcgccccagactactcgtatttcctgccttttgtgttcgcacatgccccagcccccagcccgggcagacgcccctgattggccgtcacactgcggaggggcggggcggggtgagcggaaaggggcggggctgacctgtgggcggggcccccggggcgaggctggtcttgtactggcgcgcgctgcctgtgattaacaggcgggcgcggccgcgcgcggctggaaaggggcggggcttccggaacagccgccccgggagcctgggataggggtgagtgctccttgatggcggccccgaacaaaggacgcctccagacccgggcttcctgtccg

SEQ ID NO: 53765 - DNA, 2180 bp, Homo sapiens
  chr17:17685253-17687433
  hyper
ctcggggccccgggccggccgccccctttttgcggggggagagcaggagccgcctctcgcagccactctgcgcgcggggtgggagggagagagggaggcgaagggacgacagcgccgggctccccgcccccatcccacccggttccaatatttcgcagaaaggcacgcggctcctaatcggtcttttccaggctgagatttagccgtgcgatgcccgcgcaggggcgggggccgcgggccaggggaggcgctcagagtccggagccgccgagcgaggtgaggagcccgcgtcctcggctggtggagcgggcgggcgggcgcgcaaacccgagaggcagatatagaaaggggggcaggttaaaaataaccctctccggctgggaagctcgcgcgcgctctctcgcctcgttcggtgccagaggactccaggggaggtggcgttggggagggcagagcgggattccccctcctccgccgggcggggtgcccgcctgcgcgccgcggttgcacgtgtgcggggccgcgcgcccgggccccctctgcacccggtcggtgggtgccccctccccaggaccgggcgcatctggcagtggccccccgcccgcagccttgcgcggctggagggaagcgctccattattcattatttacgagcgttaataggtttgagccacgggggcggggggttgggggggcgacgaggacccagtggggaccgaagcattagaagaagggatagggagggagggggaagggcgggggcggggctgtgccgcggcctggaggaagaggtctcggcctggggcccggcgagccgggcgcacctctccgtcaggtttctccacaccgccggccgtcgaggctgctcagggcgccaagagggcagcacgggccttagattttgctctcggcctctgtccttcgcgtcctcgcccttaccgaggcgtggggagggagctgcggaggccgtacgccccgccctgcgcgccccttgccgccgccgcgtccccgcggcagccccggcctcatttatcatcatctttggtcaagtggagtgtgcaaggaacagctgcttcactcggctgacttcgagggcggctacgggagaatcagggagatgaatgatgggggctggtggcagccccccgcggtccccgcgcaggcgagagggaggcggggacgtccagggccgcctccgcctcatggcgagtgcagcgcccccttcctctctcctggcgcctgcagcgaccggggaccgggggaccggggcaccgaggaccgggcccgccccgggaggggactgggcgcggggacgggggggcgcccttcgccggcggagaactggcgggcgcgctgccggcagagcccgaggttgccgtgaccttgctggggtcagcgggctgggctgcggaggcggcggcgcggcgtctttggtgcgctttccggattggcgcagaggccgggaaacaaggcgggggcgggcgggggaacacaaatagaaggtgaaattttacctgcccctgagggagtcctgcggattttctccggcagcagcaggcgctctgcctttgtcttacacggctgaaacatctgttgcagaggggcggagaggccgcaacaacccccacacaccctgcgctgctccccgtccccctctgccccagccgggctgcaggactccaggcgccgcgttaaccctgctcgcgctggggcgcgcgcccgcactcgctgccgcagtccagcgcctcgcgtggggctcctcgcccccgccccggatctggtcctggccggggcgcccggtgacccccctccacctcgatggggtgctgaggtgtaggcggggggcgggggcggaaagggttaatggcctagtcgcagaccctaattgtcagagccggccccgcttcgtttcaattaccctaagtagagactgaatgcgcaattaacgaagtcagcttgccaactggaaagccggccccgctttcacgttgagcagaatactccaccagctgacttggacgaagcaatttcctcctctctctctccccttttttctctccttctctcttccaatccccctccctctttttctctctccttaataataaaattataccaagcagtttgcggtgtggcaggcggccagaaaagcgtttctttaaacgccgccgtctcacaatt

SEQ ID NO: 53766 - DNA, 30 bp, Homo sapiens; identical to SEQ ID NO: 11021
  chr17:17726744-17726774
  hyper

SEQ ID NO: 53767 - DNA, 30 bp, Homo sapiens
  chr17:17727266-17727296
  hyper
gctcccgcccccttcgttaaagggtcaaag

SEQ ID NO: 53768 - DNA, 30 bp, Homo sapiens; identical to SEQ ID NO: 11022
  chr17:17740390-17740420
  hyper

SEQ ID NO: 53769 - DNA, 30 bp, Homo sapiens
  chr17:17876050-17876080
  hyper
tctaggaatatccccgcccatagaaagtac

SEQ ID NO: 53770 - DNA, 82 bp, Homo sapiens
  chr17:17991152-17991234
  hyper
ccagcgggcggaaccgatagtgtctggcacttggctcgcccggactctgaatcctggagcaccaggcgcccacgagaacgct

SEQ ID NO: 53771 - DNA, 30 bp, Homo sapiens
  chr17:18129072-18129102
  hyper
acaaggtgcggcggcggcccgggcccgggc

SEQ ID NO: 53772 - DNA, 30 bp, Homo sapiens
  chr17:18161602-18161632
  hyper
tgacctcagaggggcggggaggctcgcccg

SEQ ID NO: 53773 - DNA, 134 bp, Homo sapiens
  chr17:18164323-18164457
  hyper
gagggaaggccaaacggcctccagggccccgctgcgcaaacttgggttattttcagccacccgtgccctttcctgcttctcggagctggaaggctgtggactgaggcctgcgcgaccccgccagagatggggct

SEQ ID NO: 53774 - DNA, 30 bp, Homo sapiens; identical to SEQ ID NO: 11024
  chr17:18266978-18267008
  hyper

SEQ ID NO: 53775 - DNA, 30 bp, Homo sapiens; identical to SEQ ID NO: 11025
  chr17:18761716-18761746
  hyper

SEQ ID NO: 53776 - DNA, 918 bp, Homo sapiens; identical to SEQ ID NO: 11026
  chr17:18907420-18908338
  hyper

SEQ ID NO: 53777 - DNA, 329 bp, Homo sapiens
  chr17:19140729-19141058
  hyper
tcaaactgagccagacgcggcggtggcggcggctccgcgggctacggtcgctcccgcctctcgagcgctgccggtggccgcagcggcgcacccacgccggcccggaggagcagaggtgagccacagcccgtggggctccaaggccagagcgagtccccggggcgaggaccctccccctctccagggcgcggacgcccccagagcacaggctcccctacctcaccagccccgccagggcatgcgcccctgccgccccgctggtccctacgccaggctctgggggatccccttctttccaaccaggccccgccccacggactggagcatgg

SEQ ID NO: 53778 - DNA, 112 bp, Homo sapiens
  chr17:19141267-19141379
  hyper
gcccagcctggtctcccgccagcccccgtgcagagcccggtccgggcgccctccgggaatcgggggaggggtccttatctctgtccgggatcccgcccgtctcacctttcct

SEQ ID NO: 53779 - DNA, 46 bp, Homo sapiens
  chr17:19141602-19141648
  hyper
ctctctccctgtggggcggctcccctagagccgagagccgagcgcg

SEQ ID NO: 53780 - DNA, 31 bp, Homo sapiens; identical to SEQ ID NO: 11028
  chr17:19265421-19265452
  hyper

SEQ ID NO: 53781 - DNA, 30 bp, Homo sapiens
  chr17:19266215-19266245
  hyper
actctgactcggcccggctccccgtccccg

SEQ ID NO: 53782 - DNA, 30 bp, Homo sapiens; identical to SEQ ID NO: 11029
  chr17:19281497-19281527
  hyper

SEQ ID NO: 53783 - DNA, 425 bp, Homo sapiens
  chr17:19282072-19282497
  hyper
gccacgaaccagccgcgcgcttctgcccttgtcggtttaggaaactgggaagttccctggtcctgctccccagcccgcagaggggacactgaggcccacggtaggtggtcctctcctcacccgagtctccacacagacaccatggccgagcctctgaaggaggaagacggcgaggacggctctgcggagccccccgggcccgtgaaggccgaacccgcccacaccgctgcctctgtagcggccaagaacctggccctgcttaaagcccgctccttcgatgtgacctttgacgtgggcgacgagtacgagatcatcgagaccataggcaacggggcctatggagtggtgtcctccgcccgccgccgcctcaccggtgagcttcctgagccgtcgcctcccagatgtggcagcgtcgcagggagtgg

SEQ ID NO: 53784 - DNA, 31 bp, Homo sapiens; identical to SEQ ID NO: 11031
  chr17:19391541-19391572
  hyper

SEQ ID NO: 53785 - DNA, 748 bp, Homo sapiens
  chr17:19436885-19437633
  hyper
tgagtcctggcgtccgagacgtggaggacccagcccccggagcgcgttccgttagtttacagagctttttcaaactttgccttccaagtgcaggagttccttggtctttgcaagacccgcaggcgtccgcagtggtgcagagagaggtgcaaggggcgcgcccaaggtcgcaggctgcctggctgcgcgctcagtcgggcccccgggcgccaggcgcggggcgggctctgggcgggcggccggggcggggactgcagagcaggctgcactgcgcggtacccactgccggcctgcgcggtactcactgccggcctccgcggtacccactgccggcctccgcgctacccggccgcagcgcgcgagtcacatggaagctcctgaggagcccgcgccagtgcgcggaggcccggaggccacccttgaggtccgtgggtcgcgctgcttgcggctgtccgccttccgagaagagctgcgggcgctcttggtcctggctggccccgcggtgagtaaggtggcctcagtggcaggccggtaccggcgggctggggacctggtgatttctgcctccgcgggtgactttggcgggctttggggaccgagcgagctgtccgccggcgggctccggggagcatcgtgccaggagccgggcgggcaccccagctcctctgcctgcgtcccggccgctttccgctccgcaccacccgactgggggccccgcggggcactgcgggaacggctggtacgcgcc

SEQ ID NO: 53786 - DNA, 30 bp, Homo sapiens; identical to SEQ ID NO: 11033
  chr17:19437914-19437944
  hyper

SEQ ID NO: 53787 - DNA, 30 bp, Homo sapiens
  chr17:19552378-19552408
  hyper
ggatggtgcaggagcgcgagaaggatatcc

SEQ ID NO: 53788 - DNA, 410 bp, Homo sapiens
  chr17:19648093-19648503
  hyper
aagaggcggcgggggcgcgcggggcgcggcggaggggagggcggtgcgcccagtctccgcgaccgaggggccaggtggccccaagtccttcctgaacctctctgggtcgcactctccccagcccctccccccacgccccatcgcatggccccgacactggcagaaggcggccgcccagcctgagcaccttgtgcaggtctgcggccagcgcgcccaccagctcctgctcctgctcctggatcaggcgctgcagcgcctccagctgctggatccggaactgcagcggacgggtcctgcccgagctgaaggcggcgcgggcgcgcttcacggcctcgctgatcttgctcatggcgcctggggacagagagcacctgcagctggctgaggggcacgagcgcgccctgcctccc

SEQ ID NO: 53789 - DNA, 188 bp, Homo sapiens
  chr17:19770862-19771050
  hyper
cggactctcatgccgagagaccggagcggaaactggggaagctgccgcgcggagccagggtcagcgaggcccggcccggcccctgccgctcatggcccggcctgccgccggccgctggctgtctggcgaagcggcctcggcgctgccgggccaggggtgccgtcaccgtcactgtgcgcgcccagagc

SEQ ID NO: 53790 - DNA, 30 bp, Homo sapiens
  chr17:19881062-19881092
  hyper
ggagtgggccccaccgcctcctcgggatgc

SEQ ID NO: 53791 - DNA, 80 bp, Homo sapiens
  chr17:19912415-19912495
  hyper
tccagtgtagagtgcggaaatggggtccacatctggcttgggacgcccaaacatcgattatgtgcgaccagaggatgagc

SEQ ID NO: 53792 - DNA, 30 bp, Homo sapiens
  chr17:19913202-19913232
  hyper
gtggtgcagaggaccgagaagcccttcgcc

SEQ ID NO: 53793 - DNA, 167 bp, Homo sapiens; identical to SEQ ID NO: 11034
  chr17:20059179-20059346
  hyper

SEQ ID NO: 53794 - DNA, 30 bp, Homo sapiens
  chr17:20755490-20755520
  hyper
gccactgccacactgcgcgcccgctatcca

SEQ ID NO: 53795 - DNA, 507 bp, Homo sapiens
  chr17:20755759-20756266
  hyper
tgagcgatcaccgagcgcacctcgcaatctctgatcttcgaacccactgaaaaagcacaaggcatggggagtcctgttggttcacgccccgggtgcgaataccaaaagcaactcccgctggaaagcctgcaggaaactcgagacaaagacagaggcaaacgcaacgctgggaagagccaggggtgctgccgtctgcaaaagcagagacgcgtctcccttcgggcaaagtgactgctacaaagtctgttccctcctgcgcagggacagagacatttaaaggcctgaacggacgtcagcaccagtagagctcgctgggtgagcgccaggcctccccgccccaaggatagcgcgcacagggcgatctgctgctcgcgaggtagaaagtggcttacttggggagaaaacagagctggtggcgctgctgagtgtcaaaccctggagcccatcgtcaagacgttatattggtggcagttctgctgtgagtgcacttgccgaattgaacagagc

SEQ ID NO: 53796 - DNA, 30 bp, Homo sapiens; identical to SEQ ID NO: 11035
  chr17:20945540-20945570
  hyper

SEQ ID NO: 53797 - DNA, 133 bp, Homo sapiens
  chr17:21030039-21030172
  hyper
ccaactgtgttcttcgccggaagtccacggaacaccaaccacgaccttcggaatttccctccggaagatgaaggcactgtagttatgcgggtggaccctatcagatctcgggtccatcgggtcctgtgtacac

SEQ ID NO: 53798 - DNA, 30 bp, Homo sapiens
  chr17:21117656-21117686
  hyper
cttctgcgagggcgcgaggactccaggagc

SEQ ID NO: 53799 - DNA, 84 bp, Homo sapiens
  chr17:21117924-21118008
  hyper
gggcccctccgcgtcgccacgcctgcccttcacagccttggcccataaggtcaccgaggggcgggaggcgccgcccgggccctc

SEQ ID NO: 53800 - DNA, 30 bp, Homo sapiens
  chr17:21187753-21187783
  hyper
atgttgacgggcagcgcgaggggcgcggct

SEQ ID NO: 53801 - DNA, 30 bp, Homo sapiens
  chr17:21189239-21189269
  hyper
tgtttttggtgcgtcggagtttcagtaggc

SEQ ID NO: 53802 - DNA, 213 bp, Homo sapiens; identical to SEQ ID NO: 11037
  chr17:21189751-21189964
  hyper

SEQ ID NO: 53803 - DNA, 30 bp, Homo sapiens
  chr17:25621215-25621245
  hyper
tctgtggttgactccgtactttggtctgag

SEQ ID NO: 53804 - DNA, 30 bp, Homo sapiens; identical to SEQ ID NO: 11038
  chr17:25659594-25659624
  hyper

SEQ ID NO: 53805 - DNA, 30 bp, Homo sapiens; identical to SEQ ID NO: 11039
  chr17:25659905-25659935
  hyper

SEQ ID NO: 53806 - DNA, 394 bp, Homo sapiens
  chr17:26120456-26120850
  hyper
aagcgttctaaaagaggaaaacgcttttagtaaaccctcaggaatcccacagagcgcacatccccgccctccgatttctcccagagagagatggggccccgcccgggctcggagcccaccgcttccctcccagggcggacttcggcccgcggggtacctggctctgcgcgggcagcagtcaggcttcggccggaggatcctgcagagcagcctgcacagccggggcccggcggcctcgcacgccgcgcccagcccctcgcgcatggcccggctccttaggcgcagctccgctggctccacgcgcctcccagcgcccgcgctttatcgctcggagcctgcagcccccgccccgggggcggggcgagccgagcagcggcgggggctcttcacccac

SEQ ID NO: 53807 - DNA, 63 bp, Homo sapiens
  chr17:26120901-26120964
  hyper
cgggacccaagcacccaggggcccgcagccggcgtctgccgcggagtttggatggcactggac

SEQ ID NO: 53808 - DNA, 30 bp, Homo sapiens
  chr17:26220459-26220489
  hyper
ccgcgcgcgggactcggggtcctactgggt

SEQ ID NO: 53809 - DNA, 202 bp, Homo sapiens; identical to SEQ ID NO: 11040
  chr17:26554550-26554752
  hyper

SEQ ID NO: 53810 - DNA, 519 bp, Homo sapiens
  chr17:26554791-26555310
  hyper
cgacgtctcccaggcttgcctccccggatcggattcctttcccttcgatcccgcaggccggaggcgcagacctgtggtgaggacacccgaggcctcctgggagacctgcagaccacgcccacctcatttacatgttcactcccgaccctggaaacccggatttcgcctccggacagcggcgtctgggcagggttcgggtactgcagtcccgcgtctggatgcccccgccccctgagctgcagggctgtgtgtggtccttccctggtcccaaaataaagagcgaattgcacagaaacggaatgtgtgcctttgtattttctttcctttctccttcgtggaggtggcgtctcgtggaagtggagggtggaggcgtgggggccagaggagagaaaacctactcggacagaggcgctccaggacaaggctggggcgagcgcgggggttccctctgctcggagcccaaggaaaattcgaccacccagcctggggctggacagcgcccagaccaggggctgctgt

SEQ ID NO: 53811 - DNA, 61 bp, Homo sapiens
  chr17:26879851-26879912
  hyper
cctgactacctctccgcttactcattgtgttccagcctttctgcccgtgagttccaggctc

SEQ ID NO: 53812 - DNA, 30 bp, Homo sapiens
  chr17:26898036-26898066
  hyper
tcccccgaccctcccgcacagcagtctcac

SEQ ID NO: 53813 - DNA, 145 bp, Homo sapiens
  chr17:26903725-26903870
  hyper
ccggagtcccaggtagcaggacgaggatggcaggggaagagccaaggaaatgaagcggagatgttgagtggctcccgccttgcctggccttacctgtgcgcagccagttagcagccgcagccacaagcacagctcgggttctgat

SEQ ID NO: 53814 - DNA, 239 bp, Homo sapiens
  chr17:26903937-26904176
  hyper
cgtgactcctccgggggcgtggcctgcatgccccgccctgaccacaccccctccccaggactggtgtccggggcaagaccacgccctcagaggcggggcggcgaggtggagtgagcgccccgccaggcatccgtggctgttagggactgccctcccacctcggggagcctggccatgaccttgcgttcatttctgccacaatccctttaccacgtgccgggcacttgctggatgctggg

SEQ ID NO: 53815 - DNA, 31 bp, Homo sapiens; identical to SEQ ID NO: 11043
  chr17:26925397-26925428
  hyper

SEQ ID NO: 53816 - DNA, 332 bp, Homo sapiens; identical to SEQ ID NO: 11044
  chr17:26925693-26926025
  hyper

SEQ ID NO: 53817 - DNA, 342 bp, Homo sapiens; identical to SEQ ID NO: 11045
  chr17:26926083-26926425
  hyper

SEQ ID NO: 53818 - DNA, 57 bp, Homo sapiens; identical to SEQ ID NO: 11046
  chr17:26926826-26926883
  hyper

SEQ ID NO: 53819 - DNA, 30 bp, Homo sapiens
  chr17:26972039-26972069
  hyper
agcaagaccaacagcgcggagaagaacaga

SEQ ID NO: 53820 - DNA, 30 bp, Homo sapiens
  chr17:26989015-26989045
  hyper
ttatttgactagagcggcctgagaaaccgg

SEQ ID NO: 53821 - DNA, 230 bp, Homo sapiens
  chr17:27038455-27038685
  hyper
ccagcactgggccccgcctctctcgttggtttgcccgtctccctcgtcggtttgccggcttcccgcgtgcgccgctcggggtctgcgagccgggccgcgccctctgcccagcccctgccccgcccctcttaccgcggcatctgctctcatcccacgagcgggccttgggctcggtcttttccttagtccatctttcaattgtgagcgtcgtcctgacccacatcgctctc

SEQ ID NO: 53822 - DNA, 228 bp, Homo sapiens
  chr17:27038906-27039134
  hyper
ggggcctccggcgcctcccaggcccctctttatctcagaccttaaccttacaggcccagctctcaccacccatctctggttccagcttgcagtccaaaccccagattttcaccctgcctccagatcgtagccccaattcttagtgttacaacgagccttgcccccagccccattcttagccccgccccggccattctctaaaccgcacactcccgtcccgctccccgc

SEQ ID NO: 53823 - DNA, 14 bp, Homo sapiens
  chr17:27044404-27044418
  hyper
gccacggggaccct

SEQ ID NO: 53824 - DNA, 162 bp, Homo sapiens; identical to SEQ ID NO: 11050
  chr17:27044581-27044743
  hyper

SEQ ID NO: 53825 - DNA, 9 bp, Homo sapiens
  chr17:27044880-27044889
  hyper
cgctgtaac

SEQ ID NO: 53826 - DNA, 30 bp, Homo sapiens; identical to SEQ ID NO: 11051
  chr17:27070933-27070963
  hyper

SEQ ID NO: 53827 - DNA, 30 bp, Homo sapiens
  chr17:27182112-27182142
  hyper
gtgggccctcatgtcgcgagggagcgggtg

SEQ ID NO: 53828 - DNA, 30 bp, Homo sapiens
  chr17:27224789-27224819
  hyper
gagcgcagcttcggcggtcaacgcgcttta

SEQ ID NO: 53829 - DNA, 305 bp, Homo sapiens
  chr17:27230103-27230408
  hyper
caggggcgtgtgcgcgtgcgggtgcgcgccggccctgcgagcgccccctaggcgtgcgtcggcgtcctgggggcgtgtgcctctgtggacacctttgaggtgagtgtgtgcgcttgggccctgggagcgccccctaggtgtgtgcctgtgtgaactcctgggtgtgtgtgtccacgtacaccctgtgagtgcacgctaggtatgtgcatgcatctgcaacgcttgtatgtgaatgatctctaggtgtgtatgtgcccatgtccctgaggatcaccctttgggttgtgtgcgtgcctctggatcct

SEQ ID NO: 53830 - DNA, 30 bp, Homo sapiens
  chr17:27254415-27254445
  hyper
gtcacatggtcccaccgttccatcttccca

SEQ ID NO: 53831 - DNA, 30 bp, Homo sapiens; identical to SEQ ID NO: 11052
  chr17:27276469-27276499
  hyper

SEQ ID NO: 53832 - DNA, 30 bp, Homo sapiens
  chr17:27277033-27277063
  hyper
cgcagagaagggtccgccaagaagctccaa

SEQ ID NO: 53833 - DNA, 30 bp, Homo sapiens; identical to SEQ ID NO: 11053
  chr17:27278795-27278825
  hyper

SEQ ID NO: 53834 - DNA, 30 bp, Homo sapiens
  chr17:27329672-27329702
  hyper
accacttcctgatcccgaagtgccaggctg

SEQ ID NO: 53835 - DNA, 534 bp, Homo sapiens
  chr17:27332300-27332834
  hyper
aggtgagcgaggtcccaaccccgggtccggccgccatccggccccgtctcccctcagtaagaacactagaggccctggaaccggcggcaaagtcgagcgaagtttggcgggcggcaggggaagcgggaccacgggccgccagctggaccgtcccgactcactgccttgcgccccccggcacgcgccccagcaccctgagatgcctagagtgtggcgaggtagcgcgcgggtgagcgcgtgtgtgcggggagtgggtggcgtgatgaattgcatcagagaaatcccattagatctggggagatgattaaagacgaggtctcggccgggcgcgaatggcgggagccgcggcagcttcccgcccgcgaagcccgcgccccgcccggcttggccggcgccgggggcagcgcagccggcggggcgcggtgcttggactgggcagccagatgcccgaagctgggcaccgggtctcccttcccacccctggggccccgctcccgcccccgtcctgccgccggatgccggggtcccttaccg

SEQ ID NO: 53836 - DNA, 119 bp, Homo sapiens
  chr17:27333169-27333288
  hyper
aggctcccgctccaccgcgactgccctactcatgtgggcacacggcccctgcccttctgcgctgcccacccccagccaagcatgccaccctctttcccgttaacggcctgctaaggaac

SEQ ID NO: 53837 - DNA, 30 bp, Homo sapiens; identical to SEQ ID NO: 11054
  chr17:27506955-27506985
  hyper

SEQ ID NO: 53838 - DNA, 30 bp, Homo sapiens
  chr17:27621421-27621451
  hyper
tctacactcctcgccggcaagcaggctcgt

SEQ ID NO: 53839 - DNA, 30 bp, Homo sapiens
  chr17:27717121-27717151
  hyper
atgaatgcacctgacgcccgcgtggcatta

SEQ ID NO: 53840 - DNA, 54 bp, Homo sapiens; identical to SEQ ID NO: 11055
  chr17:27893140-27893194
  hyper

SEQ ID NO: 53841 - DNA, 402 bp, Homo sapiens
  chr17:27893344-27893746
  hyper
cggacgggtccccgaaaggctgcagccgggggctgaccagtgggcaaccgtggtggccgcggcgatggaagatgaccgggtagtagccgcgctccagggcgagcaagcaaaggccgagcacgttgcgggtgaggcgaccccacgcattggggatcaccagaagcaccgcaggaaggcccccggcgctggtgatccggcggccccgaacacaaggtcctaccacccagtccagggccactagcccatcgtccgccaactgcaggtactcccgggccagctcaggcccaggcgctacgggcaggacgaagtggcagagggtctgcaggtggggcccggagaaccaggagcgcgggccggcctccagcgcctctgagcgccgcagggcgcgcagcaggcactggg

SEQ ID NO: 53842 - DNA, 30 bp, Homo sapiens
  chr17:27894162-27894192
  hyper
ccgccccccacccccgccccggccctttgt

SEQ ID NO: 53843 - DNA, 72 bp, Homo sapiens; identical to SEQ ID NO: 11057
  chr17:27940265-27940337
  hyper

SEQ ID NO: 53844 - DNA, 311 bp, Homo sapiens; identical to SEQ ID NO: 11058
  chr17:27940590-27940901
  hyper

SEQ ID NO: 53845 - DNA, 904 bp, Homo sapiens
  chr17:27942511-27943415
  hyper
cctccctaggccagctccagccgagtcccagacgaggctcgcagtccagcctccgctggagcgacgtgggtctcccctaagctccaagagttctggtctcccgcgaggggcggagttccctccccagtcccgcccccgggcccagcccaagaaggcggggtccggagttcgggactaaaagccggggcggggccgagcttgtgcgccccgccccgctccgcctgcctggcgcgcggggctagtccgtgccgtccaccagctcgcacagcatgttctccagagccgtgatgcgctgctcctgggcctgcacccgctcgcggagggccttgatctcttccagcagcgtctccagggtgtgctgctgctggggcggaggacagagaggccgtgtcgtataggggcggttgggggagatgtagattgggccagagtgcagcagggccgatcttaccgacaagggggcgtcgctggccgactggctgcggcgggggccggagggcgggcgcacgtccaggatgttgcgcttcgtgacccggagctcgcggtgcttggggggcacatagccgtccctcagcgaaatgagcacgggttcggcgtcctggccggatagccattcgtccgcttctagggccggctccgggcctggcgtatccgggtacagatcgtcctggaagaggtctgactgcgggggtgggtggacaggaggacttgcgtgagagggtgcggggcttgctccgctcccttccgcctcgtagccctgcccaacccttctcccggcccctcaccttgcggggcacagtcatgatgataggttcacactttctttcgtgtagcttgtagaacctataagggagcagggttcagcaccctcgcagacttccacgtccttaacttctcctgtcta

SEQ ID NO: 53846 - DNA, 634 bp, Homo sapiens
  chr17:27949493-27950127
  hyper
cagcctgctgccctgacactgcgttcttgcgagacgaggtgtctgcgccctccgggagcgctggctgctgtccggccaaatatagacaccacgtcctccccgcccgaaaccgaatttggcggcgcggggggaggaggcgcagacctctgcccctcagggaccccgcccgctccgctggctgcggtgacggccgggtgtggggggctgggtacctggtcctgagcgggctgcggggcgctcacgctgcgaatcctctgcggaaggggcccgagtgcgtagggggccgaggaaggcttcagggcgaaggagccacctctccgggtgtctgtagtatctgggacccgggtgtccagctccgcactctggccgatcctgcggctctctagagcccggcgccgctgcagccccagctgccgctgccatcaacctaagagggcggggctagcataggggcggggccagagcccaagttgccccgccccctccagcggcgggaaagtcgagcgaccccgactcccctcccagcttccgccggcctcggagaaccatcgaaaataaatgtgcagctgtgtgctaggtgcgcacgctgcttccctccctccatgactcccgggtaggctggggaggctcgggt

SEQ ID NO: 53847 - DNA, 183 bp, Homo sapiens
  chr17:28088116-28088299
  hyper
gagcaaactttctgagcgttcgcggaggcggagggcgcgcggcggactcacagctggttgatggcgttctgcgagatgaccgcgttggcggagaagtaaggaatcatgtcggggccaccgaggctgcaggtgcaagcgaggggcgccttcctcttgcgggccaacgtgctcagggtcatgggg

SEQ ID NO: 53848 - DNA, 56 bp, Homo sapiens; identical to SEQ ID NO: 11061
  chr17:28089159-28089215
  hyper

SEQ ID NO: 53849 - DNA, 30 bp, Homo sapiens
  chr17:28256762-28256792
  hyper
ggggcaaaaatcaacgtcttgtagttcctg

SEQ ID NO: 53850 - DNA, 30 bp, Homo sapiens
  chr17:28257058-28257088
  hyper
ctgagtgtgggggacgggagggtgacggag

SEQ ID NO: 53851 - DNA, 330 bp, Homo sapiens
  chr17:28443741-28444071
  hyper
accagcgattcaaccgacaagcaggatccgggccacccaaagccgcgcgagagtttacgtgacgacatcggcgtcagcgtcacggaggcgtcggccacgttcagcggacacgggagcaagatggcgattccgggcaggcagtgagtgatccgggagttagggtcaggctgggggatgagaaactacggcgactgtatctttggccgaggagttttaaatgcgctggaagtgaagggactgtgtcgtcaagggtagagacgggaaaaaacgagaagtcctgaggaacatagattcccctcccccgtacattttcccggatggaagcccgaa

SEQ ID NO: 53852 - DNA, 702 bp, Homo sapiens
  chr17:28562556-28563258
  hyper
tccccctccccgaggcggggaagaaggtctggaaagaaacgtgggttcgaggcggagaggaaaagcggacccacctgccaggctgcgcggggaggctggtcccgggctgggcaggcgggctggcctcgcgccctcgaggcacccggcggcgctggctgtgcggaggggcgccggcgcggccgtatttgtacccgcgggccctcacatggtctgatctctagatagccgccgccaaagagctcttgaagaatttttgcgtcactttgaggcgaataaacttaatgcttccccgcggccgcggctccgcgctcccgctggatggggttgcgctcgccagggaggggccgcgctacggggcggggtgcgcgcccgaccccagagccaggaggggagggacccccgacacacacacacgctcgcagggaggagcggagcgcggagcagccggcagggcagggccgagcgaggaatcctgactttcctgctctttaactttgcgggaggggggaggctgcacaaaggagcaggtgtgcgcctcccctgccgccccgcgcccacaggacggcacacaggggtctgctcgtgccgctttctcttgacctcggacacctccccatcgtccccatcccgaaagctgctctctctttcttcctgggacctagcagtactcgatacccatgcgtttatctgactgaccggctg

SEQ ID NO: 53853 - DNA, 167 bp, Homo sapiens
  chr17:28563900-28564067
  hyper
ttgcagctccagagaagccaccgccccttgtacttggaggaactgacccctgaaaactgtgcggccggttgggctgagcgtctagagggactgagctggacaaccacgggcaagcgagggcagctcccagcgggtggagtccgcgcgggattctggtgccacctaga

SEQ ID NO: 53854 - DNA, 30 bp, Homo sapiens
  chr17:28618434-28618464
  hyper
gtcgtgggtggtcccgacattctgggcaag

SEQ ID NO: 53855 - DNA, 30 bp, Homo sapiens
  chr17:28619325-28619355
  hyper
tagcatcggggaatcgtccccaggaagcct

SEQ ID NO: 53856 - DNA, 142 bp, Homo sapiens
  chr17:29033229-29033371
  hyper
ttcccggagcccagttgctggcgcggcctccactgcggctgcgaagccgaaggtctgaggtgcgccagggctctttacgcggcccccagcctctccgcaccctttgtctcctgagcacgccgctcacaagtccaggagacat

SEQ ID NO: 53857 - DNA, 30 bp, Homo sapiens
  chr17:29159698-29159728
  hyper
aaatgttggtggaacgtgatgttttggact

SEQ ID NO: 53858 - DNA, 30 bp, Homo sapiens
  chr17:29233360-29233390
  hyper
agcagtgggtcgtccgcgtctgggctgcgg

SEQ ID NO: 53859 - DNA, 784 bp, Homo sapiens
  chr17:29297828-29298612
  hyper
gtttctagcagctcgcggcatgttggtttcccagggcaagaggccgccactgaaggtcagctctgtctttccagctgggcactggaggctctaagtctgttttcagcaggatcggaggaaggagacggggtggcgccaaggaaggaggagaaaaggcggccgagaaaaggaggagggcaaggggaagaggaagggcgagggaggagcctgaggagactcgcccggctcaaccccgacgtccgcgccccggccgcctgttggccatggcgggcctgggcctgggctccgccgttcccgtgtggctggccgaggacgacctcggctgcatcatctgccaggggctgctggactggcccgccacgctgccctgcggccacagcttctgccgccactgcctggaggccctgtggggcgcccgcgacgcccgccgctgggcctgccccacttgccgccagggcgccgcgcagcagccgcacctgcggaagaacacgctactgcaggacctggccgacaagtaccgccgcgccgcacgcgagatacaggcgggctccgaccctgcccactgcccctgcccgggctccagttccctctccagcgcggccgcgaggccccggcgccgcccggaactgcagcgggtagggaggccgggcccgcagctcccctggctcccccgggctgcccgccgcctgaccctttcccatgtggctcgaacccctttcctcagccgttctacttttacgttccttttctcagtctaaaagtcgagttccgctcttcggaggca

SEQ ID NO: 53860 - DNA, 444 bp, Homo sapiens; identical to SEQ ID NO: 11064
  chr17:29421943-29422387
  hyper

SEQ ID NO: 53861 - DNA, 30 bp, Homo sapiens; identical to SEQ ID NO: 11065
  chr17:29422761-29422791
  hyper

SEQ ID NO: 53862 - DNA, 145 bp, Homo sapiens; identical to SEQ ID NO: 11066
  chr17:29482999-29483144
  hyper

SEQ ID NO: 53863 - DNA, 92 bp, Homo sapiens; identical to SEQ ID NO: 11067
  chr17:29486026-29486118
  hyper

SEQ ID NO: 53864 - DNA, 192 bp, Homo sapiens; identical to SEQ ID NO: 11068
  chr17:29490202-29490394
  hyper

SEQ ID NO: 53865 - DNA, 110 bp, Homo sapiens; identical to SEQ ID NO: 11069
  chr17:29496907-29497017
  hyper

SEQ ID NO: 53866 - DNA, 69 bp, Homo sapiens; identical to SEQ ID NO: 11070
  chr17:29508438-29508507
  hyper

SEQ ID NO: 53867 - DNA, 89 bp, Homo sapiens; identical to SEQ ID NO: 11071
  chr17:29508714-29508803
  hyper

SEQ ID NO: 53868 - DNA, 164 bp, Homo sapiens; identical to SEQ ID NO: 11072
  chr17:29509519-29509683
  hyper

SEQ ID NO: 53869 - DNA, 175 bp, Homo sapiens; identical to SEQ ID NO: 11073
  chr17:29527438-29527613
  hyper

SEQ ID NO: 53870 - DNA, 124 bp, Homo sapiens; identical to SEQ ID NO: 11074
  chr17:29528053-29528177
  hyper

SEQ ID NO: 53871 - DNA, 76 bp, Homo sapiens; identical to SEQ ID NO: 11075
  chr17:29528427-29528503
  hyper

SEQ ID NO: 53872 - DNA, 141 bp, Homo sapiens; identical to SEQ ID NO: 11076
  chr17:29533248-29533389
  hyper

SEQ ID NO: 53873 - DNA, 136 bp, Homo sapiens; identical to SEQ ID NO: 11077
  chr17:29541467-29541603
  hyper

SEQ ID NO: 53874 - DNA, 137 bp, Homo sapiens; identical to SEQ ID NO: 11078
  chr17:29546008-29546145
  hyper

SEQ ID NO: 53875 - DNA, 81 bp, Homo sapiens; identical to SEQ ID NO: 11079
  chr17:29548866-29548947
  hyper

SEQ ID NO: 53876 - DNA, 125 bp, Homo sapiens; identical to SEQ ID NO: 11080
  chr17:29550460-29550585
  hyper

SEQ ID NO: 53877 - DNA, 157 bp, Homo sapiens; identical to SEQ ID NO: 11081
  chr17:29552111-29552268
  hyper

SEQ ID NO: 53878 - DNA, 251 bp, Homo sapiens; identical to SEQ ID NO: 11082
  chr17:29553451-29553702
  hyper

SEQ ID NO: 53879 - DNA, 75 bp, Homo sapiens; identical to SEQ ID NO: 11083
  chr17:29554234-29554309
  hyper

SEQ ID NO: 53880 - DNA, 85 bp, Homo sapiens; identical to SEQ ID NO: 11084
  chr17:29554539-29554624
  hyper

SEQ ID NO: 53881 - DNA, 442 bp, Homo sapiens; identical to SEQ ID NO: 11085
  chr17:29556041-29556483
  hyper

SEQ ID NO: 53882 - DNA, 141 bp, Homo sapiens; identical to SEQ ID NO: 11086
  chr17:29556851-29556992
  hyper

SEQ ID NO: 53883 - DNA, 124 bp, Homo sapiens; identical to SEQ ID NO: 11087
  chr17:29557276-29557400
  hyper

SEQ ID NO: 53884 - DNA, 85 bp, Homo sapiens; identical to SEQ ID NO: 11088
  chr17:29557858-29557943
  hyper

SEQ ID NO: 53885 - DNA, 118 bp, Homo sapiens; identical to SEQ ID NO: 11089
  chr17:29559089-29559207
  hyper

SEQ ID NO: 53886 - DNA, 515 bp, Homo sapiens; identical to SEQ ID NO: 11090
  chr17:29559716-29560231
  hyper

SEQ ID NO: 53887 - DNA, 412 bp, Homo sapiens; identical to SEQ ID NO: 11091
  chr17:29562627-29563039
  hyper

SEQ ID NO: 53888 - DNA, 137 bp, Homo sapiens; identical to SEQ ID NO: 11092
  chr17:29576000-29576137
  hyper

SEQ ID NO: 53889 - DNA, 64 bp, Homo sapiens; identical to SEQ ID NO: 11093
  chr17:29579954-29580018
  hyper

SEQ ID NO: 53890 - DNA, 160 bp, Homo sapiens; identical to SEQ ID NO: 11094
  chr17:29585360-29585520
  hyper

SEQ ID NO: 53891 - DNA, 99 bp, Homo sapiens; identical to SEQ ID NO: 11095
  chr17:29586048-29586147
  hyper

SEQ ID NO: 53892 - DNA, 148 bp, Homo sapiens; identical to SEQ ID NO: 11096
  chr17:29587385-29587533
  hyper

SEQ ID NO: 53893 - DNA, 148 bp, Homo sapiens; identical to SEQ ID NO: 11097
  chr17:29588727-29588875
  hyper

SEQ ID NO: 53894 - DNA, 112 bp, Homo sapiens; identical to SEQ ID NO: 11098
  chr17:29592245-29592357
  hyper

SEQ ID NO: 53895 - DNA, 434 bp, Homo sapiens; identical to SEQ ID NO: 11099
  chr17:29652836-29653270
  hyper

SEQ ID NO: 53896 - DNA, 342 bp, Homo sapiens; identical to SEQ ID NO: 11100
  chr17:29654515-29654857
  hyper

SEQ ID NO: 53897 - DNA, 204 bp, Homo sapiens; identical to SEQ ID NO: 11101
  chr17:29657312-29657516
  hyper

SEQ ID NO: 53898 - DNA, 195 bp, Homo sapiens; identical to SEQ ID NO: 11102
  chr17:29661854-29662049
  hyper

SEQ ID NO: 53899 - DNA, 583 bp, Homo sapiens; identical to SEQ ID NO: 11103
  chr17:29663349-29663932
  hyper

SEQ ID NO: 53900 - DNA, 216 bp, Homo sapiens; identical to SEQ ID NO: 11104
  chr17:29664384-29664600
  hyper

SEQ ID NO: 53901 - DNA, 322 bp, Homo sapiens; identical to SEQ ID NO: 11105
  chr17:29664835-29665157
  hyper

SEQ ID NO: 53902 - DNA, 103 bp, Homo sapiens; identical to SEQ ID NO: 11106
  chr17:29665720-29665823
  hyper

SEQ ID NO: 53903 - DNA, 142 bp, Homo sapiens; identical to SEQ ID NO: 11107
  chr17:29667521-29667663
  hyper

SEQ ID NO: 53904 - DNA, 128 bp, Homo sapiens; identical to SEQ ID NO: 11108
  chr17:29670025-29670153
  hyper

SEQ ID NO: 53905 - DNA, 142 bp, Homo sapiens; identical to SEQ ID NO: 11109
  chr17:29676129-29676271
  hyper

SEQ ID NO: 53906 - DNA, 143 bp, Homo sapiens; identical to SEQ ID NO: 11110
  chr17:29677199-29677342
  hyper

SEQ ID NO: 53907 - DNA, 159 bp, Homo sapiens; identical to SEQ ID NO: 11111
  chr17:29679273-29679432
  hyper

SEQ ID NO: 53908 - DNA, 124 bp, Homo sapiens; identical to SEQ ID NO: 11112
  chr17:29683476-29683600
  hyper

SEQ ID NO: 53909 - DNA, 411 bp, Homo sapiens; identical to SEQ ID NO: 11113
  chr17:29683976-29684387
  hyper

SEQ ID NO: 53910 - DNA, 144 bp, Homo sapiens; identical to SEQ ID NO: 11114
  chr17:29685496-29685640
  hyper

SEQ ID NO: 53911 - DNA, 48 bp, Homo sapiens; identical to SEQ ID NO: 11115
  chr17:29685985-29686033
  hyper

SEQ ID NO: 53912 - DNA, 218 bp, Homo sapiens; identical to SEQ ID NO: 11116
  chr17:29687503-29687721
  hyper

SEQ ID NO: 53913 - DNA, 3666 bp, Homo sapiens; identical to SEQ ID NO: 11117
  chr17:29701029-29704695
  hyper

SEQ ID NO: 53914 - DNA, 312 bp, Homo sapiens
  chr17:29718209-29718521
  hyper
tctctgggcctcagcttcctccgggatgaatgcagtcacggaacgcgccaatgcaggaggcccccaggacatcctgagcgctcgggagacgccaggcgcggcagcgggcacggatagcggaaaggggcgcgaccccgcggaatcctccggcagggcagggcctttgggtggctccgggtgtccagaggaaggggtgggctcggggacgcggagggaaactggggacgcggagggaaactgaggtcgcggaggacgcggccgttggcagctcgctgcgcctgccggccccgcgtgggccgccccactcgggag

SEQ ID NO: 53915 - DNA, 497 bp, Homo sapiens
  chr17:29718749-29719246
  hyper
gcggaggctgcgcggcgcagacccagacgggcggccccggagggcgcgcggcgatggcggcggcgggcaggcggcgggcgcggcgggcgaggggtccgggctgagctgcgggccggcccggatggcgggcggcgcgggctggtcgggcgcccccgcggctctgctgcgctccgtgcgccgcctgcgcgaggtgttcgaggtgtgcggccgcgaccccgacggcttcctgcgcgtggagcgcgtcgcggcgctcggactgcgcttcggccagggcgaggaggtaagctggcccgaccccagtcccggcccggggaccccagcccagccccgccgcccctcccccagctcccccgccgggtcacccgcgtggcccgaggcggtggcctccctcccaatcccctccctccgccggagcccaggacctcggccccccccgggtatccctggcccagccgggccctcgctttccgccccccggcgcccgtgccccgagcgtc

SEQ ID NO: 53916 - DNA, 31 bp, Homo sapiens; identical to SEQ ID NO: 11118
  chr17:29815732-29815763
  hyper

SEQ ID NO: 53917 - DNA, 61 bp, Homo sapiens
  chr17:30454726-30454787
  hyper
cttcaataaggcagcgggacggtttggctgatggaagatgtttcccggaagcctgttcacg

SEQ ID NO: 53918 - DNA, 30 bp, Homo sapiens
  chr17:30469324-30469354
  hyper
agtgtctccggggtcgcggtgcccaaagga

SEQ ID NO: 53919 - DNA, 37 bp, Homo sapiens; identical to SEQ ID NO: 11120
  chr17:30592879-30592916
  hyper

SEQ ID NO: 53920 - DNA, 30 bp, Homo sapiens
  chr17:30677123-30677153
  hyper
gctccgcctcctaccgcagtgcttgacggg

SEQ ID NO: 53921 - DNA, 90 bp, Homo sapiens
  chr17:30813421-30813511
  hyper
gcagcctcagagagggcgggccgcgcgctgccagggcagggactcggccgagagtgcccccgcggccggcagctgcgggcgccgcggcgg

SEQ ID NO: 53922 - DNA, 30 bp, Homo sapiens; identical to SEQ ID NO: 11122
  chr17:30814499-30814529
  hyper

SEQ ID NO: 53923 - DNA, 298 bp, Homo sapiens; identical to SEQ ID NO: 11123
  chr17:30846451-30846749
  hyper

SEQ ID NO: 53924 - DNA, 109 bp, Homo sapiens
  chr17:31203739-31203848
  hyper
ccccctctcgggaaagcgcagcctcgcgcccctgcgcgcggccgctccgccctcacctgagcctgaggttggccatgaactcgggcatggagacggtgtccatcagcac

SEQ ID NO: 53925 - DNA, 58 bp, Homo sapiens; identical to SEQ ID NO: 11125
  chr17:31254913-31254971
  hyper

SEQ ID NO: 53926 - DNA, 378 bp, Homo sapiens
  chr17:31255334-31255712
  hyper
ccggggagaggggaggcgggtgccgcagctttgttcttgccgcggggccgcgcgcccgaagttggggaaaggagtaggagccgcgccccggagcgctccggggcccgtgcggcgcgtcccgggcgggctgggggtccctccctcccggggacagagtgggcgtcctgggtggacgagcacggggaagcgggtagggtcttgggtctgttctgtccttgtggttctggaaccggaggggaagggggaaagtaagggagagagaaagagacggagaaaaacaggaaaacttactcttcagtacgcagggaagaatagagaaagaaaaacacaaagaaacgccacgcagactgcagagaaggaccacgaacacacgctccg

SEQ ID NO: 53927 - DNA, 2004 bp, Homo sapiens
  chr17:31618439-31620443
  hyper
gcggcccgcagagctcgccgcggtacttgcaggagagcagcatgtcctccagctggtggcccaggcggtccatgaaggcggcgctgattccctcgaagtggcgcggaggcaggaagaggcggaagtccgccagcttgcggaaccactggcggcgcggctcgtcgccccgcagcagctcgctgacaagcgggcgcgcggtgcggttgggcagcagcagcccgagccagtggccggcatagtagaggtcccccttggagaggcgcgggaagcgcagcgggttgttgttgcacacagtgacggcggggaagggtaactggcggctccactcgcggtgcacccgcgtgtgtgacgggaagctgagccagtagagcaagcggttcgaggaccaggacagcagcaagccgaaggatgtacagaaggccagcacccacagcgcccgccgctggaaggagcccccagccgccgtgcgcccggcacacatgtgccgcagcccgtgcagtttagcgcggctcagcgatggccgccccctgcgggcgacccctggcccctgcagcgcccgctcgccgcctctgccgcccccgggctgcccggcagccgccaacgccgcgggcgccggctcctcgcgggccatgcggaagcgtcccgggccggtgagcgcggctgcgggcagcccggctccgccaatccggctcattcattcagcccgcggctggcggcagcggcggcggccccggccgggcggagccgccatgggagtccgcagcagcagtggaagcagcagcagcggcagccgcgcgcagcccgcgccagggaagcgtgcgcccgaaaggagctccggtggcgcggcatgcccgcccggcgccgccgctgccgcctccgcgggcgcccgcccggggctgagcgccgcctcagcccgcagcccctggcagtggcctctcccgagcgcctcccaggctttcccggcccctggtcttcctggaggatgcccggcgcccggcactacttctggaggggtcccactgggagccgcctctccagtccctgggtgctgcgcccgccttccctcgtcctggacctcgggggaccctgagccgagtcccccctgccccgcctaaccccagcttttacgctggtcctgggagaagggccactcggccaccatgcctgatctggacatccccagggaccccaccagcccggcccgtagcccagcggtgctgggacacgggagagaaggcgccaaggaacgagcgcccccagaggcgcaccgcggctcctggctgggcgggcggggtgggtgtgtacgggggtgagtggtcgccttgccggctgccgccttctttcccttcccctccaggacccttccttgttactgctccctgggctgcgctcggcagagacctgcttaggcttccccaagtcctgcgcctaagtcctgccaggcgcccgctctcgcctggggctgagagcttctcagggcgtcctgcgggaggctgttcgccgccggggtccttcaaggatgctagccgcagggaagtgtcgcttctcgcctcggctctcccaggtgcctcgcgtctccagaaaagcccagccttgctgtctctcgcgtcttctctctgcccccgcggcgacaagagctggggactgcggggacccgccaacacctcccgggggtgacccggactcgctgctccgcgcgcccttctcctctcgagactccgagctcgcggtggccgtgacgccggctaagctccttccccggttgcccgggagaaccctctttgggccccaggcgaacttgggcagcggccgcgcgacgctggcgcggctgggctccgagcacctgctcctcagctcgctggccccgcggctccgggcgggcggggcggcggcggccgtgagcgccgtgcgctcctggagacgcggtgctgacgcgcccggctcctcctcgctgcattttaattcctggccactgtggccgctgcacaccgagcgggaagcctc

SEQ ID NO: 53928 - DNA, 260 bp, Homo sapiens
  chr17:32483867-32484127
  hyper
ctcccccctacacacgccactagagacaagattaaaagcgagagcgagagagaaaatgcttaaaacaagtcgctgagcagctcggagcctgttaaccagcgcataatgccccatgttaaccatcctgggggatgtcagggcggccacgctgatgcactgcggtcgggcgcagcggcacagccttcagagccgccgccgctcggttccttttcccatgatgttttggactccgaatgccgtttctcgccgccggcctccgt

SEQ ID NO: 53929 - DNA, 611 bp, Homo sapiens; identical to SEQ ID NO: 11131
  chr17:32905944-32906555
  hyper

SEQ ID NO: 53930 - DNA, 1206 bp, Homo sapiens
  chr17:32906598-32907804
  hyper
cgagtcatttacggcggagcagccggcgcgagcgccgaggaggcggcgacggcggcggcggctgcttcgtgcaactgtggcttcccccacctcctcttcctttttgctcctcgattcttcttcttcccccacacacgtccatggggagccggctcccctgccagcacctcctctcctctcggccccgtaggcaccagctgccgcttccctggccgcaagctgcgcaggtgccggctgccctggcccctggcgccgcgcccgcgtctcaccgcccgcagcccggactggcgcggcgatccgctcgcccaaactgactcggagggagcgggagccgatgcccggcagcatcgagacagcgggcgaacgggcgtccggggacagggtgggggcggcggggaggaggcgtcggagactctgaaccccagaaaagttcaaggtttgtgcaggttcccccagggaaggcgaggagcgaggcggggcagcgcgcctctctgccgagacagcgagaccttagcggggtggcccggagctgccgtgagctgcaggagcccctctgcatcttacagcgtttatggtcatcaagctggagtcgacgtcctgggcaggaagggctcggggcagggcgcattagccggctttctcgctccctcgcttctccaagccccatctacatggggcagcccgttctggccgcgccacccttgccccagccgccgagcggctgcctgggcaggaggcgctgagccggcctgtgtggagcctgggccctgatccagactggagaaagcgcgctggagcggaggagcgagccttgcgaggggacaaacatctggccgcccgcctcgggcatccggtctgggcgtcgcctagggtggtggcgaccggcgtcgccagtttcagcaccgcacggaaacttttccttctccagatggattaaagttgtctggattttctctttctttgagaaagacagcattcatttgcacctgacctgggatttttatgctgggctgctgcaggggcttggaggaagaaagcggcgctatccatgtgcggttactaccgaaaccgaggaaactggggattgcgttggaagtcggcaccctcgagtgagttcggattcgagctgggccgtgaggccgggagattcagcactgggctctaggtagcccccgggacgcccgcggccaccgggctccggactgc

SEQ ID NO: 53931 - DNA, 273 bp, Homo sapiens; identical to SEQ ID NO: 11134
  chr17:32907873-32908146
  hyper

SEQ ID NO: 53932 - DNA, 1137 bp, Homo sapiens
  chr17:32908170-32909307
  hyper
cgcggcgcggactgggggtgaggatgcggcaggcgccactggagggggtacggggaagactggggagaggagcacccacaccccctggactcgcagccgccactccgggtttggcgtctctggctgcagctcgagttaccgccagcccccgagccctccggcgagctcagctgaggggaccgagcccggcgccagaaaagggtggggggagggtgtcgctccagtcctctcctggttataaagaagggttcgaacccgaaggtctggggtcgtgtccgcccacggaaatctagagggatccgagggatcctccggatcgcgtccaggccgccccccgcccccgtctctccctgcagccggccgggctgggggctgttgggatccgccgggatcgcgtctttcctcgccccgggcgcgcaggccggtgcggggccgcgccgcccgtcgcctcgcttcctgcggcggtcctcgggaagggaagtggactgactccgggccggggagccgccgcggctcgcacgcccgcggtcctgtgagctgcatctaaatggccggcttaggcgagcccggagggcgggggtctgggcacccgcacaggccggggcggtgggccgcgggccgcgcgcggagggagcgggctccgcgctctcgcattctgcaatctgttgcgtctgctccccaggctcgccccgggctccgcggtaaagggggtgggagaaggagggattgaggttggcgcgctttggcggtgggacagcgggcatacgggtggggggcagcgggtttttgaacagcccccaagaatgggaaatcagaccagagggaaggaggctgcagcgggccttccgcaagctggagacgctccaggaggcgaggggagcagaccgaggtgggagggagagagctccgaaaggagagtggagaagcggggccctctgctccctcctaacgtgaaaccagccgacctgggatacattttcttaaccagcaaggcgtggcggggttggggggcgggggtgtttcgatgctccacgctgaggggtgagcctcaggcagaatggagggcgcttagatggagggggcagtgggctctccgcattggtggagcgccctcggtgtgccgggctcagctcttgc

SEQ ID NO: 53933 - DNA, 31 bp, Homo sapiens; identical to SEQ ID NO: 11136
  chr17:33125098-33125129
  hyper

SEQ ID NO: 53934 - DNA, 30 bp, Homo sapiens
  chr17:33308347-33308377
  hyper
ttttatgggtctgccgtacttccacttacc

SEQ ID NO: 53935 - DNA, 30 bp, Homo sapiens; identical to SEQ ID NO: 11137
  chr17:33447033-33447063
  hyper

SEQ ID NO: 53936 - DNA, 30 bp, Homo sapiens
  chr17:33469398-33469428
  hyper
gaagcgtcccgctgcgcacggcctcaggga

SEQ ID NO: 53937 - DNA, 30 bp, Homo sapiens
  chr17:33569313-33569343
  hyper
aggcccttcgccagcgcccagtacaaattt

SEQ ID NO: 53938 - DNA, 1627 bp, Homo sapiens
  chr17:33700164-33701791
  hyper
tcggttcctgctccgcgccccgcagaaaccgcggctggctggccaggggctcttccaacttccagcgggagcaggtgcacaggtcaggcccgccccgcccctaatgccttctacccccattacccacccccgccccgcccgccagtcctccatagtccgctttttagggaacctgctgagcaaactagctgggcccccggacaggggagaaaagcacagatacccccactccactccacccccagcccctccgcacccctccagcccctccccacaccccacaccctggctggggtggggtgggaagggtgctgctcccttctcgaacctggcactcgagttacagcccgacgcggattcggctgggctagaccctgaagcacgggtagaaacgcaactccggagtcccaggctgggggcaaggaccctctctgacctctcaagctccagcgcttccgaagcccccttagcgtttccctggaggcgcccaggtcgagtccttatatactagcgggttggcgccatcccacgcacatcccacgcaggagatgcaagagccaatgggcgggtctgctaagcccgcgaactctgccgcgttaaattgcctagaagctcccacccttctgactgttgccacgtagttcttagtttccgggaatttggggattttttcctcccccttcttcccacccttcctccgtctcctcgctccctccatccatctctccctccctatcatctatctattcatctatctggattacagcaaaacaaagaataaagattatgaagaaagagaagaacttcccaggcccaagcagctgtcggctcctgcgctcccaacggggtggccgtttccttcctcgcaccctcttctctcccggtgcctgcggtcccaccttccagatacccctcggagagtccagctgagctctcgccagagctttccccttccaacccgctcgacttgcccagatcccaagctgggcttctctctccatcgccccagaaagtgggtcttggagaccgaggcaagaatttgggcctccgcttctgttccagaccccggaccccttgccaaaatgcggcagatgtgcagattgggccgcgcttggttcctggctgggtttatggagcctgcggctgaggcaggctccgcagaccccgagccagagtgggatttaacggcggccggtgcgctgtgcttggtcaaccccggtaaccgtcacgctgctagtgatatgaaaaaaacctgccagcgttctgcttttctgccccgctgcagtctttagcacccgccaggattctgtccgagtgtttggattttgtaatcctcctgtctttggccaactccccatccttggcggagcgctcgcccttggccgggctccgtgctgccagccttgcggaaccctaggcccgggcggctctgtcggaggcccacttctcactgatgcggagtggcccgagggtgggagcagcggttaatgccgcactgattaatacaggctccagtgaaagcgaaagtaagaaaataaaacggatttcattatacatatacaatgtgtgtatggatacatgtacatacatattacacttatgtgtatgttacgcacgtttgttaaaa

SEQ ID NO: 53939 - DNA, 427 bp, Homo sapiens
  chr17:33775273-33775700
  hyper
tgaaacaagagtcccaaccttcgcaacgggggaagcctccaggacgcacttggctctgcctgtttgttccgcccccgcggaaaccgctgctcgctgggcaggggctttctgttttgcagccggaacaggaacacagatagcccgccaagccgccggcgacaccttccaacccctttagctctccgcaccgtccctccccaccgccccgcctccacccgcgccgcgatcaagtcctcatagccttttagggaatttgctcagcaaactagccgaaccccaaaggcaggggagaagcacgcaaataccccgactccaccggctggccggagctggggggcgggggttgctctcctagcttgctccccatccgagtcaacgccagtccagggtcgtgccggactagaccctagggcgtgggtacaaacgg

SEQ ID NO: 53940 - DNA, 30 bp, Homo sapiens; identical to SEQ ID NO: 11140
  chr17:33814581-33814611
  hyper

SEQ ID NO: 53941 - DNA, 190 bp, Homo sapiens
  chr17:33914228-33914418
  hyper
ctttctaggtctaccgcgcaccccgatgacgtcacgcggcgacgttctctgacgtcagagtttcctgcccaccatctttgtccctggcaaagtgggttttgcgcagtggcttagacctagaaaagaatcgtgacgggcaggaaaccattacaccaccacctgggctgtgctctccggctcccgccgccac

SEQ ID NO: 53942 - DNA, 460 bp, Homo sapiens
  chr17:35014237-35014697
  hyper
aaagggaggggagggaagggacgcggggcggaggacgcagcgggcggcctgcggaggcggcctggctcggggtgggggctcggccggagttcccgcggctgctcggcggcggccggctcgggagcaaccttgagcgcggtcgcggaggcagtgatttaggtgccggcaccggagcgtgaaggtaaatggccacatttcaccgtcgggaggtgagccggaggcgcccgccctggcccttcccccaaggccccgggccggtgggggcgggagttttgcttcccctctctgacccgctccgaggcccgcctgggagggcggcgcccccacggtgcaggacaggagggctgcgccgggctgcggggtgagcaagacccctagagctgcctttcccgaccccttcctatttggggggctgtttccctcacttccccgtcgccccggcctcctcccaaagctgctt

SEQ ID NO: 53943 - DNA, 30 bp, Homo sapiens; identical to SEQ ID NO: 11142
  chr17:35054543-35054573
  hyper

SEQ ID NO: 53944 - DNA, 174 bp, Homo sapiens
  chr17:35060308-35060482
  hyper
gagtgacagatacccggggaggctgggcgtgccaagctggaccggtccggccaggctggaagcccagctgcccgctttttctcagtgcctggagaccgcccgccttttcagcaccacggtcagcggccttttcgcaggcgcgcgccccagccccgccccgggttgggctggcat

SEQ ID NO: 53945 - DNA, 487 bp, Homo sapiens
  chr17:35078588-35079075
  hyper
cagccttaattgctacttaagcgtgggccctgcacttaacatccggggggcaggcccggtgcgtggtgcacgccgggcgcgctgtgcacagtctccggaggccgccagtgcgaccccgccccacccgcgcacccccgcccggagggccccagcgcgcatgcgctcgccgcagggcggcctgcggggctgtggacgcgaggccagctcgtagggggctgggcggtcagcggggtcaagggacagccacgctgggacggaggacggggacaggggagcccctgcggcgccacttcttcctctccgagtcctgtctgcccttgatggagccactggtggggttacttgctggcggtcggccactttcgcccctccctcgccagcccgccagctccctaaggttttgtggttttttgtcaccaccacacctcagtgttgagctaagtgaggacgtccccccagcaaatgtattggacggaaggaaacggtg

SEQ ID NO: 53946 - DNA, 30 bp, Homo sapiens; identical to SEQ ID NO: 11144
  chr17:35082280-35082310
  hyper

SEQ ID NO: 53947 - DNA, 30 bp, Homo sapiens
  chr17:35165594-35165624
  hyper
ttcaattttatcagcggccggggagccggg

SEQ ID NO: 53948 - DNA, 32 bp, Homo sapiens; identical to SEQ ID NO: 11145
  chr17:35165829-35165861
  hyper

SEQ ID NO: 53949 - DNA, 137 bp, Homo sapiens
  chr17:35285542-35285679
  hyper
tccaacttatctctccgaggggaagtgtccatttgaccacatgatcctccctcccctaccctcccccaaggggaaatcaaatcttgaagtgagaccggaagagctgctgcggaacgtgagcacgggagagctggtgg

SEQ ID NO: 53950 - DNA, 321 bp, Homo sapiens
  chr17:35289322-35289643
  hyper
aggattaattactgtgaggcacgagccccgtttgtcttccttactgggtgttcagacagaggaacacgggcacgcacccaaatacacattgttgtcacgccgtcttagacgttttatttatttgttggattcctgcccagagccgcttttccacgggcgcagagtctcccaccaaacacgctgcctctttctctcagcacgcactcgcctgtcccaaagccgcacacccccagacccgcgggacgccccctccgtgcctgcagggccctcggctccgcgcccgtccccgcggccttcttcgtggcagggtctctctctggg

SEQ ID NO: 53951 - DNA, 1699 bp, Homo sapiens
  chr17:35290199-35291898
  hyper
agtgctctgacctagggatctcggacaagcctcctaacttgggcctcctggccgggaaagtggagatagtacccttctcttccaccccccaccaccctcttgctatacggttcaggggagaccgtgatacaagctgtgaagtactgcacacgagtagatcatttccatgagagagtgatgggtgagattaaggcaatttgagtccggagagaactagacgggaaggagaggcgggagaccttggcgctcagatccgagcgaccttatccacgcagttccctgcgtggcattactgcggcctcaccgagtctgggcggagtttgcgtggcctctgggaccggcagagtccaggggtgctccgggctggctatttcctccctcctccgggatgggtgtagcagggtgtgtactccgcatggggtaacctcctagagccggctacgccccaggcgcctcctttcacggccttgtcactcttttctgctccttgggctgttctggaaccgaagagagaggagggaaatggctaggggcggccatcatcctcgggatcaatagcagccgagagtgactgggcaggctctgtccatgggccgagcgtcattctggaacctggagggggcgggggcgggggaaggaagggaagtggaagtttgagaggggcaccttcaggctccccaaactgcatggcagctggagagggctgacagaaccctctccaacccgggttctgaccagggtccctctggggctgatcgtcaaggagcttctcaagaaaagaaacctggactgtgaaagtcacctcctaggccctctggggccgtatccgggggtgcctgggaggagggtggaaaggattctgcagtcaccgagctatgggcgaaaatgatccccgcggaccctggtccagaatgtacaggtcctgggcggtgtaagtggctgtgggtctgtggaggacattgggtaggaaaacgcttgcgtagttgaggatgcagacaataaatgtggccgggaaggtgaggagggaaggttggtgctcttcgctgaacggaactggcttaaatgcagagctgagctgagcggcttcggagaaggcgaatttagaaagcctggtcaattttctctccatgtccctgcgaccgattatgttttaaaacaaaagctcaatggaaacgaaaacaaaacaaaacccaccatttgtctaatgtgctgtccccgtggaggagttaaatctggactccaaacctagaatctggagccaagaggcgcactttgagttgcgctcctggccccccttgcagagacgccagggttggctcctgcggacctgtttactgagccatctggacaccaggacgagcggagcctgacgccctagagcgagcgtcctgtcctcatcctcaactctcctgcctcgctggtccgtctgtggggaggggccttctttcccctatacctaggtcccaaggttcttacacccctaaatggatggagcaacctcctcctgcccaccagagggaggtgacaggccctgggttggggaagggccgacagctaggtccagctgtcgtccggtaggtcccactgaccgccccacactccaccgtgacccctctgctttgcatgagaaggagcccagctgggacgggggcggaggcaagccacccgggactggggccactatagattccagaaaggg

SEQ ID NO: 53952 - DNA, 799 bp, Homo sapiens; identical to SEQ ID NO: 11147
  chr17:35291920-35292719
  hyper

SEQ ID NO: 53953 - DNA, 1824 bp, Homo sapiens
  chr17:35293612-35295436
  hyper
cctccaaagatgtgcgctgcgcttgggacaaacttccaggtcaagaaagtacggggggacaatggcaacagccgctgaattgcaaagcccagcagtgcaggggagccgcctgggattccggacccggctgcaccccaaccttccacaaggctcggtcttggactacccccactctacagcagaactctggcctccgcctgcgcctattcccgctctctctctgtccctcccatcgaaacccacgccttaccggagcaggagggggcccaggcacggtgctgcccgccgtccgcgccgcgcggggccgcgggtgccgccgccactgatcctctaaacgcggtctccccgcactctcccgggccgggggatgcagaatggtttacagagggaccgcgaggcgctgattggtcgcaggccgcagtgacgtcggcgggcgctgcattaaggcgagggggcttccagagctcagccaacagccaggagcagtgaccaagccgccggagctggggagagacgcaccggggcggcgactgggccaggagaccagggactgagggacgcgcccggggagggccagcaacaagccgcggcccgggcgcgacagcggcggtccgcgccgagccgttccagccgccggcctactgtagccgctgcgccaggacatttttttttaaagctctccaagctgcccccctcctccccgactcctcccgctgcaaaagaaaaacaaaaaaaaaaaaggaaggaggctagaaaggaaacccagatttgccaccacaacgaaaaaaagaaggggaaaaggaaaaggagagaaagtcgagcgactgtggggttagacggaggcagacagagcgtgggccgagcgatgcggggctgtgcgcccaggcggccgcgagttgtgactggagccacgatgcacggccaggcgcggtgagaagccagcccgtagtgcctcccgaaggagcccgggcgcagggagggtcgccctgaggacacggaggccgccaggcaggccaagggccgaggtgactgggctggggcggtagggaaggagcgagtgcgcctggctgcctccgcacggagttgtccctctctgttttcgattgacacaaacacttctccaaaagcggggaaacctaagcaacaacagcaatcaacaccaagatcttcctcctaccctcccctctttcccttctcccgcggtcggccctcgccccctcccccaggcccagcgcgggcgctcggcgcgtccagacccgcggcgcgatgccggcagtttaggatccaaagcttctctgctccttttgttctttccttcccttttttaaaaaaagaggggggaaatcccagtggtgggcagcctggcacgcacacagtcgccctcataccccgacaaaagcagatgcactttgacttctgacagctctacctcaagccccggagaactcagcggcgctttcctcgcaacccgagctcggcgagtcgtcgtcttcttcttctccgtttttatttatttatttccgttcccgccgccgttctcgctgaccttcactcctccgcgggctctgagcagaagggtcgcattctctcccgcctgagacttcttttcctcgccccgggagctcaggcggcgccgctccagcccggggccccgggactccccggctgcacacttcactgagacgcccccccaggccccgatcagcctcgtttcctccaccctactttgatttcctggtgcgagttttggcttgcacggccgagtgtgtgtcctctttttggagagactggggagctcgtgccgattgtcttcaggagtcatcc

SEQ ID NO: 53954 - DNA, 443 bp, Homo sapiens
  chr17:35295940-35296383
  hyper
ttggaagagacagggcagcctcgggcgttgtagcccggactgctgtctttcccggagccaagctctgcagcaactgcattctccaggccttcggggttgtttgccctccaggcagagcccaggctccctcccggccactaccttttccgaccccgagcggtcttggcggtaagctccgagccttttgcgtagagtgtctgggccaactgccctgtcagcggcaggaaagaactcggccttaaagccgatcctgcacgcccgggggtcttccccaaacccggacatgcctccgagtgcagacctggacaaactgctgcactgtagcctgcgaagtgcccggagctttttcctgcttccctggctgccgaagttgtctggtggttcggcttcagccccaggtgactccgactcccacgggctccgctcagtagtcctcctaggaa

SEQ ID NO: 53955 - DNA, 30 bp, Homo sapiens
  chr17:35297294-35297324
  hyper
aggctggggcttggcgggtagcttgggccc

SEQ ID NO: 53956 - DNA, 499 bp, Homo sapiens
  chr17:35297721-35298220
  hyper
ggaactctacatcatcgacgagaataagttcgtctgcaaagaggattacctaagtaacagcagtgttgccaaagagaacagccttcactcgggtgaggccccaattcctggctggctaggtgcaagcgggtcctgggggaggaaggctcgccaaggccccggctcatctgtcctttccctcttagccaccacgggcagtgaccccagtttgtctccggattcccaagacccgtcgcaggacgacgccaaggactcggagagcgccaacgtgtcggacaaggaagcgggtagcaacgagaatgacgaccagaacctgggcgccaagcggcggggaccgcgcaccaccatcaaagccaagcagctggagacgctgaaggccgccttcgctgctacacccaagcccacccgccacatccgcgagcagctggcgcaggagaccggcctcaacatgcgcgtcattcaggtcaggccccggcgcgcctctccatcccacagaggc

SEQ ID NO: 53957 - DNA, 143 bp, Homo sapiens; identical to SEQ ID NO: 11151
  chr17:35299300-35299443
  hyper

SEQ ID NO: 53958 - DNA, 365 bp, Homo sapiens; identical to SEQ ID NO: 11152
  chr17:35299600-35299965
  hyper

SEQ ID NO: 53959 - DNA, 452 bp, Homo sapiens; identical to SEQ ID NO: 11153
  chr17:35300260-35300712
  hyper

SEQ ID NO: 53960 - DNA, 190 bp, Homo sapiens
  chr17:35300812-35301002
  hyper
cgtggggagggaggccgtgagcacagccgggtgaaggaagtgaagcggcccagggcgctcccgggccagccaggagggttctagctctgggatatcccttattagtgttgtctcagagttcaacaacagcgacaaaaaactcttatagcttcagaaacgccgacctgccgtgcatcaggtgggactatat

SEQ ID NO: 53961 - DNA, 342 bp, Homo sapiens
  chr17:35303269-35303611
  hyper
gtatttgataagaagcgttttcgagttgggcacacgatgtggattcgattcttctaacaacgtggttgtggcgcagtctctcccctcgtcgcgggattcagaatcctggcgaaaacccgaacaggtggcaacgctcagcagtcaaatttggagccgaaggccccaaggaggaggcctggaaatgtcagggcctgttctccttcccatcagtgctgtgccgcccacctctggccccgaggtgcggggacgtgcggcaccatacctaggcggagctcccgcaggaggcgcagcaggagggaagcgccactgcagtcccctctcgcctgggagggcagcctggtt

SEQ ID NO: 53962 - DNA, 30 bp, Homo sapiens
  chr17:35306848-35306878
  hyper
cctttctggtattgcgttagaaaggaggag

SEQ ID NO: 53963 - DNA, 30 bp, Homo sapiens; identical to SEQ ID NO: 11156
  chr17:35716123-35716153
  hyper

SEQ ID NO: 53964 - DNA, 282 bp, Homo sapiens
  chr17:35716578-35716860
  hyper
aacccagaattaaggcgggctagaatggggcaggcggtgtgcgggcccgtttgtctgtttaatcctaacacattaacaaggggtgggcaatcgcgtccactacctgtcctcatcacgctggctggtttccaagtctgggcgagctaagtaaccccatgctggaactccataaccagccccccgtttcgctcctcagccccgagacagcccactccaaaggtgttatacatgctggatcctggcgtgttgaggagaagcctcagtaaacgaagctcagtaaga

SEQ ID NO: 53965 - DNA, 31 bp, Homo sapiens
  chr17:35816364-35816395
  hyper
aagagtttgaactgtacgtggatgggaagcc

SEQ ID NO: 53966 - DNA, 242 bp, Homo sapiens
  chr17:35969417-35969659
  hyper
gccgctgccttcgccgccgccaccttatcagcagctgtcagctgaacacagccacttccgggtcaaacaccaggccccacctcgccgcggaccgggcgatggggcggggcctcgcgcccacgtgactcccccggccctcggggaggcgtggcgcgcccacggcacgtgacccggcgccgcaggggtcccccagattcaattctagctctcgggctggtggggcggtcgcgggcgcctctcca

SEQ ID NO: 53967 - DNA, 177 bp, Homo sapiens
  chr17:36003412-36003589
  hyper
ccgcgccgagccggcgaaagagatcgtggacgtccatctttacccagaaagcgccacagttctacggcgcctgcgcagactacttcccaggccccgggcagcgtcggaagagggcgtgagcataattggctcctgtaggcggagcctggctgggtgagaaacgaggctattttatta

SEQ ID NO: 53968 - DNA, 30 bp, Homo sapiens
  chr17:36093006-36093036
  hyper
cagcgggggcagagtagactgaacagatct

SEQ ID NO: 53969 - DNA, 30 bp, Homo sapiens
  chr17:36096499-36096529
  hyper
gcaggagcctggacatgagcccagcctgca

SEQ ID NO: 53970 - DNA, 30 bp, Homo sapiens
  chr17:36098024-36098054
  hyper
gcagcacagactggagatgctgcataaagc

SEQ ID NO: 53971 - DNA, 30 bp, Homo sapiens
  chr17:36099824-36099854
  hyper
ctcatccctttcttccgaggttagtgggca

SEQ ID NO: 53972 - DNA, 2022 bp, Homo sapiens; identical to SEQ ID NO: 11158
  chr17:36102012-36104034
  hyper

SEQ ID NO: 53973 - DNA, 333 bp, Homo sapiens; identical to SEQ ID NO: 11159
  chr17:36104217-36104550
  hyper

SEQ ID NO: 53974 - DNA, 706 bp, Homo sapiens; identical to SEQ ID NO: 11160
  chr17:36104643-36105349
  hyper

SEQ ID NO: 53975 - DNA, 194 bp, Homo sapiens
  chr17:36105458-36105652
  hyper
cgaagagtagagaccctggatgcgtcccggccgacgcaggtggtgggccaggagagcccgcagggcggaagagaaactgaccacttaggaaggggcgccgaggccacgggggaggtgaggcagcgttaggtgtggtgagcatgccctggagggactccatttatttctacctcggttactacctccaggcccca

SEQ ID NO: 53976 - DNA, 30 bp, Homo sapiens
  chr17:36204420-36204450
  hyper
ccccgcccaggtttccgccccgggccagca

SEQ ID NO: 53977 - DNA, 470 bp, Homo sapiens; identical to SEQ ID NO: 11162
  chr17:36714787-36715257
  hyper

SEQ ID NO: 53978 - DNA, 255 bp, Homo sapiens
  chr17:36716048-36716303
  hyper
tgagcctgggaaggactgggctgggacaaagtcctccctactctccgaccccacacagtagccagagaagcccgtggctctacctgccccaagtggtcagccctaacggtggggaccaaagtgccaggaaaaagacctcttgggctaaggccagtgatgtagctattgcttaatccccactttatagattagaaaacaggctcggagagaacaaggatgggggagggggaggttcactcacgtgctgagggggtg

SEQ ID NO: 53979 - DNA, 172 bp, Homo sapiens
  chr17:36735070-36735242
  hyper
gggtcacggcgcgcccggcctggggctgcccatcccccaagggggtccctgcgggaaggggcggggcctgggcctaaggagagtggagaggcgcccggggagaggcaggggctgcccagcaccccactagggactgaagggggaagtgcgtggatggcgtggaaagcgcgcc

SEQ ID NO: 53980 - DNA, 30 bp, Homo sapiens
  chr17:36749381-36749411
  hyper
gggagatcggaggggcgagcccagaggcgg

SEQ ID NO: 53981 - DNA, 30 bp, Homo sapiens
  chr17:36754365-36754395
  hyper
caaagtgagagtctgcggcagtccccacag

SEQ ID NO: 53982 - DNA, 30 bp, Homo sapiens
  chr17:36755706-36755736
  hyper
tcatctgaaaggtcacgctgaccagtcccc

SEQ ID NO: 53983 - DNA, 46 bp, Homo sapiens; identical to SEQ ID NO: 11164
  chr17:36762362-36762408
  hyper

SEQ ID NO: 53984 - DNA, 31 bp, Homo sapiens
  chr17:36762777-36762808
  hyper
gccgccgcctcgcccccgctccgggttgcag

SEQ ID NO: 53985 - DNA, 30 bp, Homo sapiens; identical to SEQ ID NO: 11165
  chr17:36763009-36763039
  hyper

SEQ ID NO: 53986 - DNA, 30 bp, Homo sapiens; identical to SEQ ID NO: 11166
  chr17:36859555-36859585
  hyper

SEQ ID NO: 53987 - DNA, 223 bp, Homo sapiens; identical to SEQ ID NO: 11167
  chr17:36886753-36886976
  hyper

SEQ ID NO: 53988 - DNA, 38 bp, Homo sapiens; identical to SEQ ID NO: 11168
  chr17:36904349-36904387
  hyper

SEQ ID NO: 53989 - DNA, 1158 bp, Homo sapiens
  chr17:36905120-36906278
  hyper
tgcatctgggagggcgagcgtgtcctccccactccccttgccccctcggcggcaggggcgctggccccgaaaagcggcgcaccaggatccagcctgggcgcctggcagggagcaatcgcgagaggggagtggaggtgcggggtgaggccgggtggggggcctcgccgcggggggatcgggtagctctggcggaggctgcgcccccggcgtgctcgggcagagaagaacggaggcccgctgaggatgggaactcaggctccgggtctgggacacaataatccggccgaaggcgagcggccacactggactaggaaacgaggcgccgggctgtaaggtgggcccgcgccttttctcctgcctggcgctgattcccgcatttttcgctcgcgccctgcgctgcgcgctgcctgtgcgcctccctgggcgcgcgggcgggagagtcgggcgagcgccaagacggctgggcccgactcccactggcgccccggctccacctggcgctggggctccggtccgcagtggctccggcaggagggagagaacgaggagggaggcttggaaacgccgggagtagcggtgaggccgacgccggggaagcgaatcgatactgcgttactggacgcccgtgggcctcatgaggatggtcgattccctcattcgttattcacgatttattagggatggcggccgcgtctgtccctccagagagctcgattatccatccggccagcagcgccattaagcgcactgacggtgggaggctcgagttagaaattaggataggaatcttcgcccagttttggagcgcctgcctcctcttccctcgttgctcgcagccaaggcagccgcgaagctgggggcctcgggtgaatgctttcgccctctggccggcgaccaggagacctgcgcacactggccgccgagtgaccccagctcgagcctgcagccacaccagcgggacgggggcggggaggaagaggaagggcggagagacttccttccagagggagtggtccgagaaccggcgggagaagggccaagggaagatccggtcacctgctccggagcctgcaggcggagaggcgagtagttcaccggccccggaggaaaggggaccctcccactgttcccaggcaaatgtgtcgccggcatcctgca

SEQ ID NO: 53990 - DNA, 30 bp, Homo sapiens
  chr17:36981795-36981825
  hyper
cagtgatgggttgccgtgggcctgtgccca

SEQ ID NO: 53991 - DNA, 25 bp, Homo sapiens
  chr17:37009648-37009673
  hyper
cgcagaggtcgcgcaaaccagggcc

SEQ ID NO: 53992 - DNA, 30 bp, Homo sapiens; identical to SEQ ID NO: 11171
  chr17:37009958-37009988
  hyper

SEQ ID NO: 53993 - DNA, 199 bp, Homo sapiens
  chr17:37025963-37026162
  hyper
tgaatcagttccagcgttcaggaggatccaaccccaccctcgacgggcttgaggggttagcccgcctcccgcagcccgggcgccccagatgtgcagcctgctcgcctctgcgccgcctccggctggggaagggccctgggcaccgggcgcagtcagcctgagagcgctgaggcgccagcaccgcgggccccgccgtccc

SEQ ID NO: 53994 - DNA, 30 bp, Homo sapiens
  chr17:37050591-37050621
  hyper
ggtttctatcctcctcggatcttgtaagca

SEQ ID NO: 53995 - DNA, 161 bp, Homo sapiens
  chr17:37183537-37183698
  hyper
ggctcagggcgcggcgccagcgcctgtcatgtcccagctgcgcctctgggtcccacggcacctcctcaggttggcaactactgtggctactagtccaggaggctcagcctctggagtgggtccaggaccggctccagccgacttccgaccctctggggccg

SEQ ID NO: 53996 - DNA, 30 bp, Homo sapiens; identical to SEQ ID NO: 11173
  chr17:37309399-37309429
  hyper

SEQ ID NO: 53997 - DNA, 136 bp, Homo sapiens; identical to SEQ ID NO: 11174
  chr17:37310277-37310413
  hyper

SEQ ID NO: 53998 - DNA, 464 bp, Homo sapiens
  chr17:37321160-37321624
  hyper
gccagaccgaggagccgcagtactaggaaggtccaagcagcgtgcccaatcgctcctccggactacagaggagcccgggaacccagggaagagctccagtgattggtccccctgcctgtcagtctggtgggaggcccagctctctaccctccccgcccgagagtcacttacaaccggtagagaatggtggtctttccttcattgtccagtcccacgatgatgaccgtgtgctctggaagcgtcggaggaagggcagcgtcagggccaaacccgaagaccaagggactgtgtgcccccaccagacctcccaggaaggagatagcgctccccgcaggctggggacctctgcccaccgtaccgcgtctgcttcccacccagctccgacacctgccccactccgggacggtggaaaagacagctgagcccccacctcccttcacattccagaaaagtgtctgaaaggc

SEQ ID NO: 53999 - DNA, 113 bp, Homo sapiens; identical to SEQ ID NO: 11176
  chr17:37321787-37321900
  hyper

SEQ ID NO: 54000 - DNA, 577 bp, Homo sapiens
  chr17:37366040-37366617
  hyper
cccccactctgcatccgggcagcgccagcagtgccccagcacccccgcagcccgcctctccttggcgccccgctcccctccgcctataaatagcacaggacgtgctcgccgtggcgatgacgcggctgggcaggcggaggggaaggaggcagctctgccagagcggtgggcggcgagcgcggcggcgggaggggtgcggcccctccatgctgggctccgatgacaggggcgactgagtcatcccggggacccacgggccacgactgtccccgccgccagcgtttctgtctccggcttgggggactgcggggacgaggctgacctcggatgggtactgagccctcccagacccccggcacgcccggtctcggagggcacctctgggtgggcaagatcggcctcgacggccctggcgcgcaggagcatgtccgcccctgcgcgactcaggtgcacatggaggcggaaagtgaccgcagccccaagccgtttccctccagcgtccccagacctcctcccactttcctcaggtccccttttggctctccccagaccccaccctcctcgggctgctggagga

SEQ ID NO: 54001 - DNA, 543 bp, Homo sapiens
  chr17:37380886-37381429
  hyper
aatgatgacattcattaattacgatgacttctctttttgcttctacccgctccccctcctctggtcccgctcccgtggtggggcgcggggctgcctgtctttctggtctggagccacaaccgcaggcccccgtcctcgcccgtgaccgacggccggcgctgctgcaggccccctcgcggactccgcagctgcgcacccccggccgcggcctcgcgtccccgagcccaacagggctaggagcggggaatgcaggactgcggaggggcagggagagacgccctgagacgcggagataaacacccggagacgccgggagagacggggagagacgcacacagagacaccaagacacagacacgcaggttgtagagacaaattcagagacacgagcgaggatagaggcgcggactgagcccgggactgggacccggcggccgctggagggtgcgcctcgcacgcacagccgggcgcgtaccccgcccgcaccgctccacgcgcgccctccggcctcgctgcgcccatctctccaacgaagaccagtgg

SEQ ID NO: 54002 - DNA, 156 bp, Homo sapiens; identical to SEQ ID NO: 11179
  chr17:37381570-37381726
  hyper

SEQ ID NO: 54003 - DNA, 500 bp, Homo sapiens
  chr17:37381825-37382325
  hyper
cgggcgtctccgggactctgaagccgttctccagaggctgcccccagttagcccccggcacggcagcccccaacccgcgggagcgggcagagaaagttgccggggtggcgggcgaggggaggccaccacgctgagccgcaggagcgggacgaccccgggcgcgaggaccgagggtctgcagaggatgctgctcgcagcgcggggaggagggaagtggggccgcggggatgagccgagggagggagccaaggagctgtccgtgtccagccggctccgccgtccgctgcgcccgccccccatcccctcccctcccccgccggccccagcccggcacccggcggcccctccgcccagtcctcgccgcccaactttgatttaggaggtcgcctggtcccgccccctgccctacgccgctcccccgcgcagccctgcaaatcaggctctcagctattggctgcctcggtggccaggagggcgaactgggcggagtcttggggggc

SEQ ID NO: 54004 - DNA, 30 bp, Homo sapiens
  chr17:37395772-37395802
  hyper
caaagaaatgggtggcgtgcctagggtggg

SEQ ID NO: 54005 - DNA, 833 bp, Homo sapiens
  chr17:37618542-37619375
  hyper
tgatgatatcagctctgattccgacaccttctccgatgacatggccttcaaactagaccgaagggagaacgacgaacgtcgtggatcagatcggagcgaccgcctgcacaaacatcgtcaccaccagcacaggcgttcccgggacttactaaaagctaaacagaccgaaaaagaaaaaagccaagaagtctccagcaagtcgggatcgatgaaggaccggatatcgggaagttcaaagcgttcgaatgaggagactgatgactatgggaaggcgcaggtagccaaaagcagcagcaaggaatccaggtcatccaagctccacaaggagaagaccaggaaagaacgggagctgaagtctgggcacaaagaccggagtaaaagtcatcgaaaaagggaaacacccaaaagttacaaaacagtggacagcccaaaacggagatccaggagcccccacaggaagtggtctgacagctccaaacaagatgatagcccctcgggagcttcttatggccaagattatgaccttagtccctcacgatctcatacctcgagcaattatgactcctacaagaaaagtcctggaagtacctcgagaaggcagtcggtcagtcccccttacaaggagccttcggcctaccagtccagcacccggtcaccgagcccctacagtaggcgacagagatctgtcagtccctatagcaggagacggtcgtccagctacgaaagaagtggctcttacagcgggcgatcgcccagtccctatggtcgaaggcggtccagcagccctttcctgagcaagcggtctctgagtcggagtccactccccaggtgag

SEQ ID NO: 54006 - DNA, 30 bp, Homo sapiens
  chr17:37755483-37755513
  hyper
caggggctcccctgcggctcctgggggcag

SEQ ID NO: 54007 - DNA, 696 bp, Homo sapiens
  chr17:37755960-37756656
  hyper
agacccggaaagacccgttcctaattcaattaattccgaaaagaggaatgagacgcagacagatactgacagaagctgggagagaggtttaaatacccgaacaccagacacacactctggtatggaactccgcagcccctgtcagcgcggggagacctcgctgcgctcccgcgctggagagggcaggagagttggctgcgctagagccataccctggctcacatctgggcagcgtctccacccaacgctgtgccccagctccctgggcatggccggcgcctagaggttccctcttctcctcccctcggagcgccccagcttcccttccctgccctagggaactaaggtgactccgctcctcgcatctccctcctgaaatccgttgccctccttcctgtgaacccagccccggtcttggccttcttctcacgtccacactcccagggctggcgcccctgtcccagtgctttaggttggagaaagtttccagagcagaacagccctcccaaggcagctgcgccctttcttaccacttctcacccagggaaactttgtcgagaatttttaaagctgcaggacagaaaggcagaagctgcttcaggattcagaaccggggcagggttttaaggtttctcacagttcaggtgtcatttctgctctggccccgtggccagcgcctgggtatcccagccctga

SEQ ID NO: 54008 - DNA, 796 bp, Homo sapiens
  chr17:37757095-37757891
  hyper
aaagagaagcaggcacagccccgtggagcttccagagtatcagggttttcctgccactgatcctcctgggggtcggtgtcccgcagtgatttatcgggctgtctccccgagtcacaaaatcagggctgggggttcactgggggtccatagctcactgtccgagtcatggctggaacgcagctcaacaatgaagggacaggaatggagctcaacagtgaagggacagggagtaactgctttccttccctttcccgccagatgggcaaatggcctggactcggagatacctctttttctctgtcatcttccaaatgctggacttggaatggggtctggaaaatcaagaggaagatgtcctcctgattgaacttggatccagccgtcgggttcagcggcccaggggttgagctgagccggctggtggacgcttggagagcctgccgctgaggctagggcaagaagggcgtcctctctgtgccttctccccaggccaggcacagcgctggcccctttcctcctccctcccctgcttctgttcttggagcatctctgggtgtgtgtgcgcaggcgggagagcaagcaagagaaagagacctgcgaggggacgtttggggccgcttgtccgcgcacatcttcttctcctgctcatcacaccatctcgccagggaagttgagcactggggaggagggtgatgagaggctagagccagccagagtgcagggaatgtggggggaagggtcagaaatcgggaaaggggcgactggtgtggatgccgggattcaccagaagctgagt

SEQ ID NO: 54009 - DNA, 563 bp, Homo sapiens; identical to SEQ ID NO: 11184
  chr17:37759986-37760549
  hyper

SEQ ID NO: 54010 - DNA, 629 bp, Homo sapiens
  chr17:37761201-37761830
  hyper
ggcccgggctccggcgccctaacttctaccctcttcaagaaagagggagcgcctggctcctttttgcctcggcagctgggtgtctgtttttaaaataataatgagagggggaaacgcgttccattgctcagctgcccccttaccaacgccttgggcctgcagggaggagggggaggaggaaacctcagcgaagatattgggaatgggggaggggtgcctccagggagcccccggagagaggtccctggagaagcactccttgggagagaggaggagggaaccccttggggagagagaaggcgagtcccctgggggaagcgaggcccctgggacaggccacccacaggtaacaggactgcgctgccccaggagagcggcaggaccggtggcccgctccccgcgcccggcgccggggtaggatgggggtgtccctgcgctctgggggctggggacaggggggcgggcaaaggcaaaagaaaaagaagggagccggcgcgaagtctcagttatgaaaaaacgcattgagctcctcgtacatggggccccggtcgtggtgaaggtgcatatcgtaagacaagagattctccgagtggacgcccccgcgcacagccgacgagccgaagactagc

SEQ ID NO: 54011 - DNA, 1039 bp, Homo sapiens
  chr17:37761946-37762985
  hyper
cggggggctgagcgggccctcgtactcggagctgttgtagtccgggctcgcgccgccaccgcctgccgccgcatacagcgtctcgtaggcggcgcagtagccgtgggtccgcagggcgtgcgccgcgccgccgcccaggccgccggccgcctggcactgtgcgcccgccaggcgcgagcacgggtacgggtaggggtgcatggcgaacgggccgcccgagccgtggaagcggccggcaccgtcggcgccttgctccgtgaggaagttgcgagagttgagctgcagacagccggccaccagattggtggtgggctgcgacagacccttgcacagagtctgcacgtaggacactaggtctggccgcttgccggagcgcaggatctccgagagcgcccagatatagttcttggctaggcgcagcgtctcgatcttggacagcttctgcgtcttggagtagcagggcaccaccttgcgcaggttgtccagggctgcgttcaggtcgtgcatgcggttgcgctcccgcgcgttcgccttctgccgccgaagcttggagcgctccaagcgcgccttggtcatcttgcgcttcttgggcccgcgcttcttgggccgctcgccctccgcctcgtccagtccttcttcctcctcctcttcctcctcctcctctccccccagctcgccttcctccttgacctcggccaacgtggcctccgtcccctcttctccacggagagggactggcttggccgcccgggctggccccggagcccctggcccgggcgcaggcggtggcggtggcggcgcgtcgcccttgtcgctcctcggctcgtcgtcttcgccgtcgccccagctggcgaacttgggcacgtccgagagaaggccgggctcgctgaacaggcgggtcagcatggtgcctgagggcgccccgcgggcgggaaggggagacagacagcacaaagtgaggggcgcgctggggtaccgacgcccccccacaaccctcctccacccccgagtctcgtgcgggctcctgcctaggctaccc

SEQ ID NO: 54012 - DNA, 30 bp, Homo sapiens
  chr17:37763219-37763249
  hyper
cccgttctctcctggcggtggagagaggct

SEQ ID NO: 54013 - DNA, 184 bp, Homo sapiens
  chr17:37763953-37764137
  hyper
gatctcgctccctttcggacaacttacctcggagaggagtcaaggggagaggggaggggagggggggagggggcaagagagagaggggggagaagagggatcttctcgcttatttcattgttcccccatcttcagggagcgggggcagcggctcctcaaggcggcgggcgccggcgtcttcaga

SEQ ID NO: 54014 - DNA, 255 bp, Homo sapiens
  chr17:37764263-37764518
  hyper
cgtctgcactgggggagagccggctcccccgggacccgccgccatctgtcactctctactccaaaaaaaaaaaaaaaaattaaataaataaaggaaataaataaatatttctgccgccctcccctccccgcccaacgcagggaaagcagggattgagaggaaggtgggaggagttgccccctgtatatagagaccccctcacgggaacaatggggtggcaaggctggacactgggggctcgtggtggccaattct

SEQ ID NO: 54015 - DNA, 30 bp, Homo sapiens; identical to SEQ ID NO: 11189
  chr17:37774334-37774364
  hyper

SEQ ID NO: 54016 - DNA, 340 bp, Homo sapiens; identical to SEQ ID NO: 11190
  chr17:37774744-37775084
  hyper

SEQ ID NO: 54017 - DNA, 827 bp, Homo sapiens
  chr17:37782848-37783675
  hyper
ctctccccacgacctcgcaggcctctctgaaactcccagtaccaggaccacgaaggggttaaagccagagtcctgcctccccgctgcccctctccccctccctccccctttatcctctctgctggactccatcaataatgcagcttcaagttctggggagaccgcagggggccccccagctggctccccaggccttggctctaactcccaccctcctcccagccccaggagaacacgattctccatgctcattggccagtttcccctaaaccctccctccgagcacccgggcgccagtcccaggcggaggggacgggctggggaccccaaagctgggaccggagggtgagcccggcagaggcagagacacacgcggagaggaggagaggctgagggagggaggtggagaaggacgggagaggcagagagaggagacacgcagagacactcaggaggggagagacaccgagacgcagagacactcaggaggggagagacaccgagacgcagagacacccaggccggggagcgcgagggagcgaggcacagacctggctcagcgagcgcggggggcgagccccgagtcccgagagcctgggggcgcgcccagcccgggcgccgaccctcctcccgctcccgcgccctcccctcggcgggcacggtatttttatccgtgcgcgaacagccctcctcctcctctcgccgcacagcccgccgcctgcgcgggggagcccagcacagaccgccgccgggaccccgagtcgcgcaccccagccccaccgcccaccccgcgcgccatggaccccaaggaccgcaagaagatccag

SEQ ID NO: 54018 - DNA, 130 bp, Homo sapiens
  chr17:37793984-37794114
  hyper
ctcatttctaatgacacgttccctcaccccgcatttttgggttagtcaatgtctcctggttttcttcgtaccgctctgacagtcggtcaaagtcccgcttcacgttttcctctgtcgcccaacccctcgc

SEQ ID NO: 54019 - DNA, 725 bp, Homo sapiens
  chr17:37823745-37824470
  hyper
gccccggcggccctccgcgaatgcgtcctgcccctcccctgcccaagccctctgccctcacccgggtccggcgccgcccccgaagtggcgggaacaacccgaacccgaaccttctgtcctcgggagcccccagataagcggctgggaacccgcggggcccgcaggggaggcccggctgttccgcccgctaagtgcattagcacagctcacctcccctatcgcgcctgccatcggacgggcagtgccgcgccctgctctggggcccccggagcgaccacagcggaggccggaacggactgtcctttctggggcggggtggggagggggtgtcgctggagggcccggtggcatagcaacggacgagagaggcctggaggaggggcggggagggggagttgtgtggcagttctaagggaagggtgggtgctgggacgggtgtccgggagggaggggagcctggcggggtctggggcctcgtcgcggagggcgctgcgagggggaaactggggaaagggcctaattccccagtctccacctcgaatcaggaaagagaaggggcgggctgctgggcaaaagaggtgaatggctgcggggggctggagaagagagatgggaggggccggccggcgggggtgagggggtctaaagattgtgggggtgaggaactgagggtggggggcgcccagaggcgggactcggggcggggcaggcgaggcggagggcga

SEQ ID NO: 54020 - DNA, 30 bp, Homo sapiens
  chr17:37844397-37844427
  hyper
cggatttttgtgggcgcctgccccgcccct

SEQ ID NO: 54021 - DNA, 31 bp, Homo sapiens; identical to SEQ ID NO: 11196
  chr17:37844562-37844593
  hyper

SEQ ID NO: 54022 - DNA, 537 bp, Homo sapiens
  chr17:37856363-37856900
  hyper
cgcgccccttcccacggggccctttactgcgccgcgcgcccggcccccacccctcgcagcaccccgcgccccgcgccctcccagccgggtccagccggagccatggggccggagccgcagtgagcaccatggagctggcggccttgtgccgctgggggctcctcctcgccctcttgccccccggagccgcgagcacccaaggtgggtctggtgtggggaggggacggagcagcggcgggaccctgccctgtggatgccccgccgaggtcccgcggccggcggggccagaggggcccggacgagctctcctatcccgaagttgtggacagtcgagacgctcagggcagccgggccctggggccctcgggcgggagggggcagttacacggcagcggctcgagatggcccatccaagagactggcgctttccaggctccgaggggctccgggaacttgtcaaagaagttctctgaaattgttcagaaagttttcccgcaaagggtgtattgcgtagagcgcgcgcgcgcgtttcccccc

SEQ ID NO: 54023 - DNA, 30 bp, Homo sapiens; identical to SEQ ID NO: 11198
  chr17:37857132-37857162
  hyper

SEQ ID NO: 54024 - DNA, 30 bp, Homo sapiens
  chr17:37887046-37887076
  hyper
cttagactgcaaagcgcttttcagtttaca

SEQ ID NO: 54025 - DNA, 31 bp, Homo sapiens; identical to SEQ ID NO: 11199
  chr17:37895237-37895268
  hyper

SEQ ID NO: 54026 - DNA, 62 bp, Homo sapiens; identical to SEQ ID NO: 11200
  chr17:37895727-37895789
  hyper

SEQ ID NO: 54027 - DNA, 320 bp, Homo sapiens
  chr17:38020385-38020705
  hyper
gccgggccgggctggagctgccgctgtggctactcggcctctccacgtgctcctgccgtcgcctggactcagcgcgcagctggcgggagattcccggcgcggggagtccccgggatccggcagccgcgtcggcgcagactgaaaagggcaggagccggcgacctgccggtgcgcggggttacagcggcgctggctggcggcggctttaaaggacgctggccgcggagtgccgcgggttccgcgcctccagccccctttcgaatgtcaaacccaaggaaccccgacaggatggaaatgtcgcatcactaaattgtctcaaa

SEQ ID NO: 54028 - DNA, 30 bp, Homo sapiens
  chr17:38051332-38051362
  hyper
tgtaacgttataaatagggaaaaacgttta

SEQ ID NO: 54029 - DNA, 30 bp, Homo sapiens; identical to SEQ ID NO: 11202
  chr17:38084022-38084052
  hyper

SEQ ID NO: 54030 - DNA, 39 bp, Homo sapiens
  chr17:38210875-38210914
  hyper
gggactcgagggagctcgaaaggccgctcacaacccggc

SEQ ID NO: 54031 - DNA, 30 bp, Homo sapiens
  chr17:38219346-38219376
  hyper
taaggaggagggagcgagggggcattaata

SEQ ID NO: 54032 - DNA, 40 bp, Homo sapiens; identical to SEQ ID NO: 11203
  chr17:38228512-38228552
  hyper

SEQ ID NO: 54033 - DNA, 38 bp, Homo sapiens; identical to SEQ ID NO: 11204
  chr17:38228860-38228898
  hyper

SEQ ID NO: 54034 - DNA, 30 bp, Homo sapiens; identical to SEQ ID NO: 11205
  chr17:38232113-38232143
  hyper

SEQ ID NO: 54035 - DNA, 128 bp, Homo sapiens
  chr17:38256106-38256234
  hyper
ctctgaggggtggtgatggggcgtttctgagagcatttccagcccgaacaagccgctctggaaatcccacactaaagcaccgcagcacgttagcaaatctccgggccgagggacaccccagtccctta

SEQ ID NO: 54036 - DNA, 85 bp, Homo sapiens
  chr17:38256952-38257037
  hyper
gtgatcccagggagcgcctcgtgccccagtgacacacttttccaacagccggcacgttgagctcttgcgcgcctgcgcaacgaca

SEQ ID NO: 54037 - DNA, 290 bp, Homo sapiens; identical to SEQ ID NO: 11206
  chr17:38264455-38264745
  hyper

SEQ ID NO: 54038 - DNA, 30 bp, Homo sapiens
  chr17:38277746-38277776
  hyper
actggtccaggaggcgtgcggggccgcggg

SEQ ID NO: 54039 - DNA, 30 bp, Homo sapiens
  chr17:38296367-38296397
  hyper
tgactccttccactcgggaagcccaagatg

SEQ ID NO: 54040 - DNA, 173 bp, Homo sapiens
  chr17:38347442-38347615
  hyper
tattttccaccccttccgcccccgccctcctgcctttcgctcctcatcgccttgcactgccatcttcccacccactcccctcaccccctggcgccctggccgcccctccgctgccgtgggtgcagctggagttcgtggactacgtgttccacggggagcgcggccgccgggag

SEQ ID NO: 54041 - DNA, 428 bp, Homo sapiens
  chr17:38347753-38348181
  hyper
cggccgtcggcgggatggggggccggaggccggaggcccgcgccgccgcccgcccctgaccccgcctcccacccccgcagctgcaagcagaaccaggacctgctgtctttctacgccgtggtcatggggctggacaacgccgctgtcagccgccttcgactcacctgggaggtgatgagacccctcccgttcctacctgggaatctgggcatcccgggctccccgaagtgcgtcctcccgggacggccgccggcctggagggagtctttgcgccagttggagggaggcgccctcttctggcatacgcaaccccagggcgcacagcttggctaatggaccctgtctttgtgcaaattagtgaaaagcccggatcccgcctgagtcacggcaggcagcccttggccaggtcaggtcgcagacttggctgt

SEQ ID NO: 54042 - DNA, 110 bp, Homo sapiens
  chr17:38375104-38375214
  hyper
tttgcaaggttggccgaggcgggttcttcgttaactcgagattaaggaaggatatttaggggggagggtgtgtgtgtgtgcggcggattaaagacgaaaggagtatattc

SEQ ID NO: 54043 - DNA, 21 bp, Homo sapiens
  chr17:38383815-38383836
  hyper
tgttccaggctggttgcggtg

SEQ ID NO: 54044 - DNA, 142 bp, Homo sapiens; identical to SEQ ID NO: 11210
  chr17:38474110-38474252
  hyper

SEQ ID NO: 54045 - DNA, 239 bp, Homo sapiens
  chr17:38478594-38478833
  hyper
ggaggccagtagatgccggagatgaacctggaggctcaggacagggcaagagtggggcacgccggggctgggtcctctggctgttccctctccccacagagttacttgaggtcaggcagtctccatgtgtcactgtaccccgcaggcagtgtcaccgtgacccactcgctgtgtgtctgtgtgtacacacctaccttggagtggctttatcccggccctccccccggagcctctgtccc

SEQ ID NO: 54046 - DNA, 1097 bp, Homo sapiens
  chr17:38498083-38499180
  hyper
ggtacaagggaggacgcccgcccctcttccgtccttgtcccctcgcagccccctcctctccctgtactcggcgtccctctgtactctgtgtactcctcatctggagcctttcccccttcctgcttctctcctctcctcccccttcccaggctgcccccacttgcctgtccacatgccgcctctccctctcggttccctgcgtttctcccgctgcagccggacgcgccgggaatgggttaagccaggggcggtgcctggacggggcggggcggtggaaagggggtggtgcccggaggggagggggcgcgcagagctggggtgggggggccgtggcgcgtaccaccagagaccgagcgagtcgccagctgcccctggcctggcgggggcggaaccgcgcgggatccccacccccacccggaatcctcgccacggagaatccctggagaagccccggatccccggctgggaggaggaagtgctcgttgacccccagccccgcgctgatcccgcccccggcctgcggacttggggagccgctgtactctgcctcggacgccacgagactctagacgggagtcccctcgaggtgaagccgctgagttcccgggccccgccaggcttccctgggagagccgacggaccccccctcccagcacacacaacttccctgcttttcaccgggactggcggagcggccggcggacttagacgcggggacttcagggcagggggcgccccctgcccgggtcaccagtcggggcgaggggacgtctcctctcccccagctgctctgctcggatggcgccgccggctgagtgacgggggcggcgcgcaggacttcccagctcggacctcttgccttcgaggggaaagatgtacgagagtgtagaagtggggggtcccacccctaatcccttcctagtggtggatttttataaccagaaccgggcctgtttgctcccagagaaggggctccccgccccgggtccgtactccaccccgctccggactccgctttggaatggctcaaaccactgtacgtaccggcctctcagtctgctgttgtagggggtgggagtgggcggtagggcttccac

SEQ ID NO: 54047 - DNA, 30 bp, Homo sapiens
  chr17:38499536-38499566
  hyper
ccacttgccaaagcccgagggagagcccct

SEQ ID NO: 54048 - DNA, 30 bp, Homo sapiens
  chr17:38501382-38501412
  hyper
ctcccaccaatctccgccactcacacctcc

SEQ ID NO: 54049 - DNA, 30 bp, Homo sapiens
  chr17:38599493-38599523
  hyper
cagcttccaaactgcgccgcttccttcttc

SEQ ID NO: 54050 - DNA, 30 bp, Homo sapiens
  chr17:38600290-38600320
  hyper
gagctggcggagatcgaggccatccaggaa

SEQ ID NO: 54051 - DNA, 126 bp, Homo sapiens
  chr17:38604452-38604578
  hyper
agcctaggtgtctctcgagggccaggggctggcgttggggagaaattgtgagggtaaaatcaggcaacaggaaagaggaaatcctctggctttcgccacaaactttgcagccggtggtgccaaagc

SEQ ID NO: 54052 - DNA, 30 bp, Homo sapiens
  chr17:38716787-38716817
  hyper
cttgggagttcctccgggaaggagagactg

SEQ ID NO: 54053 - DNA, 31 bp, Homo sapiens; identical to SEQ ID NO: 11214
  chr17:38776490-38776521
  hyper

SEQ ID NO: 54054 - DNA, 153 bp, Homo sapiens
  chr17:38804061-38804214
  hyper
ttccctttgtcccgcgctcgccccgcccctcgcgtccggagcttccgcactcgcactttccacactcttcttaatttttttttttttccgggccccacccgaccctctttagaaaaactaaccttctagtgaagatgcggtgatgcttagcac

SEQ ID NO: 54055 - DNA, 30 bp, Homo sapiens
  chr17:39596539-39596569
  hyper
taggctccttctccacgtgtggtgtctatg

SEQ ID NO: 54056 - DNA, 856 bp, Homo sapiens; identical to SEQ ID NO: 11215
  chr17:39683577-39684433
  hyper

SEQ ID NO: 54057 - DNA, 30 bp, Homo sapiens
  chr17:39705219-39705249
  hyper
ctccgccaccggtgcgggaggagcccagga

SEQ ID NO: 54058 - DNA, 30 bp, Homo sapiens
  chr17:39795172-39795202
  hyper
aggaaacccaggcctcgggggtcacccgtg

SEQ ID NO: 54059 - DNA, 30 bp, Homo sapiens
  chr17:39819085-39819115
  hyper
ccggggctggccggcgcgccctaaggccgg

SEQ ID NO: 54060 - DNA, 30 bp, Homo sapiens; identical to SEQ ID NO: 11216
  chr17:39822527-39822557
  hyper

SEQ ID NO: 54061 - DNA, 449 bp, Homo sapiens
  chr17:40306685-40307134
  hyper
gaggacagtcatagcggtttccttaaggctcaccaaaggcaggtaagctaaggaaagaagctccccacctcctatggcccgacgcctggggagcccctcaagagggggctacgggtcgggggaggggtcagtatccccctaaactggggctgggcgggaggaagggctgccctggagatgcttcaacgcaggcgagacaccaggtcctgggacaagcatactcacggcggctccggggcggcggcgttacttggggccggggctcggacgggatccgcttctctccccgccggcggtgtcccaggctccggcctccacttccgcctttcagccgctccggatccggatctccacctccgccccgcccctcaatactcccaggtgattgacagtgcggagaccaatgggaggcactcttggccgacctacccagcggcgccggtaggaac

SEQ ID NO: 54062 - DNA, 415 bp, Homo sapiens
  chr17:40332755-40333170
  hyper
gggagttcctagacccgcacctccattctctcccctcgcctcgggtctcaccatgtccaggagatccgagacggccccgaggatacttgccccccagctcgaacctcaagccccgacctccgtcccactcacgcgttccgtcaaaacgggtggcgatggtgtccaggaaggtgttttgcggggccagcaaccccttcatgaccggcatggccccggggcgtgggttcaaggcgcggcgctggggagctttcagcgcggccgggccggagggggcgcgctgtcggaggggccggggcgccccatgcgccctcctgcctcctcccctccctcttactgccgctgccgctgccgctgcctctgctccgaaccccgtagctctcggctcggctcagcgccgtttcggtcccccccacct

SEQ ID NO: 54063 - DNA, 263 bp, Homo sapiens
  chr17:40400775-40401038
  hyper
agaagcgaagagcagcgatttccttccaaaaggtcagctgcctcagacagaccaaacagaaagcagcgaattcttgccaacttcccctcctgcttctgcagctagtacgcaatagcatttagtttccagtaaagctccagataaaaacaaagcaaatgtgagacccagaatctacacaatgtcagtgtctcgcttgactgaacgaagggcagtaagatcatatggagctacgctttttcaacgtggtggaagtgttaggaagg

SEQ ID NO: 54064 - DNA, 30 bp, Homo sapiens; identical to SEQ ID NO: 11218
  chr17:40427459-40427489
  hyper

SEQ ID NO: 54065 - DNA, 30 bp, Homo sapiens
  chr17:40427937-40427967
  hyper
agctcctatggggtcggcgcggggtcccca

SEQ ID NO: 54066 - DNA, 247 bp, Homo sapiens
  chr17:40429004-40429251
  hyper
tgaacctacgggggacggggcgcctggggccggttcccttcctgggaaaatctggctggctcccaccagtcagagctgcgggagggactgctctctctagagaagaaagaataaacagggtcatctgtaggatccaggggaagggggtcccccagatcctttccacgtgctgaggagggggttgcggttgtgggaagccaggctgagtcacccactctcctttcctctgctacgtctatctcccgga

SEQ ID NO: 54067 - DNA, 56 bp, Homo sapiens
  chr17:40441310-40441366
  hyper
ggcctggcctggccgcggtccagggataggtaggcatggcaaggccaggggcaggc

SEQ ID NO: 54068 - DNA, 382 bp, Homo sapiens
  chr17:40464189-40464571
  hyper
taaaaagcaggggactcgaggtttggggaaatgatggagatgggcgcgggtgggcagaactctgacccaggcttctccttagcagctgctgctcccagcagcctcgaagctggcggctgagggcccggcgccaagatgcttctcaaccctcggggccaggggcagtcccagagccgcaacaaccgtcccatcctcctccttcccagagaccagcaggtggcaccacgcggctgcgctgttttcagctggctgccggcgactgtgcgaggcggaggtgcagcaagcgggaccggctcgccccggctggacccccgcactgccggctgcagccagtccctgctgtcgctggggcccttgggctcagggacgcgcgctccctggg

SEQ ID NO: 54069 - DNA, 59 bp, Homo sapiens
  chr17:40540528-40540587
  hyper
cttcagccaatcctcgcccagccccagcctggccgaggcacgccgtcatgcataattca

SEQ ID NO: 54070 - DNA, 93 bp, Homo sapiens
  chr17:40558073-40558166
  hyper
gaccaaacttcgggtcggagatggggttgcgtaataattgcacttgggctaaaatctctgtggtcgtccaaccctgtcctgatccctttccac

SEQ ID NO: 54071 - DNA, 51 bp, Homo sapiens
  chr17:40558226-40558277
  hyper
cggagcgccctctggtgccgcaaatcgcacactgcccgagccaggccgaaa

SEQ ID NO: 54072 - DNA, 598 bp, Homo sapiens
  chr17:40573765-40574363
  hyper
ccagcctcctcccgccggctgcgctgctgcgcctggcccccgcccccgcaggcatgcggggtgattcacctcgcccagactgcgcccagaccgccggaccccgcaggggctgtccacccactccaccagcccctcttgcactcctgacgcccactcttccccgcccagccccgcccgcttccaggaggcccagggtgccagcgcgccgcgggtgagggtgtcctcaagggcctgaaaatgcctggtggccaggagcagagagcagcgaggggacaggggtgggccgccgaggccgatgtgggggcgcgggggcgcagggtctggggaggaggttggcggtcgcgttccccgcttggcacagcccccgctggtgcgtgcctgagccctgaatcacccgctatatcaggcccgcaggcgcagaggccccaggcccgggccccgcagccagtgtccgcttacagcggaccccaacgatcgcgagggacccctgactttcctagaaacttcccccaagtaggaagaagtttgacagagccaattagggagggagcggtctgcgaggggcagcgtcctcgagtccacccgctaattcggttct

SEQ ID NO: 54073 - DNA, 108 bp, Homo sapiens
  chr17:40575274-40575382
  hyper
gctgggcgggggatcggtgagctccccagctcccgggccaaactccggagtctgatcgctgattggctggccccaccccagaaagggagggaccggggcagaagggga

SEQ ID NO: 54074 - DNA, 30 bp, Homo sapiens; identical to SEQ ID NO: 11222
  chr17:40688557-40688587
  hyper

SEQ ID NO: 54075 - DNA, 64 bp, Homo sapiens
  chr17:40713960-40714024
  hyper
cctgccttgcctttctccgcccggtcccagcgggggtccgatcggcatcaaggcttcacccact

SEQ ID NO: 54076 - DNA, 200 bp, Homo sapiens
  chr17:40719397-40719597
  hyper
gggtggagtaggggcggaagggatcatacacaggggaggcactcgcacgccctagcctgtgccagtctcgggggactcattaagctgcccgcgcaccccgggctgtgtgtgtgcaagcgcgcagggtgacagaggcgccttcccggaatggggggcgcgctgtgcgtgcctgcagtggaaggggcgcctccccctagggg

SEQ ID NO: 54077 - DNA, 30 bp, Homo sapiens; identical to SEQ ID NO: 11223
  chr17:40760807-40760837
  hyper

SEQ ID NO: 54078 - DNA, 30 bp, Homo sapiens
  chr17:40761335-40761365
  hyper
cagccatctccccgcggcagccacaacatc

SEQ ID NO: 54079 - DNA, 30 bp, Homo sapiens
  chr17:40761569-40761599
  hyper
gcaatctgcatgaacgaaggccagtgctta

SEQ ID NO: 54080 - DNA, 30 bp, Homo sapiens
  chr17:40827748-40827778
  hyper
accaatcgtgcctccgtttccccacgggga

SEQ ID NO: 54081 - DNA, 30 bp, Homo sapiens
  chr17:40828890-40828920
  hyper
agtgtccggtgcagcgtccgaggtgggcag

SEQ ID NO: 54082 - DNA, 30 bp, Homo sapiens
  chr17:40829162-40829192
  hyper
cctggcgccgggcgcggctaccaatcagac

SEQ ID NO: 54083 - DNA, 31 bp, Homo sapiens; identical to SEQ ID NO: 11224
  chr17:40830981-40831012
  hyper

SEQ ID NO: 54084 - DNA, 315 bp, Homo sapiens
  chr17:40831604-40831919
  hyper
ggagctgagcaggaagaaaggcggggccggcgggggcagccgcggcggggttgaggccctgaggggcagctcccaccccgtagcagcctccgcaggtcctggcggaagcgcaggcccaggaaggcgtagagaacgggattgaggccacagcgggcgagggccaagccgctggtcaccagcagtgcgacatccttgcgtttgctggcagggcagctccgctcgcgcgcagccagtagatcggcagtatccagcagcagggcgaggctgtagggcagctgcagcaccacgaaggccgccaccagagccaccacgacg

SEQ ID NO: 54085 - DNA, 14 bp, Homo sapiens
  chr17:40832268-40832282
  hyper
ggaagaggaagccg

SEQ ID NO: 54086 - DNA, 30 bp, Homo sapiens
  chr17:40834728-40834758
  hyper
taaggaggagagagcggtctgctgcaaacc

SEQ ID NO: 54087 - DNA, 30 bp, Homo sapiens
  chr17:40896866-40896896
  hyper
ggaatgaggaggggcgcctgctacccccgg

SEQ ID NO: 54088 - DNA, 30 bp, Homo sapiens; identical to SEQ ID NO: 11227
  chr17:40897167-40897197
  hyper

SEQ ID NO: 54089 - DNA, 30 bp, Homo sapiens
  chr17:40925775-40925805
  hyper
cagaagcagctggccgcctggtgctcgctg

SEQ ID NO: 54090 - DNA, 60 bp, Homo sapiens
  chr17:40932938-40932998
  hyper
ctgccagcctcacccgctccggacccccccgatcctccggactccgctggtcctggcccc

SEQ ID NO: 54091 - DNA, 212 bp, Homo sapiens
  chr17:40950644-40950856
  hyper
acggggcctctccacgcttagaatccagagggtcaccagctcccgaagacgccatgttgccactcctcccttcgcggtgccgccgcgcgggcctcgctgggaacagtagcccttggccgctgcagtggactctgggagttgtagtccgcgtgccctttgcggggcagagccgcggttcccgggcacaggggatggacgcgggaggtgagaag

SEQ ID NO: 54092 - DNA, 30 bp, Homo sapiens
  chr17:41132457-41132487
  hyper
attcccggggaaggcgcgccctcggggact

SEQ ID NO: 54093 - DNA, 363 bp, Homo sapiens
  chr17:41150139-41150502
  hyper
gttccccctcctagcgccagagaaaggaactacaacaaagcctagctgctgagtccagagcgcacagcacagtcgccctcccagctcttccgtcggccgggaggagtctcctttgctcttgtctactgctggagctgctaataaagtttcattcgaatacttgagctgccgcgccctgcgtttccctcatgagcttcttccgcccgcaacacgagactcagcaccacacaatcagcgtggcaaagcctgaagggcgggacaggaagtgaggtcactcctcaccggggtgaaaggttagcggaagtgtccttctttcctttttgctggtagggccgggtggttgctgccggtaagtagaagctt

SEQ ID NO: 54094 - DNA, 30 bp, Homo sapiens
  chr17:41176458-41176488
  hyper
tgagccaccgcgcccggcctattgtcagac

SEQ ID NO: 54095 - DNA, 515 bp, Homo sapiens
  chr17:41196310-41196825
  hyper
gtggaagtgtttgctaccaagtttatttgcagtgttaacagcacaacatttacaaaacgtattttgtacaatcaagtcttcactgcccttgcacactgggggggctagggaagacctagtccttccaacagctataaacagtcctggataatgggtttatgaaaaacactttttcttccttcagcaagcaaaattatttatgaagctgtatggtttcagcaacagggagcaaaggaaaaaaatcacctcaaagaaagcaacagcttccttcctggtgggatctgtcattttatagatatgaaatattcatgccagaggtcttatattttaagaggaatggattatataccagagctacaacaataaacattttacttattactaatgaggaattagaagactgtctttggaaaccggttcttgaaaatcttctgctgttttagaacacattctttagaaatctagcaaatatatctcagacttttagaaatctcttctagtttcattttcctttt

SEQ ID NO: 54096 - DNA, 695 bp, Homo sapiens
  chr17:41197124-41197819
  hyper
agtttccttttcatttctaatacctgcctcagaatttcctccccaatgttccactccaacatttgagaactgcccaaggactattctgactttaagtcacataatcgatcccaagcactctccttccattgaagggtctgactctctgcctttgtgaacacagggttttagagaagtaaacttagggaaaccagctattctcttgaggccaagccactctgtgcttccagccctaagccaacaacagcctgaatagaaagaatagggctgataaataatgaatcagcatcttgctcaattggtggcgtttaaatggttttaaaatcttctcaggtgaaaaattaccataattttgtgctcatggcagatttccaagggagacttcaagcagaaaatctttaagggacccttgcatagccagaagtccttttcaggctgatgtacataaaatatttagtagccaggacagtagaaggactgaagagtgagaggagctcccagggcctggaaaggccactttgtaagctcattcttggggtcctgtggctctgtacctgtggctggctgcagtcagtagtggctgtgggggatctggggtatcaggtaggtgtccagctcctggcactggtagagtgctacactgtccaacacccactctcgggtcaccacaggtgcctcacacatctgcccaattg

SEQ ID NO: 54097 - DNA, 62 bp, Homo sapiens
  chr17:41199658-41199720
  hyper
ccatggaagccattgtcctctgtccaggcatctggctgcacaaccacaattgggtggacacc

SEQ ID NO: 54098 - DNA, 75 bp, Homo sapiens
  chr17:41201136-41201211
  hyper
ctgtgccaagggtgaatgatgaaagctccttcaccacagaagcaccacacagctgtaccatccattccagttgat

SEQ ID NO: 54099 - DNA, 56 bp, Homo sapiens
  chr17:41203078-41203134
  hyper
cctgtgggcatgttggtgaagggcccatagcaacagatttctagccccctgaagat

SEQ ID NO: 54100 - DNA, 85 bp, Homo sapiens
  chr17:41209067-41209152
  hyper
cctttctgtcctgggattctcttgctcgctttggaccttggtggtttcttccattgaccacatctcctctgacttcaaaatcatg

SEQ ID NO: 54101 - DNA, 42 bp, Homo sapiens
  chr17:41215348-41215390
  hyper
cctcattcagcatttttctttctttaatagactgggtcaccc

SEQ ID NO: 54102 - DNA, 79 bp, Homo sapiens
  chr17:41215889-41215968
  hyper
cagaaatagctaactacccattttcctcccgcaattcctagaaaatatttcagtgtccgttcacacacaaactcagcat

SEQ ID NO: 54103 - DNA, 89 bp, Homo sapiens
  chr17:41219623-41219712
  hyper
cctgttttcataacaacatgagtagtctcttcagtaattagattagttaaagtgatgtggtgttttctggcaaacttgtacacgagcat

SEQ ID NO: 54104 - DNA, 312 bp, Homo sapiens
  chr17:41222943-41223255
  hyper
caaattcttctggggtcaggccagacaccaccatggacattcttttgttgaccctttctgttgaagctgtcaattctggcttctccctgctcacactttcttccattgcattatacccagcagtatcagtagtatgagcagcagctggactctgggcagattctgcaactttcaattggggaactttcaatgcagaggttgaagatggtatgttgccaacacgagctgactctggggctctgtcttcagaaggatcagattcagggtcatcagagaagaggctgattccagattccaggtaaggggttccct

SEQ ID NO: 54105 - DNA, 192 bp, Homo sapiens
  chr17:41226346-41226538
  hyper
cctagatcttgccttggcaagtaagatgtttccgtcaaatcgtgtggcccagactcttccagctgttgctcctccacatcaacaaccttaatgagctcctcttgagatgggtagtttctattctgaagactcccagagcaactgtgcatgtaccacctatcatctaatgatgggcatttagaaggggatgac

SEQ ID NO: 54106 - DNA, 128 bp, Homo sapiens
  chr17:41228503-41228631
  hyper
cctttccactcctggttctttatttttactggtagaactatctgcagacacctcaaacttgtcagcagaaaggccttctggattctggcttatagggtattcactacttttctgtgaagttaatactg

SEQ ID NO: 54107 - DNA, 173 bp, Homo sapiens
  chr17:41234419-41234592
  hyper
cctttttctgatgtgctttgttctggatttcgcaggtcctcaagggcagaagagtcacttatgatggaagggtagctgttagaaggctggctcccatgctgttctaacacagcttctagttcagccatttcctgctggagctttatcaggttatgttgcatggtatccctctg

SEQ ID NO: 54108 - DNA, 90 bp, Homo sapiens
  chr17:41242959-41243049
  hyper
cctgagtggttaaaatgtcactctgagaggatagccctgagcagtcttcagagacgcttgtttcactctcacacccagatgctgcttcac

SEQ ID NO: 54109 - DNA, 3427 bp, Homo sapiens
  chr17:41243450-41246877
  hyper
cctaagtttgaatccatgctttgctcttcttgattattttcttccaagcccgttcctctttcttcatcatctgaaaccaattccttgtcactcagaccaactccctggctttcagactgatgcctcatttgtttggaagaaccaatcaagaaaggatcctgggtgtttgtatttgcagtcaagtcttccaattcactgcactgtgaagaaaacaagctagcagaacattttgtttcctcactaaggtgatgttcctgagatgcctttgccaatattacctggttactgcagtcatttaagctattcttcaatgataataaattctcctctgtgttcttagacagacactcggtagcaacggtgctatgcctagtagactgagaaggtatattgtttactttaccaaataacaagtgttggaagcagggaagctcttcatcctcactagataagttctcttctgaggactctaatttcttggcccctcttcggtaaccctgagccaaatgtgtatgggtgaaagggctaggactcctgctaagctctcctttctggacgcttttgctaaaaacagcagaactttccttaatgtcattttcagcaaaactagtatcttcctttatttcaccatcatctaacaggtcatcaggtgtctcagaacaaacctgagatgcatgactacttcccataggctgttctaagttatctgaaatcagatatggagagaaatctgtattaacagtctgaactacttcttcatattcttgcttttttatttcaggatgcttacaattacttccaggaagactttgtttatagacctcaggttgcaaaacccctaatctaagcatagcattcaattttggccctctgtttctacctagttctgcttgaatgttttcatcactggaacctatttcattaatactggagcccacttcattagtactggaacctacttcattaatattgcttgagctggcttctttaaaaacattttctctaatgttattacggctaattgtgctcactgtacttggaatgttctcatttcccatttctctttcaggtgacattgaatgttcctcaaagttttcctctagcagatttttcttacatttagttttaacaaatgacttgatgggaaaaagtggtggtatacgatatgggttttgtaaaagtccatgtttatttggagtaatgagtccagtttcgttgcctctgaactgagatgatagacaaaacctagagcctcctttgatactacatttggcattatcaactggcttatctttctgaccaaccacaggaaagcctgcagtgatattaactgtctgtacaggcttgatattagactcattctttccttgattttcttccttttgttcacattcaaaagtgacttttggactttgtttctttaaggacccagagtgggcagagaatgttgcacattcctcttctgcatttcctggatttgaaaacggagcaaatgactggcgctttgaaaccttgaatgtattctgcaaatactgagcatcaagttcactttcttccatttctatgcttgtttcccgactgtggttaacttcatgtcccaatggatacttaaagccttctgtgtcatttctattatctttggaacaaccatgaattagtcccttggggttttcaaatgctgcacactgactcacacatttatttggttctgtttttgccttccctagagtgctaacttccagtaacgagatactttcctgagtgccataatcagtaccaggtaccaatgaaatactgctactctctacagatctttcagtttgcaaaaccctttctccacttaacatgagatctttggggtcttcagcattattagacactttaactgtttctagtttctcttctttttcttctcttggaaggctaggattgacaaattctttaagttcactggtatttgaacacttagtaaaagaaccaggtgcatttgttaacttcagctctgggaaagtatcgctgtcatgtcttttacttgtctgttcatttggcttgttactcttcttggctccagttgcaggttctttaccttccatgagttgtaggtttctgctgtgcctgactggcatttggttgtacttttttttctttatctcttcactgctagaacaactatcaatttgcaattcagtacaattaggtgggcttagatttctactgactactagttcaagcgcatgaatatgcctggtagaagacttcctcctcagcctattctttttaggtgcttttgaattgtggatatttaattcgagttccatattgcttatactgctgcttataggttcagctttcgttttgaaagcagattctttttcgagtgattctattgggttaggatttttctcattctgaatagaatcaccttttgttttattctcatgaccactattagtaatattcatcacttgaccattctgctccgtttggttagttccctgatttatcatttcaggagtcttttgaactgccaaatctgctttcttgataaaatcctcaggatgaaggcctgatgtaggtctccttttacgctttaatttatttgtgaggggacgctcttgtattatctgtggctcagtaacaaatgctcctataattagattttcagttacatggcttaagttggggaggcttgccttcttccgataggttttcccaaatattttgtcttcaatattactctctactgatttggagtgaactctttcacttttacatattaaagcctcatgaggatcactggccagtaagtctattttctctgaagaaccagaatattcatctacctcatttagaacgtccaatacatcagctactttggcatttgattcagactccccatcatgtgagtcatcagaacctaacagttcatcacttctggaaaaccactcattaactttctgaatgctgctatttagtgttatccaaggaacatcttcagtatctctaggattctctgagcatggcagtttctgcttattccattcttttctctcacacaggggatcagcattcagatctacctttttttctgtgctgggagtccgcctatcattacatgtttccttacttccagcccatctgttatgttggctccttgctaagccaggctgtttgcttttattacagaattcagccttttctacattcattctgtctttagtgagtaataaactgctgttctcatgctgtaatgagctggcatgagtatttgtgccacatggctccacatgcaagtttgaaacagaactaccctgatacttttctggatgcctctcagctgcacgcttctcagtggtgttcaaatcattattactgggttgatgatgttcagtatttgttacatccgtctcagaaaattcacaagcag

SEQ ID NO: 54110 - DNA, 78 bp, Homo sapiens
  chr17:41247861-41247939
  hyper
cccttttttgcagaatccaaactgatttcatccctggttccttgaggggtgatttgtaacaattcttgatctcccaca

SEQ ID NO: 54111 - DNA, 47 bp, Homo sapiens
  chr17:41249259-41249306
  hyper
cctgcaataagttgccttattaacggtatcttcagaagaatcagatc

SEQ ID NO: 54112 - DNA, 107 bp, Homo sapiens
  chr17:41251790-41251897
  hyper
cccaattcaatgtagacagacgtcttttgaggttgtatccgctgctttgtcctcagagttctcacagttccaaggttagagagttggacactgagactggtttcctg

SEQ ID NO: 54113 - DNA, 141 bp, Homo sapiens
  chr17:41256137-41256278
  hyper
ccaaggaaggattttcgggttcactctgtagaagtcttttggcacggtttctgtagcccatactttggatgatagaaacttcatcttttagatgttcaggagagttattttccttttttgcaaaattatagctgtttgcat

SEQ ID NO: 54114 - DNA, 90 bp, Homo sapiens
  chr17:41256883-41256973
  hyper
cactccaaacctgtgtcaagctgaaaagcacaaatgattttcaatagctcttcaacaagttgactaaatctcgtactttcttgtaggctc

SEQ ID NO: 54115 - DNA, 79 bp, Homo sapiens
  chr17:41258471-41258550
  hyper
ccttttggttatatcattcttacataaaggacactgtgaaggccctttcttctggttgagaagtttcagcatgcaaaat

SEQ ID NO: 54116 - DNA, 55 bp, Homo sapiens
  chr17:41267741-41267796
  hyper
cttgcaaaatatgtggtcacactttgtggagacaggttccttgatcaactccaga

SEQ ID NO: 54117 - DNA, 100 bp, Homo sapiens
  chr17:41276032-41276132
  hyper
ccagatgggacactctaagattttctgcatagcattaatgacattttgtacttcttcaacgcgaagagcagataaatccatttctttctgttccaatgaa

SEQ ID NO: 54118 - DNA, 214 bp, Homo sapiens
  chr17:41277286-41277500
  hyper
cctttacccagagcagagggtgaaggcctcctgagcgcaggggcccagttatctgagaaaccccacagcctgtcccccgtccaggaagtctcagcgagctcacgccgcgcagtcgcagttttaatttatctgtaattcccgcgcttttccgttgccacggaaaccaaggggctaccgctaagcagcagcctctcagaatacgaaatcaaggtac

SEQ ID NO: 54119 - DNA, 30 bp, Homo sapiens
  chr17:41321703-41321733
  hyper
aattcactttcccccgcccgtcccccggag

SEQ ID NO: 54120 - DNA, 93 bp, Homo sapiens
  chr17:41323034-41323127
  hyper
cgcactcctagttccgcccctcagcctcaatgtttgttattgttgttcgggttcaggttgcttctgccccgccccatcgacgcaatctccacc

SEQ ID NO: 54121 - DNA, 30 bp, Homo sapiens
  chr17:41393108-41393138
  hyper
aattcacttgaaaacgtagccaactataaa

SEQ ID NO: 54122 - DNA, 72 bp, Homo sapiens
  chr17:41446764-41446836
  hyper
actccaagggtttggccagagcgactgccacattcagcctgggcgacaaaagcgaaactacgtctccaaaaa

SEQ ID NO: 54123 - DNA, 167 bp, Homo sapiens
  chr17:41476227-41476394
  hyper
agcaaacgcccctccgcgtatggtgggggctgcagcgcccgtagctccacgctccgccccgccgccgctgattgtcccgcgccttgtgacgtcacacgcgggtttttaaggccgaaccctaggcaggctctgcagaggcagcggttggaggcgcggtgggtgtctgc

SEQ ID NO: 54124 - DNA, 30 bp, Homo sapiens
  chr17:41623825-41623855
  hyper
gggctgggcacgcccgccaatccggagagt

SEQ ID NO: 54125 - DNA, 30 bp, Homo sapiens; identical to SEQ ID NO: 11229
  chr17:41624130-41624160
  hyper

SEQ ID NO: 54126 - DNA, 30 bp, Homo sapiens
  chr17:41723521-41723551
  hyper
ggctgcctgcccggcggcctctggctccag

SEQ ID NO: 54127 - DNA, 31 bp, Homo sapiens; identical to SEQ ID NO: 11230
  chr17:41723871-41723902
  hyper

SEQ ID NO: 54128 - DNA, 195 bp, Homo sapiens
  chr17:41790828-41791023
  hyper
atgaaatcatttttgtaaaatcgcaatttgtcaccaggggttttgactttccttattgcctcgtgggaggtggcagaggcagcacatctcagaccgagcctcggttcctccccctacctcccaccgctgcgcttgaagaaagatgctgcagcctccccagtccccatgccagcgctcccacttttctctgagctt

SEQ ID NO: 54129 - DNA, 258 bp, Homo sapiens; identical to SEQ ID NO: 11232
  chr17:41791085-41791343
  hyper

SEQ ID NO: 54130 - DNA, 77 bp, Homo sapiens
  chr17:41791412-41791489
  hyper
cgtttgccaccgagctgtgcctgctctctgcaacaggaaggggcccagctcccccgggcgaccgttcctatctgagt

SEQ ID NO: 54131 - DNA, 516 bp, Homo sapiens
  chr17:41910162-41910678
  hyper
actcccgctcgctctccgaaggaacctgtgggagaacaaggagcgcactgggcgcaggagcagcgaccccgggggacctcggagggcggtcccggaggacgcggagcagcagggagcggggggcgcgcggcggggcgggcgcgggaagagggaggcgggggccgaggggcggggttgagactcccgcggtgggctcggtgggccgcgaggctgtccgggagcacgggaggagggtctcggcccggcctcccgcccctcccgccgcggcgcccagctccctcgtccgttcccctcgcggcctcctacctcgtcgcgccgggatgtgtgctccgcgaacgggagccgcgcgagtgcccagagcctgggccgccgctggctccgccttcccggacccctccctgcggctgccgcgccgggcgggggtggcggagcctgaggaggcgcggcgcggggaggaggcgcggcgcggggaggaggcgggggaggagcggaggccgccctccgcgtctggcaccg

SEQ ID NO: 54132 - DNA, 283 bp, Homo sapiens
  chr17:41910700-41910983
  hyper
cgctagccggcgtcgtacccgctcccgctctcccgctccctgagtcccctgcctgtgtccccccgcaccctggcacacagccagacttcccttccgcccgcgcaacccaccctccgcgagtggaggggtggacacctgctcaacagagaattcgattttgcaaacatttattgagcgccctccaggtgccaggcgctgtgccaggggccggggcttcaaagacgaccaaggcacagatcctgggtttgaagatctccagaggtggggcggggggccggtcgga

SEQ ID NO: 54133 - DNA, 30 bp, Homo sapiens
  chr17:41978203-41978233
  hyper
ggatggggaggaggcggctaacaggaagtt

SEQ ID NO: 54134 - DNA, 174 bp, Homo sapiens
  chr17:41984003-41984177
  hyper
ccagaggatggggtcgaaaggccaggcggacgtgcatgcttggaccatcagatcacccctgccccaacggacccagccctaacaccctgggcgctaggacctgggggaggggggcgtgttgtgagccatcaaagaaggctctctacgtgcgcgcccgccggagaccagggatga

SEQ ID NO: 54135 - DNA, 891 bp, Homo sapiens
  chr17:41984410-41985301
  hyper
ctagggggaccagggggccaccgggacccagcgcaacctctgtctcgctccccaacccccggaagcgctaacagcacggttcttacgtaatgccgggcttctaagtacccccaacccgcacagcccccggggaggccgcgcagataccggggcccctcacagctcaccaccttggtgcctgaagccactttggagcccctaccgcaggggcggggaccagtgtcaatgggcagcggggcttggttctcccaaccagcaccccagaaagagggcccaggggcgggggcgggtggacagggagggaacgggcctgggtgaaaggggcctgtggagtttaaacccagtgaatagggtcctaagtgccgtgtcaggacgaaaagaaggcggaggtcttgggataggagctggcccgggggccgggggacgcctacctgcgccccgggaagcccctagctccgggcggctccagcgcagccgggcgctcagcgtttattgcttgtcaatcgctagcccggctcttaaagcggcaaggcctctccgcgagggggcggaggtccggaggagaggggaggtgaggagaacgcggaggccggcacaactcggaggaagtagtctttcccagcagctggtacgggggcagccaggtagtggtttgggagacaccgcacagaccacgacgccctgctggagtcccactgggaagggttagggaggcaggactggtaccagtacccgctggtgcccctcggctcccaaggatcccttaaaggggcgatggtaaaagtgcctaatgagaccggcttgattactccgcccacccatcttggcttagaccggcgttctagttccaggcgtgcctcacttttcctcgttatcctgcttccatattga

SEQ ID NO: 54136 - DNA, 30 bp, Homo sapiens
  chr17:41986293-41986323
  hyper
agagaagaaagccatcgaacccagatagct

SEQ ID NO: 54137 - DNA, 364 bp, Homo sapiens
  chr17:41995083-41995447
  hyper
aggctatagggccagtggctgcgacagggacctgatacaacagtgcgttaaataaggagcttattgagctatcatgtcgtaagccggtggagaagtccagggctagtgtgggggctccggcgggggctgtggcccccatccgcatggagcctccccacggttcacaggtctcggtcttcggagccttcagccccgtgagcccgaacagtccacacggcggcgccagaccctcttcccaacgccaccctctgaagcctccgctccaaccgtctccacttctgcttcaggctcaggattttcacttttctcgaatgggggtggccctcccctgatcttctgagtcgcaacagcatctccctccctc

SEQ ID NO: 54138 - DNA, 30 bp, Homo sapiens; identical to SEQ ID NO: 11239
  chr17:42005404-42005434
  hyper

SEQ ID NO: 54139 - DNA, 212 bp, Homo sapiens
  chr17:42015509-42015721
  hyper
ctgcaagctccggtccgggtgccgcgctgaccacagccccggcatcacgtgacctcccgcggctctgtctgccccgccccctccagacgcctgctctgcgctgcgcattcgctctggccatagcgggcctcgtgtcgctgctgatgcagcccgagggcgccctcggcgaggagctgcaagtgccgcagcccagggccgccagttggctgaac

SEQ ID NO: 54140 - DNA, 506 bp, Homo sapiens
  chr17:42030244-42030750
  hyper
ccgggtttctggggtcgggagtgcgtatgcaaatgacgtgggcgtggttggcagatctcccaggaggcctcaggggtcctcaccacaggtctgggccctccgacctgcggaagcgaaggggaaggaattggatctggggaggcgagcctgggagacgtcgttaagtgatgttgccagggtagggccaggccgcgctctcggatgcaggatgtgtggtaacgggcgcttttaccgcgacctgacggggcggtcctcgccgtcggggaagaacgttttggaaagaagcgtgtccgggccgtctcttttcccatacctgggggcggggaagggaagagcgtggtcagatctggccacgcccccaggtggagcggggccgcagggtgagagccccaggggtcccgctccgcgcctgcgctcaccgctgccgggtgaccaggttgaggtagtggcgcagggaggcgtagtagcggttcagctcctccggcgaggcgtcttcgcggggagcc

SEQ ID NO: 54141 - DNA, 96 bp, Homo sapiens
  chr17:42030779-42030875
  hyper
cgcccctaggcagacgagcagggccagaagcactgtggtcaaggcgggccacggcctgcgcacgaacaccatctgggaaggcgacattgggacgtg

SEQ ID NO: 54142 - DNA, 538 bp, Homo sapiens
  chr17:42061025-42061563
  hyper
tcaacaagctcagacacccaacgctccccggggccgggtcttaggcgcacattggctcgcggtgcacgtccactctcctgtaggctcgtgcccttgacatatccggggctgtcacagtcccatgccccgaccccgaccccgcgcgagtctgcttgatgacgtcgctgtcgcaccccaccggcctccccgggtcctccccaggcgcgcgcaggggccgcgtgtccggtgccggccgggctgagtgttccgaggcgagcggctgctgtttgcgcagctaagtggcgtctgtgtacccagcggggcgcagcggtcgcgcgcttatctcccgcaaacaccgcgcccggatccgccggaaccacggccgcgccgccccatttgcacgccccggccgccggaggcccttatcgcccgcgtttatcgggccatcgctgataagaaaccgagggggcggcggggcggcccctctccttggatccaagaagcgatggggtcgctgttagggggggcgccagccccggggatgcggggagccttcgca

SEQ ID NO: 54143 - DNA, 30 bp, Homo sapiens
  chr17:42072189-42072219
  hyper
ctgcctgggcccaacgaacgggagggcgct

SEQ ID NO: 54144 - DNA, 2018 bp, Homo sapiens
  chr17:42081916-42083934
  hyper
gtccggaccccgccccgaccaggtccagccccgcccaacggcaagttaagagccccccagtgccagacgctccagacagactgccactcttggggggcaagagttggttgtcgtcatggcgacggcgctgatggctgtggttctgcgggcagctgctgtagccccgaggctgagaggccggggaggcactgggggcgcccgaaggctgagctgtggcgcgcggcggcgggcggcgaggggcaccagcccggggcgccggctcagcaccgcctggtcgcagccccagcccccgcccgaggagtacgcgggcgcggacgacgtctcccagtcgcccgtcgccgaggagccgtcgtgggtgccgagtcccaggcccccggtgccccacgagtccccagagcctccttcgggccgctcgctggtgcagcgggacatccaggccttcctgaaccagtgcggggccagccctggggaggcgcgccactggctcacgcagttccagacctgccatcactccgcggacaagcccttcgccgtcatcgaggtgagcggagcccggcgtgggccgtgacgcagcgaggggatggggttgtgcggccacctgtcctcaggcatggcaggatacgctgcgggctctgcgcagcggaagcgggaaggagcccggcagggcccagaccagcgccgccgggaatgggagaggccgtaagctcctccggaagcctcccgcccagcccgagtgaggatcctgggggaccccacccgccaggtgtgatgctctgaagaaggcccccaacatgggcgcagttaggggttcagaaggacctggacaggagccgcttgcactgcccctcccccaaagatgtcccggagtccaaggtcggagggaggagggcgggaggtaccccagcgtgagacaagggagtggcaagacccaacggggcaaagggcggagcaggtgggcactggtggccagaactgggtcctgacagcttctggaagggtagggtcaccgagacggccctgcaggccaggctgtgggagccagcggctcaggtccgtgtcacgctccttgaaagcccactcctccgcaggtggacgaggaggtgctcaagtgccagcagggcgtatccagtctggcctttgccctggccttcttgcagcgcatggacatgaagccgctggtggtcctggggctgccggcccctacggctccctcgggctgtctttccttctgggaggccaaggcgcagctggccaagagctgcaaggtgctggtagacgcgcttcgacacaacgccgccgctgctgtgccattttttggcggcgggtctgtgctacgcgctgccgagccggctccccatgccaggtgagtgcccgccctgcccgcccaggcgtcctcagagcgtgctactctgcccgccctgccccgtccggcaggcctggagggggccctctcgagcaccacgtctggcccacagctacggcggcatcgtctcggtggagacagacctgctgcagtggtgcctggagtcgggcagcatccccatcctgtgccccatcggggagacggccgcgcgccgctccgtgcttctcgactccctggaggtgaccgcgtcgctggccaaggcgctgcggcccaccaaaatcatcttcctcaataacacaggcggcctgcgcgacagcagtcataaggtgcggccctttctttcaccttcccccacgccggcgatccgggccttctcttgcgcccctcgcacttctccccgacgggccgcagactcactagcaagccgggtgggtagaaaagcctaagggagtataggggaggagttcagccctgggtgcccagatctgcgccctccctggctaaggactccgggcggaagtaaggataaaggggtcagagaaaagagaggtccgtgggggtaggggggcagtccgtgccggctgtgggccaggctcacccgctgactccggacacaggtcctgagtaacgtgaacctgcccgccgacctggacct

SEQ ID NO: 54145 - DNA, 846 bp, Homo sapiens; identical to SEQ ID NO: 11243
  chr17:42091702-42092548
  hyper

SEQ ID NO: 54146 - DNA, 30 bp, Homo sapiens
  chr17:42143859-42143889
  hyper
aaaggctaccacctcgccctgcagccgctg

SEQ ID NO: 54147 - DNA, 30 bp, Homo sapiens; identical to SEQ ID NO: 11244
  chr17:42148055-42148085
  hyper

SEQ ID NO: 54148 - DNA, 30 bp, Homo sapiens
  chr17:42219238-42219268
  hyper
gccctttgtgtcggcgggaaagaaatatgc

SEQ ID NO: 54149 - DNA, 51 bp, Homo sapiens
  chr17:42264410-42264461
  hyper
cccctacggaaagacgagtccaggggccgtcctggcgaggtcaaaacattt

SEQ ID NO: 54150 - DNA, 102 bp, Homo sapiens
  chr17:42287839-42287941
  hyper
gcctgcggggatggcccgggcgtcagccttccacccacccccagggggcgcgcgctccccgcgcagcagcccaggcgctcccgccggcgggcagaagcatgg

SEQ ID NO: 54151 - DNA, 83 bp, Homo sapiens
  chr17:42295576-42295659
  hyper
gcagtcggcttctccgttcatcctccagctgtccagccacctcctcggtcgtgctggccgggcaacccggggtcaaagccacc

SEQ ID NO: 54152 - DNA, 30 bp, Homo sapiens
  chr17:42298136-42298166
  hyper
ggcacctgggagcacggcgggccgaacagt

SEQ ID NO: 54153 - DNA, 405 bp, Homo sapiens
  chr17:42299065-42299470
  hyper
tagttacagggaaaaaaaaagcgagaaagaagctcttagatttgcaacacatcggaaaaccgggggagcaccccgccttatccgatctccatgctccgcaagggccttccgggttttaggacaagcttctcaatgtcccgtttcgctgggtttaggatccgaggagtccgagcaaaaagttctccccctgggtcgtagtgacgggtgtcggggtgggagttgcggggatttttcaagaagcagcagctaccccggcgtcggtcactgggccggggtaggggaaagagcaaaatcccagtgggtttgcgcgagggatcttctagggtcgaggcgggtgtggggggagttggaaccgggagacaccgcttggcgcatctctccctcggtctctacctcctgtcctat

SEQ ID NO: 54154 - DNA, 30 bp, Homo sapiens
  chr17:42385274-42385304
  hyper
ggcaccattgtaggcgcctgctctgctgct

SEQ ID NO: 54155 - DNA, 233 bp, Homo sapiens
  chr17:42386108-42386341
  hyper
acagagggcccagccgtgatccagcgacgggtttggggctccgggaggggtgggggggcagcgggcggcggcagcagtggccgcacatctggatggaagcgagctttgtccagaccaccatggctctggggctgtcctccaagaaagcgtcctctcgcaacgtggctgtggagcgtaagaacctgatcaccgtgtgcaggtgggcaccgctagtgggcgggggctggggtggt

SEQ ID NO: 54156 - DNA, 247 bp, Homo sapiens; identical to SEQ ID NO: 11247
  chr17:42392465-42392712
  hyper

SEQ ID NO: 54157 - DNA, 30 bp, Homo sapiens; identical to SEQ ID NO: 11248
  chr17:42392968-42392998
  hyper

SEQ ID NO: 54158 - DNA, 235 bp, Homo sapiens; identical to SEQ ID NO: 11249
  chr17:42393843-42394078
  hyper

SEQ ID NO: 54159 - DNA, 403 bp, Homo sapiens
  chr17:42402709-42403112
  hyper
gcgtgagccgccgcgccggccttaacagcgcattttcaccagccccgccccggccgcgcgcggcactggaaaccccagcgccttctggacggcgagggtgacgcactggccctcttcctcggtgtcctcaggtgcgtggcggcggcagtgagaatgagttcttcgagatcgccgggagaccacacaataacgacgaagttacttgccgggctacccgccgagacttgaaaacttcgcggcgacttctctcgccggccttagcatcgcccccatttttcaggttacaggacaggcctgcaactgcaaaacgctttgtaaaccacagggccccgcgcgggtgtgcgccactgggttagctgagctgcagcccgggccgggcgggctgggacgtgagcaagccggg

SEQ ID NO: 54160 - DNA, 30 bp, Homo sapiens
  chr17:42422427-42422457
  hyper
tgctgaggctgtcccgacgtcacatgattc

SEQ ID NO: 54161 - DNA, 153 bp, Homo sapiens; identical to SEQ ID NO: 11251
  chr17:42441041-42441194
  hyper

SEQ ID NO: 54162 - DNA, 30 bp, Homo sapiens; identical to SEQ ID NO: 11252
  chr17:42462943-42462973
  hyper

SEQ ID NO: 54163 - DNA, 30 bp, Homo sapiens
  chr17:42579637-42579667
  hyper
agtaggatctgcagcgggataaaaacttga

SEQ ID NO: 54164 - DNA, 355 bp, Homo sapiens
  chr17:42633724-42634079
  hyper
aaaattccctcaaacgttcgtcaggcctaagagagtcgtcccttcactcaaaattgcccgtcaccccccgccccccaccattaactttcgattaagacctcctccttagggcaactaaactttactttgcacaattaagatttgccgcagaagaagcgggagggagaagccgcagctccgggccattctcctttccctcgctccctccaagccccccgccccaaccctccagctccgggcctccgagttcctgagttttctcactttgaggtgccaccgaacacaaagaaccataatgggctcctttgtgttggctacggggcaattacgcctcggagtcctggtccctttaaga

SEQ ID NO: 54165 - DNA, 683 bp, Homo sapiens
  chr17:42635072-42635755
  hyper
ccctgccccgcctgctgctgccgctgctgctgctgcccgccgccgggccggcccagttccacggggagaagggcatctccatcccggaccacggcttctgccagcccatctccatcccgctgtgcacggacatcgcctacaaccagaccatcatgcccaaccttctgggccacacgaaccaggaggacgcaggcctagaggtgcaccagttctatccgctggtgaaggtgcagtgctcgcccgaactgcgcttcttcctgtgctccatgtacgcacccgtgtgcaccgtgctggaacaggccatcccgccgtgccgctctatctgtgagcgcgcgcgccagggctgcgaagccctcatgaacaagttcggttttcagtggcccgagcgcctgcgctgcgagcacttcccgcgccacggcgccgagcagatctgcgtcggccagaaccactccgaggacggagctcccgcgctactcaccaccgcgccgccgccgggactgcagccgggtgccgggggcaccccgggtggcccgggcggcggcggcgctcccccgcgctacgccacgctggagcaccccttccactgcccgcgcgtcctcaaggtgccatcctatctcagctacaagtttctgggcgagcgtgattgtgctgcgccctgcgaacctgcgcggcccgatggttcc

SEQ ID NO: 54166 - DNA, 61 bp, Homo sapiens
  chr17:42733683-42733744
  hyper
ccaatggcgggctgcgaaacgggaggggcgggcctcacagcggggcggggcgcgcctgtgc

SEQ ID NO: 54167 - DNA, 30 bp, Homo sapiens; identical to SEQ ID NO: 11255
  chr17:42853596-42853626
  hyper

SEQ ID NO: 54168 - DNA, 1094 bp, Homo sapiens
  chr17:42906536-42907630
  hyper
gaacaaaaagaaaaccaaattcgcccatttcgcaaaggaaaagtactcccaatcagacaatcgcaaaaaaaagaacaaaatctaaaccatacattcacgtacatcttttcaactcagagctccaaacgcagccgccaaccacacaactgcccacaatcacagcggtagcgcctactcttaattttgaagctagagacttaaggaaacacacacacacacaaaacagttctcaagtttgacaaagtgggggaaaagtcattttaagtaaagacaacgagttaatcaggaggcgatgagcccagtccttccgccccgctttcccgcttccagccctcgaacgaaccctcctctaacccccgggaggcaggagttccagcggggagatgcgggaagcctcagacgagcccgcacgccgccggagacgcagggatcgaggtcggggagacaaagagcagcccgcgaagagcccgggcggcgaggggcggcccggctccgccctgcgcccctaaccgcccgggtagttgtcggcaccgccggggcgccgccgagtgcgcgccgcttctgtccgggctccccgaccgtcgcccgacacctccgcggcccaggacacccccgagccgtttccctcccgatttgggagccgcgcgcctggggacaaagagggagggtgcgccggggacagtggcaggacgcgggccggcgacgcccctccggactcggcgggaacccctcggcggcgcccccctccttctcccgctctggccgcgctcctccccggacctccggaggttctcctcggcccctccccgggctccccaagagttctcccgcctccccctgggaccccgcccctggcccgcttctcctcagccggccctgcggccgcccctcacccggcggcgggttcccccggagccgcctcctccgccgggcctcggcccgtcccgccggtcgcggcctcatgtgccccgcgtcgccatcgccttcaccctcgcctctcctccacctcctccgccgctgccgccttcgcctcagtctccagccgaggcagaagccgctcccgccgctgccgccgccgccgccgcctcccgctc

SEQ ID NO: 54169 - DNA, 498 bp, Homo sapiens
  chr17:42907654-42908152
  hyper
cgcctgcgcactgcgcgctgcggtgggggcgggggcgtcccgccgcggcccgggagcggggggcgcgcggcacgtggcgctcgagtgggaggggggcgccccagaacgcgcgggaagcgacgcgagcgccaactttccgcggtcgagtcctcgccgctctctcggatagtccgggacgcggcggaggcgcggcgcgcgtgggagtcacccgcgtggagtctggaccccgggtgggcgcagacttcgctccggacagttcattcttccaagctgattttcgggcgagagtcccccgccagccgcgcctcagtttgagcgggccgctaacggcgccgtgggttctcgccttacctgggtatcctgggttggtttagcgggcccagagttgtcttctgcgcgctccgccgaggccttggtccattgtagcacgggatgctaatgtctcctcccaggttctgctctacaattcctcgaggatctggcgggccctgcgtggat

SEQ ID NO: 54170 - DNA, 30 bp, Homo sapiens
  chr17:42977087-42977117
  hyper
ggcaaccacagctgcgggcgtggtctgcgc

SEQ ID NO: 54171 - DNA, 225 bp, Homo sapiens
  chr17:42988769-42988994
  hyper
cctcccgcacgtgccgctcctcctgctcgcgcatctgcctctccagggactcgttctgtgggatggagccggccggtcccgcggagccccgacccgacttggggaggtttcgaggcccggcccccggccccaggccccgcctctagcccgggggtaacgttcaggccccgccctcgacccaggtcctcgtccctggcccttctcccctggcatctcctggggtgg

SEQ ID NO: 54172 - DNA, 110 bp, Homo sapiens
  chr17:42989016-42989126
  hyper
cgtcctgccctggccgcgctcaccgtgccgcgcagagactccaggtcgcaggtcaaggactgcaactggcgccggtagtcgttggcttcgtgcttggcctggcggagcag

SEQ ID NO: 54173 - DNA, 236 bp, Homo sapiens
  chr17:43025008-43025244
  hyper
tccgccgctggcgtcgctgcttgctcacgggtcccacagccacaccacagacagcagtacccacaccgggagagagcgccccacaccctcccctacccgcgccaacctccacccggcgccttgcgttcaaattagccgggcgggccggaccgtgcttcctattggtcagcgtccgtatcgctgattggctgtttcctaagtaacaaagtgttgcgagagccgttcacagtgggctt

SEQ ID NO: 54174 - DNA, 23 bp, Homo sapiens
  chr17:43028038-43028061
  hyper
gccaccgcgcctggtctactttg

SEQ ID NO: 54175 - DNA, 161 bp, Homo sapiens
  chr17:43044645-43044806
  hyper
atgtccgctggctccgaccatccccacacgtgatgaccaagcggggccgctgtggggtgggatctccacctgcgtccgcctggcgcccccgccaactccgatcaggtacccatttgccccgggctccctgggtgccctgggcccagcccagccccatgccc

SEQ ID NO: 54176 - DNA, 5 bp, Homo sapiens
  chr17:43044863-43044868
  hyper
cgccg

SEQ ID NO: 54177 - DNA, 227 bp, Homo sapiens; identical to SEQ ID NO: 11263
  chr17:43045038-43045265
  hyper

SEQ ID NO: 54178 - DNA, 201 bp, Homo sapiens; identical to SEQ ID NO: 11264
  chr17:43045371-43045572
  hyper

SEQ ID NO: 54179 - DNA, 7 bp, Homo sapiens
  chr17:43047918-43047925
  hyper
cgtctcc

SEQ ID NO: 54180 - DNA, 31 bp, Homo sapiens; identical to SEQ ID NO: 11266
  chr17:43209588-43209619
  hyper

SEQ ID NO: 54181 - DNA, 30 bp, Homo sapiens
  chr17:43210088-43210118
  hyper
gagcccccatgctgcggggctgggggtggg

SEQ ID NO: 54182 - DNA, 30 bp, Homo sapiens
  chr17:43212998-43213028
  hyper
taaattccccccctcgatctgcgtcgccat

SEQ ID NO: 54183 - DNA, 30 bp, Homo sapiens
  chr17:43213255-43213285
  hyper
ggcactgaggccctcgccacctgcctcgcc

SEQ ID NO: 54184 - DNA, 30 bp, Homo sapiens
  chr17:43237960-43237990
  hyper
ctccgtttctatttcggagccgcagcgact

SEQ ID NO: 54185 - DNA, 179 bp, Homo sapiens
  chr17:43239155-43239334
  hyper
ggtgtggctgttgacgttacaggcccttggatcgcttttcaggccagaagaactacaatccccagcaggcaccgcgcgtccaggctctctcttcccccccatcttagtggcctgagcggcttgaccagagctgctgcaactgcagcaagaggtagggctcaggcgttgggaattgcacc

SEQ ID NO: 54186 - DNA, 30 bp, Homo sapiens
  chr17:43275449-43275479
  hyper
gaaatgttgcgagccgaggaatgttctgaa

SEQ ID NO: 54187 - DNA, 31 bp, Homo sapiens; identical to SEQ ID NO: 11268
  chr17:43278126-43278157
  hyper

SEQ ID NO: 54188 - DNA, 147 bp, Homo sapiens
  chr17:43298738-43298885
  hyper
gggaacgcagccctggcgccccaacgctgcaccaccgtgggtctccgagccgtgctcgcagtcgctgagatcctcggtgcggagaagatgtgcccctccaatccccaggccgtgatccccttcacccagacccggccaatccctcgc

SEQ ID NO: 54189 - DNA, 73 bp, Homo sapiens
  chr17:43324280-43324353
  hyper
gcccgtcggcgtcccccgggccccccactgcaggtcacctccgacctctcgctgtagccgctatttctgcagg

SEQ ID NO: 54190 - DNA, 876 bp, Homo sapiens
  chr17:43324795-43325671
  hyper
cggggagaagggctgcttcttcactagagttggcggcgagggagcccgcttcgagggggcggaggctttcgtggctggcccagtatccctgcgggaggccggagggggcgagcgggcagctggggttagacacgccgggccagccccgcagcagttctccttccggctgccccgccccatttgcgccagtcctgcctcccacccgggcatctggccccttttcctttcgccctacccagtacttagtgacgccataagtgacctcgccttacatctccgcgcgtgccgcctccgtcaccgcctgccgggtccccatttcttccgggcctgcccccgctcctcgcctgcccctcccctccaccagccagtgtcgccccatctgtctgtcctccgggcacttgtcccgcccctcactgcgtgtccctcccccgcccgccggctctcacctaggccgagacacgccccgggctgggcgggatcttggggcggccgggctagtagggctggatcaggcggaagccggggcccggggctgggcttcgtgtcctgcgttccgggagcgccaacccctccaggttaggaatctgagagtacgggctgcgcgcacctggggcgggtgcctgggaggaggtggaggaggagacggtcctcagaacgggtcctgggggtcggaggcgagggcgggggttgtaagtggccgggagaggtccctcccgcgggtcccggcgccccccgccccgtcggggacgcacctacttcgtgcagtttgtgcagcgagcgcgccagctcctagttggagaggtcgctgatgcgcgccgcgtggcagaaggcgagccccgcgtgggagcgccccccaacccccgcagcctgggctga

SEQ ID NO: 54191 - DNA, 181 bp, Homo sapiens
  chr17:43339226-43339407
  hyper
ctgcctttcaggtgccgggggtttgggagcaggggaacgggccctgggcggattcctgaccgcccccttcgcgcccctccccctctcactttcgctttccccgcctgccccaaccctcgcccccgggcgctcggccgctcccacctgtcacccccatgcagaccgaggctctgtcctggag

SEQ ID NO: 54192 - DNA, 366 bp, Homo sapiens
  chr17:43339475-43339841
  hyper
cgctggaaatattagaggcgccggtgcctgtgatgtcgccgcctctgtgacgtccccgccgcgaccccacaggcagggagccgcatttaggtttcgggcgggcggacgggggacggcccgagtgaggcgtcctccgaaggctgcgggcccgaagccagaactccttcctctccgaagacctcgggggtggggctcgcgcttccgcagcgggcctagagcgagaggcaggcggcaggtaagcctggctgtgctggacaggacttgcacccgctctgcacgccagcggctcagggctgccgcccttttcgtggtcccagggcccttccaagaaccggctaaaccaacccaagccgcgcgcacacacac

SEQ ID NO: 54193 - DNA, 70 bp, Homo sapiens
  chr17:43974329-43974399
  hyper
tcctccacgcgggtcgcccaggttgatctgaatttctggggaatggcttggctgcccgcccgggaccagg

SEQ ID NO: 54194 - DNA, 26 bp, Homo sapiens
  chr17:44849774-44849800
  hyper
gatcagaggtgactcgcttttgggga

SEQ ID NO: 54195 - DNA, 41 bp, Homo sapiens; identical to SEQ ID NO: 11274
  chr17:44849831-44849872
  hyper

SEQ ID NO: 54196 - DNA, 289 bp, Homo sapiens
  chr17:44919153-44919442
  hyper
ctgagagaccttgagcaaccacgtcctcctctgagctccgcgtttgccgtgtgcaaagtgaaggggtaggccgaccccgcagggcccttcttgcgctcctctgcggtgtgtgggggggtctctggtccgcgagaggacagtccctgccgcgccgagcgtcctccagcgtccgcggccgccgcgagcagcgctgaccggcagggggcgctcctgcagaaggctggccgcggtggcgccctcggcggggcctgggctggcctggggacccgggaggcctccccctccatcc

SEQ ID NO: 54197 - DNA, 278 bp, Homo sapiens
  chr17:44928952-44929230
  hyper
gcgagcttgagcggcgcgaggagatgctagagggcgcagcgccgccagcaccatgcgccccccgcccgcgctggccctggccgggctctgcctgctggcgctgcccgccgccgccgcctcctacttcgggtcagtgcccgccgcgccccccgcccgctccccggcctgcctgtctctccctcctgcgctacagctgggccaatttttccctcccgctgtccttggccccgccgaggtctcgaactcagaccctagcccggcgcgacccaacccacttc

SEQ ID NO: 54198 - DNA, 30 bp, Homo sapiens
  chr17:45000293-45000323
  hyper
aggctagccttcagcgaacatgtacaccgc

SEQ ID NO: 54199 - DNA, 128 bp, Homo sapiens
  chr17:45055672-45055800
  hyper
aaactcccacgcgagcgaccgcagtcccaaattgcatctccatacccactcccaccctgccccgaacgtcttaaaaaacaaacaaacaaaaaaaactggtaagaaccctcaccccacattctcccacc

SEQ ID NO: 54200 - DNA, 820 bp, Homo sapiens
  chr17:45055831-45056651
  hyper
cgggcgtccaagtcccttcccgcgcccccgccgacagtctcgccgcgtccccgcccgggcgccccaggcacgtagctgcccgcccggaggcggcggcagagcgcagagagcggggcgagggtccgggtctccggggtccttcttgcagcagcgctggcgagggcggacccagatggcgctcagtacagccccaggatggctgcgcccacgtccttggagggccggcgctcctgcaccagaaagttgatcatgctctcggacttgatgagcaggttgcagcccaggaagaagacgccgaagaccacggtaagcgacagcacgcagagcacggcgatctgcgccacccgcgacacccacaggctgcgctcgtcgggcgccagccccgcggggaccccgtcgctggcggccagcggtgcgccccctggacagcagcccagccacgtgcccagcccgtgggtgcggtttcccagggcggccccggcgccgccgcccacgccgtccacctcctccaagccgctgtggttcaggaaggtcgcgttcatcgccgcgcggcgccgggggtctcggcgcgcagtcccgggtgcactgggctgctcgccggggtccgcgctctcagggacgctccggacccctcggaccggctcctgcggtacggggaggggacgaaggcgggaggctggctgcctgcgcgctctcgggccgcctacccctgggcaccgggcgggaagcgaccgcccggaggagcgagcaacaggcggcgcaggagctggagccggagaacctagtgtgcttagcggtcgcccgctgggttcctcgcgcg

SEQ ID NO: 54201 - DNA, 30 bp, Homo sapiens; identical to SEQ ID NO: 11276
  chr17:45056961-45056991
  hyper

SEQ ID NO: 54202 - DNA, 30 bp, Homo sapiens; identical to SEQ ID NO: 11277
  chr17:45266584-45266614
  hyper

SEQ ID NO: 54203 - DNA, 826 bp, Homo sapiens; identical to SEQ ID NO: 11278
  chr17:45330947-45331773
  hyper

SEQ ID NO: 54204 - DNA, 38 bp, Homo sapiens
  chr17:45401133-45401171
  hyper
tgccttccagtcagcgcggaggcggtattgagttcagc

SEQ ID NO: 54205 - DNA, 40 bp, Homo sapiens; identical to SEQ ID NO: 11279
  chr17:45609731-45609771
  hyper

SEQ ID NO: 54206 - DNA, 30 bp, Homo sapiens
  chr17:45772508-45772538
  hyper
ccactccgtcccgacgcccctgcgaccccg

SEQ ID NO: 54207 - DNA, 932 bp, Homo sapiens
  chr17:45810487-45811419
  hyper
tgcctagtattagccacgagagggcggggtggggcgaggcggagcagggccgaggtggcggagtgggggggagccggagagcttcataaagccacagcaaagcgctgcgactctagtgacagcggcccgctggagaggaagcccgagagctgccgcgcgcctgccggacgagggcgtagaagccaggcgtcagagcccgggctccggtggggtcccccacccggccctcgggtcccccgccccctgctccctgcccatcccagcccacgcgaccctctcgcgcgcggaggggcgggtcctcgacggctacgggaaggtgccagcccgccccggatgggcatcgtggagccgggttgcggagacatgctgacgggcaccgagccgatgccggggagcgacgagggccgggcgcctggcgccgacccgcagcaccgctacttctacccggagccgggcgcgcaggacgcggacgagcgtcgcgggggcggcagcctggggtctccctacccggggggcgccttggtgcccgccccgccgagccgcttccttggagcctacgcctacccgccgcgaccccaggcggccggcttccccggcgcgggcgagtccttcccgccgcccgcggacgccgagggctaccagccgggcgagggctacgccgccccggacccgcgcgccgggctctacccggggccgcgtgaggactacgcgctacccgcgggactggaggtgtcggggaaactgagggtcgcgctcaacaaccacctgttgtggtccaagtttaatcagcaccagacagagatgatcatcaccaagcagggacggtgagtgcggcgcgccggcccttggggcctctgtgcccgcgccggaacaagaacgtctcgtctgtttttctggctcgacaatgcttctgactccgtgtccctcactgc

SEQ ID NO: 54208 - DNA, 518 bp, Homo sapiens; identical to SEQ ID NO: 11281
  chr17:45867102-45867620
  hyper

SEQ ID NO: 54209 - DNA, 30 bp, Homo sapiens
  chr17:45909395-45909425
  hyper
cagttggaaaacagcggggtaaggcctcca

SEQ ID NO: 54210 - DNA, 30 bp, Homo sapiens
  chr17:45918790-45918820
  hyper
ctgtcctacccaggcgcccatttgaggcct

SEQ ID NO: 54211 - DNA, 514 bp, Homo sapiens
  chr17:45928209-45928723
  hyper
ggcgcgttcggagtgcgttttttcgagacaatctccgtagcgctcacccctggccaccccgacccgcgctcctacctcgaggctgcggcgggctccgggcacggctggctggtgcgctactgacggtcgctcataggccctgtgcgccggcgagctctccagcggtaaggggcaggagcccagggcgagccagacccggcggctggcggcaggcggcaggcggcggaggtgagcgctggcgagagggcggaggacggagggcgggcaggagccagcgagcgaacaaggccagctccgcccgtgactcacccgcgctctctgccttcatcctctccccagcgctgctttttcccccggactcgcggccccgcccacctcacctgcggccgcctttaacccttgagggctcggctggaccggagcccagccagggccgcgaggagggggtgggcgggagtgggggaggaaagataactagggcgtgcgccgcccgctccctcgctcctccctggtc

SEQ ID NO: 54212 - DNA, 30 bp, Homo sapiens
  chr17:45973138-45973168
  hyper
gactggacttagggcgcaatgtatatgcta

SEQ ID NO: 54213 - DNA, 38 bp, Homo sapiens
  chr17:45973402-45973440
  hyper
gctttcggttggtgcgctctaccgtccatcagtgacat

SEQ ID NO: 54214 - DNA, 30 bp, Homo sapiens
  chr17:46048482-46048512
  hyper
tctccagcctgaagcggaagtggaggaaag

SEQ ID NO: 54215 - DNA, 624 bp, Homo sapiens
  chr17:46089203-46089827
  hyper
ccccagaagttgcccgtttcctgggccattcctctccaggcagccctcgggagttcccgccgcaccgaccccagccaggctccagcggtcccctctcttccatcccgccatctctctgaggggcttgcgtctccctgatgcgctctggtgtctgtctgagccatccatcaaggatggcaggctgggggaaacatgaaaaagagcctatttggctattaacatcccctcccgctttgttgtctctctcctccccagtcccctaccagcccctcacccaacccctcccttttccccttttgcaggagacaaaaccagactgacaagctgaagactcaaacattaatcaaactgcgctccggaacaacctttccctcgcattaataaatacatttgcggcccctcattggacagttggcctaatttgtttctttttcgcggggtggggggagcagccgcgcccgcgccccctggctcccagcagccctgtgcaaagcagatgttccgccgcagacgcggagctgcgcctagccgcgcgccccggaggccgcggttgccatggcgacggcggggccgcctgctgtcgccgagcacgctgtctcgcccgctcagtgattacctccatct

SEQ ID NO: 54216 - DNA, 30 bp, Homo sapiens
  chr17:46103976-46104006
  hyper
ccacttggcttaaacgcggccaaccctcca

SEQ ID NO: 54217 - DNA, 207 bp, Homo sapiens; identical to SEQ ID NO: 11284
  chr17:46124762-46124969
  hyper

SEQ ID NO: 54218 - DNA, 307 bp, Homo sapiens; identical to SEQ ID NO: 11285
  chr17:46125006-46125313
  hyper

SEQ ID NO: 54219 - DNA, 30 bp, Homo sapiens
  chr17:46411484-46411514
  hyper
ttctgataccccaagagaccctgacacctt

SEQ ID NO: 54220 - DNA, 30 bp, Homo sapiens
  chr17:46500657-46500687
  hyper
aaaataatggcacaatttttagaggcttag

SEQ ID NO: 54221 - DNA, 211 bp, Homo sapiens
  chr17:46507534-46507745
  hyper
gacgggctggaaggcgacccggctgcaccgcgaggcacctgtacctcagccgcggtcgccgcccgcccagcccggccgcggggcggggccgtgggtccccgggcgcgtcaggaagtggcgcgggcggcaggcggggaccggaacggggcgcggggcgtgggtgcacgtggcgctcacgccggagccccacggtagaaggattgggggtgcc

SEQ ID NO: 54222 - DNA, 30 bp, Homo sapiens
  chr17:46534779-46534809
  hyper
tcaacgcggggaggcgccacctacaggaca

SEQ ID NO: 54223 - DNA, 30 bp, Homo sapiens
  chr17:46570232-46570262
  hyper
gtaaatcacccatccgcccgggcagtttgc

SEQ ID NO: 54224 - DNA, 16 bp, Homo sapiens
  chr17:46619087-46619103
  hyper
cgcaggggcgggggca

SEQ ID NO: 54225 - DNA, 1187 bp, Homo sapiens
  chr17:46620278-46621465
  hyper
gaagaaagggagtggattaaacgctaattcagtaatacctgaattttagcaaaacacataagtctatgcgactgagggtgggagaggctcgatttttccagtagacggccaaggagcgcgggggtcgaaaggaccgggaggaggaaacaggttagggaaactgcaggtcgatggcacagagcgtactggtgaaaaaatccagctcttcctcggaaaaagggaccgggctgtcgagagaaccctgtaggctaggggagaggcctccggatagctggagacaggagtcggccgcgaagaagttgaggtcgggaaggaaaggtgaatcctggcgccccgagaagacgtcttctggcaatggcccgggctccagcccgccggccccgcgcagcgcgcagccgggactcgacgcgcctgcgccctctaagcgaacggctaaaggccgggggtccgcgcttaaggcccccggcaccacctccggcgggtgacagcaggcttcccacgccgcccgcgaggcggaggggccgcccgggctggccgcgggttcctcggcagggtcgcagatgtcctccagggctcccgggcaggcaggctccccatccggcggctctcggtgctgcgtctgccgcttgtgcttcatgcgccggttctgaaaccagactttgacctgcctttcggtgaggtccagcaaggccgcgatctcgacgcggcgtggccggcacaggtacttattaaagtggaattccttctccagttccagcagctgcgtgttggtgtaagccgtgcgcagcctgcgcgccccgccgccaccagcctccggcagtcccaggccatctgcagggaaaacaggctcggcgtcatagcgggccgtgtactcagcccaacctcagttcggactaccccatcctccaaaaccagtatcacctctccccttcctcgccaccccacccccgcccccaccccaaagccgctcgctttactgcttttgggttttcttctctccctctctagtctacagccccggcccgggtcagggcaaagcattcagagccgcccacgggccacgcagggggcggagagcggctcccttcggcgccggaacctcagatccccctcccaagccctcccagtggacccctcaattcggaactttccaactcaaccggagcgagggtcagaaagattgttct

SEQ ID NO: 54226 - DNA, 298 bp, Homo sapiens
  chr17:46621694-46621992
  hyper
gaaaaaaaaaaagacgctgttagcggccaggcctgaaccccagtgggatattctacttccccatcccaggaatggagggggtaaggaaccccaacaggctcgccaccattttttttaaacctccttccactgctttttctccccctcttctagctgcccctcaccccacccccaccacgcttaccgacctgcaggcgatccgaccccggaggccggaacggcggaggcggccggagaaggagacgtggcggattggctgggtttcttggcggatttcttctctttcatccaagggaac

SEQ ID NO: 54227 - DNA, 114 bp, Homo sapiens
  chr17:46622061-46622175
  hyper
cgcttttggctcctgggtctctgaagggtggaggcgccgggctggaggctggggaaggtttgctcgaaaggaggaggaggaggaattaatgtcgactccttgattgatgaagtt

SEQ ID NO: 54228 - DNA, 464 bp, Homo sapiens
  chr17:46654954-46655418
  hyper
gtatctccctggcgaaaaagtcgctggtgagaatggtgaagaggatggggaacctacttcaaaggcgcagggcccaccaggccataaaaatttatgggggatgtaattatgtggctctgaaaacaggcgaccgtaaatctccggcaatggcgagtttatagcggggacaattggcttccccagctcaacccccccccaacccatgcctccgaagtccctttggtgtaaagctccaggggtgggagggggaaggggtgcccacgcactcacccgtgctcacgtgaactttgcgcatccaggggtagacgacgggctctttgcacgcggagtgggacgggctggggtgcagggggttctgggcgcagggaggcggcggggggctgctgctgaccgcctcgcagcgctggccgggctccgggaggagggccccggcgggtggcggcgcaggagcccgaggggacaga

SEQ ID NO: 54229 - DNA, 548 bp, Homo sapiens; identical to SEQ ID NO: 11291
  chr17:46655450-46655998
  hyper

SEQ ID NO: 54230 - DNA, 488 bp, Homo sapiens
  chr17:46656057-46656545
  hyper
cgcaaaccctagatcccttaagaagttggggctcccggtgtagccctcctgttctgcctcacctctgcccagcattctgtaccttccaaaggccccagtctcctcccctcggcgggagggagcgctagcaccctgcgtctctatggggagttaggttactggcgggttgggggctccgtctcgaaaggggaacccatacgggggccagagcacagagcttggggcttttctctgcagctggatggggaagggtaggggtgagagaggaggcgtccagagctagagggcgggtgcgcagagggacttgtcagagatgaatggaaccgcgggcggatcgataggaaattcatgcactaattcggggagacttcgccttccaaatctcatttagctgcacggttagctagactgtgtccgtcagtccgtctgtcccccttctcctatccactcctccctttaacccacacggcccaagcctggagaaacga

SEQ ID NO: 54231 - DNA, 189 bp, Homo sapiens; identical to SEQ ID NO: 11293
  chr17:46659084-46659273
  hyper

SEQ ID NO: 54232 - DNA, 482 bp, Homo sapiens; identical to SEQ ID NO: 11294
  chr17:46659384-46659866
  hyper

SEQ ID NO: 54233 - DNA, 412 bp, Homo sapiens
  chr17:46662739-46663151
  hyper
tggagcaggggctcctcgggagcagaaggggccgctgtgctcacagggctagagggagagttcagtgtcccaacgatgcgggggggcccggggccaccttgcgcggccgctcgctgacgcctcagaggccccagcctggctgtgaacttggtctaaggcggactctactggcagctccgggatgttacagcctctgcctctggtccagagcagcggcggtgcggacaacccgtgcgctttcggtttcccttccgcccaaatatcgcctcccagacccccacctctccctgggaaggatttcctttctccctccttgggatcccttgggattcagaaaacagaaaagaaaacgaattagagagatgcatgcacctaaggacaagcctgcaggagccccgaaatagggtatcct

SEQ ID NO: 54234 - DNA, 436 bp, Homo sapiens
  chr17:46663388-46663824
  hyper
ccagccgctgtgctccgaagccgcaaggctcagcccggatccactaggggagaggcagtccagagggcggcctcgcagactgggaactgtttccggggaggagaagctagaggatactgcagagagtgcatttttctctccaagaggaactttagggggagaagagacaagagaggagacgcctaaatcactgagaaaaggaataagaagagagggaagagaaacgttaaaacttggggacaaggtgctttttgggatccgacaggttcccgaattgcccgaagtccaatactctccaggctcccaaatttcccctcttcctcttggagcctgcaatcagtaaattcgccaaaagaaagaacgaaagatccgcctaaacctgccggcgtgcccccacccccggtctacagaggcggaggtggctgcggcggtgtgg

SEQ ID NO: 54235 - DNA, 109 bp, Homo sapiens
  chr17:46663855-46663964
  hyper
cggagccccacgtaggccggcgctgctgcccccgtctgctgacctctgcatgatcccggactctatgaattattgatgagatatgagcgttgatttcccctttcaggat

SEQ ID NO: 54236 - DNA, 801 bp, Homo sapiens
  chr17:46670737-46671538
  hyper
tgcagggcagggactcgggcgaggacagggagcagctcgaagccgcttgcctgaagcggggctcctgggcgggcgcggggaaggcgcgcgagctctcgcccaccgccccaaagtggctggaggaggccgaggagcggttgacgctgaggtccatcccattgtaattgtagccgtaagagccggtgtgcatggcagcgggatccctgtaagagccgctcagagagctgccactgccataatttagcaactgatagtccgggccatttggataacgccccgagaaggagtttacaaagtacgagctcatttgggtgattttggagggcttgatttgtggatcgtggtcgttataaccctgtgcttcacgatttatgatgtattaatgaattatagcgatgcactgtacttcgttttgctatgtatgcggccaaatatggggggggggttggaaggggggtggggggcgttagggaatcacgtgcttttgttgaccagtcgtaaattctcgctgatgacctcaagaggtaattcatgctctatggttacaaataatgacgatccgagaatcgttagggccgattcaatgcgagcctccgagagagggggaaaaaaggagaagggggagaaacagagagaaggttggctttggcctctgagcagagcgcgccacctcccggcgaccgacgggagcgcgggcgtgagaccgccatggcggcgggcggctgcctccctgctggctccctgcaggctccctgcagtcgccgggagagaaagaaacccggccaaggctcagccacaggg

SEQ ID NO: 54237 - DNA, 923 bp, Homo sapiens
  chr17:46674937-46675860
  hyper
cgagagacccccggccggcgcccaatcttcttctatctcctaactgagatgcccacccagcaccctgtgggagattggggcagggggcgctcactagttctgtgtcccggggtgggcgcccaggggagccggggcgacggcgacgggaagtctcactcactgttgcacgaattcatccgctgcatccacgggtagaccggagtggagcacttctgctcttctgtctcgccgaacacgctcttgtcctgcgcgcagtccgacttccgcggctcggggtggaacgggggctgctcgtcggcgccggagagtgcgcaggccgactctttctcgcggtagaaggccggcgccggcccgtagtcgcagggcgccgctcggccgtagccaccgcccgccggcgggtaataggaggaagtggcaaagcccttgtcctggcccggccctggcccgtagggcgcggggtaatgtctcagcgggtccgcatagcccgacgaatagagcggtagctggcccaggaaggactcctgcccgctggccagagtgacggggaaggtggagttcacgaaataggaactcattgggaggggaggcgcgcgcggccgctgctgctccgccgggtttatgatttgttgtgttttatagtccgagcgccgcgcctattagtagtatatccgagattgggttttagctgaggggggatggcgaggtgccagtgagggccagaaggaaatacaaccatctgatccaacactgaccaatggcagaggcaggaattgtcaaatagcacccaggaggagcgcagcccgcacgagggacccgcgcacaaacctatcaacctttttttttttcctccttctccttcgcctttctcctctctccccccaacaacacaacgcgtcctgttccacctacgtaggatctgtgaa

SEQ ID NO: 54238 - DNA, 1612 bp, Homo sapiens; identical to SEQ ID NO: 11300
  chr17:46687506-46689118
  hyper

SEQ ID NO: 54239 - DNA, 49 bp, Homo sapiens; identical to SEQ ID NO: 11301
  chr17:46689519-46689568
  hyper

SEQ ID NO: 54240 - DNA, 333 bp, Homo sapiens
  chr17:46690030-46690363
  hyper
gattgggaggggaaatgaggacgcagcgagagagagcgagagcgagagcgagcgagcgagagagagagagagaagggagacagaaagaattacggcgtgaataggcagtttcatgttgttgggagaacttagcagaaatcggtaccttggtcattacaaagaagcacgttcaaaggaaaaaaaagacaattgcacaaggaggctttttacacggggaggggaggggcatggggggctcagccgggcctttgccgctcgccctcacagggcgagggagcctttgcttaaatccttttctttccccccggcccccaagagaagggaaggagatcc

SEQ ID NO: 54241 - DNA, 275 bp, Homo sapiens; identical to SEQ ID NO: 11303
  chr17:46690429-46690704
  hyper

SEQ ID NO: 54242 - DNA, 195 bp, Homo sapiens; identical to SEQ ID NO: 11304
  chr17:46690852-46691047
  hyper

SEQ ID NO: 54243 - DNA, 382 bp, Homo sapiens
  chr17:46691436-46691818
  hyper
gattcaggaaatgtttctaagcgacccccttcaagggaaagaaaaaagaaagaagaaagaaagataagaaagaaaggggaaaagcggcaggcgatcggaacggagccggcaagtcttccagaagctggaggaaatgcgccccggcctgccaggccttgggcccttccggccccctcctgcccttgtcggccccgaggcgagctcaccttgcgggcgcatccaggggaagagctgtgtgggcgacgggctctgctcggagccctcggcctcctcgcccaggccgctggcggcggcaagcttgcagtctgcgtactgcaccaggtctggatcctgcgcaccgaataggctctggcgttgcagcgggtcgtagccgtagaaattg

SEQ ID NO: 54244 - DNA, 600 bp, Homo sapiens; identical to SEQ ID NO: 11306
  chr17:46691987-46692587
  hyper

SEQ ID NO: 54245 - DNA, 175 bp, Homo sapiens
  chr17:46696417-46696592
  hyper
gtaaaaagggggaccgagcagttttcaaactccacgcgattgtttcaaattctgaggagaaacagttgggctttttgtcgggggagaggaggcctgagaggataggatgagactgtaaaagaatcaagaggctgcccgcgcccagacgtctggccccgccggacctgagtgtgtg

SEQ ID NO: 54246 - DNA, 221 bp, Homo sapiens
  chr17:46696642-46696863
  hyper
caggaggctcctcgtttccgacgcctgattctggagggggtgtgaagaacaaagacaagagccccagttgcaatttctgaagcatttgcgacaacaaagtgttctttcccggcttctctcttctccctctctgccccctgccaccccccgccccggaagcccggagccccgtgttctgtgcgggtgagggtgaaggctgccggagcggggcccacccattc

SEQ ID NO: 54247 - DNA, 1809 bp, Homo sapiens
  chr17:46702259-46704068
  hyper
tccccccacccctcctctccccggggtcccttcgagatgccccgatattcggaagcgattccccgactccccaagaggcggacagcccgggctggggctcgggagccccgcagagagcagcgggggaccgcagaaaaggaagcggtagcccctgcgaggacgccgaggaggagaggggccaccggagggaaggctcccggggaggggccggcgcatccggggagggggctcagtcaccgcgtcctgggcttcccccgcccctcctgtcgccggttgcggactctgcgcggctacagcgcgagatctgctaggaacaatcctccgccaagctgttgcatcgcaaataaaatcctaatgagctccctcccccttccccttggccggcttttacggtctgcgcgtggcgcggggagctctgccagccgcacggccccgggcagcccagtgcgctccggcccttgccctcgccggctctcggcctcgctggccgctggccccggcccccgccagctcctctcccggccgtcgccggtctctggccgggctttcagctggggcctccgggagagagggggaaagagggccgagagagctgcaagtcgatccccgagcccctgttccccgcaggacttggagaagtgggggcagcgctcctctggcggcctcagtctccccttctagagcacgcagctttccccttccctccgtctttccttcctctcccctcctcctcccggcccgctctccggccaccgccgcagtttcccttcacattgtccgcagtttattgcctttcccctccccgcccccctcctggccttcggcctgggtatttcctcactttttataacttactttgatccggcctctctttgtcctcgcttccttcgcaaattttattgtccccgtagccgggtctttgattagacagcacggcctccctgcccgccgaagtttccaaactgtactcgggcgtgccctgtttgagcagctccccaggcgcgcccagcagcggctccgccttcaccgccgcctggccctgccccggggccgcttcgccgcgcggcgccggctccagccaggtgcggaggtacctgctctcggccggcgggacgccctggggctggatgtaagggtggtagacggacggcaggctcccggacgcgtgcgggctcagcggcgcccaggaggcgccgaacaccggcgctttgggctggaagctgcacgaggggaactccaggtgctccgcgtggcccggctgccgcgagctcgcgtactggccagaaggaaacttggctggaggcgcgtcctcactctcgtgacttatgatcgagtcgacataatagctgctaagcgtcccagaaatggacattctcagacattatccgggcgcttgcagggggaagggaagcgctcgcgcggcggcgcccaagcagggagaggtggcacccggaccggtgtgagggctttcggacgcgacccccccagccccccaccctcccacccccaccccctgctcaacttctcagccaacaaagtacagtggagcagcccgtctcagctctccttgcaaaatgattggtcaaagtttttccgactgcctgataaagcgtcagctccgacataaatcaatcgggcgagggggctgcgctctcgctgtcatccgtccgcaccgcactccatatcgaggatggattgttttatgctgatgcaatgtgctatcacgtcagggctccggcggccacgtaacctcagccccagctaccggccgcccggtccccccctcccgctgcaggaaggggggcagtt

SEQ ID NO: 54248 - DNA, 17 bp, Homo sapiens
  chr17:46711510-46711527
  hyper
ggtggcctccatttttt

SEQ ID NO: 54249 - DNA, 492 bp, Homo sapiens
  chr17:46713827-46714319
  hyper
ggaggagacagtctcggagaattcagaggtgccagaagccgagttcctagaccccagctggattttttttttttttttttttttttttccaatttctggcggcgggcggctggggaagcagctctgtggtctcccggcgggtgaggccgagacagagaccaacctctaggcggcgccctggcgttgagtccgcgctgaacaagattctctcgcagctctgcgtcccgcgccgggtgaaggggcgtgttcctgcaggcgctcggggctcggcctggagctggcggccggcacgtcgcctttggcgccctctgccaaccaagagaaacacggttaaatgagtgcgctgggacagaaatccacagctaatcaaggccccatccgctcccaccccctggcccttacctcctaactccatctccgacgctagggagccttccacagcccgaatctcctttgatgtccccagcagccggctagagggcagcgccagca

SEQ ID NO: 54250 - DNA, 511 bp, Homo sapiens
  chr17:46723838-46724349
  hyper
agcccacgcctgccacgggcggttggtcctgaaagctcgggccacggggctgcccagcttggagaggggcctttcacgccgcagtccccagctgcgagaggaagggctgcgcccgcctcctcacctacctctcggaaccacgccgtcccccgcgcgtcttcgtagactgcaggagtccagggcgtctggggactgtgacggcgcccaaggcgggggatgtggcggctctgggtcgccgccttctgcccccgcctctgtgaggcctctcgaggcagtgtctgtgtctggggcagcgacgccgacggcgctgggggcgcgaaggggctcacgctcctgcgttcccctggcgccggtgagtggcgggcgaggacagggtccgggagggggataggcgagagcgcttcctgcctccgcccgggcggggctcggccgtctcacctgcccccacccacggcgccgtcggatcccagagcggctggtgaggagatgggcctggcgcgccgcggggagg

SEQ ID NO: 54251 - DNA, 277 bp, Homo sapiens
  chr17:46724659-46724936
  hyper
catgggcgtctgaagcgagcgacaagttatccttgggagttggaaatgtgagagggaggggcgaggccgaaggaggctgagaaggggagggggcgctcacaccctgggcgggaggcgactgatccacacttagggctccgaatccggagaaagagagcgccggaccctcctccgcccacctcccgccccagccgcagcccagcgacttcccgccatcctcggccaccgagcggctcctgcctggggttgttcgaccgggatggctgcaccaggctga

SEQ ID NO: 54252 - DNA, 330 bp, Homo sapiens
  chr17:46755696-46756026
  hyper
aaacccaggagatgctcggggtcggggcccagggcagggaaaaccctcagctctggtcaaaagccaagtgagcgaaggaggcgatgcaacgtcaccctggtggccaaggcaggcacccaggtctcgaggttccaggagagggacgcgctgtgaccaccagccccctaggctcctgtctgctcgatgagcgtccactcgccagttccagccgcgagcgcccccagcactcccggagctgggccgggcgccgccttccctcgggcggccggcaggggtcagtgtttggccgcaggtgaacagacagcggccggggctgaatctggttcttct

SEQ ID NO: 54253 - DNA, 738 bp, Homo sapiens
  chr17:46795635-46796373
  hyper
aaagcaatgtagatgtgatctcgtttgctctgaatcgaattccacagaaaccgctgtgccgaatactgcaaatccttaactttcataaacgccggcaccgaactcaacgcaaaactacccaagtgccaaagaccatttctgggaagctcattccatgagaccttcgcatttttccaaatcaaaggcttcccttcggatctaattatttctcctctacagggctgcgggagggggaggggatgtgagactagggcaacagattaagattgaaagtcctttctcgcagcttcattttcgcccccacactgtcccaaatgcttagaaccctcctcgtcagaatgggaacggtgcccccgcttgtcctaaaagacacagaccaggtccgtgaacttgacccaggcgcccacgcctcttttccccgaaggtcagacaaaggcagaagggttggctggattctttcccgggccgcgaaggcctggggatcgcaagttgaggaggagaagaccgcaaacccctttggttcaagcaagctctgcggcaggtaaaaggcaaattggtggggacgggtaggacagggagagcattatctggctaactcccgcaggcctcttccgatttgtcggcggggacctgactccctgcggtgtctctggccccaaatacggaggccaggagcttttcgttgtctcgcccgatttggtatcttattagccggtgtcgctgagccgcgggggactc

SEQ ID NO: 54254 - DNA, 74 bp, Homo sapiens; identical to SEQ ID NO: 11315
  chr17:46796498-46796572
  hyper

SEQ ID NO: 54255 - DNA, 6 bp, Homo sapiens
  chr17:46796631-46796637
  hyper
agcagg

SEQ ID NO: 54256 - DNA, 364 bp, Homo sapiens; identical to SEQ ID NO: 11317
  chr17:46796849-46797213
  hyper

SEQ ID NO: 54257 - DNA, 357 bp, Homo sapiens
  chr17:46797274-46797631
  hyper
cgtctcggcctggctccggaggggtgaaggaatgtttatagcctgactcaagttcaatgacaaaaacctgcctggaatgggaggtgcggcgagcttcagccatcaacatgacaaaggctggacgcaggtctcgggcgggggcgacgggctgggcccacctagagatggggagctgagggcccacaggatgggtacggaccccgcagaccaagagctgcctctctgccctcagcctggggtctgcggagtttggcgagtagtgcgggtgtgtgcccgcctggatgagggtaaggcgatcagcctctgagtgggcaaggggacgtctgattactgcccaggcttcgcctgggggtccag

SEQ ID NO: 54258 - DNA, 108 bp, Homo sapiens
  chr17:46799795-46799903
  hyper
cctgaccttgcaagcaagcatcggcctaaaggtttcagcctcccagtggcgctctgtttgcacgccttaggctaggagaggaaggacgggagcacagcactgggtgcc

SEQ ID NO: 54259 - DNA, 618 bp, Homo sapiens
  chr17:46800429-46801047
  hyper
agaaaggctggcatcggttcctcattggatgttttaaatctgtctcaggcccaggccagtgcctggggggaggggcggggtgtcctgcttttgggctagaggcccggggccgctcccgagctttctcccctcttccctggagagcgactgttcgggagggtgagaatggtataaatttcaaaaacaacgaaaccttcttttgccccctccgcagcagtcgcctccgggctttattgcaagtttacggtaacgagttcatctatttaattcgcggttgcagctcggggatttctattagacaggacgggttggggccggggggcacagggtctcccctgaaggaaacccaattagagtgcagcacttagcaccttcaatataactttaatgaagggggggaggggagctgcagggaagagaagtttgctctaggttggggaaggaaagctggagctgctcccgagaactggggggcctggatgaggctttttcctgcttcgagggctttccagcttccggcccgggaactactatttggagtagggatcgcctgcagggaaggcggggcggattctcggctggcggcggcctcgcagggttcccggaagcgctagccag

SEQ ID NO: 54260 - DNA, 220 bp, Homo sapiens
  chr17:46801108-46801328
  hyper
cgagattcaaaaagagcttccggaggtagtttctacgcattgcgccactactcccttattcggcttctggaggcctaataaaatccacttgctttggagttagaaattatttcgggcctggagcccgcgtagacgcgaccctgtgatcccatttcgtagcttgctgagagattcgctgcgggagtttggctctgagggaggggaacggtctggagggcag

SEQ ID NO: 54261 - DNA, 30 bp, Homo sapiens
  chr17:46801988-46802018
  hyper
aagcctgtagctccgcggacgatgaaagcc

SEQ ID NO: 54262 - DNA, 531 bp, Homo sapiens; identical to SEQ ID NO: 11321
  chr17:46802380-46802911
  hyper

SEQ ID NO: 54263 - DNA, 300 bp, Homo sapiens
  chr17:46802993-46803293
  hyper
cgtggagaatgcgccggcaggccccccacccccagcctaaggtgcaggaaggaccagcacgaacccgctggctttgctgcgcggccaggagatgagtcccaccgggcactgagcccaggtacaggacatcagagaatgaacacagaggcagaggccctcatgtccctctcagagtcccggctctgcaaagagcccgtctgtctccagcttccagaattccgcactgtgaatctgtctacgtggactgggaaaacagggttggcaccactctgccactccgtttgtgcctgggaagggcta

SEQ ID NO: 54264 - DNA, 334 bp, Homo sapiens; identical to SEQ ID NO: 11323
  chr17:46804101-46804435
  hyper

SEQ ID NO: 54265 - DNA, 710 bp, Homo sapiens
  chr17:46805458-46806168
  hyper
acaggcaacagggagtcatgtcgcggttctccaggagcacccagagtctgcaccacagacacgtccaggtaactggccataggctggtaggttcccggatatcccggatagaaggcaaactcagtggggcggctggggtactcttccccggccgtgggagtctccgcggggtacgcggccagggtggctgcctgggcacagggtttcagcgagctccgggacactcggcaggagtagtacccgcctccaaagtaaccataaggcacgggagctggggacgtcccctggggcaccccagggcatgggtggcattgctttggcggctccgccgagcctggcagatccaagggggcatagttgacagcaggcatcagcgtaggcgccgctgggtggctggtcagaggggagtgggcgaccagattccgcccccctcccgctcccagcaagccttcgatatccttggctccatccaaggtggcataattgccgggctccatggagccgagggtcggctcatgaggtgcgggggcggggaatctagggggcacccagctcgctctccccacccaggccgggggaatccaaagcgttttaaatcgctcccagctcgcaagtcgcctgcattcgctcagcacggccgtcttgacgcaagagacgcaggggcccgggcacgcgcgctgattggctgcggcctgggggagagaagctaa

SEQ ID NO: 54266 - DNA, 520 bp, Homo sapiens
  chr17:46806430-46806950
  hyper
ctcatttacacgtccggggggaggggaggcgtggtgggcggaggaagaggggacgaggagccgggccccacctccttctcctcctctccctccctagctttctgtctcctgcgctttgacaggtttaacgagagaataaaaagctctctctataaagtgtccatctcctgggggggaaggggagtcgggggtggggctgggaggccgctcccggcctcagaggagaacccgggaatgcgcctgtgtaagaggaggctgggaaatgggggttaataggtatttctggcagcccctggctttgggtcctgggtactagcaccccagttcattcccggtacccttcctgtcccagatgtcctggaatgagctgctccgggccccagggaggtgccctggacgccccttacccagggactcgctactgcccagaatgctctggaggccctgattcgggtgaggctgagggaagaggcgggagacacgaacgtagacgtagaagacatgcgatctggatggaacc

SEQ ID NO: 54267 - DNA, 419 bp, Homo sapiens
  chr17:46810525-46810944
  hyper
gagcccattcagctcggccccacagacagcctgtgacctttacagcccggcctttgagcgcggccgccgcgcccccgggggttccggcaacggggacttggcacctcggtgtcagctcccgcccccacccaggctagggacccgccaacgaggggtgggggcgggaggcgcccacccgtcgcactagtgggcatttgctaaactacgttttatttttttgtaaagtgagcgcccgctgccttcgttctcccaactggagcaaactctgtggcggcgacgatggcggccgtcaggtcggtggtgatgaatagagaggatttctctgcagcgcgacgctcccctctcccgaaaggttggctccacggtcccgccggccgcgcaggtctggctgaactgcttggggtcgcccggctcctctc

SEQ ID NO: 54268 - DNA, 151 bp, Homo sapiens
  chr17:46811348-46811499
  hyper
cttttttctttctctcatctccgttttacttcccttcctccgcccgccacacacgtttttcctttgcagcgctctcgcccagtttttccattgttcttctctgaagtctggaaagggcctgcggggctatagctctcagcggccggagcct

SEQ ID NO: 54269 - DNA, 72 bp, Homo sapiens
  chr17:46811594-46811666
  hyper
cgctggagatgaagggtgactccggcctttcgccctgaaacgaagtcaagcggggcctctcctggccttaga

SEQ ID NO: 54270 - DNA, 183 bp, Homo sapiens; identical to SEQ ID NO: 11329
  chr17:46816136-46816319
  hyper

SEQ ID NO: 54271 - DNA, 49 bp, Homo sapiens
  chr17:46824358-46824407
  hyper
cgcttactggttctcaagtcagagtcccccttcccggggctccttctgg

SEQ ID NO: 54272 - DNA, 640 bp, Homo sapiens
  chr17:46824674-46825314
  hyper
gggaggaaaggaattcgggcaaatttgtgggtaggggcccagacccaagacccgtgtttctcctgcgtgggttggagtctgtctcaggtcgctccagggacatcaagagcccgcgccgccgagagcccgcgccgccgtccagcgggaagcagcggacccacaggggcctccagccgcctccccgctcccgccccgtgtttctcctgggcctccagctccgtggagagagctgagagttctcggcccgcgggcttcctcaccaaatccccaaaaaccgacgcaggcacagagggctgactgtgttttgagtaatgcacgcgaggcagtccaatccggcgagatggcccgaagcggggcccagcggtcgggggtgtgggtctggagagagagggtctccccacttccttcctccggctgctcggtcacccatcgactacccgggcggaagcggggcgcagaggggcgcagagggaggcattgccctccaggagtatctattcccatcggggtatggtgaatgccatctaggcccatgctccattcccagggccccctcggttcctccaaaggcgtccacccagaagcagccccagtgtcgcgcattgactcccgccggccaagtcgccgccgaaacaggatc

SEQ ID NO: 54273 - DNA, 30 bp, Homo sapiens
  chr17:46826997-46827027
  hyper
aaagacctcagtcctcgcatccccaccccg

SEQ ID NO: 54274 - DNA, 72 bp, Homo sapiens
  chr17:46827429-46827501
  hyper
aggggtcgaagggatcgattctaggggccgcagaggctactctcgtgctctggagaagcaccgcatctttct

SEQ ID NO: 54275 - DNA, 68 bp, Homo sapiens
  chr17:46827625-46827693
  hyper
cgccagcattttgccggggtttatgcctcaatcccgcattccagccacttccacgaattacttggaag

SEQ ID NO: 54276 - DNA, 643 bp, Homo sapiens
  chr17:46829492-46830135
  hyper
ctagaaaggcaaagaagttaacgatgtttggcagtctgaggtcttatcagtgtgttggggtcaggtgggggccgaggcaacaagctcaggcagacgccagccggggctgggacggtgcaggtgaggaggggctgcctgggggacagcccgcctcactgacccaacctgggacaaggtagtggctgggttaggggctggggtgtgtcttggagcccccaggtgacaggagagggaggaagggagtgactggtgaaacattaaccccctcagggttctgaagggaaggggaacatccttagaggacacagggagaagacaaacgtcccttcatcctgagattcacttggaaatcccctgaacttccaactcctggctgatgaaacggagcaagttgtctctgccttatggcctccatcaccaagcctgaaggagagtctctcagcccggtttgggagtaaacccaaaaccgttcattcgtcagggaatgccccaggttggttcacgcgagttttaaaatgaatcggaggtgaaatggagctcattaccctctcttcagcccgaccctcaatctttggcagcgaggggcagttatgggacggggggcgggtgggaagagcgcccagggccccctccgggttctccc

SEQ ID NO: 54277 - DNA, 473 bp, Homo sapiens
  chr17:46830189-46830662
  hyper
cggtagggatgcctgggagtctagggagtggcgggggtgtttcttggcccggcagggtggggtttccaagcgtgatctcctcgccctggcagagccggggtgccgggtgggggcaggctcgggggcctgcctgcggtgaatcaggcttgtgacctcaggccgtccaggtaaacatcctctgcgctttggaaactgttgggactagaaaggagcgggcggcagggagagggaagggggaaggagggattctgagtggaggagacctctgaaatcctctctcctgccaggaaaccagggcggtcttccaagcgggcagccacgttgcctacttgaggccaaggcagaagcatcaatcacatggggcgtagtttctgtctggctaaagaacggctcacgcggacctcgggaatgcgactgtggaaacgacggggaagctggaagggctgggtggcgggggaagctggagggcacag

SEQ ID NO: 54278 - DNA, 30 bp, Homo sapiens
  chr17:46831244-46831274
  hyper
accaaaataatgtcccgcctgcctcatctt

SEQ ID NO: 54279 - DNA, 848 bp, Homo sapiens
  chr17:46831477-46832325
  hyper
tcagttccctttcgtcgttcacacagtggtcctccacaccaggaaacctaagggctctgtggagggccaggtgccgtggcagcaacactcctcagggcctgtttcagcaccccatttacgtggcacatgaaaaattcaggatgaacgccctggctgaaagctcttcctgggtttgggacatcagaagaccttcccgggatgggctcttgtctctgcagtagctatgacctgcacataaacctgtttcctacactgtaaaattggcgtaaccaccattccctcccagtctttctctggagtcctaatgggaacagtgacggaatgaaagtgaccacgctggaacccgaagcgctgttcccctccgtggcttcacactgatctccacactagaattccgtgtctgcagttcaagttcaaactactgtggtcggggaagggctacagagatctcgcttggccgtggagtcaccggccccgtccagtcttgcttgggacacatactggtttacactctctcgggttcagtttcctcatctgtaaatggggctcgtatccccctcataaagtggtttgggggataataaagcttgtaaaagcgctttgccccagtgcttggcacataatacgcgctacgttaacaatgtcgcgtacacgcccgaaccggaggaaccccattccacgctccttctggaaccgaattcacctctgaggctttggggcttcagagccggagccgcttgggcaaaaccagcagaacagcgagagggaacgggctggtctagccctgccctgagcatttctactgagacccccggtcctgcttcttccagcctctgctggatttctct

SEQ ID NO: 54280 - DNA, 201 bp, Homo sapiens; identical to SEQ ID NO: 11337
  chr17:46832489-46832690
  hyper

SEQ ID NO: 54281 - DNA, 30 bp, Homo sapiens; identical to SEQ ID NO: 11338
  chr17:46832904-46832934
  hyper

SEQ ID NO: 54282 - DNA, 30 bp, Homo sapiens
  chr17:46894279-46894309
  hyper
gcaccaggaggctgcggtctggagccagca

SEQ ID NO: 54283 - DNA, 30 bp, Homo sapiens
  chr17:46908823-46908853
  hyper
atcgccgttggcttcgaggcggaggtggag

SEQ ID NO: 54284 - DNA, 30 bp, Homo sapiens; identical to SEQ ID NO: 11339
  chr17:46970398-46970428
  hyper

SEQ ID NO: 54285 - DNA, 41 bp, Homo sapiens
  chr17:46970679-46970720
  hyper
gggggtgaaggggacgaccaaaggtcgtcattataagcaaa

SEQ ID NO: 54286 - DNA, 199 bp, Homo sapiens
  chr17:46985397-46985596
  hyper
tcgcagagcctttccgagagaaggggcccaaagcgagtcaacttctctactgagcttcccatgaggatgctggatccccaatcctaaccatgcagacgtctgagggtcgccgccattaacgggaatgatatggcccttcctcccccactccctcctctcttctcccctttcaacacttgaattgggctctccgctactt

SEQ ID NO: 54287 - DNA, 30 bp, Homo sapiens
  chr17:46986792-46986822
  hyper
gctgtccactcttacgcctcttccagaaac

SEQ ID NO: 54288 - DNA, 280 bp, Homo sapiens
  chr17:47072748-47073028
  hyper
tggtggaggatatagagaaaccgagttggaagccctcccccgcccctaagtcccagccccatttcttttcagcgcgccgggaaaacggggagggggacaaaggtgctgcgtgctgtctttcaactcccgactttttgaatggcatacaatcgtccggccgcagagcggtgagccaaagtcggagtcagctcagactctgcaaacgaaaaataataacaataaaaaaaattcaaggcattcatatcggtgtagtcaacacgtgttgcggagtcggcccggg

SEQ ID NO: 54289 - DNA, 224 bp, Homo sapiens; identical to SEQ ID NO: 11343
  chr17:47073103-47073327
  hyper

SEQ ID NO: 54290 - DNA, 2061 bp, Homo sapiens
  chr17:47073388-47075449
  hyper
cgaaacgcgcggcgagcagccccctcccccaccgcccagacggggtgcgaccgcccacgtgtcgccccttgcccagtcgggtccttccctcgggctccgggagccggaggatccggaatgagttggtcaaagccgagggaagggacccaggcggatccgcttccccctccccaggaacggcgggaggaggaggggagtggccgccgccccctcccctaagctcccgcccctcgcttccccgtgcgcggagcggaaattaccccctccccccgcgggtctgacctggggacgtgggcggggcttcccgcttagccccccgccctccgtccctctcccgccttcccgccaggatcggaatcctgcaccccaaacaaagttccgagacccgaacctagggcctagagagctgccagcagtgtcccgggtggtgcaggctctggaaactccacctgtctgtccccgactctgggagggaaaaggggaccattcaaatctccacccggtcactccctccctaagacctcccccttcagttcgctccggttagccctagctatcactcctcttccttgtctcccaccgttcctgtctcctggagtcatctccggccagttccgcgtgttcccctcaggaccccgaaacgttatcatttaacagccggaccccgggtgcgaaccaccctttctcccgtggggatctcaaaacattatttcctgcggcttcctcgttctccactgggataccccgttcccagctttccagtcccgcgctcgcagggtcccccggtcctgcatccccggaggcgggggagtttcgtggggctggcgtggggaaggcggagaccccccccatttaaacatctagggaaaaggttcctttctttttaaatcaccagctcgtgcgaccctctcctgaagaccccagagtcttcggcttctctttgtctgtctcggccgtcccccgcctgtcagtcgctagcagttaaccggggaggggtgagcaaccccgccccccaaaacgaatgaaaaataaccgtacattttaccctttaagacatgtgagatctgggctggaccatcctcccccagtttgggctggggtagggggatgggtgggggcggggcgcttccctaggggccaggttcttgcaaagggggaaggggcctgtagagcttcagggacgctgccgcaccgccccagtttaccccgggggtgagttgagttccccaccctcaggcgggagattatcgggtttggccggagggccgaggggccctgtggcgtcgggggtctttccctgcagggtgggtgggggctgtcaccacgtggcttctcctttttttttttttttttttttccgctccattttttttcaagtcgattttatttagaggcggcgccagggcggccgcggagaaacgtgacacaccagccctctcggaggggtttcggaccgaagggaagaagctgcgccgtgtcgtccgtctccctgcgcgccgcgggcacttctcctgggctctccccgaactctcccgcgacctctgcgcgccctcaggccgccttccccgccctgggctcgggacaacttctggggtggggtgcaaagaaagtttgcggctcctgccgccggcctctccgcctcttggcctaggaggctcgccgcccgcgcccgctcgttcggccttgcccgggaccgcgtcctgccccgagaccgccaccatgaacaagctttacatcggcaacctcaacgagagcgtgacccccgcggacttggagaaagtgtttgcggagcacaagatctcctacagcggccagttcttggtcaaatccggctacgccttcgtggactgcccggacgagcactgggcgatgaaggccatcgaaactttctccggtaagaacacagccacctcccggaaaagccacaacgagagccccgaacaacggagacccgcaccttccggttcctctcccgccaactcctctcttcccgggcctgcggggtttggcctccgtacccaccctcgacctacccccttcgatgccccctccctcgctctg

SEQ ID NO: 54291 - DNA, 73 bp, Homo sapiens
  chr17:47075879-47075952
  hyper
cggcgccgggtcgccatgctgcttcccgagacgccgaggctgggccgagaggcgcgcgcggtggcagtgaggg

SEQ ID NO: 54292 - DNA, 710 bp, Homo sapiens
  chr17:47209859-47210569
  hyper
cgaggaaggaacggtagggaccgtggtgatagactaggggtggacgcggggattgtgtttttctttaagcgggagagagaagcccgatcaccggcagcggaggagaaaagtccagggtagagatgggggcgctggtgtgggggcggtcaggagagaagggcgggggccgtcccaagcgtcctgcacctgccctactcgccgagaatttgcccgggtcggtgccagggcggggcagtcggcggcctggctgctaggctccgtgacatccggcagtctgagggcggcgggattcgggatgacttcgggcgggtgagtgtccccggggcagagcagagcgagaggtgaaacttcgggagcagggagcgccgcgggtcctttctggcgtctgcagagcgggcaggtgctggggacgcagacgccggagccagggagcgggcggttggagtcttaagtccaaccggttccccgcataggtggctgcagaggcgaggtgacggcgcgtgcggaacgaactctgcacccccaggaatggggagcgctggcttttccgtgggaaaattccacgtggaagtggcctctcgcggccgggaatgtgtctcggggacgcccgagtgtgggaatcggctcgggagtgcgggcttcggggctctctgcttggaactcagaggcgctgacccagcctggggcccgtttgctgcccacgggaggag

SEQ ID NO: 54293 - DNA, 30 bp, Homo sapiens
  chr17:47307922-47307952
  hyper
agcaaggggtgcttacgggaattggagggg

SEQ ID NO: 54294 - DNA, 222 bp, Homo sapiens
  chr17:47308444-47308666
  hyper
ccgcctccagggcttcggttcttgagatttgcagaagtgcacctccacctcctgcccattccgctgtcgcgtcctaaacccagtgggaggcacgggatgacccagccctcgggacccttttccccagattataggttactgaggattgcgggggttggcgggaggaatgactccctacccccacccccgcccgtaaagttggtggagcgggtggtgacagac

SEQ ID NO: 54295 - DNA, 399 bp, Homo sapiens
  chr17:47439787-47440186
  hyper
tgccacattgtgagcgctccgccgcccagataaccgccggctccccgcgccgcccccgccttctcccactccgcccactgccgggagcccaggtaaagacgagagctgcgcatgcgcggcgctctccgtgagtcggggggcgtggttgccgaaaggaagccaaagtgaagagtgcagggggttgtagcaggcgctgctgtgggattccacaaaataggcgcgggttaggatggggaaggtaaagtgaagaaacgggccaaagcagaaaagtgggtcgacgtgagatttggaagtaaaaagagactttgaataaaaacttaacgactgctgacctccttgttctccttggagggcagtgggagtgacggggggcagaaatcagctcggcagcatgcaagc

SEQ ID NO: 54296 - DNA, 30 bp, Homo sapiens
  chr17:47492511-47492541
  hyper
gaggctaagactgccgcaaggagagcctta

SEQ ID NO: 54297 - DNA, 30 bp, Homo sapiens; identical to SEQ ID NO: 11348
  chr17:47563751-47563781
  hyper

SEQ ID NO: 54298 - DNA, 244 bp, Homo sapiens
  chr17:47573001-47573245
  hyper
gggtctagggttcccggagcgcagaggcgactctccagggtggagatgagggcaagaccggagcacggatgccggtcctcaggtaccgcagggggcggtgggggagctgggaggggtctttcaagagggggcatggggctctccgatgcccaggttcttcggaagaggacactcgaatgccgggatcccgaagggactttcccctcagcatctcggtctctggagagtcgtgggacagaaccaa

SEQ ID NO: 54299 - DNA, 1197 bp, Homo sapiens
  chr17:47573468-47574665
  hyper
agggcagaagaggggcgacggcgagggcggcagagagatggaagcagaaggaaaggagacagagcggggcgcggaccctgaagtggtcggggtcccgcctgcccgctgagggacagtgagacgagaagagagagcagaggcttggacatttccagcgcctgtccccgcgctcctgctcgcggcctctcccagtcccggaattggggctgcggatctaaggctgggaggggagtgcccacttcgccggggcgaacccgctcccggggttcccccacggccggcgggctcctccgacgcgcgtgttctcacggcttgaagcagcgcagcggatcgcgagggacggagcgggtgtgcccctacccgggctggcggtggctacgtctcggggtgcagagcgccggggcgcactaggcggggacccttcctggccgcgcgcagctctggctacgcaggcgggaggcggcaggcagggggcgctgcggggcgaggcaagtgcagtccgccgctgcctgcctgcgagtctggggctgcgcgccgctccccacctagctgcgcgacccgagcgccgcgcccaccgcgctccgtgggctcccgcgcctcgaagggtcgggatccggtctgagcctctcctggctctcggtgcaagccgctgggcacctaacgagacgggggcgcccggacgcctcggattctgtagcgcggtatcccgggccaccgactcggcaaaggtcggcgggtcctccgggtggtccgacgagattgtcagatgtggcctgctttatggccatgaaccgaatgccctggaaggtctggcaacggaggaggcgtcttcactctccccgccagcatctttcatcagagcactgcgccccaaattccggctttacagatacggagactgaggctctgagagtttaaacgacttggccaagatctcacagcaagttgggccagagtcgtggctagactccccgacctgattcccagctcggtactcccccaccttttcagggggcagccgctgtcccagctcggggtcacggctgcgtttcccagcagggcggggggggttgacactgtccccagagtccgtcggcggtagagcctgcgggtgaggtgggcagagattctgtccgggtgcgggccccagcccgaaagctcagccccagttccctggagctgtcaggacctgtggct

SEQ ID NO: 54300 - DNA, 427 bp, Homo sapiens; identical to SEQ ID NO: 11350
  chr17:47574903-47575330
  hyper

SEQ ID NO: 54301 - DNA, 30 bp, Homo sapiens; identical to SEQ ID NO: 11351
  chr17:47645353-47645383
  hyper

SEQ ID NO: 54302 - DNA, 30 bp, Homo sapiens; identical to SEQ ID NO: 11352
  chr17:47647458-47647488
  hyper

SEQ ID NO: 54303 - DNA, 112 bp, Homo sapiens
  chr17:47653549-47653661
  hyper
ggagagcgaggggacgagagcggaggaggaagatgcaactgactcgctgctgcttcgtgttcctggtgcagggtagcctctatctggtgagtggtccgaggggagctgcgca

SEQ ID NO: 54304 - DNA, 30 bp, Homo sapiens
  chr17:47840628-47840658
  hyper
gggcatttgcaccacggtaaaagccgttaa

SEQ ID NO: 54305 - DNA, 30 bp, Homo sapiens; identical to SEQ ID NO: 11353
  chr17:47841772-47841802
  hyper

SEQ ID NO: 54306 - DNA, 184 bp, Homo sapiens
  chr17:47865513-47865697
  hyper
acaggaaacttgatggcggacgctatccgttagttcctttttcaattccccattcccaccccttcgagaccacgatgtttcttaaaatacaaagtttcttttacaaaacatccctccgcaactttgagtttatataataaacggaaacgtcctttaaacaatcaggctacgaaggggttaaatc

SEQ ID NO: 54307 - DNA, 212 bp, Homo sapiens
  chr17:47928287-47928499
  hyper
catcctgcatggtcccgacctcgtcagcgccagagccgtcctgcatgaggcaggatgtggtgggcgcacagcagggacgaggcggggggcacggggcagaaaggagagggcgacgggaagaaggcagagaaaacccaaaaggtccggaaggctgggagggaggcagggcacaggctggaaaccgcggctatttgcagcgtcgccctcgggct

SEQ ID NO: 54308 - DNA, 249 bp, Homo sapiens
  chr17:47979496-47979745
  hyper
ggctgccctgtggtcacgtccccgccccaccgacggaggtaggcgcccaggtacccagcctgtgggccttgggagcccgccaagctgctgatgaaaggcgctgccagattaaccctttcttggccgcacccccttgctgctgccggctgccgggtggtcgcagagcaggagggtgaggggcaggagaggagtctagacacgcctggctaacgagggggcggctttggcctctgcgcgcttgccgggtgg

SEQ ID NO: 54309 - DNA, 30 bp, Homo sapiens; identical to SEQ ID NO: 11356
  chr17:47987581-47987611
  hyper

SEQ ID NO: 54310 - DNA, 30 bp, Homo sapiens; identical to SEQ ID NO: 11357
  chr17:47988085-47988115
  hyper

SEQ ID NO: 54311 - DNA, 377 bp, Homo sapiens
  chr17:48041279-48041656
  hyper
acccggcgatgaagacgtcggcgaaacgcctactttccatgcctaggtctgggaaggtctgaagatcccggcggagctgccttcgttcggggccgggcaaattcgttgcagccgggttggcctcagggcctctcgccggctcgctatgtttccccggggcgccctggcaggccagccggcggtctgtcagtccagctcctggtgcgggcgcctcgttttggtccaccgggtccggggctgggacaccgagggaaaacttcagagctccgggccaccgagcctggaagttacgcgtcccccagcccacgcgtccccaatcccggggtatttcctgctccctcatccagcgaagttcagcgtcgcgtgtctccccagcg

SEQ ID NO: 54312 - DNA, 3 bp, Homo sapiens
  chr17:48041886-48041889
  hyper
act

SEQ ID NO: 54313 - DNA, 236 bp, Homo sapiens
  chr17:48041904-48042140
  hyper
cgatggtggagcgggagacgggcgtggggagccccactgcagtgctgggatcgaagtggtgctgaccccaagacctctcccctcctcctcccccgggagcttctccagggttatttgggaaatgagggggaactccaatccctgagaaagcgctcaggggcttgctgaggtgagcgcaaatggaagcacaaggccgggctggccgtgggctcagtaaccagtcggctgcccggctt

SEQ ID NO: 54314 - DNA, 434 bp, Homo sapiens; identical to SEQ ID NO: 11361
  chr17:48042213-48042647
  hyper

SEQ ID NO: 54315 - DNA, 328 bp, Homo sapiens; identical to SEQ ID NO: 11362
  chr17:48042750-48043078
  hyper

SEQ ID NO: 54316 - DNA, 30 bp, Homo sapiens
  chr17:48045891-48045921
  hyper
cctgcaaggagctgcggtgtcgcaaccaaa

SEQ ID NO: 54317 - DNA, 30 bp, Homo sapiens
  chr17:48046350-48046380
  hyper
tggactgcaccaatcgctctgcaaccccag

SEQ ID NO: 54318 - DNA, 226 bp, Homo sapiens
  chr17:48046648-48046874
  hyper
ctttcccaggcgcgcgttctccgctgaaagaggctcagagagacactttctccgggatcttaagtgtgggggctgctggctggggggcccgtccggcccaacgccggaggcttggaaaagagagttggcagcgggagcggactacgtgccgggccatggcccttctgcccgggccctggccacaatgacctctttgccctgccccctccccggccgggacgcctcc

SEQ ID NO: 54319 - DNA, 243 bp, Homo sapiens
  chr17:48047108-48047351
  hyper
gaggcaggtaagttcggccgtggaggctcttcccacctctggggttcggctcctgtgcgcccctaaacttctccctcgcctggttggacgcagctagcgggattcaaaccttccttggattccctgggatgtgggggtggggggagggcgaagggatggggcgggagacacggggggaggggcgggggagagttgatctaggtctcctttcaaaaccgacctggtttcgatttgcagttgtgt

SEQ ID NO: 54320 - DNA, 1486 bp, Homo sapiens
  chr17:48049109-48050595
  hyper
aggcgcgggcgggagcggaaacccaacggtttttctgggaattggttgaggcagggtcgaggagggaggatctcagaagcccgcagcgcccgaggccacgggtgagggatgcgggggaggtgacggcagctggtgaccgcggctggccgagggcgggtacactgacgtgtggagggtgagcccgactaggggaagaaggtggggggacgcgggcggacagaagccgctctctctcggctcaggtcggctggacagacccgcagggaatgcggcgaacgctgccctaagcgcccgggcattgcggctgctccatccgccctactcctcccattgcctgggacctctgcagcgtccccgtagagccgcgcaggttagggtggctggcttggaagaacagaaacccctcggcccaaccctcccctgtccctcagcattctagggctgggctgtcccgcggccgagattcctggagagctaggcgggccagagctgaccagatcccccgcggcggcaccgcagcgcgatccaggagtggccccgccgggctacgctgcgcgctcttggaacccgggtcaccttccctgccgccggaaccgctctgtgcgcgctgcccaacgaaggaaggggctgccccacgcagacccggcttctgggggtccctggaaacccaggcggccacggtgtggcgggggagacatggtcacttttcctgcagggtgcgcctgagcagaggggcagcccgttacagtaggcgaggccagggcaaacccggggtcactatcagcgctgcgagactggtattcaaggtcctctcagccgggcctctcacccaccccgctggccgcagccggaggctgccacgcggacaccgtctcaagcctctgagcattgctctgagcctctgcctgcaatgtccttcctctgtcatctctaggcctcggctcagccctggacctagcctttctgccccgccctaccccaagctggcgccaccgcccgtggctgaactccgacctcccaccgcaggcgccgcggtaccctggctgtggccctcggcgctttcttcctagggtcacaggacccatacgagtgggagctccctgggagcagaactgcgtcttgtatcacctggcgcggtgaacgtgggggttgaaacgctccacgcggaaggtagagggcaggggccaagggggcgatcctggtggctgcgctttttgctatttgctgccgacggcatgcagacgagatgcaaataagcttatgaaactgtccgtcctaccccctcgctccctcctcgccccctacaccgtgttgtgctgcccaccagactcggagaagccgcggctgtccccggaaccctccgagcggcgccctcaggcccccgccaaaaagctccgcaagccgaggaccatctactccagcctgcagctgcagcacctaaaccagcgtttccagcacacgcagtacctggcgctgcccgagaggg

SEQ ID NO: 54321 - DNA, 695 bp, Homo sapiens
  chr17:48070683-48071378
  hyper
gtggccagccaggctcggcagcgcgcggggaactacggggtcccgcgcgcccccgcggccctggacagccaaacaccaacctgtgtctgcgtgaggcccagctgcgcggccagctcggcgcgctcgggcagcgccaggtactgggccttctggaagcggcgctgcagggcggccagctggtagctggagtagatcgtacgcggctttcggaccttcttgggcttcccattcaccatgcgcacctctgcttccggctcctccttcaccgacactgcggggaacgcaccgggcggaagagggggcggttcagcctcggcctgcgactcctgcgaccctccagggccccgccggacgcccctcgcttccgcccaccgactcgccgcgggattcccggccgcgcgctccgctgcccgcggcccaggggggagccgcggccccagagccagaactggccgcggcccacaacgcggcgctcccagctccgcgcccggccgccgcagcactgtccccggcgccagccgccgcctgcgccaggaccgcctcggcttcgctcacgacgccttcccggctcgcctcccagcctcggggctcctcgccgcccggctgctagccgcccccttcccagtcccatctcgccgtcggttgtttctctcgctccttcccgtccgccccccgccctttaaaaaagtttcatt

SEQ ID NO: 54322 - DNA, 13 bp, Homo sapiens
  chr17:48071691-48071704
  hyper
ccccaagccctct

SEQ ID NO: 54323 - DNA, 54 bp, Homo sapiens
  chr17:48071806-48071860
  hyper
cgatcctcatccgggaccgcggcgcactgcgcacatcgcgccccaaatgcttgc

SEQ ID NO: 54324 - DNA, 30 bp, Homo sapiens; identical to SEQ ID NO: 11365
  chr17:48072550-48072580
  hyper

SEQ ID NO: 54325 - DNA, 30 bp, Homo sapiens
  chr17:48133875-48133905
  hyper
gccggcggctgcgtcgtctccgccttcaac

SEQ ID NO: 54326 - DNA, 30 bp, Homo sapiens; identical to SEQ ID NO: 11366
  chr17:48134211-48134241
  hyper

SEQ ID NO: 54327 - DNA, 30 bp, Homo sapiens; identical to SEQ ID NO: 11367
  chr17:48172867-48172897
  hyper

SEQ ID NO: 54328 - DNA, 277 bp, Homo sapiens
  chr17:48206162-48206439
  hyper
ctgagaagaaagagatcacaccgagagtggggccacgggaactggcactgggaacaagggcttccgccgctctaagtgacgcccgagggtgggagagaagggagaagcccttcgggcaggcgataggaaagggcccctgaagaggagaaagcgacagagagaagtgcaactgggagaggccgggaagaggtggatgggaaaggagactagcggtcggggaggcagttgtggagccagagaggtggtccccccttcccatatcgccggccgtccactg

SEQ ID NO: 54329 - DNA, 31 bp, Homo sapiens; identical to SEQ ID NO: 11369
  chr17:48207254-48207285
  hyper

SEQ ID NO: 54330 - DNA, 122 bp, Homo sapiens
  chr17:48207666-48207788
  hyper
aggctggaggggacagcggtgaacagaacccccgccccctaactgcgctcaaggccagtgggccagtcgggggctcagacgagtggggaggccctcacgagcctgggcgccatgggcccagc

SEQ ID NO: 54331 - DNA, 132 bp, Homo sapiens
  chr17:48226427-48226559
  hyper
ggctggctggctggcgagcgggggcggccgcgtgcacgtggcaggggcggcgcgggggcagggcgggggggctcacttacttggatgggcgccgtgctgaaatggatcttccggctcggggctgggtcctcc

SEQ ID NO: 54332 - DNA, 30 bp, Homo sapiens
  chr17:48229250-48229280
  hyper
tggccactgtgttccggttggggtgggggg

SEQ ID NO: 54333 - DNA, 30 bp, Homo sapiens
  chr17:48277201-48277231
  hyper
gcacaacaccttgccgttgtcgcagacgca

SEQ ID NO: 54334 - DNA, 30 bp, Homo sapiens
  chr17:48278071-48278101
  hyper
cgacctcaccggcccgactacctctttaag

SEQ ID NO: 54335 - DNA, 30 bp, Homo sapiens; identical to SEQ ID NO: 11370
  chr17:48278763-48278793
  hyper

SEQ ID NO: 54336 - DNA, 30 bp, Homo sapiens; identical to SEQ ID NO: 11371
  chr17:48351993-48352023
  hyper

SEQ ID NO: 54337 - DNA, 224 bp, Homo sapiens
  chr17:48503148-48503372
  hyper
tcaaggacgcttcgcgcctgctcctttggcccccggctcgcaagtagcggggccagcacgtgacccgagggggcaggggatggatggatcttgaccttgccatctggcccctcacggatgtgctgctggctctccctctaggaaatcaacaaatttttgcgcttctaacatccaggcccctgaggatggtcgcgaggaagatctgtttcggactgcagctgggg

SEQ ID NO: 54338 - DNA, 40 bp, Homo sapiens
  chr17:48585620-48585660
  hyper
gcctagcagcagggcggggcgaggcgggtcatgcacccct

SEQ ID NO: 54339 - DNA, 30 bp, Homo sapiens; identical to SEQ ID NO: 11374
  chr17:48609908-48609938
  hyper

SEQ ID NO: 54340 - DNA, 30 bp, Homo sapiens
  chr17:48610240-48610270
  hyper
tctggagacgctcccgaggctgtgccgtcc

SEQ ID NO: 54341 - DNA, 195 bp, Homo sapiens
  chr17:48619095-48619290
  hyper
ttcagagcctagcctccgccggaggagcccactcttcttcccaacttccacgacctcccggtgtagggctctgaaccccgggtcactcaaagccactctcgttctgcaggtctcagcgctccgtcccccaccaacccgttcggcgcgggcgagccgggcaggccgacgctaaaccagatgcgcaccggctcgccg

SEQ ID NO: 54342 - DNA, 608 bp, Homo sapiens; identical to SEQ ID NO: 11376
  chr17:48619346-48619954
  hyper

SEQ ID NO: 54343 - DNA, 634 bp, Homo sapiens
  chr17:48636575-48637209
  hyper
ggggtggtgatggaggtcatccgacccatcccgccgcctctccgcagtggcgcaagcgccccaaaatctccggagagggaactgactgacccactaggttccgccgtgtctacctctcgcagatgttggggaagtgcttcccggcgtctaatcctcgctgttcccccctccaccggcgcccagcacacccgcggcgctccgctcccgggtacccacagctttctggagtggcgccggcggcaggagagagctagagccgactgagccccagaactcggggaggtaggcggggcaagggccggggtctgcgcgtgcgtgtgcacgcgtggaaagcacaaacccacgagggcccgctgccggtagggttaaggtgagtgagtgaaggcggcagacccgcgaagttccagttccgcggacactctttccctaagccacatagggacttaagagaaactgaggcacgaagttggggggtggcggtggtggggactttgaaggtcgagtcgataaagcccagctctgtgcttccgccccctcccacacactcgagacccccacaggttccttcttaggggtcctcgctctgctccgcagcccctcctggggatccgggctctgcggtccagcgcgacct

SEQ ID NO: 54344 - DNA, 443 bp, Homo sapiens
  chr17:48637430-48637873
  hyper
cctttctcgagctccgcccgtttctccaagactgggcccctccagcctgaagccccacccccaggacatccagctccgctccttccctcccccagtcccgcagccaagctcaactccagggtgggagattaaccaggtggagacctgggatttcgctctgggaccccctggtgacaaccctcacccccgtgccgcctgtctcctttcttccccaggcccgcccagagctgagctccgtcctccggctgctgcccaaatcaggggtcgtggacaaaggatgcctggggcctgcggccctacgccaggaccccgcgccgaatactctgattcttcgggctccctccaagggagtcccaaagaccccaatggccaataggaaagtgggttcggtctgggcagcagtctgattggctccagccttcgggagcggacccaggggcaag

SEQ ID NO: 54345 - DNA, 31 bp, Homo sapiens; identical to SEQ ID NO: 11377
  chr17:48638201-48638232
  hyper

SEQ ID NO: 54346 - DNA, 30 bp, Homo sapiens
  chr17:48638688-48638718
  hyper
gggggctcagcttgcgccctagagcccacc

SEQ ID NO: 54347 - DNA, 313 bp, Homo sapiens
  chr17:48639570-48639883
  hyper
cccaaagtttgcggcggattctagggtctgatcccccaacctggtccttgaggctgaggtttttactgacctagaaggagatgttggggggcggggaccaggtcctggcccacctcaccccccacctcgcgggttggaggcacaacaaggagattccggcggcggctgatgtcaggggcgcagaatgagaacaagatgtggtggaggggagctgtctgcccccggagctgggagtggagcccctttccgctagagcccagtgccgcgggtgcctcctacccgatctccattcgatgcagggtgcttaagattg

SEQ ID NO: 54348 - DNA, 400 bp, Homo sapiens
  chr17:48712036-48712436
  hyper
cttggcccaggggccgctcgcaggggctgtcgccgtgccaagggcccccccacctctgccccaaagtccctcccagggaggcgctgtcgcaacccgcgggacgggggcagggagaccggacccagaggcactggggtagggctcggcagggcgggtccgggcggagcgcggggtgcggagggcggaggcggctccggcgcccgctctgcccgccgctgggtccgaccgcgctcgccttccttgcagccgcgcctcggccccatggacgccctgtgcggttccggggagctcggctccaagttctgggtaaggcgcggggctccggggtcactgcgcgggggccagggtcggccggcttcgcccggtccccgccgcctgccttcccgcggggccggcaggt

SEQ ID NO: 54349 - DNA, 30 bp, Homo sapiens
  chr17:48785315-48785345
  hyper
ggggctccggcgcccgggctggctgtttat

SEQ ID NO: 54350 - DNA, 42 bp, Homo sapiens
  chr17:48796761-48796803
  hyper
tcgggaaaaccgggcgcttggggaggcgcgcgggcagaggct

SEQ ID NO: 54351 - DNA, 30 bp, Homo sapiens; identical to SEQ ID NO: 11381
  chr17:48944743-48944773
  hyper

SEQ ID NO: 54352 - DNA, 38 bp, Homo sapiens; identical to SEQ ID NO: 11382
  chr17:48997200-48997238
  hyper

SEQ ID NO: 54353 - DNA, 201 bp, Homo sapiens
  chr17:49008950-49009151
  hyper
cgcgcgtgcaccacgcgccggctttttttggttcctccgaggcgcgggcagctctgcagccgcgggggccgcaggaggtgggggctggacccgcccggagctcgggagggcccgggatggccccggggagcgcaggtcccggcaggggccgagcgaacaagggccggcctggggcgcccagagacgcgggggaccgttctg

SEQ ID NO: 54354 - DNA, 514 bp, Homo sapiens; identical to SEQ ID NO: 11383
  chr17:49021779-49022293
  hyper

SEQ ID NO: 54355 - DNA, 116 bp, Homo sapiens; identical to SEQ ID NO: 11384
  chr17:49027999-49028115
  hyper

SEQ ID NO: 54356 - DNA, 131 bp, Homo sapiens
  chr17:49199265-49199396
  hyper
agtgaggtttctgccgcctgggagagtgtcacgtgtggggaatgacacaacgcccacgcctagagcgggctgagtcaaggatcccggtgtgctcatctaacgtccgcaaatgggacggaagacactctcaa

SEQ ID NO: 54357 - DNA, 30 bp, Homo sapiens
  chr17:49244619-49244649
  hyper
ccccagaccccctgcgcctgcccactcggg

SEQ ID NO: 54358 - DNA, 188 bp, Homo sapiens
  chr17:49337242-49337430
  hyper
gtgctccccgagcccgcggcgccccctccccgggctgggggcaggtgcctctccccgggactgcggcgactacagggggcccccggctgggcccagaccggtggcgggtgcagcagcccccggatttcccccctttaactcgggtggccccaggatatcaacaacattagcatagccctccctcccca

SEQ ID NO: 54359 - DNA, 104 bp, Homo sapiens
  chr17:50235154-50235258
  hyper
tctcattccaagtgcatcactcgacgggaaaacggggggaaggggggagcccgacacggcacacacacatacacactcgcacacacttccgagcgagtgcacac

SEQ ID NO: 54360 - DNA, 686 bp, Homo sapiens
  chr17:50235416-50236102
  hyper
cgcgtgtctcttctcttcgcaccagcggcggaaaccgcactagcagcggcggcggcggcggcggcggcagcagccacctgaagccaccaacactgggctcttccagcaaaaacgagaccccgattcgtctggcgccccaagaagacatagacgatagccccccgccgggctgcgccgtgcaattccgggctcccgggagcgcgtagctcgctggctaagcccaggcagtccgcggcaagttgccctcgaagtccgcccccctcaccggggcatggtcggagggtggctgctgcgctccggggcagttcttctcctgcttccggggggcggggaaggagcagacacagcagacacacagagaaagagaggcagggattattgcccgaaaccgccagccgccggcagcctccgccgaccctccctgctccccaggtccgcgcgcagcctgcagcctctcagccgggttccggcagtgcgtccagggcgccgaggggaagggctgggccccggggactggggcgcggtgggggcacacagactctccaggtcgcgcgcgcccttcctgctcctctgctattttcctgaactccccagaacccccagttgcctggcttccatcgcccgcaactagcgccgctgtcgagattttccgcaatacaactgcaggggtcgttatttcctcgcct

SEQ ID NO: 54361 - DNA, 867 bp, Homo sapiens
  chr17:52977560-52978427
  hyper
cgcacacctcccctcccggatctctaggacaaaggcaggtcgagggtaaatatttctagttattcagtatattcagtggctaactatttattttgtgggtaccagacaccgacataatcggttacgtccttcccttaattctcataattctgaggtttgtgttattaaccccctattatctttggtctacccagggcagccaaagaggcgcagagaagaatgacaaggtgcccagcaagcggcaggatcaaagcctgggtctctaattcccaggctggagattctgggctgcctgctcctcctgcacggggcgaaaagcccacctgggatccgagcgggcggccgcgccactctcgcaggctccatacacccgccactacccgcctgtaccacctgcagccggcagcgcagcctcctcgcgggtcccgcagggcgcgctgcaggtgcgctgggcgtcccgaagccccgccctcgcgtccctgccccgcgcccagctcctcacgctcggtgcccgcgccccgcagcggcagcgcagaacgcaccgcctctgccagagcccgggaagcgctcgggcgaagaggaggagccaagggtaccgagcgggtggagtcgggagccggagagcggtggaggcggatttcctgggcccggccctctggcgctaccatggcgtttggcaagagtcaccgggatccctacgcgacctccgtgggccacctcataggtaaggaggcgcggggagagacgcccaggcaggcaggggaccgtgggatcctttcctgcttgatccattctcggcctgcagaggacggagttagtccaacttgaaaaaattattcccctccccccgcaactttcccaaggcac

SEQ ID NO: 54362 - DNA, 144 bp, Homo sapiens; identical to SEQ ID NO: 11387
  chr17:52978453-52978597
  hyper

SEQ ID NO: 54363 - DNA, 30 bp, Homo sapiens
  chr17:53051517-53051547
  hyper
cctgaatccatttaacgatgtgaaatacct

SEQ ID NO: 54364 - DNA, 30 bp, Homo sapiens
  chr17:53056455-53056485
  hyper
gtattaaaatgaactggtatcctgcctttg

SEQ ID NO: 54365 - DNA, 372 bp, Homo sapiens
  chr17:53341332-53341704
  hyper
ggaagaacctgcctggccccccgcggagctctgcagggggcgtcgcggctgcacgccagcgcccgcaccaccccaggcgggaagggagttatcacacagggggtcgcacgcagatctcggggaccgtgggtgccacgaggtcaaactggcagagggagacgctgcagctgctgtaacagcaaggaaagccgaagcccccttaggggatactttacaaaattattttaatcaccgtgcaaacctaataacttgacccaagcgcaatcacctgtattcacccagagtaaatattcctaaaatcccgttcagtgtgtctgtgtctctcccgcctctttccgtttcaggcaaatgtctaccccccctctcccccca

SEQ ID NO: 54366 - DNA, 22 bp, Homo sapiens
  chr17:53341786-53341808
  hyper
cggacttataggaagtagttat

SEQ ID NO: 54367 - DNA, 1555 bp, Homo sapiens
  chr17:53342190-53343745
  hyper
aaggtccccgaaaatcggcgcgagcggcgacgctaaacacgcggcggcggggcgagcgggccaggcgggcggtgccgcgcgtggccccgcccccgcacgcctatgggcgcgaggtgcgggccctgacgtcactcttgtcagggccgcggcacatgggcggccggatgcgctgagcccggcgctgcggggccgcggagcgctggggagcagcggccgccggcgcggggaggggggtggggtgggacggcgcaccgcctccggtgctggcactaggggctggggtcggcgcggtgtcttctgcccttctgcagccgtcgacatttttttttctttctttttttcaattttgaacattttgcaaaacgaggggttcgaggcaggtgagagcatcctgcacgtcgccggggagcccgcgggcacttggcgcgctctcctgggaccgtctgcactggaaacccgaaagtttttttttaatatatatttttatgcagatgtatttataaagatataagtaatttttttcttcccttttctccaccgccttgagagcgagtacttttggcaaaggacggaggaaaagctcagcaacattttagggggcggttgtttctttcttatttctttttttaaggggaaaaaatttgagtgcatcgcgatggagaaaatgtcccgaccgctccccctgaatcccacctttatcccgcctccctacggcgtgctcaggtccctgctggagaacccgctgaagctcccccttcaccacgaagacggtgagcgctgccgcggccccgctccgggaagggacgacgctccgggggtccccctccgcggccgggcacgcccgctggagcatcccccaaccccgctcccgccctgtcccgcggcgccccggccccgcgctgatgaaattgaggagctcacccagcacccttcctccccttcctcctcctccatgaaaggggagggacccctcctgagctacatttaaaagagcttcgggcacccggcctccctgggtcccgctcctgcggcgcgggtgggaggtgtaacttgacaggtcaggatcgttccctagaacgaggcacacccgcacgcagagcgagcccgcctgcggagggcagagcctcccgggctggggaggagaaaccctggggcctggttctgtgcggggcagggggcgggggtcggcttgagggagggggtttcactgcgtagcctgggttttggggttgtgttacagcttctgttactggttagtatttggaactcacgaggtgtgagagaagactcgttttcttctggtgaagggtagctgagaaagcggggtgggggctggggccggtggggggagtggtctctcggcgggaagccgtgcacgcctccagcgttgacactttcccggtgcactttttctggtgggaggggagagcggagcaggctcacgtgtaaccgcgcaggagcctcctctggcttgagccctttcttggtaagtcccaaaccttcccaagacaaccttggccttagcagtagaggaggggtacgtgtgatgaggccc

SEQ ID NO: 54368 - DNA, 30 bp, Homo sapiens
  chr17:53445243-53445273
  hyper
tcatttcccaactagcgttcctttctctag

SEQ ID NO: 54369 - DNA, 30 bp, Homo sapiens
  chr17:53558866-53558896
  hyper
aatccctcctgttttcgatcatgacaaatc

SEQ ID NO: 54370 - DNA, 30 bp, Homo sapiens
  chr17:53922864-53922894
  hyper
ctgccgaagagggccgcctcgcctcgagga

SEQ ID NO: 54371 - DNA, 30 bp, Homo sapiens; identical to SEQ ID NO: 11389
  chr17:54376036-54376066
  hyper

SEQ ID NO: 54372 - DNA, 30 bp, Homo sapiens
  chr17:54670223-54670253
  hyper
atcacgctgcgcaacgctgcggctctcgga

SEQ ID NO: 54373 - DNA, 648 bp, Homo sapiens
  chr17:54671748-54672396
  hyper
ccccaaggaaaaggatctgaacgagacgctgctgcgctcgctgctcgggggccactacgacccaggcttcatggccacctcgccccccgaggaccggcccggcgggggcgggggtgcagctgggggcgcggaggacctggcggagctggaccagctgctgcggcagcggccgtcgggggccatgccgagcgagatcaaagggctagagttctccgagggcttggcccagggcaagaagcagcgcctaagcaagaagctgcggaggaagttacagatgtggctgtggtcgcagacattctgccccgtgctgtacgcgtggaacgacctgggcagccgcttttggccgcgctacgtgaaggtgggcagctgcttcagtaagcgctcgtgctccgtgcccgagggcatggtgtgcaagccgtccaagtccgtgcacctcacggtgctgcggtggcgctgtcagcggcgcgggggccagcgctgcggctggattcccatccagtaccccatcatttccgagtgcaagtgctcgtgctagaactcgggggccccctgcccgcacccggacacttgatcgatccccaccgacgccccctgcaccgcctccaaccagttccaccaccctctagcgagggttttcaatgaactttt

SEQ ID NO: 54374 - DNA, 30 bp, Homo sapiens
  chr17:54673178-54673208
  hyper
catcacgtggcctccgcctagtctcctagc

SEQ ID NO: 54375 - DNA, 183 bp, Homo sapiens
  chr17:54674044-54674227
  hyper
ttggactccaaagtcgctctcctttgctccctccccacctccctgccacctctccgcgcctccctcccggcgttccttccaccccaccccccaccccccccaaccccccaagtccggagtcccggcgaatctatgctaattatttcaaacctgcgcctggtccccagcgcagtctcaatgccc

SEQ ID NO: 54376 - DNA, 260 bp, Homo sapiens
  chr17:54674986-54675246
  hyper
gaggtcttcccctccgcgacgccccctcctccctccgcgggcccgcccgcccgcgcccctcctccccacccctgcccacttggaaaacccgcccgcagccggcgagcttctcggctttcagagcaggagccggtgtgagctgggaggacgcgggttgcagacgtgaccggcgacagacagaccaccggatgcacagaaccagagagcaggcccgaagccgctgcggccgcgggagaggacccagcgggacccaggcagtc

SEQ ID NO: 54377 - DNA, 30 bp, Homo sapiens
  chr17:54756363-54756393
  hyper
gctcaccccgtttacgacggagccctttgt

SEQ ID NO: 54378 - DNA, 170 bp, Homo sapiens
  chr17:54857394-54857564
  hyper
gccctcctcctcgccgaggcagaaaatagaaaaggaagaattcagcagattttccccggtggccccctcggcggcaccaagataaccagcgcagaaaccacaattggatccttattcctccagcccaggaatgcgaaggacgggacggtttaaccgccttctgcattttc

SEQ ID NO: 54379 - DNA, 353 bp, Homo sapiens; identical to SEQ ID NO: 11393
  chr17:54910846-54911199
  hyper

SEQ ID NO: 54380 - DNA, 918 bp, Homo sapiens
  chr17:54911483-54912401
  hyper
ggatcggcgtgcgtgcggctggagccttaagcgtttcccccgcccggcttcatccctgctggcggcccagcgtcgttctcctcctgcgcgaggcggccaaggcctgctggcccggagccgcgcctccacccgcgcgaggtagggcttcgaggaccggcgcggcgcaggtctccggaggcctcccgagaggggctagggtcgccgggccgcgcgtgggagcgggtggggcccgggaggagacggcgccccggaggggagtgcgaggcctgggccgacggttacgggcgccgaccggcgttgcctggcctgaacgcccggcctttcggtggagggcagcttgcccctgtatgttgcgcccttccgtgggtcagaccggcggcaaggtgaggcggcggcggcagcagcagccgccttgggctcctggacgcgctcccgaggtggggcgggttggggagtggggattggagcgtgatggctggacgtcgccttctcggcgcggcaggtcccgggagacggggggacgaggcgcagtcccgccctcgggagagcggagccaccttcactgagggcgcccggtttggccccggaaaggcaggaagggggcggggaagggatggcgagctcggggtgcaccgcctgtttcttttctggttaggtatcgtccttggagaagatggaagcggagaggcggccggcgccgggctcgccctccgagggcctgtttgcggacgggcacctgatcttgtggacgctgtgctcggtcctgctgccggtgttcatcaccttctggtgtagcctccagcggtcgcgccggcagctgcaccgcagggacatcttccgcaagagcaagcacgggtggcgcgacacggacctgttcagccagcccacctactgctgcgtgtgcgcgcagcacattct

SEQ ID NO: 54381 - DNA, 30 bp, Homo sapiens; identical to SEQ ID NO: 11395
  chr17:54990647-54990677
  hyper

SEQ ID NO: 54382 - DNA, 30 bp, Homo sapiens; identical to SEQ ID NO: 11396
  chr17:54991049-54991079
  hyper

SEQ ID NO: 54383 - DNA, 142 bp, Homo sapiens
  chr17:55038315-55038457
  hyper
tgcggggtagctggcggcgggtaatcaaattgaagccgtagcctaaccgtctcggaagctgccatcttgcttggtgctcaacggaagccgagagataccacggggccaccgagaggcgtgctcgggcggctcgcccccgccg

SEQ ID NO: 54384 - DNA, 30 bp, Homo sapiens
  chr17:55055344-55055374
  hyper
gggcagagggcgtgcgggtctcagcaagct

SEQ ID NO: 54385 - DNA, 30 bp, Homo sapiens
  chr17:55056051-55056081
  hyper
atcttcccccacagcgatcttttttggcaa

SEQ ID NO: 54386 - DNA, 30 bp, Homo sapiens
  chr17:55162583-55162613
  hyper
cgggcacgtcgccgcgcgtcttcagtattt

SEQ ID NO: 54387 - DNA, 30 bp, Homo sapiens
  chr17:55162861-55162891
  hyper
ccctccaggtaccccgggggcgggacgctc

SEQ ID NO: 54388 - DNA, 30 bp, Homo sapiens; identical to SEQ ID NO: 11397
  chr17:55163835-55163865
  hyper

SEQ ID NO: 54389 - DNA, 30 bp, Homo sapiens
  chr17:55927453-55927483
  hyper
gccgagccaaggatcgctgggctttcaccg

SEQ ID NO: 54390 - DNA, 421 bp, Homo sapiens
  chr17:55938683-55939104
  hyper
tcccttgcctgatacagcaagcggtttacagtcctgggccaaacaggaaggcgacagcgctagacgcagccggcaggtccgcaaggttgaggtgcagcggtgccgcaggtgtcacctcgagagtgcagtcggagagcgccgcgggtgaatgggccaggcaaggcaggggtaccctagggatgcgacgcggggctcctggggacaaaccctgccccaggccgggagggaggagggagcaggagggtccagcccacgccgctggccacatcagagcaccaagagaacaccaactgtttattacaggaattcctatgaaacagctccaagaaaaaacccacacataggaggaaaaaaaataacaaagcaacactcaacagacatggggctggggcttcccccacagtgcgccgggtcctggcgc

SEQ ID NO: 54391 - DNA, 30 bp, Homo sapiens
  chr17:56024651-56024681
  hyper
tatttcagttcaccccgtgagctaaagttc

SEQ ID NO: 54392 - DNA, 386 bp, Homo sapiens
  chr17:56032159-56032545
  hyper
gcactgcggggaggggcgcccacacaaaagggggagcggcgggagaggggactcgggcgaagccggctccgggaggcctcgtctcccttccctgcggcgctggcccgcgccccccggtctaatcgcgcgccccgctcccggccccccagatgcccgcacgccccccgcgcccggggcccgggatgaggtgggggctcgggaaggaagggcgggcggggacctgccgcacgcggagctcccggggagccgcgccgacagccccgggaatcaaactcgcgacggcccggccctcccggcggcgcctgggcaacgggtcccgagaaggtggggccgctgggccggggccgcggccgggattgcgcgcggggcgccggcgaggaccgcgc

SEQ ID NO: 54393 - DNA, 30 bp, Homo sapiens
  chr17:56032800-56032830
  hyper
gccacaagtggggccgcgcggggaggagcg

SEQ ID NO: 54394 - DNA, 30 bp, Homo sapiens
  chr17:56064913-56064943
  hyper
agtcaacacacgcacgcacacacacaaaaa

SEQ ID NO: 54395 - DNA, 30 bp, Homo sapiens
  chr17:56084492-56084522
  hyper
cgacatggcggtgacgaaaagcgcggactc

SEQ ID NO: 54396 - DNA, 544 bp, Homo sapiens
  chr17:56234333-56234877
  hyper
ttgctagcggagtcgcgcgtcgggagctacgtagggcagggaaggcatggcttctgttttcgtccaatgagaaggggccagcggtggcggtcgggccaggtccggggcctggggacgccgaggcggccgcggaggagcgccgcgtcaaggtctccagcctgccctacagtgtggatgcgctcgtgtcggacaagaagccgcccaaggaggcatccccagtgccggccaaaagcgcctcttccggggccaccctgcggctactgctgctgccggggcacggcgctcgggaagcgcacagccccgggccgctgatcaagcccttcgagaccgcctcggtcaagtgggaaaactccctaagacggagcggcgtggatgcaggaaccctgctgataattcgccgccgccaagacacgtgagccctaccacctgcaccctgagaaaacacaagaccaatccgaagccgcgcacagcctttaccacgtcccagctcctcgctctggagggcaagttgctccagaaacagtacctctccattgcagagggt

SEQ ID NO: 54397 - DNA, 477 bp, Homo sapiens
  chr17:56296379-56296856
  hyper
aaagaagtggggagcccggagaagtggtcgggattgtaagcagaaagtggggacctcagaacaccgagctcaggttggaatgatctaaggacacaaaagcatggggcctcggggctggggcggtgcgactaccggaggcgcaagttgcgcacggggtcccgggagcgatacactgcctccccggtgtcagtgctccagacggtctccgccatgacagctgcgacgcgccgcgactgcgccggaaagcgcgccgctctgttttcctggcaacggagacgctggatcgggaggcgacggaggtgctgcgcgcgcaacccgccgttcccgtcacggcgccacggtcgcagttggccacacagtgcaagtgcagcccaagccgaacgcccaagagggctccggggtcctaccgatcaccgcttaccatgtatgcgataaaagctcaccgaaagcgggacctcgtgcgctgtgcaaatgagg

SEQ ID NO: 54398 - DNA, 281 bp, Homo sapiens
  chr17:56326989-56327270
  hyper
ggacgggctctccctgcccttcggctggacgccggggaagacgcgcaacggcttccctctcccgctggtgagggcaggccgggccggggtgaaggatgggagccagaggggacgggatgcactacccaaacacgcagtgaaaggaggaggagggatcggtgggggcagcaggggtgcgcgatggagatctgcacagacccccaccttccgctagagggcagcagagctcggagcccggagcccggccacgtggcggtcacgttctggccgccgcaggccag

SEQ ID NO: 54399 - DNA, 31 bp, Homo sapiens; identical to SEQ ID NO: 11400
  chr17:56401799-56401830
  hyper

SEQ ID NO: 54400 - DNA, 160 bp, Homo sapiens; identical to SEQ ID NO: 11401
  chr17:56402169-56402329
  hyper

SEQ ID NO: 54401 - DNA, 206 bp, Homo sapiens; identical to SEQ ID NO: 11402
  chr17:56406103-56406309
  hyper

SEQ ID NO: 54402 - DNA, 1163 bp, Homo sapiens; identical to SEQ ID NO: 11403
  chr17:56429043-56430206
  hyper

SEQ ID NO: 54403 - DNA, 30 bp, Homo sapiens
  chr17:56591735-56591765
  hyper
catggagcaggagacgcgggcggtcaggct

SEQ ID NO: 54404 - DNA, 30 bp, Homo sapiens
  chr17:56595390-56595420
  hyper
tcgagtcgggcaaacgccctcccagccttt

SEQ ID NO: 54405 - DNA, 30 bp, Homo sapiens
  chr17:56736740-56736770
  hyper
ttgtttttaggcatcgcttcgaaactaccg

SEQ ID NO: 54406 - DNA, 3 bp, Homo sapiens
  chr17:56833038-56833041
  hyper
atg

SEQ ID NO: 54407 - DNA, 839 bp, Homo sapiens
  chr17:56833161-56834000
  hyper
cgcccccgggccgcgcacgtcggtgctcggcggcgcgcacgcctgcgggagccctctccaggcaacctagtgctgatcgctcgtgccggtgcggccgttaaccgcccttgccggagccctaggctcaaaagcagccccttacccttcctgggcttcccccaacccctttcccggtctgccctggggcatgagcagcgatggccggctgcatccctgaggagaaaacttaccggcgcttcctggagctattcctgggcgagtttcgcggaccgtgcggcggcggcgagccggagccggaacccgaacccgaacccgaacccgaacccgagtccgagcccgagcccgaacctgaactggtagaagctgaggcggccgaggcttcggtagaggaacccggggaggaggcggccacggtagccgcgacggaggagggggaccaggagcaagacccggagcccgaggaggaggcggcggttgagggtgaggaggaggaggagggcgcggcgacggcggcggcagccccggggcactcggccgtgccgccgccgccgccccagctgccgcctttgcccccgctcccgcgaccgctgtcagagcgcatcacccgcgaggaggtggagggcgaaagcctggacctgtgcctgcagcagctctacaaatagttaagtagctgggcttggctggtggtgggcccgcggtccccaccgcgccggcctcggacgcggctccctcggcccctcaaactgctctcttttctgctcctctcccccgcacccgcgcctgccgccgctgaaagcgcccccgctgctcggacccgggcggtcggctgagagctgccc

SEQ ID NO: 54408 - DNA, 142 bp, Homo sapiens
  chr17:56834019-56834161
  hyper
cgcccgcctcggcccccacgcctcctacccggccttgaagccgctctcctgagccccggcgccctcccgccgggcccgggcccctcatcccctttcacctcggcccccagcttctagctccacttcacgcaacctttccctt

SEQ ID NO: 54409 - DNA, 30 bp, Homo sapiens
  chr17:57297742-57297772
  hyper
tcctacacgggagccggagagcgcctgcgc

SEQ ID NO: 54410 - DNA, 30 bp, Homo sapiens
  chr17:57697100-57697130
  hyper
ttccccccatgtggcgtcaggaagcgaggc

SEQ ID NO: 54411 - DNA, 30 bp, Homo sapiens
  chr17:57697474-57697504
  hyper
ataacccccgacagcgccatggcccagatt

SEQ ID NO: 54412 - DNA, 57 bp, Homo sapiens
  chr17:57784632-57784689
  hyper
ggtgggtaatgcaacgaggtgaaaagaaacgttcctactggcgagaaaatgaataat

SEQ ID NO: 54413 - DNA, 30 bp, Homo sapiens; identical to SEQ ID NO: 11405
  chr17:57970348-57970378
  hyper

SEQ ID NO: 54414 - DNA, 30 bp, Homo sapiens
  chr17:57970641-57970671
  hyper
gaccagccagaggacgcgggctctgaggat

SEQ ID NO: 54415 - DNA, 30 bp, Homo sapiens
  chr17:58041243-58041273
  hyper
atattacctccccgcgcaaaagaatgttac

SEQ ID NO: 54416 - DNA, 30 bp, Homo sapiens
  chr17:58042255-58042285
  hyper
gccttcaggcctggcgctaaataataagtc

SEQ ID NO: 54417 - DNA, 30 bp, Homo sapiens
  chr17:58156329-58156359
  hyper
acatcctcccgttccgcgcgctctagttcc

SEQ ID NO: 54418 - DNA, 30 bp, Homo sapiens
  chr17:58212947-58212977
  hyper
tgggtttcttcgagcgctactcgcacgcac

SEQ ID NO: 54419 - DNA, 30 bp, Homo sapiens; identical to SEQ ID NO: 11406
  chr17:58215071-58215101
  hyper

SEQ ID NO: 54420 - DNA, 64 bp, Homo sapiens
  chr17:58216772-58216836
  hyper
catttacctgcttcccagaaacggtccatggcttccgtcccggtcatagcgctgcgcagcggga

SEQ ID NO: 54421 - DNA, 433 bp, Homo sapiens
  chr17:58216865-58217298
  hyper
cgtccgcgctccattgcccctccaggtgccgttattttgccttttaacctggggcgggaggttttagacgaggctgcaagtctgggccagcggggacctgagggtcccttgcaaccagcacccgcgacggtgtctacactggaattccaaggaaaagagggctccaggggcgcgaccaaggtttggtcttctgctgagcgctgctggatgaatcgccagccttcgcccgcggccccctcctcctcatccctgaccccaactcgacaagatcccccgagcgcaggcccaaactccgcacagcttgtgggccgtgaggtccgggtctcgaagctcggtcccgctggggctgtccctccgcctctacttccagggtaaagaccgcggaaccaggcgggggtctggggagcctggctgcgacctcggctgcaggctt

SEQ ID NO: 54422 - DNA, 179 bp, Homo sapiens; identical to SEQ ID NO: 11408
  chr17:58217356-58217535
  hyper

SEQ ID NO: 54423 - DNA, 30 bp, Homo sapiens
  chr17:58218835-58218865
  hyper
cacagaagctgcagcggcgcggggcggtgg

SEQ ID NO: 54424 - DNA, 30 bp, Homo sapiens
  chr17:58227327-58227357
  hyper
cgctgcacccgcggcggcctcctcggtgcg

SEQ ID NO: 54425 - DNA, 437 bp, Homo sapiens
  chr17:58228041-58228478
  hyper
aaaaaaaaaaggatgcttctcggacccgcctcaacgcacgccttcttttctcacccagcctcctccgtctgcccgtgggtttccgtccgtcccgctgggactcagcgctgggtgactgccccgcggccagagcaagggcggtctggcagggtcctggaagccgcgcttcccacacgggttccttgcccctgagggtcgcaagctcccctggcctccctaacctccagcgctgaattgggagcctggcgggggcggggggtgggggacccggagccccaaggcctctgcggagccggtctttccggacagggtgattttcgtttaaagattaatggtgaagccgagctcttaattattcctctaggtgggaggtggcaggaaaggcatgttaatatttgataagaagctaaaggcgcttcaagcggctgggcacaggg

SEQ ID NO: 54426 - DNA, 30 bp, Homo sapiens
  chr17:58470018-58470048
  hyper
cccaaccttagggacgtctttgactgggag

SEQ ID NO: 54427 - DNA, 668 bp, Homo sapiens
  chr17:58498602-58499270
  hyper
cttacaacaacaacaacgacaacaataacaacaagacgtttgctgaacatgctggcatagaggacaagttaaaaagtttctggactcaaagggtgctcctccaaagctccgggcctccgggctacccctacttgaagccgctatgcccctctcctgtgcccgaggtggccgctgggtggcaggggaggcccgggccgacggcggtcccaccgcactgtcgcgaaggcaggcgaagaacagggccacactgagtggggacaactgggcccgggcccagaggacacgaaggaaggtccgggagaaggaattcctagtttcagggaagaaaaggtggctcgagtgaggaaactgcgggggcaacggtctctcgtcgccgggaccccgccgtgtgccgcccagggacgcgagggggcgctgctgccgcgccaggggcgagggtcccggggcctcctgagcacctcccggccctgcccggccaactcagactacacccggactctgcccaccgcgtttccgccctcggcctcgggtccctggagggctcgcgggtaggaagagtcggggtggcgggactttcgccgacacccggctccccgcctggtggctgcgcacacgaggccggcgacgggacttgcccgcgtctcagcgcctcctgtgtgaagcgggac

SEQ ID NO: 54428 - DNA, 30 bp, Homo sapiens
  chr17:58603022-58603052
  hyper
cgcaccagacgtttcgggaggcaagtctgc

SEQ ID NO: 54429 - DNA, 30 bp, Homo sapiens; identical to SEQ ID NO: 11411
  chr17:58603272-58603302
  hyper

SEQ ID NO: 54430 - DNA, 51 bp, Homo sapiens; identical to SEQ ID NO: 11412
  chr17:58676700-58676751
  hyper

SEQ ID NO: 54431 - DNA, 705 bp, Homo sapiens; identical to SEQ ID NO: 11413
  chr17:58677542-58678247
  hyper

SEQ ID NO: 54432 - DNA, 243 bp, Homo sapiens; identical to SEQ ID NO: 11414
  chr17:58700867-58701110
  hyper

SEQ ID NO: 54433 - DNA, 126 bp, Homo sapiens; identical to SEQ ID NO: 11415
  chr17:58711212-58711338
  hyper

SEQ ID NO: 54434 - DNA, 192 bp, Homo sapiens; identical to SEQ ID NO: 11416
  chr17:58725251-58725443
  hyper

SEQ ID NO: 54435 - DNA, 251 bp, Homo sapiens; identical to SEQ ID NO: 11417
  chr17:58733951-58734202
  hyper

SEQ ID NO: 54436 - DNA, 1531 bp, Homo sapiens; identical to SEQ ID NO: 11418
  chr17:58740341-58741872
  hyper

SEQ ID NO: 54437 - DNA, 750 bp, Homo sapiens; identical to SEQ ID NO: 11419
  chr17:58742891-58743641
  hyper

SEQ ID NO: 54438 - DNA, 115 bp, Homo sapiens
  chr17:59467439-59467554
  hyper
gccggtgctcttctcccgcccgcctggccctgctgtcagcgccccctagtgccgggccggccgcgcatgagggcggtgggacagatcgcccacaactcctcggcttgcttttggg

SEQ ID NO: 54439 - DNA, 39 bp, Homo sapiens
  chr17:59469780-59469819
  hyper
tttttaaccatacccacggtggggcgggtggggggagcc

SEQ ID NO: 54440 - DNA, 340 bp, Homo sapiens; identical to SEQ ID NO: 11421
  chr17:59473906-59474246
  hyper

SEQ ID NO: 54441 - DNA, 366 bp, Homo sapiens
  chr17:59474741-59475107
  hyper
cgccaggggagggggttcctgggaagggggagggggccggcctaggtgggggaggggcccagcggaggcctcacggcgccgctccagggcctcccaggcctccccagcgccagctttcggtgagcctcgggcattcctagctggagagtttggctgggggtcgctacagactcttcagagcggctgcagcaggacctcagggtgatcgcgggaccgcggggcggggcgagtggtgggatcctggcccggacagagccccggaaagccagagggaaggtcggtgccactgtaggtggggtcgccgtccccagatgcagccgctgcactgtcgccgccaggtttctcggtcaaataacccaggcctga

SEQ ID NO: 54442 - DNA, 3209 bp, Homo sapiens
  chr17:59475528-59478737
  hyper
gaggaggtactaagagaggtgcgacctagccaagaacgaggtcgtggagaaaaccctgtgggggcggcgctcacatatgcggtgatgaggagttgtgagggccctggggtcggccccgaaaagtagggataacggtcgcagaggccatactgcttccgccggtcccgaatccgcactgccaggagagatccggccttcaaacgctgctcccaacgttcaacaacgaagtgccctgcgaccggtgtgcgcagtgggcgggcgcctgcatgggtcaatgttggatgtacgcgcccaccacgcggttgtacgggtgggaatgtcacccgtggctagtgcatgctctgtcttttccttcagaaaacgaccttcaggaatcagcctgagtgttcgcgcccgagcccgattggaagcaggtgcgtggtcgcttcactctccccgtgcacaccttgagttatagctctcgctgcgcacagagggcaccacacggggcccgacacacacacacacacacacacacacacacacacacacacacacaccatcacttcatgggggggaaactgaggctgccggaagacagaaaacgaagactgatcacagaagagggggcttcaatcacaggtgctcgcagacaccccaactccctcacgcgttactcagcactccttaacttaggagacgtgcgcttccgagagatgagaagaaactaaaaaagtggttggcagggcgaagagaggaagccggtatttcggaagaaggagactttcgtctccggtaccggatagggcgaaaattcgttgggtcgcgggtggagaatccggggtccgcccgcgcggtgccgccctgtgctcagcgaaaggtgcgctcaccttcctggccccgaggatccgctcctcccggccgctggaaagctcagggcggggcccgggcctgcggagaactccaggttccttccgagtcttccggtgaaggcgggcgcgggtagggggtccccgcgtttccccagcgcaaggccgcgtcccgctcccgcccgcgccggccccagcagggctcggccatggctccactcaccagctcccgccacctgggatccgctcccggacctcggccgcccgagcctcccgactcgcccgcccaccggcctcgctttccagtgcctgctgtctctttccggggcgcagggacccccaggcggcgccacgacccggagctgggtcggaggccaggctggggctcgggccagagcggccgggcctctgggcgcgggagaaggagggcgccccctctccgctcggggtcgtgtcaatgctttgcacttggggccggcgtgcggctgcgggtccttccccaaggccccgggacccgggctcccctcgcctcaggccctttcggcgggtcaggtcggccctccgcgctctccagtccggcgcaggcagccgcaggcgcgggcgggcggtgggggccggggcaggaggaggggtctcggggcccggcggcccgtcattggttaatattttattctgttgacatgttttcttactgctgaggcttccgacaccttctcccaggccccccctcccggccggagcttggcctgagctgtcaaaaccccgcccccggagacccacaattggtccaaaaagcgtaaaatcagcaatcaaggggggcctggctcgttagcgcaggggatccgagctgggcaggacatgtgagatagtcacagttttccagagatcacgacaagatctaaccagtcgcgcgtggtccccggcgccggagcgggccagctcagcccggcccagcccggccccgcgcagagcccccgccgcccccgcgcacagagccgggtgccccttgcggtgcgccggacgggaagccccgaggagcagctgctgcgcccgccacccgggtcgtccgtccaccgcgcgcgccgccgcccgggccgggggtccgagccgcgcgcccccggccccggccccggcccccgggcgcctgggccggatgtcccgatgagagagccggcgctggcggccagcgccatggcttaccacccgttccacgcgccacggcccgccgacttccccatgtccgcctttctggcggcggcgcagccctccttcttcccggcactcgcgctgccgcccggcgcgctggccaagccgctgcccgacccgggcctggcgggggcggcggccgcggcggcggcggcggcagcagcggccgaggcggggctgcacgtctcggcactgggcccgcacccgcccgccgcgcatctgcgctccctcaagagcctggagcccgaggacgaggtggaggacgaccccaaggtgacgctggaggccaaggagctgtgggaccagttccacaagctaggcacggagatggtcatcaccaagtccgggaggtagggctgccggccggctggaaggcgcgcgggcgggcgggcgggctggggcacgggactgcacggatcagagcagagctggggactcccggctcccggctcccggctccaggttctggccctgacgccacgcttcgctcccacggacaaccaagttgacttttctcgtttggcaccggagcgatttttttttaaaacaaaaacgctaaaatcctccgaatgaaataaaacgaaaacatactgctaaagaatagccccaaccgttctgagtcccagcgcagaggaggccccgcggcttggccctggcggtctcctccgccccgcgctctcgctcttctgcgtccgggtccgtctccgagctcgggggaaattcagcctctctcagactctgctccgaccccgaagcccctagtgggacctgggcccagctaaccccacgctggttgctcggttcctggcagcgagccccgggtcagccgagccctccgcctcaccgggctgggagccctttctccaccgcgggcatccgagccctggacgcatccgccgccccaggccttaaagcctgaagaaagccacagccccggcccctccacccttcgactcagccaccgagaatccaggcctcgggttcaccctcttcccccgaactgcacggccaggatgtcttatcaggctctgtagcccagttcccaatacaaacaccctccagatttatttctgggagcttccgtcccaagtgggtatttcccctgaacgaatttcggggagattaaggagaagcgagaatatttctagagggcct

SEQ ID NO: 54443 - DNA, 329 bp, Homo sapiens
  chr17:59488094-59488423
  hyper
ggcttccctgcctcagacctgcgggcaggtccgggaacccgacagggacagagaagcccgttttccagcctaaatagaagctcgtgggcagcgcgtttgctggaggtcgctttgggctgaaacgcctctcatactcctagaggagcggcgcgtttgcgtcccgcggcttctcactttcagcaggacattaggagggagacgagagtcggctgcgcgcccgcggcggcctacgtacagggctgcggacaccagggggcagcaccgacttagggtcgcgggaggggtgcgggtgcgggcatgggcgcgggggaggcgggtgcctgcgaagg

SEQ ID NO: 54444 - DNA, 494 bp, Homo sapiens
  chr17:59488634-59489128
  hyper
cggctgggccttgtcccagacaaaggctaggccactcccatgtccaattaagccaccctcctccccggcctcccagccctcattgtccccggggtcgccaattagcctaggcgcccggcgtacccgccgctccggtgccgcaaggcctccttaacccttcagggcctggcccggggtccttggacggcagagccgccggcacacgcgtggcaggagggccagtgctgggacgatggcgatacctgctggcggcctagcctgtcgcctcgggctctcgcgtgtggggcgtgtgaggtctaagagggaattgtgcgtgtcggtgtggggtggcgcgtgcgattcccggaggaactcggagatggagggtgtgagtgcaggggctccgagagacccctagcggctaagccgcccggatcccaaggcccaggggacctcatttcctctcgggttaatcggaatcttccgagccctcaagcccttcctcctccactccc

SEQ ID NO: 54445 - DNA, 692 bp, Homo sapiens
  chr17:59489181-59489873
  hyper
cgaaggccgcagctcccgggcccgcctccccagctgaccgcgaactcctgcgtggggtgctcctggggcgggaggggcgcgctcagcctcgctctccccgggactctcacgctcaagcgccccggcttgaggccgggaccccctatttcccggttatgggacggccccttgagggacagcctctacgagccctggatttataccccgagcctgccttcctccgctctgggaaggacccaaaatccagtcccgcttcctccccctccttcgctgtccttggccccgaggtgcggagcaccggcggtcaggcgggatcccgcaggaggccgagcgctccctgctcgcaggacagggcggcagcggagggagcccccgccctcttgggaggaagcccgagctccgggtctcctgggcaccctcccgggagcgccttcggggtggaggctggttgccgggcgctgaacgtgtccgagcacgcccggggcggttttgcacttggacttccttttgggctctccggaggcgcatatctgttcctcctattggatggggccggggaccccaaacccactccggaagcaccgatttccagcgctgacggccgcgcctggtttcccagcgagtcctcttggcagctcccgcagctccccgccgggagcacgagtgggagcgaacccagagcccgcccaggc

SEQ ID NO: 54446 - DNA, 139 bp, Homo sapiens; identical to SEQ ID NO: 11426
  chr17:59529011-59529150
  hyper

SEQ ID NO: 54447 - DNA, 11 bp, Homo sapiens
  chr17:59529253-59529264
  hyper
cgacctcggga

SEQ ID NO: 54448 - DNA, 436 bp, Homo sapiens; identical to SEQ ID NO: 11428
  chr17:59529843-59530279
  hyper

SEQ ID NO: 54449 - DNA, 298 bp, Homo sapiens; identical to SEQ ID NO: 11429
  chr17:59531719-59532017
  hyper

SEQ ID NO: 54450 - DNA, 117 bp, Homo sapiens
  chr17:59532269-59532386
  hyper
cgatcccgccggggccctagatatagttggacccagcgcgctggccggagcgggcagctaccctactggcgcagcggccctgtgtggggactcctaggtttccgaggctcggcccgc

SEQ ID NO: 54451 - DNA, 232 bp, Homo sapiens
  chr17:59533874-59534106
  hyper
cgagagcgaggaggccttccgggccccgggcccagcgctcggagaggccagcgcagccaacgcccccgagcccgcgctggcagcgccgggcctcagcggagccgcgctaggcagccccccgggacccggggccgacgtcgtcgccgccgccgccgcggagcaggtagggctgcgccagccgtcgggtagaagtcgggcgtcggtctgtctgcggggccgcctgtgtccgtct

SEQ ID NO: 54452 - DNA, 17 bp, Homo sapiens
  chr17:59534388-59534405
  hyper
aggaggaggccaccccg

SEQ ID NO: 54453 - DNA, 1000 bp, Homo sapiens
  chr17:59534556-59535556
  hyper
cgcctctccctgtctgtgtctgccccgggagcctgtggcgatggcccgccacagaaatgttcatgagtgagcaggagtgtcgtctaacctgcgctggccactatgtgtgtcctctgagggttcctccgtaggtgcagctttaaaggaggaagttttagccaccgattaattcttttatattcacgaatagttcaaaatcgttctgtgaaacgaaatctggagccatgggctccgggcgggcagggttccgcacagctcttcgggtctggttcttctttcctcaggctccgcgtggagccctgggcctggcagacacaagtttctctccctcccatccccagaccatcgagaacatcaaggtggggctgcatgagaaggagctctggaagaagttccacgaggcgggcaccgagatgatcatcactaaggctggcaggtcagcgctgggagatttacttccggggatggcggtggggagcaaggggggccagggaggtcccttagaagtcctctcggccccggcctggtggcctgtgggaggcctctctgcctcctcgggcgtcagtgccacctcccttcgcagcttgggactgggccgccaaagcccgcagggggccaccgcagccgcgcgggccttgcgggaaagaccgaggggaggggcagcgctatgcaaatgaatccaaacagggatcgcgacgctcaaaagtcccagctccagcacttttggccccctggggggctgctttgccctcctctctttgaggacctgaggaggtttctcaggaatgcattgattggagacccagagatgcctctcagcagatggggagagggaaatagactatgctgttcagttttcatacattttcgtgagtgactcgaaccccaagtttttcatcccaggggcgccgctcttctgtttccatccccatctctggccaacgggaaagcactacgttgggctccgtgtgtgttgttgggggagcggctctcggtggct

SEQ ID NO: 54454 - DNA, 589 bp, Homo sapiens; identical to SEQ ID NO: 11433
  chr17:59539224-59539813
  hyper

SEQ ID NO: 54455 - DNA, 131 bp, Homo sapiens
  chr17:60142476-60142607
  hyper
gcgcccgccggccccggcactcaccaggcagaagaggttacagtgacaatcttccaggctggccccgttcggcacgaaggaggcactcatcgtccctcacagcagccgccgccggcgccacaacccaccat

SEQ ID NO: 54456 - DNA, 30 bp, Homo sapiens
  chr17:60143462-60143492
  hyper
ggccactaacatagcgccatctgctgggtg

SEQ ID NO: 54457 - DNA, 30 bp, Homo sapiens; identical to SEQ ID NO: 11435
  chr17:60704528-60704558
  hyper

SEQ ID NO: 54458 - DNA, 30 bp, Homo sapiens; identical to SEQ ID NO: 11436
  chr17:60705824-60705854
  hyper

SEQ ID NO: 54459 - DNA, 30 bp, Homo sapiens
  chr17:60771365-60771395
  hyper
gctaggcgttactgccgtttctgggctgcg

SEQ ID NO: 54460 - DNA, 136 bp, Homo sapiens
  chr17:60781449-60781585
  hyper
cccggccgcggctggacggagcgcggggccgcagcaaccaggccgggctccccgtcgcgccccttccggagcgggaggccctcgccgaggcggaggctgggacgcgcggggcgggcggcggcggggagccgcgggg

SEQ ID NO: 54461 - DNA, 210 bp, Homo sapiens
  chr17:60885476-60885686
  hyper
gtcgaggggctgggcgggcgggccggtccagggcgcaggagccgcccattaattgcgcggggacggccctgagctcctcttcctcctcctctttttgcttcttcactccctacacctgcccctcttcctcctccttccccgaggctgctttccgcggcgccggccggccttgcctggggcggaggcggtgggggcggctaccgggcgtcc

SEQ ID NO: 54462 - DNA, 55 bp, Homo sapiens
  chr17:61043209-61043264
  hyper
acagcagcagccacctcgagagtgacatcacccctgagggcggagcccaactatg

SEQ ID NO: 54463 - DNA, 126 bp, Homo sapiens
  chr17:61043853-61043979
  hyper
cccgccgccgccgagccgagccgaggggcgagagctggcccccgagccgccgctgacaggagcaccgccgcgggctgcgctcgccggctgcgaggccccgccgcgccgttccggggtgcagactcg

SEQ ID NO: 54464 - DNA, 97 bp, Homo sapiens
  chr17:61044392-61044489
  hyper
ggcggattgctaaacgtggcagggaatgtggtgcagaacgagttgcaaaatgtgcccccagaatgcagcataaaagtagttgcgaaatgtgccaggt

SEQ ID NO: 54465 - DNA, 76 bp, Homo sapiens
  chr17:61522993-61523069
  hyper
aaggtggcggcagctccgccctcagcgcagttggcaccggcctgacccaccacagggccaccgaggccaccgaagc

SEQ ID NO: 54466 - DNA, 277 bp, Homo sapiens
  chr17:61553923-61554200
  hyper
ctacccccggcaggcgacgtccccgcccctcgaccatggcctggtgaagaagccggccaggcccgatcagccccatccccgccgcacgagcggcgcctgcggacagctcctggggccccggccttgtcactccggaggcgggaggctccggggggtcgggctgggaagatcgagccggaggccgctaggctcccaggccccggccgaggctgcgcggccgcacggtgggcaggctcgggtgttccggcaaactgccgggtccccatcttctaaagag

SEQ ID NO: 54467 - DNA, 30 bp, Homo sapiens
  chr17:61554914-61554944
  hyper
ggctgctcccaggccgcgcccgccttcgcc

SEQ ID NO: 54468 - DNA, 30 bp, Homo sapiens
  chr17:61678285-61678315
  hyper
attagctgttgagccgccccgggcgggccc

SEQ ID NO: 54469 - DNA, 30 bp, Homo sapiens
  chr17:61699773-61699803
  hyper
tttgtttttcggagcgttcctgaggtggag

SEQ ID NO: 54470 - DNA, 30 bp, Homo sapiens
  chr17:61776836-61776866
  hyper
ggtcttgccacttccgcccctcacccacct

SEQ ID NO: 54471 - DNA, 311 bp, Homo sapiens
  chr17:61777762-61778073
  hyper
ggcgtggggaagcaacggtggcagggacaggatggaagggccgcgctccgcatcctactgggaggggacgagttcaggctgcggcggctgcggtcgcgggacactgggcgctcccggcctggctccgggataaccgggcggggcctgggccattcactgcctcggtttcccccggttggcctcgcgcgtaggcgccggcgcccccatccccgcccagagctgtggggccgcagagacccagccggggcgaccccggagcctggcccggggtccctcgggcggccgagtcctcccgccgccaggggccgccc

SEQ ID NO: 54472 - DNA, 14 bp, Homo sapiens
  chr17:61778234-61778248
  hyper
ggtatgcgtggttc

SEQ ID NO: 54473 - DNA, 30 bp, Homo sapiens; identical to SEQ ID NO: 11441
  chr17:61819058-61819088
  hyper

SEQ ID NO: 54474 - DNA, 149 bp, Homo sapiens
  chr17:61851077-61851226
  hyper
aattacataatccccgcccctgggccggaactgccctcgcctatcccaatcctcctacctaggattccgtcaagttgacgtcacacggaaccggtgctccggaagctaaaggtggccatgctgtgtgggaccacgtggccagaggcaag

SEQ ID NO: 54475 - DNA, 30 bp, Homo sapiens
  chr17:61851752-61851782
  hyper
tctggacgcaaggccgccagtccttggggg

SEQ ID NO: 54476 - DNA, 30 bp, Homo sapiens
  chr17:61904038-61904068
  hyper
aaaacaaccaagtgcgcaaactgcttcact

SEQ ID NO: 54477 - DNA, 30 bp, Homo sapiens
  chr17:61905168-61905198
  hyper
tccgctggctccttcgtcagtactgacacc

SEQ ID NO: 54478 - DNA, 30 bp, Homo sapiens; identical to SEQ ID NO: 11443
  chr17:61921071-61921101
  hyper

SEQ ID NO: 54479 - DNA, 113 bp, Homo sapiens; identical to SEQ ID NO: 11444
  chr17:61926211-61926324
  hyper

SEQ ID NO: 54480 - DNA, 31 bp, Homo sapiens; identical to SEQ ID NO: 11445
  chr17:62067669-62067700
  hyper

SEQ ID NO: 54481 - DNA, 165 bp, Homo sapiens
  chr17:62075059-62075224
  hyper
acagtactggggacgcgggtgctgaagtcaccacgattttcctcgtctgaggagcagtggctcaccttggccaggaaacagggcaaatagccgcaaggagagaggcgagaagccggccacgtgtttccagccagagtcctcagcctcttccgtgaattcgggcgg

SEQ ID NO: 54482 - DNA, 182 bp, Homo sapiens
  chr17:62103202-62103384
  hyper
aaccaagcccttgacgtcttcctggacctcaacctcatctcatcagctccccctacggagtggggcggaggcggcggaaacgctgaacgctcagggtcgacaggagcaggggctgcactgcccgccacctagtggccaaagtgagcaggtcccctaaaagacacgacgccccgcgatctgcg

SEQ ID NO: 54483 - DNA, 30 bp, Homo sapiens
  chr17:62206635-62206665
  hyper
ttgaggttctgaagcggcctcacctcgaac

SEQ ID NO: 54484 - DNA, 289 bp, Homo sapiens
  chr17:62223929-62224218
  hyper
gggggcggtggctgacggggatacgcggactcttgatgcgtaaggagtgcccctctgctcccatacgttccccagcccagccttccctgagtgtatcgcgcgcgctgtgccttcgccgtgagttcgacataagtcccaggctgtcgcgtctgccatcagacgcgcagatttagttgaaggcagcgtggaatggcgtctgcagggctgttgtgtacttgacataaacagattcggtgtggaactgcattgagttaactcctgactaaagggtaatcgacctgtttacaaa

SEQ ID NO: 54485 - DNA, 65 bp, Homo sapiens; identical to SEQ ID NO: 11446
  chr17:62776357-62776422
  hyper

SEQ ID NO: 54486 - DNA, 1405 bp, Homo sapiens; identical to SEQ ID NO: 11447
  chr17:62776446-62777851
  hyper

SEQ ID NO: 54487 - DNA, 31 bp, Homo sapiens; identical to SEQ ID NO: 11448
  chr17:62915937-62915968
  hyper

SEQ ID NO: 54488 - DNA, 30 bp, Homo sapiens; identical to SEQ ID NO: 11449
  chr17:63119250-63119280
  hyper

SEQ ID NO: 54489 - DNA, 34 bp, Homo sapiens; identical to SEQ ID NO: 11450
  chr17:63341481-63341515
  hyper

SEQ ID NO: 54490 - DNA, 1548 bp, Homo sapiens
  chr17:63555846-63557394
  hyper
aacaagctgctttccctagcacggaaaagatcaaactaagaagggtaggggctgaacggggtgcaaccccgggcgagaagccagggaccccggatctgggatgggtgcacgctgaacccgaccagagcctcgagccgcggggctgggcggcgcggcccacggagaagtggggctgccgttggcaccgcgctacccgggcggtgggaggtggagcggccccgttacctggaagacgaaggccgccgaagccaggctctcatgtcctccgagcccctccggcccggtcccccggcccaaatgcaactgaacgcctccagagccctggcgggcacacctcgaggccggaaccccgggacacgccagcagcgccccgagcccgggcggggggtcggtccccggcgccgccgtttgcagaggcgcccgcagaaaaagcacagaaagcagcagcctagtccagaaatggcgacgcgcggagtctctgcctctccgcaaaaggggccggggcggccacgggcgaggggcccgggccgggaggagggacgcgagggacacgggcgccccggacttgggccggtcctgcgcgcagactgagcctccgccagcgctgtgggccccttagcgcggacccgcggcagggaggggaaaaggggagggggaagagaagtaggaggagaggatggggcggaggagaggcggggggcgggggagggcaagcggggggcgccgctaccctttcatcccacctcccaaaggcactcccgcgcgcactcacacgccgactcacatccataaccgcgacagcgacgcgacccccggggggtatctgccccctctccgcccccgccactgccgccactcggataagtctcctctctgggccccccgccaacccggtcaccgcgctggggagggggctccggcgcagggcgcgcaaggctgcccggccaagccccccggaacgctgggcgccgggtccgccgctcccctccgcgccggcccctagcgcgccccgaaatagccggcctgccaacttcaaagggccgccccgcacatcaaagcgcgcggtccgcccggccgcctcggcctcggcactcaccattgatccccgcgcgcgctcggcggcgagacctcgcaggcgcccctggcaggggcccggccccggcccccggctcggctcgcggcggcagccccgggcccccccgggccggccgcggcgtcggggaacatggggagtcgtgcggcgggggagggggtgcgggaaacaacaatcccgggttcagagcgaaagccaccggccggggagggggaacggcgcgccccgccgccccttttatgcaaaagatccgagcgggcctccgcccccgcccggcccggctttcaacgcaggtcctgtttccagcagtcactcggcgcaccaaatgtcctccgggcgcttccaacaaaaactgcgctgtggatttaactgtgcacttcaaaggcgcgagccgagcgcacggtcctgaaagggaggtacgcgccggccgcgccccgggccgccccccgcagccc

SEQ ID NO: 54491 - DNA, 31 bp, Homo sapiens
  chr17:63557793-63557824
  hyper
aaagggacagcgccccgcgcccgccccgccc

SEQ ID NO: 54492 - DNA, 158 bp, Homo sapiens; identical to SEQ ID NO: 11454
  chr17:64257869-64258027
  hyper

SEQ ID NO: 54493 - DNA, 31 bp, Homo sapiens
  chr17:64298538-64298569
  hyper
tcctccgcactcggtccggtccgctcagcgc

SEQ ID NO: 54494 - DNA, 30 bp, Homo sapiens
  chr17:64299050-64299080
  hyper
cagaagaacgtgcacgaggtgaaggaccac

SEQ ID NO: 54495 - DNA, 85 bp, Homo sapiens
  chr17:64831322-64831407
  hyper
cgagggacattggaccagggtcgggggtcgcggccgctccagcgaggtaagagccgggaagaccgggagagaccacctcttccat

SEQ ID NO: 54496 - DNA, 30 bp, Homo sapiens; identical to SEQ ID NO: 11455
  chr17:64877670-64877700
  hyper

SEQ ID NO: 54497 - DNA, 790 bp, Homo sapiens
  chr17:64960823-64961613
  hyper
ctcgtcgccgcgcctcggagtttgagccccagcgctgccggagcgcaggcacgcccggggcgcggggtcggagcgcgcagcgcggcgccgccccccggccctcggccccccaaccccggcgcccccggagcggcgcgcggagggaggagggcgggcgggcgcggcgggccgggccggcgggcggcggactatgaggcgcccaccatggtgcgatgcgaccgcgggctgcagatgctgctgaccacggccggagccttcgccgccttctcgctcatggccatcgccatcggcaccgactactggctgtactccagcgcgcacatctgcaacggcaccaacctgaccatggacgacgggcccccgccccgccgcgcccgcggcgacctcacccactctggtctgtggcgggtgtgctgcatcgaaggtacggccagccccgacccctcgccgccccacacacacacacacacacacacacatatacacacgcgcgcgcgcgcgcgcgcacacacacacacgcgcacacactgcccggcgcgcgggccggggagagggtgggcgcggcgctggctccgcgcgagacacaaaggagccggagctggcgggcgggtcccttcgcggccagctgtacatcagctctggtccctctcggctggggacctccccagcacaccgatcccacaaactctccacgcgcacaccccctcgcccacagacacaatgaaacacaccgaaactcaagcacgcgcgcgtagcccgggacccgagcgatccccaggggccgcgccgg

SEQ ID NO: 54498 - DNA, 30 bp, Homo sapiens
  chr17:64961905-64961935
  hyper
gcccagcccgacgcccgcctcgtctcccac

SEQ ID NO: 54499 - DNA, 30 bp, Homo sapiens
  chr17:65241469-65241499
  hyper
ctcccccgggctgacggcattgaaaattca

SEQ ID NO: 54500 - DNA, 57 bp, Homo sapiens
  chr17:65242141-65242198
  hyper
gctcgggggagggtcccgggcggaaagcagggtgcgccagtccgggtccacctggcg

SEQ ID NO: 54501 - DNA, 42 bp, Homo sapiens; identical to SEQ ID NO: 11457
  chr17:65352418-65352460
  hyper

SEQ ID NO: 54502 - DNA, 30 bp, Homo sapiens
  chr17:65362359-65362389
  hyper
agccctggccgggccgacctggggtctccc

SEQ ID NO: 54503 - DNA, 30 bp, Homo sapiens
  chr17:65362886-65362916
  hyper
ttacctaaaatttgcgatgagaaaagcgag

SEQ ID NO: 54504 - DNA, 30 bp, Homo sapiens; identical to SEQ ID NO: 11458
  chr17:65374034-65374064
  hyper

SEQ ID NO: 54505 - DNA, 30 bp, Homo sapiens
  chr17:65713965-65713995
  hyper
gtttggcaagcactcgccccctcaggcccg

SEQ ID NO: 54506 - DNA, 30 bp, Homo sapiens
  chr17:65820954-65820984
  hyper
tacaggtcttagggcgcccctccctccggg

SEQ ID NO: 54507 - DNA, 435 bp, Homo sapiens; identical to SEQ ID NO: 11459
  chr17:65822941-65823376
  hyper

SEQ ID NO: 54508 - DNA, 140 bp, Homo sapiens
  chr17:66434323-66434463
  hyper
ttgccatgcatagctacgggaggaagtggctgagccccggaacctttaactgcacgttctggcagccctgccacccctttggcgatacaaggtcattcctggccccagccttagaagaggccactcgtccatttccagtt

SEQ ID NO: 54509 - DNA, 1254 bp, Homo sapiens
  chr17:66596260-66597514
  hyper
cactctaagcccagcgccagggctggagccgtgggtggagccgctgcagccctgggccgggggcgtcaggaaactcgagactggggcgcggggaggccccggccagagcgcccgctctcccgcgtcccgggcggggtcctcacctgttccagcgggccaccttcctccggtaataccgcagcgcctcctggctggccaggagcgagtcctcggctcccaggagaggcggctcctccgggacgttgtacagcgggtgggcgaagagggcctgcaacttggagctcgacccgctgtggctgccgccagccggttcagtccggggctcggttcgggaaaagttgtgcacgatcgtgccggggtccgaggcagctgcggccgagtcccgcgccagggaggaggcgcggccggtgcacgggcacccccgcgggcgctcccgaggccgcagctggcgctgtacttggggccagaggtggaagtagaggtcggcggagagcagcgcgcccagcagcagcagagtcagtaggcggtcccggcgcagccccggcatggcgtgctggccaagggggacgccgggggcaggccggctgtctccggggtcccgggaggggtcgcggggtgcgggcagaagaggtgcctggagtcccgcgggtgggccggggtcagtgagaccggaatgctccccgcgcgggctagtcccctgtggaggggtgtcgctcctcaacttggggaccaggtgcacggagcaccggggctctcggagtcagcgggcgtcgcttctccgcgccgagtgagccgagggaatggggttcccggggtgcccgcttcttgcgccttttctcccgtgcgcccgcccgcccggacgctcgcggcaggtgaagggccccggggcgccggcgccggctgccaccgcgggcggacgggcgacggggcggggggcgaccgcggagggcggacggaggccgccggctgcaaagcccggggcgtctctcctgaggatgctgtcgctcggcggcggctgctagtgctcccgcgactcctcctgcgggcggcggagacgccagtgccggcggctggcacgggcggcgcgagtggggagttggcgaagcaggagcggctccggggagcttgtctgtgcgcctggactcctagaggcagaggtagcgcggggcctccccgagcctggcctggcgccggcacccccacccactctccgctggcacctgcctctggcgcagctgacggccaactcccgat

SEQ ID NO: 54510 - DNA, 30 bp, Homo sapiens
  chr17:67323267-67323297
  hyper
gatctgtgcgagggcgcggccgcgcgcacc

SEQ ID NO: 54511 - DNA, 99 bp, Homo sapiens
  chr17:67410685-67410784
  hyper
gacgcaatctttgtcgcacccagttatctcgctcagcgaccggggcgaccacgtttccttaaatcagagccccgtggactccgccggagaactacatta

SEQ ID NO: 54512 - DNA, 1583 bp, Homo sapiens
  chr17:68164453-68166036
  hyper
caccccgactgcgccgtccacaataccagctagtttgctgaattagttcagcgactcaaggaggccttacgaggtttaaataaactgcacaaaagacacatttgatcgctcgagaaaataaacatttaaaaaactcagtggaaagaaagactcctaaaatatatcctgtcctttaggagcaaagcttcgttaggacaccgaagtactcagaaataataggcacttactcttcggtttacacacacacacacacacacacacacggattagtttataaagttccaggatccagacccggttaacactgaagttgctttttaggggtctgcgcgctctcgcctggctgctgggaaggagggctgggaggcgctgaagcgagggcagatctgagtgtctgtaggagttgctattccaaaaaaaatcattactctctaattgttctgattttagatcagcaaagcgtgccgggcggtggtggagagactgagggcggacaaggcgagagggaacgagccgtccacccttcggagaagcctaggcgccttgtaagtaattcgcgaacagtcgggagaacaaacagccaagcggcgctgcagtggccgcacttgcgcgcgtctcaatcctgggggctctgcgcgcccgccccagtccctcgccccattgactcagtggcttctccgggcgctgcagcctccgcggggggcttcgaagggccgaggggctccggcagagagggagtggagagggagacgcgccgggaccgacgaacaatcctgcccctgcggcaaaggtctctacccggcgctggcacctcgcaggcccctcgaggagcacgcagggcaagcggcccaagagcgggggaaccgggaagtgtgtggggctccagacggagtaggaagctttgcccaaggccaggctgcaatcaggcagccgcaacagccgggcgcggagcttcccacctgctgctgtcccagctgggccgcaacttcctcctccccggcccgggcccgactccccggccgggctccgagggtggagggggacgaggcggcggcaggttccctccgctggcaacgcctcgcagcatcctcccctccccgccgcggttcccggggccggccgcgcggccaggcgcgctgcgattggccggcagcggccgggggcggggccaggagagccggtgtcgcacggaccgcctcaaaagagcccaggatattgcagagcgcactggagccctggccagcgcgcagccttcccggcgccggcgggctgggtcttgggaattctggtttgctttggctcactcgctttttacaaaccactggatcttacatgcctctgtaccccccacttccactccatgtccccatgctcctgcgccagcaacaggtaagggctgctgtgttttcttccttttcgctcgctgccggtgtgtcctggggaatggactctggccgccgtcccctaccctaccctgccccgctgctccagaggtgcccagctgtcacactgctgtagcgctcacccacactccggagtcccagatcatgcctatatagtttgtgtgcgcaccagaacatccc

SEQ ID NO: 54513 - DNA, 356 bp, Homo sapiens
  chr17:70026537-70026893
  hyper
aaagaaaacagtcagctcctgcggcatctgatttgcctcctgccctcgctgctgttaatctgcaacacgccacagcctctagatcgctgccgttcagagtcggatgtcatgggggcgactggcaggggttctttcttctttcggtttgatacatccttccttccgctgctcctcgcaatcaaccgctaggggaaggagggaagcaggcaggagggagagcgggagacttccggaaatccctttcctcccttcccttcacaggttgccccatagtgaccctggagactcccgcctgcccccagtgaaggaattggttactctcccagagccctcccgggcatcgcccccttcctcac

SEQ ID NO: 54514 - DNA, 443 bp, Homo sapiens
  chr17:70113123-70113566
  hyper
ggcagattggaggttcgcgccccctcacccgacacctcccgtccacctcatctttctttttttcgaaaacaggaaagggaagaaaactgaaacgggcctcttggtctgcagttttagcggagtcgggattccacagccctgagtggcacatgccggtcaacttcccaaagtcgggctcccgtgtggggagaaatacacacgcaggaatgcacaagcatcgcgtgttcgcaactgtcgctgggaggtctggcggctgtgatgggacatgcactcactcgggcaacacgtccacaggtgacatctattcgatcagtcaacagatatttattgcgcacctacgacgctatctggtactttccttttccccttagctgttgctgtccagcccagcgccagtccagagacgggcttaccggccgctcccttccacaagaaactcgtgt

SEQ ID NO: 54515 - DNA, 191 bp, Homo sapiens; identical to SEQ ID NO: 11466
  chr17:70113827-70114018
  hyper

SEQ ID NO: 54516 - DNA, 459 bp, Homo sapiens
  chr17:70114152-70114611
  hyper
cgcacctctgtgtctccgctcccggcggcagacctcgcggcgcttgctcaagagcgggtatccgaaagcacgtcccgaacacggagaagcgccctccgtctcctgcctcgtgacctgcgccctttccctccctcaccgcatcagatggaggaccctggctcctttcgcccctggcaaaatgctctagccaacactgggtcaacagccttagtttccagatctgtaacctgaacatcaggagcgggttcctttccttctacctgtgtctgaggtcctctggtcggggactgcgcgcgtcttcccaggtcagggaggaggggtcggggcgacctgagaaagacacaacgaagcgaatggagcccctgaatggggaaaggggagtggacaccaggaggcccctgcagaaatgcaggaccgatccactcgcgagctgacaatgccacgcgctagacttggcct

SEQ ID NO: 54517 - DNA, 30 bp, Homo sapiens
  chr17:70116666-70116696
  hyper
aggctcgctccaggcgcgtaaactcggcta

SEQ ID NO: 54518 - DNA, 80 bp, Homo sapiens
  chr17:70116990-70117070
  hyper
ccctctcctcccctcccgcctcgtcacccagcccagtgccacaatcctcctccctccccaaaatcgggtccaatcagctg

SEQ ID NO: 54519 - DNA, 30 bp, Homo sapiens
  chr17:70118543-70118573
  hyper
tcgagcagcaaaggcgtttagggggcagca

SEQ ID NO: 54520 - DNA, 595 bp, Homo sapiens; identical to SEQ ID NO: 11468
  chr17:70215711-70216306
  hyper

SEQ ID NO: 54521 - DNA, 200 bp, Homo sapiens; identical to SEQ ID NO: 11469
  chr17:70216392-70216592
  hyper

SEQ ID NO: 54522 - DNA, 52 bp, Homo sapiens; identical to SEQ ID NO: 11470
  chr17:70270192-70270244
  hyper

SEQ ID NO: 54523 - DNA, 30 bp, Homo sapiens
  chr17:70400150-70400180
  hyper
tattcactctgtatccggctggaagataat

SEQ ID NO: 54524 - DNA, 40 bp, Homo sapiens; identical to SEQ ID NO: 11471
  chr17:70553091-70553131
  hyper

SEQ ID NO: 54525 - DNA, 30 bp, Homo sapiens; identical to SEQ ID NO: 11472
  chr17:70587738-70587768
  hyper

SEQ ID NO: 54526 - DNA, 632 bp, Homo sapiens
  chr17:70588429-70589061
  hyper
caccaagtaatccacgttaaggggtccgcagccccccacccaattccccactttccatccaaggccaaagagcagccagaccctgtcctctgcgctccagactcgcggaggtcgcgggcgggggtcctcaggcggccgccttctcgtccccaggggtgggcgcgcgacgcgggcagggaccgggcgcccggaggaccaagcgagcgcatcccgcctactcgtgctgggacatcacccagcctggacgccgctcctcgcctttcttccccgcgcatcgccagcgccaaccaaagatccccgccgggaaagcctctctgccaagctggaaagcgctgaaggcggatcgtctctcagacttgggtttgcaggttcacaaggcccgggaggcttacggtgggcgcctgcctaacagagggtccttgcggagaagcgcagaacgacaaatgccagaggcggtgaccgcgtcctctggataccagcgccgcaccgcgcacccgcgccgcctgcgcgccctgcagtcggctgggccattcggcccttatataccaggcggacccgcgccgggacggggcggagcggggtgggcggggagggggtggggaaggccgaacggcttcctgggagtcgtagtt

SEQ ID NO: 54527 - DNA, 30 bp, Homo sapiens
  chr17:71088836-71088866
  hyper
ttccctcccgcacacgtggccctcccgcct

SEQ ID NO: 54528 - DNA, 16 bp, Homo sapiens
  chr17:71161142-71161158
  hyper
tgggccagtcccagcg

SEQ ID NO: 54529 - DNA, 250 bp, Homo sapiens
  chr17:71161183-71161433
  hyper
cgcaagaccaccagcgcccagagccccagtctgaggcttggcgccgggggtctgcgggcgaggggagctctctacgtgcgaggggctagcgggagccggcacaagagggtcgaggagccaggaaccccaaacgtccggcgccaggcgctagccaagctgctgcgcgccccggcgcccagctggctcggggacagccgctgggtgtcggagaccggagctagcggattgcagcggaaaagcaaaggtgagg

SEQ ID NO: 54530 - DNA, 544 bp, Homo sapiens
  chr17:71161481-71162025
  hyper
gagatggagggagcgagaagcgcacttgggcacctgtgtgcatctgcgctgatggtggtgtgcccatccgagtgcctgagcttaggtcccggtgcgtgattctccgctcttgtgccttttggggtgattgtagtaggaatgaacgacaacgggtacccttgcctgagtaagggggctgtgggtagagtgtgctggaacggacgtgtcctcgcagcctcatgcccgtgtgcgtggcgtgtgccctttagcccgagatttcaggtagctgcgacgggtgacaacttctctcccagccccctacaaaagagacctggcgcgaggggagcgaggccgtgagatgccagctggggctcctgcgggagcgcacccggagatccgagcctgccagaggcaggcggcgggcgcagagcggagaaagaggggcttctctccctagacgctgaacgatctaggatccgtccccgtcccccacctcgggacagaaaggacagtttgtctaggtttggagagaaaaaaccactgcataggccgtgcccaaaagccg

SEQ ID NO: 54531 - DNA, 74 bp, Homo sapiens
  chr17:71162334-71162408
  hyper
gcgctcacgcgccgcggtggccctcaggggcttttgtcaccctgccagtgggggctctcgctctagccgcacag

SEQ ID NO: 54532 - DNA, 30 bp, Homo sapiens
  chr17:71188788-71188818
  hyper
acgccgtcagtccgcggggcccgatcccga

SEQ ID NO: 54533 - DNA, 100 bp, Homo sapiens
  chr17:71227555-71227655
  hyper
cgaggccaggctccctcgggaaggtagcgagtgcatcgcgataaaatctttcctcccgccttcggagtcaaacggccccgcaatccaaacagtttagaat

SEQ ID NO: 54534 - DNA, 254 bp, Homo sapiens
  chr17:71228587-71228841
  hyper
tggggtggcagaagcgctcgcctgttcacagccaacggagggtacggtataaaagtcaagccaggtttcaaataaattcaattatgtcataataatatcatacaagtatttgagttgaatccgtgtaacatattttaaaacaggcggacctatccggcagtggtgcagacggcctgacgaggttccttggccgggggttgggcaggggcctggggggcttccctggggggcttgtcgccggggccgcctgggct

SEQ ID NO: 54535 - DNA, 242 bp, Homo sapiens
  chr17:71306520-71306762
  hyper
gatggctgctggggttcggacgagagagagattttccctccagcaccctggaccctcaggggagggcagggggcttcgcagcgacgggggctcccaaggactccacccggatccagctgctcagctatctgggcaaacagtgggcaccgggcacacagtaagggatgtgggagccggtcagattgcaaggggtgggagtcgtggagagagagaagttccagaggcaacgagaaaagaaaagg

SEQ ID NO: 54536 - DNA, 1601 bp, Homo sapiens
  chr17:71306966-71308567
  hyper
cctcagccccggctcccgcccagctctccagccctcccggccggggcactcaccggctgacgggatccccgcgggcaggatggctcctgggggacgcgccgggggcagggggcagttttgtaaccccggctgggggcgctccggagagggggcggggccagggacggccgatccgcgcgcacccgccccaagcgggcgattaaatcattaaccgaccgctcccgcctgcgatcccgctgagcgcgctgagctcggggcgcactagcccaggagcggccgtctccccggctccaagggggcgggtggctcgactgccctccccccgcaccccgccaggaggcgcctcggcctcccgggcttccgagggagcgggcggggcgggagcctggcgggggagggaagggttcgcggggcgggagtaggggaaaggaggaccatttgttccttcggccattcccttccagacagctccttccctctggcttcccggccgggtgacattgggtggcgtgtgctgcagtgtgtgtacgagagcgagatgtgtacacgcctctgcccgtacaggcggagaattcggttcttattcatggagaactccgggcgcacacacgcccccctcgcggagatcgcgggccgcgcgccgccgattgctgcgctcctgcccacaccgacacacaccccattcctgggaagggggaggccctttaaaaccggcccccaaccccctcagcggcacccttggccagggccgggagttccagcgtggagagaggaaatggagtcccggcaacgctgcgcccggctccctgccacctcctcctccacacatcccgctctgccaggacactaggtgcgcagcttagggtcccaggcaccgcggtgggcgcggtgaaaagcgcgagcgccgagaagtgggggctccgcgcccttctccccgcgccgcggcctcgcatccccagcttcgatcctctctgccccacagggggactcgagacccccaagcccacccagggcacccagcgcgaaggcggctaccacagacagaggcggttgcccgtcgcctacctcggtccccggagacccgagctctgggccggctgcgctgtccccttcgtgggctccgcgcggcggaggggctggcggcccctgtcagcgccggcgtttgtttccctctggctctcgggctttcagggctgggagcctccaggacactccccttccaggctccgcccgcgcccgccccgcgcaaccctccccgcgcacccctctgcgctgatgtcacggcgccgcagcagccaatggccgtcgggaacctctgcccgactgctcggcctcctcggttcaaactgaaagcctgagactttcccaactccgtatggggcagcctgggcccgcccggcttccgggagacactcccgccccagcctgcgctccggccgcgaacccccactggggcccccagggccaggggcgcgtctccctccgggggcctggcgcgaggctcttttgaggctcttccccattcgagccggggcaagaaaccaagaactccagcccgggtggcgttcctcgttcctgctccctcccggacctgctaacca

SEQ ID NO: 54537 - DNA, 30 bp, Homo sapiens; identical to SEQ ID NO: 11477
  chr17:71469605-71469635
  hyper

SEQ ID NO: 54538 - DNA, 30 bp, Homo sapiens
  chr17:71639300-71639330
  hyper
ccaccctcaggaagcgggcagcgcagatca

SEQ ID NO: 54539 - DNA, 297 bp, Homo sapiens
  chr17:71639570-71639867
  hyper
tccaggcccgcgcagcgaagcacccccagccccagcggctggccgagcagccaggggcgggctcccgtacgtggccaagccgggcaattgctctccccgggcgagcaacccggcatccagcgctcgcccaccccactccctcgccccggggaggccatcgcctgcccggcaggggccctgcccttccccgcagacaccgagcagggaaccaggagctcggtctgggaagctcagcgtagccgagcgtggagcccggcacggaatgtcgctcccctcccaagccggcgcagggcagcc

SEQ ID NO: 54540 - DNA, 454 bp, Homo sapiens
  chr17:71640083-71640537
  hyper
aggccggccagctcccgccgcccctcccccgcccactctcccagccccctccctgtccccacgtgggggtccctccttaccttgggctctggccgcgcggatctgatgcagagctagcagtgtccagatcaaaagcccccacatggtgaccagcctggagaggggtcctcggggtctcccttccctccgccctgttttataatcctggtggggtccgataccccgtggcttagtcccaggaaacagtcagtctacgcggctccgtgccccggggtgtaatatgcccgggaggggcagcgcttggctaccccaacccttcctcctcttctgtactagtccgagcccggcagcgcgcccggaaggcgaggggcgagcagggagaaagaggccaggccgccctctcggactagggcgcctctctcccttagcaccccaactccgacttctcccaaac

SEQ ID NO: 54541 - DNA, 30 bp, Homo sapiens
  chr17:71640833-71640863
  hyper
caggcagcatctggcggggccgaaccaccc

SEQ ID NO: 54542 - DNA, 30 bp, Homo sapiens; identical to SEQ ID NO: 11478
  chr17:71641654-71641684
  hyper

SEQ ID NO: 54543 - DNA, 250 bp, Homo sapiens
  chr17:71897913-71898163
  hyper
gtatacatcttggttctgcagcgagtggagggaatgaggagggcctttcaagggaggcgggattgcattcgcacctgattacgctgcgcggacacaacagaggcgcccggacccgcagccctgccttcgccgcctttgctgggctgtttgcgcttcgtttccttctcgccgccccatggcgcgctttctctcttctttatttcgccggttctccccgctcctaacctgcttaacaacttacctcgctctc

SEQ ID NO: 54544 - DNA, 252 bp, Homo sapiens
  chr17:71898228-71898480
  hyper
cgtggctgcgccagcatttaataaaagctgctgaccgggaaatccgagctaactgaattacttcctcattaaagaggcgggcagattcttgggccccgcgtgcagccaccctcgctgcctccctccccgccccgctccgccctgctggtcccgcctgccgtccgcaattaggcggcagatgcttgccgcccggtggtggcctgggttctgcagggactgagggggctcgtcggcttctctccagggtggatc

SEQ ID NO: 54545 - DNA, 888 bp, Homo sapiens
  chr17:71948433-71949321
  hyper
cccacccacaaaatgctgaatcggtgggtgagatccccatagcaacggctccgatgccagaacccaggattacgacaccggatcagccagagacgcgctggaggggcccaggaggggctgcagcgcgccgcaaatcccccggggcttacgggagccgctctttaggagacagcgctggacgaaccgggcggggtggggatggataatcttcaggcgccaacgcaaaacggccgcaagacgtggccaggccaggaggctcctgggtcccgggcccgcgatgtggcccttgcgcggggacaaagacgaggccatcgccctcacgtgttcccaaagacgcccaacctcatcaggaggccgccccatccgccacctgggagcgtcccacacgcccgggcccttgaggatgtcccctcggcgatgtgcctgaccgggcgctccccgcccgccaacctccaacctccaacctccgccctccaccctccaccctccttgctctgtccgcgtggacgcagcccccggttcagacactagcgggtgcgcggggccgcccaggacggcgggagaggacggggccctccctcccctctggtcccccaaagctccccggacgccgcggccgcgccccctgccggctccctccggccggctcccgcgtcccactggggctcctctcccgctgcaaggtcagcgcttccccgccccacgccctccacaactccccgcccttccgttcctgctgccgccgccctctccacccaggctcctgtcacccaccacgggagttcacacgctccagtccatcggcctcccccggcccgaccgccctggctcaggcaaatcccagcctgcacttcccgaaggaagtcccctccacgcacacaccctaca

SEQ ID NO: 54546 - DNA, 225 bp, Homo sapiens
  chr17:72208726-72208951
  hyper
tttgcggttacaggacgggtgggggcctctgcatatgtgcagagtacggagggcccagggacgcgaggctccccgatgggcaacctcccctgcctttgcttttccccagagccccctcctggcctgcgttcggcatcttctcgggtcgtcatcgccctctgcggtgcctgcgctcggggtgagggtttttgtcggcttttgttacatcaccgatgtaacagtgcc

SEQ ID NO: 54547 - DNA, 52 bp, Homo sapiens
  chr17:72209160-72209212
  hyper
tgcaggcggcttcagcgagttgttggggcagatgcgccgggagctcccgagg

SEQ ID NO: 54548 - DNA, 52 bp, Homo sapiens
  chr17:72209565-72209617
  hyper
tgcagcgggctgcgcgcccagaactgggactgggatcgcggcggggcggggc

SEQ ID NO: 54549 - DNA, 30 bp, Homo sapiens; identical to SEQ ID NO: 11480
  chr17:72210263-72210293
  hyper

SEQ ID NO: 54550 - DNA, 164 bp, Homo sapiens
  chr17:72270295-72270459
  hyper
ggcctgcgcttccgacgtggcaggaaaggagtcacgtgctccggggtccttccgcgtcgccccgcgcgtccggagccaggccggggttgccaagcaaccggtaaacgccgccgtttgaggagcaccggagccgcgaccgtggattgaacgcttccccagagacc

SEQ ID NO: 54551 - DNA, 41 bp, Homo sapiens
  chr17:72322128-72322169
  hyper
aactgacacggaggcgccaggcggacgcacggacgcaccga

SEQ ID NO: 54552 - DNA, 112 bp, Homo sapiens; identical to SEQ ID NO: 11482
  chr17:72353147-72353259
  hyper

SEQ ID NO: 54553 - DNA, 99 bp, Homo sapiens; identical to SEQ ID NO: 11483
  chr17:72353416-72353515
  hyper

SEQ ID NO: 54554 - DNA, 1927 bp, Homo sapiens
  chr17:72427015-72428942
  hyper
gcctcccctccccctcgcgggcgctcagggttgagcaaacactccgggccgcccgccccgccaccagctggctccgaccggcgcaccgctggcgatcccccaggcaattcggcgtcatgagaaccggcaccccgagactcggcgccctgccctccctccgcgtctccagggccctggccaggcccaacaacctctccctcctctgtgcgcctcagcccctacgggcctctggcgcgggctaactaggcctcgctgcgggcccccaggactgcgcaccccaccccccgcgaggccagcagccccgggggaaggcggccggaaaatctcttgtttatcgggctggataagtaccagcctggattcgcttcccaatttctgcggtccagcttcagcagattcctggggccggaggggaaagggtggcaacccacagatccaccccggaacagggagtggggggtggggctggtgggaacctgacctcctggaaaggacggactcggagtcagagccaacgtgtcccggagcgcagaggcccagggggtcgcgctaaacactgtacctcggggaacaaaaccgtgaaggctaattaggacaagtcggagcagggaacggggacgccgggaggggagagcgcgctccgagttgggcagaacctggaacggtcacaggaaacccgggcgcggggtagtcgggccgagggggacctttgcccacggtccagagtggtctggactcggcccacgcgtgagaggagcgcttggtgacgatcccacgtacgcttggtgactggtggaggtcccagagaaggaccgtgcgtgcaaaaggcgaacctcggtgtgcggtgtgtccacgtgtgcaagctggggaggggagggggcgcagaaggcgtgacaaagacggactctgtcttgagtgtgcgcctcgctccggcccgctcccagcgaactgtgcctgaagtgtgtctcacgggagggccaggacgaaggtgacaaaggctaggtgtcccccacggagacgcgccaaggtagccccgcgcgtgtccgtaggcgcgctctctggaagacgcggtggggggtgcgcagggctgcaccctcacaccaattgccccggcgaaggccgagcccagaaagtgagtgcgcgtgagtgtgcgcgcgcccgcatgcgggggcgtggcagtcaacagcaacaacccacacgccggcagggccagaaactcccatctccctcaccagccggaaagtacgagtcggctcagcctggaggtgagtcggggcggggagggccgggcaggctttgttcctgtgtaaacggagcgcacgtacctggagcgcggcgggcgcccgattagcgccctgaatggaggtgatgtaacggtgatgcaggctccagcccaccctcgccgaaagcaaggagccctgcctggggacaggcccgcgcgagagcgagcaacccagcgcgcctggctcagcctcggtcccagggagaggcaggccctgcgtcccggcccgggccccgccatcccagccaggaccgggcctggcccagcgccccgcgccgcgtccctcccacccccgcccgccccccgcctggggctggagttggccccaaacgctgcgctggagcggggccggcggcgagtcccaggtaagggctgctgccttcccgctccgccgcccggaagagtcgggtcgggacggcggggagtgggcgagggcagaggcggggggactggacatcctgcgggctggggacgccgcgccaactccgctcggtcgctgaaagttttcaaacccgagccggctggggactgggggggtgggggagcccggcgctgcggctcgggctggagggaggggaaaccactccataatcggggtctccaagaggagcccctccaccgcctgcctctcggtgggagtccgcg

SEQ ID NO: 54555 - DNA, 30 bp, Homo sapiens; identical to SEQ ID NO: 11485
  chr17:72439029-72439059
  hyper

SEQ ID NO: 54556 - DNA, 374 bp, Homo sapiens; identical to SEQ ID NO: 11486
  chr17:72449938-72450312
  hyper

SEQ ID NO: 54557 - DNA, 337 bp, Homo sapiens
  chr17:72450330-72450667
  hyper
cgaagccagctgtcccagctcctgctgtagcctgggggccgggccgccgcgctccgcccatccccgccctcagagctgggcctcgcagccgctagggattgcgggggccgcatttatccctgtgtctctcaggccccgcagagacgggggtggggtgggtgacgccagggaagcaggccccttttcccaagggaagaatccccttccggaggcccgccgggccatggagtttccgcgggtggaggtagtgaggccaagggcacggggagccctgtcgctgccttacgtctggctctaggccggggttcctcggctccaccagcgacatttgtggccg

SEQ ID NO: 54558 - DNA, 30 bp, Homo sapiens
  chr17:72612278-72612308
  hyper
gaagtgaggtcagaacgggagtgatggggg

SEQ ID NO: 54559 - DNA, 30 bp, Homo sapiens
  chr17:72638272-72638302
  hyper
cagtcacttaatgagcgtctactaagtaaa

SEQ ID NO: 54560 - DNA, 249 bp, Homo sapiens
  chr17:72732949-72733198
  hyper
gccatcggcggaggcgcagcccaggggtccccagctccccgcctcgccacctggggacagcccacggcccggggctcgggcgccgcctgctgtcgcggtgcgcagcgactacgggaactcttccgcagcagacggggtccccgcggcccgctcccccaggggcaagcaagcgaccacaggggaccggtcccggggctggatgtggctcatgtccgaagcgcacggagccgagccggtgttgctcaggga

SEQ ID NO: 54561 - DNA, 30 bp, Homo sapiens
  chr17:72733435-72733465
  hyper
gccacccgggatggcgaggcccccgagcgc

SEQ ID NO: 54562 - DNA, 183 bp, Homo sapiens
  chr17:72733757-72733940
  hyper
actctggcaaatatgagcccccgggagcccatgcttcttggtgagggttaagcgcgcaactctcggggctcaggctgggaagggctgggagatggggaccgaacggagactcggagaggacgtcccctgctggcagaggaactggcgttaatgccattttccgagctaagctcttagttgaga

SEQ ID NO: 54563 - DNA, 30 bp, Homo sapiens
  chr17:72857080-72857110
  hyper
cctttccaacccctcgctctggtggatccc

SEQ ID NO: 54564 - DNA, 30 bp, Homo sapiens
  chr17:72857996-72858026
  hyper
gggcaagtgcgcctcggaggacacaccagc

SEQ ID NO: 54565 - DNA, 30 bp, Homo sapiens
  chr17:72869046-72869076
  hyper
cagcgccagcagcgcgaagccatggctggg

SEQ ID NO: 54566 - DNA, 591 bp, Homo sapiens
  chr17:72889430-72890021
  hyper
cgcgccgccacctccgccgcaccccgcccccacccgcagcccggccgggacgccgggtccccgcgttcctcacctgccggcaaggcgaagaggctgagcgcgaggatggcgcagtccacgccgtggcgctcccaccaggagctcgtcctcaccacgtcctgcaccagcacctccagctcccgcagcagcgcctcgcccccacggtgcgcgctccgcgccggttccatgggctccgtaggttccatgggctccgtgggttccatggactctgtgggctcgggcccgacgcgcacggaggactggaggactggggcgtgtgtctgcggtgcaggcgaggcggggcgggccggggcggagtcacgcgccgcctggggacacccgcccccggggtcaaggtgcgagacaccctggctcctctgctgcgggcgctggcgacccaggcccggctcaggcgcgcgaccctggcaggcggcatcagaaccgccgcggagggaggagccaggccgatgagctgagagtggctaggcggggaggcgaccctgcggtgagacccagcccaggtagtagggacggaggcgtcaggggcacgga

SEQ ID NO: 54567 - DNA, 66 bp, Homo sapiens
  chr17:72919340-72919406
  hyper
caagacatctgaaacgctcacccgggggcgggggcggagggggcgggggacgaaatctcccgctgt

SEQ ID NO: 54568 - DNA, 734 bp, Homo sapiens
  chr17:72920294-72921028
  hyper
tggagccaaactcccgcagctgtaaatcaccctgtcctcctgggtataaagcgcctgtccatctcggcgtgggagagaggagacgctcgccgtcccctgacccccagctcagcgccggctccaagcccagccaggtgggtgccccgggccggagggcagtcggacttggggagtggggaccttggaggggtccaaccgggtgctgccgcttctcctttcttcccatccagcgagaggggcaggttccgcattttctcttcccctttcccagcgcttcctccagcacccgaagccccaaccctgcgggtcaggaactccctagtccccaagtctagggatgagatgggggaaggagagccgtcagggttgacctggagttttgtccgctcctcccctacagtgatccctctagccttctccagtcgcctccgccatgtccgaggagctggcccagggccccaaggagagccccccggcgccgcgtgcgggccccagggaggtgtggaagaagggtggccgcctgctgtcggtgctgctggcggtgaacgtgctgctcctcgcctgcacgctcatcagcggcggagccttcaacaaggtggccgtgtacgacaccgacgtgttcgcgctgctcactgcgatgatgctgctggcaacgctctggatcctcttctacctcctccgaaccgtgcgctgcccctgcgcggtaccctaccgggacgcgcacgctggcccca

SEQ ID NO: 54569 - DNA, 105 bp, Homo sapiens
  chr17:72931842-72931947
  hyper
gggagggtaattaacgagggattaatgagatttccaaagtcaacagaaaaatcgatgggccgcggagcccgagcggcggctgcgcagtcccgctgggggagggcg

SEQ ID NO: 54570 - DNA, 592 bp, Homo sapiens
  chr17:72932011-72932603
  hyper
cggcgatgcctctcccggcctcaggtaagcccggagcgccggcggaactttcccagcttgcgcaccccagacactggcacatactacccacccccccaaaaggggggttcacaagtaggggctgcagggattggaacgggaaagcggggtgactgtggagaggtgaactccctttaatctgaggccggcccctccacccgccccgcaacccgcgctccgcgcccctactcctttccgtggacccggggagcacagagggcctcagggcgcgactcctcccggccgggtccacacagcagaaagcgcggaggcctggggtgtgaggttggttggggctgtctggacgcccggtctggggcacgcaggaagcggctgccccggccccgcagtccctaaaatggctcggaaggaaatcccgagggcgcccgcactcagcagcctcctcggagccggccctgcgctgctgggccgggcgccgggcccgacggctccgcggctttcatcgccaatccagccgagacccacaaaccagtccagtgtcccggccctcccttggactggcgtcgcgcccaggggcgtgccagggggcggc

SEQ ID NO: 54571 - DNA, 48 bp, Homo sapiens
  chr17:72968520-72968568
  hyper
cttccaggtacaggccgcggggtcccgttccggcgctggccttggcgt

SEQ ID NO: 54572 - DNA, 128 bp, Homo sapiens
  chr17:72968953-72969081
  hyper
acccgcggagtcggcggttccaacccagcgccgccgcacgccgggtgccttctcaggtcccacccggagcctcgacgctcttccttctgcgtcggagcattgtacccgcctccgctgctaccacgcag

SEQ ID NO: 54573 - DNA, 905 bp, Homo sapiens
  chr17:72983605-72984510
  hyper
gacaccaggagggtcccgccctcggccccgcctccagctttgcatacatctcctgattggtcggcggcggcaggccccaccccgcggagccgagctccgcaagctgcaggcgggctccgccaagatgcagcggcggctccggttgtcgccgggcgggccaggagcagcgcggacccgagccgggcagggggcgcccgccacggcacccgcgcgctcctagcgccccagacccgcctgcgggcccggatcctccttgccactgtcccacccgccgtccctgccactccaccctttgtgtcgccgcagcccggtgcccccggctctgcgggaccccggccgggccggaccctggcaaagcgccaggccccgcgtgggctcccggcgagcggttgatggcgagggggcgcggcgcgggctctgtagcccgagttcccgacgctggaggcccggcccgcctcagccgcattgtcccgggccgcgcgcaccggccctgagctgcgccgccgcagcacccgcccgccgcccgcggggccatgcggagagccgccgggatggaggacttctccgcggaggaagaggagtcctggtacgaccagcaggacctggagcagggtgagcgcgggggcgaccgggacaggaaggcggggagcgcccggtgacccctgtccgcttctccattgttgggcgctatcaccccgggaggggctgggctggaccgggcgcgcccgactcggaggagggacgcgtctggagaaccgggacgtggagagagggggcgctgccggagaagacgcggaccggacgggcggagacctgcaaaagtggggggcggggggcggtcttcctattttcccagacgaccgggcatccgtcatccagctcgcccaccccgtcctggaggcagc

SEQ ID NO: 54574 - DNA, 116 bp, Homo sapiens
  chr17:73008759-73008875
  hyper
gaagcagtcgcaagacctgagcatggcggccaccaggtgcctgcgctggggcctgagccgagccggagtctggctgctcccaccgcccgcacggtgcccacgccgggcgctgcaca

SEQ ID NO: 54575 - DNA, 30 bp, Homo sapiens
  chr17:73009127-73009157
  hyper
ggtgctcgctgtagcgcgagatgtgcagga

SEQ ID NO: 54576 - DNA, 31 bp, Homo sapiens; identical to SEQ ID NO: 11493
  chr17:73029808-73029839
  hyper

SEQ ID NO: 54577 - DNA, 82 bp, Homo sapiens
  chr17:73043060-73043142
  hyper
acggaagtgggtcacgggaagatctttcctcagccaaccccaaagccaagggggtgggccttgcttcgcagatcagccaata

SEQ ID NO: 54578 - DNA, 223 bp, Homo sapiens
  chr17:73073460-73073683
  hyper
gggccgccactaggacgggaggtggaggtgtccaactcgtgggtgtgcctgggcgtcacctacccccgcagctccccgctcggcggccgcccgagccgcagcgtggtctacctgctgggccgcaaccccttctcgtggtgcctggagtgggacgacaacgcgcagaccgtgctgcacggcgcctaccaccgcacgctgggcgtggcgctcgactgcgacgccg

SEQ ID NO: 54579 - DNA, 86 bp, Homo sapiens; identical to SEQ ID NO: 11496
  chr17:73073967-73074053
  hyper

SEQ ID NO: 54580 - DNA, 19 bp, Homo sapiens
  chr17:73110676-73110695
  hyper
cgtcgcaagcagttgtggg

SEQ ID NO: 54581 - DNA, 233 bp, Homo sapiens
  chr17:73127280-73127513
  hyper
taggtcgttcatctcccgcacagcgtccaaggctcccgggatgggctccaggtccaggaaaaagcccggggcttcgtacacactggccactttatcctgaaagacaagagttctgggtcccggcttcccgttcccgcgaggacccgcagggaggctcctgggggctccgggcccgagctcagaggggcggagggggcgtcggtcaggggcacgcgcccaaaggctcctcccca

SEQ ID NO: 54582 - DNA, 253 bp, Homo sapiens
  chr17:73127891-73128144
  hyper
ggctgatttgcatagagtgtccgggccgccccgcccaggtcgtaaaccagtgccgacggccctgcggttgcgcgaggccatcctagggttcgggtgcagggacggctttggggggcacttttctgaccctgcgcttcttcgggacccagcctttgtccccatcagccgcctcccactttacggcagacgtacccccgttcaccccacgttactagtaggggaccgaccttccgggggcccaacaaagggatgc

SEQ ID NO: 54583 - DNA, 30 bp, Homo sapiens
  chr17:73149989-73150019
  hyper
gagagacaggagcgcgtggcccatcaatgg

SEQ ID NO: 54584 - DNA, 30 bp, Homo sapiens
  chr17:73201965-73201995
  hyper
gcttccctagtggtcgcgaggcgctcgtcc

SEQ ID NO: 54585 - DNA, 30 bp, Homo sapiens
  chr17:73257776-73257806
  hyper
gccgcgccagactgcgacggatacagggag

SEQ ID NO: 54586 - DNA, 30 bp, Homo sapiens; identical to SEQ ID NO: 11498
  chr17:73285310-73285340
  hyper

SEQ ID NO: 54587 - DNA, 30 bp, Homo sapiens
  chr17:73285838-73285868
  hyper
cggtagacttgacccgctttcctcaaactc

SEQ ID NO: 54588 - DNA, 70 bp, Homo sapiens
  chr17:73401910-73401980
  hyper
gcgccagacctccccgcagcaggtggcctccgcacggctccgcccccgggtcgccgtaaccctctcggtg

SEQ ID NO: 54589 - DNA, 84 bp, Homo sapiens; identical to SEQ ID NO: 11499
  chr17:73422367-73422451
  hyper

SEQ ID NO: 54590 - DNA, 30 bp, Homo sapiens; identical to SEQ ID NO: 11500
  chr17:73452533-73452563
  hyper

SEQ ID NO: 54591 - DNA, 450 bp, Homo sapiens
  chr17:73511035-73511485
  hyper
gtttctcggtggcagcgaatttactgccagagtcttgtggcatgagatccgcgcaggcctggggccctggccgggaacccctcactccccaaacgtcccaagcccaacccaggggcactcccacgcggagcccgcggccgacacgggcggagggcgcccttggcagtgcctggggtcgggctggctcccccgccccccggaatgtccctccagcgcctcgcaaccccccagcccagcccagcccagcccaggcccaccggggaacaaagcggcgggagaagccgggcgggccaagcgcccgaggtataaacgcggaggatggaaaaaggggcgcgaggaggacggaaggagcggggagatggaggtgcccgccgaccccgcaagaaaagttagtttgcgcccgcccccaggggcgctgacccccagcgcgggccccgcagcctcacctct

SEQ ID NO: 54592 - DNA, 34 bp, Homo sapiens; identical to SEQ ID NO: 11502
  chr17:73521009-73521043
  hyper

SEQ ID NO: 54593 - DNA, 99 bp, Homo sapiens
  chr17:73522039-73522138
  hyper
ctcgcccctgtccgcgtcgctgtgctggcctggaagagagacacctgtagaaagttctgcgggaaacttctctgcctgatctgcgcgatgactgaaact

SEQ ID NO: 54594 - DNA, 44 bp, Homo sapiens
  chr17:73522382-73522426
  hyper
tgtgcctcctaatccccggacgcaggaagcccgcgggagggact

SEQ ID NO: 54595 - DNA, 71 bp, Homo sapiens
  chr17:73522482-73522553
  hyper
cggagacccagtctgccctccatgctgacgggcggggtttgcgctgtgggatttggcgagaagtggaaaat

SEQ ID NO: 54596 - DNA, 209 bp, Homo sapiens
  chr17:73585912-73586121
  hyper
gtggggaaggggtgtccgggcttcgtcgcggctccctccttgccccgactgcacccgacgggccttccctcgacgagagcggctccagcagtgaggcggagttggagaccctcaatgacgagcccccggtgcgctgggcgcagggctcaggcccccacgagggtcctaggcttggcgccgccgtgctgctaccccgactctccttggag

SEQ ID NO: 54597 - DNA, 30 bp, Homo sapiens
  chr17:73629230-73629260
  hyper
cccaggagtccgtgcgcccgcacagcggcc

SEQ ID NO: 54598 - DNA, 30 bp, Homo sapiens; identical to SEQ ID NO: 11506
  chr17:73663342-73663372
  hyper

SEQ ID NO: 54599 - DNA, 30 bp, Homo sapiens
  chr17:73717537-73717567
  hyper
ccccccaacccccgcgcccgccctcggaca

SEQ ID NO: 54600 - DNA, 31 bp, Homo sapiens; identical to SEQ ID NO: 11507
  chr17:73760184-73760215
  hyper

SEQ ID NO: 54601 - DNA, 30 bp, Homo sapiens
  chr17:73780896-73780926
  hyper
ctcggcgcggaccgcgcagactgaataata

SEQ ID NO: 54602 - DNA, 122 bp, Homo sapiens
  chr17:73781200-73781322
  hyper
caacctgctggggccggtcccaactgcctccaactgccaccaacctctggtcgggctgtggggcgggaaactcggtcccggccgccgagtggggaaggcgggagctcgggatgcagagtgca

SEQ ID NO: 54603 - DNA, 30 bp, Homo sapiens
  chr17:73851684-73851714
  hyper
ggttccacattttgcgtaaccaatcggctt

SEQ ID NO: 54604 - DNA, 30 bp, Homo sapiens
  chr17:73851963-73851993
  hyper
acgcggtgggctggcggcgtcggatcaccc

SEQ ID NO: 54605 - DNA, 46 bp, Homo sapiens
  chr17:73874666-73874712
  hyper
cggcctgggagggacccgggccgttcgcgccgcggcacctccccct

SEQ ID NO: 54606 - DNA, 30 bp, Homo sapiens
  chr17:73937171-73937201
  hyper
gcggtcgactcacccgccctcacagaggag

SEQ ID NO: 54607 - DNA, 30 bp, Homo sapiens
  chr17:73937401-73937431
  hyper
ggccgacgcggaggcgtgagaaatgtgttg

SEQ ID NO: 54608 - DNA, 112 bp, Homo sapiens
  chr17:73993494-73993606
  hyper
cctctcctcccctgtccctcccggcttattgctttatgagccagctagaatcgaggccacaggcagccgttcttcctcctaccatcagacactgaaacggccaccgaccatc

SEQ ID NO: 54609 - DNA, 152 bp, Homo sapiens
  chr17:74068652-74068804
  hyper
ggctgatgggatagcggcggactccgccgccgtcggcccttgctgcagcagggcgccatgtgctggagcgcgcctgcgcgagggatcctgtcatcccgggtccggaattgtggctggctaggtggggacttgaggccgcagtgagaccgtgg

SEQ ID NO: 54610 - DNA, 119 bp, Homo sapiens
  chr17:74071601-74071720
  hyper
gacgcgtttgtgcgcgttcatctcgcttgagcttaatgccctccgtgagggtgggataggacaaagtgcccaatatacagaagagttgagttcctaagtaactcgctcagagtcgccag

SEQ ID NO: 54611 - DNA, 30 bp, Homo sapiens
  chr17:74072090-74072120
  hyper
cctggggaggaaatccgggtatttcccctc

SEQ ID NO: 54612 - DNA, 284 bp, Homo sapiens
  chr17:74072426-74072710
  hyper
ggagactgtggttgcagtccccgggggcagcgggagaatggcttgaaggcacacctttcctgctgccgggcccgccccatttccaggctccgctgagtgtctgggacacgctgggaggcccccacctccgccctcacgccgagcctcacccccacctcctctgtgtgcggtgtaaccatgcgctaaggaccttcctcgagagcagccttgggaccgaggtgcaggggtcgcggccctccagcatgaatgtgcccgctcagccgacgtctcccttcccggtctga

SEQ ID NO: 54613 - DNA, 591 bp, Homo sapiens
  chr17:74072998-74073589
  hyper
cgtcgacccggtggccgcgggctcgggtgcccggcgcgccaagcgcaaggtgacacgcatgatcctcatcgtggccgcgctcttctgcctctgctggatgccccaccacgcgctcatcctctgcgtgtggttcggccagttcccgctcacgcgcgccacttatgcgcttcgcatcctctcgcacctggtctcctacgccaactcctgcgtcaaccccatcgtttacgcgctggtctccaagcacttccgcaaaggcttccgcacgatctgcgcgggcctgctgggccgtgccccaggccgagcctcgggccgtgtgtgcgctgccgcgcggggcacccacagtggcagcgtgttggagcgcgagtccagcgacctgttgcacatgagcgaggcggcgggggcccttcgtccctgccccggcgcttcccagccatgcatcctcgagccctgtcctggcccgtcctggcagggcccaaaggcaggcgacagcatcctgacggttgatgtggcctgaaagcacttagcgggcgcgctgggatgtcacagagttggagtcattgttgggggaccgtggggagagctttgcctgtt

SEQ ID NO: 54614 - DNA, 31 bp, Homo sapiens; identical to SEQ ID NO: 11512
  chr17:74132738-74132769
  hyper

SEQ ID NO: 54615 - DNA, 250 bp, Homo sapiens
  chr17:74136743-74136993
  hyper
ggatcttttagtgccgaggtatgggaaacagaagcaaggccctggggtcccacccccatcagatctgcctccctcttcctttcctcttcgaggttttattagccaaatgaagagggtaggggcatccgaggctatccttttctcccgaagagcaggaaatcaggacccccttcctcctcgcaacaaatggaagtggggcgagaagtttgggagggcggtacgacggggcgggggcggtggaggtcctctg

SEQ ID NO: 54616 - DNA, 42 bp, Homo sapiens
  chr17:74137493-74137535
  hyper
aactccctccttctgccgccctctcccgcgccacccaacccc

SEQ ID NO: 54617 - DNA, 30 bp, Homo sapiens
  chr17:74137754-74137784
  hyper
tcaggctcgggaaccgtatccttgaggttt

SEQ ID NO: 54618 - DNA, 238 bp, Homo sapiens
  chr17:74236236-74236474
  hyper
acttgggcgggtagcggtacacggaattagacgggatgtccacctcctccacgcccgcgtgctgccggctcgtcagggcccccatggccgctgcggctgcagccccggcccggccccggtgcccgcgccgccctccgcgcttcaccgcggccgcccgccccgcgcccggtgcgggggccgactgcccgccgcggccggctccgctgcggcgctgcggctctggcggcggggagccccc

SEQ ID NO: 54619 - DNA, 106 bp, Homo sapiens
  chr17:74236843-74236949
  hyper
ctgggaccccaggagacgagcgctgcacccggccgggacgcgtcgcccctccgcgcctgtttatcccggctcggattaccgcgcagggagccgccccctcccgcgg

SEQ ID NO: 54620 - DNA, 30 bp, Homo sapiens
  chr17:74237195-74237225
  hyper
gcgtctattcaaagcgctcccaactctata

SEQ ID NO: 54621 - DNA, 30 bp, Homo sapiens
  chr17:74261234-74261264
  hyper
tgggcgcggccgggcgaaaagagaaacagt

SEQ ID NO: 54622 - DNA, 110 bp, Homo sapiens
  chr17:74350285-74350395
  hyper
ctatggtagcacagcgcccgccccacgaggcgcgtgcgccggccggagattaatttgaaaagtagagggcgggggttctttccagctggttgaccgcagtactgaagcgg

SEQ ID NO: 54623 - DNA, 30 bp, Homo sapiens
  chr17:74379907-74379937
  hyper
gggggcggggggcacgtaccacatgcttgg

SEQ ID NO: 54624 - DNA, 112 bp, Homo sapiens
  chr17:74381537-74381649
  hyper
ccgccgcagggaatgacgccggtgctcctgcagccacggctccgggcggggaaggcgagccccacagccggccctgcgacgcccgcctgggcagcaccgataaggagctgaa

SEQ ID NO: 54625 - DNA, 30 bp, Homo sapiens; identical to SEQ ID NO: 11515
  chr17:74497094-74497124
  hyper

SEQ ID NO: 54626 - DNA, 30 bp, Homo sapiens
  chr17:74497638-74497668
  hyper
tgggttcctgcctccgccctccacccagct

SEQ ID NO: 54627 - DNA, 161 bp, Homo sapiens
  chr17:74533830-74533991
  hyper
cgggggacagccagcggtggggcggggatgtggtctgctggaaaatgtttaaaaaaacaaatccgctccaaacccccagccccgtgtgggtaagagccaatgccggcaaggtgaaggctgcgcggggtgggggcgacgcgactgccgcccgcccacccgca

SEQ ID NO: 54628 - DNA, 647 bp, Homo sapiens; identical to SEQ ID NO: 11517
  chr17:74581100-74581747
  hyper

SEQ ID NO: 54629 - DNA, 30 bp, Homo sapiens
  chr17:74707256-74707286
  hyper
ctgggcagccttgacgctttggggcacaat

SEQ ID NO: 54630 - DNA, 30 bp, Homo sapiens
  chr17:74722082-74722112
  hyper
gcgtgaggccacgtcgttcctagagccacc

SEQ ID NO: 54631 - DNA, 225 bp, Homo sapiens; identical to SEQ ID NO: 11518
  chr17:74732258-74732483
  hyper

SEQ ID NO: 54632 - DNA, 262 bp, Homo sapiens; identical to SEQ ID NO: 11519
  chr17:74732943-74733205
  hyper

SEQ ID NO: 54633 - DNA, 30 bp, Homo sapiens
  chr17:74733667-74733697
  hyper
aggccggacgatcgcgattgggcaggagga

SEQ ID NO: 54634 - DNA, 30 bp, Homo sapiens; identical to SEQ ID NO: 11520
  chr17:74864287-74864317
  hyper

SEQ ID NO: 54635 - DNA, 1691 bp, Homo sapiens
  chr17:74864602-74866293
  hyper
ggcgcgggttgccctcgtcgagagccatgggcgcggcgcggcgcggggctgaggatcggcgcggcccggaggcgctggggaccggggcgcgggcccggggccgcctttagccggcaccgagggcgcggggccggggatgagggcgcccgccgcggggagcccgtctgcgcgccgcggcaccttcccgcccagcgagcgagcccgagcaggcagacgcgcggccggcggtctgggggcgcgccgcctcccggtccccaaaatgtgaagcggggagggcggagacgcagagacggcccggccgggcgccctcgccgccctccggcagccgcgccgctccctccgctgcacgcccaggcctgagcagcgaggccaccgggccgcgcgctcccagcttcgctcggacgcggcttcggcccgcagagggttcgtggcccggacgcggcgagagctgggcccaggacggtgcgtccggcctcgcccgcggctgctcgcaccaacaagtttgaacaatgatcaccgtcaaccccgatgggaagataatggtcagaagatgcctggtcaccctgagaccctttcggtaaagttccctcctggttggttttttccccaggggggcgccgggtggaggtgggcgaggtcggttcctgcgaacgttcaagtcctggtggcagagggggcggttcacacttcaacccctggtgatgaccagtggggctgggctgggggaacggatggcgttggggttcggggtgcggatggggagggttgtgttattcggggacctgtcccgagttgggcagggttggagaggactcggggtgcagaggtaagaatgggggcagaaaacccccaggtcgtggtcctgggcccagaaagttgccccagcctgcgcgccccttcccagcccctcagggtccttcctcaccccgcggacggtcccatccgggtggcaaagttagtgtgcggcgccttggagctccccctccggtccctcccgtcccgcccgtctgcccctaggtcggctaccccccaacccctccgcctgtgccaccctctccccagcctttggtggcactgctctcctccccgcggggctcgggcctggctccgacgagagggtcccgagattagagcgaggactcgctcatcccaggattcgcccccgatcgcaggcgtcggagaggcgggggcaggggcggcgctgcagggctacggggcggctggagccgaggctgcggcggagcgtggtgggcgggcggtggcgaaggcgacacgcttcgggcggccaacacctgggggcccaggccaggcagggctggggccgcgcgggactcactggacccagccaggggcccccagggcccagcggtgccggggcagccccctctcctcccaggcatccgcggaaccggcccgcagcggggtggggagggggcgctgcccagtggacgcccggcggggcccgagtgtcaccccgtgggtagctgggcagcgaggaagctgggggagtgaccgccccggcgcgggggccggactcgggacgtggccacaggtgggctccgggcgcgggaaggagcccgagaaggcggagcttgcaggggccctgaactcttgccctccaggtctcggcccagccccactgtggtccccctgccggctccagacggggatgggggcggggagacggtggc

SEQ ID NO: 54636 - DNA, 30 bp, Homo sapiens
  chr17:74965693-74965723
  hyper
agttccggccgctccgcccagtggctctgt

SEQ ID NO: 54637 - DNA, 114 bp, Homo sapiens
  chr17:75082777-75082891
  hyper
agggccatgtagtagacgcctgtagttttcgcctgtccaggacgccttcacccctgcttcctttgagaaaagtccctctcccactccaagtggtactgacggggatcacccaca

SEQ ID NO: 54638 - DNA, 30 bp, Homo sapiens; identical to SEQ ID NO: 11523
  chr17:75137660-75137690
  hyper

SEQ ID NO: 54639 - DNA, 790 bp, Homo sapiens; identical to SEQ ID NO: 11524
  chr17:75368667-75369457
  hyper

SEQ ID NO: 54640 - DNA, 623 bp, Homo sapiens; identical to SEQ ID NO: 11525
  chr17:75369492-75370115
  hyper

SEQ ID NO: 54641 - DNA, 491 bp, Homo sapiens
  chr17:75370185-75370676
  hyper
cgtgggccgggagcaccgaacggacacagcccaggtcgtggcagggtctagagtgggatgtcccatggcccccatccaggcctggggatatcctcatccgcctcccagaatcgggccgtgggggacagaaggggcctgcgtgcgggcagggagagtattttggctctctcctgtcttcggggtttacaaagtgtgttgggacttgcggggctgctctgtccaagcctgggtctggcgtccgcgtctctgagcctgtgagtgcgtgcgctttcctgcgtcctcttgactgccggtgctggggctctgcgtcctgcgtccgcgggagtaaatacagcaggcgaaggggaagctcacacaatggtctccagcgctctggggcagggcttctgaggggcgggcctgcctctgccgggacctggagcccccgcccctcggagaggctcctaggctgacttgggcagagccctctggtgggccgggagggggaaagg

SEQ ID NO: 54642 - DNA, 31 bp, Homo sapiens
  chr17:75392295-75392326
  hyper
tttctgacactgtgcacggtccacagttgtg

SEQ ID NO: 54643 - DNA, 379 bp, Homo sapiens
  chr17:75447462-75447841
  hyper
tccctacctctgccccgcgctctgggaggctccttgttccgcgaccacaaagcccctttgatcctctgctcggctctgagccatgtgacccggtgggcgggccgcggctctcggcgcgtccagcgcagcccgacgttccgctgctggggtgagtcctgctcctttgttcttcccagccttgcaccactggctcgggggctctcaggtggcgcggccgcgaggcggaccctgatggccatggtggcggtgccgggagccacgctgtccctgggccccggcccgaggccggcaggaccgagcggggtccccaggagaggggtggcggggagctcgatctccacgcggggaccagattttcggcctcaaaatagaagaatag

SEQ ID NO: 54644 - DNA, 633 bp, Homo sapiens
  chr17:75524568-75525201
  hyper
gggctgggaagaagatgcccccgaccccctctcgtggtcgccagggtaggggtgggaggaatctggaagccacgtgcgatgctcggagctgcgtcctctgtcctggggcgtgggtccgcgagcgccgcgcagcctcccggaccgccctgagctgctgcgcccggcgctgctcctccttccccagctccgcgccttcccctcgcgatccccctcctgcctcttcggtcctggaagcgtcccaagatggggtgggggcatggagggagagaggggaggagggagctgcccgggggcagtgccgccaggaagtgggacggggactctggcgcccctccaggctgctgcgcgcgggctggggaccgtgcaccgctttgcgcgccagacgatgcatcttctggaacggcagctgaggcaatgcggggtgtgaagtggcggcgggcagaggggctcgcaggggctgggatccgcgtgcccctctctgcctcggtgcggagcacgatgtgcccgggcgggggcgaggacgtccgggaggggctgggctgcgcacgctcgcggggccgtcgcagatgggcggtttggaggcgctgcagtccctgggaaatgggagcctccgtcctgttctctctgctgctt

SEQ ID NO: 54645 - DNA, 653 bp, Homo sapiens; identical to SEQ ID NO: 11529
  chr17:75953796-75954449
  hyper

SEQ ID NO: 54646 - DNA, 30 bp, Homo sapiens
  chr17:75955643-75955673
  hyper
gcagcggtgaaattcggtcctttccgggca

SEQ ID NO: 54647 - DNA, 30 bp, Homo sapiens
  chr17:75955906-75955936
  hyper
cagataacgtaacccgagcgcctggttgcc

SEQ ID NO: 54648 - DNA, 30 bp, Homo sapiens
  chr17:76124158-76124188
  hyper
ccagcactccgccccgaggcccaggcaagt

SEQ ID NO: 54649 - DNA, 30 bp, Homo sapiens
  chr17:76125137-76125167
  hyper
aagtaagatgccgccgaaagccccagggac

SEQ ID NO: 54650 - DNA, 30 bp, Homo sapiens
  chr17:76165238-76165268
  hyper
ctcggggcaggccacgggtccgccttccca

SEQ ID NO: 54651 - DNA, 155 bp, Homo sapiens; identical to SEQ ID NO: 11530
  chr17:76227981-76228136
  hyper

SEQ ID NO: 54652 - DNA, 30 bp, Homo sapiens
  chr17:76250627-76250657
  hyper
gggggtccagggagcgagccccgtggcacg

SEQ ID NO: 54653 - DNA, 59 bp, Homo sapiens
  chr17:76254667-76254726
  hyper
ggctggctggagggggccttgcgacataagccccaggtgggctgcctttcacggcgccc

SEQ ID NO: 54654 - DNA, 25 bp, Homo sapiens
  chr17:76254836-76254861
  hyper
cgccggggaggctgctgctgggaac

SEQ ID NO: 54655 - DNA, 30 bp, Homo sapiens
  chr17:76338190-76338220
  hyper
aggcctgaggaattcgcagccggcggcgcg

SEQ ID NO: 54656 - DNA, 30 bp, Homo sapiens
  chr17:76348834-76348864
  hyper
gggtcagtgacccccggtgacgaacgcctg

SEQ ID NO: 54657 - DNA, 167 bp, Homo sapiens
  chr17:76349230-76349397
  hyper
tcttcctggcagagggcggcctcgaggcgacgcgcctgcccgcccgccagcccggcggccgccagatctggaggggagtgggggcggggcgcaagaaggtgctcccagccctggggctcctgtcaccctcggcctcgatcatcccgccccgcgctcctgggaccgga

SEQ ID NO: 54658 - DNA, 207 bp, Homo sapiens; identical to SEQ ID NO: 11532
  chr17:76355659-76355866
  hyper

SEQ ID NO: 54659 - DNA, 126 bp, Homo sapiens
  chr17:76356799-76356925
  hyper
agggctgcaggggacgccccttcgtggcagctacccagcctcggcccactgccaggttctttgccaaccctgacgcgagtgtggagcccccctcccctcccctatgaaaacgctttcatgcactgg

SEQ ID NO: 54660 - DNA, 30 bp, Homo sapiens
  chr17:76374555-76374585
  hyper
accccctcctgcggcgcgaccactgttcct

SEQ ID NO: 54661 - DNA, 290 bp, Homo sapiens
  chr17:76588404-76588694
  hyper
tgaaccacatggccctggggtcggggcctctggccgaagggcgctcagcttggtctgtaaaatgaaatgtgttttgaatgtcatgagtcaggaaaaaagaatttgagcgcagtctggaaatgaaatttcctgcctgtggtttgactcacgtctgtctgtctcgaaatctaccccaaggacatttattccactgtgacagggctcatctctgaggagcaccagactcctgcggtggggagggaagattatccgcgctgcagagactagctggcctccggaagccgcctcct

SEQ ID NO: 54662 - DNA, 274 bp, Homo sapiens
  chr17:76921080-76921354
  hyper
ggagcagctgcaggcgtcggccgggcgaagcagcgtcgccagcagcaggaggccgagcgccagccgcagggtgcgggccgcggcgcccatggcgggccggggggctgggcgggcgggggccgccgctggggggtccgggcgctgctcgcggcggcgggctgggggcgcgggcgggggctgagccggggccgaggcgggcccctcccgcgcggctcaccctcctcacctgccccgctcggccgcgcaaactttctctcctctttgtctcgggggc

SEQ ID NO: 54663 - DNA, 130 bp, Homo sapiens
  chr17:76921422-76921552
  hyper
cgctgcggttctcggcggccgcgctgccttctacggatgtgtttgctgcgggcttgggccgggccgcagttttattgcgctcggaggattttctgctcctcctcccggtggctggcggccaatgcaggct

SEQ ID NO: 54664 - DNA, 104 bp, Homo sapiens
  chr17:76921859-76921963
  hyper
cgccaccccggggtcccttcgagcccagcctcggggcgagccaaggggtgtcctttggagcaggggccgttccctgtcgccacctccccgtttctgtgggcggg

SEQ ID NO: 54665 - DNA, 107 bp, Homo sapiens
  chr17:76967537-76967644
  hyper
ggcgacatctggtggccggttgttgaaggtcattgcagagaggaaggaagccgaggaggggagcctgcagtgagggcgtcctggggttctccggttctcaccaccct

SEQ ID NO: 54666 - DNA, 30 bp, Homo sapiens
  chr17:77005808-77005838
  hyper
gctgggctaacggccgggacggaggaaggt

SEQ ID NO: 54667 - DNA, 114 bp, Homo sapiens
  chr17:77020151-77020265
  hyper
ggatttccctgaggcgcggcgcggggcacacacggttaatcctccgcggctgctgtttggacgaaaagcgctgggggtgttggaggctcctcgctgctcacatctggctgggct

SEQ ID NO: 54668 - DNA, 81 bp, Homo sapiens
  chr17:77070948-77071029
  hyper
cgcacttcccattggccgagcgcggcgcgggggcgggcccgggcctgcgattgcctctcggcgtgcgcggacagtgtcatg

SEQ ID NO: 54669 - DNA, 264 bp, Homo sapiens
  chr17:77071239-77071503
  hyper
gtttcccggcacgggcgcgccgaggggcggggggccggcgcctgtgtccgctccgtgcacagtaagggacagagggtggcagcgcccctccgccccggtccgccccgccgtcctcgcgccactgccgggcagcggcctccggcccccgtgcgtgacccctgcctatctcagaaatacgggtgcaaacccgagtggccgcggggcccagcgggaatcccgacgccccggccagacccctgcttcccacgtcgctggtctatgcgg

SEQ ID NO: 54670 - DNA, 31 bp, Homo sapiens; identical to SEQ ID NO: 11539
  chr17:77099946-77099977
  hyper

SEQ ID NO: 54671 - DNA, 101 bp, Homo sapiens
  chr17:77178962-77179063
  hyper
cgctccccgccccgagtccccagcggcccggcgcgaagttccccaaagtgacccgggcgccgagaacccccgccccctcccctcgggcttccccggagact

SEQ ID NO: 54672 - DNA, 248 bp, Homo sapiens
  chr17:77179081-77179329
  hyper
cgcgccttcggaaaagttgcgagcgacgccccaaactccggcccccccgcctcgcgccgcgcgcgccctgggcgcccccgcgctcggccgccgcgcaggggcgcagttccccctaccccagccccggcgccatgacgcggggagcgcagcgggggccaccggtggcggcggcggcgcagaggcggccaagtgcggggcgtgggcggcagcgcggggcgcacgtgcgccgggccgggggccggggccgg

SEQ ID NO: 54673 - DNA, 102 bp, Homo sapiens; identical to SEQ ID NO: 11540
  chr17:77179380-77179482
  hyper

SEQ ID NO: 54674 - DNA, 159 bp, Homo sapiens; identical to SEQ ID NO: 11541
  chr17:77179617-77179776
  hyper

SEQ ID NO: 54675 - DNA, 221 bp, Homo sapiens; identical to SEQ ID NO: 11542
  chr17:77179799-77180020
  hyper

SEQ ID NO: 54676 - DNA, 31 bp, Homo sapiens; identical to SEQ ID NO: 11543
  chr17:77188903-77188934
  hyper

SEQ ID NO: 54677 - DNA, 30 bp, Homo sapiens
  chr17:77216684-77216714
  hyper
gtgtgtgtgtgtgtcggggggacacaaaac

SEQ ID NO: 54678 - DNA, 191 bp, Homo sapiens
  chr17:77766024-77766215
  hyper
agctgaggcggagatcgattggagatttgtacaaatcttagaattaaataaacccaacagcgcacacaccctgcgcggttgcagactcccagccacgtggcccccggcccctgcccacccaccccccaggtcagcgtcgcaagagcgagagaaggagacacatacacacacggccacggacaaacagcagg

SEQ ID NO: 54679 - DNA, 30 bp, Homo sapiens
  chr17:77766673-77766703
  hyper
accccccaccccacgcgaagctcccccacc

SEQ ID NO: 54680 - DNA, 189 bp, Homo sapiens
  chr17:77770286-77770475
  hyper
cctacttacttctgcgaccatcccttccatttcacgaggtattccatgcgtccctgcgggtgcaaaggcgataatgtgtgtgcatggggagaaacgcatgacgaggatacaagaaatgcatgcgaaaatgcatgcaccagatgaatgctcgaaaccccgccgcaaaaggcacgcgcccgctgcatcacc

SEQ ID NO: 54681 - DNA, 30 bp, Homo sapiens
  chr17:77770809-77770839
  hyper
cttccccccttggccgcttccaggagcaga

SEQ ID NO: 54682 - DNA, 175 bp, Homo sapiens
  chr17:77771455-77771630
  hyper
tgcacaggtgctggggcgccgcgggccgcgcccgaaccccgagagcctgcggcgcgcccatcggctggcttctcccccggcccccgcccccctcccccggagccgcacacccgacccccggtctccatggcaacgtcccccccccccccaagccgggtcccgctaacaaatcaat

SEQ ID NO: 54683 - DNA, 564 bp, Homo sapiens
  chr17:77772694-77773258
  hyper
tcctaaacttcacaaggtggccgcttgtcgaacagtcccatctctccggccgttctgtctgaacgaacagcgcgtcgaggacgctcagatctcccagtgaccctcgcgggccgcccgtgggaggccgccgacggccgcgtccttaatcataaaaagtcattcccggtaacaaatagtttcgtcggccggtgccagcgatacagctgtttctgtttaagcttaaatactttccaacagtttgggcagtaaaaataaagtcggcctcagccgcctgtaagtgtctggtttccccgcccagagaaagcccaccctccgccctgggcccgggtccctctgcctgtcccgcccgcctcctcttggaatccgctgcccgccaaggacaacagcgccccagccccgcaccggccgcctcagcccctcgagctggctccagggccactgtggaagtgggagggagggggccttcccagagtgggccggggggacctgacccgcctggcctcgcgccctacccccacccctggcaagctctcccgcacccgcgaagagcggtgattttccttc

SEQ ID NO: 54684 - DNA, 386 bp, Homo sapiens
  chr17:77773656-77774042
  hyper
tctaaacaaaactatcgcttgcgaaaagtctgagtttgcaaacgtcggggaatcctgcaaagcttgtggcaaaggtggaactcgattcagaaggaaggaagaggtatagaatgatctgagggcagggagcctggctcttgtcagtagcagacgcgctcagtcccgccaaggaaggcaatccccaacggggcagagtgtgtctcatccctgcctggcgcaacccctgccccccaacccgtgagagagcagcgttgcagggggtgtgaaaacaggtcaccgggcaacctcattcctcgacagtttggagacaaagcgggaggtggcggtctgagaaatgggagcccacctcccgggctctggctgggtgggcgcgggaggaagccctg

SEQ ID NO: 54685 - DNA, 310 bp, Homo sapiens
  chr17:77774930-77775240
  hyper
caaggagaggggcggacgggccccagcggggcgctgggctcctgggtcttgggccaggccggcaagccctagcgcgtcctctagcttgaggatgaggccggcccggttctttgggagcgtttcaacttcgcggcttggcgggcgtcggacctgcccggtcttggccgcggacgcgggcagatttggaagccaaccgtttgcctcgggcgggccggcagtgaaatgagcgcgggcggctccgaggcgtggccttgtggccagtggcttacctcccgcggtcccggagccgggcgggcgtcccgcagcgctg

SEQ ID NO: 54686 - DNA, 30 bp, Homo sapiens
  chr17:77776701-77776731
  hyper
gccccccccccacgcgcccccccatcacac

SEQ ID NO: 54687 - DNA, 191 bp, Homo sapiens
  chr17:77777712-77777903
  hyper
aatcctaagtgcagggcctgccgggtcattcgagaaggcacaagctgcggaggccagtctggggcctctcgcagaacctcggggaacagaggcgtctgccgggccgcctaccctccgcaagagtgggccacgcgggcggcaaacccgagggcagacgtttgggagctgaccgagaaaacgcgacggtgccg

SEQ ID NO: 54688 - DNA, 484 bp, Homo sapiens
  chr17:77777943-77778427
  hyper
cgacgcctttcctcgcagccccggtacagggcttcctcggtgcacccctagccgttgccccgggaggaggcgccgtctgggacacgaaggggctcggctggcgtcgaggctccgcggccagagcgcggcggctccgcgcacgcccagaagccgtgttgccggttccggggctgccggaaagcgtggggccaagctgctgctctgtgcccgcgcaagcgcctcgctacccgggcgggaccttgctctctccggccgccctgggccgaggggtggctcagcatcgtgggggcggacgcagacggccactcggccgggacaccgtcggcccgggagccgtgatgccttttctctctgcagctgaagcctccgatcggtttccccgcccttctgtaggaaatcaaattcagggaacatggtaccgtatttacccgcacaacttcctcccttgacattttgcactctcgaagttggggcagaagtaatt

SEQ ID NO: 54689 - DNA, 84 bp, Homo sapiens
  chr17:77778747-77778831
  hyper
tgaaggggtaagccaccgtggaagtcccagcagatacccccaccatcgccccatccatcctgggaggttcggtggccctcgagg

SEQ ID NO: 54690 - DNA, 31 bp, Homo sapiens
  chr17:77779042-77779073
  hyper
ccgagacagcagaagtcgttgaattcaaagc

SEQ ID NO: 54691 - DNA, 30 bp, Homo sapiens
  chr17:77781709-77781739
  hyper
taaatctgtcacccaagagttgaggagcct

SEQ ID NO: 54692 - DNA, 30 bp, Homo sapiens
  chr17:77785625-77785655
  hyper
aagcgctgcggcggcggcagcccttggtgc

SEQ ID NO: 54693 - DNA, 30 bp, Homo sapiens
  chr17:77786033-77786063
  hyper
gacgtgtctcaaatgcgccttttcttctct

SEQ ID NO: 54694 - DNA, 585 bp, Homo sapiens
  chr17:77786282-77786867
  hyper
tctccccggccggcccggcccgctggggcctgggttcctttgggttggggaagtgggggtacgaacccacgcggctgtgccaaggggtcccaactccggagtccaaccccacccaccagtcctctgtgcgcacttttcgtttatttctcagcagtctcagtcctggagctcctggggcgatttcgtcccctgccctggtgcgcccccgggccctgccctgagcccatgccccaggccgggtgtccagttcaccctgagctccccttggcgcccggagaagggtgctcgggcccgggtgctggggagcggcggggtggccgccggcgcctcttcggcgcggatggctctcggcggggccgaggagggggtcgcagagcggctccccgccgagaggagggtgggcgctcggcacctgctgagctacggtggtggctgcggtttatggcgcccgaggatccacccggatcttctccgcggagttccgggcttggctcgtctgtagtcagcacgcacacagctttgttatttgttatttttttaatttttctgcggggagcatcggggctagcccgcccagctccaacg

SEQ ID NO: 54695 - DNA, 96 bp, Homo sapiens; identical to SEQ ID NO: 11548
  chr17:77788536-77788632
  hyper

SEQ ID NO: 54696 - DNA, 54 bp, Homo sapiens; identical to SEQ ID NO: 11549
  chr17:77789473-77789527
  hyper

SEQ ID NO: 54697 - DNA, 351 bp, Homo sapiens
  chr17:77813599-77813950
  hyper
cctccccctcgcggcacgttctcagtgttcacggccccgggacccctgctgggggccacggaagcatccgccgccgctcccagttgcaccgaattgcgtcaccagcgccccgggacgcgcgggccccgccggcagggggcggaatggggcaggggcagctcgcgccccactgcgggccccgcctcgcctccaggctccgggcattttggagcgcgaggagggaaagggacagggcggagagaaggccgaggactgggtgccaaggagagattgaagaacgcacgaggaaggggaccgaggagcagccaatcccggggccctggcgcccaagaacctcggcagaaagggctc

SEQ ID NO: 54698 - DNA, 1491 bp, Homo sapiens; identical to SEQ ID NO: 11551
  chr17:77814493-77815984
  hyper

SEQ ID NO: 54699 - DNA, 187 bp, Homo sapiens
  chr17:77816033-77816220
  hyper
cgccctggaagctcccctgatgccccagagggcccttcctgggaaacctcccgggggggtgccccataccatcccacccggctgtcttggcccctcccagggagccgcaggagaaactagccctacacctgggattcccagagccttctgctggggctcctgcccccgacttcggataaccagctcc

SEQ ID NO: 54700 - DNA, 418 bp, Homo sapiens
  chr17:77816434-77816852
  hyper
ggaccctggagaggtcgggaaccttttaacagccgtgggctggagggtggctactaagtgttcggtctgggaagaggcatgacccgcaccatcccggggaaataaacgacttcttaagggaatcttctcgctgagcgggtgctctgggccaggagattgccaccgccagcccacggaacccagatttgggctctgccttgagcgggccgcctgtggcttcccgggtcgctcccccgactcagaaagctctcaagttggtatcgttttcccggccctcggaggtggattgcagatcaccgagaggggatttaccagtaaccactacagaatctacccgggctttaacaagcgctcatttctctcccttgtccttagaaaaacttcgcgctggcgttgatcatatcgtacttgtagcggc

SEQ ID NO: 54701 - DNA, 403 bp, Homo sapiens
  chr17:77817072-77817475
  hyper
ccctagcgggccgcgcggcactgcagccgggggttcctgcggactggcccgacagggtgcgcggacggggacgcgggccccgagcaccgcgacgccagggtcctttggcagggcccaagcacccctcggggccacaccgccgcccgcagggccgcgcctccgcattgcggcacgctggggtcgcaggcgccgaagcgggacgcgctgttttctacgacgtccgtccctcccaacgtcagggcagccacctcaggcccgcccggagaagcccacccggcccccggcccccactcagtcgcgaggccccgccggcctggagatctgcgcccccgggatccatatttcaaatatgatctttggaacggcttccaccgcccgccgccgccgccgccgcgctcacaac

SEQ ID NO: 54702 - DNA, 30 bp, Homo sapiens
  chr17:77818341-77818371
  hyper
gctttggacacttccggagccgagtccggt

SEQ ID NO: 54703 - DNA, 30 bp, Homo sapiens
  chr17:77904221-77904251
  hyper
cctccgccgccctccgtcccaggagagcag

SEQ ID NO: 54704 - DNA, 30 bp, Homo sapiens; identical to SEQ ID NO: 11552
  chr17:77982385-77982415
  hyper

SEQ ID NO: 54705 - DNA, 101 bp, Homo sapiens
  chr17:78009417-78009518
  hyper
cgcaccccgaggacggcggccggaccccggcccctccccggtcccgcggctgcaggcccacgcgccccacgcgccccgcgcgcccccgccccagctccgcc

SEQ ID NO: 54706 - DNA, 580 bp, Homo sapiens
  chr17:78009923-78010503
  hyper
gctggccctccgctgccgccctctgcagggagatttctcctatttcggactaggaagggaagatacgctccggaagaccccccgggcgtccatgcaaggagtctccgtaggacccctggagaagggcaccggagccccctagggcaggagatggaaaagcgctcgccatgcgcggggtccccggcccccggtgcccccagcccgcctgccattcccgggcgcttagcagtccggggtccccaggtgcccggcaggtcccttcgggacctcgagccgcccgctgggcacacgctgacgccgctgtcgctttacagaaattgagcgcagccgaggcgggacccgggcgcagagagcgataaaggaaaagcatggtcgtgctctaatcattacagtctaagggacgacacgtcgagacggcgcgcgcctctgcgtgcgtggagatggcacaaaggccgcgccgcccccggcggcccccgccctcgcagcgcgcgtggtcccggcccggccggatgttgacagcgtcgcctagcaacgggaaatggcggaaccgggcggcgcggcgggccggtaagccgggccg

SEQ ID NO: 54707 - DNA, 15 bp, Homo sapiens
  chr17:78010737-78010752
  hyper
tcccctactccaagc

SEQ ID NO: 54708 - DNA, 286 bp, Homo sapiens
  chr17:78010812-78011098
  hyper
cgtggcggtccctgcgcgcagtcctcctaagagtagagggctctgcagggcgcggggctgttggataccgcccctgaccttgctccggggccactcgctgtggccggagaccagcccggccccgcgcctccctcctgcaaggacagatcccctctcgcaggcttgggggtgacccgcgatgggaggggtccctgcggttaggcggcccgcgatagtccgcggtcaccgtcctggggcctgggtggaagcactgagcgcgcacagggagggcggctgagtgaagatc

SEQ ID NO: 54709 - DNA, 30 bp, Homo sapiens
  chr17:78121120-78121150
  hyper
gatctcgttgagggcggggcacccagttcc

SEQ ID NO: 54710 - DNA, 30 bp, Homo sapiens
  chr17:78194130-78194160
  hyper
tcgggatcgggatccggctccggctctctg

SEQ ID NO: 54711 - DNA, 179 bp, Homo sapiens
  chr17:78388503-78388682
  hyper
acctggtgaatcctttcggggttcagcaaaggcggacgctgaccgggccaaggagtgggacctgcagtgctggaccacccttttccaagcgcagaagtgccgtgcccgccggctctcaacagggcaagaggcccctctcgccgtgcagagcgcagcgcttgcggcggggacagcagagg

SEQ ID NO: 54712 - DNA, 91 bp, Homo sapiens
  chr17:78389460-78389551
  hyper
ggctgaaggcccacgtcgtagaccgggacaccgaggcgtggcagcgagaccccgccttctcgggtctgcagagggtcgggggcgttgacgt

SEQ ID NO: 54713 - DNA, 311 bp, Homo sapiens
  chr17:78428376-78428687
  hyper
ctactgcctccagagccgcttcggggccgaccccggggactcttcccgcctgcggcctcgcgccagcccggccggctcgcctagtgcccggcgcccagaaacgcgtggagctgggagaggccacacaacccacgccggaagcctaaccccgtcggcccccgcggccggcaccggccggaagcccgcgaagcctaactctcgcgagacgcctcctgagtcccgcctctccgcggttccgccagtcgccgcgctcctgtctgcgttgctgtggcagccccgccgtgcgtccgcgttcccggagccagcgcggc

SEQ ID NO: 54714 - DNA, 30 bp, Homo sapiens
  chr17:78429123-78429153
  hyper
tatcagacggagggcggcccgctcccgtca

SEQ ID NO: 54715 - DNA, 312 bp, Homo sapiens
  chr17:78449758-78450070
  hyper
cgagcgagccggagggggaaccggagccgagggcgcgcgcggacctcgaggttctccaggcgggttttgagcgattgcaaagtttgcccgagttggctgagcgtctcggcggccggtgtccgggacaggtcgcccatggtgttcttgcccgagccgggctgcttgcggccgccgcccgcccgggcctcgccggctccggggtccagcgtgctctggctctcgcagcggcccagcttggcggtcagctcgcggatggtctccttctggctcaggatggtctccttctgctgcagcaccgtctcgcggagctgc

SEQ ID NO: 54716 - DNA, 30 bp, Homo sapiens
  chr17:78450840-78450870
  hyper
ccaaggacccaggtcgtcaacacccgagtg

SEQ ID NO: 54717 - DNA, 789 bp, Homo sapiens
  chr17:78451164-78451953
  hyper
gccggcccgatcgcgggcaggcggcgtcgccggggctggacgttcgcagcggcgcttcggaagggggccccgcgggagcagccgcccgcgtctccagcagcttccccttgccaggcgccgcgcgcgcccggtatccccgggtgtccacctgtgcgtggggggctgtttcccgtctgtccagccgcgcccacttctcaggcccaaaggccagcaggaagggtcccggaggtggctgggggcgtccacctgagaagctccgctctcgctcagacaccccacccggcacccgcgcactcgcgccttcatctggaccgcggggctcggctcccgagatcgcggtccgggttccggcgccgggctgggggctcaggaccagggctggcgcagccgccccgccccgccccgccccggggctatcagagcggtcaaagcctcggaaatccctccgtccacgctcccgtggtacagagaaggaaactgaggctccgagactgcggggccgggctacagccgtggccccccgacccctccccgccgcccccggcttctctggtctctgcgttctgcagcctttccctgcgcgcagccgggggctgggggtccccagccagcagggacccacgggcagtcccgggtgccgggatcgggcgtccgcccctcgggcgggagcagaggccggctcgatggagacctttttgagaaatggcggcctctacccgccccccagcccccgagcgcccgccgtctgcgttcagcatctcagcttttaagcctccctgagccggggct

SEQ ID NO: 54718 - DNA, 459 bp, Homo sapiens
  chr17:78452108-78452567
  hyper
cggccccttgcgtgctctgccgaccccgggccgcaggaggggttagcctcgccggtccccacgcggggtctgcgccggcagcgccacgggctggaacgcgcctcgggagaaattacccgcgcggggtcgcggcgtcttctgccccaactcccgtagggagccgctaggcgggtgccctcctggccccagcgctttggcctcgccgccctcccgcacgcgtccagtggggaggccgcgcccgtcaggcctggagccggaccgtgcccagccgagagcgcgcgggcgcgggagaggagccctgccctgcccagggcaggctgtttagacggggcgggaacccttagcctggccccgcgtctctatccccagcagccgtggagccttcctagccgcccaaggccagggaccctgcctggcttttcctccagggcagcagatctcagcggcctggcacctcgg

SEQ ID NO: 54719 - DNA, 30 bp, Homo sapiens
  chr17:78518598-78518628
  hyper
tggtctgtcggccacgccgtaggccgcggt

SEQ ID NO: 54720 - DNA, 31 bp, Homo sapiens; identical to SEQ ID NO: 11558
  chr17:78955670-78955701
  hyper

SEQ ID NO: 54721 - DNA, 30 bp, Homo sapiens
  chr17:78978380-78978410
  hyper
gccccaggatggggcgcggggagcgcgctg

SEQ ID NO: 54722 - DNA, 256 bp, Homo sapiens
  chr17:79008305-79008561
  hyper
gttctcctctctgccccgaggggccggccggggggtcgccgcccgcccggcgggcttacctgcgaagcggcggggtcggggcctctcccacctgtaagcccggcccgcggcgtcctgcgtccgagccgctccccgccccgcagcgccaggccgcgacccggcgggccgcccgccccgaagtgccacttcgcgaagtgccgcctccacgcgcgctgccgccggcgccccccgctctcctccccgcaccttctgctcc

SEQ ID NO: 54723 - DNA, 650 bp, Homo sapiens
  chr17:79008840-79009490
  hyper
gtcgggggcggtgatgcgggcgcaacgggggcgggacgcaggggcggggactgccgcggggcggggcctgaggcggctataaaggtggccgccgccggacgccgggctctgtggttcgggtccgctttcgtctccgtcctgctgccgttaccgccgctgctgccgccgcttgcgtcccccgctccggtctgtggtgcagccgggacccaggaccatgtctctgtctcgctcagaggagatgcaccggctcacggaaaatgtctataaggtgagcgccccccggcgccgagctgagcccgctccgtgtgcgcctgggtcgcgcgccgcccgcgcgcccgagcccgaccagggcggccccggggccgcgcgccgggccaggaggctgggactttgggggtcttcccggcgcggccacccgggacccgggctgctggggtggtgagcccggcgccggccgctcacaggtggccacccccgcccgggcccccccatcccatgcgcgccgcggcccggtcagtccccagccccaggcccggggagcactccccgctccgacggccctgctcggcccccgcgcgctcgccttggcgtcggcgggaacggagccgcgcgccgggccccggaagccctcggaccggtcggggtcgtag

SEQ ID NO: 54724 - DNA, 30 bp, Homo sapiens
  chr17:79184838-79184868
  hyper
ccacgagcgcgtgggcgccaccattcttcc

SEQ ID NO: 54725 - DNA, 30 bp, Homo sapiens; identical to SEQ ID NO: 11561
  chr17:79196662-79196692
  hyper

SEQ ID NO: 54726 - DNA, 31 bp, Homo sapiens
  chr17:79197096-79197127
  hyper
gcgaggcagatgtgggcggggcaaggcaggt

SEQ ID NO: 54727 - DNA, 30 bp, Homo sapiens
  chr17:79205354-79205384
  hyper
agggcgggtccgggcgcactcacgctttga

SEQ ID NO: 54728 - DNA, 30 bp, Homo sapiens
  chr17:79268973-79269003
  hyper
gcctcagggccatgcgtccctcgctcggcc

SEQ ID NO: 54729 - DNA, 30 bp, Homo sapiens
  chr17:79283113-79283143
  hyper
acgtcagggcggggcggggctggacggaca

SEQ ID NO: 54730 - DNA, 215 bp, Homo sapiens
  chr17:79317324-79317539
  hyper
gtttgaaaggtgaccgggctggggctgtcggagacccgctctgcggggtggcccttctagccgctaggcccacgacaggacttctagggaggggtccctgcaaatgcccttgggcgaagagaggacggaaagaatattctcccttaaattgcaattaagggtgtgcggggcgggggtgcttggggggtgctgcggcaggccgggttcgctcaacc

SEQ ID NO: 54731 - DNA, 403 bp, Homo sapiens
  chr17:79317846-79318249
  hyper
ggcgggtgtgcgctccgagcgtctttcggcgggggggaggggggagcaggaggggcgaggagacttgcgcagtcagggagccgcgaaccccgagtctcggtcctcgaaggcggcaggagaaaccgcgcgctgtgccccgacctctctcgccctggccaaccgcgacttgggacgagctggaggagcttcccccgggctccggacgcccgcgccgaaaaccgggccatgggtaccaaacccgactctaggcggtcattcactttgtccccacccaaactctgatgagctatttgggagtgcgcggggactgggaagtgagggacttttataacattcttctttcgactccggcttccgagcccaccacccatcttgcctccttcgcctccgccctttgttctaa

SEQ ID NO: 54732 - DNA, 181 bp, Homo sapiens
  chr17:79319123-79319304
  hyper
tgaggccgaggcagggcgcacctcctcctgggcgaattcaatcggagctgcagaagagacaagcatttccaaactggcacccgctccgagcccaaggtgagggtggagaagggtccctggtggaagctgcaggaacactttgggccggggtctaccccgcgttcggcggctccccgaatcc

SEQ ID NO: 54733 - DNA, 30 bp, Homo sapiens; identical to SEQ ID NO: 11565
  chr17:79519273-79519303
  hyper

SEQ ID NO: 54734 - DNA, 30 bp, Homo sapiens
  chr17:79519688-79519718
  hyper
aggttgctcttgggcggggcgtctccccgg

SEQ ID NO: 54735 - DNA, 30 bp, Homo sapiens
  chr17:79520364-79520394
  hyper
gcagacatcctgaccgcccccctttgaggt

SEQ ID NO: 54736 - DNA, 30 bp, Homo sapiens
  chr17:79604192-79604222
  hyper
acgcatgcgcagggcggcgccgctgacccg

SEQ ID NO: 54737 - DNA, 21 bp, Homo sapiens
  chr17:79650801-79650822
  hyper
cggcacccgtagctcggcgcc

SEQ ID NO: 54738 - DNA, 30 bp, Homo sapiens
  chr17:79670795-79670825
  hyper
gaaagcgccggggtcggccccagatgacct

SEQ ID NO: 54739 - DNA, 58 bp, Homo sapiens
  chr17:79677825-79677883
  hyper
tgcctcctgagcacctccacccgcttccccaccaggcgtggctgtgttttcaccccca

SEQ ID NO: 54740 - DNA, 47 bp, Homo sapiens
  chr17:79762707-79762754
  hyper
ccggcgccccaccacccggccgactcggccaccgggcttatgctccg

SEQ ID NO: 54741 - DNA, 112 bp, Homo sapiens
  chr17:79791490-79791602
  hyper
gggacgggtccggccgcccctggcccacgggtggggcacgtgctggcccatgggcgacgcgcggcttctccagggaggcggccctgggcgcgggggcgggcgggcaaagctg

SEQ ID NO: 54742 - DNA, 30 bp, Homo sapiens
  chr17:79828341-79828371
  hyper
ggcagctagaataccgcacggggccacctg

SEQ ID NO: 54743 - DNA, 48 bp, Homo sapiens
  chr17:79884792-79884840
  hyper
gctcgaatcccctccggtatcagcttgagcaccgagtgacctcacgct

SEQ ID NO: 54744 - DNA, 37 bp, Homo sapiens; identical to SEQ ID NO: 11566
  chr17:79886040-79886077
  hyper

SEQ ID NO: 54745 - DNA, 31 bp, Homo sapiens; identical to SEQ ID NO: 11567
  chr17:79889370-79889401
  hyper

SEQ ID NO: 54746 - DNA, 30 bp, Homo sapiens
  chr17:79895342-79895372
  hyper
ccctctccggcacgcggtcccctgacccgc

SEQ ID NO: 54747 - DNA, 189 bp, Homo sapiens
  chr17:79917291-79917480
  hyper
gcggcttcctcccgggcctcacgtcgagacgccttccccagggcccgccgctgacctgtgcgagtgcgcggccagtcccgggagctcatgaggcgccgcatggtgtcgtatctggagtcgcagttctcgcggttgaagcagtaccagccgcctgcggacacgaccgccgctcaggcccgcgcgcacaga

SEQ ID NO: 54748 - DNA, 141 bp, Homo sapiens
  chr17:79918401-79918542
  hyper
aggtccagccggagaccgggcgcgtcgggcggggcggggaggtgcagggcgcgggccttacccggcggggctgccgtcgttgcaggtcaccgaggtgttgagtaggaggtgcaggcgcaggtcctcgttgagctgctgcgc

SEQ ID NO: 54749 - DNA, 31 bp, Homo sapiens; identical to SEQ ID NO: 11568
  chr17:79926113-79926144
  hyper

SEQ ID NO: 54750 - DNA, 30 bp, Homo sapiens
  chr17:79934855-79934885
  hyper
gtgagactcaagttcgctcaccccacggtt

SEQ ID NO: 54751 - DNA, 34 bp, Homo sapiens
  chr17:79946603-79946637
  hyper
cacagccatgctcttccgtcgtgtgggtgtcatg

SEQ ID NO: 54752 - DNA, 30 bp, Homo sapiens
  chr17:79981249-79981279
  hyper
gggctgggtgggggcgcgcgacgcacctgc

SEQ ID NO: 54753 - DNA, 1266 bp, Homo sapiens
  chr17:79988352-79989618
  hyper
cccttgtcctcccgccgcccactggtgggacgtgaggccagccagagagcggggctggccaggtctcccgtgctgaggccgtgccacggtgcgctggggctgcgtccgctcactgcgctccttgccctgcagtgatggcgagcgaccaccgagaggcgctgctggacagggagagcgagaacgcgtctctccgggagaagctgcggctccgggaggcggagatcgcccgcatccgggacgaggaggcccagagggcgagcttcctgcagaacgccgtcctggcttacgtgcaggcgtcccccgtgaggaccctgagccccccaaagtgagacaggccgggaggacccgggcgcagtaggagtgcatcaggcggcgcccgagatggaccaggggctgcgtcccgcccgcgccgcctctttgagacccgggtcgtctgttccacgcggcggttgcggcgactgttggtggtgtcgcggctgcgggggaaccccgtgggaggcgcctgggaagggctccctaccggccccttcttcccggtcgacgccacgtgggagcacaccgggaaggggtcccgcgggcgcgtctccccctcgccttttgcgatgtcaccgtgaacgctgcggccgcctgcgcgcggcggggtttggaaatacagcgcgtttgcactttgtgatacattctggccccgcctctccctccaaacgcgcgaccgtccgtgcctctccaaacgcgcggccctctgcccccagccctgcagggagggcctgccggggtgcggctgttcgcccctcctcgccgctgccttgaagggacgggagggccgcgggggctgtccgtctgggggttcgggcggctgcagaccccggagttcccagctggctcccggcggcagggggcgggtccccgagaaagcgcagcgcgcggagccctccccgccgggtccaggtcgctgggctctctccggcctgcgctgcgccccgagggacccgtaggagacccccgggccggggtcgcgctggaggcgggggcgccgcagctcgcgcagctctgcccgggttcgggcggccccgccccgccagccgcgcggccgggcgccccccgcccgcccccgcccccgccccccgccccccgccggccgcgctcggctgtctccgcgcccggcgctcggcggcgctcggctgtctccggccgatcgctcggcgctcgggtccgcggccgctgcggcgccgggcatttctccgcagctcggctcgcggccgcgcccgc

SEQ ID NO: 54754 - DNA, 41 bp, Homo sapiens
  chr17:79989899-79989940
  hyper
tgggctggctgcgggcgaggcggggccgccgccctgtcctc

SEQ ID NO: 54755 - DNA, 30 bp, Homo sapiens
  chr17:79995729-79995759
  hyper
cggggcggggtctccgctgcctcagggacg

SEQ ID NO: 54756 - DNA, 30 bp, Homo sapiens
  chr17:80009830-80009860
  hyper
taacttgcaggtaacgagccgaggccgccc

SEQ ID NO: 54757 - DNA, 31 bp, Homo sapiens
  chr17:80010342-80010373
  hyper
ccaggacagggacccccgagcgagggagggg

SEQ ID NO: 54758 - DNA, 31 bp, Homo sapiens; identical to SEQ ID NO: 11572
  chr17:80156992-80157023
  hyper

SEQ ID NO: 54759 - DNA, 30 bp, Homo sapiens
  chr17:80170607-80170637
  hyper
agcggcgccccccacgcctcccacgcctcc

SEQ ID NO: 54760 - DNA, 278 bp, Homo sapiens
  chr17:80186356-80186634
  hyper
ctagccaggaagagccgccgtccgcaccgggaccggagaggaagcggaggtctgaagggggacaggtcggacgtggcctcagagagggaggatgtgggccccggagctgagccaggcggccggaaccccacgggacccgcgcgcacctccccaccaaaggggccccggcgttggggggcgaggggtcgctgccctggaggacgttgggacctgccgcgctgcgctccgaggcggggaaacggagggacggcggggcggaggggcgaagcgagcctgga

SEQ ID NO: 54761 - DNA, 30 bp, Homo sapiens
  chr17:80186841-80186871
  hyper
aggcggtgacgtgcgcgggggacgtgccgc

SEQ ID NO: 54762 - DNA, 266 bp, Homo sapiens
  chr17:80187170-80187436
  hyper
ccagccgcgcccctccgcgccctcgcatacctggctgcccagtctcgtctcccccggtccggcccggcgcccacccgtcgggctgccctcaggggctgggctcgggccaggagatggctgcgccggcggccaagcccggtccgggtataaatagctcggtccgcggtggcggggggcgcgggctatatttggtggggctgctgcagccctccctgtatgggtggcctccccgagggagtggggagcacttgcgctcgggccgtggc

SEQ ID NO: 54763 - DNA, 352 bp, Homo sapiens
  chr17:80189390-80189742
  hyper
gggtccaggaggcctcggaggtgggggacggcggctctggaccagctccggcccccaccacctcccggccccagggcggtgacagccttgcggagaaggggtcttcaaagctctgagaccccgcagtgccagctcaggattgaagcctgcggcggcacatgcagccttcctttcccaaaggggacttgcgcccagccccacttggggcaccagtgggggctcctggccctggccctgggtgggagtggccaatccgcaaatgaggcctgtgtgtctgccccgccggcccctgccgtcgtgatgtaagcggacacagagcggcagggcacgggctgcgcgaggggtctgcggg

SEQ ID NO: 54764 - DNA, 31 bp, Homo sapiens
  chr17:80277704-80277735
  hyper
gtgcagagacgggtgcgcgactccatgcgtg

SEQ ID NO: 54765 - DNA, 30 bp, Homo sapiens
  chr17:80279415-80279445
  hyper
gccccggagggcggcgtccacctgaccccc

SEQ ID NO: 54766 - DNA, 352 bp, Homo sapiens
  chr17:80291596-80291948
  hyper
tcctctgggatgcagcttctccgcgccccggagccccaggaaaatgaaagacacgagagggaggggccagggaggaggcggcggacccgcgcgggacccacctcccagatgaggaaggagctgggtttacgggaagcctccaagtttcgggaaccacccgcgttcacaacaagcgtgacggtgaatttattattttcacgggaggcaccgcacccgcggttcacgctaaaggaagcaggaaagccgccgggagcatttttccaggagagttcgtgcctgggcgggtccagctcgcgtgcggcgcgcgttccccgcggggctgtttggctccgctcctggaggcctcgagtct

SEQ ID NO: 54767 - DNA, 557 bp, Homo sapiens; identical to SEQ ID NO: 11573
  chr17:80329443-80330000
  hyper

SEQ ID NO: 54768 - DNA, 541 bp, Homo sapiens
  chr17:80332161-80332702
  hyper
gtgtccacccagccctgagcccgtcgtgaggggtcagagatggcgctgacccccgagtccccgagcagcttccctgggctggccgccactggcagctctgtgccggagccgcctggcggccccaacgcaaccctcaacagctcctgggccagcccgaccgagcccagctccctggaggacctggtggccacgggcaccattgggactctgctgtcggccatgggcgtggtgggcgtggtgggcaacgcctacacgctggtggtcacctgccgctccctgcgtgcggtggcctccatgtacgtctacgtggtcaacctggcgctggccgacctgctgtacctgctcagcatccccttcatcgtggccacctacgtcaccaaggagtggcacttcggggacgtgggctgccgcgtgctcttcggcctggacttcctgaccatgcacgccagcatcttcacgctgaccgtcatgagcagcgagcgctacgctgcggtgctgcggccgctggacaccgtgcagcgccccaagggctaccgcaagc

SEQ ID NO: 54769 - DNA, 30 bp, Homo sapiens
  chr17:80408771-80408801
  hyper
gccgagcggatttccgggatccgggcggag

SEQ ID NO: 54770 - DNA, 30 bp, Homo sapiens
  chr17:80416030-80416060
  hyper
actgacaggcaggccgcgcatgcgcgctgc

SEQ ID NO: 54771 - DNA, 30 bp, Homo sapiens
  chr17:80476995-80477025
  hyper
attcagaacttctgcgtattttgcaggaca

SEQ ID NO: 54772 - DNA, 217 bp, Homo sapiens; identical to SEQ ID NO: 11574
  chr17:80503129-80503346
  hyper

SEQ ID NO: 54773 - DNA, 30 bp, Homo sapiens
  chr17:80550891-80550921
  hyper
tctgaaagcagaccccgtgaaggtcttcct

SEQ ID NO: 54774 - DNA, 36 bp, Homo sapiens; identical to SEQ ID NO: 11575
  chr17:80551802-80551838
  hyper

SEQ ID NO: 54775 - DNA, 30 bp, Homo sapiens
  chr17:80606220-80606250
  hyper
ccgccgtgctgggtcgccgctcctcagcgc

SEQ ID NO: 54776 - DNA, 1706 bp, Homo sapiens
  chr17:80655504-80657210
  hyper
gctcctcactcccagccgaggtgttcgcctctgcgcgttcccccttctcctgggttcctgcccccgcctttctttccccggagccgtccaccccctcgccgggcgccggctttcaagcctcaaacttgggggatccccgggctgcctgcctgggagctctgggcgctccggcctcccctcgccctggaacccgctctccggccgctgtcgtggggggtcccctcttccgcacgcgagtcacctgtgctccttcctctcccccggacacgcgggacccctggcctcgggaccggaccctggtctcccctcccctccgacccacgcgcagacccagcacctgggcgcctgctcgccgcgctccgccccaggagccccggagctcgcgtcccctcccgcccctcctgccccgcggccgaacgcgcacttgcggactcgagcccccgccccgggtccccacagcagcggccccaggtcgggaggagcccagcgcccggcccagccgcgggctcccgctgcgcgcagactgcggagaaggatggagactgcgccgcggggcctcgagtggaactgggggtgcaacagggacgccgcagcacgagggccagggccgggcggagaaaggcccgcccgcgaaccgcgctcctcctcagccccgcgcccccggaccgggactcctaccctccccggccacgcgccccggcctcttcccgacccctgcccggtctcgcgtccccggacccggacccccacccgcaccccctccccagccccgcgcccctccccggccccgcgcccgcaccccggcacgccctccgcccgcgctcacccgccgggtggccgtacggggactcggccgcgccatcctgcaggctcgccaggatctcgcccttgcccacgtcgctgtcgcccaccagcaggaacttgagcagaaagtcgtaggcccggaccgggctgcccagggcgctcatcgtgacggcccggcgcccccacccatgcccggcctgcggggctgagcgcagaggcggcggcccggccccgagaggcgccgcgcgggccccgagtccttgctcgcctccggccccgccccgccgcccagcgctgacagcgcgcatccccgcccggccccgccattggtggaccgcagttgctagggcagctgcgcgctttcactggcttggttgtccgtccatcttactctcgtcaccgcctccgggctgtcgcccacccgcccctcctgaaaggtcgctgtcaccacagccaatggaggcccggagacggggcaggggcggagccagaacaagcaggaggcggggactctgctcccgcagccaatggcggggcggggtgggggcgatcagggggtggggccgggtgtttacactctcgcgtgcgcccgtgagcgccacgaactcgctcccacggtcgtcgggtctgcacgccccgagtcgggaggggcgaggggcggtgcagggtcccagcgtggggcctccccacctgcccaccagggagacctcgggtgcctggccgggtggggctcggggtcggtccagttggcggacgcggccggaaggcccccgcaggccgcctcgccggaggagtccctgtcgccgtagaatccaggctcgcggtctctccccacggttcatccagggcctcgtcgttgccccatttacgcggcgtgcctgaatgcctgtgtgtgcacatgc

SEQ ID NO: 54777 - DNA, 227 bp, Homo sapiens
  chr17:80693227-80693454
  hyper
gggccggacctgcgtccgctgcggggcagggataccgggtccctgcagggagctcaagccccagcgcgcccgcgaagagctgcgcggactcccggctgcttcccccgaatcccgggcgcaggaagcgcgaagccggacgaacgcggggagcgcgcggcgagcccgcctgaggccgcccctcccgccgcccggggtcacgcgccgcgcgctcccgccccgccccgccc

SEQ ID NO: 54778 - DNA, 31 bp, Homo sapiens; identical to SEQ ID NO: 11580
  chr17:80840580-80840611
  hyper

SEQ ID NO: 54779 - DNA, 37 bp, Homo sapiens
  chr17:81009161-81009198
  hyper
gtgcgcaggagcgaggcgggagcgaggcaggtgtgcg

SEQ ID NO: 54780 - DNA, 30 bp, Homo sapiens
  chr17:81009743-81009773
  hyper
ttggtgcagagcggcgtccataggggtggg

SEQ ID NO: 54781 - DNA, 457 bp, Homo sapiens
  chr17:81036701-81037158
  hyper
gttgtcaaagctggggcgggggttgctactgatacccagagtgcgggggccagggtgctgccaacatcccaccatgcgcaggacgtccccaccccaagaaccacccggccccgcgtatccggagcgaggagtgggcagcgctcggcagaggccccggcgcggcggctgcacgtcctccgggaggagggagggaagccgggctcaccgccgggcctcccccccggtcaggagggagccgggaactcccgaggcaccaactctgcggaacgcggggcgcccggatcgcccctgatcaccgcccgctggcgaggcgcgggggacccagaaccggcggggccgggagcctcctttaccgctccgcgccggggctgcccgcaggatggggcgcaggatggggcgcaggatgcggccccggcaccgcctcgcgggggtctgcggggggcgaccgcggctcgcg

SEQ ID NO: 54782 - DNA, 50 bp, Homo sapiens
  chr17:81038241-81038291
  hyper
ccagagcgggaagggacggccgcgggagggagcggcggtttcggggatcg

SEQ ID NO: 54783 - DNA, 203 bp, Homo sapiens; identical to SEQ ID NO: 11582
  chr17:81039184-81039387
  hyper

SEQ ID NO: 54784 - DNA, 30 bp, Homo sapiens
  chr18:267622-267652
  hyper
ccccttccccttctcgagacacctgcccca

SEQ ID NO: 54785 - DNA, 30 bp, Homo sapiens
  chr18:499378-499408
  hyper
gctccggttagttccgcgggagctgccctt

SEQ ID NO: 54786 - DNA, 1379 bp, Homo sapiens
  chr18:499745-501124
  hyper
cctgcagtccttctcgtgcttctttctaaagtacgataacatctgacacttccataaaccggcctgcagaggacaccgcgcagggggcgactaaccagctgaggtgtgtcaccccaaaacaccagtgggcacaccccaaggcgggcacgtggaagggacgcggaaccgagggcaactattttccagtcggtgaatctgatggagaaagatgccaaatgcacttcccgagccagctgaactcctcgggcacctaatcattgccagatgtggcgagggcgcacggagaacatccccagtcccggagaaaacacccggccgccagcgcggggaccgctcgggccgggaaacggctagaggcgggaggagagaggactgggcgagcgtggggagcgctgcggcgtggaaaagcgaccgggagggatggcgatgcctccactctcctcggcaggttttttcaattaaaaagttggaaacgggaatccgtaaacaacgacttagggcttcaaactacttgcaaagacgcgatggggaggggaatacttgcgcgcttcaaaaccccaacctcgaggtctccagccgcgcctgacccgggagccgggtgcgcccccagtgtccgcgcacgaacccggcgccctggcagccccgactccccgggcccgcagcccaagggaaggttcgcgcgggaggcacctccgtggcctcccgcgcgccccgaagcccgttccccccgcccagagccccgcggagctgccgccgccctacctttcatggtgaccgtggggacgcaccgccggccggggagctccgcgcgagcgccgcgcagccgaggaagtcgtcccgagcggctgctcaccgcacgcccatggtagccgcgccgcgcgccggccgtctgcgcccccgtcctccctcgccgccgccggcccgcgctccccgcgctcccggctccgcgctctgctgcctcggggctgccgcgcgcgccgctctcgctctcccagcgcccctccccctggcccgacccggccgagcgagcggccgcgcccacgcccctctcgcgccctcccgcgcccgccccgccctcggcccgcgcctgccctcgccgggcactttctcgcccgccctctcctgcgcgccctggccccactcgcgcgggctctctctttttcccgttgcaccagcgtcgggatgaagtcgggagcaaagcccttcccggggcggtccagcgttcaccttcggcgagcacctaaggtgccgctgctgctggggtcgcttctacaccccaaactacctagcaagtgttgggcgagaggatggggagctgctgtgccccgggggtggcggggggtaaggtgggcccttccccaaacggctctggggcatgg

SEQ ID NO: 54787 - DNA, 30 bp, Homo sapiens
  chr18:597060-597090
  hyper
ggctgacttccagccggtggcacagacgcc

SEQ ID NO: 54788 - DNA, 423 bp, Homo sapiens
  chr18:712015-712438
  hyper
gtacagaggaagccagcgagcgctgtgctctagggtttccactggcgggaacccaacaaaatcattttgctgctattgcctattatgcattctaccatttccagcaaaatgtgagtcgtaaaagtaaaaccaggatattctaaactccagcaaagaaaaaacccaggagagtggaaagtttctggatacttatacaattgctccaaggcatgaaaagcgagtgtctcccccaggcgcgcctcccactttacagaagcaatgggttcgaagtcgggaagctgcccggggcccgcagagctgcagtcggcggggcgggagggacccgggccgcaagccgcgcgtaccatggcgtccgcgcttaccatggcgtccgcgcttaccatggcgtccgcgcttaccatggcgtccgcgcttaccatggcg

SEQ ID NO: 54789 - DNA, 9 bp, Homo sapiens
  chr18:712722-712731
  hyper
attggccgc

SEQ ID NO: 54790 - DNA, 1572 bp, Homo sapiens
  chr18:811502-813074
  hyper
gaacgcaacgggaggcggagtggcatgattccgtaaaagtggacgctgaatggtaaatttcccaacccccaacccaaaacaaaggaaaactttaaacatgttgcggttttcaatcaaaccaagtaaagccagaaaggctcatccactcgccccacacacccgctcctctccccgcacagctgctaccggcgtcggccgatacacagacccccagcctttaggacccaaaggggccgcttccctcgcccctacttcggccgtaggggcaaaaataaacctctcctccccgtcgccgggcggtccacacgaccccaaagacaaggggtggggagtgtccccacgcccctggaacctcaggtcggacttgggcgggacccggcaggtctggacagggcagagaccgagtcaggggcgagcaggtagcgcggggaacgagacaagcccgccgggcgatccgggggaggggagaagtttcttcccaacttcccgactcgggcccgcgggggcggggaaccgcggcggcggcggcggcggcggctccgggcgctggggcctagccctgtccgggcagaggtggaaccctccgcccgcggggccccaccgggtccttacctgtcctccggccgcgctctcatgagtcgctgctaccgcagctcgaggtggcggagggcggaggcgaggcccgcgggccctctccctcctccacctcctcgtcccggggcgcccggcggcagcaacgacggcagagccggcccgggacgcgttacttcaggaggagggagttcccgggctccccacgcctcggcctcactctccacctcctccgccccccccccccggccccgccccctgacttctagcgggggcgggggctgcgggtacctgcgcgcgccgccgtccgctcaccggaactcgggccacgccggcccggctccggggcccccagccttccggcgcctacgcccccgtcaggtcccctccgcgggctccgggccgctttgctgtggtcaggataggcgaccggtccgtgtcacttctcccgacccaacatggcggcggggtccggggcggattcccgggggcggtgcaggccgagggggcgtgaggaggaggtgcttccctgcccggagagcaggcccgcggcgtcccttcccacccgcgaacccaccgacgctcggctgccgcggagattgaatggagcgctccgattctgcccctctgcctttctctgttccttggcccagctctcagtagtggccagggctttggggcttgcttttgtgggggaggacggggttgagtttttttggttggctgtttgcttctcagcgctacgcttccgcaccctttgtcgttggtagtaaaatctcaagcccaaccgcgtgagccgggggcgttactcacaccctcatcaccatcctgatcgccgtccaaaaaacgttcacgtcttgcctccttccgaggcagggatcctgtccctgcccccaggagcttcctgttgactgtaggtcgaaccagccttgccgggaggggaaccgaagctgagttctgtttggcgactatcccagtcat

SEQ ID NO: 54791 - DNA, 107 bp, Homo sapiens
  chr18:903732-903839
  hyper
ggtgaaaaattaaaccggtggcaattttcaacgtttgtagcatctgttaccctacacttcagcacccggagtctggacagctccgcaggccgcgctccggaggcagc

SEQ ID NO: 54792 - DNA, 726 bp, Homo sapiens
  chr18:904526-905252
  hyper
cacctctgtaaccagcggtagcagcagcagaagccgcagcttcagaggcagccggagagacctcggagcagagaaggcgccgccgaccctcgcggctgcctggcccgcggctcctacaaaggcgggctagccgcccgccctctcccttgccttcctccccttcttttctgactttccctctttcccttaatcgcctgcttcttcctccgggtggacttacggccaccttgctcctccgcgcttcacctcatcgccccctctttctttcttctgcctctctctctgcgcccccttctctccgtgtcacgctccctcctggttctgcgcgtctacaaacttttgagcagaacacgagcctcggcaaacgagtcccgcagctcctcctgctgctcccgctggttcctgcggcttctgctcagacaccaacgccagacggcgatgcctctcgggtggtgactccagcgcaggaacttgaagaagcgctttgcccgccgtcctacctggcagctctcctggcagcgggaggagttgaagggtaagggagggaaaatcttaccaaagcgaccggctcactcgactgctgattctttcgcttggcatcgcgtcaggggagttagctttccttcagccgggtctggctagttattgggcgccgggtagatgcatatatatatatttttttctaactatagcaagcaagaagtggcagggcgcgcaccggctgtc

SEQ ID NO: 54793 - DNA, 163 bp, Homo sapiens
  chr18:905452-905615
  hyper
ctacagctcacctgccgccgccggactccggttccccgggatcaggtaggtgctggctgcctggcccaagcaggagctggggcttcccaggcacagacgcttcctcacggtctccttcctgcagtcctttgggtccagactactagcatcgccctctgcgccc

SEQ ID NO: 54794 - DNA, 234 bp, Homo sapiens
  chr18:906005-906239
  hyper
tctttcaagtgatccgtgttccaactgcattttgaatcccaggctgtcttggggggcgtgcggtggggagggtgttggcccggtgtgattgaggaaaagcgacttaagagagggaagaacaaggacgagactgcgaaggagggggaaaaacaggcgcaaaggaggaggaagggaaagccagcaggcaggcaggaccgggagagcagccctgcctggcccgggatggaggaacct

SEQ ID NO: 54795 - DNA, 30 bp, Homo sapiens; identical to SEQ ID NO: 11588
  chr18:906711-906741
  hyper

SEQ ID NO: 54796 - DNA, 411 bp, Homo sapiens
  chr18:907282-907693
  hyper
tttctcgtccccgcccgttgctgctttggggaggctcgggagccaggcggggaggggggcggtccttttccgtagacaggtgtgcgcgatcggcggagacgcctcggtttcccagcgcttgttgaggccgtggcccgcaggacgaccctttacccgcgaagggggggtgggcgggccgcccggcggggtaggagtggttgggtgtcgttgcctcctccttacctctgctcccacccccagtcctgggagaagagacaattctcagcggaggacttttatcacctgtgaaaatccgcgcgagccccttactttggatcctcgccgagctggggaggaacttgcactgaccacaccttctgtccccggccaccccgcaggccagaggaagaggcgtacggcgaggacggaaac

SEQ ID NO: 54797 - DNA, 549 bp, Homo sapiens
  chr18:907721-908270
  hyper
cgccgggcgcagggagccccgcctccgcgccgcgcgccgccgccgcctggtaccgcccggccgggagaaggtgagattcgcgcggcctcgcgcacacccgcggctgggagctcgggactgcggtgacgggaggggcagtgtggtgacccacccaggatttttttttttttcccgtgaaagtcctcaagcctgtcctctccctggcccgatcctattgcagcgacagaaaatcagcagcgggcgggtctgtgtggacctgagggccgcgtggggaccgaggggggctgtggcccaaagagtggcagtgagtggcgtcaaggaacccacactccgcatctgccactcctagagccgggactagctcccgatcctagcagttgctctcgagatcatcccgggagttattggcgagttctgggcctctggaggtttccctgtcagcctccccggccgccgagggggcgcgcgcccaacaagggggtctctagcggccacctggggacagaaacagtgaccctgggcgcgcactttgcctccccgttagagatg

SEQ ID NO: 54798 - DNA, 221 bp, Homo sapiens
  chr18:908299-908520
  hyper
cgcaaagtgctggaccagctgtccgccgggaagcacctgcagtcgctcgtggcccggggcgtggggtaagagtttgtggaaggattaacctgcgcgcgccggggtgggtgcctgtgcggggcgcgcggggcgggcggcggtgggtgcccgtgggggccagggtgagtctgcgcccctgggtctggggtgggcatccgccacgggtcgcagttggagatttt

SEQ ID NO: 54799 - DNA, 40 bp, Homo sapiens
  chr18:909044-909084
  hyper
actggcatatgtagggctctccggttactttctctgtatg

SEQ ID NO: 54800 - DNA, 105 bp, Homo sapiens
  chr18:909183-909288
  hyper
cgtcgcctgcccggatcttatcccgggccccctccgcagggtttggtgccaggagatcctgcgtggggaggggggcatcgaggggctgccgtctcggccctcccc

SEQ ID NO: 54801 - DNA, 276 bp, Homo sapiens
  chr18:909318-909594
  hyper
cggtgggcagtgcgagccccgggccctccccgaaggctcccgcgtggggtggggcccgcctgctccccgcggcgattgaacctgtgtctcccgccccgccaccctcttcccgacccctttgcttgcagtgggagcctcggcggcggcgcgggggacgacgcggagccgctctccaagcgccactcggacgggatcttcacggacagctacagccgctaccggaaacaaatggctgtcaagaaatacttggcggccgtcctagggaagaggtataaa

SEQ ID NO: 54802 - DNA, 184 bp, Homo sapiens; identical to SEQ ID NO: 11591
  chr18:961751-961935
  hyper

SEQ ID NO: 54803 - DNA, 30 bp, Homo sapiens; identical to SEQ ID NO: 11592
  chr18:1664281-1664311
  hyper

SEQ ID NO: 54804 - DNA, 30 bp, Homo sapiens; identical to SEQ ID NO: 11593
  chr18:1777065-1777095
  hyper

SEQ ID NO: 54805 - DNA, 30 bp, Homo sapiens
  chr18:2105039-2105069
  hyper
tcggtaccattctcccgccagcagggggcg

SEQ ID NO: 54806 - DNA, 51 bp, Homo sapiens; identical to SEQ ID NO: 11594
  chr18:2571377-2571428
  hyper

SEQ ID NO: 54807 - DNA, 30 bp, Homo sapiens
  chr18:2571618-2571648
  hyper
agcagatacttgcacggtttacagaaattc

SEQ ID NO: 54808 - DNA, 30 bp, Homo sapiens
  chr18:2655164-2655194
  hyper
gagcgcccttctgacgttctcacggacccg

SEQ ID NO: 54809 - DNA, 1881 bp, Homo sapiens
  chr18:2846544-2848425
  hyper
tccatggagctggtgggggaacggccctgtcttgcccgaggaggaaattcgagtcgagcccccactcctctccccgcgggactgataaacatgtccctcattcgccccgggaggctggcacccaggcacgacgcgaggacggccagactcgccgacggcggccgcgtcccggggggccgggagcgagcctgtcggaaggtgggaggcggagtcgctcggcatctgggaagagaccaaaggaatgagtcattggaaatgctgtaacgtagacccttatcccaaaccctttcgcccctccaccccgagccccctgccgagaagcgaagggactggagacggggagacttggtggggggagagtcacgtttcggagagggaagtgaaataaagagggcggcacccggggggacctgtgcgtcattgagggaccggggagaagcgcagggcgcacggggctgcagaaggagaagtaggaacgagaagccggagggggcggccgcggagcactggttggagcgccgcgaagcgcccgagcctcttgccttcgcgggcggcgccctggccgccggcagccttgtggccggtgccccgatccgccgcgctccggacccgggcaggcggggcgcgcccgctgcgcgcgggatgtggcagcccagacggccctggccccgcgtgccctggcgctgggcgctggcgctgctggccctggttggcgcggggctgtgccacgccggcccgcagcccgggtatcccgcgcggcccagcgccaggaacaagtaagtgcgcgccccttggctggccccaaaccgcctacccctccccggcccccagttgagccccagagctgccctgccaaagacgacgagcggcagccgggggcctcccttggacttccccgggcggctccctctgcgggggaccgcgcgctccgcagccggcgcctcaggcagagctgactccgggggcgtgggcgcagagagcgtcccgcagacccgggcgatccgaaaacgactcccaggaattccatgagcccctgggaccatgggtgcttttctttcccgtcttggtcgggtccaggcgcgcgctctccagaggcgcacccgggcaccctccggcgtctgctcggtgaagctcccgcctccgcagagggcgacgggcccccccgaccctcgctcggtctggtgccgcagtcccctctcccctggcctcattgttctccgggtttaccccgtgcccctctccctctctctcctgcaccccaggaactggtgcgcctacatcgtgaacaagaatgtgagctgctccgtgctggagggaagtgagagttttattcaggctcagtacaactgtgcctggaaccagatgccctgtccgtcggcgctggtgtaagtcctggagccggggagcgggcggggcgcgcccgggccggggcggtgggggtggggtggggttgctgcgctgggctccagtccctccggtaaatcccttccagatccggtgaaaagcccgcagcggaaaagcgctccgagcgctcgcggggcaccggccacgctgggctatttagggagtgggtgctgcccgagtgagtggggaggatgcgcgcgcctcgggagtgtggggtcgcgggggcgtaggagaggatgaacaaagctcccactcccacttctgttttctccctttcaatgtttgtttgtaacataaggcagctgaatctaattggatccatattgtgtgttctggggcacacagaagattccaaaatgtatactgctaaagactattccgtataggattcgctgagaggtttggctaagtagtgttctaaaacgagtgagttctgtccgtatgtccccataaaacggaatcttccagttttgtaga

SEQ ID NO: 54810 - DNA, 742 bp, Homo sapiens; identical to SEQ ID NO: 11596
  chr18:2906054-2906796
  hyper

SEQ ID NO: 54811 - DNA, 153 bp, Homo sapiens; identical to SEQ ID NO: 11597
  chr18:2907033-2907186
  hyper

SEQ ID NO: 54812 - DNA, 165 bp, Homo sapiens; identical to SEQ ID NO: 11598
  chr18:3012398-3012563
  hyper

SEQ ID NO: 54813 - DNA, 30 bp, Homo sapiens
  chr18:3012979-3013009
  hyper
cggcaggacagccccgggcccgcgccaagg

SEQ ID NO: 54814 - DNA, 30 bp, Homo sapiens
  chr18:3246159-3246189
  hyper
ggagaggacgctggcggagctggtgctctc

SEQ ID NO: 54815 - DNA, 45 bp, Homo sapiens; identical to SEQ ID NO: 11599
  chr18:3247279-3247324
  hyper

SEQ ID NO: 54816 - DNA, 30 bp, Homo sapiens
  chr18:3247639-3247669
  hyper
tctatattctaggtcgcccactttacactt

SEQ ID NO: 54817 - DNA, 30 bp, Homo sapiens
  chr18:3248839-3248869
  hyper
tggtttacttggaacggaagcaccaacttg

SEQ ID NO: 54818 - DNA, 36 bp, Homo sapiens; identical to SEQ ID NO: 11600
  chr18:3262088-3262124
  hyper

SEQ ID NO: 54819 - DNA, 30 bp, Homo sapiens; identical to SEQ ID NO: 11601
  chr18:3262534-3262564
  hyper

SEQ ID NO: 54820 - DNA, 632 bp, Homo sapiens; identical to SEQ ID NO: 11602
  chr18:3447897-3448529
  hyper

SEQ ID NO: 54821 - DNA, 36 bp, Homo sapiens
  chr18:3448759-3448795
  hyper
tagttcctgaaacagacgctccgaagtcgagttagt

SEQ ID NO: 54822 - DNA, 3100 bp, Homo sapiens
  chr18:3449164-3452264
  hyper
aataagccaacaggaacgggtgtttacttaatggctagtttctgtttgaaatgggaggagggatcccctagcagggttccaatccgaagagtagacactgttgaccgaaacagacgagcaggcacggcgtggtcaccccttagctataaaagtggccgctgccggggttcggcgactcggggtgtcaggcggagtcttggtgaggcaggcgcgcgcccggccgtccccgggcagagacgtttaaagagcatgtgagcgtgacaagtgtctgtccgcaacgtgtcagatttcgaaactgccttgcaatccagtccggaactcgcagctttagcccgggggaacagacgttcgtttaggctgtgtctcatcattcccccccgccccacccccgccgacctcccactgtcgctgctggaggaagagccccgggaggagaagggtgcgccgcgccgcgcccgcgtgtcaatggcagccgcgcattctggaagaagttggttcttgtctcgaatacttttcctcccgtgccccgccccttgaatcagaggcggctgtctcgtgcggctagagcagggccagtagagttcggggcagctgtcaaaaacgagacggggaggcttttcttcccgggggtggaggagggaaggagggaggtgtccttttttccatctgttgcagtttccgaaccaaacgcaccctcgccagccccgggaagaaaggcccaagggagaaacctggggcgctcggctggtgcccccaccgccgggcgagggatgcgggcggtccgtgcgcggcaggcggaaaggatcgtgtttctggacccggccaccccccgcgtccgcaccgccgcccccgagggacgagtgacagcggccgccgcgctcggtccagtcttcccggctggaaggtgcgggggaggggcggaggagcggcggggcgggagggggacggggcgggcggctgggggcggaggcaggacctcctgtaccttccctcctcgcctctctcactctgacagcgccgaggtgcgccgagcaggagcagggaacaaaggagcggagaggggaggggagagagttgggcgagggagagcccccggccggctgccagaagatcccggcgggaggaagcccaagtgtcacttgaattccacccaaggagcgggcgcctgggatcagagcgtcctgtttagcaataacggctggagcacgtcctacaagttacgggagagtcggctgtgaaggagacgttcgcttatcccctgtgtccccgctcctggcccctccagacccccgccttgcctcgcgctgggaggggagatccagaatgaaaggcaagaaaggtaaggcggccgcgggctgcgcgcaccagaagacgcgagtccggggaaacgtgctggccgggccgcgccgcgcggagtcacttggtggacttttccgcccaggggctctcatgctggagtggcggccgtgctctttgttgaggctgcgtctgaaacggcagcggctgttttcctgctagacacaacacgaggggctgttgtggggcgagcctctccacgctgctggcacgttgtcaagaaacacgctcagcgccttgtttgtgcgcctgcaagtttcattgtctccgccgacaccccacgctcggcccagccgccgcgtggcttctcgctctttctcgcgtgctggggatatggggtccgagtagggaggacccagcccctcgtttttcccgatccggacccaggcggccggggccgcgggaccgccgcggctttgtctgaaagttccactcctaggctccccccgcccccgcccccgccgcccccctactcccagccgggccctagcactgttctttagggatgtggtgtttttacgatcgaaggaatgcgattctggaccccctcatcgccctcgggtgtaaacagctttggaaagctagacttttacaaatccccagtctctaaaagttttcccacgatgaattttggggcaggaggaagagttagcacccagggccagcagcttcaagcggcatgcagtcaaaatgcgtccaaatgtgacaagcaggcttggttgtaagtgcaaagagcaaggctgtcattgtttccacgaagtgttctggaagctttacaactaaaacttgccgtcagtttggtttaaaaacaaaatacaccggagggggacggggggtggagaaaccacacaaaacaccccgaaaggtcagagtgtgaagtcccttttgaagttaacaaaaattgagtccctggctgggaggtcccccgagtgttccgctgtgggctggaggtggcgtttctgtcgtgatttatgtggagtggttcaaaacagaagttaatcactcgggaagcggacgggaggggcggcgctactgcgcatgcccgggagccgcctggagtttggaactccacattctttcagacccggcccgctgcggggcgttcctggggggtagcctcaaggccagcggggttccttcggctgcgtttctgtgggaggccctgaaacgcgcggagcttccctctgcctccaggctttcccagcgagagtgaaattaaacttgaaactcggatcaactggcagtcgttgttggtagaacgccctaaggacccctccccgcgggacggagggaggactcgggacagggaattggccctgggagaaaacgcgcggggggcgtccgagacgccccgtgaaagccgtgccgacccttgggaggactgacaggtctagagacacgcgctgtctgttgtggtgggcctcccgggaataagtgaggggctctgtgtttcgaggatggttctagcgcagagccgggtgtctgccggggtgggctccccgcattgttcgggctccggcgggggcggctctgattcctttccatggcccgcctcccaccccgggaatccccagtgctccttttccacggcttttctggcgtccccccgactctcccgcggcactttggcctaccttcccccagcgccgtggtcctccctggcgaccccctctgcgctcctggggtcctcctgcgccccccctcctccaccggcgcgctgcccacagccgcgtgccctctcccc

SEQ ID NO: 54823 - DNA, 30 bp, Homo sapiens
  chr18:3453783-3453813
  hyper
ttgtatgtggatagcgtgaaagaagcttgt

SEQ ID NO: 54824 - DNA, 401 bp, Homo sapiens; identical to SEQ ID NO: 11606
  chr18:3498977-3499378
  hyper

SEQ ID NO: 54825 - DNA, 1037 bp, Homo sapiens; identical to SEQ ID NO: 11607
  chr18:3879109-3880146
  hyper

SEQ ID NO: 54826 - DNA, 856 bp, Homo sapiens
  chr18:4453834-4454690
  hyper
ggagtaaggagtgaagagtctcgcctggatccacaaaagacgtgacatctcccacccagcgtcccactgcttgccgcctggctacctttaaccccttgccctccgcacatcctccccttctctagcagaaaattccgcagcgctacggtcgggctggaggcaagccctgcagccgggggcgagcgcggcactcggacacaggcactcagtgtctccggcgccggcagccgagccacgggccaccccttcccacggcctcccggtgccacccagcgaggccgggacagcgcgccttccgcaaaaagcgcagcagccgaagtcctgaaagcagggtcttcatcgccgcgggccctccgaaggtgcctctcccagctgcagccgcccctcaatgaaagtgcaatgtgttatctcgcccagcccagaggagaggtccctgtttggccttggttccagcccggctcattcaattcgctgaatgtcgggtctcccggcccgccccgcgattctccgggaattggccttggccgcgggcagggggcgactctccagtgacctcctccttggaccccatttctctctctctctctctctctgtgcctgtctttgtgtctctgtttctttggctttctcttacaaacgcacgggggagttggtccttttccacaatgccaaaatgtcacccaaaaagctagtgcaacaacttgctttgcaaacgacccaggagcctgccgagaaagccctgcggggagcagccccctcctcccctgcaaggtgcatcgggggtggggtgggggtgcgaatttgaccggtggacatgaccgggacaggggaccggtgttctcctcccctccccctt

SEQ ID NO: 54827 - DNA, 253 bp, Homo sapiens
  chr18:4454777-4455030
  hyper
cgcccccgagatcccaggttacccggagggcccgggagtgcaccccgggcggctgaaagggtaaggagcgcggactctcgagccagcggccgggggagcccagcccgcagcccctccgcgggcgagggaagcggcgaccgcgcggcaggcagcagccaggagccacccagcgcgccgcgaccgccgccgccgcgcacgccccagccccgcggcgcagcccggcgttacctggccgcgtcccgcagtccggccc

SEQ ID NO: 54828 - DNA, 13 bp, Homo sapiens
  chr18:4455258-4455271
  hyper
cggaggctgagcg

SEQ ID NO: 54829 - DNA, 97 bp, Homo sapiens
  chr18:4455631-4455728
  hyper
cacccgtgagtgggcgtgacccattggttcccttgcgcagcatctgtggagaattaagctttcccctcctctcttgccagccgttgttcctaatctt

SEQ ID NO: 54830 - DNA, 30 bp, Homo sapiens
  chr18:5196723-5196753
  hyper
gccggtgctgctggcgaaagtcccagttct

SEQ ID NO: 54831 - DNA, 264 bp, Homo sapiens
  chr18:5197007-5197271
  hyper
acttggtgaaaaagcaaggtgcggtgtacctggagcgaacaccatgatttcttccagccgctacgcccccagattaagagagaaagacaggcagacggaggatgggaagaaggccggacttggcggggtccggtgcaggagggcgcgctgggcgggcggcgggcggggcggtcagcaccccggacagctcccgccgctagatcctggggccgcagctccagccgccgccgcgcgctctgcctccacaatgcggccacagcggcg

SEQ ID NO: 54832 - DNA, 245 bp, Homo sapiens
  chr18:5197329-5197574
  hyper
cgacgtacactgctgcttagggagcaaagcacttccaccgctttcacgcgacgaaggtcggaagagcaagagagagaaaggtaaacttcccggcaggggacagtgaattgcttttaattacctgctgtggctcgtcgccgtggatattggactgacatttaagatagatttgtcaaaaaaaaaaaactctaagagctttctttactctcgaggatgactctgagttctccgagttgggctggctc

SEQ ID NO: 54833 - DNA, 1486 bp, Homo sapiens; identical to SEQ ID NO: 11610
  chr18:5237297-5238783
  hyper

SEQ ID NO: 54834 - DNA, 30 bp, Homo sapiens; identical to SEQ ID NO: 11611
  chr18:5295790-5295820
  hyper

SEQ ID NO: 54835 - DNA, 30 bp, Homo sapiens
  chr18:5297083-5297113
  hyper
gtttccccgaaacgcgtaatttaatatcta

SEQ ID NO: 54836 - DNA, 429 bp, Homo sapiens
  chr18:5542728-5543157
  hyper
gaaaacttcagatccgtaatataaaaagaaaattgaaaagaatactctcattgcaagggaccacagttacaatttactaggtaaccacacccaccgcattgcagaagccatgaacttggcgggcgtgggggggaaggggaagaagtccggcgagattagaggggaaatccgaaaaagcaagcccctgcggcagcagccaggaaacactcgccaggaactggctgcgaccccaactccagcggtccgaagccctagcctccccacccccaccgcggcagagccgccttcgcagacacctcccgaggagaatcgcggccccgagggcgccaggtgagtcgcgccgccccgagcccccgggccacggcaggccgacccaggcgcccccggcccgcccgtgctcccgcgcccgggtgccagaggcgaggggcc

SEQ ID NO: 54837 - DNA, 116 bp, Homo sapiens; identical to SEQ ID NO: 11613
  chr18:5543430-5543546
  hyper

SEQ ID NO: 54838 - DNA, 362 bp, Homo sapiens; identical to SEQ ID NO: 11614
  chr18:5543899-5544261
  hyper

SEQ ID NO: 54839 - DNA, 1213 bp, Homo sapiens; identical to SEQ ID NO: 11615
  chr18:5628270-5629483
  hyper

SEQ ID NO: 54840 - DNA, 256 bp, Homo sapiens; identical to SEQ ID NO: 11616
  chr18:5629569-5629825
  hyper

SEQ ID NO: 54841 - DNA, 530 bp, Homo sapiens; identical to SEQ ID NO: 11617
  chr18:5630124-5630654
  hyper

SEQ ID NO: 54842 - DNA, 112 bp, Homo sapiens; identical to SEQ ID NO: 11618
  chr18:5630693-5630805
  hyper

SEQ ID NO: 54843 - DNA, 46 bp, Homo sapiens
  chr18:5891336-5891382
  hyper
ggggggcgccgcggcgggggcagacgacgacgaagaggcggcggcg

SEQ ID NO: 54844 - DNA, 295 bp, Homo sapiens
  chr18:5894650-5894945
  hyper
ccacaggctgggagcgctgtgctgtgcccggtacccaacccaggtcctcgaccccggcccctcactggcagggcggcgaccccctggcccctggctttggtctgcttattgatgttagctggagtcacatgagtgcagcagctgggagtccgcctctggaaagaagacaggcaggagccaagtgagggcaatcctgaactagctttttctgggcagcgcatcccgtgtagccagcccgggaaaaagcctctcaccgaacaccagcccggggcgcggggactcggggacccgaggg

SEQ ID NO: 54845 - DNA, 1228 bp, Homo sapiens
  chr18:5895017-5896245
  hyper
cgctcacttacccagggagaccgagggaggtcggggccggcgaacgggcgctcgggcgacacaaaggaaccatggagaaactttttcagcccgagccgacggcggagcgcagggacagcgccccggggccccgcatccgagcgcgactcagcagccccgcgggggcgagcgcccgccccaggctcgcagtccccgccggcgctgtggcgggagccatttccaagagtttccaagaagtgtcaggtcctccgcatcccgcatcccgcatcccgcctcggagccctcctctccgccgctcatcctccagctcccggcgtcccctagcgcggcgctcccgggcgggcccctgcggccgcgccgccggccctcgcgcctcttttgtgtggctgcggcgcgccgggctccgccgggtggagttgagcccgcggcggcggctcggggcggccggactggcggctgttgctaagagaccggagccatgacacagggaaattgcggcagggtggcggtcggggcccgcccggctcggcggagtcggggggcgcccccgcccccgccccccgccccaccccctcctccggcgcccccccccacgccgccggccttccccgctcccccgcgtcctccgccgcccgccgcccgtcccttcggaagcgccgattcctcggggaggaggaggcgtgaggggaggcggcggaggcagccggcacggggcgctcgggccgcggggcagggggcgcggggtgcctcctcggcctcggctctccccgccccggggcgccccgagaccgccgcctgcctccgcgggcagctttgttcttctttcctccaactacctgtctgagccgcgggccccagaggccccaaagagaggcccggagggtctccccagcagcatccgaggggcgctctcggggagctaggggccagagtccgcggtccctccgtgcctgcctccctcccctcgtgcctcggtcttttgttgcctctactcctcggcacggcgcagcctgggctctcttccccctcccgcttgggagtttgcagtgtggacgctcggcaagcacagtaagttgtcccccagcgaactcgggcccgggcggagtggagccgcccccgccgggacgggcgcaccgcgggacgcttggaagcctctgccagatgcgctcgcgctccagccccgccgggctttgtgaccagcctgaccgggacccggcagctggggctc

SEQ ID NO: 54846 - DNA, 38 bp, Homo sapiens
  chr18:6414307-6414345
  hyper
gggacacgcgggcagacgggggcgttagccccagagga

SEQ ID NO: 54847 - DNA, 32 bp, Homo sapiens
  chr18:6414961-6414993
  hyper
ccctgcccgccccgcgcgcatgctcccgccgc

SEQ ID NO: 54848 - DNA, 30 bp, Homo sapiens
  chr18:6415237-6415267
  hyper
aaggctctctcctccggatccctctcggtc

SEQ ID NO: 54849 - DNA, 30 bp, Homo sapiens
  chr18:6646431-6646461
  hyper
tcatctccccaattccgcagtacaaccccc

SEQ ID NO: 54850 - DNA, 30 bp, Homo sapiens
  chr18:6659987-6660017
  hyper
agactaaaaggaaaacgaaaacaggagaag

SEQ ID NO: 54851 - DNA, 959 bp, Homo sapiens
  chr18:6729208-6730167
  hyper
aaaaacaaactttactagagccgctagcaggagccccaaaggatcccggccggtttccagtttcctagaagcggggatcacacctccccgcgcactcccgacacatgcgcgcgcacgcacacacaggcgcacacacacagacacacaggcgcgcgcacacaggcacacacatggacacacgggcgcgcacacacaggcacaaacacaggcgcacacataggcgcacacacacacaggcgtgcacacgtacacaggcacacaaacaggcacacacaggtacacacgcacacacagacaggcacagacgcacgcacacacacaggcacacaaacaggcactcacacaggagcgcgcgcgcgcgcgcgcacacacacacacacacacgcactatgcccgcccccactccagcccgtgggcgtggttcccagcgtctgcgaattcgcgcgcccggggcggggcgggcctgcccgggggcccctgacagccgcgggagagagcggctggtcgcacctcgggccgcgccgcccagctgctgacagcctcccggcgcgccggtccatgctggtcccggtctttgttctggggccggcgccgagacatgcgcggctgacgatggaggtggaggactcgggcggcgtggtgctgaccgcctaccactcgtacgcgcgcgcccagccccccaacgccgagtcgcgctgcgcgccccgcgccgcagccagccacccgctcagcaggtacccggagccgctcccaccagggcggcgcagtcgcgctgggcttggggggttcgccgtgcagctgcgccttgtgcctgagcgcacgaccgccgtcactggatgttgtttcaagttttggtggactagatgagtgagcctggggttctttgcattgtctttgactggaggtgggaaacgctcgaaggctccaccagcctgggctgaagtcgttggctagcagag

SEQ ID NO: 54852 - DNA, 30 bp, Homo sapiens
  chr18:6795203-6795233
  hyper
gagtatgaaaagcaacgcgttttcattgat

SEQ ID NO: 54853 - DNA, 30 bp, Homo sapiens
  chr18:6950931-6950961
  hyper
ctggaggcgaacgtgcggatgcttagctca

SEQ ID NO: 54854 - DNA, 30 bp, Homo sapiens
  chr18:7037492-7037522
  hyper
ctaaaatgcaggcagcgcaagttctttctc

SEQ ID NO: 54855 - DNA, 281 bp, Homo sapiens
  chr18:7116490-7116771
  hyper
aatgaatgagatggtcgcgtttctgcagagctcacaactcagcacaatgcccaaacacacgtttcccacgagggcactgcaaattccgcccactacttttgactcgaatttttttttaatgaagtttatattcgtgggaatacgcccattgtcatgtgctgcatacattaagatgttttcaacaaatatttgtgactgcctagccaacacgaagccacgctgcgaagacagctctaggggtggcgtgggtgactagggttgtcccccaaaagggaaaagaa

SEQ ID NO: 54856 - DNA, 56 bp, Homo sapiens
  chr18:7116826-7116882
  hyper
ttctttcttctctctctctctctttccgcccgcccgcaaaaacagaaaatgaaaat

SEQ ID NO: 54857 - DNA, 260 bp, Homo sapiens
  chr18:7117059-7117319
  hyper
cgcctgcgggtccccctgcccgggacggctggctaggggcgcccttctcgccgcgtctctccccactagcccgcttggctgccaggggccccgaggaatccgccctttcccggccgccgcgacccagcttgcgcagccggacaatgagggcgactcgggagagctctttctccattcatcccccgcgcccggccaacagccccgccacccccgcccgcgcagccggggcactaaaagcaacccccggcgccccgctccgg

SEQ ID NO: 54858 - DNA, 185 bp, Homo sapiens
  chr18:7117374-7117559
  hyper
cgaagtcccgcaaaagccagaggcgaggctgggctttaaccccaaagcccgaggaggttaaagcctaagcctgcaaagagcgggcagcgtccggcaggagcggcgtccccatccagccctccccggcaagcgcgggagacccacgtggccgagacacccactccgaggtggatcaggatgcgcgc

SEQ ID NO: 54859 - DNA, 247 bp, Homo sapiens
  chr18:7117615-7117862
  hyper
cgcctgcgggggacagggaccctaggacccgggccgggctcacctctctgccggcactgcgcggcgacacacagcagcaagaccaggagcacgcccccgcgcatctcgcctccgccgccactcggtgggtctggggagaaagccgcgcgcccgcctggaacgctccacgggacgcgagtccgcgctgccctggccccgccgctcctggagtcctgccgcccctccctccagccgccctcggacacac

SEQ ID NO: 54860 - DNA, 30 bp, Homo sapiens
  chr18:7127507-7127537
  hyper
cccttgtggacccgacgccctctgtaattc

SEQ ID NO: 54861 - DNA, 30 bp, Homo sapiens
  chr18:7204771-7204801
  hyper
actggaggctcagagcgagaggcaagttgc

SEQ ID NO: 54862 - DNA, 30 bp, Homo sapiens
  chr18:7419870-7419900
  hyper
tccaactactagaatcgtgctcatggcatt

SEQ ID NO: 54863 - DNA, 30 bp, Homo sapiens
  chr18:7542474-7542504
  hyper
acaggcgtgagccaccgccggtcatattga

SEQ ID NO: 54864 - DNA, 212 bp, Homo sapiens
  chr18:7566543-7566755
  hyper
tttggtgtgaccaccgccttccgtgtactgcctgcggctcgcttcgggcccacacgggacaccgaggcatgatgaggacgcagaacagcagaagcgcgccctgcttcccgggcgccagtgctcggggccagcggcgtgtacccggcgggcccggccgggagcgggctggcgatcgcggggctcggcgctcccggctcccgcgccatctcccg

SEQ ID NO: 54865 - DNA, 1937 bp, Homo sapiens
  chr18:7566780-7568717
  hyper
cggcgtagagaagctcgcagccctccggagcctcagcgatctcctggctcgcttttcccgcagccgccgagcagcgcaggcccggcgactccgggtgcagctggccctgtgcggtgacatcgccgtccggcgccaggctcgaagccgcctggccgcgcccgcggggtcgcaggccgctggtcccgcccggccgcgctcacaaactactcgcggctcgtgacccgggacaaacttctggcggcggcgcagcctcttccacagtcaccctccccagagccagctaccaaaatagaagacgcggccggggcgaggaggtgggcggggggagcccggtggccgctcctccccgcgcggctgacgcccgcttcggcggcggtagtggctgtggccgcggggccgcccccagccgagctcccggaggcgctcgggcgcgggccggcggggcacgggcgctcacgccctctagcgggccgcggcggcgccgggcggccgtgacgtgagcgctcccttcagccggcctgcggggcaccgccagtcagtcggggagcaagagccccgcgcgcagccggcgcgggctcggtcatcggcgcgccgccgcccggggctgggcttggggctgcctgtggagaggcggcgggcggaacgcgcgcggccacggccacggccaccgccacggccacggccggcagctcgggtcccgggtcccgggcaggggaaggggagaggcggcgagctcagcaaccggaaccgagggaagattttggctccgcgggctcgccctccgctccctctgccagcggcgccagacgccgagtggggccagggacaggggaggaggacccaggaccctgtgcccgcgcccctggagccgctggagttcggacttctgcaactgttggcactttgggggcttggcttagcgctctgctgtttacccgtctctcctcgctgcctcggaaccaaagctcccggccccctccgccctcgcgcgcccacccaccgccgccggggagcggcccggcccgcactcagcaccatgaggggacttgggacttgcctggcgactttggccggacttttgctaactgcggcgggcgagacgttctcaggtaagcgggaccgcctctgccgcccccgaggcgcgcgggccggcgcgggacgcccgggacgccgacagctccctggtggtagagccctaaggctggcgtcggggccgggcggggggcgcggcgggccggacaccgcttctgcctgtgagccgggcgctgggcgaggggccgtggggctggcaggcacccagtcctcgggcgggcggagcggacggaccccgagggcgagctccccagccgggactgccagctcggccgccgtccttccgcggcctgggctagtgctcaaggttgggcggcttgcactcttgagtccctggccggctgcaaaaggaacagcagaaaactttgcttgaagttcccagttgcagccgccgggccgcctggcgtaggcgctgcgcggtccccgccgaccccgagcagcggccgggcccaggccgctggtgttcggctgcgcccgcagcgatcgccgggaactggcggccgctccggcggcggcgatctcccggtgccctgccctccctgtcgccccctgcccggcgcggctggcgaccccgggaggtccccgcggtcgtgcagcgtctgcggagaggctggggggagttcctcgccggtcccagcggtagggcttggcggccgcggagggaagcgggcaggtccccaggccctggccacggccctgcgccccgctgggctccccctccccaccctcgtccccctagcggagcgccgcggccagctgcaacttgttcatccagcccggctgcccgggggtcccaggtgggaaggagaggcactggcggtgtgcgagcaagcgtgtgagtgtgt

SEQ ID NO: 54866 - DNA, 114 bp, Homo sapiens
  chr18:7568792-7568906
  hyper
cggagtcgggggtccggcgtgggggcgaacccggcacgctgtcacaggggtttacaaccaggatgacctttattacctgggtgacacaggtggatagacggcaaatgctggccc

SEQ ID NO: 54867 - DNA, 30 bp, Homo sapiens
  chr18:7605703-7605733
  hyper
ctggttttgcttaagcgtgtgaggttcagg

SEQ ID NO: 54868 - DNA, 30 bp, Homo sapiens
  chr18:7647070-7647100
  hyper
acgtaacagtgataccggggtgggtgaaat

SEQ ID NO: 54869 - DNA, 30 bp, Homo sapiens
  chr18:7789601-7789631
  hyper
ctagcaggctgaaaacgctaagatttgata

SEQ ID NO: 54870 - DNA, 30 bp, Homo sapiens
  chr18:7926629-7926659
  hyper
ccagtgcagtgccatcggcaggaccgtggc

SEQ ID NO: 54871 - DNA, 30 bp, Homo sapiens
  chr18:8003570-8003600
  hyper
ctgctgaataaagtacggatcagttccggt

SEQ ID NO: 54872 - DNA, 51 bp, Homo sapiens
  chr18:8016760-8016811
  hyper
tggtcactagaaatgcggcattcatttttaaaagaacgtctatctatccat

SEQ ID NO: 54873 - DNA, 30 bp, Homo sapiens
  chr18:8129093-8129123
  hyper
gtttggtaaaagatacgaaatactatgaaa

SEQ ID NO: 54874 - DNA, 30 bp, Homo sapiens
  chr18:8249539-8249569
  hyper
ataggcgaagatttgcgatttcttcatgtg

SEQ ID NO: 54875 - DNA, 181 bp, Homo sapiens
  chr18:8367258-8367439
  hyper
tgagatggggaggaccggattcgaaatgcctgggccgcctgttctgggcccgccccgccaggtgcctgtgctcgggaggggccttgcccagcacgcattctagaaggaagcggccccgcgcctcctccctcgcaattaccgccgggtcggaggcatccgggcggtgcgaagtcagcaccgt

SEQ ID NO: 54876 - DNA, 30 bp, Homo sapiens
  chr18:8379043-8379073
  hyper
ggagggggaagggaccgtcttgcagtcagc

SEQ ID NO: 54877 - DNA, 30 bp, Homo sapiens
  chr18:8383007-8383037
  hyper
ttagatgcggccaggcgcagtggctcacac

SEQ ID NO: 54878 - DNA, 30 bp, Homo sapiens
  chr18:8470342-8470372
  hyper
agtcctgtcaaagaacgtgtgtccagccac

SEQ ID NO: 54879 - DNA, 200 bp, Homo sapiens
  chr18:8705986-8706186
  hyper
agcccccgccgggcgccggggccagagcggcgggcggtgccaaggctgccctgggaagcaggagggcggcgcgcgtggcgcccgcggagccgctgtcccgggctgggaagcctcccggagccgagccgccgtctgccgctgccaagggccgcaaagccaagcgcggctcccgggcgccacccgcccgcaccgtcggcccc

SEQ ID NO: 54880 - DNA, 44 bp, Homo sapiens; identical to SEQ ID NO: 11630
  chr18:8748271-8748315
  hyper

SEQ ID NO: 54881 - DNA, 30 bp, Homo sapiens
  chr18:9102444-9102474
  hyper
gtgcagctccgggacgcttcttttcaaggc

SEQ ID NO: 54882 - DNA, 71 bp, Homo sapiens
  chr18:9474875-9474946
  hyper
attccgtggatgttcccgacagaggtttattcccgcctatccctacaggcccacggcgctctttcctccaa

SEQ ID NO: 54883 - DNA, 169 bp, Homo sapiens
  chr18:9475346-9475515
  hyper
tcgggctggctggacgccggggccttgggaactacgcctcccagcgcgccccgcgcgagagcccaggtcgcctgcccttgacggcttcagccgtctgagcggagaggaggatccgggaagccggctgcggcgggaggagggaatgcgcgtgcgcgctggaccgcctcgt

SEQ ID NO: 54884 - DNA, 30 bp, Homo sapiens
  chr18:9708423-9708453
  hyper
aaagtgtgccttctcggggtgagtcctggc

SEQ ID NO: 54885 - DNA, 495 bp, Homo sapiens
  chr18:9708875-9709370
  hyper
tgatagtttccttccggcagaaagtttaagttgctcagccaagtcgctgagtgctcttttgcctcctgggggcaattgatttactcacgtaaaacagaaaaataaaaccaaaagcgaacccagccaagggggtgaaagccgagggcgcggccggggtggaaggtgaggcagtgacctgtgcggagcgcgccctgcaaacttccctgctgcgggtgaaagaagctgcctgggaaagtcctccccaccatcactcccctaaagtggggttttctccgcccgaagaagccttaaagcagccagaaacaaaaaagcagtcaatccgtgcggcccggggactgcagacaggggacccggcgaggacgcagggagccgctggcgaaccgcccctgggaattcagataaacgtagggtcgcttcctttcgggggcccactccgcattccagaattccttcttctaaaagaagagccggttctaagggcgttttcagcagcca

SEQ ID NO: 54886 - DNA, 106 bp, Homo sapiens
  chr18:9771586-9771692
  hyper
gaagggcattcccagcgcggagtgactccttagcctggctcctggcctgtcctcagcaaaccgcgggtagggtgtgcccctggtggccagccgaggaacagcagtc

SEQ ID NO: 54887 - DNA, 30 bp, Homo sapiens; identical to SEQ ID NO: 11634
  chr18:9913710-9913740
  hyper

SEQ ID NO: 54888 - DNA, 33 bp, Homo sapiens
  chr18:10454666-10454699
  hyper
actgcagctcagagcggcgcacgcggcggccgg

SEQ ID NO: 54889 - DNA, 224 bp, Homo sapiens
  chr18:10454974-10455198
  hyper
ggaaatgtcctggccgcgccgcctcctgctcagatacctgttcccggccctcctgcttcacggtgagttcccgagggccactcgagcgctcccagccggcggaggcagcccgggcgccgcggagcccgcggaggcgtcgggtctggatcgcggcacggcctacactgtccccttggcggggcgggtccgaggggagccccgcgcctgccgtctcagccctggga

SEQ ID NO: 54890 - DNA, 30 bp, Homo sapiens; identical to SEQ ID NO: 11636
  chr18:10455448-10455478
  hyper

SEQ ID NO: 54891 - DNA, 30 bp, Homo sapiens
  chr18:10525827-10525857
  hyper
catcagtatctcaccgcgcctgcgctagat

SEQ ID NO: 54892 - DNA, 30 bp, Homo sapiens
  chr18:10526123-10526153
  hyper
gggctggaacacctcgccaaagcagagaaa

SEQ ID NO: 54893 - DNA, 130 bp, Homo sapiens; identical to SEQ ID NO: 11637
  chr18:10647663-10647793
  hyper

SEQ ID NO: 54894 - DNA, 80 bp, Homo sapiens; identical to SEQ ID NO: 11638
  chr18:11148544-11148624
  hyper

SEQ ID NO: 54895 - DNA, 352 bp, Homo sapiens; identical to SEQ ID NO: 11639
  chr18:11148741-11149093
  hyper

SEQ ID NO: 54896 - DNA, 158 bp, Homo sapiens; identical to SEQ ID NO: 11640
  chr18:11149115-11149273
  hyper

SEQ ID NO: 54897 - DNA, 461 bp, Homo sapiens; identical to SEQ ID NO: 11641
  chr18:11149298-11149759
  hyper

SEQ ID NO: 54898 - DNA, 220 bp, Homo sapiens; identical to SEQ ID NO: 11642
  chr18:11149779-11149999
  hyper

SEQ ID NO: 54899 - DNA, 477 bp, Homo sapiens
  chr18:11752127-11752604
  hyper
ggcgccctcgccccccgtctccgttcattgtgctgtattcatccagcagattttgaaacaattctcgtgtaaaaaggcattttactccgcgcgtcttccttacagccatttagttgggagtttgcggtgggcagggggagggagaagaaacgcctgctctgaatcggaaaacaccgaagagaccagaccatctctttcagcagcaggaaagagaggagccgtcgcaggagccgcacacgtctccaactctctattgctttttgcgcacattcctaacttcctgacgtccatcccagcgggcaggcatggggtgtttgggcggcaacagcaagacgacggaagaccagggcgtcgatgaaaaagaacgacgcgaggccaacaaaaagatcgagaagcagttgcagaaagagcgcctggcttacaaggctacccaccgcctgctgctcctgggtaaggccgaggggcgcgcggcggctc

SEQ ID NO: 54900 - DNA, 114 bp, Homo sapiens
  chr18:11752640-11752754
  hyper
cgccaggctgggcgggcagggccgggcgagggtcgcgcgcacctctgggccgcggagcccagacggcggccggggcgagctcctccagccaggaacccgcgtgtaggaaatccc

SEQ ID NO: 54901 - DNA, 30 bp, Homo sapiens
  chr18:11908166-11908196
  hyper
taaatgttgtcacacgggcgcaagaataca

SEQ ID NO: 54902 - DNA, 599 bp, Homo sapiens
  chr18:11947243-11947842
  hyper
tcctaaggaggaaccacaaaccgcgtagactcaggccagccgctgggcctgggcctgtgtgtccctcaggcggcgacctttggcccacttcaggccggccgtatttaccagcttagaggcgccgcggcgttggcgagtcctttttcacccaccccttccctccgttctcaggcttgaacttgaacaggcactcatgactcagcaaacggtacttgatagggttctttacacgtcagtcaggctattttttaaaatcactcttcctggagatcttcaaaccagaagcaccgcgggccctccccaacgggcttctgcttacctccactacgtgatgcagtatggcccccgggaggccgcccccagattctagaggggcttaccccagacacacccgaaggaccacctcgtgacctcagaggaacagccctagacccaggagagactgccagacacccccgtggcagcccgccagggcccagctctacttgtcgcctggaggtgctgcctcccttccacgccgccccagggaatggccgcccctctggggctcctcccaatcccccttcccaggactgacaatggcccggcgccctgctttg

SEQ ID NO: 54903 - DNA, 30 bp, Homo sapiens
  chr18:11980675-11980705
  hyper
ccagccgcccctggcgctcgagcccgaatc

SEQ ID NO: 54904 - DNA, 30 bp, Homo sapiens; identical to SEQ ID NO: 11645
  chr18:12038703-12038733
  hyper

SEQ ID NO: 54905 - DNA, 140 bp, Homo sapiens
  chr18:12253734-12253874
  hyper
ctcctttcccctcccgttctgcatgcccttctcactgtccccaaatgctcatgacatggccttgagagcagcgcagcgggcaggaagcccaggcgcctcggagaacctgaagggctgcaggtcccggtgtctgcggcagc

SEQ ID NO: 54906 - DNA, 41 bp, Homo sapiens
  chr18:12254105-12254146
  hyper
gaccaaaagagacccggggagcatctgggcttccaaggtcc

SEQ ID NO: 54907 - DNA, 180 bp, Homo sapiens
  chr18:12254304-12254484
  hyper
cgggcgggggcggggccgccgcactttaagaggctgtgcaggcagacagacctccaggcccgctaggggatccgcgccatggaggccgcccgggactatgcaggagccctcatcaggcgagtgccccgcgtccccctgattgccgtgcgcttccaatcgccttgcgttcggtggcctcat

SEQ ID NO: 54908 - DNA, 30 bp, Homo sapiens
  chr18:12271788-12271818
  hyper
gactgagaccagaacgctggagcaggaagc

SEQ ID NO: 54909 - DNA, 342 bp, Homo sapiens
  chr18:12287786-12288128
  hyper
ccaggaatgagctttggacaacgtggttcctcccgttgaatcaggttctgaccgagtccgctgcagctgcaggcgggggcgccctgccgagcagatacccagcggagctccggggccccgtttctactgtaagcagctgggggccaaatgtgcgcccgggcacgtctcttggcctctcccagactcggcaccctcatctgtaagaacgtgaacgatgtccgccctggacaggactgcggtcgcgagaggtgcccgggccaggcaagggacacagcgcggatctgctggtttcccccttgattccatgcgtgggcgtgaagcgtattcttgggagtcaggcac

SEQ ID NO: 54910 - DNA, 479 bp, Homo sapiens
  chr18:12307602-12308081
  hyper
cgcgaggagtaggctgcatagacccggcgcaggaggtgttcattttcggatccagccctgtagtcactttagctaaacccggttccaaaggggtgggagtcgtcggagaggaatggcctctgtatctccggagacggaaacaccaggacgaagaggccctaagaacgtgtgcccggggtgcgaccggggggtggggggcagggggcagagaccctgaaaagctccaccgccgaaccccagggcagtgtcccggcttggctggactgggcgcgggcggctgcaatgctcccgggcgcggcgctgggaccccgcgggccacgtcggctccgctgccccgacgccagggcccgactcgcgtctccctctggcggggcaccacaaggggcagcgaaacggtggtgggggcgggcgccgcgctccttcccgtctcctccccgccagctccgggcccgtccttttccgcccggctcccggcaagg

SEQ ID NO: 54911 - DNA, 755 bp, Homo sapiens
  chr18:12308301-12309056
  hyper
tcgtgcacatccaggcgggccagtgcgggaaccagatcggcaccaaggtgggcctggcgcggtgcagggcctctccgcgggtcggctgctggcgggccccgggtctcccggcgcgacccccgccggggcgcgcacccgctgtgcgcccctgggtcctcggagcccggtgcggacccgcgagggccgcagggagggagcgcccggggcgtggccggccggggaccttctactcttcgctccccacccccatcccaactgggagcggctgccggcggctcaggcgcgcctggaattcggccgccggggcgcctggggtgggcgcgggtggcggcgtcccgggctctgggttctgagcgtctgtccccccgccttgccctgcccaagttttgggaagtgatcagcgatgagcacggcatcgacccggccggaggctacgtgggagactcggcgctgcagctggagagaatcaacgtctactacaatgagtcatcgtgtgagtagcaaggccgccgcgccctgcccggccgggacccgcgtggacgctccggcgccgcctcttagcgcggcgagtttgcttcgggaaaagttctctcggggtgtagcaggatgcccggccactcccttcgctcctccggggcgggaaatccgccgtcagtttattcaaacagctcgattcagcctatcctgagggtctgagcgcttgaacgggaccacccgttagcgttgtgaaatcaacgtagcggttcctgcccagc

SEQ ID NO: 54912 - DNA, 31 bp, Homo sapiens; identical to SEQ ID NO: 11650
  chr18:12376269-12376300
  hyper

SEQ ID NO: 54913 - DNA, 615 bp, Homo sapiens; identical to SEQ ID NO: 11651
  chr18:12407707-12408322
  hyper

SEQ ID NO: 54914 - DNA, 42 bp, Homo sapiens; identical to SEQ ID NO: 11652
  chr18:12408339-12408381
  hyper

SEQ ID NO: 54915 - DNA, 262 bp, Homo sapiens
  chr18:12656809-12657071
  hyper
ttctctttgtatcccgacatcctgtcaacttttcactttacaagcctgtttttcatcacaacaaattttcacatacaggaatgcaatcagtattttctaacgtccaggagccaaaaatcactatttagtctatttttccatttctccccaaagagcagaattctcacggttcagaatcatctttacatttccgaaccgaggaaaggctgtctaatgtggaatactgctagtttcccgtgaggagtgcggtgtttccgacagc

SEQ ID NO: 54916 - DNA, 55 bp, Homo sapiens; identical to SEQ ID NO: 11654
  chr18:12657374-12657429
  hyper

SEQ ID NO: 54917 - DNA, 34 bp, Homo sapiens; identical to SEQ ID NO: 11655
  chr18:12658129-12658163
  hyper

SEQ ID NO: 54918 - DNA, 30 bp, Homo sapiens
  chr18:12702727-12702757
  hyper
cccggcggcggcggcgccaactgttttcaa

SEQ ID NO: 54919 - DNA, 31 bp, Homo sapiens; identical to SEQ ID NO: 11656
  chr18:12859860-12859891
  hyper

SEQ ID NO: 54920 - DNA, 30 bp, Homo sapiens; identical to SEQ ID NO: 11657
  chr18:12883588-12883618
  hyper

SEQ ID NO: 54921 - DNA, 31 bp, Homo sapiens; identical to SEQ ID NO: 11658
  chr18:12991134-12991165
  hyper

SEQ ID NO: 54922 - DNA, 31 bp, Homo sapiens; identical to SEQ ID NO: 11659
  chr18:13217472-13217503
  hyper

SEQ ID NO: 54923 - DNA, 51 bp, Homo sapiens; identical to SEQ ID NO: 11660
  chr18:13217884-13217935
  hyper

SEQ ID NO: 54924 - DNA, 30 bp, Homo sapiens
  chr18:13218428-13218458
  hyper
actgaattctgcaccgcccggaggccagga

SEQ ID NO: 54925 - DNA, 30 bp, Homo sapiens; identical to SEQ ID NO: 11661
  chr18:13218869-13218899
  hyper

SEQ ID NO: 54926 - DNA, 19 bp, Homo sapiens
  chr18:13312124-13312143
  hyper
tgcccggccaaatctgaaa

SEQ ID NO: 54927 - DNA, 30 bp, Homo sapiens
  chr18:13725908-13725938
  hyper
cttcccaaacacggcggtaaggaccagtct

SEQ ID NO: 54928 - DNA, 346 bp, Homo sapiens
  chr18:13823934-13824280
  hyper
accgacccaccgacccgaccgaccaaccaaccaaccaagcaaccatccaaccattcaagagtgtgttcggggggattttcgctcggggctgacgcggttctctggccgctgtgccgtgctgggccactaggtggcagcggaggccgcccggagcgacagccggcggtgcggaggcgggcccggcgcgggcaggcaggaggcttaaagccccgcagagccgcagccgcctagctgggggagaggcccgtccggggctggctctgagcgccgcacggccgtcggatcccggggacgccgggggcccgggctgagcgccgcggcccgcgaggaggagcaccggtaaata

SEQ ID NO: 54929 - DNA, 408 bp, Homo sapiens
  chr18:13868511-13868919
  hyper
caatgggccctctcagaggcccgggcaaccgcacaagcaagaatgcagcacggagcggagtccaggatgctcagcgtgggcctcggagtctgtgtgcgatcagctggagtccaggatgctcagcgtggacctcggagaccgtgtgggctctgcgctctgcagctgagacacagtcacccgcccgatgggcggagaaaggggcagctttgaaaacaagcgcaaggagatgcatccaaaagacaaccgaacccatcagggtaaggagcgcagcggtggagtgtgagggggaaccagaagggcggccagggccggcggcatgccatgccaggcagccccgcgccaccccggaacactgggacactctcatattcccaaagggacttctccatgcggcgctctgaccaggca

SEQ ID NO: 54930 - DNA, 314 bp, Homo sapiens
  chr18:13868946-13869260
  hyper
cgagcgcagggcacccggcccatcagctcttccttcacctgaactgccccggcctcgctgagacgcggattttaaaaccgccctgcacctatgtgctggcagccaggccctgggaacttcctccaaacactcccatgagttcgggatgactagcatcagttttcagctggagagcagacggcaactgaacgctgcgaagtcccacgatggggatgagaggaccagagccccgaggccagtcgcccccctcccgcccatccgcccgcccgcccgccacgcagggctgctctagcgcctgcctcttcctcttccat

SEQ ID NO: 54931 - DNA, 30 bp, Homo sapiens
  chr18:14450359-14450389
  hyper
acgcgcccgcgcccgcgcccgcgcccgtgg

SEQ ID NO: 54932 - DNA, 30 bp, Homo sapiens; identical to SEQ ID NO: 11663
  chr18:14726130-14726160
  hyper

SEQ ID NO: 54933 - DNA, 28 bp, Homo sapiens
  chr18:15198163-15198191
  hyper
aagcagcggtggcgctgacaaaaagccg

SEQ ID NO: 54934 - DNA, 30 bp, Homo sapiens; identical to SEQ ID NO: 11665
  chr18:18691690-18691720
  hyper

SEQ ID NO: 54935 - DNA, 2044 bp, Homo sapiens
  chr18:18821313-18823357
  hyper
tttaaaaatggagccgcatctctaataacaaaagcctccagctgtgaaaagtggagctaaatctctctaccgggccgcagcatctctcaagaaccttttccccgcagcacccgtcaaggcccagggccagctggacgcggctgccctggggtggagccgtccccgtggtcccgggaggctaccgacgagccggggcccggggccggagggcgtgctcctccgggaggtgcaaaagtcggcttgggcccggagctcccgggtttgtttggttttgtccgcgccctgcccccaccctacccccttcatgcaaaaggccaagggtttccgagccaccactgcccaggccgagttcacgcttggggctcttcagccgccgtccagtgaacagagaaagcaattgcgcagaggcgagagcaggctgaatgaacgcgggctccaggggaaataatttttcctcctggcttcgcgcgtcagcacactggggtgcagccctccctcacagaagaccccccccccgcacgaccccctgtacacccccgcggggctgcgcgttcgtctgtgcggcggggtttgggaatggaggcgtgaggaccgcgcatcgagggctccacaggctgggcggggggcgtcgttggaggggggtaggggagaaatgcgcgcccaccaccctcacagagggcgagggacccccaaaagccactcgcggacgccgaggcagcgggaaggcgcgaggcggggcggggggagggggcgcgggggtccccgctgcggaggccagggcgggcgggaggggcagcacctgaggaatccgcctccggctgcggcggccgccgcctcgctccgccccggggaactgagcgcgcggaccgcgcgcctgccagagagacgccagccgccggcggcgctagcacctcggagtcgggcggccggagcagcggagcgcagcgcggcgcagggaacggcactgggggtggggagaccagcccggccgagccgagggccaccccctggtcctctgccctcgcgccccgctagggccaggtgagcggccgcggggactccggggcgcgggcaggaggtgagaggtcgcgaaccgggcgcgggagctcgcctgtgaccggcaggagctgccctttggcgggctggacgccctggccgcgcggggaagcgccgcagcggacttttccggagggatgggaagctcagcgggggtgtgagcggagcgcgtgcgggtggcgagggagcgccagtgccaacctgggagccgtgcctgccttccctgccgcctcgcgtcgcccaccgaagggacccggccgtgctgtccgcgcccagaggccgaaggcctgtcaccgggctctactcgctgcctttgtggcgggagcgagacggcccgggggtgggacgagggagctgcggcgcgccgagtagcgcggggtcccccggcggaggcggcgagggggcacctggttcgtctccccgagcccaggggcagtgagggggtgccgggcaggcgggcgggcgacaggtagggcgccgcggaggtggcggggagaggatggatggagttcagcctgggaaagttgagaacgtccagaggtggctgggcgctcgctcggcgtctgtgggtttttttcctcaacaccaaatgtcacttcgtcacgagcgggcgcgcgtgtcttccggccagcatgtccatttttctgtgcatggctgaggaccactcttattccgaatgagacacaaagagttgtgttgacagctgaccctgacacaagcagacagcgagtgaggtgcgccctggccggggagggtgagggagactcgttaaaggaaatccattcccgccgtccctcttcccagctccattaagaggaaactccatgtggagattcagtgcgtggggtttctcagttacatgagtccaaggaacgtccccgaacgcgactcgtttgcccggaactgccgctgcctctaaccgaggctgcgggtcctggagaaactcctcagtcttgcccctttctccggtgaacgtgacggttccaag

SEQ ID NO: 54936 - DNA, 30 bp, Homo sapiens
  chr18:19181010-19181040
  hyper
gttcctggggtcatcgctttgagctgaaaa

SEQ ID NO: 54937 - DNA, 30 bp, Homo sapiens; identical to SEQ ID NO: 11668
  chr18:19284433-19284463
  hyper

SEQ ID NO: 54938 - DNA, 30 bp, Homo sapiens; identical to SEQ ID NO: 11669
  chr18:19284816-19284846
  hyper

SEQ ID NO: 54939 - DNA, 30 bp, Homo sapiens
  chr18:19321118-19321148
  hyper
agcttgctccccgccgcccccctcgggcta

SEQ ID NO: 54940 - DNA, 61 bp, Homo sapiens
  chr18:19577720-19577781
  hyper
gtcctgtttctacttcgtgagatggcactgactcaccactagtggtcgctattattcacac

SEQ ID NO: 54941 - DNA, 2369 bp, Homo sapiens; identical to SEQ ID NO: 11670
  chr18:19748746-19751115
  hyper

SEQ ID NO: 54942 - DNA, 230 bp, Homo sapiens
  chr18:20139427-20139657
  hyper
aggtgtcagggacacgcagctgttttcaaggaaagcctggctccaagaggtcctccccggccgggccgcctggcggctccatcccgggtgggtgtcagcgagcgcgcagcccccgacgcttgtcctctccctgacagggccctggccaatgtcctgctgctgcgggtcgtggtaatttacatcctctctgtgtacattaacttatctgcagccgcgctggctgcgctcct

SEQ ID NO: 54943 - DNA, 30 bp, Homo sapiens; identical to SEQ ID NO: 11671
  chr18:20261870-20261900
  hyper

SEQ ID NO: 54944 - DNA, 210 bp, Homo sapiens; identical to SEQ ID NO: 11672
  chr18:20512627-20512837
  hyper

SEQ ID NO: 54945 - DNA, 1246 bp, Homo sapiens; identical to SEQ ID NO: 11673
  chr18:20512902-20514148
  hyper

SEQ ID NO: 54946 - DNA, 75 bp, Homo sapiens; identical to SEQ ID NO: 11674
  chr18:20715562-20715637
  hyper

SEQ ID NO: 54947 - DNA, 1040 bp, Homo sapiens
  chr18:20715850-20716890
  hyper
ccgcgccggcccagccgccgcccgaacccccccggaagccgcgcatggacccgcggcgccgccaggctgccctctccttcctcaccaacatctcgctggacggccggctgccgccgcaggacgcggagtggggcggtggcgaggagggcggcgcggccaagccgggcgccggcggcgcctgcggcgcgaggactcggttcagcttgctcgccgctgccgagcggggcggctgcatcgcgctcgccgcgccgggcacgccggctgcggggttagccgctgggtccggcccctgcctcccacagccctcgtcgctgccgcccttgattcctggcggccatgcgaccgtgtccggccccggggtggcgcgggggttcgcgagtcccctgggcgccggccgggcgtcgggggagcagtggcagccgccccggccggcgcctctcgccgcctgtgcccaactgcagctgctcgacgggtccggggccgccgggcaggaggagttggaggaggacgatgcctttatcagcgtgcaggtgccggcggccgcctttttgggctccgggacccccgggagtgggagcggcagtcggggacgcctcaactcgttcactcagggaatcctgcccatcgccttctccaggccgacttcgcagaactactgctccctggagcagccaggccagggcggcagcaccagcgccttcgagcagctgcagaggtcccggtgagtatccgggatgcgacgcgcacccaaccctgcgtcccgcccggcgctcccagcctccccgcggtctctgggctacgggacacgggttgctcccattttcccgcgccctgccggatcctgtgctccgggcccgaatcccaaaccacgagggcacccaaaagagggggcgtccccagggagtgcggggttacacgtgtttgcacgagcccagcattcgcagaggagcaccgcgcttgtgcagtgggtcgggaattgggagttgcaggagcccagtagaaagcggcgtccgagcctccccacacgagatcacaaactt

SEQ ID NO: 54948 - DNA, 384 bp, Homo sapiens
  chr18:21033057-21033441
  hyper
tgccctgccctgcccgacacaggcaacgtgaccccaagcgacagccagctgatgcttgcttctccgagcccggcggtcagcagccggaagtagcccgcccgggggcggggaaaggtgccttaaggaggagctaggggcgtgcggccaattgcaagcgactgtcctagcgaagagggcggaagaggagagatccagttccggacgcggccgccgccgtcgccgccatctgtcacctccactccggcatcagcagccagtcgcccgtgtcccgcctgtctcctcggcggagcctgctgcccgtcctgccacctctctgctctgttcttgtctctgccttcattcccgaatggatctggtaggagtggcatcgcctgagcccgggac

SEQ ID NO: 54949 - DNA, 30 bp, Homo sapiens
  chr18:21083626-21083656
  hyper
gcagttcgagaaggcgaaccctgtcaactg

SEQ ID NO: 54950 - DNA, 30 bp, Homo sapiens; identical to SEQ ID NO: 11677
  chr18:21166683-21166713
  hyper

SEQ ID NO: 54951 - DNA, 769 bp, Homo sapiens
  chr18:21242240-21243009
  hyper
gtgctggccacccctccggggaggaggcatccgtgggtgcagctggtactcctgcatgaggacccagagggtcagggtcggggactccttctgctgcaggacagcgctgaccccaggcttcttacccgcccccgacctgttacccggcgacagtccccgccgccccgtcgccgggcacagactcagccgatccacagccatgagtgcgaagcctctcaggcagggcaggcaggcaaaccgcaaacccacagggcgcacccagccccgccgcttcctcccgggcctcgcccgcagctggaggagagaggaaggaggaggcggcgggcagcgggcagcgcccaccccatcccaccccatcccaccccacccgaccccgcgggcccggccgcccgagcccggccccagccctgaccccggagtcccggtcgctcaccttgaaggacatcctgcacatgtccgcggccgcccgagcgggagccggcgcgctttgggcccggggcgccttgtcctccccggcccttcactctcccggggctctcggcgttccgcagaggggcggcctccgacgccgcgcgctcccgccgcccggcccggcagcagccgccgcacacagggccgggccgaaggggcggcgcgggggcgcgcgcgcgcgcacactacacatggggtgtcgcgtggacgcgctccaggacctgccacacacgcgcgtgcacaaacaccccaaactccgcacgcactgtgcactttccacacacgtccacacttccac

SEQ ID NO: 54952 - DNA, 886 bp, Homo sapiens; identical to SEQ ID NO: 11680
  chr18:21269065-21269951
  hyper

SEQ ID NO: 54953 - DNA, 161 bp, Homo sapiens
  chr18:21270126-21270287
  hyper
ggcaccaccggcccgaggcgaggagggggagcacgcgaggtgacatgaggctgtggtcaggttcgggctggtggaggggaaagtgtgaggctgcgctctaagagatgcaggcgcctcggcccttcccgcctccgtcacccacggagcgtcccgccaggctt

SEQ ID NO: 54954 - DNA, 31 bp, Homo sapiens
  chr18:21393784-21393815
  hyper
cgtgagctaccacacccggcctattctgaac

SEQ ID NO: 54955 - DNA, 30 bp, Homo sapiens
  chr18:21405537-21405567
  hyper
tttccattcaagacaacaaaggaacatcag

SEQ ID NO: 54956 - DNA, 189 bp, Homo sapiens
  chr18:21594029-21594218
  hyper
ctgccttgcagtcccgcagcgcggggctccggggagctgcggggcaggtgccagagaccccgcccccgccgcccacctcctcgggaattggctgccctggtcctagggggcggccccagggtcgggatgaagtctggggtcgcgggcgcgggctgcgtggggtttcagttactcgtggagtttcagtta

SEQ ID NO: 54957 - DNA, 248 bp, Homo sapiens
  chr18:21594466-21594714
  hyper
ctgcaggaagtggaggcggccgccgctcggggaccggcttggcggggtgagagacacccggaaacggattccgcttcggggcccgcgcgagttgggtgcttcggagggcgcgagaggagcgggcgggtgctgctgagtaatccccgcggcggcggccggacgcccacctcccacgccgcgccgcagccgggccgcggctcctccctccgcggtccttccctcctcttccctcccgtcttctcccctcc

SEQ ID NO: 54958 - DNA, 85 bp, Homo sapiens
  chr18:21851439-21851524
  hyper
cactctgcacacacacgtccaactattcttggatctactcacatccctggatcaagtctggccgccctccccgctccgtcccccg

SEQ ID NO: 54959 - DNA, 759 bp, Homo sapiens
  chr18:21851561-21852320
  hyper
cgagctgcaaatacacccacctacctgggccagatccgaggaccccggctggcgcgctccaccctgcgctcctcgcaagctccagcgcgaatgcgctcggcctgctcctcctcctcccctccagtcgagccgaggcgagccgatccgggaggcgcgacccagggcggcccgcaaggtctccctaagtcacctttgcgcagcctgcccctggctccggccgggcagcagcgccagccttccccagcgaggtcgggcagaggcgttgcccgccagcggcccaggactcccgcgccgcgcccgcccgggccgcagaggtctgcgctgcccctccgccgccgctggctcggccgcagacccgccctccggggctcgcggggagagcgcgggcgggcggcggcaaggcctgcggcgggcggctccctgcgcgcggcgggcagcgtccgggccgctcctccccttccccagcgccgctggcgggcggaggcgcaggtagggaccgccggggaagcctgcacggccctccgaggagaggtcggggactgctccttgggctctacgtgagtgccgcgccgaggcgcctgcgaggtcctagagctgctgtgcgctcggccctctcctggagacaccggccctggcaactttttttttttcttttttctttttttttttttttaaccaacccgccccttgggaaactctggaaagcaaaggaatcttctctccagtcctgcctgtcacttactccggctcacgctgaag

SEQ ID NO: 54960 - DNA, 781 bp, Homo sapiens
  chr18:21977254-21978035
  hyper
ttaaaaagtcacatggacacacgaaagtaccgagaaggcacgcagctgaagatctggtaggggatgcatgcggcaccagcatggtcgtggcacccgagtgggaagtgcaacaaacgccaacatcttgttacttttaacgcctaacttcctgcagcgctggagcagccagcggccgccgggaagccgagctcggctgcagccctgcgtcgccgcgccacgacccgaccatcctctgagacgcccgggacgggagcgcccacccccaaccaggcgcggacagacctcccgagcgcagcccggcgggaacccgtcagcgcgggaaccggcctcgaactccaggcgtggacagccgcgagaaactgacctacgcggtcacccgggctcccagagctcccgaggcggtggccacgaccccaggcttcccgtccgcccgccccacgtcgaggaagtggtcgtcaccaactctggctggcactccccgaggacgctcgagcccgcgtaacgtctgtctccgggacccggcgccgggaccacggcggagcgcgaggtggcgccgcccctccccgcagcccgcccctggaacgcgcatcctcctggcgagctggcatccctcccgacacgtgaccgcagcggggacacgcccgttccccgcccactccccgcccctgcctggcctgcccacgcccccggcccgctcctgtcccgcctgggccaccggcgctggttccaggttttgccagctactagggacgcgtaaagccttcgcgctcctcccaccaca

SEQ ID NO: 54961 - DNA, 248 bp, Homo sapiens
  chr18:22006300-22006548
  hyper
agtcccttcccgggacgcggtggtaaatgactccctaaagtctcctggccattccgatggcgccaaggccgcaatgggcaagcaaaagccccccgccccggcgcattcctaggagacagagccgtgagggcctctggctgcaactcgcgagggtcggctttccctgggtctccgccctacgggagacagtgaaggcgggagcaaggccccaaccgagaaccccaccccaaacccgggggccaggagcc

SEQ ID NO: 54962 - DNA, 169 bp, Homo sapiens
  chr18:22006774-22006943
  hyper
gctgtctctccaggctcggctccggctcgcctcgccatgccagtcctcctcagccgaggggccctccgcctggggccgccccgggttccgccagcactggccacgccatttgctccaccgcgttccattttcccggcgcttcccgtcggccgagcgctcttaggccggc

SEQ ID NO: 54963 - DNA, 148 bp, Homo sapiens
  chr18:22653838-22653986
  hyper
aaacatctttccccaccgtaagccaaaaaaaaaaaaagcttgtctactatggcatatgctttggtaaagatatataaaaataaaactgtgaaaggacaatgtattaatttagataaactgtgttaagtatgagccacctcctgagagg

SEQ ID NO: 54964 - DNA, 528 bp, Homo sapiens
  chr18:22929190-22929718
  hyper
actttcaagaaagccggggtctcgggcaagtctcgccggcgcgagcctggtccaccgttaccctgacacccgcgcacgcccgtggcgtttcttttttcactgtcgacacttggatctttcaggccctgggtctaggtttcccccagaaaaatgaggggcccatgtgacggaaaccaccagacacactgtgtggagacacatgccaatgattcacctcgttcccgaactaaaacttctgcgctttaggaaaaaagcaagcgttccaatctgcgaggccctcccccaccccgtcccttcccaggagaagaaagaaagggctttgtgtgtgcggtgagggctccgttcatcgagttcaaaaatgcacagcggccgggggccgggaggcgtggggcgccgggccctgcccaccccttttccccgggccggcggcgagtcgggaagctggtgcgggaaccggggccacggggcgccgcggcccggcagccaggaggaagaggatgctgcgccgccggggaccagagggcgggg

SEQ ID NO: 54965 - DNA, 1259 bp, Homo sapiens; identical to SEQ ID NO: 11688
  chr18:22929926-22931185
  hyper

SEQ ID NO: 54966 - DNA, 30 bp, Homo sapiens
  chr18:22932061-22932091
  hyper
gggggcccctaacccgcagggactcgctct

SEQ ID NO: 54967 - DNA, 30 bp, Homo sapiens
  chr18:22932658-22932688
  hyper
ctgctgttgttgcccggactcgggaaatct

SEQ ID NO: 54968 - DNA, 1029 bp, Homo sapiens
  chr18:23806174-23807203
  hyper
caaggagaggaacacggatgccgcagttttccaagtgcagcttgcccctcccacgtgataggtttctggcatcgcccctccttgctggcgattctggggaagattttaacgctccctggagccgtccccagtgacgtcacgggcgcggctccgctccttggccaatcacgcggccggatcccggggaaacccggggcggtggcggcggcctgggcgcgtgcgcgaggtctccgcgtggctatataaacatggctggcgtggccgcgcggcggggccgtgccaatcgcgcgtagggggctgtgggcactcggggttcgtagttttgaaatttctggcgggggagcagctgcgcagttaggctcgaggtgtgagcgacgaccttccgggagccgcaagtccaggctcccccgcagcgggacccgagcctgaggcgcagggctgaggcagcgcacgtgtgagcgccgctgaggaagctgcgagaggtcgggcgggtgtcgctccgggggcagcccaggctcgcgcggacgagaggaaggtccgggacgcgcgtgtcctgccgtgcagcgggcgcccgtcactgacttcgctgctgcggcccccgcgcctctccccagcgatgctgtggaacccgaaccgcaccggagtcggctgccgcgcgccaagcctcccctcacctctgctcccggaaccgcagcgccaaagctgccgctgagcccctgggggatgcccgccggcctcaccgaacccgccggcgccgctcccccggctgctgtgagcgcctcggggaccgtgaccatggccccggccggggcgctgccggtgcgggtggagagcactccggtggccctgggcgccgtgactaaggctcctgtcagcgtctgcgtggagcccacggcgtcccagcccctgcggtcccccgtggggaccctggtgaccaaagtggctccggtcagcgcccctcctaaagtcagcagcggccctaggctgcctgctcctcagatagtcgccgtgaaagcccccaacaccacg

SEQ ID NO: 54969 - DNA, 525 bp, Homo sapiens
  chr18:24127690-24128215
  hyper
gagcttgcggatgaccgcggccagcgtcaggttggcgctgcgcagctcggggtccttggtgaggtcgagcgtgcggcagtacgggggctcattgaggtagcggttgagggagctgcggatgctgatgagcgacgacttgctgtagagctggccgcttttggagcgggcctcggcatagaaggagcgcagcacgcggcacagcgcccccttgtccatggtctcgaagtccgggctctgcgccttctcgctcaggtactcccggaagatgcgcacggcgtagcgggtggccagccgggtgttctcgctcagccgggcccgctcggggcgctgcagcacgtcggggtccagctcggagccgtccccgggcggcccaccgcgggcccggggcgccagcagtcgcggcggcgcctcgggctccagcgcggcgctctggtccatattgatcatatggaccggctcgggctccagctcctccccggccgagtcctcgggctccaggggctcgtcccagtccagccccatctc

SEQ ID NO: 54970 - DNA, 30 bp, Homo sapiens
  chr18:24128610-24128640
  hyper
tcttaaaggagccgcgctccaattgtcatt

SEQ ID NO: 54971 - DNA, 269 bp, Homo sapiens
  chr18:24129547-24129816
  hyper
acaactccctcgggcgaggcgctccaccaagctggagctgaagtctccctaaggcccatcgggcaggcggaaaaagcgaacttgtgtctcggccgaccctgccgcagccacaattcggcaattcggatccggagcgcactctcactcaaagtttgccaaccgccattcgttcgccctccgggctgcgctgcctcaggcgcgcgggggcgggcacctcggaaactggaaaagcagccaaagagctcgccgggtctcgctttcccatagga

SEQ ID NO: 54972 - DNA, 161 bp, Homo sapiens; identical to SEQ ID NO: 11690
  chr18:24130252-24130413
  hyper

SEQ ID NO: 54973 - DNA, 302 bp, Homo sapiens; identical to SEQ ID NO: 11691
  chr18:24130644-24130946
  hyper

SEQ ID NO: 54974 - DNA, 96 bp, Homo sapiens; identical to SEQ ID NO: 11692
  chr18:24131098-24131194
  hyper

SEQ ID NO: 54975 - DNA, 165 bp, Homo sapiens
  chr18:24235703-24235868
  hyper
acagtgcaagtgttcgaaagcacaaaggcagactgtctacccgcgacagttcgcaagttgcggtggcggggcggctgtgcggagcgcgcgtgcaggtaagggattcctgcacccaggtctgctttcctcttcctggatgttttggggctcgacctcacttttaac

SEQ ID NO: 54976 - DNA, 60 bp, Homo sapiens
  chr18:24236253-24236313
  hyper
gctcgcatccttcccccgtcccagcgccgcccccaccccctccccgcctcccaaggagac

SEQ ID NO: 54977 - DNA, 30 bp, Homo sapiens; identical to SEQ ID NO: 11693
  chr18:24367819-24367849
  hyper

SEQ ID NO: 54978 - DNA, 30 bp, Homo sapiens
  chr18:24443329-24443359
  hyper
cacctctcagagggcggagcagcggccatt

SEQ ID NO: 54979 - DNA, 30 bp, Homo sapiens
  chr18:24570651-24570681
  hyper
gtgtctcattcctcatgcaccctgcagaat

SEQ ID NO: 54980 - DNA, 695 bp, Homo sapiens
  chr18:24764492-24765187
  hyper
tgctctggccacgatcgcacctggcctcccggtccccctaacttccctcccacctctcccgcagcctgcgcctgagcctgagccaggtcgcggagtttgagactgacgcaaaggaggcacccccgcagcagagatgctcgtctttctgccacacaccctggaggacccgacagactggcagcagaaactaaagactgttcctgccgtcctctttccaacctctgcatgccccaagaggggtctgaccccggaatcctggagtccagggtgccccgccggggcgcaggaaggaaactcaggtagctgacaagttcaggcggccgtccttctccagcgccccctcaaagtcaggatcccctcctgctcccgccccccacctcccgccatgcgtccactgaagtgaagggaagtgggttggaatactggaggtaggggagatagaaaaaggaagaagcctcccgcatctccagcggcgaagcacctggaaaggtgagggcgcacgtccccgcccaccagagcccgctcccggcgcgggtacccagcagcgcgccatcatctctgcccctccagtgccccccagccccaaccccagccccagcgcggttacctcgcgggccgctgccgggcgcttgcaggtgctgctgttccaggagcgcagcttcggaggaaacttccccgcgctccggggcaaactc

SEQ ID NO: 54981 - DNA, 269 bp, Homo sapiens
  chr18:24765230-24765499
  hyper
cgcgccgggagcggggacagctcggagtcgggcgctcaccctggccctgaccctcccgcgtccggcccggctggggctgcggcgccgcctccgcgcccgctcccgcccgcgcccccgcccccgcccgcccgggcagctccgcctccctctttttctctccctcgcccccgctgcccgccctgccttctccagctctgcctttgtggctctctggtcccctctttcctctgactttctggcctcgcctccgctggcgactcgccctccca

SEQ ID NO: 54982 - DNA, 58 bp, Homo sapiens; identical to SEQ ID NO: 11695
  chr18:25755393-25755451
  hyper

SEQ ID NO: 54983 - DNA, 2416 bp, Homo sapiens
  chr18:25755555-25757971
  hyper
cgtccagcccctgcccccgccccagcagcactcaccccccggcgggccggagcgcgccaggccctgacccgtgaagaccacggagcggggtaatccacaccacctgtctccacccccggagcaggcacttccgagctgcgtccgcacttttcggggctgccagctggcagtagagcacctctccccttgccccgagggcgacaggcagggggaccctccgtggattttcctgccccgcggcgagggtgggcacgcccctttcccgcaaccttcgagggaccccacggcaggcggagaccgacttgggaccagggcactgcacccgcccagctagagggtcccggccgaggctgtgtgaagtggcctccaggcctgggctggctggtcgggaggagcctgggggcatcctcgggttggaggcggcggaaagttgggctgcccccgggctgggaacccgcagcgtgcagtggcgagggaacctgcgcccggactggagcaggtgcttcctgccgcggaggagcctcttagtagagattaaatgaaaaggctcgctggctctctcccgagggtatgaaaagtacggaaggctccaggcaaaggcgcccccggggcgcatatagggcacaggcagccggacagagaaaggagcagccgcgtaacggaacttctcgcccgggggagatactaggcgtgagaggccagactcgttctacaggcaggcgctgaccggcagagactcctccgggcaagagggccagattttctttccaggtgggacgaacacagaatattgtgagggcaagagaagaagaaaaggaggcaactccagactgggataaagacaataggacagtagagcccttgagcaccgggaggcgcacgggtgcagggtggggtaaggtggaggcaagtcccgtaactaagacaccagagtgagaattcctactgtaaactcgcgacccatccctgcagaaataaacaaaaaaattggagcaaagtactatgcgaggggcgaaaggcacagaaaactgcaaaacctgggagttatcctgcctcaccctcctgctgcctggggacaccccccgcgagcttgctcggccccgaagaaggagcagaggggacccgcaatccagcccctagagccccgccaggaaaggcgcgagagacctactggccccggcaaccctgccccggcgcccggacggagcccgatgcctgcgcagctaccggccgcgcggcgcggcgcggcgcggcgtggcacctcccttcccgggtgcgcagcccggccccgcagcggcgcggggaacaaagggacccggcgccgcccgccccaccccgcccgtggcccggcccgcggggaccgccgcgtacctgaagcagggccgccagcagcggcagcagggtccgcagcgctcccgctatccggcacatggaggcggagaggggccgagcgaagagccggaggaggcggcggcggcggcggcggcggcggaggaggaggaggcagcggcagcaccaacagcggcgcggagaaacggctccaggcagtttccacccccttcccttcccctcccctccccacccccttcttcgctgctctccgctccccgccaatggagagcgagctgatgacaaatagcgggccgcggagtccgcgggactcgcaccaggagtaataaaacagacccagagatcaaggagctggggagggggcgggggaacagggagggagagcgtgtgagcgtctgcgagtgtgtggaggcggctgctgtggcagcgcaggcggctcggctccggcccggagcgcagcggaagccgcgagggatgcagcggcggggaccttggccggtggaggatgtggaggtggaagtggagcggatggcgctccccaagagctccgccacgcgaggtttcgggctcgtggttttgcttcctccgggtccccgctccagggccgctcggcgcgacgaagacgccggggacagcgccgcggggagggcgctccgggtcgtgcgtgctgcacccacaaagagcagcagtcccgccactccgcgcctccgctgcgtgggggccgaggggcgcttctcggctcctctttccggtcccccggcgagttggagactgttctccggcctcggccgcaagggggtgaggcgaggggccggcgcggtctctcccgccgcggctccgtcccgcgcagctgctgccgcagccgcccctgctgcccgcgcaccggcacccgcccgccggtcctcgccctgcgccgctcactcgcgcgcgccgccctccgtcgccgaccgcgcaccccgctcggcctccgctgcgcgacctgggcgagccgccgccgctctccccgcgctcgccccacgcgctgcctggctgcgcggcccgctcccctctcctattcctcccgccg

SEQ ID NO: 54984 - DNA, 340 bp, Homo sapiens
  chr18:25758128-25758468
  hyper
cggggggtcgccggagggaagcctagagtgcgccgagcaccgccccggcaggtggaggggctgcgggaaataaaataacttgggcaggaacttgattggtagcaggttcatctttggtccgcggtagggaatctaatggagatgaagaatggtggggaagggggggcggtgtctccttgggagcctaacgtacgcttctttattttgtcattctttggagatgggtaatctttcctggcaggggcagacacagcaaactaaggacgcaggccaagctcatcctagctattgttgtctgaggcgctcgccgggagccacctgcgggcgggggagggcggag

SEQ ID NO: 54985 - DNA, 20 bp, Homo sapiens
  chr18:28620935-28620955
  hyper
cagcatttaacctaaactca

SEQ ID NO: 54986 - DNA, 172 bp, Homo sapiens; identical to SEQ ID NO: 11700
  chr18:28621033-28621205
  hyper

SEQ ID NO: 54987 - DNA, 915 bp, Homo sapiens
  chr18:28621468-28622383
  hyper
ggccaggaagcagtaagaatccgcgagaccagactcggctcactgccgacgcgggtatagacctcgctcccatcggaccccatgcgcatccatggatgcgggtaagtcgcgggtccgcggctcctttctgggcgtgcggaatgaaactctgttgaagcctgaagcttcgcgtgtaaccgcgccgccagagttccgaacacttcaagtctcccgtgttctcagagcatcgtctctaacttcctctcctagaggatttcgtcctgggcggcaggtttccgtagactcgaaaccccaggctgtgctccggccgcgcagtcctccccggagccggagtaagtacgacgcaaccccaccgcatccatcatcccccaccactgtcaccctctacccgcctccacacctcggcagcatccccaaaacacaacacgaccccaacccccattctggcccggtcttcccacactttcgcgcccccggcacatcccgcccccagctgggtggctggcgggggtggaccgcttgggtgagcttctgaataccctttaggggagataccgagaaacccacttctcaggggcagccccaccaagggacccagggacacagccccggctccactcactaacgaaccaatccgggtcaactgcgacccagagctggggagggggcagcccctaaatcccttttcaagtctgtgctttgagctctcagggatcctctccacccaaaggcgccctccaaccaccatcaccaccagctccaccacctggggagaagcgtgaatcccaaccccctgcccaacccgcgacggcgcccgccagagcgcagcgaagcctgagcgcgactcagaattccaacaatcgaacaccttgtctcaaaacaaaaagctcagtccagagtcgacccgcaaacaca

SEQ ID NO: 54988 - DNA, 30 bp, Homo sapiens
  chr18:28622588-28622618
  hyper
gctccgcgcacggagcgccggggcccagcg

SEQ ID NO: 54989 - DNA, 972 bp, Homo sapiens
  chr18:28681273-28682245
  hyper
acaattcccagaaaggcgagcagttccctttttcacccaaggacactcgctctccgtcccggccgcccagcggttcccctttccgtggcctgggcaggcgctgaggcacagggagccgcacgttcccgaggcacagggagccgcacgttcccgaggcacagggagccgcacgttcccggggaaggtgccagaggccagctggacggccccggcgcactcccgccccggcgcactcccgccccggcgcactccgaccccggcgcactcccgccccggcgcaccctgctccccggcgcgtacccaggggccacgattttggctgggcgaaagcggcccgctcccgcctctccttgagtgcgctgattacatctaccggagacaccttcccttcccttggggatcccaactctcaggtcgcgatcctcttcctatctgccctcccccacccccgccaactccattttctagccacccagaggccccttcaccccagcttttcccgccacccccacctatccccgttcccctagttttcctctgcaccctaggcgatcgcccccttccccggagcggtggccgcggctacactcaccgcgagggtcagcaggagcagccggcagagggctccgttccaggagccggaggggcgggctgcctccatggagagggctcggggcaggtcgcgggccgagcgtcgggccggggtaggagggctccgcggggcgagggccgcggccggagcgcagtctgggcccgctgctcaggaggagcgcgaggcggaggaggtggggcgcgcggagaggtgcttttcttagcttctctgaagcgcctgcctctcatccaaggggcttttcctttggcggagggaggggctccagacgcgtccaaaagacaccgatcggcccctccttgttgtctatttaagacttaagacttcatttctctaagaaagccacgggtgggaactccctc

SEQ ID NO: 54990 - DNA, 73 bp, Homo sapiens
  chr18:28682286-28682359
  hyper
cggacgccacctataaggcccatctcccccaccacgccccggtgtccgctccgccaggcgagattaacagccg

SEQ ID NO: 54991 - DNA, 901 bp, Homo sapiens
  chr18:29077772-29078673
  hyper
ccgcgctacccaggtcgagccccgccaggaggctccctcctcccgccattctccagagagtagggggtcgggaaggagagaacggcggggcggggcctgccacccacagtccccaacccaaggacgtcacggtcccaggtgcgagtgcgagcgggcgggagtccaccccgcgcctccctcctctgctgaactccccacctctgtaaaagcggcccgggccggcccccggctccattttctcgcggcggccacacctggagccgcgcctttgggttgggctgggctgggccgcgcaaccgccacgggaagacagccctcggggcggggagggagagggtggccgggccggggggaggccggggccagggaggagccgagtgcgcgctcggggcaggcggcggcgcggagcggtgcggcggcgggaggcggaggcgagggtgcgatggcgcggagcccgggacgcgcgtacgccctgctgcttctcctggtaagtgccgcaagcgggacaggggagccaccgccggggagggcgtcggtaggcgaggtctagacctcgcgaccagacttgcccgccgcccttgtgcgcgttacctgcccggcgctccttcctgctgcccgaggggggaaaagggccgggcaggctgcggcgagatccgacctggggcttcggaaaatcctcttggctggagccaggagagtaagttgcgacctatcgaagttgtgttttccttcccgcgtcacccaggccccagcgcccttttctgtggtgtgtgggtgtagtgagccctggggcggggaacaccattgctgggggtcggaggctttgttgagagtctctgggacgagaaacgtggaggcaatagggaacaacctcgcgcttcttccacgttccttaaatttc

SEQ ID NO: 54992 - DNA, 37 bp, Homo sapiens; identical to SEQ ID NO: 11704
  chr18:29265159-29265196
  hyper

SEQ ID NO: 54993 - DNA, 171 bp, Homo sapiens
  chr18:29598281-29598452
  hyper
ggatgacagagtagcgatagcaccgtcttaggagacgcccaatcataggtcataggtcatttttgcagcttattgtgatgacaacagtggaggatggtcttccacttcaccttaaaagcggctgttctctgattatcattaagcatggccacgcccgcacttaacttctga

SEQ ID NO: 54994 - DNA, 30 bp, Homo sapiens
  chr18:29598682-29598712
  hyper
tggcttctgggctgcgcgagctgggagagc

SEQ ID NO: 54995 - DNA, 222 bp, Homo sapiens
  chr18:29599654-29599876
  hyper
cctgctagggtggggcttggacgttagccgccaagcccctgaatgtactccttcaaaacccagccacaacgtaacaggaggtggcaggctacctgctttacgcacggtctctccaaaccggcggaaattacagagtaaaataactttctcaaaaccgcatagtacttagctaaaactcacagttggtgcaaagccgtggtcgtttctaagaagaatttaaaa

SEQ ID NO: 54996 - DNA, 1367 bp, Homo sapiens
  chr18:30050220-30051587
  hyper
tggagacggctgtcctcgcccgtctgccccgcgccccagctgggactcaccgttgtccaggcgcgcgatctggggcagccggtaagtgctgaccaggaggtcgagcggcacggccaccgagctccacttcacatccttgaggctgcagcccagcgagggcgccgggtccatcttccccgaagcctcctgtcccgcgctcccccgccgccgccaccggcaccacccgcgcctcggcggccgccgctgctcgcgctcgcggtctggggcgcgcgggaggcgccgggcagctccggccgcgggcagccgggggggcgcggcgactggggcggcccggagggagggggccggcgcccggctcagctgccgctgcggggcatggctggggcgccccgcgtgccctcacgcccggagaagactcagagcagccgcgcggctgcgggcggcggcggcggcccgggtggctgcggcggctcccgctccgcctcctcctctggccctgggtctgcagctgcggcggccgcccgctcgcctcctcctcctcttacccctccttccctccgcctcgagcgtgtgaggaggagccgcgggtctgagaaacgccatagcagcgctcccagcactgactaatcaacaaggtgcgagcaacgcctgcgcagctctgggagacaccgcctccgcctcccaggcgccgcccgctccgcccccagctcggcctccgcctcccgcagctcccgcggcccggcaggctcgcgtcagctccccggccggggccgccagcgcccgcggctcggcgcgctccgcaagctttagctctcgctcccccgtccgaccactcgggcgccctgcagtctcgccgggtgctgctgcgcgccccggctccttccccgcccaggcccgtccccggagcccgggaattgccgagcgagctcaggtatcgctccctgagtcgtggtgtcgggcaccgtccgcctccactcccatcctggcaatgcggtggctaaatacaaggcacaaaagatacctttagtggcgctccctcttgcttcccggtgacccagactttggtcagaagagtaccacagcccaacggggctgcggacggcaggcgtggagcacgccttggcgtttcccctcaaccctactcctctaccatcggagctggaaatgactcccaacagtctcagctttggctactagataagataaaaagggcaaagcaccgaaaagcggaaaggtggtgggtgatgagtacccacatacaggaaggtggccattcggtctaggaccttcactgagtgaacgagctgctggaggcgacgggagttgatgaggccaccaaacaccgtagacacggagatgggaaggga

SEQ ID NO: 54997 - DNA, 1331 bp, Homo sapiens
  chr18:30349790-30351121
  hyper
tgcatgcgggtctcgcggtcgtgctccagccacagcacggacatctggaagagcgccagctccgactccacggggggcggcagcgagtccagcagggcgcgcatctcctcgaagttgagcagcagcacatcctccaccaggtacttgttggccagcttcttggtctcctccaggccgtgcagcgcggcgatcttgcacacctgcttgtagttctgcaccgagatctggtcgttgaggaactgcacgcagagcttggtgacctgggggatgtgcaggatcttgctgaccgacagcacctcctccaccgtgtccagggacagggtcacgttggccgtgtagaggtactcgagcaccaggcgcagcccgatggacgagcagccctgcagcaccaggttgttgatggcccgggggctggtcagcagcttgtcgtcgggggaggaagaaggagtcccgggctcctcctgcggcggcggctgctgctgctgtgacggctgctgctgcggcggctgctgctggtccttgggggcccccaggccgtcctggccgccgacccctcccccgagaggggggtggctggagaagagcgatcggaagtactgcgagcaggaggccagcacggccttgtggcaatggaactgctggccctgggccgtcagggtcacgtcgcaaaacagctgcttcctccacagcaggttgaggccgtgcagcaggttgtcgctgtggctggggtcgaaggtggaggtcctgtccccggatctggacatggcgagctgactcggtgcacctggctttaaaccctcctccaacctggcagacaggggtgggggatgggagggaggggagcagggtggtggagcgggtggggtgtggtcggggtggggaagggtgtggaggggaggggagggcgaagaacaagaatcaaggctcagcttgactccctcctggcgcgctccggaccccgaccctaggaggaaagtccgaagacgctggatccgtgagcgccaccagaagggccctgtctggggtcccggcgccggttctgcgccctgcggctcctctcgccacctcccacacacttcgtccctcactttcctaaaaccaaccacctcagctcggctgttggcagcaacagcagtggcagcagcgacggcaaagtggcggctgaggccgaggcacctcgtgggctcgtgtccatgccgggccagatgaagggaaaggccgggaagtggggagccgggggtgccctgaaagctcagaggcgaccgacggcgaaggttccaggtcaacttgtgcccgaagctttgcttttcgcagttggcccagtttggggg

SEQ ID NO: 54998 - DNA, 30 bp, Homo sapiens
  chr18:30351457-30351487
  hyper
aatccttccaccaccgccacccccacccgg

SEQ ID NO: 54999 - DNA, 315 bp, Homo sapiens
  chr18:30351968-30352283
  hyper
aggcgaaatcgatacgccaggtccttaacctgtaattgcaccttccagggctgagcagaaagggaccctctgcttgcatcccgcccgcgcgccggcccgccggcccgccggcccgcccgcccgggggagagccgccgccgccgcccggctcggagggatcccggcggacctgccccttccactgcggctcactctgccctgcctggcgccggtcctggatcgccggcttcctatttataccggactgggctcctttcgactcactttaccatcccgttccaggtggaccctaccctccctcgcgctccctccgcc

SEQ ID NO: 55000 - DNA, 30 bp, Homo sapiens; identical to SEQ ID NO: 11711
  chr18:30352490-30352520
  hyper

SEQ ID NO: 55001 - DNA, 107 bp, Homo sapiens; identical to SEQ ID NO: 11712
  chr18:31020403-31020510
  hyper

SEQ ID NO: 55002 - DNA, 628 bp, Homo sapiens; identical to SEQ ID NO: 11713
  chr18:31157629-31158257
  hyper

SEQ ID NO: 55003 - DNA, 637 bp, Homo sapiens; identical to SEQ ID NO: 11714
  chr18:31158456-31159093
  hyper

SEQ ID NO: 55004 - DNA, 531 bp, Homo sapiens; identical to SEQ ID NO: 11715
  chr18:31739004-31739535
  hyper

SEQ ID NO: 55005 - DNA, 30 bp, Homo sapiens; identical to SEQ ID NO: 11716
  chr18:31802056-31802086
  hyper

SEQ ID NO: 55006 - DNA, 1011 bp, Homo sapiens
  chr18:31802345-31803356
  hyper
caatctcaacagtcgcggcaacgatctctgggagtgatcgaggcattcgggctgccccgtgcctcccgggcagcgatctaacgataaaacctgacagtgtcctggggaaaaccccacatccaccgctagcgctacattcgggctttatgccaataaggagacactgtagactatcgatcagactcgtctgctctcagagcgtgcggccgggcttccagcctggcctttaggcgcggtggcggcggtgggacacgcgccaggcgcccagagaaggacatgggacaatggcccagcccgaggacgccagacgccgccgcccgacccggggaaggaagctcctgcagccggtccgggaacccgaggcggggagggaggccagctctggaggtgcgctgccgctttaaaataaaggaccacaaagactgtacagtggggaaaacgcgcctggctaatgcgagtggggacgacttggggagggggttgaggaaggtagggggcacacgagccaacggcggctcacggctccccctctctcccgcctctctccttcctccctccccgccgggctgctccggcagacaaataacagaggaaggcgagtcactcaccgtggtcttgacaggcacgtagagcacttgcttggcgccgccgcctcccccgcggacctcgtccggctggcccagctggaagcccttcgatttgacccagaatttaaatttggcgttgtccgtggagctcgactcggagccattgaggagctggacgatccgttcgtattttttacgggtcaccgtcttggtcttgcctgagtccccgtaagtcctgaggcaccagtcctggaactggcggtacatgtcgcgctcgctctccatgttccccgcgctcggccgctggccggatgctcccagcgcacttcgcacctgttcaccctaggctcatgaaaaatgcagccccggccacgttgcagggatgcgaggtcccggccgcagcgggagcctgctttgggtgggg

SEQ ID NO: 55007 - DNA, 19 bp, Homo sapiens
  chr18:31803640-31803659
  hyper
gctgggcaggtggagcgca

SEQ ID NO: 55008 - DNA, 178 bp, Homo sapiens
  chr18:31803673-31803851
  hyper
cgcgcgccccagaagcttccccagccactggccccgtggtccaggagtgagggctgcgcctctcccgaaagcagccgcccgcccagcgcctttgagccccgaagggcacacgggtcccggatctctccttcctcctgggtcctgctttgaccttccccacgacgggtgttaagggact

SEQ ID NO: 55009 - DNA, 316 bp, Homo sapiens
  chr18:31804501-31804817
  hyper
cctctttattctactctcacccgaggcccgcgcccgtcccggggagcggctctgccaggaaaacggcccgaccagtgcccggcgcctgggctgcgtccgagcccaccttcttccctcgtcgtcgtctcccagactaaatcccggaaagggaaagcgggatgtttgcgcccaccgcgctgtagctggtcctgacacttgcaaaatggtcagtggctcctgctcggccaggctgagtgtgtgcgtgtgtgtgagcaagggagcgagggtgtgcggtgtgcagggggtgcgctgtgtgtgcgcgcgtctccgggaaggt

SEQ ID NO: 55010 - DNA, 130 bp, Homo sapiens
  chr18:31805036-31805166
  hyper
atcccgggggcagtgcgcatgctgcaggctgcaggttagaggcagaaggaggtagcagcgggcccggcggcagccaggtggcagaaaggagcacgcagcatccaggtggggggacgactccagcagggtt

SEQ ID NO: 55011 - DNA, 30 bp, Homo sapiens; identical to SEQ ID NO: 11720
  chr18:31902859-31902889
  hyper

SEQ ID NO: 55012 - DNA, 730 bp, Homo sapiens
  chr18:32073100-32073830
  hyper
tttttcaatgacgagcgtgcccactatttccctagaggaatatttcggtccaggaaggaagatagtgcattcagcatgagtgtgtgtgtgagtgtgtgtgtgtgtgctgtgcgtgcgcgcccgcggagagaggggcgggggaggcggatgaggaggatgagatcatagtttcaggatcctcaggaaaccctggtactggcagcagccagcctctgctgtgcccacatgacccacaactctggcagcggacccggcacttccaacattattaaataataagaaagcggctcctactccaggctcaaacctccctgcagaccaatggacaccttctaagagtttggcgagtcagtgactgaagcgcccgtccattccaaggtgtgtgcacggcgttttcttctttgacagctccggagtgggggagggcgcgggggtggagggggtccgtgtgccgggcgaggagtgggcgcgaggccgggctgccgcgctgcccccggccgcccggtgcagaggagcccgccgcggggcgggaggtgcacatgacgcgcagccccggctgcgcagggaccgcagccgcccacggcgccggggcgcggacacaggcggctcggcgctggagcaagggcaggcgccgcgcaccgagcaaagtcaagagtggaagcgggcggagagcgccggcgggggcagggattcgcctcaacgcccactcacggggttcccacctgtgcgc

SEQ ID NO: 55013 - DNA, 413 bp, Homo sapiens; identical to SEQ ID NO: 11722
  chr18:32073907-32074320
  hyper

SEQ ID NO: 55014 - DNA, 102 bp, Homo sapiens; identical to SEQ ID NO: 11723
  chr18:32074337-32074439
  hyper

SEQ ID NO: 55015 - DNA, 1865 bp, Homo sapiens; identical to SEQ ID NO: 11724
  chr18:32556604-32558469
  hyper

SEQ ID NO: 55016 - DNA, 613 bp, Homo sapiens
  chr18:32621209-32621822
  hyper
tgctggcgtggtcacgccgcgaccctgtgcgaattgaggcgaggtgatgagttagcgggttgccatggcaacaggctggccacgtgaccagggtgctgctgccggcgctctgacgtcagctgccagagggcggggccgcaggagggcggggcgcgagcgagagctgggagaaggcagtgagcgagcaggcggcaggcacggtccgtgcggagcaggcgagcgagcgggaagacgcagccaccttcctcaccagccagcccacagcggtttgttccccttctcgggagtgcgccaatgcctgggccgacccaaaccctgtccccaaatggcgagaacaacaacgacatcatccaggataataacgggaccatcattcctttccggaagcacacagtgcgcggggagcgttcctacaggtaatggggctggcacgagagcagcgccggggaccgccgtgagggcgcgcggaaatccagcccgttatataatggagcagacactgcctgcgacccctgctgcaggcatgcatttgtgaaggcggttgtgattatttggtatctgtttccatgtgtcatgttgggtttgcattgaggctccgcgactgcagatggaa

SEQ ID NO: 55017 - DNA, 30 bp, Homo sapiens
  chr18:32622086-32622116
  hyper
tctgtgatgttaaaccgccagattgatgga

SEQ ID NO: 55018 - DNA, 30 bp, Homo sapiens
  chr18:32821177-32821207
  hyper
tttggcccgcgcggcgtctccaagcgactg

SEQ ID NO: 55019 - DNA, 226 bp, Homo sapiens
  chr18:33077286-33077512
  hyper
gcaggacattacagcgctatgcgcctcaaagacactgggtagatgtctgcagaatggacgaggggaagacacgcaaatttctgaatgactgacactcattagtcctgaacctcatgctaaaggcgacctcgaggggaagaggcagtccttctattaatactaagtcagtaataacctccctacttcttcttctctccttacaacacaaggcgttgtaagcccatgt

SEQ ID NO: 55020 - DNA, 79 bp, Homo sapiens
  chr18:33077969-33078048
  hyper
ggtgcaatctaaaaggcggagctcggagtagcctgtgccgtcgggacgggaagatgtcagcgggcgttgtcctgccact

SEQ ID NO: 55021 - DNA, 406 bp, Homo sapiens
  chr18:33530169-33530575
  hyper
cactgggacccgggcgcagcctcacctggtcccccgagttcccgggcgcggccacactgggtccccctcctgctcgcgccgccctgggcgccccggaggaagctctgtgcggctgcaaccctgagtcccaggcggagcggtcagcggagagttccagccaacttattccgtgcgcctcgaaagggagggttgctgggcgtatagatattctatttcgcggggcctttgcgctccgagtggcccctctaggccagttcctccgaacgctaatcgggggctccgcgctctcccctcgcttccctttgcttggggaattggcagcggggcgcagggatccatcggaaacgcaaaactactttttccccctgctggtcactgtgaggaactgcacgtggtggaactaacc

SEQ ID NO: 55022 - DNA, 30 bp, Homo sapiens
  chr18:33709429-33709459
  hyper
ccgcgggggcgtggcgcggccctagcgcat

SEQ ID NO: 55023 - DNA, 421 bp, Homo sapiens
  chr18:33766768-33767189
  hyper
tttaatagagagggcccggccacacccacgtgcgggaagtgcggggcgggatgcagggttggggaggcaagggcaggaagtagggcccaggacgcggttgggagggcggggaagctcagctcacttggatcccagctgcagggcccgctccgggggaagcccccgagcttcccggttccgaaagtgtgcagccactgagaatttattagcctcgtggatccctaatctttccccttttctaccctttggtcagccgcattctaacaaacggcaagcacacgccccgctgggtagcagcaacccgagaacgcccccacccccgcccccgccagacgccggttcccgcttgagagggtgagggtcccgagacccctgcgaggaggagggtcgcggggttccaggatgccgatgccaagcagga

SEQ ID NO: 55024 - DNA, 636 bp, Homo sapiens
  chr18:33767424-33768060
  hyper
gtggcgggggcggagtcgccgggggccggcttcgcgcacttcccgggcccggccggcctggatggactagccggggccatggccggcgcggcggcggagtcagggcgggagctgtggaccttcgcgggttcccgggacccgagcgcaccgcggctagcctacggctacggcccgggcagcctgcgcgagctgcgggcgcgcgagttcagccgcctggcaggtgaggcgggcgggcaggcttgggggacacgaggtttctggaaccgacgtggacggatcttttgctcctagtgagagcggcgctacctcattcgggcgcattttgaatcgaaactccaggagggacgtgtccacgcgtcctcctagtagacacggctccctgaggtcccacctgcagccccaaggcttcttgctactcttactcttccgactttccggtgggcaggaccaacctagccgtcttccccttttcccgccctccgcgagcggggcttaggatggttcttgccctctcttgcgggagacccctcactgtaaagggcctgctggggccggggttgcaaaagacagcatgtccagcggccgtgacccttcggatgtcctcccgaggtaggagcggtgcgtggaccgccagcg

SEQ ID NO: 55025 - DNA, 48 bp, Homo sapiens; identical to SEQ ID NO: 11726
  chr18:33877649-33877697
  hyper

SEQ ID NO: 55026 - DNA, 30 bp, Homo sapiens
  chr18:34409509-34409539
  hyper
gtgcggagctagctcgaagttgagggagga

SEQ ID NO: 55027 - DNA, 20 bp, Homo sapiens
  chr18:34823757-34823777
  hyper
agttcccagttctcccttgc

SEQ ID NO: 55028 - DNA, 31 bp, Homo sapiens
  chr18:34823862-34823893
  hyper
cgaggatgacggcggcggcggcggcggcgac

SEQ ID NO: 55029 - DNA, 20 bp, Homo sapiens
  chr18:34823977-34823997
  hyper
gcctggcccttggggacaac

SEQ ID NO: 55030 - DNA, 30 bp, Homo sapiens
  chr18:34834309-34834339
  hyper
gagggggcctggcagcgcgcgggcacaggg

SEQ ID NO: 55031 - DNA, 30 bp, Homo sapiens; identical to SEQ ID NO: 11727
  chr18:34973989-34974019
  hyper

SEQ ID NO: 55032 - DNA, 151 bp, Homo sapiens
  chr18:35064994-35065145
  hyper
ataaataattctcttctcccccgcacagaagctataaaccagggccgaggcgcgatagtttatcaaagacgagggctggctccttaaataaaccgcggtgatctcacttgcggcgccccctcccacgccggccccctcctcccccactaga

SEQ ID NO: 55033 - DNA, 299 bp, Homo sapiens
  chr18:35065516-35065815
  hyper
cgctctgggccttcagcgctgactcacgctcgcagtaggtgaggaaggcgcagcctggggaggaaagcaagcgccaagaagggtcagtggggcgcccccgggcccgccgacgcgccctgccgcccgccctccaggctcccgcccctccctgccgctcggtccctgtccccacctctctttctctcccgtgcactgttctcggagcttctctgcctctcggtgttcccggctgtctgcctctcgtacctccctttgcttttctattttgctccctccgcggagtctccccaccctgcatc

SEQ ID NO: 55034 - DNA, 30 bp, Homo sapiens
  chr18:35067550-35067580
  hyper
cgtccctcgtgctgccgcctgcttctcccg

SEQ ID NO: 55035 - DNA, 21 bp, Homo sapiens
  chr18:35104934-35104955
  hyper
cgccctcggccctccctttct

SEQ ID NO: 55036 - DNA, 50 bp, Homo sapiens; identical to SEQ ID NO: 11730
  chr18:35144886-35144936
  hyper

SEQ ID NO: 55037 - DNA, 792 bp, Homo sapiens
  chr18:35144968-35145760
  hyper
cgtcctgggctcgaccggtgcagccttccccatccccatctttcaggtcgctgtacccaaaaatccaagccccgtctcctcgatcccctctctctttctcttcatcggcgcccgctgctctctccatggcatcgttcctatcagcacctcgcccaaaacccagtcttgccccagcgaacagctccccacgcaccccagctctggtctccgctgcccgagcgcctccctccaccgcgcccgcccgaggcttcctctcgcttagtccgccgctcgtcagtcgccggccggccggtcggcccgccagcccgctcctgctccccggcaaagttgggagggaaaggtgtactcacctttgtgcatgcctgtgaacctgtccttcagaaccgtaagctcgtagattttgccaaactcctcgaagaggggcttgaggtccttctcatccaggttgcgggggatctgcccaatgaacagcttgatggcatcgtggtccttcatgggaatggtcgacgggttccccgggctgtggcttaatccgttcatgtgcccggcactgcccgggctgctgccgagcccgttggtactgaggcttgcgttgtcagcctgtccgtttgctaacgtggccatctttatatacatagagaaaatcttctttccttttattctttctcgctcacactctctcgctcctctctctcgctcgctcgcgctcacacacgcacacgcatacacacactcgggttctctccccctcggtttctctacacctcgctctccgctcgctctctgctctct

SEQ ID NO: 55038 - DNA, 68 bp, Homo sapiens; identical to SEQ ID NO: 11732
  chr18:35145968-35146036
  hyper

SEQ ID NO: 55039 - DNA, 703 bp, Homo sapiens; identical to SEQ ID NO: 11733
  chr18:35146061-35146764
  hyper

SEQ ID NO: 55040 - DNA, 273 bp, Homo sapiens; identical to SEQ ID NO: 11734
  chr18:35146895-35147168
  hyper

SEQ ID NO: 55041 - DNA, 375 bp, Homo sapiens; identical to SEQ ID NO: 11735
  chr18:35147245-35147620
  hyper

SEQ ID NO: 55042 - DNA, 30 bp, Homo sapiens
  chr18:37421813-37421843
  hyper
tcaagactctggcgcggtggaaactgcaga

SEQ ID NO: 55043 - DNA, 30 bp, Homo sapiens; identical to SEQ ID NO: 11736
  chr18:38242390-38242420
  hyper

SEQ ID NO: 55044 - DNA, 99 bp, Homo sapiens; identical to SEQ ID NO: 11737
  chr18:39172187-39172286
  hyper

SEQ ID NO: 55045 - DNA, 238 bp, Homo sapiens
  chr18:40857241-40857479
  hyper
gccattttttactgcgtgttctgtccgaggtgctgaagggaaaactgcctggctggattcacttgcctggatctcaagcgccggctttcggagcgctgaaaacaacagcgcagagcccagggcaccagctcctggaacagggaggaggcaaagagggaggtccactcgccctcgcacagtgatttgccacctcggttcctgttttggctcttctgagaagctcgtctccgagactcca

SEQ ID NO: 55046 - DNA, 1725 bp, Homo sapiens
  chr18:42258978-42260703
  hyper
aaatgcgcccagtttcgagagcctatcacagctcacgtctgggcgcgcagtacccccccgacactgctcctgttgtgtcagatagtggcagtgttgagcccaggaatacgcgcggagcccgcggcgatccccgcggccgctcagtcttcgcggcggactccggcgcgcaggagccactgggccgcaagggcgccggggagcgggaggggcgctgggggcggcaaggggtcccagatcccaggccacgaactgttttccttttccccgggcaagagccccgctcccttcaactgacagaaattcactggggcaggggggcgagtggggagagaggtcgctcagggctcgctactggctgcgcctcccccggctctggtctgggaagcggctctgggccctccgggcgagcagcttgggcgccggcgccccctgcgaggaagatcgcggggtgacggtcggtacccgttcggctgggccgcgctgccgctccgatccacctcccttccgcgcccgcgccctcccccttcctttcactaggagtccgggattcggagagggcgcgggaggcaggcacacgggcccgaccccactccagcgctcaccggggacgcgggcgggcggcgacgggacgcggcgggggcgcggggcgggcgcggccatggagcagcagcggcggcggcggcggcggcggcggcaacactagcgaccgcgggcggacgagcgggcgggcagggccgccgggctcagcggaccgaactgcacagctcagcaaaagcgccctcgccctccgcgcgccgcctcctgcgagcccaaacccaccaacattttttaacgctccaacccatcctttgaagaaaagcaaaaaaaaaaaaaaaaaaaaaaaaaaaagcaaaaaaagaaaaagcattgatcggagagacggggatatatatatatatatatatatatatatatatataaaattttttttggctcctgctaaaattagcagggctcgccgcgcgcctgtgtgccagtgtgtgcgagtgtgtgtgcgtgcgggcgtgtgtgtgtgaatgtgattactccaggactcctcgggctccggagacgccattttcccccttgatatctctctccataaatcggtggcgcggcggaggcggcagagtcgggcgggaagcgcggggccggccggggcgcccgccgctcgccgccgcctccgcgcgcccgggggccccggcgccccccgagctagggcggccagctcgcggctcgccgtttgacagatgctcatcgccatggagttgccgcagcagcacctttgggggctcgggcgagcgacgggagccgggatctgagcgagcgccggggccagcggagccggagccgccgggacatgggtgagcacgcgcggcgaccttggcccgggagcccgggcgcccagcctccctccgcgccgcgggcccccgcactcccggaaccgggggcgacgtgtgtgccctgcatgcaaaagttcacgtcgccttgctgggtctttgactttgcacccggcgggaagggggagaccgggccgagggggcgggatgccggtccgggcgaggttgcaggagatgggcgcgattccggcgggccggcgggtgggcggcgatgctggctcaattggagtggctcgttggtggcggcgatggtggaagctttgggctggagggctgggagcttattgagtttcgcctaatctgatct

SEQ ID NO: 55047 - DNA, 246 bp, Homo sapiens
  chr18:42260963-42261209
  hyper
aagaagtggtccagccggcgaaggttggtgtgtgcttgtgttgtgcctgtgtgttagtctttttcttaaaaatcttaatcaatggatttgagtctctttcttgtgctctctggttttgggactctgaaaagataggaattcccttaaaagcagacgaatgcctttttgaaagcacgcattgtgtgcgtttctagaggagccgtgggcttgggaatgaacggcaggcttccccgttcggtggtttcc

SEQ ID NO: 55048 - DNA, 30 bp, Homo sapiens
  chr18:42399574-42399604
  hyper
agggcagaggaaggaaactcccatccaggc

SEQ ID NO: 55049 - DNA, 68 bp, Homo sapiens; identical to SEQ ID NO: 11740
  chr18:42531891-42531959
  hyper

SEQ ID NO: 55050 - DNA, 30 bp, Homo sapiens
  chr18:43309895-43309925
  hyper
tttcagctctttctacgtgatttgactcat

SEQ ID NO: 55051 - DNA, 30 bp, Homo sapiens
  chr18:43316950-43316980
  hyper
gttttaaatcttccatagtctactccctcc

SEQ ID NO: 55052 - DNA, 30 bp, Homo sapiens
  chr18:43547237-43547267
  hyper
ttgtcaaacccctgcgcttcaagcaacctg

SEQ ID NO: 55053 - DNA, 143 bp, Homo sapiens
  chr18:43547677-43547820
  hyper
aaggaagaaaccctgacgcccatcggggtgtgcacttcggcgtcctcttttgtaaaggggaatgatcacacctgccttttcggatgtcatgagaatttaatgggctctcccagaaaggtgcctggtagcggcaggcatgtcgg

SEQ ID NO: 55054 - DNA, 30 bp, Homo sapiens
  chr18:43652157-43652187
  hyper
agcgcgagtgggggcgcggaggagagccgg

SEQ ID NO: 55055 - DNA, 229 bp, Homo sapiens
  chr18:43678498-43678727
  hyper
gccccgggtgaccacgtgggtagctgaatctgctaagcagcagttcccaggccccatctggtgctagaggatgagggcctcacccgtctggggtcgcggctgtcttgaggaccagggcgattaatagtgtcggtagtgttagaccgtggtttagcacgagtagcaacagtgaacagctaaaccccgggactggccaccagcagggagcctcccacggagcccgttaatc

SEQ ID NO: 55056 - DNA, 30 bp, Homo sapiens
  chr18:43753516-43753546
  hyper
gcagatattggtgccgctgcccgagaagag

SEQ ID NO: 55057 - DNA, 30 bp, Homo sapiens
  chr18:43754771-43754801
  hyper
agtagggggtctggcgccgacacctgcccc

SEQ ID NO: 55058 - DNA, 263 bp, Homo sapiens
  chr18:43913491-43913754
  hyper
acagtgcctgggtcctgtttgcggctgcttgttcgcattccagcttcccttgtgcccgcagtcaggctctacacgtgcgccagcctccgagcgcacgtccccgagtgacccgtgcgcggtgtgcagggacctcagggtcgtgtgcactaagggcgctcgtgcccgtctctctgcactaaggaacgcacctccacatgtctgagtgcacgtccctctccatgtgtgcacgttccgtgttcacgccgcccatgtctgtgcagggg

SEQ ID NO: 55059 - DNA, 493 bp, Homo sapiens
  chr18:43914155-43914648
  hyper
gccgcccgcgcccgcgccccggagccgcgccacaaagggcccgcgcgcagccgccgccgccgccgccgcgcgaggagccaggatggtcctggtccacgtcggctatctcgtgcttccagtgtttggctctgtgcgaaacagaggtatcgctttttcctttcggggtctgcttcggagcgtggatcgccgcaggcaccggggcgggggcgggcgccgcgggcggccgggggctcagggcacacccgcgaggacgcagggcgagcggtggcttccccccaccccattttagggggacccccgagggtgggggcggccgccctcgtgggagcttttgtagtgaagttagggtttggcgaatttgggtcccttcctccccagccccattttttattttttgcggcggacgtggttcccccaaatcacagccccttcccctaatacctagccctgtatgatcgaaaggagaaagatacatgaccgtgtgtgtgtgtgt

SEQ ID NO: 55060 - DNA, 30 bp, Homo sapiens
  chr18:43914933-43914963
  hyper
ttgccctgctcaccccgccccccgcaactg

SEQ ID NO: 55061 - DNA, 483 bp, Homo sapiens
  chr18:44335966-44336449
  hyper
tgagccctccgaccccggagtccaaacaaatggccatagaactgtgggtctggaggacaccgctccgatccatgcggtctctccgggtattaaatggatttatcgtcagcctggttgcttggaattctattctgtccttcatttttcacagcggaacaaagttgtctggaccctccagccagcgctgggcagaagcaagcaaggatgctcttggaaacgcggtggcccaagcctaagcggccatgctcggggctaggagcggaccccacggccactcaccccggggcgctgcgaccgaagctgccgcggccactgccacccgggggctcgccggccggctccgcgcatcccgccctctcaatggactttcttacctcttaatgtagttcctgccatacaggatctgttgcagcaaggtcaccaaggcaaaggcgcagatgaagatgaagagcaaagttcggctccccaacaaatcccggttgg

SEQ ID NO: 55062 - DNA, 151 bp, Homo sapiens; identical to SEQ ID NO: 11745
  chr18:44337012-44337163
  hyper

SEQ ID NO: 55063 - DNA, 155 bp, Homo sapiens; identical to SEQ ID NO: 11746
  chr18:44337462-44337617
  hyper

SEQ ID NO: 55064 - DNA, 192 bp, Homo sapiens
  chr18:44337649-44337841
  hyper
cggggctgcctgcccgtgccccggcgcccaactcctacaaggaagaaattcaggggctccccgcccccgccacagtcctcttccccctccccagctgcaactcggcagccgttcgtcaaagaccctgttgtcaccgagacactgggaccttgtctcatccttggaaccactcgtaaatcttaggtcaggcag

SEQ ID NO: 55065 - DNA, 30 bp, Homo sapiens; identical to SEQ ID NO: 11748
  chr18:44581294-44581324
  hyper

SEQ ID NO: 55066 - DNA, 30 bp, Homo sapiens
  chr18:44677538-44677568
  hyper
caactttctggagccgtgttgacataatag

SEQ ID NO: 55067 - DNA, 30 bp, Homo sapiens
  chr18:44702742-44702772
  hyper
gatggggcccaaaacgaactctccgggaag

SEQ ID NO: 55068 - DNA, 356 bp, Homo sapiens
  chr18:44773610-44773966
  hyper
gtggggcgcgcccgccgacgccccgtgcagcttggccaggctctccgcgtcgtccttgccgcccactggccggaaggcgctggaatggtggtagctgccaccgcccgctttgcgcccctccagaaggtgcggatggtggggcgccggaacccgggagcccgcggggccagacccggcggccgcggcccctgccccggcagctgccacagagtccgcgggcggcgtggagcccgcgctgcagtccccgccgctgccgcccgggggcgactcgaagagcgcgtcgcgagagccggcgcccccggcaggaggaggtgggccggagcccgggccgttggccactacctgcgggggctgcc

SEQ ID NO: 55069 - DNA, 581 bp, Homo sapiens
  chr18:44774201-44774782
  hyper
ggacaagccggccttgggcgccgcgcccgcgccgcctgcgcccgcgccccccagggcctcagcggcggcacccgcatcctctttcttatggcacaagctgaaggcggcggccgcggcagggaaggtgtaggggtgcgggaagagcccgccgcagcccgggaacttctgcaggacgcccccgaacgagcccttgctgggcaccgggatgactgggtagctgcgcgggcctttggcccctgccccggcacccgcccccgcgcccgcgcccacgcccacgccggccacacagccacccccagcgccgcccccaccagtccccgcgccgcccgaagcagcagccacagagaggctggcggctgcggccgagaggctggcggcggccactacggcggcctcctgcaaggagtcgtcgtcgtcgtcgaagcgcggccgcttgtgatgggcgtgcggggcaccagccagctctgccaagggcggcggtggcggcggcggcggcgggggcgcacccagcaggtgggggcccagcagacccccgcctccggccaccgcggccgcggcggccacggcggccgccttcacag

SEQ ID NO: 55070 - DNA, 91 bp, Homo sapiens
  chr18:44777700-44777791
  hyper
cagcaagctgtgtgccggattggggcggccggttccggcaatacctggtaacctctgggtgtctttaggcgtgtggctgccggcccatctt

SEQ ID NO: 55071 - DNA, 389 bp, Homo sapiens
  chr18:44777862-44778251
  hyper
cgcgaagatccgggctctggcccgagcgaatggcgctcaaaccccggcctggggagaatgacggcctgaattgcggcggggcgtcccctccaccgcagaaagtgtgggtacgcagaaacccgcggcaggagagccccaagtggagcgcagtctgacagcgtctgtctctgaactcgtgtcggaccgaggggacgccacccagcgggcagggtgacgtcaccgtctccctgacactccacattaaagggctggcatgttacagggagggagggggagagcgaaagccagcgcgagcaacagagagatcctttctcagcaggcacgaaagctaccaacctaaccaactcgcaattgacaacaacctcctcagccccggagtaaactgcagc

SEQ ID NO: 55072 - DNA, 608 bp, Homo sapiens
  chr18:44780649-44781257
  hyper
gaggctggtcgagcccgagttaatcaatgctttcctcttcgagctgacatgcattttacacgtcaggactctcctcagccggctaattgattcaaattgttttattggttaaactggtgtcacccattttcatgatctatcaccacatggaggagagcatttccactcccatctccgttccgggcggctgcggttcacccaggccaaggacaggtaaaggagcccagacgcgggacccagaggaaaaccacaaaccgagctggcctcctcataactggagaggcgacgtctggaagtaagaggaggaggccggcacagcagcgcatatgggcttccagctacaaatttaaactggttgaagagaacccacgctcagccgggcctgggcccagtttcctccacctgggacacagtcggtttccgagccggcgttgaactccgcggtataggaggccacaacaaaacccgggtgggaactgtccgcggtgctgacgagatgcatcgttccaaagcacagcgaatcctactgtgttcaagtcgggaagaagcctcccagcatgtaattgagccctagattcggctctgggcgggctcgagcagagcctcat

SEQ ID NO: 55073 - DNA, 30 bp, Homo sapiens; identical to SEQ ID NO: 11752
  chr18:44786871-44786901
  hyper

SEQ ID NO: 55074 - DNA, 587 bp, Homo sapiens
  chr18:44789527-44790114
  hyper
aatcgagggagacagcgcaagcaggtcagactcgaccggttcgcttcctcccacccctaacttggcgggatctgagaagaaagttcccgcatgtttgagcgtcctagggcttggataggacagacctcgtaggtccccaagctccagcttggagttcccaaggagaagggaagcgctagtgctatggagcgaggttttggtgaagaaaagggcctcgcgcccccttagtgccgtcgctctggggaatcttctttcgctgggaggatgaatggggcgctcgccgcggctcatggcgccccctaggagcggcaggaaacttctcctgcagggcagcgcgggccgggctccgcctccggaaggcgggcggggagggtagttgctgggggtccctaggccgggccccaggacatctaggacatgccgggggctgtttgctacggcttcatcccggagctcctgctcggggttgccggctgcctctgctggcgtccctcttcccttcctttgcgtaagcggcaactcctccaggaagccaggggaaggacgggatttcctctccacgtagggtagtagatcgcatagcccag

SEQ ID NO: 55075 - DNA, 324 bp, Homo sapiens
  chr18:45275508-45275832
  hyper
aattagaaaagcaataataatcggtgtaattgctctaaattaccctcctaacagagaacggcgctcggagccgggaacgcagctgccgccgcccagccctgagccccgcgcttcgcgcccgcggccctgagctctgctgacccctggcggccgccgcgcgccgcgccgtctggactgcgaagggcagccgcgcgaaacccgacgctctggcgccccctggtgtccgcgatgccgcactgacccgcggacggacgggaggcctacggatccaggatggctccttcgactctccccacgccccccgccctctgcttctccccaggg

SEQ ID NO: 55076 - DNA, 30 bp, Homo sapiens
  chr18:45456728-45456758
  hyper
tacctgcaaggtggcgccaggtcccgcccc

SEQ ID NO: 55077 - DNA, 196 bp, Homo sapiens
  chr18:45534405-45534601
  hyper
catctcggccgggagtcgggtctctgccagcccagcgctcggaatggagctttgtggggctggggaagcaacctttgccaatgggaagggggtgtcacagcgcctcattccctcccagcttgcgctcctcggaataatctccaacagcgtgcctagaagcacagctgcttttgtttcgggcgtcggtgcttcccag

SEQ ID NO: 55078 - DNA, 289 bp, Homo sapiens
  chr18:45662345-45662634
  hyper
cacagccaggacaacggaagccaggaacagaaaggagcgaccctggagccctcaccacagagcacggcgtgggggacccgacgctggatgctccgcgcggggtgggcggcgggcaggggggcgtgggtgctgggttagggggaagctctctccatcgtccttcccaggccagccccgcggccgctgcgcccgcctgcaggaactcaggcgctccagtgggtgacgccggcccgggcgcccgcgggagtggggacgcacggggtcagtccttttgcgccacccacaccgg

SEQ ID NO: 55079 - DNA, 257 bp, Homo sapiens
  chr18:45663033-45663290
  hyper
ctggcgtgggccggcggcaatggggcagtggcgagagttgctctctgcagagttccagatcctctctcctatttcggaagaggtgcgtggccccacgccccgcaggagctccggcgaggctgggggagttgaacgctttgcggacgccgccacccgcgccagccagagccgccccgcggccacccggccacagggtccccgcagcgcgtagcgagaatgcccgcagcgctctcccggccgcccggaagggcttcctc

SEQ ID NO: 55080 - DNA, 30 bp, Homo sapiens; identical to SEQ ID NO: 11757
  chr18:45663495-45663525
  hyper

SEQ ID NO: 55081 - DNA, 577 bp, Homo sapiens
  chr18:45687916-45688493
  hyper
ctttctctccctgccggccccactcgcctgacctctgagaaagcagaatccgggacatgaagcaaccacagccgctccgcccggccacaagcgccccggactccgtgcctgcccgcagcccccttcctgcagcgttcactcggctgcccggcccggcccggcccgggcgccccgccccagccccgccccgctccggaggcccctcctctatccccgccccttcccgggcgccccgccctctccctccactctgcgcccccgcggcctctctctcctcctgcgggagccatcgccctcctcccgggcgcccctccccgcggccgcagcctgtttcccgggcctctcctccgcattctcacatcgctccagctcgacctccccacccgcccgcctccccgggaggccgcggcccggcgcggcaccgcccctgcccacggttacccggttaccgcctgagaggccggcgcctgcccgggcgggcgggacccgcactgaccccgcagggggcgaggcggggctgagaggggcgaacgcagagccagaccccccgccgccgcaggccgcccacctccaggca

SEQ ID NO: 55082 - DNA, 2578 bp, Homo sapiens
  chr18:45934609-45937187
  hyper
cgcttttctttggctcctcctggccttcatcctagtaaaaccagacaagcaaccggaaaaacaaagcagcacagcggccagagacaattcgctttcaacggagcaagagacgtacacaccttgagagaagacgcacgcagttcccgtgcgtgtcgctgggaacagacctcgcactaccccgcgcggcgacaggcaccgggccaggctcggcttcacttgtccgaggcttggaggaactgtgtgcgtgcgcccatttcccccagcttcccgacttgacagcagcaaggatctttgagtcctgcatgagcgacacctcgggcaaggactgtactctgctcagatctcatcgagaggtgctggatcccagcctttccagctcattttccaattttcaagaaaagacagcgcgaagtgagactgcaaaagtcccaggaaaacgtcactcaccaaaacgctcccgcgccttccaggcagaagtgcggtaaaacttttggcagaaaccacctgtggctgccgacgggcccgccccgctcgggcccgcaggcgccgccgagccccgggccgcacgcgcccgcagaagttcctttccagccccgcgcgccacttcgctccgggccgcggtgccagccaggaggcgcggcgcccgctcgctggctcgctctccgctggctctcccctccctccttccctccctccctcctcccgcctcctccgttgcatggctgccgcacggagcccctgaatagccaccgcagccccccgcctcctgcccaccgcgcggagggcgcccctgctccagccggcgccccaaggcgcgcggaccgccggcctcctagcaacggcccccgcaatcgctttccggcgcagcccaagcaaagccacccgcccgccgccccgcgacctcccgaactgcctcggctgccgaggtgctgtggagatcgcgaccccggcagccggcgcccgagcccggcgcgcgaagccgctcacctccgcgcgccgccggccctgcgcgcctcccgcacttggctccgggacgcagtcctggcgtcctccttcgccgccggtgtccgccggtccctgcgcgcccgagcctcgccggccgcgccgctgtcagagtctcgtggcggggctgcgccggcgggtatggagctgagcggcggcagcgggcgagcgggcagctcctccctccccgcgccgcgcctccgccctccccgcgccccgcctcccgcgccgcggctgtcagccccgcgccccgcgccccgcgcccgcgccgccggctcggggggcgcacagggctaaagggcccggatgtgtgcggtcgcctgtcgctcgcgcccgccccctccccgccgcgcggcacatgcacttgctgcgccgcagcccccgcccggctccgctaatttctattttgacagtaactgtggcgagtgggcggcgcggcggggggcgcccgggactggcggaggctgcgggcgggagtcaggacccgacgcggaggcggagtgggggggccgggcaccgccaccaaccgctcggggctccgcgtcttttctctttctttccttttttctctctgcctcctccaggatttaaagggacagccccggcagaggcgagggggccaggcggccgccgtttctccggtctcctgacgccctctgcggcccggccggacccgcccgcacccccagcgcaggcttgggaccgccgggtatttttaggtccacacccgacccggggcagcggtgcggcagagatgggctctgccgacccggggcagcggtgcggcagagatgggctctgccgccccggcgcacggctatttttacagagtccgatgggggaggaaataaaacaactcggcaactgcttttctacccgaaagtcgggagcaaggagtgggggcgagaagttaagtttcccaaatgctctcggcactccagcgagcgcaccaagacgcctagccagcacctgaaaccgcaagcttgccgcaccccggggcgccgaatctcagcgggcaatcgcgctcggcggcgctgcggcccggagtccccacccctctggagccttgggccccgcactccgcaccccacacgccggggagcagccgctggccgcccgtcactccccgggtcggcctggaaggcggccttccgaagcgtccaatcaccgcgcaacaatgccaacgggcgggcccggggagggcttgtccccgccccgtcccgccgggccccgccccctcggagtctgtcggggcaggagaatctcgctgggacgccgagtgctcagcggtgctggaagccacgaagggccagtgcgaggggaggaggaagggtcctggccctggagagggcgtgagcgttctcgggcgaggcgacacttgggcagatgttccctccagctacgggccggggaaactcgagctggctttgcctcctacctttttgcagtccacccctctgcgctccagacagacataggaaccctcgccctccttggtagtacatcggaggcagcaccctcgcacgtcagcgggtcctctccggggctcctccctcagaagcgggaaagtttgtcg

SEQ ID NO: 55083 - DNA, 274 bp, Homo sapiens
  chr18:46065115-46065389
  hyper
ctgtaagcctggactgcgcctaagcccccagttctcccaccgcagaggcccccacccagggctgcgccagcgccgtggggtcgctgggcggcgggttttggcgtcgctagactgggctgtcttggcagctaaggcgacatcccgagcgtcctggggccaccctgctctccagggcccgccatcctggaaaagaaaggcgaactacattacccagcaggcctccagccgccctctttcctttcaagtctttgcacgtggccggaggggagggcgg

SEQ ID NO: 55084 - DNA, 2060 bp, Homo sapiens
  chr18:46065663-46067723
  hyper
gcggccagaggaaccccgaggtgagcatctcctcgcccgtcctcctcttatagtcatctcagcttgctgatcgattcggggacccgggaggagggctgcgtgacgtgggcgtgcttatagataaatccgggaaaaccgccccaaacaatcagcccccttccccccatccctgctcctgggccagcggggtgtccgcacccatctaccatcccctcctccccctcggtggggaactgcactccacagtgtcgccccctccctgggtttgtcccattccctgccgggttccccgccccgcggggtgtcgtggccctggagctccggcgccaaggggggctcttgggggacgcacggctggagcccggctcgctttggagctgcgcggtgtagccgctgtcatgtgccgggttccgacctgggaggaggaaaagagcgagcgcgattcctctcccttttgttttgaagcccgcatttgctgcatcgagcagttggtttagtatcagccaaacttgcagctgttcagaccgcgctccgccgaggtagggagcccgtctcggggtggcgtttgggggccgggggctgcggcactcggggctgcgggagggaccccgagagtgtgtcgccacgccgcccctcccttccccggtgactgattgtgtctgtggcagcgggcgtgtgtgagtgtgcgcgcccgtccccgcgggctcggggatgtctgtggatggctgtcgtctagacagggcgcagccccctccctgcgtccccggtgagcccgcgggccgcggggggagcgggggatgggagcagaggaagaaaccaaatcggtggacccgttgcggtctcccctttggttattcccaacggttgtggttctgttggctttttttattattcctgtcgctgcggtgcaatcgggcctggggaatagatacgcccggcggagaggggttcacttgacaggctctgaaaagccacctctgggtggcgagtgacccgagaggccgtggggtgggctccggctcgggttcatcaggacgacgagcaggtaactgtcccgggcgccggtcatgggggagggcgggcgggggggcgatggcttgggctgcggcgaaggtctggggcctcggagggccgcgtgccggtgcctggatgtggccggagggggcgtccgggacaccgcgcgcctgagccgagtgtttctctattgatggtaaaagacaatcgggaggggggtggtccgagcccgttatctgggcggcgttggctctgtttggttccgcggagttttcagggttggggctggggggtgtgagcaccgcggggtgtgcggcgtgtagaggggagggctgactggcggcgccgcgtgcgtctccaccccgaggagtgaggcgtcgcctcccccgcccggctgtttgtgtgtacacacggctccggtgtgtgtggggggcggggaccgcagaccgcggcgtagtggggacaagcgtgggccccgatcctccgcgcgacctgtcccgccagccccctccttgtctaagtcggggtcgtgtgtccccgcgcgcgcgcgcccgagttacttggagaggggaccgtgcggctgtgggccggggaagaccgtagggtcgcgtgtgctggtcttcggtgcaggagtcccaggtccgctgtgcggccggagtcacacagcccctccctccgcgtccgcgacgccccgtgacccggcagactgggggtccacccggcggcgcggggggttggtttggctgcgccgcccccagtccacgctggggtgaccccgcaccgaggcgttctatgggtgtgcgtgcccgcgctcgccgccgctgccttcgcagaccggggagagagtcagcgactgccaaccgcagccccggctcttcagtctggggacagtgggagcccaagcccagcgcgccccagcccggcccaggccgccgcccgcccggcgctgtgtctctgcggcccgaggattatcccccagtccaggggcccgcgcgaccaaggaggaagccgctggagccgccggctcggccgcggctagagcctcc

SEQ ID NO: 55085 - DNA, 83 bp, Homo sapiens
  chr18:46186358-46186441
  hyper
agtctgtcacctgtgacgtgtgtcgattgtgtgactgccatggctcttggaggagcactggttgccaccgtgactccaccacc

SEQ ID NO: 55086 - DNA, 30 bp, Homo sapiens
  chr18:46450960-46450990
  hyper
cccagaaaaactgcaatgcatggatgtcgt

SEQ ID NO: 55087 - DNA, 30 bp, Homo sapiens
  chr18:46453447-46453477
  hyper
atccaaaagaggaaataggaccccagagct

SEQ ID NO: 55088 - DNA, 30 bp, Homo sapiens
  chr18:46454032-46454062
  hyper
gagagtgctgcacacacgttggtctcatct

SEQ ID NO: 55089 - DNA, 31 bp, Homo sapiens
  chr18:46476386-46476417
  hyper
cagcctgcagtccaggcggccgggcagcagg

SEQ ID NO: 55090 - DNA, 30 bp, Homo sapiens; identical to SEQ ID NO: 11766
  chr18:46476807-46476837
  hyper

SEQ ID NO: 55091 - DNA, 30 bp, Homo sapiens
  chr18:46477955-46477985
  hyper
gggtcgcgcgttctcgccccccccgggcac

SEQ ID NO: 55092 - DNA, 186 bp, Homo sapiens
  chr18:46501831-46502017
  hyper
accccagccccctcaccgaaaccgggcctgtcccctcccccatcgcggtcccgcacggcggcggaggggccgaggggtggcggcaccgggatcccgccgccaccccggcgcgcacggaggcagggttgggggaaacacgattcctggggagattggaggaggcgatgccgccgaggctgcggggga

SEQ ID NO: 55093 - DNA, 318 bp, Homo sapiens
  chr18:46502752-46503070
  hyper
aatcttgcccgtctgcgcctctgactcacgtggtgacccagcctccagtcacccggcggccgccctccggcctcagtttcccccgccgccgaacaatgaagccactgtgtcgccgttcatttctgagcgccgtttcacacgcggagcgccgccgcctccctggggaagggaccgaggcgtccggcttttaattatccccggtgggcgggcgtggggaggccgcgctctgctggataattgaaccctgggactattccctcgtcagcccaagctctttatcttaagccgtcctttcctcttcatcgtatttaaatttta

SEQ ID NO: 55094 - DNA, 30 bp, Homo sapiens; identical to SEQ ID NO: 11767
  chr18:46986861-46986891
  hyper

SEQ ID NO: 55095 - DNA, 1548 bp, Homo sapiens
  chr18:47087066-47088614
  hyper
gtaatgaggcgaggtcggaacaggatctgctggctccggctcggtttcctcgcacaggtctctccagctggatcctcgacgctagggaggaaggggcgcgggactgctgtgggggttttccctccccaggcaggggcaggacctgttccgggcgactgcagggttaagggtatcgtcttaaagagccggatcctcccggctggagcgaggctggatggcgggacgcagcctctcagcctctcgtacccgccctgcgtccgcagtggttgttggcgcagccgccccgtcggtgttccgggctcagtccccgctccccagcgccagacgcagactccgggccaagttctccctccgctcgctgctttctgccgcaggacccggatcaataaagggaaggagagccgggaggaaatgatggagaacagagagaaaggagatgcttgatttcactcgccaaggagtgagtgctcatcggcagacactgggctctggccacgcgtcttagactccaaatctcggctcactggtccctttgaggaggtcgcctggtgttcccgtagccctccaccccaccgtaggagagcgcctgccacgagctccgcgcctcgctaagtgctttgctacgtgaactcttagttttcccaacatccctaagccgccgatacattatcacccacgtattgcggacgagagaaccgcctcggagaagctggctggctcgcttggagttttgcagctagtggcggagcgagcattccgagcaggtactgtgcgatcctccagcgccggccgcagctcacagccccttagctccgccgggttattgtgcggccgcgccttctgcacctgttgcggccctcgctaggcgggaagggagggagaagaggaggacaaaggggatgaccaggtggctctcccccgacggactcccggcccagggagcggatagaccactcccagagagagtgtggctttgagccttggagaggatgctctccttctccagggatcgcctccccagcggacgcagagtttcagggaaatgtccgcctccgccacttgggatggcagtggggagaggaggatctgggtgtccggaggagggcagtgggagaaagctggagctgctggagtcgcagctgcctgcggagcgggcccgggaggaagcggggccgagcgtgcggcgtccacgcggtgagtgtgcagcgctttcattcaaactttctccagtctcggttccggcgtcagcaaggtgtgaccaatcagagcccagagacgggaataaattatgcaaatcaccatctggcgatgggtcagatgactcccatacttttaaaaactacctctataggagcgtgacagcagcgagtccttgcctcccggcggctcaggacgagggcagatctcgttctggggcaagccgttgacactcgctccctgccaccgcccgggctccgtgccgccaagttttcattttccaccttctctgcctccagtcccccagcccctggccgagagaagggtcttaccggccgggattgctggaaa

SEQ ID NO: 55096 - DNA, 767 bp, Homo sapiens; identical to SEQ ID NO: 11769
  chr18:47339390-47340157
  hyper

SEQ ID NO: 55097 - DNA, 1552 bp, Homo sapiens
  chr18:47720184-47721736
  hyper
tccaggttgaaactcgaggggtcccgggcggctgcagcgctgccgcgagctcccctggaagcggtggcttgtccctaactttaaccacagcaactgctgcggaacgcgggcgtctccgcccgggctgcacctgttcccgattcggagcacccagcctcacacatcccttctgaccttgaaggcatcctgaaactcacaccctgctcccggttcgactttactccaaccccctccccgcagtcactgaagccctctttgtaccaaagaggccgcgtcaaaacatccatccccagcaaattcacaatgctcttccctggggtctccggagataacggcgcacccctctacccattgcttaccctcactccatccagccgccgcgccctcacgccaggttgtctcctccctctccaccaagtccagaacccccacctctcccaagtccagggttccctgttgtgggtatgcgggaggaaaggacgcctcggaggcgcgccctcgagagccggcgccgcagagcccctggggtggggtccacggcggggacaggggacagcagcgggagcaccgcgggggcccgtcccgcgcacggcgctcagagctggcagggtcgccctgccgttcggggaactcggttggagccgagcccaggcaacgaaagtgaggggcgcggcggggagggggcgacagccctggcttggtgctgagccgtggcgctgcggaacctctaggagccgggtggccggtcagtgcgggcgttcccggaaccgccaaactttctccgccaaccgaagttagggactccgaggacagtgacgaggaggacaccgcggaggggggtctcccgtcacctcccgcctccagtagccgagggagaaggcgaccctgagtactaggtggccccgagcgcgccaccccggccccggggcgcctccctcgcggccgcgctcacctggctgtagagctcgcccaccgacatggcccgggccgggcggggctcgggccccggctcctggctgccccgcggctctcagtccgcggctggcccgcctggcgccatgttcccgggctggcctggagtttctcgatcttctcgctcttctccgacctgccccgccggcttcccgcaggcgccgcggccggctcgctcccggcggcgcgacctttactcccgccgcggcggcgcagctacggccggacaggagttgcgagcgccgggggaggaggccgcgccgcaccactcccctcccaggtgtggggaggaggcgagggccggcgaggagggaggacccgctcgcgtcagagcggacggcccgtgcgccgccgcgcctctgagccctgccggtgcccggcccgacgcgccctcccgcgcccccgctgccacctgggcctccgggccgggggcggggcgctcagagaggagctccgggaccggcgcgggccgccccctgctggacgccgcgcgcgcgcaggcacaggtgcgccccggcgcccgcacctgccctgccgcgctccgcttccacccgcaccgggccccgcggagtccggcatg

SEQ ID NO: 55098 - DNA, 411 bp, Homo sapiens
  chr18:47792568-47792979
  hyper
aattcaacccactgcatcaggcgacacccgttcccctcgagaaggccccgggtgggggccgaagtgggataggccaggcctggagtgcggagagatggagaaagctgtagggtctggcagacatatcctgtgcttaccacgatcaccactttgggggtggggcccttaacctcccgctgtacggtgccaaaccgctggctgtacattttcgagtccccttcgggacgggggcggcgtccgccgcgtttcccccaaccgtggcgacctgcgggacccgcttccgcgacgcagaagtctggttgccatggtgcgcctcgcgggattaggggccggtagaggtgggcgggtcgggcggaagtcggtctggtcaccatgggggccgcagacgcctgcactcgggacttcctcttc

SEQ ID NO: 55099 - DNA, 203 bp, Homo sapiens
  chr18:47813500-47813703
  hyper
gcgcctcacagaccccgcgtaactcactgcggacttcccatcgcggttctccacgcacccctccctgtttatctcatagacccacctggcacccgcacccacccccagtcgcggctgtccacggatacccggacacggactcctcgtcacggctcactacagaccactcaatgtgactccttacaacccgcttatccctctgc

SEQ ID NO: 55100 - DNA, 30 bp, Homo sapiens
  chr18:48345891-48345921
  hyper
aagtgcagccaggacgcctcccgctgcatc

SEQ ID NO: 55101 - DNA, 35 bp, Homo sapiens; identical to SEQ ID NO: 11772
  chr18:48346823-48346858
  hyper

SEQ ID NO: 55102 - DNA, 30 bp, Homo sapiens
  chr18:48405357-48405387
  hyper
gctaagcctccagacggagcccgcccctcc

SEQ ID NO: 55103 - DNA, 80 bp, Homo sapiens; identical to SEQ ID NO: 11773
  chr18:48494352-48494432
  hyper

SEQ ID NO: 55104 - DNA, 30 bp, Homo sapiens; identical to SEQ ID NO: 11774
  chr18:48724081-48724111
  hyper

SEQ ID NO: 55105 - DNA, 70 bp, Homo sapiens
  chr18:49866289-49866359
  hyper
acgctcaggatgttcgcaggctccattgacaaaagtgacttcccacgctttgcccacagagggcatccct

SEQ ID NO: 55106 - DNA, 294 bp, Homo sapiens
  chr18:49866411-49866705
  hyper
cgctcttttttccctaagccatagtctgtctgcccccacccccttcccgtggaatctttgcctgatccagttcgtttccctccggtctccacattttcccttccagccctccacttctccggatcaatgtgtagtacggttccaactcccagctcgcacaccgctggcggacaccccagtaacaagtgagagcgctccaccccgcagtcccccccgcctctcctccctgggtcccctcggctctcggaagaaaaaccaacagcatctccagctctcgcgcggaattgtctcttc

SEQ ID NO: 55107 - DNA, 86 bp, Homo sapiens
  chr18:49866959-49867045
  hyper
agtggacaaggaaaaaggcttcgaaggcagcagaggcgcaggggaggtggagaaagaggtggaggaagaggacgaggaggaggagg

SEQ ID NO: 55108 - DNA, 56 bp, Homo sapiens
  chr18:49867104-49867160
  hyper
tgtgagtgctgccgctgcccgcgacccctggccccgaaggtgttggctgaaatatg

SEQ ID NO: 55109 - DNA, 232 bp, Homo sapiens; identical to SEQ ID NO: 11778
  chr18:49868161-49868393
  hyper

SEQ ID NO: 55110 - DNA, 30 bp, Homo sapiens
  chr18:49868773-49868803
  hyper
tggctcttctctcccggagctttgtcctca

SEQ ID NO: 55111 - DNA, 495 bp, Homo sapiens
  chr18:52495590-52496085
  hyper
cctgaggtgagctccgcacatccgcgttgggacttgcagacacgccttcttctcacacaaaccttacccagccccgccgccgcggcggactccgagggtggtgccaccagccctgccactcgcagtcctgacgggcaggggctgcggaccgcccggccttggacccatccggagccacaggttggaggagataagtagctgtccccgtgctcatcgccctgtggagcagatcctgtctccttgctgacggtggagcccgggagttccagggcttgggaaggggaaggaaacctctctgaaatctgacacctgctctcccggcaaggaaacttcgcaggctggtgagttgggaaggcgggctgctgctgctggaacgcgttcccacccacccgggtgctgcagcgccggcctgcgccgtgggaagtgaggcctctgtgtgtgtgtgtgtgcatgtgtgagtgcgtgtgcaccttcgatcgcggtttccagcagaaa

SEQ ID NO: 55112 - DNA, 468 bp, Homo sapiens
  chr18:52988830-52989298
  hyper
cacctaggatgctcatccctgcgacaataaaacttgtcaaaaatccccctcgcagcccgcattcgcttaccgctttcccattatagtagtacatcaaagagttgccgcccatgcccgggattgtgtatgcgcagtacatggtctcggattcttttttctcctcagtaccactctaacaacttttatttcaaactcgctgtcccttttttcacaacaattccttcagttgcattttcccatatggccgggccaagcgtggtgaatatgcaaagcaggaagagaccattcctggcgggcgggggaggccgcggcgctgctgtcagacgctcaactttgcgcagcggagctggaaggcagcccggccctgatggagctcgaaatcctaatgcatacgcgagatcgattcaacttttccgaggggtttttattagttcctcgaataatgccgattcttacaaatttctgcag

SEQ ID NO: 55113 - DNA, 386 bp, Homo sapiens; identical to SEQ ID NO: 11781
  chr18:52989589-52989975
  hyper

SEQ ID NO: 55114 - DNA, 1671 bp, Homo sapiens
  chr18:53254613-53256284
  hyper
gtatttccaaagagacgatcaaactggtaacatccactataaaaccaaatcagggaaagaaaaaaaaaaagccgctcttcagcgcatcattttatgcaacaggaggtagagcgagaaatgaatggatcacagagaaaagagaaactactgagaacgatccgatctcaactttccccccaccctgcaccccacccccctcgcacactcacactcgcacacgcacacacactcgcacacaccactcccctccgcttttcaaagtagctatcaagaaattaaagatgagcgtctctggagtgaaaacacgtccaaagggggaggggtggggtgacagggttggggggagcggagtggagggtcgggtcctctaattgtccagcaccctaatttgtgaaagaaaggggttataaaaattaaagtcaggcccctggcaaagtcctcggtccctccgagggggcatcaaggggaggggcgggggggctggcggcgagggggagggaagcggcgggaggggaaggggtgtctcttctgggagcgccgggcgccgggagcccgcggcgcgggaggcgcggagccgcgtgcggggccgccgagcccgaaccccgcgccgccgggcgcctccgccccgccgagccccgcaggcgccggtacctaccgcccgcgcgcgagaaggggctctccgtgcaccgccggcgccgaggcggcgttcatgtctaaccgccgccgccaccgccgccgcctgctcctgcgcccgctcccgcgcctgctgcctccccgccgccgccgccgccgccgccactacagatccgcagacacacagccaagatccctgactcttaacaccaactctcttctccggggaggggaggggacggagggaaggggggagggggaaacacgccgaggcgcacggaattgcaagttcagcaaagaaatgggtgggggggctccggcggggagacgcgacttgctccgggtcgggcaggctaggatgcatccccctcgcacccaccccgaggggaaaaaaaaaaaatctcaacacctcccccgcctcgccaaaaaatacaaacgaaaattcatcgagcacctcatttttcctcagatcgtcagttacaatctgaagcctgaacagttcagtttttgcccgttgcatccctcggaggcactttgaaatttattcgagtttacatcccctcacttctttctttctcttactctcgttccctctcactcacacatccacacacggcaaagcaagtttatactaggctgcaaatacacgtgatgcaaaaagactttgccaagaggaacaatatttttctttttcgtctataaatcaagccacattttcctggggagattttcgtttcggtagttttgcgttgggggcgaaatctgaattgcatactttctttcccctcccttttaagtcacagaatagtataactgcaaacttcgaaaaaaaaaaagggcaatttttgggggtggatgttgttttgtttttgcacttgagttcctaggcacgctaagtccctgttcgccagcactgtaagtttttaattcaacatttaccattataggccctgcatgctcttaaaacatactttttcacatcactttttaggataaaatttaagcttcataattctatcgtttcgtaataacaagcgt

SEQ ID NO: 55115 - DNA, 399 bp, Homo sapiens
  chr18:53256997-53257396
  hyper
acattgtaatccattcacatccgggaactgcgggcttataaagagaaggagctgcggccgcggctgctcctccagacaatgactgggaaggggcggggcgggagcaggcgaccatagagtggtaaacagagcgcctagagaggcggccaagatggcggtgctggtcgaccacgcctcctccgggagcggaggcgggtggctgttctcgggtaggcgtcgcgcgtggggcggcactgtgggagttcccgaggccgaggtcgttcgcaggccccatttccctgcgctcttattcgtgttgccgcttcttggccgtccttgctctttgacacaaaagtgtagtttcggcacaaatttacaaattaaactccacagacttccgcagggaagtgagataccccc

SEQ ID NO: 55116 - DNA, 30 bp, Homo sapiens; identical to SEQ ID NO: 11784
  chr18:53257771-53257801
  hyper

SEQ ID NO: 55117 - DNA, 706 bp, Homo sapiens
  chr18:53446768-53447474
  hyper
gaagcacccacttcacgacttaacgtttcaggaatatgaattctatgttcagaaaatttccccacactcttcttcgctggcacattcactgatgtagaaaatgccaggagccccgggggtgtgatgtttccggtggataatgtctcccgttccctgccccggggcccagacagttggtgcttaagcgtctacaatgtagagtttcctgcattttcctcgggccgccatttgtctacttgtcccatccaggacatctccctaaataatctctaagtggaaaaatcacggtcctctaggagatttatccgggaacgaacgtgcgtggggcagttcaaattcctgagctcagatttcgtttcccgcggtcagatggtgcggtcggtggggcccgagggatgcgcacagctgtgcctgagaggtgctgctctcccgccaccgaagtcgctgggaaattctgctgcactgagacattttaatgtcggatgttctaatcctgcgggcaaaaaaaaaaaaaaagtttgaaccaggtactgggcttttgtcacggtgaaccccacccgcgccccgcgccgtcccttcattcactcaggcgaggtggcttggatttgcacctcgttgaagaagcctcccatgcgacatctccgccagcaccccgcgcggacttggctgggcggcggcggggagtcagcttgtcaccgcacggcgg

SEQ ID NO: 55118 - DNA, 64 bp, Homo sapiens; identical to SEQ ID NO: 11786
  chr18:53447798-53447862
  hyper

SEQ ID NO: 55119 - DNA, 30 bp, Homo sapiens; identical to SEQ ID NO: 11787
  chr18:54305272-54305302
  hyper

SEQ ID NO: 55120 - DNA, 30 bp, Homo sapiens; identical to SEQ ID NO: 11788
  chr18:54318600-54318630
  hyper

SEQ ID NO: 55121 - DNA, 30 bp, Homo sapiens; identical to SEQ ID NO: 11789
  chr18:54724442-54724472
  hyper

SEQ ID NO: 55122 - DNA, 190 bp, Homo sapiens
  chr18:54789066-54789256
  hyper
agcccggtcagcggccgggcgccggtggcagcccccggtcccgcggcgaccccggcccaggaaggagcccggtagggggtgcgctttccctggcctcccgaggcgggatcggggccgggctccactcggtgagaggatcctgccagccagctgggtgaaagacccacagaaatcccgaactggctgcaag

SEQ ID NO: 55123 - DNA, 85 bp, Homo sapiens
  chr18:55020859-55020944
  hyper
gcgggaagcgagcctcggaagggccgcccaccctcgccaggtcggagtcaccgctccgcgctgggccggcctgtgaaggctccag

SEQ ID NO: 55124 - DNA, 582 bp, Homo sapiens
  chr18:55020965-55021547
  hyper
cgagagcccccgccccgctctgtgaccccgggaactctcccagcagggcctcctgacgggcaggtggcaactacaaagtgccacctgtggtccaagctgggaccgaggcgaggaacccagaggagcctcgcctggaccgaggagcggagtaggccggcggcccccgggggtccccagccaagttataggaagtgaaatcggacgtgggtttgggaaggaagaggttaaggcaggaaccacccccagactttccctgggtctccggtttcctctgccctttctccaaaaacaattctatggggctgcaaaggcgtagcgggtcaggctggcggggcggccgctgtccgcggtgctgattccctggtcctcgcagcgccgcgggctccagccctgcgcccggcgtgcgccctgctctccgcatgacggccattttatggtctctccggcacccggagggatggacaatgcagatggggttccctagttttctttttttctctcgggtgtgtgtgggagcagagggtggaccaaatgagaggggctccgggacggaacggagcccgcacgcgtaccagccgccct

SEQ ID NO: 55125 - DNA, 40 bp, Homo sapiens
  chr18:55101950-55101990
  hyper
gcattactgctgcccgcgccgcccgtgggccgccggccgg

SEQ ID NO: 55126 - DNA, 1406 bp, Homo sapiens
  chr18:55102007-55103413
  hyper
cgagggcactacagttgctctgaccgcgtagattatgcatgtcccggcctcgggaatttaccatgcattagaatacattagcgcctgcattttaaaaggctaaactattggctcccagctagggactctcggtaagtggcttgttagtgacgagtgtttgtctatactggcacatagcggagtcttttgctcccggcttactcgcctccaggaaagctttggggtgaggcgaaggcgattgaagcaatgccccttcccccagatcgcagctgctcaggggggacacagcacggcatctttcaccgaatctctctcgctcgctcgcactccagcctccctctccccagcgacccccccaccttctcctccctccctctccttgacgtttgattccagtagcaaaggaggtaaaaaaggcaccgagccgtcagccaaacctgaaaagtgcggccccgccccctccacagccactggtagcttcccgtggaaggcccgcctcccggggcagctgcggcctcggagtggttgcgcttggcgcccgtcgggcgtggccccgccccaggtccgggagggtaggttggctgccccggcgagcggcagagcccttctggacagctcccgctcacccaaacagaagacgtcggcgccggagcgggctcggacatggcgaggctgcgagccggcccgagcggcggggcccggtgatccctccctccctccccgtcccctcccctctcccgcacgcacgccccgtccgcccccaccccgcccccaccccgggcgagcccgcccgcagcccggggcgcacacccgcacgcgcactcctctccactcactcccgcgcccgcccccactcccgcagccgagccccgccacgcgcgccttgcccgcccgccggccgcccccgccgcccccgccgcccccgggccctgatggactgaatgaaggctgcctacaccgcctatcgatgcctcaccaaagacctagaaggctgcgccatgaacccggagctgacaatggaaagtctgggcactttgcacgggccggccggcggcggcagtggcgggggcggcggcgggggcggcgggggcggcggcgggggcccgggccatgagcaggagctgctggccagccccagcccccaccacgcgggccgcggcgccgctggctcgctgcggggccctccgccgcctccaaccgcgcaccaggagctgggcacggcggcagcggcggcagcggcggcgtcgcgctcggccatggtcaccagcatggcctcgatcctggacggcggcgactaccggcccgagctctccatcccgctgcaccacgccatgagcatgtcctgcgactcgtctccgcctggcatgggcatgagcaacacctacaccacgctgacaccgctccag

SEQ ID NO: 55127 - DNA, 119 bp, Homo sapiens
  chr18:55103761-55103880
  hyper
cgcggtgagcaacacctgtcccgcggcctgggcaccccacctgcggccatgatgtcgcacctgaacggcctgcaccacccgggccacactcagtctcacgggccggtgctggcacccag

SEQ ID NO: 55128 - DNA, 243 bp, Homo sapiens
  chr18:55103897-55104140
  hyper
cgtcctcatcgggctcgcaggtggccacgtcgggccagctggaagaaatcaacaccaaagaggtggcccagcgcatcacagcggagctgaagcgctacagtatcccccaggcgatctttgcgcagagggtgctgtgccggtctcaggggactctctccgacctgctccggaatccaaaaccgtggagtaaactcaaatctggcagggagaccttccgcaggatgtggaagtggcttcaggagc

SEQ ID NO: 55129 - DNA, 203 bp, Homo sapiens
  chr18:55104166-55104369
  hyper
cgcctggcaggtaaggccggggctagccaggggccaggctgctgggaagagggctccgggtccggtgcttgtggcccaagtctgcgcgccgagtcacttctcttgattctttccttctctttcctatacacgtcctctttcttctcgtttttatttcttcttccattttctctttctcttccgctcttcccctactttccctt

SEQ ID NO: 55130 - DNA, 1163 bp, Homo sapiens; identical to SEQ ID NO: 11793
  chr18:55104738-55105901
  hyper

SEQ ID NO: 55131 - DNA, 30 bp, Homo sapiens; identical to SEQ ID NO: 11794
  chr18:55114512-55114542
  hyper

SEQ ID NO: 55132 - DNA, 30 bp, Homo sapiens
  chr18:55288983-55289013
  hyper
gactgcaacaccgacgccgtcttatgactc

SEQ ID NO: 55133 - DNA, 290 bp, Homo sapiens
  chr18:55469741-55470031
  hyper
tcagatacgtttggcccgcaagtccttttcggacacgttggcatctgctcccaaagagcgccccagcaggacccggtcaccggggtcttccagaggggcggtagccaccgcacaggagccagcggcatcccccaaggagccgcaagccctacctggcttaacccccggacatgtgtgtcgctaccgatcgaagaacccaaacaccccgagatttccctcctctaggcaggtgaaaaccccacggaactctccgcagcgctgcctgcccagccggccgtgtctcgccgtcc

SEQ ID NO: 55134 - DNA, 58 bp, Homo sapiens
  chr18:55470276-55470334
  hyper
ctcggagcgctcgctgcgcacctggccgctgccgccgcccgcccggccccagccctgg

SEQ ID NO: 55135 - DNA, 249 bp, Homo sapiens; identical to SEQ ID NO: 11796
  chr18:55470591-55470840
  hyper

SEQ ID NO: 55136 - DNA, 211 bp, Homo sapiens
  chr18:55470898-55471109
  hyper
cgtcaccccgggtcgaggactgagccagcctggaaagctggcggggccgcggcgcgcccgggacctgagctccctcggtaaggggagctgtgtcctcttgatgccaagtcatgtttggggaccggtcaccgaatgcgcgtcaaagttcgccgcgtggagggtgaagaaagaggctgcgcctcaagacttccagaaacgtatcctgtgattg

SEQ ID NO: 55137 - DNA, 246 bp, Homo sapiens
  chr18:55710764-55711010
  hyper
gatatttcacgttgcggctcacaaatgaactgctttttattcaaagaaccatgctgtctgttttcgcgtgggtgggtgtgtaaccggggcgggcgctatgttggttttgttccctgcaaggttgacacaggcaatggcgacttgcggccacactggggcagcctctcctcggctggcagccgggccgggcggctcgctcccgggagctgacaatgtagccaagtcctgctcgtcggggccgcaaag

SEQ ID NO: 55138 - DNA, 30 bp, Homo sapiens
  chr18:56338243-56338273
  hyper
ggatgctggtgtgtcgccgggcacatgaaa

SEQ ID NO: 55139 - DNA, 30 bp, Homo sapiens
  chr18:56807203-56807233
  hyper
ggctcatctccccgcgtccggcttggatat

SEQ ID NO: 55140 - DNA, 246 bp, Homo sapiens
  chr18:56887179-56887425
  hyper
ggcggacggggctacgaggaaaaaagagggggcaatgtacactcagccttttcatcactcggcggggagatggatggttttccggaccgggcgtcccagcgccccggttagctatagggagacgtcagagcgctctggtccgcgatagaagagccccccagcccccccgcccgggcttccatataaagtaggggccctagtggaggccgcagcagtagcaccagcggctgcggcggcggagctcct

SEQ ID NO: 55141 - DNA, 164 bp, Homo sapiens
  chr18:56887636-56887800
  hyper
gtgagtgtcctggccgcgggagccgcgcgcttgtcctcctctggatcagccagccggaggggacctgtctccccatttctttgcgtttccctggcccagctttgggagctgggtttgttgtgacctttctatcggcaaacaccttccccgttctcctaaaactc

SEQ ID NO: 55142 - DNA, 211 bp, Homo sapiens
  chr18:56888444-56888655
  hyper
caggtcctgctctctaggcaccggcttggaggctccctcgccatggcccctagaacccaggcggagaggacggccgcgctgcgggtgcggagggcgcctgcgggtggggtcaggattccgccctgcgcgcactcgctgctttcgctcagctgggaggcaggaagcgcctggcagcctcggctcacccagcatcaccccagggctctcggcg

SEQ ID NO: 55143 - DNA, 51 bp, Homo sapiens
  chr18:56888686-56888737
  hyper
cgtccaacttcctcactcccccacctacccgccccacaaaagccaactaca

SEQ ID NO: 55144 - DNA, 267 bp, Homo sapiens; identical to SEQ ID NO: 11801
  chr18:56932077-56932344
  hyper

SEQ ID NO: 55145 - DNA, 302 bp, Homo sapiens
  chr18:56932699-56933001
  hyper
gctgatggtggccacggggtcgcgggggaggtccgctcccggcaggctccagctctctgggtcagcggaggtaccccgaggctcaaagagcggtcagctccccacctccccaaaagtgcctgactccgcccttctctcggcgcggtccaattcgcggcgtccttcccctccccgccttcgctatctgagagccccgcccaggccccgcccaacctggttcgcaagagcagaagaggatcccggtctacagacccgcttgctttcctcctagggcgggtcagagcagacgtcgtcggggtttg

SEQ ID NO: 55146 - DNA, 30 bp, Homo sapiens
  chr18:56933297-56933327
  hyper
tgactcaacttcggccggcgcctctctgca

SEQ ID NO: 55147 - DNA, 216 bp, Homo sapiens; identical to SEQ ID NO: 11803
  chr18:56934998-56935214
  hyper

SEQ ID NO: 55148 - DNA, 766 bp, Homo sapiens
  chr18:56936004-56936770
  hyper
gaggtccgcgaagtgcgttgaggcggccagagggcctctcctcaggcctgaaagtcgcccttctccccgtgcatcgggagcaggcgcgtggccctgaactatgcttggcgggtggctgcaggcgacagggaaagaggggccgagctggggaggggggttgtccctgggagagaggatgcgggtacggtgcggtcggcccggggtcggatcccaagacgttccccagtgcccctagagggcctgccacggcttcccgatggcctggatgtgctccttggctttcagacgcagcgccgcgatgctgctgttgcgcgggtccgcctcgtccagcgggaacttgtccccgaagccgggcccgcacgggtaggagggcggcggcggcgcgagaggttgcaggccggggcccaacggcggggagttcaggaagggcggaggcggcggcggtggcgtgtagctggcaggcaggctctgcgccggcggcccgaagcccggcaggctctgcagcgccgtggcgcccccgcccggcagcggcggcccgagccaggactccagcggcagcgcgcccccagccggcccgccaccgctgcccgggcccgccccgaggggcgacagcgtcgcggagggcggggagcggctgaaggagaggaggggcgagtcctgcagcttcatggaggacacttccagcttctcctgccgccgccacttagcccgtcggttctggaaccacacctgcaggagagagcacaggggccgtcgggcagcagcg

SEQ ID NO: 55149 - DNA, 30 bp, Homo sapiens; identical to SEQ ID NO: 11804
  chr18:56939181-56939211
  hyper

SEQ ID NO: 55150 - DNA, 153 bp, Homo sapiens; identical to SEQ ID NO: 11805
  chr18:56939498-56939651
  hyper

SEQ ID NO: 55151 - DNA, 407 bp, Homo sapiens; identical to SEQ ID NO: 11806
  chr18:56939763-56940170
  hyper

SEQ ID NO: 55152 - DNA, 679 bp, Homo sapiens; identical to SEQ ID NO: 11807
  chr18:56940565-56941244
  hyper

SEQ ID NO: 55153 - DNA, 441 bp, Homo sapiens
  chr18:56941557-56941998
  hyper
gggccaaggagatggcccagagctggctggggaaggaccttctcccggggaagaggcctctcgcctccccgagggttcaggagtaattggcttgcagttctttctcctttggaccccctcgaggcttccgtggcccacagtgactgatcggccacttggaaagatgattggatagggtgagtgtgtttcacctccagcagcgcggatggacaatggcgctgtgaacgtctcacccctcaaatctgaggcgagacccgaggcgagcgcttggccttccctgaactggtggcctgaaccgtgaattaaaatgctttcctataaaagctcaaggacctagaggacaatatccctaaaatctccttttcagtaggcgctctgatctccacagcaggggtgtcttctttatcccgcttgcgttcagacaagcgtttgctgcgtccc

SEQ ID NO: 55154 - DNA, 110 bp, Homo sapiens
  chr18:56976091-56976201
  hyper
tcgtcagtgcggggacgcgggcgggagggtaacgtgcgacaagtgacagcgcgggaggcagaggaggcgcccaagggtggggctggtttgcaagcgcaaagtgttgcact

SEQ ID NO: 55155 - DNA, 30 bp, Homo sapiens
  chr18:57026678-57026708
  hyper
gcggtgcggtccttcggccccgcccaccct

SEQ ID NO: 55156 - DNA, 232 bp, Homo sapiens
  chr18:57069754-57069986
  hyper
ttgtgacactgccattgctgccgcctgcagtaccactgccgcatctgactcacattctagaaggaaggtaggtttgtcccaatgaatgcagcttggggcagctgccttgtggagaggtgactgaggccgctgtgctgaggctccctgggcgattcaactacaccatctgccgtgtcagcttggaactgcaggagacgctagaggggaagacggagaaaggaagggaaacaaa

SEQ ID NO: 55157 - DNA, 452 bp, Homo sapiens; identical to SEQ ID NO: 11810
  chr18:57363597-57364049
  hyper

SEQ ID NO: 55158 - DNA, 154 bp, Homo sapiens
  chr18:57364448-57364602
  hyper
gccgtcctccggctcctctctgtaggtccacgtgtgtcccaacgccaggagcagcagcagcggacccaggctcctgcccagctggcccctggcagctcctccccggctcggaggcggcggcaccatcagggaagctcccggcttcttcccagcg

SEQ ID NO: 55159 - DNA, 40 bp, Homo sapiens
  chr18:57364847-57364887
  hyper
ttgtctcgtcgggacgttcacgtccgattgacagacttgc

SEQ ID NO: 55160 - DNA, 116 bp, Homo sapiens
  chr18:57365455-57365571
  hyper
ccatcaaatgagacacgtgggggcaaattaattacaggtgctgctacctgctagtgtatgcagccgcgttgataggtaacaagaaaacggaggaggggggccgtaaatcggctccc

SEQ ID NO: 55161 - DNA, 30 bp, Homo sapiens
  chr18:57567256-57567286
  hyper
ttggcatctccgcgcgtccggacacccgat

SEQ ID NO: 55162 - DNA, 498 bp, Homo sapiens
  chr18:59000845-59001343
  hyper
gcacggagactttgcgaaacatccgaaggcagaaaagctgtgacacttctgacagagggggtaggggggtggggggcggggacagcgccgcgagcaggggtgaagagacccagcggggcaccagccgcccagtgggggaggcagctacgtgagcagaacgcccgccctggagcagttaggaccgaaggtctccggagagtcgccggcggtgccaggtaacgcagagggctcgggtcgggccccgcttctggggcttgggactccgggcgcgcggagccagccctctggggcgaaatccccgggcggcgtgcgcggtccctctccgcgctgtgctctcccagcaactccctgccacctcgacgagcctaccggccgctccgagttcgacttcctcggacttagtgggagaaggggttggaaatgggctgccgggactgggggagctgctctctggaagcagggaagctggggcgcaccggggcaggtggaggacgtggc

SEQ ID NO: 55163 - DNA, 254 bp, Homo sapiens
  chr18:59001497-59001751
  hyper
cgcacagagatgtgcgccgggaaggggaccagagagccaggctccggggaggcgcaggcacctacggggccgatccctggtccgtgcctcgcgccgcgcccccgccggagctcggctgtgggaggagaatgtggtgggtactcgagtccccgccacctgccggacttcgccaactccccggatttcctgtcctcgggccctgacactcccaaggaaagctctgaattgcgctcgctgtttggtttttgcttgtt

SEQ ID NO: 55164 - DNA, 752 bp, Homo sapiens; identical to SEQ ID NO: 11816
  chr18:59560075-59560827
  hyper

SEQ ID NO: 55165 - DNA, 30 bp, Homo sapiens
  chr18:59561206-59561236
  hyper
cgccaccccctccgcggtccagaagatctc

SEQ ID NO: 55166 - DNA, 30 bp, Homo sapiens; identical to SEQ ID NO: 11817
  chr18:59992372-59992402
  hyper

SEQ ID NO: 55167 - DNA, 40 bp, Homo sapiens
  chr18:59992690-59992730
  hyper
cggcccgacgcctcctcgggagccccgggaagggccgggg

SEQ ID NO: 55168 - DNA, 114 bp, Homo sapiens
  chr18:59992967-59993081
  hyper
ttgagcacctactaagcgcttgcgccgggcggtgccgcgggagacagcgccgtgggcacctcacttgcggcagataaccgttcccgatacgatttctcccgggtggcctccgtc

SEQ ID NO: 55169 - DNA, 501 bp, Homo sapiens
  chr18:60189546-60190047
  hyper
tcggccggccgggtcccgctgcgcacctcccggccgcgcgtccccacctgcgcacggtgcctccagcctgggcgtgggcgcggcccgggatcgcggcgccggggccgcaaaccggggccgcaaaccagcgccgccacccgcgtccggacccagtcccctgtgagcgacacctggcaaagtttcacaaggtgggagacagcccaccgccggctttcaggaagtgcactgggcggtgaggactcgaacgagctcgtcccggggctggcgcactcacttcggagaaacccctgctcccgggacgcgttcactccggccgcgcaggcagcccgggcaccactggcggaggcggggcggcagctggcaagcagaggagaatcaggagtccaaagccgggccagggccctcaggaaaggtgagagcggccgcgtccctccgctcacgtgggcctcgcacgctcctcaccgctcccgggctaccctcacgccgccccacggccccagc

SEQ ID NO: 55170 - DNA, 1612 bp, Homo sapiens
  chr18:60190084-60191696
  hyper
cgcacggaagccgccgagagggaggcggccggccagcagttgggcgtggcttcctggagaaaggcggccccccagggggcggggagagcgacgtcaccgtcgattcgcggtgctgattggcggaggtgaggtgcgcggagcccgcaagcttctccgcccggcccggctgctccacctcctcacccagccgctccgtcctcaccggctcgcgagggaacagctcaggcaccgccgccccggctcagcgcggacggcggagagagggaggcggaaggaggacaccctcgctcgcttgctcccacccgcacccgggctcccagaaccggcgaggagcccagggggaggagccgtcgcgggcacgccccgcccccagcccgggaagacgacgccagcgaccccgccggccggccaccgcccccctcgccggccgagacccgcccccggccccggccctcccccggcggcatggaggggccccgctcctgacggccgcgccgccgcctcggcccgtgctccacctcgcggcccctcccgcccgcccccgctcgcatgtctgcgccgccctagccgaggatgctgaggatgaagctgccgctgaagccaacgcaccccgcggagccgccgcccgaggcggaggagcccgaggcggacgcgcggccgggcgcgaaggcgccttcgcgccgccgccgcgactgccgccccccgccgccgccgccgccgcccgcgggcccgtcgcggggccctctgccgccgccgccgccgccccggggactcgggccgcctgttgctggtggagcggcggcgggggcgggtatgccgggcggcggcggggggccctcggcggcgctgcgcgagcaggagcgggtatacgagtggttcgggctggtgctgggctcggcgcagcgcctggagttcatgtgcgggctgctggacctgtgcaacccgctggagctgcgcttccttggctcgtgcctggaggacctggcgcgcaaggactaccactacctgcgcgactcggaggccaaggccaacggcctctcggacccggggccgctggccgacttccgagagcccgcggtgcgctcgcgcctcatcgtctacctggcgctgctgggctcggagaaccgggaggccgctggccgtctgcaccgcctgctaccccaggtggactcggtgctcaaaagcctgcgcgcggcccggggcgagggctcgcggggcggcgcggaggacgagcgcggcgaggacggcgacggcgagcaggacgccgagaaggacggctcaggcccggaaggcggcattgtggagccccgggtcggcggcgggcttggctccagggcccaggaggaactgctgctgctcttcaccatggcctcgctgcacccggctttctccttccaccagcgggtcaccctgagggaacacttggagaggctccgcgccgcgctccgcgggggccccgaggacgcggaggtggaggtagagccgtgcaagtttgccggccccagggcccaggtaaggcgcacggagcctccctggactcgcggtgcgatcgctgccccggcggcctccccggcctcgctctcggacgccccttgcccgagccccagcccgg

SEQ ID NO: 55171 - DNA, 96 bp, Homo sapiens
  chr18:60191978-60192074
  hyper
ctgtgtgagagccagccgcagtgagccccaggcagcgccgtccttccccgcctgcctggccggggctccgcctcccgtctccgggctctgccgggc

SEQ ID NO: 55172 - DNA, 31 bp, Homo sapiens
  chr18:60193831-60193862
  hyper
gctgttctcggcctcccgccgccgccgccgc

SEQ ID NO: 55173 - DNA, 98 bp, Homo sapiens
  chr18:60194121-60194219
  hyper
ccaggctttgggctagcgccggagacttccaggcggactcgagaaccacgtggatgctgcgctgggccgtactgggccgtggcgataaccctggtaaa

SEQ ID NO: 55174 - DNA, 328 bp, Homo sapiens
  chr18:60263660-60263988
  hyper
cgctcccgcgcgggtcagcaattcgaagtccgccccagacccctgggccttcgggcgcccccggaagccgcagggactgtcggactgagcggcccccttgcttgggtgggagctggggtgcagagaggggctgttctcgcacccttccgctgcatcggtccccgggccagtgcggagactcctctttgcgtttccaaatcacttttacgaacaaaagaggcgcccagaggatatcaccccgggcgcaccgccctccaggggtgtttgaaacgtgagctgttgtcaggcccagggccaaggatgctaaatgtccgggaaaatgcgcgcg

SEQ ID NO: 55175 - DNA, 30 bp, Homo sapiens
  chr18:60382504-60382534
  hyper
tgccgtcatgccggcgatgaatatttatga

SEQ ID NO: 55176 - DNA, 1366 bp, Homo sapiens
  chr18:60382938-60384304
  hyper
cggtacagcgactccccgagctcggcagggaggaccgagcttcggctccggcggccgccgctgcggcagcagcagcagcagcggcggccgcggcggctctggcggcggcggccgggggcggccggagtccggagcccgcgctgaccccggcggccccgagcggcgggaacggcagcggcagcggggcgcgggaagaggccccaggcgaggcgccgccggggccgctgccgggcagagcggggggtgccgggcgcaggaggcggcgcggggcgccccagcccattgccggcggggctgcccccgtacccggggccggcggcggcgccaactccctcctgctgaggagagggcggctgaagaggaatctgtccgcggccgccgcggccgcctcctcgtcgtcgtcgtcctcggccgctgctgcctcgcactcccccggcgctgccggcctccccgcctcctgctcggcctcggcgtcgctgtgcacccggagcctggacaggaagacgctgcttctgaagcaccggcagacgctgcagctgcagccgtcggaccgggactgggtgaggcaccagctccagcgcggctgcgtgcacgtcttcgaccgccacatggcctcgacctacctgcgcccggtgctctgcacactggacaccacggccggcgaggtggccgcccgcctgctgcagctgggccacaaaggcggcggcgtggtgaaggtgctgggccaggggcccggagccgccgccgcccgggagcccgctgaaccgccccccgaggccggcccccggctggcgcccccggagccgcgggactcggaggtaccgcccgcgaggagcgcgccgggtgccttcggggggcctccgcgcgcgccccccgccgacctacccctgcccgtcggcggcccgggcgggtggtcgcgccgcgccagcccagcgccctcggactccagccccggcgagccgttcgttgggggccctgtctcttcgccccgcgccccacggcctgtggtctccgacaccgagagcttcagtctgagtcccagcgccgagagcgtgtctgaccggttggacccctacagcagcggcggcggctcctcgtcgtcgtcggaagagctcgaggccgacgcagcctcggccccgacgggggtcccgggccagccccgccgtcccggccaccccgcgcagcccctcccgcttccccagacggcttcctcgcctcagccgcagcagaaagccccgagggccattgacagcccgggcggggccgtccgcgaggggtcgtgcgaggagaaggcagcggcagccgtggccccgggaggcctccagtctacccccgggaggagcggggtgaccgcggagaaggcgcc

SEQ ID NO: 55177 - DNA, 132 bp, Homo sapiens
  chr18:60985400-60985532
  hyper
acatctcccggttgacgctctccacacacatgaccccaccgaactcaaagaaggccacaatcctcccccagttcaccccgtccctgaagagctcctccaccaccgtggcaaagcgtccccgcgcggtgaagg

SEQ ID NO: 55178 - DNA, 468 bp, Homo sapiens
  chr18:60985592-60986060
  hyper
cgtcgccggcctggcggagggtcaggtggaccacaggtggcaccgggctgagcgcaggccccgcggcggcgccgggggcagccggggtctgcagcggcgaggtcctggcgaccgggtcccgggatgcggctggatggggcgtgtgcccgggctgggaggagaagatgcccggtgcgggggcggcccccgggggcgcggcgcccacatctcccgcatcccactcgtagcccctctgcgacagcttataatggatgtacttcatcactatctcccggttatcgtaccctgttctcccagcgtgcgccatccttcccagaggaaaagcaacgggggccaacggcacctctcgccccagctcccaccccacggcccccagagaaagaagaggagttataatccagctattttattggatgtgctttgcattcttggacgagggggtgtcttcaatcacgcggaacacttgat

SEQ ID NO: 55179 - DNA, 30 bp, Homo sapiens
  chr18:60986639-60986669
  hyper
agatctcaagagctcgagaaaaaaaaaagg

SEQ ID NO: 55180 - DNA, 30 bp, Homo sapiens; identical to SEQ ID NO: 11826
  chr18:60986896-60986926
  hyper

SEQ ID NO: 55181 - DNA, 70 bp, Homo sapiens
  chr18:60988041-60988111
  hyper
tgagagtgtgtacacgcgcctacacacacacacgttgtgttaccggcgctcggccgccgggggaagaccc

SEQ ID NO: 55182 - DNA, 30 bp, Homo sapiens
  chr18:63411688-63411718
  hyper
acatccctttttaatcgttcagacctaaaa

SEQ ID NO: 55183 - DNA, 30 bp, Homo sapiens
  chr18:63416927-63416957
  hyper
tattagcatagaattcggttttaaacattg

SEQ ID NO: 55184 - DNA, 207 bp, Homo sapiens; identical to SEQ ID NO: 11828
  chr18:63417590-63417797
  hyper

SEQ ID NO: 55185 - DNA, 445 bp, Homo sapiens
  chr18:63418354-63418799
  hyper
ctgacgccgtggggagggcagcgaggccccaggtgagtgtgtctgcctgcgcggggctggggaggcgccgctgggcagatgtgcgcccttgctgtgcgcctttggaagcaggactaatcagtgagcggagagcgggcggggatgtccgtgtggagtttcccttggcgtccccaagttactgcgtgttgcagtgagatgtggctctgcaaggcaggacaggcttgtggacggaggcgggggcgtttggcccggaaagccggtgttgacagacaccaggtgcgacacgaggagtagtagttgagggtaagagcaaatcccggcactctccaggtgcagcggcaaacatgggcaggctggagcactctcctcaaagaggaccacaagcaggctcctccctcaacctcggactgatgggggcacaactccgcgccggctgtgccgccgg

SEQ ID NO: 55186 - DNA, 30 bp, Homo sapiens
  chr18:63421750-63421780
  hyper
cagaattaaaattatcgaatgtgatgttaa

SEQ ID NO: 55187 - DNA, 30 bp, Homo sapiens
  chr18:66382544-66382574
  hyper
ctggggcgcgtttccgggaaggtgaatacc

SEQ ID NO: 55188 - DNA, 482 bp, Homo sapiens
  chr18:67067488-67067970
  hyper
gccactttcagtcctagttaacgaaaacgcatgcataaatcaaccactcgggtcggtcggtcttctccactccttcagcagaggacgtcggcgcccggctgcctcgcccgcctgcctgtctctaggctgcgggaggattagacacatgcgcacgattggtctctttgtgtgcaccaggaagggtctggcgtcgatttacacttcctaacggggcagagacctggaacggccgcgagtgcttgggaataaaaatgtactgtaaacaaggccaatgaaataagtgtctcgctcccgctggccttccgcgttggaagtgtccccactgccctttccccgctgcacagcttgcgagtggagatttagagcccgggaatgaggcgccgtgtccttaggaatctcgcgcccggggagcgctgagggaccggggagccgggtggggagcgggcctcggggcgcccggcggcggaggcgctcccacccgc

SEQ ID NO: 55189 - DNA, 118 bp, Homo sapiens
  chr18:67067995-67068113
  hyper
cgagcgtctccgagcccagccaccccacgggccagggggagggagcggggccggcgcatcagcccgccccccccggcccgccccctccccccgcgccggggagccgcggtggtgcgct

SEQ ID NO: 55190 - DNA, 783 bp, Homo sapiens; identical to SEQ ID NO: 11831
  chr18:67068592-67069375
  hyper

SEQ ID NO: 55191 - DNA, 258 bp, Homo sapiens
  chr18:67872882-67873140
  hyper
tgccaggaccatctcgtcccgtcaatctgcagccgccggagaattaaactgccgcgccactgcgtccagccacaattaatgtacccccggaaacacgtcctgtgggacggtgagttccgcaacgcctgcgctcaccaggagtaggagtcattacgtgagcccttcgcggccccagcgtcgccaggagagcttccagcctctctagaatcactactgcgcacttcctggacagcagtctccgtcgcaagaagcggaggg

SEQ ID NO: 55192 - DNA, 150 bp, Homo sapiens
  chr18:67955796-67955946
  hyper
acagggggacagggaccgcagccgccaaatccgcggggccggggaacgaggagactttcctttccgcgttagccggggccacccccgccagagggaaagcaccaaaggaaaaaccaggacagggactctgggggccggaggagcggcctc

SEQ ID NO: 55193 - DNA, 178 bp, Homo sapiens
  chr18:67956753-67956931
  hyper
cgcgaggcctgggcagcggcgcggggcctgcgcggctctgcgccccggccgggtccctcctcggacctccgcgggctcgggctcgggctcggggtcggggcgcggcgaggccgcaggcgcgagggcgggcctggggcgcggcgctgggactcggggacgcccccgccccaccgcgagg

SEQ ID NO: 55194 - DNA, 84 bp, Homo sapiens
  chr18:70208928-70209012
  hyper
ggacagagcctgggaactccacgtccaagaagcctgaaccccagcccgcgcgcgcaggtccccgcccctctccccgggctgggg

SEQ ID NO: 55195 - DNA, 284 bp, Homo sapiens
  chr18:70209101-70209385
  hyper
cgtggcggagaaggccaccttggcgctgccggagcgcacggagatgcctagggaggaggtgacggcgccgtccgccgacgggctggagtcgcacaccaccaggcacttgccctccagcacgatgggctccgtgtcgttctgcgcccgcacggggcagcaggcgggcagtagcagcaacagcagggccagcgccacccccaggcaggatccgcagccgcccggctcgcgcagcgccccccggcgcccgggcatcatcagccgcagcccgagtggcccccggccgg

SEQ ID NO: 55196 - DNA, 463 bp, Homo sapiens
  chr18:70209493-70209956
  hyper
gggggccttcgtccccggctctgacgttcaaggccagggtcgttctcagaagaaaggcgcctgtgaacctgtcagggcacagaacccaaagccttacaccgggaggtggagccaccgggaagaagggggactgggagcaggtgcctgcggctcgggggttctccccgaaggccacccccttggtcccgcgcacagccaacccgctttccgatctggcacaacaggtccggagaaacgcccgggcgcagctggcagcgcatccctgaaggctcccgagcagcgcgcggggctgcgacgagggagggggccgcgcttctgcaggtcctcgtcgctaagacgggccccgagaccctcagaaggcgtcaccgccaccccgcccattcaccagcgcggagggggctaagacgcaggcaaagaaaaacctacgaatgcttgccttctcgccttcatctcacagcatttc

SEQ ID NO: 55197 - DNA, 1527 bp, Homo sapiens
  chr18:70210283-70211810
  hyper
aaggaccgattccaacgacggaatcccaggcttgggttattctccagctctggtttccagaccacggggattctctctttctcagcggggcggcagcccctgcaggtttctgcgaacttacgcgcccgtctgcacttttgccccgtccccgctcctcccaggaaagcagacaggccatttcaataccagcccagagacacgcagagaagccgccccctcgccgcccacagcctcccattaactcttccagtattctttctaagaacagagaagttggctcttgataaatatccgctgtccgcagccccgatcctacatgatttcccttctctctctccacctcctccacccctcgatctggaccagggagagtcttcgttaaaatccacgcagaaggcgcttgcatgcggaggggagggcaggtcgggggtggttacctggaacatccatgctgggcgagctccgctgtccgcgaagttgctctgcttagagaaaatgaggcgagtgggagctgtcgggaggaggacacggagcgcgaccctgctcccagcgcgtggccaataaccgcgccgccccgccctgccgctttcccgcgccagcctgcgccgcttcaggggtgcaccacgccccgcgcgcccgcttaggcgccgcgcccgggaccgggaaccccgcgtctcgcccggctcagcgccccgcgctgtgcgcccaggtgcctccaacccctgggcttcgcgcccgcaccgctgcctggggcccctcgagctcccgcgctcagcgcgtccgcagcgcggctccctcgcgggtcccctcggccccgcagccccgccagtctccagagggcatagccgagcgctgccgcctccctaggactcggaaccttccctgctcccaagcccgccgcaccctccaacgccccggtcctgctcacccaaacgcccagagcaaaatactcccagacgtctcttttgaaaattagacacccttaaaagcaccggtcgcttctcttcttttagattctttcttttctttccccaattccctccaagtcttaatattgaatggcgtgaccactttcataatgacaggagcgaaaaaaacaataagttaaaaaaaaaaaaaagaagaagaagactgggatggctgggacgaagagagggaaaaaaaaagcttgagaatttgatgatttaggagctgtggttccagagtcccagttggggaactgtccggttcccgcagggctagaagaggggcctccggcccgggtctgtgtgtctgctcctctggacctcggactggtggagcggctggcgcttgcgcttatttattaaattgcggtgtccgcgctcgctcaaaggacccggggagacgcgctgggtttcccagctgcgcctggagctcggctgagggcgcaaacacggacgtggggcgccacctgcgggtgcccgggcctccctgccgcaggctgcggaccggcggactccgacagaagacgggggagtcctggccgcaaggctgaggtttgctgat

SEQ ID NO: 55198 - DNA, 282 bp, Homo sapiens
  chr18:70534033-70534315
  hyper
cgcccttccctccagcgctggcttcaggtgtgccttctgctacctcctgtactgcgaacaggggcccgccgagctccgggagcccctagaagaggaagactcctctggccccactaggtatcatccgcgctctcccgctttccacctgcgccctcgcttgggccaatctctgccgcacgtgtccatccctgaactgcacgctatcctccacccccggggggttcctgcgcactgaaagaccgttctccggcaggttttgggatccggcgacggctgaccgcg

SEQ ID NO: 55199 - DNA, 304 bp, Homo sapiens; identical to SEQ ID NO: 11835
  chr18:70534427-70534731
  hyper

SEQ ID NO: 55200 - DNA, 110 bp, Homo sapiens
  chr18:70535444-70535554
  hyper
gccccggggctggtgcgcggcagaatggggccgcggcggcggcagcaaggacatcccagccgcgcggatctgggggaggggcggggagggggtgaggacccggctgggat

SEQ ID NO: 55201 - DNA, 508 bp, Homo sapiens
  chr18:70535575-70536083
  hyper
cgcagagagaggatgcagccgcaaatcccgagccggatcctcgtgccggacggaaggcgtggaagcgggaggggccttcgtgtgaaaatcccttgtggggtttggtgtttcactttttaaaggttagaccttgcgggctctctgcctcccaccccttcttttccatccgcgtaaaggaactgggcgccccctctccctccctccctggggcgcaggtttcgccgcggactccgcgctcagcttgggagacacggcaggggcgcgccccagggaaaggcggccgtaaaagtttcgcggttgagcactgggcctgatgtccagtccccccaccaaattactcctgcaaagacgcgggcttcttgcaattgagccccccacctcgaggtatttaaaaccaccccaaggcacacacggacccccgttcccccgcgccacttcctcctacaggctcgcgcggcgcgttaaagtctgggagacacgagttgcggggaaacagcaccggaagagc

SEQ ID NO: 55202 - DNA, 415 bp, Homo sapiens
  chr18:70536187-70536602
  hyper
cgccgcaacggcacctcctccctttcccggctccgtcccgccctccctcggcctctgcggacgcgacccacgcagaccacagccgagcccgccggaccccgggactacggaagccatcccgtccggccacccacacccgcgccgcggctggggcttgggttggggactgtggcggcgaagaagccggggtaggaagagctaatggcaatggcggggtcgccggggggcggggggtcagcagcagacgctgagctgtgaagactagggtggccccgaaaggccgaggaaaggagaaagggccatgagaagagtctggcgagcgctcgaggccggggggctgcctcccggctctggcccggcctccgcttcccggcacctgctgctggggcgcccacgtgcgcgcggggctgcgcgg

SEQ ID NO: 55203 - DNA, 30 bp, Homo sapiens
  chr18:70536833-70536863
  hyper
gtgcgcgcgcatatacgcgcgcgcgtgttg

SEQ ID NO: 55204 - DNA, 30 bp, Homo sapiens
  chr18:71815754-71815784
  hyper
cccaggtgactttgcgaaggcatggcgggg

SEQ ID NO: 55205 - DNA, 124 bp, Homo sapiens
  chr18:71958660-71958784
  hyper
ctccccaggtgtgcacgcgcaggtgtgcggactcgaggagagcgcccaggtgtacactagcaggtgtgcggactcggggagcgctcccaggtgtgagcgcgcaggtgtgcggacttggggcggt

SEQ ID NO: 55206 - DNA, 30 bp, Homo sapiens
  chr18:71959077-71959107
  hyper
gtacttcacggcctcgtccgactgctctgc

SEQ ID NO: 55207 - DNA, 30 bp, Homo sapiens
  chr18:71959387-71959417
  hyper
aatctcccggctgccgcagcgcgcggagag

SEQ ID NO: 55208 - DNA, 590 bp, Homo sapiens
  chr18:72123599-72124189
  hyper
ctgggtgcgagctttcgggccctcccaggttaggaggcgcctgtcgaggaccgggacccgggatcctcccggtcccagccgcctccgcagcgctctctgctcgcccgagcgcacactgcgtcggttcccacagaccgcgaccgcggagagcctgggctctggagcgcaggggggccggggtcagaccagccctccgcatgggctcggtgagatagggggtgacctggcagctcagggtggaatcacagaacgcgggctgggctggagcgctgcggacccgagagacagaggcgtggcaccccggatcccgaaccccgcactggcttgcgccccgagcccggcggcctgacaccggacgcggcacctccctggacactcggatcagacccgcaaactttcttccggagctcgggctcaggggtggcgagggtaggacggagaggctgtctggggacaaagggcgaattctggcgaaaaggggagagacacccccagcgcgcccacagagcactgccggctgcgtccccattcgggggaccggggcgtgcgcctctggcactccacgcaggtgtcgggaacccatgtccccg

SEQ ID NO: 55209 - DNA, 463 bp, Homo sapiens
  chr18:72124237-72124700
  hyper
cgggtgtgatcccccctccccggacgcgcggcgcggggcagagcggcggcgggacctaccagcgcggccaggatgcgccggctcttctcgtcggtgcagcgctcggagaggacacccgggtgcgcgcggagcagcagcgcggccgccagcacccagcccgcggtccacgcggcgaaggcgaggagcgtgccccgcccgcagcgcccgcgcctcctgcaccacccggcagggccccgcgcgcccgccgcccgcgccatggccagccctgcccgcgcccgggccccaccgccgcccgcgccccgagttccgcactcgcgtagctgctccgcggctcaggcccgctcggcggggagggggaacgggggaggggccgcgcgagggttggggcaggccccgcgcctggggcggaggtgcggggagggcgtccagcagcagcaacaccccgcgcgccccgagcacccac

SEQ ID NO: 55210 - DNA, 116 bp, Homo sapiens
  chr18:72167085-72167201
  hyper
ttacaattctgaacacgtgctttctgggcaggtcgcccctcagtctccactagagacaggactgaccagttgctcttccttccaagaaccttcgagatctgcggtctggggtctgg

SEQ ID NO: 55211 - DNA, 30 bp, Homo sapiens
  chr18:72266140-72266170
  hyper
ggacatcccacatccgtggacacacatgta

SEQ ID NO: 55212 - DNA, 30 bp, Homo sapiens
  chr18:72920182-72920212
  hyper
cgccacgcggcggtcgttaacactcagggg

SEQ ID NO: 55213 - DNA, 238 bp, Homo sapiens
  chr18:72921090-72921328
  hyper
ctctgctcggctagggcgggcgggtccgcccctcctccggccggcgccctccccctggctccccccttccccgcgtcgcccgctcccgctccccccgcctccccggcgccggcgcagcccccgcgaacccgggcgcaccaccccgggtgtcccggcctggggaccgctgccgccccggccgctgctcctttaatctttttgttttggtttgaatctgctcggcgcagactggccaagg

SEQ ID NO: 55214 - DNA, 30 bp, Homo sapiens; identical to SEQ ID NO: 11840
  chr18:72922720-72922750
  hyper

SEQ ID NO: 55215 - DNA, 30 bp, Homo sapiens
  chr18:72923242-72923272
  hyper
tcttagactaagtgcggggaggaaaaggac

SEQ ID NO: 55216 - DNA, 24 bp, Homo sapiens
  chr18:73167904-73167928
  hyper
ttgatcggcccaagcgcaggagaa

SEQ ID NO: 55217 - DNA, 43 bp, Homo sapiens
  chr18:74162763-74162806
  hyper
ataataactatgtctctgaatcgacaggaaatcttgccatttt

SEQ ID NO: 55218 - DNA, 158 bp, Homo sapiens
  chr18:74163245-74163403
  hyper
tctctgaccaccttccgggggcggggggggcaccgatgtcagcccgggatggatgtccgcgggtgcaggggggtgacagcccggtcctgcgcacatctccgctgacagggcattcctcaggaggggctggagtgaacgggaggaattggggagggagg

SEQ ID NO: 55219 - DNA, 241 bp, Homo sapiens
  chr18:74202734-74202975
  hyper
tgctggttaagtcacacgacgagcggaccggagggtccgagggctccgtcctttgttacgcaggggacacccctggaaggccagcccaacgcccacgggcacatctgggcttttccaggcagtccacagagccatccccggcctctttaccgcggagacactgtgaggtcacacacgcagaacacaaaacccccacgcagcagcccctcgcgaggcgccccaagcccgggtgcccaccgcc

SEQ ID NO: 55220 - DNA, 777 bp, Homo sapiens
  chr18:74203666-74204443
  hyper
ccccagcccagagggccgccctgcgctctcgcccccggcccctggccgcgcgtgccccaggtcccccagtagcgccccagcgccgctgctgctcagacacaccgaaataggaatgatttaatccaacgacacctcccagggctgcccagtcccggttccgccggctcctgagattggggaggggcagaattgggtggaactcgggctggggggcggaaatggcccgagtgggagggaaggcgcggagtcggacgctaccttgtaaccgagttagatttctgcagaagaggaggacgaaggtcgcccacggaccctcgggtgacctcggtgcggcctggtggccgggcacacccgcgcatggacgaggtccctcccaggggtctccctgcaggggtctccggggaggtagtgggcacgtgggtccttaacctctccattgcatcatccccatcccggtgggtacagaagcgcagcaaccccgcggtgctcccggaagacaccgcgtctccaacatttacacggagatgctgctcggctcaggtcgggtccgtacgcttcccgaggtgcgtactacgcgagccacacacatcactaccgatattcctgagaaagtcggtgccacagtaagtcagctgcaagcgtggggtggccggtgacgcgctgtgcccgtgaatacgcccattgtgcgggtcagacgcagccagggcgcagcgttcaggaggcgggtgggcagccgaactttcactggccacgagcgcttcaccttctagaatttgc

SEQ ID NO: 55221 - DNA, 31 bp, Homo sapiens
  chr18:74204793-74204824
  hyper
tgcgtgcccatgtagccgaactgactcgaat

SEQ ID NO: 55222 - DNA, 117 bp, Homo sapiens
  chr18:74206707-74206824
  hyper
taatggatggagagcgcatccgagctcccctcctcccgcgtcgcctttgacaaagtgtacaaagccagagcctcttccgcgctcccaccccggcccccaccccgcccctccactgcg

SEQ ID NO: 55223 - DNA, 148 bp, Homo sapiens
  chr18:74207201-74207349
  hyper
ccgaccgcgccagctgcgcccgggcgcgggggacgcgcgagggcgcgcggggcccgccacgcgcccggccccctcctcgcgccgcccgcgcgcgccccggacgcgtccgccccgcgggggccccggcgcgagccgggctcggggggct

SEQ ID NO: 55224 - DNA, 94 bp, Homo sapiens
  chr18:74208278-74208372
  hyper
gtggaggtggattccgtccaagacgcccaacgtggctccgcgtagcaatcagcgctgcaatcctggcggttacctcagcggcggcgtctctctc

SEQ ID NO: 55225 - DNA, 130 bp, Homo sapiens; identical to SEQ ID NO: 11844
  chr18:74843246-74843376
  hyper

SEQ ID NO: 55226 - DNA, 50 bp, Homo sapiens
  chr18:74844752-74844802
  hyper
ccgagggacgggcgcgcacccagctccccggccccgcctccccgggcttc

SEQ ID NO: 55227 - DNA, 635 bp, Homo sapiens
  chr18:74961320-74961955
  hyper
cttccccttccatgtcagccacgtctatagagaagctcacgcggccctttccctttgcacttctctcctctgtagcaggccgcggggtgagggtgggattaggcggccaattttacaaaactccagggagcgtcgccagcctcgatttcctggggttattcctgggagagaggcgttctcacggacagccaccctggggaggaggaggaggaaaggcactaatggatgaggaggcccgcgcacccctccgcctcccaccccggcgcgccctggaacgccctggagcgcgcccggcttccctcgcccgcctggcccgcggcatccggcagccccgccttcagcccgccgggcaggtccgcactccgcagaggcgagcgcgctccggttccagccgggaggtgggcggcgacccatcccgctagaatccgtccagtctctgctcgcgcaccgtgacttctaaggggcgcggatttcagccgagctgttttcgcctctcagttgcagcagagaagcccctggcacccgactctatccaccaccaggaagcctcccaaaagagctctcgccctgtggacgactcggaatccctggaaaagccgggagggagtcggaggcgccagcccactggggaggtg

SEQ ID NO: 55228 - DNA, 152 bp, Homo sapiens; identical to SEQ ID NO: 11846
  chr18:74962018-74962170
  hyper

SEQ ID NO: 55229 - DNA, 134 bp, Homo sapiens; identical to SEQ ID NO: 11847
  chr18:74962209-74962343
  hyper

SEQ ID NO: 55230 - DNA, 30 bp, Homo sapiens; identical to SEQ ID NO: 11848
  chr18:74962779-74962809
  hyper

SEQ ID NO: 55231 - DNA, 30 bp, Homo sapiens; identical to SEQ ID NO: 11849
  chr18:74963028-74963058
  hyper

SEQ ID NO: 55232 - DNA, 196 bp, Homo sapiens; identical to SEQ ID NO: 11850
  chr18:74963349-74963545
  hyper

SEQ ID NO: 55233 - DNA, 2 bp, Homo sapiens
  chr18:74963720-74963722
  hyper
cg

SEQ ID NO: 55234 - DNA, 257 bp, Homo sapiens
  chr18:75362778-75363035
  hyper
aacctttttttgcaaattaaccgccgtactttccttcccaatgtttgtgtggagagcacacggttcctgcgtcaggaccctgcaggacgcgggccgaggctcccagctgccggccatgccctcggctcctctcccgacacgcgccagcactgccccctgctggcctcccgggagcactgcccgctgccgcggcgggaggagacccgggaagaagccgggaccgcgagcagctggacgctttctccctggggctcagc

SEQ ID NO: 55235 - DNA, 387 bp, Homo sapiens
  chr18:75612004-75612391
  hyper
gtcctggactctgagcaaagccgcgggccttagaccctccccagcctcaggcgagccccagtgccgacacctgctaagagacggtgcattgcgggctaaacccgcagacactgagcggggacgccacttccgacggcgtaaggcacctaaagtagccacagaggaaactgggggtgcaggagctgcaggagccccggcggcctgcaggggcggtggcgcggcgctgggcgcgcggccgctagatggcagcgcagccccggcccggcccgcgggaggcggccacgcgcgggggacgcggggcgcggcgcgctgagcgcgggtgccgaggctggagggcgcggccgggctcccgagtcctccctccgcggcatccttgtctccaccctc

SEQ ID NO: 55236 - DNA, 470 bp, Homo sapiens
  chr18:77153101-77153571
  hyper
gaaaagctctcaagtgaccaccgctgtgggccagaatgcaaaactgcaggaacagaacattcgcaggaacagaacacagtcgtattaagtgattttcccgagcaggaagtggcatctggcctgcggttcagtagggggaggaaagggtgggcgcacctgcccctggctggcgcacctgccaggtagccccacgcggcaccgcgtgtgccgagcgcccctgaggatggaaagccccacgcggggcaggtggcacccaccctccgaagacgggacgggatggagcgttgagcttcggggcagctccggcccggcccgcgctggagacgcccgcatctgccaggatggcgtctcatagccctggtgctcacacatgacgccaggaagccccagcaacagtgaccgcccaggctctagaaaatattggacggggtggatgaacacccaagtgcgctccaggagaagggatttgg

SEQ ID NO: 55237 - DNA, 41 bp, Homo sapiens; identical to SEQ ID NO: 11853
  chr18:77156453-77156494
  hyper

SEQ ID NO: 55238 - DNA, 301 bp, Homo sapiens
  chr18:77159935-77160236
  hyper
ctttcccgaggaggcccggattgaaaacttctttaaaaaaaaaacttaaaaaaaaaattccgtcgccctgggcgcagccttaggtacctggtgccgctcgtggggtcccgacgcccctacccccgggtccggaggagcctgcgccgggccgggacccccagggcacaagaggccgggggacccctgcggtcgcgcgcgcgcgagggggcgggggcgggggggacacgagtttatttaaaaactcgtgtccggggagtttatttaaaactcggaagccggcggccgcgagccggttgtttat

SEQ ID NO: 55239 - DNA, 237 bp, Homo sapiens
  chr18:77160494-77160731
  hyper
agggcgcggggggcgcggggccaggtcggggtttgggggcgcccaggccccctccgcgtcctcgtcgctccccggggaccccaggagtccccggcgcgcccgggaccgaggggctacggcgggggacgctgcagtgcggggcgtcctgggctcggatgcggttcctccgagcgctcgcggcggggtcctgggggaagagcgcagcccggacacgggcgtggacgaagtggtcccgga

SEQ ID NO: 55240 - DNA, 386 bp, Homo sapiens
  chr18:77193398-77193784
  hyper
cgtggccacaggtcacgatgagtaagcactgcattgacacaggcttctccatctccatgtcaggacgtgcactcgccgatgaagtgtccacccaagatggcgacgggtgagcacgggcacgtgtggcccgggcgaggtctgtgtggtgctgaacgcctcctctgctctgttcccttccagcccgaccctgcccgccctggactggcagctgccgtcccactcaggcccgtatgagcttcggattgaggtgcagcccaagtcccaccaccgagcccactacgagacggagggcagccggggggccgtgaaggcgtcggccggaggacaccccatcgtgcaggtaggcactgcggccagactcgcacgtcacttggtgcttttgtggt

SEQ ID NO: 55241 - DNA, 30 bp, Homo sapiens; identical to SEQ ID NO: 11856
  chr18:77439059-77439089
  hyper

SEQ ID NO: 55242 - DNA, 97 bp, Homo sapiens
  chr18:77547950-77548047
  hyper
gggcgggcgcttccccggacccgggggaggcgggacgcaggcgaaggccgccccgggagagcggggtcccgggagagcggggtcccggctgtggggg

SEQ ID NO: 55243 - DNA, 170 bp, Homo sapiens
  chr18:77548351-77548521
  hyper
ggcaggcccagctcggacgaggctcagctgccgcccccgttgcctttgtgggtttttctgcggaagccccttttcctcgggtggatgggaccctgcgcgtggaaccccgcacagcccccgctccgccgcgggccgcaggacccattccttctccacggtggcgctgggga

SEQ ID NO: 55244 - DNA, 30 bp, Homo sapiens; identical to SEQ ID NO: 11859
  chr18:77551522-77551552
  hyper

SEQ ID NO: 55245 - DNA, 32 bp, Homo sapiens
  chr18:77557858-77557890
  hyper
cgcgagggggcgccgcgccactgaaggctggg

SEQ ID NO: 55246 - DNA, 484 bp, Homo sapiens
  chr18:77557912-77558396
  hyper
cgccggagtccgggatgccggctccagagacgccgcgctccgccccgaggaggccgccggccgggtaagcggagcccggagctcgcggagtctggaccgcaggtaaagttgagcgcgccgtggggccgggggtggggggtccgcggcgaaggagccggggccgcagtgggcggtggggcggggggcgcgggctcctgtctgatggttccgcgcgcagcttcttctccgggtgcgcggtgcgcgcgggcgcgggagggtcgaaggggaccttggaatccccctgttcgggccaagggggcgggggcggctcggggccgggcggggctggtgcctccccctcccgctcagcgcccagagtccgggagtcgaggggggcgtcgggccggaggcgctcgccggtctggccgcgccgcgcgcgtggatggaggtctcggccgcggatcgccccgtctattcgcgctggtcctgcgggagcccgggtgag

SEQ ID NO: 55247 - DNA, 579 bp, Homo sapiens; identical to SEQ ID NO: 11861
  chr18:77558416-77558995
  hyper

SEQ ID NO: 55248 - DNA, 30 bp, Homo sapiens
  chr18:77559220-77559250
  hyper
gctgggtgaccccgcgggccacatgccaca

SEQ ID NO: 55249 - DNA, 31 bp, Homo sapiens; identical to SEQ ID NO: 11862
  chr18:77710900-77710931
  hyper

SEQ ID NO: 55250 - DNA, 36 bp, Homo sapiens
  chr18:77712072-77712108
  hyper
ccggggtctcgggaaacggagcgccccccgcgggtc

SEQ ID NO: 55251 - DNA, 81 bp, Homo sapiens
  chr18:77724413-77724494
  hyper
gccggtggcgcccacgggccctcttgagtaaggcggctccgcccaggccgtcccggggcctcggctcggctcggctcggga

SEQ ID NO: 55252 - DNA, 136 bp, Homo sapiens
  chr18:77794467-77794603
  hyper
tgctcgctccgggtcccggcgccgcgccatgtgggctgcggcgggcgggctgtggcgctcccgcgcgggtctccgggccctgttccgtagccgcgatgctgcgctatttccaggctgcgagcggggacttcactgc

SEQ ID NO: 55253 - DNA, 32 bp, Homo sapiens
  chr18:77867027-77867059
  hyper
ctttaggcaggggccccggggggcctgtggga

SEQ ID NO: 55254 - DNA, 30 bp, Homo sapiens
  chr18:77983402-77983432
  hyper
gccacagtgctggctcgattccctcccagc

SEQ ID NO: 55255 - DNA, 30 bp, Homo sapiens
  chr18:78004029-78004059
  hyper
gggctcccactccgccgttaggagcctttc

SEQ ID NO: 55256 - DNA, 967 bp, Homo sapiens
  chr18:78004713-78005680
  hyper
tgcagccttgaaggcgccttggccagggccatcccacggcccgggcccccagagcccccccacggccccgaatccgagcagcccctggccctcaactcgccccggaaaggccgccctcccctccaatgtgtggcgcgccccgatcgcctctcactcgtggaacaaaagagcagctcccgcggagcgggtccagagtctgcccggactgtccgatggccctcggccctctgagcgccgcggctgccgggctttgtgtccgcgcggggggcgggaaggacggccggggtccccagtgcgcgtcccgcggagcggcgcgcggcgcccgaactggaaagttgtcgccggcgcctgtcgcctccacgccgccccagtccccctccgcggggcgccccattcattagccaggagactgggcgcagggccgccggggcgggcggggggcttaccttgctcttgacttccactgcgctgcaatcgtagaatcgcaaggtctgagacttgtgaaaacttcggttcatggtttcggccccggtcagcctcgccgtcgccctcgctcctcaggggccgcagaaagactcccgggggcggcgcccccaggccccggccccggccccggcccgcgctcgcttggccggcgggctgctcccggtgctgcgggcccgagctgggctggccgcgcgcctcagggactccaggggccgcgcgcgggaggagcgcgggggacgccggcgcgcgccgccccacctcccggcgcccgcgcccgcgccccgccccgcccccgagccccggaggacccgcccatatccccgcccacagccccgccccgcgctccggaggacccgccacaccacgcccccacgctgcagctccgcgtcggatcgccagtgggtgcgcgccctcctgtccacaatcccagagcctggggaaaggagcatcgcggccagcccaaggcgtctcgttttgattg

SEQ ID NO: 55257 - DNA, 12 bp, Homo sapiens
  chr19:267126-267138
  hyper
cagccatcaccc

SEQ ID NO: 55258 - DNA, 403 bp, Homo sapiens
  chr19:267205-267608
  hyper
cgcagatccggaggccacgctgcgctgcgctgcgctgcgctgcgctgtcaggacgcgcagttcccgccccgctgaagggacaccgttttacaacacgccgcgtagaccgtgacagggaagtaaggcccacggcagcgctccctcctcagcactcgcggccgcggacaggacgccttttcctcctcctctcacctggtgaccgggtgtcccgaaccgcggccgctcccgggcgggtcctgaagagaccgtggctccgtcttcccggtcgacgccccggggcgacgagtgcggatccgccgcggttcccgcgcgtgctccaggttgggcgggagccgggcgccccctcgcggcagtcctggggagtctctgaaaatcagcgttcggatgactgcaggccgtgatt

SEQ ID NO: 55259 - DNA, 813 bp, Homo sapiens
  chr19:290580-291393
  hyper
acagagcaaacactcggcctttgttcccgggaccctgcgggaggggggcctcgggatgcccattccgccagtgtggcccgcaaacccgccggacaggtttggttctcctggcctcccggccccccgccaccccgttcacccgaagcctgggacccagccttcatccccagtgtctcccccgcccgagccagcagggcggctgggcctccccgcacgtgcacgggttcgaatcccgccgacgcaccgggtgccaggaccgagggtcagccctctccgcgcgcagcgggagcgcccaccccaggggcggaggcgcggacgtcctgccggggtaacccgcggccgcccccacctcccgggcccgcgtgactcacctcccaggccaggcggggcgggatggaggcgcgcgcgcggcccctccgcacagacttcctgctgccggggcgggggatgctggccccggctccccgggcctctcgcgacccccatccccctgggcctgggacgcggggacccccgagcctgggagggcgcgcgcagtgcggggcgcggagggaggtctggtcctcacgcgaggtccccgcctccagggtcctcggagggacgagggcgcgcagcctccgcgttcccctgcaaacttgcgcgcagccgggggcgtgtccgtcccgggagggtccccccaacacccgggtccccaaggctcttaccgaccagtaagcacagcacgtcgagcagcacgaagacccacctccgctgcatggtccccgcgacccccgacgccggtcccagcgcgtcccgtcgcgtcccggcccggcc

SEQ ID NO: 55260 - DNA, 31 bp, Homo sapiens; identical to SEQ ID NO: 11867
  chr19:384495-384526
  hyper

SEQ ID NO: 55261 - DNA, 30 bp, Homo sapiens
  chr19:408668-408698
  hyper
ggagactggcccctcgcccgcccccactct

SEQ ID NO: 55262 - DNA, 31 bp, Homo sapiens; identical to SEQ ID NO: 11868
  chr19:452244-452275
  hyper

SEQ ID NO: 55263 - DNA, 179 bp, Homo sapiens
  chr19:460120-460299
  hyper
caaacaccccttcccgcacccccaccgcaggccagcgtctcgggccccgtctgtcattcgtgaacagctgtccggggggctccggtggcagagacgccccggccgctcgccgctctcggcctcgcccgcccagtccgagtggggggcggtgcacctgcgcatgcgcgcccctcccccgc

SEQ ID NO: 55264 - DNA, 551 bp, Homo sapiens
  chr19:460568-461119
  hyper
tcggggtgtagccagccgtgcgcgggtttgtggatgaagctgcccttccggatccactcggcggcggcggcggcgtccccggaccccgccgccccccgcccgccccgcgacccccgcgaccccgcgccccgacagcggctgagcgcgggcaggggacagggcgcggcgcagcggggctcgcaggcgcccaggacggcggccgccagcgccgggacgccccccgggcccgccggctcgggttgggggtccgcgccccccgaggccccagccgcccgcgccgccgccgggccgcggcccaggaagccgcccggggccgcgaacttccactgcggcattcggggcagcaacgcgcagaaggtggtgggcgcctcgggctcggggggcgcggggggcgccgggggcgcgcgcccgcccggaccctgcgtcatggccgcggccgcccgacggagcccgaccgggcgctgcgcctggcgcggaggaagccctcccgctccgcccgctccctcccgccccccggcccggtgatgtcatccgcccggcccagcgcgcag

SEQ ID NO: 55265 - DNA, 536 bp, Homo sapiens
  chr19:461499-462035
  hyper
gtggggaaactgaggcgcggggaggggaaggggcgcggccgagggctcacagacgaagctcaaacccaggagtgccggctcgggggtggggggggggggcggggctaggagcggagccgggcccctgctctgcggcctgtcccggcctcagtttctccggctgtaactcaggggagcgggctggagggtcgcggcccttcttccctcacttctggggagcccagtcccgcaccagctcatctgagctctgggcctcagcctcccaggccggtcgctccatccccagcctcaacctctccgagaccggccgcaccttccctggcctcaagggtcggttccttctgcaccagaaaacggggtgtcactgtcaccccgggacccagcctcctggcccgacttggctggagctcccctgcacctgccccgccccaagcagggctgattgccgggaacaaagggaggggccgggacgcgctggcaggtggggagggagggaggggcgaggctgcccggagcccgatcgataattcagggga

SEQ ID NO: 55266 - DNA, 30 bp, Homo sapiens; identical to SEQ ID NO: 11874
  chr19:488550-488580
  hyper

SEQ ID NO: 55267 - DNA, 41 bp, Homo sapiens; identical to SEQ ID NO: 11875
  chr19:507105-507146
  hyper

SEQ ID NO: 55268 - DNA, 30 bp, Homo sapiens
  chr19:571401-571431
  hyper
gcccccacctgtgtcgccccaatagcgact

SEQ ID NO: 55269 - DNA, 265 bp, Homo sapiens; identical to SEQ ID NO: 11876
  chr19:591380-591645
  hyper

SEQ ID NO: 55270 - DNA, 14 bp, Homo sapiens
  chr19:591765-591779
  hyper
ggaccctggacccc

SEQ ID NO: 55271 - DNA, 612 bp, Homo sapiens
  chr19:603407-604019
  hyper
gtcccgcaggctcctcggaggaggcactggctcgaggtgtgggcgcccctcgtcccccaaggaagagtgcccggggctggtcccgcaggtgccccggggaggcaccggcctgaggtgtgggcaccctcgcccccaggttctactgggacttcaccatgctgctgttcatggtgggaaacctcatcatcatcccagtgggcatcaccttcttcaaggatgagaccactgccccgtggatcgtgttcaacgtggtctcggacaccttcttcctcatggacctggtgttgaacttccgcaccggcattgtgatcgaggacaacacggagatcatcctggaccccgagaagatcaagaagaagtatctgcgcacgtggttcgtggtggacttcgtgtcctccatccccgtggactacatcttccttatcgtggagaagggcattgactccgaggtctacaagacggcacgcgccctgcgcatcgtgcgcttcaccaagatcctcagcctcctgcggctgctgcgcctctcacgcctgatccgctacatccatcagtgggaggaggtgaggtggggcgggggcggggccaaggcagcaggggcggggctataatggt

SEQ ID NO: 55272 - DNA, 510 bp, Homo sapiens
  chr19:639659-640169
  hyper
caaacgcgcggaggccgagcgcggagtcccgcacggccgcgcccctgtgcacctggcccccgcccccgagacgtcccattggccggcgccctagcctggtcccgcccaagtggaccccgcccccgccccgaggcaccccattggccggcgtccccgccccagcgaacccggccccgcccccgaggcgccccattggccccgccgcgcgaaggcagagccgcggacgcccgggagcgacgagcgcgcagcgaaccgggtgccgggtcatgcgccgccgcctgtggctgggcctggcctggctgctgctggcgcgggcgccggacgccgcgggaaccccgagcgcgtcgcggggaccgcgcagctacccgcacctggagggcgacgtgcgctggcggcgcctcttctcctccactcacttcttcctgcgcgtggatcccggcggccgcgtgcagggcacccgctggcgccacggccaggacagtgagtgcggggcggcgggggcctggggtg

SEQ ID NO: 55273 - DNA, 49 bp, Homo sapiens
  chr19:661144-661193
  hyper
gaggtcaaggtcctccgtgtccaaggccacggggcgaggaagtggctcc

SEQ ID NO: 55274 - DNA, 557 bp, Homo sapiens
  chr19:661473-662030
  hyper
cagctccccaaccttcgccccacacccgagatttcactttatttgttcctcctgctggggaggggaagccctgtggcttcagtagagaggaaaccacacctctctctttccactcctgggcctggccccgctctcccgccatgccccaactctagcactcgctcctcctctgtgacccagagacaggcggcttctcctgactccctccagccccttcctgggtctctactcccggggaactgcactgcttctggggggcttggacttctcttacgggtcaaagcgtagcaacagccgggcggctacgtacacagcacagtaaatcctcaatgcctgcagcctcttcccctgggcacagggtggggagtccagacccctccacctcctgcggctgctcccctcaagctggccaagcggctcccgactgagccggctctgccactttcccgctgagccaccacgcgcctcagtttccccatctataaagcacgggtggctcgactaaatcaccactttgcacgtcagcctggcgaagggcaacacgggttaaaaatgca

SEQ ID NO: 55275 - DNA, 31 bp, Homo sapiens; identical to SEQ ID NO: 11880
  chr19:663759-663790
  hyper

SEQ ID NO: 55276 - DNA, 89 bp, Homo sapiens
  chr19:676321-676410
  hyper
gccccgccccgcgccccgccccgcccgcggcccgcgggacctttatagggagcgccggccgcgcgctgggaagtcggtgccgctgccgt

SEQ ID NO: 55277 - DNA, 132 bp, Homo sapiens
  chr19:680399-680531
  hyper
gcgccacctaccgcgacgagtgcgagctgcgcgccgcgcgctgccgcggccacccggacctgagcgtcatgtaccggggccgctgccgcagtacgtgggggcgtggtctgtggaggggcggggcgggaccta

SEQ ID NO: 55278 - DNA, 27 bp, Homo sapiens
  chr19:680552-680579
  hyper
cgaggctgctgccgcagtaggcggggg

SEQ ID NO: 55279 - DNA, 30 bp, Homo sapiens
  chr19:708694-708724
  hyper
gagctggggaggggcgggacttggtgacag

SEQ ID NO: 55280 - DNA, 30 bp, Homo sapiens; identical to SEQ ID NO: 11881
  chr19:709310-709340
  hyper

SEQ ID NO: 55281 - DNA, 30 bp, Homo sapiens
  chr19:797444-797474
  hyper
tcctgctattccggcgcctccactccgtcc

SEQ ID NO: 55282 - DNA, 378 bp, Homo sapiens
  chr19:813482-813860
  hyper
ctcttctgcttccactcgctgatgagctgcttggagcgcgaggcgtccagcggcacgtggatggtcatgtggcggcgcgcggggtcgtccagcgagggcgcgctggccctgggcagcgtgtggctgaaggtcaccatgttctccttggccatggggctgcgcggggccagcaggtccacgtccacgctggcgcgcttcaggctgcccagcgaggtcttctcgcgggccacgggccggggcgcgccctccagccgccctgggggccccagctcgtcggtgctcaccgacttattctgctgataaaccgagtcgtggccccgctgcgtcagggcccgcagcgcgtccttggcgggggccggggccgcgggcttctctgca

SEQ ID NO: 55283 - DNA, 474 bp, Homo sapiens
  chr19:814390-814864
  hyper
ccctgggaacccatgccgacccccatcagaacctgccactcaccaggtaggcagcgatgcccgccccgatgaggaagccggcatacacgtccacagggtggctgcggtactgcgtgatctgcgtgagcccgcatacgcccgcggcgatggcaaaggcgaagaccaggatgggcttcagcagcttggtggtgtccgagatgaccgagttgaagtacatctggggcatgggggttggggtcagggagggctccccacgggtcagcaagagggcctgggaagggcagtgaggggccggactcaccgacacatagaccgcggcgaaggctgacagcgtggcgtgctgggacgggaaggtcttcctgtaagaggcgtccagcgtgagccccgcccacctggggaccccagctccagtggcctctctgtgtctctgtttccccgcatgttcaccggggcggaagaaggctcccagtcagg

SEQ ID NO: 55284 - DNA, 30 bp, Homo sapiens
  chr19:822071-822101
  hyper
tctttgtctgggcgcgtcctccgcaggccc

SEQ ID NO: 55285 - DNA, 30 bp, Homo sapiens
  chr19:822620-822650
  hyper
ggggctgggggctgcgggatgcgggcaggg

SEQ ID NO: 55286 - DNA, 30 bp, Homo sapiens
  chr19:893238-893268
  hyper
ctctgccccgcctccggggctatttgcata

SEQ ID NO: 55287 - DNA, 723 bp, Homo sapiens
  chr19:919386-920109
  hyper
tgtgcctgagtgttcgcacacgtagggggatcagcagggcgggcggacagggcaggctcccaaccgcgcaggtggccacacgcccggctggcggctcccgcaggtctcggtgcaggccacgtgtgccactctgaccgccatgagtgtggaccgctggtacgtgacggtgttcccgttgcgcgccctgcaccgccgcacgccccgcctggcgctggctgtcagcctcagcatctgggtaggtgagtacagctcaggggcctcacgggagaaggcggacacgtcctagtgccctgggcgcccggagccacctgccgcctcggtccagcatctggaaaatgggcgcaatagctctgcctgcctagggccagcgaggctgcagacggggcgcccgggcctttgcagggtggctgggtgaacgcctcccggggaggcacgtgggggaccgctggttccccgagcggggtcttcatcctggcttgtggcacaggctctgcggcggtgtctgcgccggtgctcgccctgcaccgcctgtcacccgggccgcgcgcctactgcagtgaggccttccccagccgcgccctggagcgcgccttcgcactgtacaacctgctggcgctgtacctgctgccgctgctcgccacctgcgcctgctatgcggccatgctgcgccacctgggccgggtcgccgtgcgccccgcgcccgccgatagcgccctgcaggtg

SEQ ID NO: 55288 - DNA, 30 bp, Homo sapiens
  chr19:920355-920385
  hyper
gtcctgctcttcgccgcctgctggggcccc

SEQ ID NO: 55289 - DNA, 30 bp, Homo sapiens
  chr19:922001-922031
  hyper
gttggaggtatccccgctgtgaagtggggc

SEQ ID NO: 55290 - DNA, 778 bp, Homo sapiens; identical to SEQ ID NO: 11884
  chr19:941803-942581
  hyper

SEQ ID NO: 55291 - DNA, 30 bp, Homo sapiens; identical to SEQ ID NO: 11885
  chr19:942806-942836
  hyper

SEQ ID NO: 55292 - DNA, 30 bp, Homo sapiens
  chr19:1026742-1026772
  hyper
tgtccccccgacagcgcggccgtcgcacgc

SEQ ID NO: 55293 - DNA, 30 bp, Homo sapiens
  chr19:1040062-1040092
  hyper
tgcagaggcaggggcgtgccccggcgctgc

SEQ ID NO: 55294 - DNA, 37 bp, Homo sapiens
  chr19:1041003-1041040
  hyper
gggtggagcctggtgacgaaagcgttaagcccaaact

SEQ ID NO: 55295 - DNA, 30 bp, Homo sapiens
  chr19:1104973-1105003
  hyper
ttggaaccctctcccggcctccgggtctcc

SEQ ID NO: 55296 - DNA, 121 bp, Homo sapiens; identical to SEQ ID NO: 11886
  chr19:1173280-1173401
  hyper

SEQ ID NO: 55297 - DNA, 30 bp, Homo sapiens
  chr19:1173620-1173650
  hyper
aggaatcggggcggcgggagagaccggggg

SEQ ID NO: 55298 - DNA, 752 bp, Homo sapiens
  chr19:1206907-1207659
  hyper
ccagcatggaggtggtggacccgcagcagctgggcatgttcacggagggcgagctgatgtcggtgggtatggacacgttcatccaccgcatcgactccaccgaggtcatctaccagccgcgccgcaagcgggccaagctcatcggcaagtacctgatgggggacctgctgggggaaggctcttacggcaaggtgaaggaggtgctggactcggagacgctgtgcaggagggccgtcaagatcctcaagaagaagaagttgcgaaggatccccaacggggaggccaacgtgaagaagtaagtatggcttgctggggtcggggccgggccgggccagtcacggtgctgatggttctgtcttccttccttctctcctccctccctcccttacttcctcttaacaccctgagctggacccgtctggcgcctgtgtcctccgtgccagggagagcgtggttgggggcctgcgttacggactttcactcaggcaaggccagttgtcgcagcggggcgtgcgtttgcatgggctcttggactccagttaaaatgccctggtagcgaaaccctcctgagaagggagcggcccccaatcccctaagactagccccttggctcccccagctgtccaaggagcagaggcgcccagtggaatcagcctgtgtttgtttgggccccgagagtttgtgtgcggccgccaacacgttttctgcgcagtgtgtggccgttaccggggccaggcgaaatgtgatttgtt

SEQ ID NO: 55299 - DNA, 46 bp, Homo sapiens
  chr19:1241589-1241635
  hyper
cgcccttatctgaccaccccctggttctgccgcagcccgggccgga

SEQ ID NO: 55300 - DNA, 30 bp, Homo sapiens
  chr19:1248272-1248302
  hyper
gcggggcagcgagtcgcgctgtacacccca

SEQ ID NO: 55301 - DNA, 30 bp, Homo sapiens
  chr19:1250522-1250552
  hyper
agacacgtaggtaccgcgcgcccccggccg

SEQ ID NO: 55302 - DNA, 31 bp, Homo sapiens; identical to SEQ ID NO: 11887
  chr19:1253419-1253450
  hyper

SEQ ID NO: 55303 - DNA, 68 bp, Homo sapiens; identical to SEQ ID NO: 11888
  chr19:1260498-1260566
  hyper

SEQ ID NO: 55304 - DNA, 30 bp, Homo sapiens
  chr19:1270261-1270291
  hyper
agtgagcagaagcacgttctggtccagcaa

SEQ ID NO: 55305 - DNA, 31 bp, Homo sapiens
  chr19:1285674-1285705
  hyper
cgggccacgcggatgccggcggggggcgcgc

SEQ ID NO: 55306 - DNA, 30 bp, Homo sapiens
  chr19:1401357-1401387
  hyper
gcttgcccaggatgcgcaggtgcgtgtccg

SEQ ID NO: 55307 - DNA, 104 bp, Homo sapiens
  chr19:1401692-1401796
  hyper
tgccccctctgcggagcgggcaccgcagccccgcgcccggggacgcgaacctgcaggctggggactggaatccccgccttgccgcttacgcgccatagattcct

SEQ ID NO: 55308 - DNA, 30 bp, Homo sapiens; identical to SEQ ID NO: 11889
  chr19:1438373-1438403
  hyper

SEQ ID NO: 55309 - DNA, 30 bp, Homo sapiens; identical to SEQ ID NO: 11890
  chr19:1438780-1438810
  hyper

SEQ ID NO: 55310 - DNA, 210 bp, Homo sapiens
  chr19:1449907-1450117
  hyper
ggaatcttggtcctcggggcacccccttccctcgggggggtttcgccccccgcactcacggcccctgagcccgcgcggaggcccgacgccccgcggccgacgccggtccccgccccgggccgccattggctgttgccatggcaccagcccgtcttcccgcgccctcattggctgtctcacccgcatccctcatcccgcatcctcccccgc

SEQ ID NO: 55311 - DNA, 104 bp, Homo sapiens
  chr19:1450129-1450233
  hyper
cgcccagcgctaggagcggcagcgccgcctgcccaggcccggaccgggctttgtccgccccggagcccctgcccgcgccgcggagaccccggagcccgcgcgct

SEQ ID NO: 55312 - DNA, 170 bp, Homo sapiens; identical to SEQ ID NO: 11892
  chr19:1455092-1455262
  hyper

SEQ ID NO: 55313 - DNA, 30 bp, Homo sapiens; identical to SEQ ID NO: 11893
  chr19:1456011-1456041
  hyper

SEQ ID NO: 55314 - DNA, 125 bp, Homo sapiens; identical to SEQ ID NO: 11894
  chr19:1469945-1470070
  hyper

SEQ ID NO: 55315 - DNA, 92 bp, Homo sapiens
  chr19:1470383-1470475
  hyper
ggaagaccttgcctctgtgccgcggaggtccaggaggaaacggggcggccgctaggcctcaagtcccgaccgtggagcgctggcaagggcgt

SEQ ID NO: 55316 - DNA, 53 bp, Homo sapiens
  chr19:1470772-1470825
  hyper
cagctgtgggagtgcgggtgggggtgtggccgagccccggcaggaagccccgc

SEQ ID NO: 55317 - DNA, 30 bp, Homo sapiens; identical to SEQ ID NO: 11896
  chr19:1471522-1471552
  hyper

SEQ ID NO: 55318 - DNA, 30 bp, Homo sapiens
  chr19:1479284-1479314
  hyper
tcatcgcggggctccgccccgtcttaaagg

SEQ ID NO: 55319 - DNA, 30 bp, Homo sapiens
  chr19:1489907-1489937
  hyper
gggaagcggccgcaccgatgggacccggct

SEQ ID NO: 55320 - DNA, 30 bp, Homo sapiens
  chr19:1490179-1490209
  hyper
atttgcgtgccaggcgctcgacctcccggt

SEQ ID NO: 55321 - DNA, 351 bp, Homo sapiens
  chr19:1491115-1491466
  hyper
ctcccattggtcctagcggggggccgggggcggacaccggcgcggggccggagcatcgcggctcaggctgcgggaaagcggtgcgcgtgcagcggggtgggtgccctggtccgcgggcgagctcgagcagccaaccccgggcgcgtcggggccatggacggcctgaggcagcgcgtggagcacttcctggagcaaaggaacctggtcaccgaagtgctgggggcgctggaggccaagaccggggtggagaagcggtatctggctgcaggtgagccgtcggcgctagcccgtttcgccgacgggcacaccgaggccatgggcctgggggtcgcagaccggactccttccccg

SEQ ID NO: 55322 - DNA, 59 bp, Homo sapiens
  chr19:1491666-1491725
  hyper
gtggccccagaggggtcgggatgccagtgtcctgcgcgtttcgccgtcccccttccccc

SEQ ID NO: 55323 - DNA, 30 bp, Homo sapiens
  chr19:1507917-1507947
  hyper
cggaaatttgcttccgggccacggctcgtt

SEQ ID NO: 55324 - DNA, 129 bp, Homo sapiens; identical to SEQ ID NO: 11898
  chr19:1546216-1546345
  hyper

SEQ ID NO: 55325 - DNA, 505 bp, Homo sapiens
  chr19:1567148-1567653
  hyper
ggggtgcccctgcgggcggccgagggcctgggctgcggcgcggctccccggagcctttccgggctggaggcggcccagacaaaggcggcggcggggccggagcgcgcaggggaggagcgcgggctgcgcccaactttctcccgcggcggctgcaggacaaaggcgcaaaggcagcggccgaggccggagcccacgcggggcgtgtccggtgcggggcgtccggcgcgggctgggctgggctcgggcgacccccttccccggggcggacggtgcggggacccccaggacagcaacccccgacgagggccactcaccctggcgacccacgatctcggcgacgtgctcggagctgggcaccgggacgcactcggtcatgttgacgcttttcttgcggctgccgatcacgctcatctggtcggccagcagcgtcgggggccccagggccgcggggtggggcgcgaagcccgcgaacacgtcggggggcgacggccggggcggcggcggc

SEQ ID NO: 55326 - DNA, 30 bp, Homo sapiens
  chr19:1568537-1568567
  hyper
gctgcaggtgtgtgcggctcagcccctgcc

SEQ ID NO: 55327 - DNA, 30 bp, Homo sapiens
  chr19:1591612-1591642
  hyper
acctgaaggcgccacgggacactgaaccaa

SEQ ID NO: 55328 - DNA, 30 bp, Homo sapiens
  chr19:1672516-1672546
  hyper
gctccccacgtgcgcgctcacacgtgcatc

SEQ ID NO: 55329 - DNA, 119 bp, Homo sapiens
  chr19:1675996-1676115
  hyper
cctggcgggggccgcgcgggggaagcgcgccgcttcttgtaaacggttccccgaagggcgctgggccaggggcctgggagggggctcgttcccggtggggggggcgtcccggtgcggcg

SEQ ID NO: 55330 - DNA, 202 bp, Homo sapiens
  chr19:1718939-1719141
  hyper
caggtcgatgggagcgggggcccaggctgcggtttacactgaatccacaaaaatcaccgaagcttgaaaagtgctcaataagccatcgatcgctctctgctgatcggtgccgccgccgcagcggggctggggggaaaggcggggcgagcagacccaggctccctgcctgtgccccacgcgggaccgcggccctgcatctgcc

SEQ ID NO: 55331 - DNA, 590 bp, Homo sapiens
  chr19:1725477-1726067
  hyper
acctccaggatacagcggaccccgatgaagccctggcctgggtgctgggggaggctccgcggcgcggtcccgcaggcgggaggcgatgctgccgacgctattgctgccattactattacggagagatggggcggggcgggagcaccgggcccttcccggaagcccttcctgagcttattcagtgcctggggccgcggcgatcgatgacagctgggcgccggccgagccccctccgggccgcgcgggggcgcatgcgcggggccgcgggatcgatcggccgcgctcgggcctccccgcacccgcccgaccccgcccccccggctcgttgcccggcaacctctgcccggcgcgctcccattggctggcggcggcccgggccccggccgcgcgtggtcacttggtcagcgcgggctcggcgtggccgggggcctggctccgggcgcgggtcgatgccgcctcgcatctgacctttcccggcgcggggagggggcccgagaggatggagagagctggaccatcttggaagaaaactttattgacccgtctcttatcttggggacgcacggttccagcggcggggggcgagggta

SEQ ID NO: 55332 - DNA, 1373 bp, Homo sapiens
  chr19:1748598-1749971
  hyper
ccgctgcagccttgctcgggtcccctagcccggcgcctccgcaaaccaacccaccgcgggccgccgagccccgctccgggatccgccggctgcctccatcccagaagagtgcgcagagaattaaatctagatatttacatgtttaatggctaaaggagcctgtcttctggcagggcagggagggcgctcaggtggtttaactcagcgccgggatcccgctcagctgcgggggccgcgaaccccgccgctgggccgacgattgggcccctccggagcgcggcgcccaacgcgggtttcgttgcgtcggggaagtccgtggcctgcagcgtccagtccccaggctgtcagccgagccctggagtggggcgttctccaggcccccaacccctgatccaggccgttcccctcccgcgcaccctccggcgggggctgcagcccgcgcccctcgccgccaagccccattttcccacagtgcaaactgcagcaaacgaactggttttctcctgagcgcacgctgcggggagacgattccaacggcgtccagtgaggaggggcccaggcctgcgagacggggcgcgttcctgtccccagacccctccggctgcgcctcaacccccagcccggctctctgacctgcatcggtcgggccgggcacagaggaggcaaagcaggcggaggccgcgagaggagagcagcctgacctcccgcctgagcccggacccttcccctcgggcaccctcggacgcccccgccccagcgtgttactttctagatggggaaactgaggcgcggccagggcgatgcggcggaagtcccgcgcccggccgtctcccgcgcctgccagacagagccccgagaagagggcatagaattccctcctctaattgtgtcccagaactctgggacgacggaggccaagctgctgagggaggggacgaggacgcggggccccagggaccaacccctccgctccccggccagccgcggccgcccagcctcggtgccccggcgcaaacaagcgcggtgtttgccgagcgcgaggcgggcggcgcggcccgagagcgatgaggattcgatggagccgctcgccgcggcgggggcaacggagcccgggcgggcgcggggatcgatcgggcacagctgtcgcctaagagcccgcgggagcatccacccgcgggccagagctgcccgggcgccccgcaactgcgggcaggaaatccgggacgtcgggcccgccaggggcgaaaccccaaagtcgcgacacccggggtggggaggtcaggacgtccccacggccaacgtggaaccttcgggagccgcgcgctcagcctcgccgggacccccgccaggccgtaaaagcccagagtctcccc

SEQ ID NO: 55333 - DNA, 30 bp, Homo sapiens
  chr19:1751177-1751207
  hyper
aggccctcttcctctcggagtccctgaccc

SEQ ID NO: 55334 - DNA, 197 bp, Homo sapiens
  chr19:1751433-1751630
  hyper
agcctgggatgctagcgttttatggcggctgattgatttttagatctcacgattatttttaattatctgtgattgttggagggtgagaatgaggagcgcaggctggggctctgtgcagccacatcccccccgccgagattcagcatctgcacggggagtggggtacgcgactgttcggacctgcccctctcttccca

SEQ ID NO: 55335 - DNA, 30 bp, Homo sapiens
  chr19:1752191-1752221
  hyper
tgcaaagctggggccggggtttgcccagaa

SEQ ID NO: 55336 - DNA, 30 bp, Homo sapiens
  chr19:1753202-1753232
  hyper
gaatcacacagagacgcgaaatcggagact

SEQ ID NO: 55337 - DNA, 43 bp, Homo sapiens
  chr19:1753608-1753651
  hyper
tgagcactaggggccggcgctgaggagcgcgcgcggcgggagg

SEQ ID NO: 55338 - DNA, 204 bp, Homo sapiens; identical to SEQ ID NO: 11901
  chr19:1753989-1754193
  hyper

SEQ ID NO: 55339 - DNA, 1129 bp, Homo sapiens; identical to SEQ ID NO: 11902
  chr19:1754224-1755353
  hyper

SEQ ID NO: 55340 - DNA, 30 bp, Homo sapiens
  chr19:1757098-1757128
  hyper
acagaagggcaaaccgcaggcgagaagtcc

SEQ ID NO: 55341 - DNA, 879 bp, Homo sapiens
  chr19:1757370-1758249
  hyper
ctgggagtctgggtttcctgtcgaggaagggagagttagaacagtcgccgtctcaggggtgcgtgggggaaccggaggggtgagcgcagctcctggcaccccgagcctcccgcagggcgctggggcgttgaggatgataaacccggaccacgctgcccgcctgctctctgccgggtccgctgcccacgccgtggccccgccgcgcggccccgcggccgcggggttcacgccgtcaaccttgcgcacctgtcgcgtctcaggtgccctgggggccgcgtctacaccaccggactccgcctggggcgtaagaggtggcgggggcgagggccgcggggtcactaggctccggcccaggcctttagttccggtcgctgcgcaaatgaaaagcggttaagtggcggcaaatcgcggcggttagggggagacggccggatgcgtccccatctccacctaacacggcgacgccccaacgctggtgctcggaaagggaactctgcccccgccccgcccccgcaccatttcaaccccgcagcagaggactcgccgccctttctactccggcatccccattccccgctccgcgagcaccgcgggcctccccaggcctcctccaaggagaactttgcgccccgggtctcccgtcgcgcttgcccggctcggggcgggccacgcgtttccgcaggtgccgagtgtcctgccgggcgccggggccaggacagagacggggacagggagggagaaagacccgcaggtgcagacggagagggagggggagacggggagatggagagagagggaggggtcgcgagacaaaaccagagagtggggagggagagaccgggagcgggagaaacagacggggagaagagaaaaagaagc

SEQ ID NO: 55342 - DNA, 30 bp, Homo sapiens
  chr19:1761409-1761439
  hyper
ttgggttggcaccccgggttggcaccctgc

SEQ ID NO: 55343 - DNA, 94 bp, Homo sapiens
  chr19:1761758-1761852
  hyper
tgggcagccttgggacacctacggcctcagttttccctctgccaagtaggtgctaatgtgagaggggctgagaaaccggcacccctcctgagtc

SEQ ID NO: 55344 - DNA, 522 bp, Homo sapiens; identical to SEQ ID NO: 11904
  chr19:1761983-1762505
  hyper

SEQ ID NO: 55345 - DNA, 261 bp, Homo sapiens
  chr19:1762627-1762888
  hyper
ggcgccaggagacccgggacccgggaccacgcgcccgcggccttggagcctcagggtcactggtgcgggctccgcaggaaagcgcagcccccagcaggcacccaccatcccacccccgcatcccaccccaggggaaaccgcgccgcaccaggcgcgagtgttcttcttccttgtctggcgccccagaaccgcggccgtcctgggtgcgctcagctccagcgcagtgggaggacaagacacgttcctcctcccctcctccac

SEQ ID NO: 55346 - DNA, 757 bp, Homo sapiens
  chr19:1765572-1766329
  hyper
agctgcctctctctggcctcacgcagcagctgctccctgaatggtgaatggatgagtcggttgcaggtccgtgcttcggcgttcattccttcgtgactctcgggactgcggcccggtggggacacagggctctgggtcactgcgtccacttgataaaccaggaacctgatgtccagagaggccagggtgcgcgttcaaggccactcggcccgcagagcccacccgcgtccccatggctgcagtggtgaggggagcagggggaggcagagaggagcccaccctggggctgggcggacatggatgcgtaacccacaccgcaggcttctgcggggtgacacccagactcaccccaagaccctgcacaccctacagctctcacgtctcacgtccacaccgcgagccagctgcatcccacacagggatgtcacaccaagatccgttgcctcatccaccgcccgtccaaggccccacaagctgatgccggttttcccgcccagaactggaacagctttcctaacggtcacaggtttcttagcttctcacttgggtggggtttggatgtgcaaggctgccgacccccatcgtggttgagcgcccgtgcaggcgccacccacccacccacagcacctcgctcagacttcgccctccaccccgccgggacatttgggaagcctcaggcagccccacgcgggcacacccgatggtggacggaggctggcaccctcagcccgcacgcggccaacgtcaggcgcgcgca

SEQ ID NO: 55347 - DNA, 247 bp, Homo sapiens; identical to SEQ ID NO: 11907
  chr19:1769648-1769895
  hyper

SEQ ID NO: 55348 - DNA, 312 bp, Homo sapiens; identical to SEQ ID NO: 11908
  chr19:1775734-1776046
  hyper

SEQ ID NO: 55349 - DNA, 825 bp, Homo sapiens; identical to SEQ ID NO: 11909
  chr19:1776192-1777017
  hyper

SEQ ID NO: 55350 - DNA, 30 bp, Homo sapiens
  chr19:1812451-1812481
  hyper
ccaggcctcagggacgcggtcacggccgaa

SEQ ID NO: 55351 - DNA, 30 bp, Homo sapiens
  chr19:1812717-1812747
  hyper
ctgggatccggagccgttacaaaggaggaa

SEQ ID NO: 55352 - DNA, 30 bp, Homo sapiens
  chr19:1813043-1813073
  hyper
aggaccacaggtaacggcggttatgtaagt

SEQ ID NO: 55353 - DNA, 31 bp, Homo sapiens; identical to SEQ ID NO: 11910
  chr19:1826719-1826750
  hyper

SEQ ID NO: 55354 - DNA, 30 bp, Homo sapiens
  chr19:1848335-1848365
  hyper
agaagccagtggagcgtagcatggtccgtc

SEQ ID NO: 55355 - DNA, 585 bp, Homo sapiens
  chr19:1856932-1857517
  hyper
aggaggagcaggttgccggggtggggggggcgaccggggcaggggcgcgcagccgctgggaacacagctgccgcacgtagctcggcggcggcggcggggacatccgcagccccagccggccccgctcacgtggtcccactcccgccggggccagggggcccgggccagggtcgcctctccggcctgggtgcctgccagccccgccccgcgcttggagactgaggcgcgcacatgcgcacgtgggtggcggggcagggggtgcacgggctacccacccacgctgcgctgggcgaagcgcctctgcgaaatgccaggccctgcctcgcacacaatccactcgcagggaggagggtggggtgaacttgtgggggcccagagcgcgctgctcctagccagccgggcccccaggtgcacagccacccagctgctccgcgctacctggccgagacgcagcgccctgaggatgcggtgggtggggacaacgcgggagggcagtgtgggcggggccgcggtggacttgaccctctgactcaggctgggcccgggtgagctcaggacagcctcggaaacaggcaggctcagaaa

SEQ ID NO: 55356 - DNA, 385 bp, Homo sapiens
  chr19:1862235-1862620
  hyper
cagccaggcccaccaggctcccggttcccctcgccgccccggggactgcgctaggaggggcgttggtgtagccgaagcgctccaactacgcgcaccttcccgaatcgcccgccaggtaggggtgaacaaacacgccagggaaatacagcagtgtggacccgagcccctcgagggtcctccaatactatgaagttcccccgcccagactcaggccccaacccgcgctcctagcctcgccctccccctcgttaaaatacagagaacgcagagaaaacgtgccgggctccccccatcctggccccacgccaggtgctctgccgacctctggggagaatccgcgcggccaccccggcggcggcgacgcggttcctcctccattttcaca

SEQ ID NO: 55357 - DNA, 30 bp, Homo sapiens
  chr19:1864923-1864953
  hyper
gctgctttggcctgcggcgacctcctgctc

SEQ ID NO: 55358 - DNA, 30 bp, Homo sapiens
  chr19:1905237-1905267
  hyper
gcggggcgaggcggcggcgcgcagtgccta

SEQ ID NO: 55359 - DNA, 30 bp, Homo sapiens
  chr19:1942117-1942147
  hyper
ctcccggctgggctcgctgccccctccccc

SEQ ID NO: 55360 - DNA, 1129 bp, Homo sapiens
  chr19:1978008-1979137
  hyper
agacctccccagtgccgcttctgtcctgggctagggaggtgggggggcgggggaggaggagtggcagacactgaggcggtgaccacacgggcagggtgcaggtgtcgggatgacttggcaggccatggtgcagtgctctggcaggctgggcccaggccctgctgctgggcagtggtgtcatttggagggtggtccttcagggaccccctcctgcctcctgcctcgggggtgggctggggaggtcggggctaggtgggccctgcgctggcggtgctgatggtctctgtccccgcaggaaagaatctctatacaaatgaatacgtggctatcaaattggtgagtcggcccctccaccccacccccgctgacgtgccccccagggatttcagggcagcgacccggtcccctggtgactcgctcttgtgcccccaggagccgatcaagtcccgggccccgcagctgcacctggagtaccggttctacaagcagctcagcgccacaggtaccgggcggcccgcgggtggggcgggggctgcgcaggggcagggagggggctgccgccgcacgcccgtgcgtctgtcctccgccgcagagggcgtccctcaggtctactacttcggtccgtgcgggaagtacaacgccatggtgctggagctgctggggcccagcctggaggacctgttcgacctgtgcgaccggaccttcacgctcaagacggtgctgatgatcgccatccagctggtgcgcggcgggcggggcggggcggggctcggagggaagagggtggccctggaggggagcgcgtgggacggggaggggcccggccgacaccgccgtgcccccctgcagatcacgcgcatggagtatgtgcacaccaagagcctaatctaccgggacgtgaagcccgagaacttcctggtgggccgcccggggaccaagcggcagcatgccatccacatcatcgacttcgggctggccaaggagtacatcgaccccgagaccaagaagcacatcccgtaccgcgagcacaagagcctgacgggcacggcgcgctacatgagcatcaacacgcacctgggcaagggtgagctgcgcgcgcgcggcggggggcgggcgcccggaccccgct

SEQ ID NO: 55361 - DNA, 30 bp, Homo sapiens
  chr19:2050851-2050881
  hyper
ttctgtccgggccccgccagcgggggaggg

SEQ ID NO: 55362 - DNA, 30 bp, Homo sapiens
  chr19:2051550-2051580
  hyper
gggccgtgtcctaccgcctggccccacaca

SEQ ID NO: 55363 - DNA, 30 bp, Homo sapiens
  chr19:2061137-2061167
  hyper
cctgggcatggggccggcccagggacaggg

SEQ ID NO: 55364 - DNA, 30 bp, Homo sapiens
  chr19:2151867-2151897
  hyper
tggctggatgtgggcggggcgcccacgtgg

SEQ ID NO: 55365 - DNA, 102 bp, Homo sapiens
  chr19:2163578-2163680
  hyper
tatggggggaaattcggatttttggttttactaagccgtgtgtggggaggtgtccggcgtcctcctcctgggacgggattcgaacccgctatccgacgggcc

SEQ ID NO: 55366 - DNA, 578 bp, Homo sapiens; identical to SEQ ID NO: 11913
  chr19:2165095-2165673
  hyper

SEQ ID NO: 55367 - DNA, 144 bp, Homo sapiens
  chr19:2168519-2168663
  hyper
tgcccaattggcaaacgcaagggggaggaagggagatttttattcttacatgacctgggagttcctggataaccgcttttctcaagccccgcatggcatttcttatttttttgagagggaatctcgtactgttgcctgggctgg

SEQ ID NO: 55368 - DNA, 444 bp, Homo sapiens
  chr19:2168902-2169346
  hyper
gtgcctggccctgcgtggtatttctagggcaggatggccctgcccttcttctagtgggaagggcacaagtggcattattggttgtttgctcggaaagaaccttcaaaggccacagaacgggaccttccccctggtgactcacaggctgtgggcgggcaggggcggcctccactggccaagggtccggactctctgactctcattaatgagtgagtacatgttccgcctgacagcctggcctggagcccggctgtgggcggcggtgagtgggcagccagcagtgagtagcagccggggcggggtgagctgtccccaccgtgactcagaaggtattttctgctgctgacctctgagcttgagtgtcctgagtaatcccagctcccccggaggcagattaacctttaggcagctttgtgtgagtaaaggagtcgctttaaataggaa

SEQ ID NO: 55369 - DNA, 30 bp, Homo sapiens
  chr19:2236456-2236486
  hyper
taggagagacggaccgttgttacataacca

SEQ ID NO: 55370 - DNA, 36 bp, Homo sapiens; identical to SEQ ID NO: 11915
  chr19:2250669-2250705
  hyper

SEQ ID NO: 55371 - DNA, 173 bp, Homo sapiens; identical to SEQ ID NO: 11916
  chr19:2251061-2251234
  hyper

SEQ ID NO: 55372 - DNA, 339 bp, Homo sapiens; identical to SEQ ID NO: 11917
  chr19:2251610-2251949
  hyper

SEQ ID NO: 55373 - DNA, 1147 bp, Homo sapiens
  chr19:2252588-2253735
  hyper
cggcttcccctctctccgaggcctctccttgggtccccggtctgcgagggtcacacggtcctcccggacggcctctccggtggcctcgccgggctcctcttcgtcgttctctgcagcctcccgactcccgggaatcttgggtctgacctctgcctcggcccggggcgcaggcggcgctgatggaggcgcctgggcctcgaacttaggctgcaagacagagtggggtcctggggtaagcgcccaccttccccccggcccgggctccttctttccttggggatgaaggtcccaatgcccgcggtcagtggaaggaagctcttaccaggggcgacgatggctccctcggggctgagcttggcgggacccagggctcgggcacacgtgcttggagtgctgcctccccagggacggcgtctgcagcgacagggtcgggacccgagtcagctgggccgaggcacggtccacactgtccatccctccctcacccctagagcccccctccctggacagttggagtggggctcccccggtacggctgagactaaggatgcccccgagccgtgggaagggactccgggactccgctgccgcggcgccccttctccgaacctcgctctttcaattggtcattcttccccccgaccacgggctgtaggaggcccctagcaagggaggggtcgcaggagtgcccccggggggcgctcacgagctgagcggtccccagagagggcgcaggggaaaggcggcagaacgctacgaggcaggaggggttgcacaaggttcatccggaagccagaacctactcgcggcgaggggaatgggccccgcaaaaggtccacaccgggtgagaggggcgcgcaaggcccgtcacttaaggggagatgcacaaaccaactttgggggcgtgcaagacccagccctggagaggaggctcccagaccccaccctggcggcacagcgcctttccttggaggaataggcgcacaggtggaccccagcctcgccccacctctggggagcctgcgctcaccgcggcacagctggaaagccgagcccagcagcgccaccagcgaggcgagcaccaggcacttgttgagcgacaggtctccccagggcagctcctcgctcagggccgggggcggcggcg

SEQ ID NO: 55374 - DNA, 79 bp, Homo sapiens
  chr19:2253780-2253859
  hyper
cgctccgagggcctgcgggggcaagtgcgcgctgcgctgtggtcactggctctgtgccgcccccttccccgggcgcagg

SEQ ID NO: 55375 - DNA, 30 bp, Homo sapiens
  chr19:2269131-2269161
  hyper
cctagggagggcgacgtggaccacgacaga

SEQ ID NO: 55376 - DNA, 30 bp, Homo sapiens
  chr19:2270283-2270313
  hyper
gaatctgcacttttcggtcccggccgtcga

SEQ ID NO: 55377 - DNA, 30 bp, Homo sapiens
  chr19:2271078-2271108
  hyper
aggctctgccccggcggggctgcgtgaggg

SEQ ID NO: 55378 - DNA, 81 bp, Homo sapiens
  chr19:2273849-2273930
  hyper
gggtctgcaaccccgccgtctgcccggccgcagcgccacctgccggccgcatccgggagcgccacccggaaaatcagggcc

SEQ ID NO: 55379 - DNA, 509 bp, Homo sapiens; identical to SEQ ID NO: 11919
  chr19:2289762-2290271
  hyper

SEQ ID NO: 55380 - DNA, 237 bp, Homo sapiens; identical to SEQ ID NO: 11920
  chr19:2290630-2290867
  hyper

SEQ ID NO: 55381 - DNA, 287 bp, Homo sapiens
  chr19:2302553-2302840
  hyper
tcccctccccagcaaggggcacgtcccaccaggcccggactgcccgtctgcccctgcagggcccctcgctctggtggcgggctcggtgagctctgctgcccggtctcgggagtctgggggagcgcggcgtcgacccctgtggagggaggactcgtgtttcaaggacagagcctcattaccatgcacgaccagccgcagctgaggccgcagaggcctttggcaggggggccgggccggcggcagggacggcgttggcggtggtggacgggagtgggggtctgtcctga

SEQ ID NO: 55382 - DNA, 226 bp, Homo sapiens
  chr19:2328965-2329191
  hyper
tcctttccccgcctcggaggccctccgccgctgcagcgccactcacttcccaccgggtctgaaatttgtgccccctccatcctccggttctgcttctccgtttcggggtctccagttgccgccggggacgcctctctccggctctgtggccttgagcaggcggctgcccacccctctccgagcctcagtttccccttaggcggaacgggcacggtgctaagctaac

SEQ ID NO: 55383 - DNA, 30 bp, Homo sapiens; identical to SEQ ID NO: 11923
  chr19:2426859-2426889
  hyper

SEQ ID NO: 55384 - DNA, 31 bp, Homo sapiens; identical to SEQ ID NO: 11924
  chr19:2431505-2431536
  hyper

SEQ ID NO: 55385 - DNA, 598 bp, Homo sapiens
  chr19:2461977-2462575
  hyper
cccccatacccagcctttgcccgtgctgttccatccgccaggagcgccgtttcctgcctgactgcgcggccctgggcctcagtcttgcgctctgcaaaccggggtctcgaatctaccccagccctcctgtctcggcgctggggaggggcttcgggtgcccagagccatccccgcgggacccccagggactggactccaagtcccagaaagccccgcgcttcccgtgggtggggcccggggctttccccctcccagcgcgcagtttgggaggcgctgggcaattttcaaattttggcgccgaacgggaggggcggtgacagctgagaccgtggtccccccgggggcacccacgcccaggctgctgctggcagctgcgcccagagcccgaggtctggggcatcccgcaaagctgccccgtccattccgaggggcctcccaaggcaccacacgcgccagggggctccgggcccatttccattatggaaaactgaggcacaggaaggttagggaccggtcggggaatccgcaccaggggcgtagcggaggcgggattcgaacgcgggaccctctttcccccgggagctagaaattagtgacc

SEQ ID NO: 55386 - DNA, 53 bp, Homo sapiens; identical to SEQ ID NO: 11925
  chr19:2462944-2462997
  hyper

SEQ ID NO: 55387 - DNA, 30 bp, Homo sapiens; identical to SEQ ID NO: 11926
  chr19:2474999-2475029
  hyper

SEQ ID NO: 55388 - DNA, 30 bp, Homo sapiens
  chr19:2476062-2476092
  hyper
ctccactgaggccacgcccaatgttcaagt

SEQ ID NO: 55389 - DNA, 143 bp, Homo sapiens
  chr19:2478803-2478946
  hyper
gaaaaaaactttttttatttccgcaaactaaaatcaacaagcagaaaaataccccaggaagtcggcctccgggccagccgggcttggcgcagtgctgcgttttgcctgtaaaccgaaactgcgagccctggccagccacctcc

SEQ ID NO: 55390 - DNA, 700 bp, Homo sapiens
  chr19:2488410-2489110
  hyper
gtggggtagagtgaggggcctcgtgaagagcgctgcgggccaagaccctcttgcgcatgtgacgagagcgcacgagtgtgggagcttcggcctgcgctcacaggcgtgtgcgtggggaagtgtttgggccgccgtgtacacagcaggcacgccataaacgcttcttggatggctccatgcgagggaagggagggagggcagagttcaggccctacagggaggaaaagggaggggcggaggcctggctttaggtttgaatctccgcggcttactagctccagcagctcagcaaaagcgtgactcagtttccctcgtccataaaagggaaagccgaatcgccctcccacgtgtcgaggtgaaactagacagtgcactaaggcacttagcaaaacgcgctgccttgagaacccttattacgccttccttccttccacctcaccccctggccagacactctgggggtggagaggggcgctgacccaggccccagacgcccctcccgtccgccctccctagcaggcaggagtcccggctttcccgttccttaaattggataattggagacagaggcgggtgctcgagacggagaaatccccaagtgggcgaaaggcaaggggcctgtcctagtttccctgcactgggggcccccaccctcgccagcgctccctccggtgcgccctgggcgcgcagtctgtgcgct

SEQ ID NO: 55391 - DNA, 609 bp, Homo sapiens
  chr19:2579150-2579759
  hyper
gatgggtgcccccggccgggcaggtccagacgccaaggtctgcacaggggtcacccggacacacctgactcggaccatgtggctaagtttgttttgaaatttcactgccccagcgtaacccagagtccaggccacgcccagcacggctggctcccgtccgggtctctgtgtcctgcagctcagggtggccagggcgggcgggcaggagggcaggcacctggcacccacccagacctgcgccctggccatcaggctgccccgggaagccgggcgaccgggaagatagcagagtcaacagggcgggtgcaggaaagggcgctccccatgcgagcctctgaagccctcggcacacagccctggaggctgggaatccttgagcgttttcctctgaggtctccaagtgtttatggtaacaagaggagggaggagggcgaggggacggccgccgctgggcagcagctccgcctgctggtcaccttcctcggggacatgcaaggacaagctgccgacggaaggggctttggcagaaatgcggggagcaggggacgcacccccacggacaggggcttttctggttgccaaacgtgcagacgacgggcctgacatccc

SEQ ID NO: 55392 - DNA, 178 bp, Homo sapiens
  chr19:2598980-2599158
  hyper
gtttctagcatacagttccaccgagggcccatgatgaagagggggagaggcgggcacgaggcgaagcgggtgccccgcgctcggctggaaaaagccaatgtcaccgggctgtgctatttgcttgtgggagggacgcctggggtgggggcgtgccgctggttgctccgccgcagacacc

SEQ ID NO: 55393 - DNA, 30 bp, Homo sapiens; identical to SEQ ID NO: 11930
  chr19:2611090-2611120
  hyper

SEQ ID NO: 55394 - DNA, 61 bp, Homo sapiens
  chr19:2702883-2702944
  hyper
ggccgggggcggggcgaagagcggctttccagggtgacttcgtgacgtcaggaaggcgcga

SEQ ID NO: 55395 - DNA, 37 bp, Homo sapiens
  chr19:2740071-2740108
  hyper
cccattggcctccccgagacccgctggcagaactttc

SEQ ID NO: 55396 - DNA, 8 bp, Homo sapiens
  chr19:2776121-2776129
  hyper
cgccccgg

SEQ ID NO: 55397 - DNA, 229 bp, Homo sapiens
  chr19:2783430-2783659
  hyper
gcaactgacctctgcgacctaatggaggccggaaatcgggtctggtttgccctctagagcgggaatgaagcggtgcacggtggaacagtggctgactccagccggtcgccgagctgaccacgtggtgctgggccggccacgtggtgcagccgcgtttggacacctggactccagagcgtcacagctgcgcaatgaatgggagtcagtgttacccgcttactatctttgt

SEQ ID NO: 55398 - DNA, 30 bp, Homo sapiens
  chr19:2819793-2819823
  hyper
agtcaggagcccagcgccgcgctgcggggc

SEQ ID NO: 55399 - DNA, 836 bp, Homo sapiens; identical to SEQ ID NO: 11933
  chr19:2944613-2945449
  hyper

SEQ ID NO: 55400 - DNA, 633 bp, Homo sapiens
  chr19:2950417-2951050
  hyper
gcctcctccctggggcgcggtgccaggacttcgccattaaacgagcccgccccctgcactttgaactctgcccccatcctttgacccaaacccccctacgccccggcatcggagtccccttgcttggcctctgccacgaagatacggggccaggtccagcagtacaaggaggagaaaccgctctcacgggaggcgctgcggccactgagggagacggccgccgcgggtcacagacggatgcttccgtttccggttccggggcggctgggagctgaaaagtgggctagtaatgagcttgggattggtggagcctcaaagataggcgggacgacctacgtcgtccaatcgctgagcaggaaaagctagtttccgccgtctgggagataattggcattgttggcagatccgcccctcgagggcaagtctcgggacagaatcgcgctgtgggcgtggcttgtactggatcctccccggggcgtggctaaaacaagaccgaggtcccgggacgaggttgggggcgtggtctttcgcgcaatcctccaacgcccaattaccctgataaacaataaacgctaaaataagtaataaatgctcatttcctccagccaacacattcctcgtgataacatactc

SEQ ID NO: 55401 - DNA, 93 bp, Homo sapiens
  chr19:2977420-2977513
  hyper
ccacgtgcagctactgcgccttcattgatctgcttcgcggtccaggtggcggctgggtggggcctgggcgggacggggcggggacaaggcggg

SEQ ID NO: 55402 - DNA, 30 bp, Homo sapiens
  chr19:3028771-3028801
  hyper
cttgaagggctggccggactggagcggggt

SEQ ID NO: 55403 - DNA, 122 bp, Homo sapiens; identical to SEQ ID NO: 11937
  chr19:3061486-3061608
  hyper

SEQ ID NO: 55404 - DNA, 88 bp, Homo sapiens; identical to SEQ ID NO: 11938
  chr19:3094303-3094391
  hyper

SEQ ID NO: 55405 - DNA, 174 bp, Homo sapiens; identical to SEQ ID NO: 11939
  chr19:3094776-3094950
  hyper

SEQ ID NO: 55406 - DNA, 30 bp, Homo sapiens
  chr19:3275594-3275624
  hyper
gagggcattccaggcgggggcgccacctgg

SEQ ID NO: 55407 - DNA, 30 bp, Homo sapiens
  chr19:3275898-3275928
  hyper
aggaggacgtgctgcggctgttccagccct

SEQ ID NO: 55408 - DNA, 41 bp, Homo sapiens
  chr19:3286044-3286085
  hyper
ctgggcgccagccccgccctctgcccgccctgtccacctgc

SEQ ID NO: 55409 - DNA, 30 bp, Homo sapiens
  chr19:3360717-3360747
  hyper
actgggcgactgtgcgcgcgtccctgcggg

SEQ ID NO: 55410 - DNA, 288 bp, Homo sapiens
  chr19:3361101-3361389
  hyper
ttcggggtcccccatccgcttggcccgagggggtcctggctggaggttcgggcgcgaggtggcgccgggacgcgatcactcggcacgcagacgtcgctcgccaggggttgcgcttgcgcggggacctgccccgagaggggcggggcggcaggggttccccctccctgagaggccgtggaagtcccgaggggtgggtggttacagcagcacaggggttaggacgggcccgggaggtggctaaggagacccctattatcctatgctggggagagcgtaggggcaccggga

SEQ ID NO: 55411 - DNA, 55 bp, Homo sapiens; identical to SEQ ID NO: 11941
  chr19:3367361-3367416
  hyper

SEQ ID NO: 55412 - DNA, 31 bp, Homo sapiens
  chr19:3404294-3404325
  hyper
acacatttgacattggcgggaccgggagggg

SEQ ID NO: 55413 - DNA, 30 bp, Homo sapiens
  chr19:3428808-3428838
  hyper
cccggtcgggggaggcggagggggcgtgct

SEQ ID NO: 55414 - DNA, 30 bp, Homo sapiens
  chr19:3505928-3505958
  hyper
ggtctgccctggggcgccccattccgcgac

SEQ ID NO: 55415 - DNA, 30 bp, Homo sapiens; identical to SEQ ID NO: 11942
  chr19:3506424-3506454
  hyper

SEQ ID NO: 55416 - DNA, 30 bp, Homo sapiens
  chr19:3572858-3572888
  hyper
ccaatgggaccgttcgccgaggccttcatt

SEQ ID NO: 55417 - DNA, 58 bp, Homo sapiens
  chr19:3573236-3573294
  hyper
ctgccatcgggcagcccgggcgctactcacctccgcccgcgtccgtgttccaggtccg

SEQ ID NO: 55418 - DNA, 30 bp, Homo sapiens
  chr19:3573736-3573766
  hyper
ctgtcaagcaagagcgcggcgagggtccac

SEQ ID NO: 55419 - DNA, 30 bp, Homo sapiens
  chr19:3585594-3585624
  hyper
catggagggagcagcggcccgggaggcccg

SEQ ID NO: 55420 - DNA, 30 bp, Homo sapiens
  chr19:3699936-3699966
  hyper
tcaggaggtgggcacgcacggcctcagaga

SEQ ID NO: 55421 - DNA, 73 bp, Homo sapiens
  chr19:3700598-3700671
  hyper
ctcgagtgccccctcgcgcccaggggtgggagtacagagccaggctcgccattccatcgtattaggtcagtaa

SEQ ID NO: 55422 - DNA, 36 bp, Homo sapiens; identical to SEQ ID NO: 11943
  chr19:3721530-3721566
  hyper

SEQ ID NO: 55423 - DNA, 30 bp, Homo sapiens
  chr19:3761693-3761723
  hyper
catgcgcggcctcgcgaggcctgctgggaa

SEQ ID NO: 55424 - DNA, 118 bp, Homo sapiens
  chr19:3762566-3762684
  hyper
aaagcttgggagaccgcatttcccagacacctccacggggcctacacttccacggggcctacaactcccaaacacccttgggccactgacgtcttccggaaacgtgcacttgcaagct

SEQ ID NO: 55425 - DNA, 345 bp, Homo sapiens; identical to SEQ ID NO: 11944
  chr19:3785490-3785835
  hyper

SEQ ID NO: 55426 - DNA, 356 bp, Homo sapiens
  chr19:3785864-3786220
  hyper
cgcacacgcttttcggccacacgcgcacagccctccacgtggacgcgcgggtacacacgcccggggctcgtagccgcgcacacccgcacccaggaaaccccagccaccaccacgcggggtccgatcgcctctgagcaccctccgccccagccgcgcacccgctgcgcgcccgggacgcgcacactcgcgcacacaccggcccttcctgcgcacgtcccgggcccacccccgcctagagccctcggggtttccccccaccccggcctcggggtctctccacgtctccccgccgacgtgctcacctgctcagggggcgcccccgagccgcgccccgcgcccgcccccaggagggcctc

SEQ ID NO: 55427 - DNA, 28 bp, Homo sapiens
  chr19:3786583-3786611
  hyper
gcgcggcggggaccgggggtgagggaga

SEQ ID NO: 55428 - DNA, 30 bp, Homo sapiens
  chr19:3801859-3801889
  hyper
aactctttgtcagccgggctggttttcacc

SEQ ID NO: 55429 - DNA, 7 bp, Homo sapiens
  chr19:3822134-3822141
  hyper
cgttgaa

SEQ ID NO: 55430 - DNA, 165 bp, Homo sapiens
  chr19:3880520-3880685
  hyper
gcctctgcccctggcgtggctttcggagatgcttgtctgtcagccaatggggaggatcggattctggcagggggctgtgcttttccgtcaggccgccaccccccaccccctcctccctgcacacaaaagcagcataaattaaccgtcttcgggaagccgagcctc

SEQ ID NO: 55431 - DNA, 30 bp, Homo sapiens
  chr19:3933152-3933182
  hyper
gggctgctgtgcgggcgggggtgggtgagt

SEQ ID NO: 55432 - DNA, 129 bp, Homo sapiens
  chr19:3933495-3933624
  hyper
cgcctccgccccatccccaggggccgcctcccccggggcggcctccaggctgccgagacctataaaggcgccaggttttctcaatgaagccgggacgcactccggagcgcactgcgtggtcgcacccta

SEQ ID NO: 55433 - DNA, 30 bp, Homo sapiens; identical to SEQ ID NO: 11949
  chr19:3970870-3970900
  hyper

SEQ ID NO: 55434 - DNA, 8 bp, Homo sapiens
  chr19:3971196-3971204
  hyper
gcacctcg

SEQ ID NO: 55435 - DNA, 1665 bp, Homo sapiens; identical to SEQ ID NO: 11950
  chr19:4053793-4055458
  hyper

SEQ ID NO: 55436 - DNA, 47 bp, Homo sapiens
  chr19:4064372-4064419
  hyper
acagaggccccggccccgccgataggtgctctcggggccccatggcg

SEQ ID NO: 55437 - DNA, 98 bp, Homo sapiens
  chr19:4064871-4064969
  hyper
gcgccgactgggtgtccgggcccgggtggacagcaacctcccgccgcggcccaccgtgcgcccccgccagccagcccgggcagcgcctcccagaaccc

SEQ ID NO: 55438 - DNA, 30 bp, Homo sapiens
  chr19:4068091-4068121
  hyper
gggtgaccctgttccggggctcactgtgcc

SEQ ID NO: 55439 - DNA, 31 bp, Homo sapiens; identical to SEQ ID NO: 11952
  chr19:4078644-4078675
  hyper

SEQ ID NO: 55440 - DNA, 206 bp, Homo sapiens
  chr19:4182605-4182811
  hyper
cggggaagaaggaggaaccgcgttccagtcctgcgcacccggcctcccacggcaaggcgcatgcgcctcttgctgacgccgcaggcgacatgttatctgctgtcagaaggaagcctgcctctttgcatgcaggtgtttgcggggcttgggaaggggctccccgatgacccgggcgggaaattggggcggccgcctacgtgagagtt

SEQ ID NO: 55441 - DNA, 30 bp, Homo sapiens; identical to SEQ ID NO: 11954
  chr19:4198043-4198073
  hyper

SEQ ID NO: 55442 - DNA, 30 bp, Homo sapiens
  chr19:4246830-4246860
  hyper
ttacaaaattttaacgagccgctgcccgct

SEQ ID NO: 55443 - DNA, 30 bp, Homo sapiens
  chr19:4247108-4247138
  hyper
ttctcaggtgcttgcgaggtgatcagaagg

SEQ ID NO: 55444 - DNA, 30 bp, Homo sapiens; identical to SEQ ID NO: 11955
  chr19:4247487-4247517
  hyper

SEQ ID NO: 55445 - DNA, 5 bp, Homo sapiens
  chr19:4279426-4279431
  hyper
ccgga

SEQ ID NO: 55446 - DNA, 502 bp, Homo sapiens
  chr19:4279567-4280069
  hyper
cgctgcgctgagaacccaggcgtccgggctgggagaggggccgggagcgtccgcaggtggcgctggcccggatctcccgaccccaggaagggatcccggagcttcctggaggcggcgggcggccgtgtcgctccagggaaccgcgctgcccgcggaaactccgcgcgcctccgcggatgcccctcgccctagcccccagcgcgcggggttcggggccctgcgaggtccccccttcccccgcggtgcttcccaagctgggctaaggcgggcttctcttcctccctcctctgtcgcctccttttcctccccctcgttcaccttttccttccctctatccatccagagccccgccaaagggcgcacctgatctttctcatccttccctgctcttcccttcctctccacctcctcctcctccttggggaaaggggcccggagaagggcatgtgggggcccctctgacagtggcccgattggggtgacaggcgcccaaatggccaag

SEQ ID NO: 55447 - DNA, 237 bp, Homo sapiens
  chr19:4304481-4304718
  hyper
ctcacatatcaccaccaacaccgcccagtgagccccaggcgctggatgtgagggctctgggcgaggccagcgcggaactacatttcccaggcggccgcggcgggtgcgcctgcgcaatgcgcgcggtgatggagcgctaaccgggggcgcggcggcggcgagggctcggcgggccattggctaccggccgcggcaaaggcagcttggggacccagcgtgcgcggggcccgcgggccg

SEQ ID NO: 55448 - DNA, 30 bp, Homo sapiens
  chr19:4400287-4400317
  hyper
cggtactcggctcccgcctgggcctgcgct

SEQ ID NO: 55449 - DNA, 149 bp, Homo sapiens; identical to SEQ ID NO: 11957
  chr19:4432844-4432993
  hyper

SEQ ID NO: 55450 - DNA, 56 bp, Homo sapiens; identical to SEQ ID NO: 11958
  chr19:4471581-4471637
  hyper

SEQ ID NO: 55451 - DNA, 30 bp, Homo sapiens; identical to SEQ ID NO: 11959
  chr19:4472165-4472195
  hyper

SEQ ID NO: 55452 - DNA, 30 bp, Homo sapiens
  chr19:4523780-4523810
  hyper
tccacaaggatgggcgcgaagggtcccacc

SEQ ID NO: 55453 - DNA, 76 bp, Homo sapiens
  chr19:4558484-4558560
  hyper
acaggaggaggtgacgcctgcgggcaaggggcggcgaggtgagcggcctgcagtcccgctcgtggccacaagacgg

SEQ ID NO: 55454 - DNA, 213 bp, Homo sapiens
  chr19:4580779-4580992
  hyper
ccaaggtgcggcggccggacgcgaagtggggcggaggggcctcccagtgccaggacccccacaccagccccgggtcgcctcgacttggctctcaggaccccgccccccaacgccacccccaacccccgaccaacaggccccctgcctgccccgaaccccccacctgggccccaatccagctccccagcggcgcagccgcgagcctcattattg

SEQ ID NO: 55455 - DNA, 30 bp, Homo sapiens
  chr19:4581198-4581228
  hyper
ccggatccctccatacggccagcgaccccc

SEQ ID NO: 55456 - DNA, 30 bp, Homo sapiens; identical to SEQ ID NO: 11960
  chr19:4639224-4639254
  hyper

SEQ ID NO: 55457 - DNA, 178 bp, Homo sapiens; identical to SEQ ID NO: 11961
  chr19:4639829-4640007
  hyper

SEQ ID NO: 55458 - DNA, 28 bp, Homo sapiens
  chr19:4666908-4666936
  hyper
tcaaggtgttgaccgggctaggctctta

SEQ ID NO: 55459 - DNA, 189 bp, Homo sapiens
  chr19:4769516-4769705
  hyper
agaatcggaggaaccgagaacgaagaggggtgggggaacggggaaagagagaggaaaatcaagttttcttcagcacgagggacagctctccaccgaccgaaggaggagaatgctatttatttcagcaccaaatatccggacagcgcctctcgggaggtccgagaagagaaccgcgatctgtttcagcac

SEQ ID NO: 55460 - DNA, 177 bp, Homo sapiens
  chr19:4791537-4791714
  hyper
cttccgatgccatgcgctgcgactggaacgccaattcccaccatgccgcgcgctcacagctctcaggggctgtcctgtggcctttggggaagtgtagtcttgagcccccaagattccttttctgttctatggagtgggcccgcgcaaaggactccatttcccggcgtgctgccatcc

SEQ ID NO: 55461 - DNA, 43 bp, Homo sapiens
  chr19:4815740-4815783
  hyper
tacatttcccagggttccttgcggcaggagcagggccatgtga

SEQ ID NO: 55462 - DNA, 326 bp, Homo sapiens
  chr19:4867022-4867348
  hyper
ccccaaagcagttaacggataggccttcctacttttaagccacctcgtcgccacgcccacccgagggaagtgggcaggctttgcccaagacctccccagaatcagttgggggcgccaggagctggggcaacccccacccccacccgtggcaaaaccatctgtaggggagggggctttgcggtggcggggggtgtctctgaaaaccccagaagggagggcggagattctgcccgcaggaggaaacttgcctgcaaatggcgtttccaaaagcaaactgttcaaaatttagagaaaacctggtgggcggggggcggtatttagcccac

SEQ ID NO: 55463 - DNA, 30 bp, Homo sapiens
  chr19:4867616-4867646
  hyper
tcaccgcggtcaaccggacgtcccaggaac

SEQ ID NO: 55464 - DNA, 133 bp, Homo sapiens
  chr19:4867953-4868086
  hyper
ctgggaggtgagtgcgatcgggggcgccgcacaggtgctgggattccccaggtcgcccatttcccctatggccaaactgaggctgcgagaaccctgggagagttgcagggtgaccctcgccagcgcgtcaggg

SEQ ID NO: 55465 - DNA, 30 bp, Homo sapiens
  chr19:4909459-4909489
  hyper
gcctcctgcggccccgcaactcccaaatgc

SEQ ID NO: 55466 - DNA, 30 bp, Homo sapiens
  chr19:4910259-4910289
  hyper
tgagtcgcggggcgcgcgcgctcgcgggtg

SEQ ID NO: 55467 - DNA, 21 bp, Homo sapiens
  chr19:4946174-4946195
  hyper
tctccacgaagcactcactcc

SEQ ID NO: 55468 - DNA, 30 bp, Homo sapiens
  chr19:4968543-4968573
  hyper
tgcaaattggggaacgctaagcccacattc

SEQ ID NO: 55469 - DNA, 423 bp, Homo sapiens
  chr19:5292714-5293137
  hyper
ttcctgccatgcaccccccaccgctacctgccccctctgcggtcctgttgcctcctccgccttctgcgaagtccccagtcacagctcccccgggctggcagcgaaggctgccccgcgcctggctccgcccccgggaggtgggggaggagagggggtggggggaggaggtcgggctgggggccaggcgggggaggggaccctgcggagcataacggtctggagttttccaaagtgcaagcgacgggcctgaatgggggggcgccaggcagcagcaggcccaagctggccctggagggcggccggcacggtcaggcccgcgctgggctgtggggacccccgtggtccccagcctcggagcctggagggggcgcgacaagagagacaaagcccggggcggcccgggcctcggggtggaagggggtc

SEQ ID NO: 55470 - DNA, 777 bp, Homo sapiens
  chr19:5293155-5293932
  hyper
cggctcggagatcgggcccaggccccgcgaggcctccacagggcccgccgcagccgctccccgcgtccctcggtccgcccggagcgcggcgcgcagcgaagactcgggagaggcctcggcctggggagctcggcctgggggcggggcaaggggcggggctgtagggggcggggttgcagtgggcggggctgcaggggacgggccccgaggagggggattggggggcagggcggggccccggccggaagtggggcggggggaccagaggggagccccatctggaggcgcggagagcctccgcaggagtccatgaaacactgagcgaaggggcgccccagggagggcacgacccaagacccctccctcccgaagacgtctcacggggagcctctacactgctcctcgcttccccagctctgatcgtagccatggcaacgcatgaggaggctggatgccggacagggcggcggagggctccccaaacacacccaactacaggaggtcggagaaggggcagagttcccctcccagtctgggtgggaccggaggcacggtgatgggggcggggggcgtcccctcttccccctcttagaccagagggtaggggagaggtgcgggcgcagaggcttccctcccgctgggggtccaggggaatgaatggggggacaccgtggcagaggcccccaccctcgccacaagcctgaggagggggcggagagcacagggccagattggaaacagatggggccgccgtgccaggcccgcgacaccggagca

SEQ ID NO: 55471 - DNA, 53 bp, Homo sapiens
  chr19:5338797-5338850
  hyper
agctgccgctggtatcgcaggagcagaggagcgggatggcttccttctcccgg

SEQ ID NO: 55472 - DNA, 236 bp, Homo sapiens
  chr19:5338900-5339136
  hyper
cgtcaccctctgcaccccaaggacagcagcgatagggggccacccagaggaggccagaatcccagcagccaaagtccgggtggtggcggacgggagcccggagcgtgtgggtccctgtccttgggaccctaggggtctcttcctgcctcctccggcttctaggtatcatccctgctgctcagccgggactccgacacctcggacacccgcttcactagccgcggctgccgggatgt

SEQ ID NO: 55473 - DNA, 30 bp, Homo sapiens
  chr19:5339365-5339395
  hyper
agggagacgagaagacgatttgagactggg

SEQ ID NO: 55474 - DNA, 30 bp, Homo sapiens
  chr19:5339656-5339686
  hyper
cctcgcacccacggcgcgggcactctaacc

SEQ ID NO: 55475 - DNA, 30 bp, Homo sapiens; identical to SEQ ID NO: 11969
  chr19:5340107-5340137
  hyper

SEQ ID NO: 55476 - DNA, 355 bp, Homo sapiens
  chr19:5340470-5340825
  hyper
gcattgtccgggcgcagctaccggggcgcagcggctgggcgtgcaactggctgcagccgagcatcctccgagcacaatggccgtgcaggcttccccggcacaaagccggcgcgctgcccactcggctgcctccgagaccccccttggagcgcctgcatttttttttcctctaatccatgattttatttttttttttggctttacctggaggctggctgggctgggctcccccggctctgccccgcttcacatcgtggctgttgcatgggatccgagcggagcccgagcgccagcggctcgcggcgtgcgcgcgccggccgggctgccgggcgggcggcgcgaggacactcactgc

SEQ ID NO: 55477 - DNA, 125 bp, Homo sapiens
  chr19:5436795-5436920
  hyper
agccaatggccgcgccgcttgatgaggtaatgcgccccctctgcgtccccattggccagcctggagcccattcccttgtcccctgcaagcagtggagacccagcggggcgcgggcggggtgttcc

SEQ ID NO: 55478 - DNA, 30 bp, Homo sapiens
  chr19:5437138-5437168
  hyper
cgcgcaggtatggagcgcctactgtatgcc

SEQ ID NO: 55479 - DNA, 249 bp, Homo sapiens
  chr19:5536611-5536860
  hyper
agcccggtgcggcgcgagctatttttagcagctgctcctcgggacgcctaatcgctccggccggctcccgccaggctgccatggaaacgctcgcgccaccgccaggagctccctcccggtcccggccggcgctgcccgcccctcagcccggggccaggatgatgcgtgctgccccccgccaggaaggagccctgcctgccttcccagcactgtcactgcacggctgtgcgatcccgggacatctctgcc

SEQ ID NO: 55480 - DNA, 740 bp, Homo sapiens; identical to SEQ ID NO: 11970
  chr19:5608065-5608805
  hyper

SEQ ID NO: 55481 - DNA, 30 bp, Homo sapiens
  chr19:5622351-5622381
  hyper
ggcacagagaggagcggtgacgggccaagg

SEQ ID NO: 55482 - DNA, 30 bp, Homo sapiens
  chr19:5680741-5680771
  hyper
tgtttgcacctggccgcggagcctcctggg

SEQ ID NO: 55483 - DNA, 30 bp, Homo sapiens
  chr19:5681156-5681186
  hyper
ggagggggtgcggtcggggacccggcagga

SEQ ID NO: 55484 - DNA, 30 bp, Homo sapiens
  chr19:5686791-5686821
  hyper
ggagttacctggggcggagctcgctggacc

SEQ ID NO: 55485 - DNA, 30 bp, Homo sapiens; identical to SEQ ID NO: 11971
  chr19:5687363-5687393
  hyper

SEQ ID NO: 55486 - DNA, 104 bp, Homo sapiens
  chr19:5691107-5691211
  hyper
ccagactccaggtgcgtcctgccagtgttgcggagactgggacttagggaggatgggagctgctccgggcgcggcgaaaagcgctaggcgttaataccttggtt

SEQ ID NO: 55487 - DNA, 30 bp, Homo sapiens
  chr19:5720312-5720342
  hyper
gtctccgcctcttccggtctcccactttat

SEQ ID NO: 55488 - DNA, 31 bp, Homo sapiens
  chr19:5804011-5804042
  hyper
acgggggctccaagaacgcaggcggcgcggg

SEQ ID NO: 55489 - DNA, 202 bp, Homo sapiens
  chr19:5804851-5805053
  hyper
tctcccgaaggggagccgtcggagtccccggggccgggggagaaagccgtctaaagggggctctgtggttggttcccgcgcctctgccacctgcgctcctccggtcccctccggcgggggcggggagggcggggagggccggggaaacccgagccaccgcccccagccccgcccccggccccgcccccggccccgcgccggc

SEQ ID NO: 55490 - DNA, 640 bp, Homo sapiens
  chr19:5827785-5828425
  hyper
gatgcgatggagctgcgcgagctgacgccctgggctgggcggcccccaggtccgcgccgtcgggcggggccccggcggcggcgcgcgcgtgcgcggttgggggcgcggccttgcgggctgcgcgagctggaggtgcgcgtgagcgagctgggcctgggctacgcgtccgacgagacggtgctgttccgctactgcgcaggcgcctgcgaggctgccgcgcgcgtctacgacctcgggctgcgacgactgcgccagcggcggcgcctgcggcgggagcgggtgcgcgcgcagccctgctgccgcccgacggcctacgaggacgaggtgtccttcctggacgcgcacagccgctaccacacggtgcacgagctgtcggcgcgcgagtgcgcctgcgtgtgaccctacctcactcggccggcgcggcggccactccccccgcctcgacggcaccactggccggccccgcgaaagactgcgcgtgcgtagagcacgccggcgcggccccgggactctcgcgataactgtactgagataaagtgtggcaactcgagctggctggtgattcatcctcggcgaggggctcgcgtgtgggccacgtcgccgtctccaccgggaaagcggggaccagtggggggggccc

SEQ ID NO: 55491 - DNA, 30 bp, Homo sapiens
  chr19:5905200-5905230
  hyper
gctagactgagtatcggattgataaaaaca

SEQ ID NO: 55492 - DNA, 446 bp, Homo sapiens; identical to SEQ ID NO: 11974
  chr19:5962009-5962455
  hyper

SEQ ID NO: 55493 - DNA, 30 bp, Homo sapiens
  chr19:5977684-5977714
  hyper
gagggagcgtggcgcgctccgggccacaac

SEQ ID NO: 55494 - DNA, 30 bp, Homo sapiens
  chr19:6022505-6022535
  hyper
cctgctacggggtcccggtcggctggtagc

SEQ ID NO: 55495 - DNA, 65 bp, Homo sapiens
  chr19:6109028-6109093
  hyper
gtgtgtgtgagtgtgtgtgtgcgcccgcgagcgcgctggtgggcggtgggggcagggggtggagt

SEQ ID NO: 55496 - DNA, 679 bp, Homo sapiens
  chr19:6110323-6111002
  hyper
ccccccggcccccgaacggggtccccgccgccccccacactccccggccgggctgggcccggggcggtcgcatcggtcacctggagttcgggccgggagttcgggcagcggctcccgcggcggcggcagcggctgctgcgtgttggtccccgttggtaagtaacagtctccacggctacagtctctatggcggcggcggtggcggcggcggccgctcctcctccggctcccgccgccagccagcctcgcgcagcccgcccgcccgacggggcggggcgttgttaccggcaacggttaccaggctccgcgccccaccttcctaacggcccgcccacgctcgcctccaacgggcccccaagagggcggggcgcgagaccctacggcgttccattggctgtctgcagagtctgtcggaaggaggaggcgttcccccttgaaaaagagtgcgagactcggccaatggccgcgaagaggggcgggtcttggcgggaggcgcgcgcggctcagagggttggcgaaccggtcgcgcgcgcggcgccgtgggttggtggcgcgttttgggaaagtccagttttaggggacccaagggactccgtttaccccacaggaggagtgtgggacatgtgggaacagtctgatcaggggtcagcaaactctcgctcgccgcctgtttttcacg

SEQ ID NO: 55497 - DNA, 30 bp, Homo sapiens
  chr19:6199427-6199457
  hyper
acggccatcaagtacgccaacaacatcgcg

SEQ ID NO: 55498 - DNA, 30 bp, Homo sapiens
  chr19:6361440-6361470
  hyper
tccgtccctatccccgcctcacccttaatg

SEQ ID NO: 55499 - DNA, 30 bp, Homo sapiens; identical to SEQ ID NO: 11976
  chr19:6393404-6393434
  hyper

SEQ ID NO: 55500 - DNA, 30 bp, Homo sapiens
  chr19:6424202-6424232
  hyper
tccgagctccggggcgcctgcacacccagg

SEQ ID NO: 55501 - DNA, 31 bp, Homo sapiens
  chr19:6459633-6459664
  hyper
ccgcatggcgcccgcccgggggggaggggag

SEQ ID NO: 55502 - DNA, 201 bp, Homo sapiens
  chr19:6464134-6464335
  hyper
caggtgcgcccacagcgcggccccgcccccttcttgactccgccctctcagcgaggctcaggtgcacaagccggaagtgcgctctcccaggtgagtgactaaactttccgggtcacgtgacagggcggagccggtggggtcggacccacagaacgaccgacggaccgagggttcgagggagggacacggaccaggaacctg

SEQ ID NO: 55503 - DNA, 76 bp, Homo sapiens
  chr19:6464627-6464703
  hyper
cgcaggtgcccctggccggagatgcggtaggaggggcgagcgcgagaagccccttcctcggcgctgccaacccgcc

SEQ ID NO: 55504 - DNA, 30 bp, Homo sapiens
  chr19:6502542-6502572
  hyper
agtgcagtctcccccgtcccagcccccagc

SEQ ID NO: 55505 - DNA, 30 bp, Homo sapiens
  chr19:6516802-6516832
  hyper
ggctggctggggtgcgggagtaggaggtct

SEQ ID NO: 55506 - DNA, 676 bp, Homo sapiens
  chr19:6530737-6531413
  hyper
gcaagagacccacagagataccgggaaagagcggcagagagggagaaccagggcgatggagagacagcagggagaaaggaacctggagccgagcttggaaggccggaaacggaaaggagagcgaaaagcggagagagatccgagtggagaaaattccgcagagtcacggggacgaggggaaaggctctgggctgggaaggggcgtggccgcgggcggaggggcgtggccgcgggcggaggggcgtggcctccttttgtagccaagcagctataaaaagcggcgcgctgtgtcttcccgcagtctctcgtcatggaatacgcctctgacgcttcactggaccccgaagccccgtggcctcccgcgccccgcgctcgcgcctgccgcgtactgccttgggccctggtcgcggggctgctgctgctgctgctgctcgctgccgcctgcgccgtcttcctcgcctgcccctgggccgtgtccggggctcgcgcctcgcccggctccgcggccagcccgagactccgcgagggtcccgagctttcgcccgacgatcccgccggcctcttggacctgcggcaggtgagacgtgccccgaccctcggtagctggtctcgcgggagacccctaccgcccctctgggactcccttctccctcccgcacccccagggacacctgtt

SEQ ID NO: 55507 - DNA, 974 bp, Homo sapiens
  chr19:6590244-6591218
  hyper
tccacctctcatcccacggcgcgcactggtgattttatttcattttatttttttttactcttaagacttcttaaagaggaagcaggtctgaaccagcggggaacgtgaagtcgagaccttcaaaagaacttcttcgtttcccgaatcgttttcctggatgtcactgggcgcgagagcaccgcgcgcagcggactctctacgctgcaaaggcgcccggcgcggtccccaaagggacccctcccccacccggagcgagtggctggggccatcccgtcctaggaggccccaggaagcccccacgcccagccttgtgaagcccccagcagcctctgagtcagcctgccgggggaacaccagagccgagtcatcttccatttccatgtgtgcctacctttcccatcccgggatctccctgtacctcctggcagggctgcctgtctcgtagcccctacaccgggcagcctggtccccgcctcgcctccctgttctggtctctgtctctgccctaccagatcttcctctctggcctctttgtacccatctcattctgtcttttcggtcacgcgcctctctatgttttcttcccaacttttccatctcaactcaccccaagtgactcgagcggcagctgctgctgagcctgtgcgaagcgctggatgcacaccacgaggcagatcaccaagcccgcgaccaatgggaccaaagcagcccgcaggacgcacccatagggcctgcgccgcaccgagcagcccgaaccctcctccggcatcgccgcggcgatcacctccgctagcgcaggaggggcgatgggggcgcggagcgctgccgagaaggaaggaaggaaactgcagccccctcccggggctcctgggcgtctacttgcttcaacctgtcaggggaccagcctgcccctctctggggatgtccggccggtcgaggggagggacttgagcaattggcgaggggaaattccc

SEQ ID NO: 55508 - DNA, 30 bp, Homo sapiens
  chr19:6737142-6737172
  hyper
tccagggtctctagcgccccaaaagtgatt

SEQ ID NO: 55509 - DNA, 30 bp, Homo sapiens
  chr19:6737416-6737446
  hyper
ccgagacaaagttgcgccaccgaccccaga

SEQ ID NO: 55510 - DNA, 238 bp, Homo sapiens
  chr19:6737654-6737892
  hyper
cgcacggcggggcccggcctttcggagtttccagtccgccaaccaatcagcaattgcctctccgcaagcccgcctgcttgcgtcaccgacggacagcaccggttccgaatgggagagccgataacgcttaacccccagctcactctcaccaatcgctataaagattgtccggatgtgatttaatgagcagtttatctaaccaattgtcatggatctgatatccggcccttaaagcgga

SEQ ID NO: 55511 - DNA, 30 bp, Homo sapiens
  chr19:6739509-6739539
  hyper
gcgtcgagtggcaacgttgctttaaaaggg

SEQ ID NO: 55512 - DNA, 30 bp, Homo sapiens
  chr19:6739871-6739901
  hyper
tagagggggctccgcgcctttcccttccac

SEQ ID NO: 55513 - DNA, 179 bp, Homo sapiens; identical to SEQ ID NO: 11981
  chr19:6767995-6768174
  hyper

SEQ ID NO: 55514 - DNA, 31 bp, Homo sapiens; identical to SEQ ID NO: 11982
  chr19:6801936-6801967
  hyper

SEQ ID NO: 55515 - DNA, 30 bp, Homo sapiens
  chr19:7069692-7069722
  hyper
cggaagcggaagcgcgcttgtgtcttgtga

SEQ ID NO: 55516 - DNA, 30 bp, Homo sapiens; identical to SEQ ID NO: 11983
  chr19:7087694-7087724
  hyper

SEQ ID NO: 55517 - DNA, 160 bp, Homo sapiens
  chr19:7098895-7099055
  hyper
actgaagcggcgaaatcggagaaaactgaagccgggcggagaaagccgaactgaacgaactgagccgaggagcggcggagaagccaaggctgggcgaggggagccaaagacgggtggtgggagccgaggtcggccgagaggaaccggaaaagccaaggcc

SEQ ID NO: 55518 - DNA, 229 bp, Homo sapiens
  chr19:7197274-7197503
  hyper
cagagtaccagagggccttcccgcttcgggagccgcaggcttcttctcttcggagagagagtgagtgagtgagtaagcgagtgagtgagtgagtggggagggagtgagtccgtccacgggggcgggccctctccatgctgcggatctcttaggagatatactgcgcacgcagaggcccggaaggaggcggggtcccaggggtctcctcgctagagcagccccaggattg

SEQ ID NO: 55519 - DNA, 1563 bp, Homo sapiens
  chr19:7293558-7295121
  hyper
ccggggcaaggttcctcgggctcaggtcgggcacgcagggcgcggaggcgcgagcccgggcgggcaaaggccaaggtcagaggcttcccgctccccctacgcgatgcaggagctaccgtcctggccaccgccccccgcccctggggagggttctcagtccacaagcgggggctcgattttggcttgggtggggtcctctccccatcgcggcgctccccgcccacgcccgcgcccccagactcaccctctccggggtacaggtggcccgcggcgcccagtagcagcgcggccaccgccaccagcagcggcgcggccgccgccccccgccggcccccggtggccatggctgcgggagcgcggggtctcctcggatcagagcgcgcggcgctggcccgcgggggtcatgctccgaggcggccacccaagaggcgctgggggccgcgcgtccttctcttccacgcccgcgacccgcgggccgcagcccccctgccggggagggcccagaggcagccccgggaagggcgcgcgcggcttcgccagctacaaatactgagcggaggcccttgcggtggtggccccgaccccccggccgctgcggcccgggccccgtcccaggatctcggggcccggagctccgcgctgcgcccgggactgtctctcggctctcggccccgcgcgctctgggtcgcgatctgcgggctccgggacagagggacgcgcggaccgacggactagctgactggcgggcgggcacctgggctggcgggtggcgggcgggcggcgggagagagggctgctcgggcccgtaaacaacgcggcccgtcagctgggccccgtgcgggccgcgggaaaaggcggcgcggatctggcctaggaagggactctgcgcccgggagaggcccaggagagggagggaaagcttgcaggggagggaggtgccgcccggccccgccccgccccgcccgcctccccgcctccctgtgccgggccccgcgcgggaggccctgggcgcgccgggaccgagggcgcgccccagatccgcgcgccctacagccccgagtctcctccagtttcagacccccggaggcgccccacaggcccgacgcagcggcacagatcctttctctaccattttgctattttgttcatagtgggctttggaggattcctgttgattttttaaaaaatactgcattaaaatgtttattttggtgactcgaggtggttttggtttctttctttttttttttttttcactcccttaaattttgcaccccaggcgagtagtgtctcactcgcctttcctcagtccgggcctggccagcgacactcgtcccagagcgcgtgggcgcccccagatgtcccgcccgcgagtgcgccccggcccaggggcgagacccaagccaggcccctggggacagccacgtgcccgcgtgcccagtgcgctccctgtgttcaagttggagaaatgacacctggaaaaatgtgcagacgcttctgaaagggcaaagacgacgccaaagaagacgccggagacctcgaatagggcgcaggtggacatct

SEQ ID NO: 55520 - DNA, 876 bp, Homo sapiens
  chr19:7459680-7460556
  hyper
tctccctctggatccccgcaacccagctgtcccctcagagcccccggccctactgacagccaggctcgcattgctctccttcaaaaagccccccaaccccgctgacccgcccctcaaaagtcgccctcaccctcgccgcgagcaccctcccacttcggtgcccgcgcccctctcaaggccgagccgacgccccctcaccacggctcggggagcagcagccccaggtccccgggagcgccccgccctcgagggcacgcctccttccgggtcacgccctctgccccgcctccgaggcgggatcgcgcatgcgctgctctcctcgcgcggcttcccgcttccggctcccagctgctagctactgtggatctgggggggccggacggaggcatcggaggcggctgcgagagtggcagaggagctggcggagagcggcctgcgggcgatcgggccgaggtgaggacggcggcggggcggtcccgaggaaaacggggctcaggagggggccctcggtctcttcagggggtggcctggggcgcgggacccccggggctgcctcgggcctcccgccggctcctgggggacttctccaggcaggcgaacgggtgctggggtgcaggctgctccttcaatgcatggaggctctaggcggcgattgcagggtgcagaggtgcagacgatgcccgcccgctccgtccgagccccagccagtcctggggtgctacggcttactctcctccaggagaggagaggaggggtcacttgggccccagcctctgctcctcgttcaggagcgcccggggcaggaccagggatggaatggaacccaccacaatacccagcaccgtcgtatttcaggcctcccgggagaaccctcac

SEQ ID NO: 55521 - DNA, 31 bp, Homo sapiens
  chr19:7553841-7553872
  hyper
ggtcccggcccctgtacgactccagcgccga

SEQ ID NO: 55522 - DNA, 542 bp, Homo sapiens
  chr19:7565791-7566333
  hyper
ggggcctgacctgcggctgcacgagggcaccatgcgcaccacgtcgcaccgggactttgcctacccggctgccacccgggagccgccgagcctgcagccgccgcccgcgctgcttttcccaatggacccgcgctgggaccgggaagagcgcgtgtcggaggcgcaccgcgcgttcccgccgccatccacgccgccgtgggagctgctgcaagcgcaggcgcgggaacgcacgctcgccatgcaggccggcaacctgcacctgcacgaggacgcgcacgccgggatcggcctctccaacgcgcacgccgcctacggctggcccgagctgccggcgcgcacccgagagcggatccgcggcgcgcgcctcatcttcgaccgcgactccctgcctcctggcgaccgcgacaagttgcgcatcccgcccaccacgcaccaggcgctctttccaccccacgacgcgcgcccgcagcctcgcgcgcccagttgccacctcggtgagcgcgcgcccgggctgagtgggcgatttgcttcacattgtggtt

SEQ ID NO: 55523 - DNA, 61 bp, Homo sapiens
  chr19:7580808-7580869
  hyper
gatggggccagggctgcgtgcgggcggggcacggtgcagacaaaggcgcggccgcgcggtc

SEQ ID NO: 55524 - DNA, 30 bp, Homo sapiens; identical to SEQ ID NO: 11990
  chr19:7581399-7581429
  hyper

SEQ ID NO: 55525 - DNA, 30 bp, Homo sapiens
  chr19:7587274-7587304
  hyper
attcggggcatggccgggagccagggcaga

SEQ ID NO: 55526 - DNA, 31 bp, Homo sapiens; identical to SEQ ID NO: 11991
  chr19:7588102-7588133
  hyper

SEQ ID NO: 55527 - DNA, 30 bp, Homo sapiens
  chr19:7598772-7598802
  hyper
gatcggctccctgtcgcgcccgaggagggc

SEQ ID NO: 55528 - DNA, 30 bp, Homo sapiens
  chr19:7599158-7599188
  hyper
gtcccttcgagggtcgttagcgagcctccg

SEQ ID NO: 55529 - DNA, 30 bp, Homo sapiens
  chr19:7600123-7600153
  hyper
gttggacaggcgggcgtctggtaggcccta

SEQ ID NO: 55530 - DNA, 63 bp, Homo sapiens
  chr19:7615962-7616025
  hyper
cttgggtcacatcaaacgccggtacccgcaggtgcggcctgttgtgggcggggcagagaggcg

SEQ ID NO: 55531 - DNA, 130 bp, Homo sapiens; identical to SEQ ID NO: 11992
  chr19:7660555-7660685
  hyper

SEQ ID NO: 55532 - DNA, 278 bp, Homo sapiens
  chr19:7660714-7660992
  hyper
cgggcccgacgcagcgtcgccagcgcaagcggccgcacctggctcagcagcggcggcggcggcggcggcggcagcggcggtagcagcagcgggcccggctggggcgcgagcgcggcgcagcccagcccagcccagtccgagcgcggacccggcgcccgcagccccggcgccgccatggtggaggcggcgccccccgggcccgggccgctgcggaggacctttctagtgcccgagatcaagtcgctggaccagtacgatttctcgcgggccaaggcggc

SEQ ID NO: 55533 - DNA, 173 bp, Homo sapiens
  chr19:7661304-7661477
  hyper
ctccaggtgagccgggcggggtctgcgggccgggtggggtctccccgtgcggacctctcgttcccgcctcccgcacccccaaggccttcccttgcacgccttcttctcttttacacacatcacgcccctgcgaggatctcctctcggtctcttcccccgccacacaccctgga

SEQ ID NO: 55534 - DNA, 1167 bp, Homo sapiens; identical to SEQ ID NO: 11994
  chr19:7676863-7678030
  hyper

SEQ ID NO: 55535 - DNA, 30 bp, Homo sapiens; identical to SEQ ID NO: 11995
  chr19:7701787-7701817
  hyper

SEQ ID NO: 55536 - DNA, 30 bp, Homo sapiens
  chr19:7745711-7745741
  hyper
gccttttacggcgccgtaaagcagctcggc

SEQ ID NO: 55537 - DNA, 30 bp, Homo sapiens
  chr19:7746397-7746427
  hyper
acccaggcccatccgcgtctcaaaggacga

SEQ ID NO: 55538 - DNA, 170 bp, Homo sapiens
  chr19:7746641-7746811
  hyper
tgctggagcgcagggcggggcaggagcgactgcccatatcccctcgtggtgcctcatctttgtcacctccctgccctagatctgacgcccctccccccatacactagttttctagttactcctgtaggtggcggagcgggcaggaaggcgctttcgcaattgaaccgtct

SEQ ID NO: 55539 - DNA, 31 bp, Homo sapiens; identical to SEQ ID NO: 11996
  chr19:7762517-7762548
  hyper

SEQ ID NO: 55540 - DNA, 372 bp, Homo sapiens
  chr19:7794835-7795207
  hyper
gacatctgagcctgcagagtccgccccgccctgccccaccgcctgaccacgccccctccccctgcgcacctgctcatccaggcccccaacgatcaccaggtgcgcgctggcatctgcgcagtgatcctgcgccgccgcccacgtcgtctttggcacagagaaaaagtagcaggagccctcgaaggacagccacgacgtggggcacggctcgcaggagtctgcggggtggcgagggtcagagaggtcgcgtgcttccaggggcaacgcaccgagaggatgcagtgggtaggggttcggccccgcgggctcaggggtggagacacagaaccaggccaaggtccaggagtgacagggtccgcttacgccctcaca

SEQ ID NO: 55541 - DNA, 30 bp, Homo sapiens; identical to SEQ ID NO: 11997
  chr19:7795604-7795634
  hyper

SEQ ID NO: 55542 - DNA, 30 bp, Homo sapiens
  chr19:7853099-7853129
  hyper
gcctgcctgcccgcccgctctgtggtcccg

SEQ ID NO: 55543 - DNA, 56 bp, Homo sapiens
  chr19:7853414-7853470
  hyper
acccggcgggcatgcgttttgggatgggggtcgttccagcctcgaagcagacggcg

SEQ ID NO: 55544 - DNA, 16 bp, Homo sapiens
  chr19:7853543-7853559
  hyper
cgcaagggtggggtct

SEQ ID NO: 55545 - DNA, 802 bp, Homo sapiens
  chr19:7933744-7934546
  hyper
gctgtgggtaggtcccgagcctccgaggccaaaggctcaggctctagggagctaagactaatccacccagcggggctccagggcagtggaggcggggtctaaaacaaacggcgtacccggaggggcggatcctaaggcaggggtggggtgtagcaggcggggctgtggtctggctcagtggaaggtctccacctccaccacggtccagtcaccctgcggggaggccacgtcgtccggagagaagctggtgaccgaggtgatgctggcacgggactcgtccaggggagacagtagttcggcccagcggccgagttcggcgtcgctgagtgcagcccgggcgccccctgtgacgccaccaccctccgcacctcctgggcccccgccgctgccgcccgcggcaccctcggcagccgccagcagcagcgtccggctcagcaggtgctgcacgacgctcgcctgcagcgcccccagtggcagctcgcccaggcgcgcctgcttcgggctccgcgaggacgccccggccccggccccagccgccgccttcccaccgctcgtgccgggactgggccccggatccagtgcgccaggggcgggggtcgccgactcgggcccttcagtctcgtagatggtgcacagaccgtcagcagagcccggtccggtagcgggaggccacggcaggggcgcacctgcggggagagacgccaggtgggccgtgggggtgataagccccgcccctgcctcaaggtcccgcctccttgtctaagctccgccccggacccagctgtcccgcccctgagctgcg

SEQ ID NO: 55546 - DNA, 30 bp, Homo sapiens; identical to SEQ ID NO: 11999
  chr19:7939452-7939482
  hyper

SEQ ID NO: 55547 - DNA, 41 bp, Homo sapiens
  chr19:7953414-7953455
  hyper
aactctgcgggagtcgcggcagctccgctcccagagaccca

SEQ ID NO: 55548 - DNA, 30 bp, Homo sapiens
  chr19:7968822-7968852
  hyper
ggggaagatggcggcgtcctccctggaaca

SEQ ID NO: 55549 - DNA, 81 bp, Homo sapiens
  chr19:7990125-7990206
  hyper
cggccctctgagaccccggcgcagggccggctagggggcgccgcgcccctcacaccaacgcgtagtcgaactgcccgcgct

SEQ ID NO: 55550 - DNA, 268 bp, Homo sapiens
  chr19:7990893-7991161
  hyper
gctctctcagggacccgcgccggctgcgcgttcggcctctccccggcggcggcggcggcggcccgggctccggctcagcccaccccacccgcccctggagcggcggagaccgaggcaggcaagcagcgcgcgagccgggccgccgcggctgttcctatggcgacgggggcggggccgccgcggggggcggggctgcagggggcggaggctgcgcagggagcggcgcgcgagccagcgaccccgcccgggcctgcgggaggacggaacc

SEQ ID NO: 55551 - DNA, 94 bp, Homo sapiens
  chr19:8067308-8067402
  hyper
gcccaggacacagcagcggagcagggagagtcgttcagaggagggagcgagcctcacttccctcccacaggctggcttccgttggtcttcccct

SEQ ID NO: 55552 - DNA, 454 bp, Homo sapiens
  chr19:8115154-8115608
  hyper
cttcctccccgtgaaggctgccggcgggacaaacagtgaggggtgaggcagggagggagactcacgttggggacctcccccaagtctgggtaacaccgtcttggccgcggcccgcgggttgggaaggtagggggcagtgagccgtagcggagaggctggccccagcccgccacgccgcttccccacgctcgcagccacgcggagccgcgtcctggtccagcctcacccacccagagcaagaggcggaggaactggaacagcgccccggcccgtgggctgccactggccgcagcaacgggacgggtgagagcacctgcccccgacgcgtcttaactgctctggtggggcggggctgaccgtgcaagccccgccccagtctaagcccctcctacaaagcccggccccttaccataagcgccatctgtcaggctccgcccactgtcttaaatcccac

SEQ ID NO: 55553 - DNA, 30 bp, Homo sapiens
  chr19:8206937-8206967
  hyper
gtgccttggtgcacacgaggcccgtcagct

SEQ ID NO: 55554 - DNA, 30 bp, Homo sapiens
  chr19:8213597-8213627
  hyper
tgtggtcttggccacgcccctctctgggcc

SEQ ID NO: 55555 - DNA, 31 bp, Homo sapiens
  chr19:8213983-8214014
  hyper
gagggataccaagcttcgccgacggggaggg

SEQ ID NO: 55556 - DNA, 49 bp, Homo sapiens; identical to SEQ ID NO: 12004
  chr19:8273922-8273971
  hyper

SEQ ID NO: 55557 - DNA, 534 bp, Homo sapiens
  chr19:8274334-8274868
  hyper
ccccgccgccggccctcggtgcgcccggccgcctgcacccccaggtaagcgagcaccccgcgccgcgaacaccgccccgaacgccaccctcacggcggtccccggccccgcctccgcggccatggcggccccagcccggcccccactcgcagctgggctccagcccccatcaccccgccggggactgtccccctcggggcttcccatcatggccgtctccccgagctatccgcgctcccccacgagggccggggcgcaacgggtgcccgaggacgcggctgtgaaacgggctggagcgagtaggggcgatcctggcctcgtgacgcgggggaatccggatgtgtgagccgggggagcgccccgtttccccgacgtgccagggctggggacgcagctggggccctggcctcggagtccgcagcccggccgcgtagacggcttctgagaaccgcttaaacacgtcattccaagcccgagctaacccatcaggcggccggggtgaggtggaggtgcccaggcggggataatgtcatt

SEQ ID NO: 55558 - DNA, 724 bp, Homo sapiens
  chr19:8372856-8373580
  hyper
ggggtcttcctagcaccagtgcgcgccttcccacaagcgatgaagtccaagtccacgtgctgggggagtgtcatgaactgacgtgcggtgcagccagtgactaggcgttgtcggtgcgcggcggcggggcgaagcctcgcgaggggtgggagcccgcgctgcggggcgtcactcacctgcggcctgggcagaggtcggggtggaaagcgggctcgcggcggcctccaggcctagtccgaggccgagcagcagcagcagcgccaggcccagagcccctgttcgccacgctccaacctgcgccatccaaccgccgctcatgctgtccccacagcggcgccggccacgcgctgtccagaccgctctcttatccctgcgcacgcgcacgcgcggggttggggcggggcccaagcccctgagttctgcggcgcccgcggctacgcgtaccgtaaatgtcagaatagcagggaaaagagaattagaggcccgtccccactttccccagtgaccagatcagttgaaaggtatggagcccgcttgaagttagaaacttctggggatgggaaggaatttgttggtgttcatttgcattatttcccgttccaaatgaggactgctgcaaatgttactgcctcgtgatcttctttaatatggcagccacgcccctcaggcactccgcatttcctccctcatcccactgcttttgtggcgccgacaggtaatttat

SEQ ID NO: 55559 - DNA, 30 bp, Homo sapiens; identical to SEQ ID NO: 12007
  chr19:8429145-8429175
  hyper

SEQ ID NO: 55560 - DNA, 30 bp, Homo sapiens
  chr19:8432401-8432431
  hyper
gaggggccggaaagcgtcttcctggtcact

SEQ ID NO: 55561 - DNA, 30 bp, Homo sapiens
  chr19:8478154-8478184
  hyper
gtccgcggcgctgtcggctcggcgggcggt

SEQ ID NO: 55562 - DNA, 228 bp, Homo sapiens
  chr19:8579004-8579232
  hyper
tgcgagttcgcgctcacgtcagcgccattttccacctctcagctctcgcgagactgggggcggggcctgcgcagggcgctcggagagggggcggggcctgagggcagagtcaccctggagctcaggtcggacgctggtgcaatcttgctatctatccccgggcagtcagcgcgcacttcagcagactccgtgcacggagatccgggatgacctcgctgtcctagtctt

SEQ ID NO: 55563 - DNA, 30 bp, Homo sapiens; identical to SEQ ID NO: 12008
  chr19:8942731-8942761
  hyper

SEQ ID NO: 55564 - DNA, 31 bp, Homo sapiens; identical to SEQ ID NO: 12009
  chr19:9267730-9267761
  hyper

SEQ ID NO: 55565 - DNA, 192 bp, Homo sapiens
  chr19:9420479-9420671
  hyper
ggcgtagggtgacaaggctgtcgactcgcgcatgcgcagaagcacacttctgattcctctttcggcgctgcaaatggcgtatggggcggggcctgggaagcgggacttgaggtgaagggggtggagcaggtaggagcgggatgcaaaggagcgccaaggctggttccagccgcaagtggatgagaaatccta

SEQ ID NO: 55566 - DNA, 231 bp, Homo sapiens
  chr19:9434745-9434976
  hyper
cagctctgggttggaaaaagccgcagcagctgatgggcccgggaacccgaggccccgccccctaggtggtcctagcctttgcgcgtgcgcggcgtgtctgcgtgggcgcatgcgcataacggccgccatcttaacagcgcgttcccgttggcgtctgaggtaagtttttgtttctgggcggcgttcggtggtgtcccggtgcagccacgcgagagtagaagggtggaaagg

SEQ ID NO: 55567 - DNA, 70 bp, Homo sapiens
  chr19:9473938-9474008
  hyper
ccattccgggcattggttcccgggaggaggcaagtgggttcatgtggtcagagtgcgtcggcggggcctt

SEQ ID NO: 55568 - DNA, 127 bp, Homo sapiens
  chr19:9517879-9518006
  hyper
cgactttccaaagctagtagagagatcccagcgtcccccgggaaaggcagaaggggcggggcgataccaagacggagacaatggggcggggcgatgccctggaggcgggattgcctgtgggagagcc

SEQ ID NO: 55569 - DNA, 447 bp, Homo sapiens
  chr19:9545894-9546341
  hyper
ttgctttggaagagtttgaagcggcaatcaccgtgtttgcaaaaatcgtgaggaagcgcccttacgacagatcccgaaacggctcctggcccagggccgtcgcagtgacaactcgagtggctttttgaacctggcggcgccaggaggacccgcgcggccccggcggacgcgagcggagcaggcaaggtctctctaaggaggcccctcggcggcctggggcaaaccggtactttcgccaccccttccaccgctggctcccacccgtcatccgacctcgccaaagctgtattaagcccaaacgccaccaggaagaaaacgggtttggcggcgcggagaaagcgccggaaaacacagcagcgctccgtgacgtcacttccgcctccagcctcaaacctggaggagcgctcgggaactgcaacctcagccgagctgaacaacctcaggcag

SEQ ID NO: 55570 - DNA, 117 bp, Homo sapiens
  chr19:9609320-9609437
  hyper
ggcattggaaggggcgtggctcgttgtgtgggcagttggacaggatggaactcttcaggattctagtttccctccgcgtgggtgcggaggtatcaaggggtcggctcagtgcctggg

SEQ ID NO: 55571 - DNA, 578 bp, Homo sapiens
  chr19:9648913-9649491
  hyper
caactttcacccagtgctcaccggaacactcagaaatcgccaggtccctgaaccgggaagatcctggggacggagccaacgcggatgcaaaaggcagcaattattttcctgccggaaaaaaattcacaaacgctgctttggaggcctttggagaggggcgcacagatgaaaacaccctgcggacaccgtaactataaacccgactcctcccgaggagcgacggtccgagcggacgctagcgggcccagcagacacgagcagagcgggccaggcctctctaacgtccgggccaaacccgtccttcaccccaaaaccagttcatctcctcggaactcacccaggccagtgaggccttaactctgaaaggcaaaaagactctcaggcgctcacagccggcgtcacaaaaggaacggcgcaccgctgacgtcatttacgctctccgcctcgggccaggcggggtttcgggactagggtttctgccgtgtaatacctcctcgaggcagaaaaattctactttccatctgcttggctgcggaggaccttggggtgggctcagcgtgggggctgcaggcagaaat

SEQ ID NO: 55572 - DNA, 30 bp, Homo sapiens
  chr19:9731906-9731936
  hyper
agatggcggtggtgcgctgacgtcacttcc

SEQ ID NO: 55573 - DNA, 31 bp, Homo sapiens; identical to SEQ ID NO: 12012
  chr19:9879693-9879724
  hyper

SEQ ID NO: 55574 - DNA, 31 bp, Homo sapiens
  chr19:9896567-9896598
  hyper
cccgtctgcctccctccgggtggctaagccg

SEQ ID NO: 55575 - DNA, 30 bp, Homo sapiens
  chr19:9903762-9903792
  hyper
ggagggtcggcggccgcgtcctccacgacc

SEQ ID NO: 55576 - DNA, 30 bp, Homo sapiens; identical to SEQ ID NO: 12013
  chr19:9942246-9942276
  hyper

SEQ ID NO: 55577 - DNA, 41 bp, Homo sapiens; identical to SEQ ID NO: 12014
  chr19:10024727-10024768
  hyper

SEQ ID NO: 55578 - DNA, 30 bp, Homo sapiens; identical to SEQ ID NO: 12015
  chr19:10047405-10047435
  hyper

SEQ ID NO: 55579 - DNA, 31 bp, Homo sapiens
  chr19:10120919-10120950
  hyper
tagagcctctctgagtcgtggaccctgggtc

SEQ ID NO: 55580 - DNA, 30 bp, Homo sapiens
  chr19:10121157-10121187
  hyper
cctctcagggtccgcgggaaactgcccgag

SEQ ID NO: 55581 - DNA, 30 bp, Homo sapiens
  chr19:10197175-10197205
  hyper
gcggccgggaggcgcggagggggcttcgca

SEQ ID NO: 55582 - DNA, 374 bp, Homo sapiens
  chr19:10197445-10197819
  hyper
tttttccaggaaatgccgtaaagggatgaaaggcggggggggggcggcggaggccaaaaccaagggtcaagttcgggccgggagaacggtgcctagagatgggggagggatgatcccgtttccccttcccccaccggaacccccctgtctccatcccagctggagaagagcgtccggcgcctccgggagaagtttcatgggaaggtatcctccaagaaggcgggggctctgatgaggaaattcggcagcgaccacacgggagtggggcgctccatcgtgtacggtgaggctgcaggggtcccgggcctggtgcggggaccgcgcgtgggagcgccgagggggcgtggtctagggagaggcgttgagatcacctc

SEQ ID NO: 55583 - DNA, 187 bp, Homo sapiens
  chr19:10207019-10207206
  hyper
cctcgtggcggccgacgcgcatgcgcagcgccgccagctcgctggcgttggcggcctcgggcgtcgcccgcgtggatgcggggccgctccagcacacagcgcccgtgaacttctgcgggggcagcacgaaggtgtaggtgcagcgcggggcgcccgcccgcgcccacgacgcgcccagcaggagcag

SEQ ID NO: 55584 - DNA, 30 bp, Homo sapiens
  chr19:10216860-10216890
  hyper
gcgtagccccgccccggtctccctagaaac

SEQ ID NO: 55585 - DNA, 260 bp, Homo sapiens
  chr19:10252655-10252915
  hyper
ggccaactttgaccccgaagccttccctctagcaagcaggggcaccacctcgaggaagtagaagcggttggggccgcccatggagtacacctggacgcactcgggcaggtcctccccatactccacggtgcagcggccctgcacagccttgaagtccaccacggcctcctcgtcgctccagtagagcaggttgatgtctgcgtggtagctcgctggagtggacttgtgggtgttctcaggcctgcgagcgggagaggcct

SEQ ID NO: 55586 - DNA, 211 bp, Homo sapiens
  chr19:10253328-10253539
  hyper
ccccagttatggaaccgcagggtaaagacctccccagttagggagtcatagggtaaagacccccctacttagggaaccgcaggtaaagataacccctccccaaatgagggaactgcaaggtagattcgcccccaattagggaaccacagggtagagaccccccaaccattaggtcagcttggctgcttgctctgcacgcctggccctgccc

SEQ ID NO: 55587 - DNA, 51 bp, Homo sapiens; identical to SEQ ID NO: 12018
  chr19:10340886-10340937
  hyper

SEQ ID NO: 55588 - DNA, 196 bp, Homo sapiens
  chr19:10346994-10347190
  hyper
aaggctgcagacatatgtggccgtctgccaggggaaccgtggctcccagacaaaggtgatgtccccggggacacacagacacaccgacatgcaacttccgcctccctcccacttctgaggcaacacaatgtcttcgccaggtcagccaagggagcgctacagaggactggaaaacgctggaggcctggacttcctg

SEQ ID NO: 55589 - DNA, 111 bp, Homo sapiens
  chr19:10362530-10362641
  hyper
tgcccacttatgggcgggggtcactccttcaggcttaacagtcattggctgaattgggccagagaggtctcattggctgaattcctgcaccggctcgtcggaggcgggacc

SEQ ID NO: 55590 - DNA, 38 bp, Homo sapiens
  chr19:10363216-10363254
  hyper
atcgctccaggtctcccggagcccgtgctgcgcaaagt

SEQ ID NO: 55591 - DNA, 30 bp, Homo sapiens
  chr19:10380795-10380825
  hyper
catgagcctgggttcgagttgccggagcct

SEQ ID NO: 55592 - DNA, 383 bp, Homo sapiens
  chr19:10381048-10381431
  hyper
tgtaaagacgcctccgcggccaaggccgaaaggggaagcgaggaggccgccggggtgagtgccctcgggtgtagagagaggacgccgatttccccggacgtggtgagaccgcgcttcgtcactcccacggttagcggtcgccgggaggtgcctggctctgctctggccgcttctcgagaaatgcccgtgtcagctaggtgtggacgtgacctagggggaggggcatccctcagtggagggagcccggggaggattcctgggcccccacccaggcagggggctcatccactcgattaaagaggcctgcgtaagctggagagggaggacttgagttcggaccccctcgcagcctggagtctcagtttaccgctttgtgaaatgga

SEQ ID NO: 55593 - DNA, 30 bp, Homo sapiens; identical to SEQ ID NO: 12020
  chr19:10382033-10382063
  hyper

SEQ ID NO: 55594 - DNA, 397 bp, Homo sapiens
  chr19:10397595-10397992
  hyper
ggtggagtcgaggaggcggggctgcgggcctccttatctctagagccggccctggctctctggcgcggggccccttagtccgggctttttgccatggggtctctgttccctctgtcgctgctgttttttttggcggccgcctacccgggagttgggagcgcgctgggacgccggactaagcgggcgcaaagccccaagggtagccctctcgcgccctccgggacctcagtgcccttctgggtgcgcatgagcccggagttcgtggctgtgcagccggggaagtcagtgcagctcaattgcagcaacagctgtccccagccgcagaattccagcctccgcaccccgctgcggcaaggcaagacgctcagagggccgggttgggtgtcttaccagctgc

SEQ ID NO: 55595 - DNA, 378 bp, Homo sapiens
  chr19:10398074-10398452
  hyper
cgcctacagtgagggacaggggctcggtcccggctggggtgaggggagggggctggaagaggtgggggaagggtagttgacagtcgctctatagggagcgcccgcggacctcactcagaggctcccccttgccttagaaccgccccacagcgtgattttggagcctccggtcttaaagggcaggaaatacactttgcgctgccacgtgacgcaggtgttcccggtgggctacttggtggtgaccctgaggcatggaagccgggtcatctattccgaaagcctggagcgcttcaccggcctggatctggccaacgtgaccttgacctacgagtttgctgctggaccccgcgacttctggcagcccgtgatctgccacgc

SEQ ID NO: 55596 - DNA, 275 bp, Homo sapiens
  chr19:10399790-10400065
  hyper
cccagccagatgagcgcatggagttgggggtggggggtgtcaaagcttggggcccggaagcggagtcaaaagcatcaccctcggtcccttgttctcgcgtggatgtcagggcccccacccaccgagcagaaggcggactcaggggcgctccagggtggctcgagctcacacacgctgagtagacacgtgcccgctgcaccctgggtaaatacagacccggagccgagcggattctaatttagacgcccgcgaacgctgcgcgcacgcacacgtgt

SEQ ID NO: 55597 - DNA, 651 bp, Homo sapiens
  chr19:10400293-10400944
  hyper
gtgggggcggggctcggagtccagcttattatcatggcatctcagccagggctggggtaggggtttgggaagggcaacccagcatcccccgatcccagagtcgcggccggggatgacgcgagagagcgtggtcgcccccagaaggccctgggccatcatgccggcctccacgtagaccccaggggtcgctcactcctgccagctcgccttcaccaaggccaggagcttagcgcacgctcgcctcccgcccccccgccgcctctgccgccgccccctccttggaaaccaagttaccaacgttaaaccaatccccaagcgcaactctgcctcccccacaccccacccgccgcgccgcgcggagccgtcctctagcccagctcctcggctcgcgctctcctcgcctcctgtgctttccccgccgcggcgatgccagggccttcgccagggctgcgccgggcgctactcggcctctgggctgctctgggcctggggctcttcggcctctcaggtaagagccccgctctggttcggggtggacagggcgggggcggagtccctggacctgagaaacggcctcctgtccctcccagctctgccctcgcctcgctcccacgcctctgcccccacctcgagcctgagtcttctcccctt

SEQ ID NO: 55598 - DNA, 916 bp, Homo sapiens
  chr19:10401308-10402224
  hyper
tccttgacccagcctcgtctctcctttgcccttgccgcaaacgcactctcctcgtatcccggcattctgccaggaccctgagaactggttcatcccccatcccccatcccgggtccccttctctcagccttgctgtgttcatccaagaacccacctttcctctcctctacgccctccccccatgctttcccgccgctccatcggcgctttggagaccatggctctctgctaccacgtcccagagacaccctcgaggtttagactctgggagtgcgcctttaaaccggaggcctgggcaggacgcgggacgcctgggttctttccctggctgcagcctctcctcctcctccccgccctctgagaacccttgactcgacataggggcgctaagatgtcagggagttggctccccaggctcagcccgcgtttccctgggcagcggtctcgcaggagcccttctgggcggacctgcagcctcgcgtggcgttcgtggagcgcgggggctcgctgtggctgaattgcagcaccaactgccctcggccggagcgcggtggcctggagacctcgctgcgccgaaacgggacccagaggggtttgcgttggttggcgcggcagctggtggacattcgcgagccggagactcagcccgtctgcttcttccgctgcgcgcggcgcacactacaggcgcgtgggctcattcgcactttccgtgagttctgggtggccacgcgcgtactccactactctccctccctcccaggccccgccccctgggtcccagggtcctccccttcaggccccaccttctgttccaagtcccggtgttcaaagagctgcggactcttcccccttgcagagcgaccagatcgcgtagagctgatgccgctgcctccctggcagccggtgggcgagaact

SEQ ID NO: 55599 - DNA, 541 bp, Homo sapiens
  chr19:10402552-10403093
  hyper
gatacatctgaatgctgaccccgacttcaaccctcgccggctgagctgtttccccctccgtgccttgaggatgataatacgataagatagtgcatgtcaagtgcttaggacatattgagcgctcggagttagttcaaacttggttcttcgacccctagccctgtctccggatgccccgcgcctcgctgctccccggctcttggaagttggctcggaaaggcccgtgagctgcactctggacggactgtttccagcctcagaggccagggtctacctcgcactgggggaccagaatctgagtcctgatgtcaccctcgaaggggacgcattcgtggccactgccacagccacagctagcgcagagcaggagggtgccaggcagctggtctgcaacgtcaccctggggggcgaaaaccgggagacccgggagaacgtgaccatctacagtaaggaaggaggcggggtctccgcggctccgaggtgggaccagaggaatgcgaaggcggggcgaagagtgggcgggacctcagtaccggaacag

SEQ ID NO: 55600 - DNA, 157 bp, Homo sapiens; identical to SEQ ID NO: 12025
  chr19:10406002-10406159
  hyper

SEQ ID NO: 55601 - DNA, 140 bp, Homo sapiens; identical to SEQ ID NO: 12026
  chr19:10406278-10406418
  hyper

SEQ ID NO: 55602 - DNA, 5 bp, Homo sapiens
  chr19:10407024-10407029
  hyper
atggg

SEQ ID NO: 55603 - DNA, 10 bp, Homo sapiens
  chr19:10407044-10407054
  hyper
cggcgggggg

SEQ ID NO: 55604 - DNA, 31 bp, Homo sapiens; identical to SEQ ID NO: 12027
  chr19:10426144-10426175
  hyper

SEQ ID NO: 55605 - DNA, 30 bp, Homo sapiens
  chr19:10443674-10443704
  hyper
ggaccaaagctgtccgcccccttccattcc

SEQ ID NO: 55606 - DNA, 30 bp, Homo sapiens; identical to SEQ ID NO: 12028
  chr19:10491445-10491475
  hyper

SEQ ID NO: 55607 - DNA, 56 bp, Homo sapiens
  chr19:10529635-10529691
  hyper
gctgatgggggggccggtttttgctcggcgttcgcccacgccgggagccccctctg

SEQ ID NO: 55608 - DNA, 1628 bp, Homo sapiens
  chr19:10529970-10531598
  hyper
ttgagggggatgggggcgcactcggatcccgctcgctctctgcttgctcgctcggcgcggcgctgggggaggcgggagcgtgagtcacggcgactcccgatttaggtgccggaaggggggctctgctggcgggggccgcagggaggaggctcgcctgtttactcgcctgaaaagggcacgggggtgcgctccgcggctacctgggaccttcctcagtttacctctggcagaagcgctttagaagaggcagcgatgtatagagcggtgggccggcagctgcggtatccgccacagggtgtcttcctggagccacaagggaaccaatgggacacaccccagaaacaccccagaggccccaggccgaccacacacatacactcacgcacacgcacacactaacatacatagacgtcctccgacactacagtcagacgacagaggccgaatcgcgtgcacaactccgcaagcacacaccgaccacaaacgcatccaagcgcttgagaacacattcacagtccccaggccacctgaaaaaagaccacgtagggatgcacatcctccaaataggtagcacatgtgcgcacacatccttcacccacagacacacacagttatacacacagccaaatccagagaaacgggcagacaacagcagccaaccacgtgcgcacacacacttccagccgacactgaaaacacagacaaccctcggaagaggccacgtgcgcgcacatcccgccccgggcccgcaccatcactatcctccgacgcacagacaggagatcccacacactctgccgccgcccgctgcaggtaccgcgccggtggcactaggaccactcctcaaaaactgccccccgccaggggtagcggcgaggacacgccaacaccggactccgccctcgccatgatggaccgactgactgacactctggcaaccagtccggtgtctgcttccagatcggattaaccgtttaactccttcgtgcctgtgcgcgccgcggccaagcagggtgctttgaagacagacgagttccagcgccccctcccagcccggagcggggatctgcgtgggcgggaagggcccccctccttaggtagctgccccccgctggcccggacggaggaggaggggggcggcgctgacagccgcggcgggcggggggcggggaggggcgggacggggcggaggagccggggctggcgccgagcgggccgcggaacgcggagcgcggagcgcggagagcgccgccgggcactgagcagagctccaggcgccgaaaggaagctgcagagcccggcccgggggcgattggcccgcagcgcccccgggtctgtccccggggcgccatggccctaccgcggccgggcgcacccgcggggccctgggctcgctggcttgcgcgcagctgagcggggtgtaggttggaagggccagggccccctggggcgcaagtgggggccggcgccatggaacccccgaccgtcccctcggaaaggagcctgtctctgtcactgcccgggccccgggagggccaggccaccctgaagcctcccccgcagcacctgtggcggcagcctcggacccccatccgtatccagcagcgcggctactccgacagcgcgga

SEQ ID NO: 55609 - DNA, 279 bp, Homo sapiens; identical to SEQ ID NO: 12032
  chr19:10531608-10531887
  hyper

SEQ ID NO: 55610 - DNA, 30 bp, Homo sapiens
  chr19:10542608-10542638
  hyper
tttctccttcccaccgctgagctgcacctt

SEQ ID NO: 55611 - DNA, 168 bp, Homo sapiens
  chr19:10616358-10616526
  hyper
gtctggaaggaatcacgtgtagggctacgttggagttaccccgctaccccaaatccttgttgcgtgtagatgcagttccagacagctcctcaggggggcggcctagatagtccgtgaacacgctgagtggccgaggttgtaaccagcgccttcctggcacgttgcaga

SEQ ID NO: 55612 - DNA, 113 bp, Homo sapiens
  chr19:10624739-10624852
  hyper
cgcgtggcgcaggtcgcggttggtgagcgtgtagatgatggggttcagaagtgagttggccatggccagtcccaggaagggatcggcctgcaggagtacaggacaggtgcgcg

SEQ ID NO: 55613 - DNA, 701 bp, Homo sapiens
  chr19:10624965-10625666
  hyper
cgcgcccgggtcgaggtggtccccgcagtcccgggccgtgccggcaggcgccgcgcgttggcgcgtacctggcagtagatgcgcgcgtagagtgcacagatagcggccaggatgcccacgaaggcgagcacgcagaagagcacgtaggccttggcgtagagcggcaagacagtggagcaagcgtccaggcgacccaggcaattccagcccagcgctggcaggagcccgaggagcagcgacacgccccaggccgcggctgccatcgccagcgtgcgcccccgactggagacgggcgcgggccccctgcgcgccatggtgaggctgcgctccagcgcgatggccaggaggctcagcacggacgcagtgagtgccacgaagacgcctccctcccgtgcgaaccagagcgcgggggacagtttcagcgtgagcggccccgacagtaggatgttggcggcgtaggcggcgcctgccagcagatccgacaacgtgaggctgcccaggagcaggaacatgggagcgtggaagcgcgggtggcgtccgagcaccaacaacacggctagattctctagcacgatgaaggcgcacaccgccaggcacaccacggcgtcggcgcgcaggccggcacccggctggtagcgcgcaccgcggagcttgccggtgtagttgtaatgcaggacgatgacctcgctcaccggcgccgg

SEQ ID NO: 55614 - DNA, 30 bp, Homo sapiens
  chr19:10676755-10676785
  hyper
acttgtaaacgaggcgtaccgctgctaacc

SEQ ID NO: 55615 - DNA, 30 bp, Homo sapiens
  chr19:10680020-10680050
  hyper
ctctgggacctcggcgcctcctgagggaag

SEQ ID NO: 55616 - DNA, 304 bp, Homo sapiens
  chr19:10691748-10692052
  hyper
cctggcacccaatagtcgctcaatcatgaaacagcctttgcagtcagccaatggctgcaatactggccgtgatcagcagatggtgagcgagcgcttatttcaaaacgggctgcgattctcttaagtccccacgtggggcgggtttgcgactcccctgtgcatttctcagaagaaaggtcccctaaatgcttacggccagtgagctcgaagagcacgcggtcattgaggcccagccgcagctctggcattcctgacagaaacaccttgagcttgatggtaccgacgatttcgctcagaaggacgc

SEQ ID NO: 55617 - DNA, 154 bp, Homo sapiens
  chr19:10762081-10762235
  hyper
caggcgtgagccaccgcgcccggcgtctttggcacatttgacgtatcatgtgactatgctacctattaaaaatccacagtaaaatgtaaataaaatagaaaagcagagggtacagcatgcactcatttcttttttgagacggtctagctgtgcc

SEQ ID NO: 55618 - DNA, 30 bp, Homo sapiens
  chr19:10765729-10765759
  hyper
aggtcgcggagaggcggaccccctccttgg

SEQ ID NO: 55619 - DNA, 30 bp, Homo sapiens
  chr19:10812310-10812340
  hyper
accgaacagctggacgctctgggttgccgc

SEQ ID NO: 55620 - DNA, 54 bp, Homo sapiens
  chr19:10812676-10812730
  hyper
cctcataatctgctaacggtgagctgaggagagagccgacgttctagggccctt

SEQ ID NO: 55621 - DNA, 223 bp, Homo sapiens
  chr19:10828957-10829180
  hyper
aacaaactgcaggacgccttcagctccatcggccagagctgccacctggacctgccgcagatcgctgtagtgggcggccagagcgccggcaagagctcggtgctggagaacttcgtgggccggtgagcgggcgcggcagggatcgcgggcgggtggcggcctagggcgcggagggcggaccgggaatggcgcgccgtgcgccgccggcgtaactgcggcgctt

SEQ ID NO: 55622 - DNA, 31 bp, Homo sapiens; identical to SEQ ID NO: 12036
  chr19:10929999-10930030
  hyper

SEQ ID NO: 55623 - DNA, 30 bp, Homo sapiens
  chr19:11039289-11039319
  hyper
gctctctgcgcctgcgcgtctcgcctaccc

SEQ ID NO: 55624 - DNA, 30 bp, Homo sapiens
  chr19:11071224-11071254
  hyper
ggtcttggtccaggcggcccgtcctacggt

SEQ ID NO: 55625 - DNA, 529 bp, Homo sapiens
  chr19:11144002-11144531
  hyper
agcagaacgaggtgcgtgtgctccgcctctgcaccgtcaacagcgtggaggagaagatcctagctgcagccaagtacaagctcaacgtggaccagaaggtgatccaggccggcatgttcgaccagaagtcctccagccatgagcggcgcgccttcctgcaggccatcctggagcacgaggagcaggatgaggtgagcccagcaccggccccgacccctccccagcgtgaatggtggacgcgtgagcggctttcatttttgtttttttaccttttttgcactcttattttttttgcatccctttggagtaaagggagtgtgggctgaacggaaagaggatgagtacttgctttttctttgaagtggtttttttttctaaactgctggtgaaagacgccggattgacagccctggagactgaagtcctctatttatccacagagcagacactgcagcacgggcagcggcagtgccagcttcgcccacactgcccctccgccagcgggcgtcaaccccgacttggaggagcc

SEQ ID NO: 55626 - DNA, 144 bp, Homo sapiens
  chr19:11199836-11199980
  hyper
taacagttaaacatcgagaaatttcaggaggatctttcagaagatgcgtttccaattttgagggggcgtcagctcttcaccggagacccaaatacaacaaatcaagtcgcctgccctggcgacactttcgaaggactggagtgg

SEQ ID NO: 55627 - DNA, 381 bp, Homo sapiens
  chr19:11200921-11201302
  hyper
agggcgactggagacccggatgtccagcctggaggtcaccgcgggctcaggggtcccgatccgctttgcgcgaccccagggcgccactgccatcctgagttgggtgcagtcccgggattccgccgcgtgctccgggacgggggccaccccctcccgcccctgcccccgcccctttggcccgccccccgaattccattgggtgtagtccaacaggccaccctcgagccactccccttgtccaatgtgaggcggtggaggcggaggcgggcgtcgggaggacggggcttgtgtacgagcggggcggggctggcgcggaagtctgagcctcaccttgtccggggcgaggcggatgcaggggaggcctggcgttcctccgcggtt

SEQ ID NO: 55628 - DNA, 31 bp, Homo sapiens
  chr19:11225129-11225160
  hyper
catcatcagatgcctgcgggtgaaggtgggc

SEQ ID NO: 55629 - DNA, 70 bp, Homo sapiens
  chr19:11253287-11253357
  hyper
tcagagggagaacaaacgggggcgggggtgggatgggggcggggccggaggccaccggcctcaggctgtc

SEQ ID NO: 55630 - DNA, 30 bp, Homo sapiens
  chr19:11266485-11266515
  hyper
ctgtccgcggggcccgccctcttccagaag

SEQ ID NO: 55631 - DNA, 172 bp, Homo sapiens
  chr19:11308101-11308273
  hyper
gtgcacactcgatccccgaaccagacttgaacccctacccagccccgggtcccactcgccttgcgcgctccggccgctgccttccctgggtcccgccgcccgagcgtcttcgcgcgcgccgcagcctgggcgcccggccctcggaggtggctccgcccgcaccacgccccct

SEQ ID NO: 55632 - DNA, 43 bp, Homo sapiens
  chr19:11373071-11373114
  hyper
cctgttgatcttgtgcgcgaaggcgcggcgctcggaggcagcc

SEQ ID NO: 55633 - DNA, 31 bp, Homo sapiens
  chr19:11399747-11399778
  hyper
aaacactcactccccacgctcctctccattc

SEQ ID NO: 55634 - DNA, 175 bp, Homo sapiens
  chr19:11465992-11466167
  hyper
ggttccttcctacaatcgatgctaacacgccccgcctccaagatcacggaggccccgccccacggggctatgcaaatgagacgcccggaggccccgcccctccctccacctcggagtctgcgcggcgcggccaggcccggccgaccgcgtctcggtcttcgcgtctgccagcctg

SEQ ID NO: 55635 - DNA, 31 bp, Homo sapiens
  chr19:11466333-11466364
  hyper
tccctctgggtccagcgcggggaggggcggg

SEQ ID NO: 55636 - DNA, 31 bp, Homo sapiens
  chr19:11466379-11466410
  hyper
agctgggggaggggaccgggctgggggaggg

SEQ ID NO: 55637 - DNA, 1004 bp, Homo sapiens
  chr19:11491657-11492661
  hyper
gggaggaggtcagggcggtgggcttgccccgtgattcgccctggctcctcctacacccccgcctggggcctcaccgctaggcgtcagcagcgacacaggctccgaccaggcgctccagaagccgccgaagctcggctcagccatacgcgcgcggacggcgaaggtgtagcgcgtccggccccgcaggttgctcagcacacactcggtgcggccctccaggatctccacctgggggcggaatcagggcgagggacgcgtagcagacaaaaatagatgacgtgggggcgggccctggtggaactgagccaatcaggggaaaggaaaacggtgccctagaattgcaatgggaccaataagagtagggggaggagcccaagaaagctcagggccaatcagagagagagtctctggtacgaaagggcgggacccgggcaatttaatatctgggctagcactcgtagagggacccgggcgctaaaggggtctagggttacgggccggagggagaagaagttggggttcaacaggcttgcgaggacattaggaaagggggtgtgtctgtgggcgtggaacggtcttcagcaccagggtaatgggatgtgggatgttacggaccggccctgaaagcggcaccgggcgcgacctcgagaggcgtggctgggccgtagtcagtggagctttgggggctgggccgtaggggctggcctcaccctctgtacgctccctgcgccgttgccggccgagacgtccacctcgtagcggatgtgagacgtcatgggtgtctcaggcggcgggagccagcgcaacactacgtggccgctctcgtcagccaaccgcgccaccagccccacgggggcgtctaggagcactgcaggcatgggggttggtcaggtgggcgaggactgagaccctctcctccgaccactcctccattcccagagcacttacctacttcattgatgtggatgacacggtgatatcgcggagcgccggaggctgctgtg

SEQ ID NO: 55638 - DNA, 74 bp, Homo sapiens
  chr19:11492786-11492860
  hyper
cgcccagggaagggagcaggttgggaggggggaccggggagttggcattgcccggcctgtggggggcagtgtgt

SEQ ID NO: 55639 - DNA, 864 bp, Homo sapiens
  chr19:11529237-11530101
  hyper
ccctcccttccttccgcccactgcacctggcggcctgtgctcggctctccagctccgccctcaactggtcgcttccggccccgcgccacccaccaaaccccctcctcacctggctgcccccggggccctccgccgggctcctgcgctgactgcgctgccgccgcagggagacactgtacaccgcgccgtcctcggtctcttcaccccagtcctgcagcggtgcctggacgcacaggcggactcagggcaccaaaggggcacaggtcctggggcctcagcctccttggccgctcggactcgggccgagtcctcctgctgcatccccacgccccttcccggccagaagctgcgagactagggctggggtcccaggctagtcccctcctcgctgcgggtcccctcctcccaggtcctgaggacatggggtggcatttggggatgtcccagggcccagtctaatagaacctgtctctagctctttctgccgactgcgctcagagactcgcgcccccatccctaagaggaaccagtcgcttcactgggtcaagggccgcgagtccccaggaggggactccagggcaagttcagattgggagcagataccgtccgacgggcgggcgcttggagtttctggacctgcgggtcaccagggatgcggggtccggggatcccttgtccccttaccagggccagctctttgcctgctgtgcgctccatggccggcgcccgtccctctcagtggcgccgctgagtgaggcggaagggccggcgggtggcgggtggcgggcggcgggcagtggccgggcgctgaggccagaggggcggagcggccgagctgctggggcggggcggggcagggcaggc

SEQ ID NO: 55640 - DNA, 409 bp, Homo sapiens; identical to SEQ ID NO: 12044
  chr19:11531257-11531666
  hyper

SEQ ID NO: 55641 - DNA, 30 bp, Homo sapiens
  chr19:11531870-11531900
  hyper
tggcgaggaactaagcggggatgggaagcg

SEQ ID NO: 55642 - DNA, 257 bp, Homo sapiens
  chr19:11532425-11532682
  hyper
cacgaggcccagcaggtttggcacatagttatctgcctggggatccagctcctttcccgcgaagcggccgtcctcctgcggccagggtagagccgggtcagccgagaggggtggggcctcttggaaggctccacccaggggcggggcttttctttcgggggcggggcctaggaggtaagggcccacctgcagggtcgatcctagccattgggggcggggacttaggtcaaggccacgtctgtgatgggggagcctct

SEQ ID NO: 55643 - DNA, 701 bp, Homo sapiens; identical to SEQ ID NO: 12045
  chr19:11532938-11533639
  hyper

SEQ ID NO: 55644 - DNA, 180 bp, Homo sapiens
  chr19:11545951-11546131
  hyper
ccgctaggtggttgcgctccgcatctctcggttgccaggtaaccgcctccccgtctctctccactgtttccatggagatcacccgcgttccgtggctgacactgcgttctcattggctgaggctgcatagaggggcggtcccaacagtgggcggggtagagccgcgccgcaggacggagg

SEQ ID NO: 55645 - DNA, 281 bp, Homo sapiens; identical to SEQ ID NO: 12046
  chr19:11590856-11591137
  hyper

SEQ ID NO: 55646 - DNA, 61 bp, Homo sapiens
  chr19:11591577-11591638
  hyper
ggccagggacgggcccgaacccggggatgcgcgcgcggatggccgggccccggggtggcct

SEQ ID NO: 55647 - DNA, 304 bp, Homo sapiens
  chr19:11591672-11591976
  hyper
cggggttgaggacgccccctgcgcggccccgcggggcccggggaggttgcgcttcccgacagagatcgcggcgctctgcctttcgccgccgcccctcggtcggtcctgtccggtcccgtgtgttcaagtcctctcccctcgcccaccctccctccctccctccggcccgcgctgcgcgctccgcgctctggaccgcgccgccgccgcccccagccctttatagcagcagctgccagcgccggcgtcgctcattggctgcggcgaccgagctccgcctcctcgcggctcccgacggcgcggcagg

SEQ ID NO: 55648 - DNA, 1073 bp, Homo sapiens
  chr19:11592583-11593656
  hyper
aatgtcctggctttctaggctcgtgattggtcctcctgactgtggagtcatgctcgctctctgctagggggaacctggcctctctctaaggcgttgggggtggcgcagcctcctttggtgcgcgggcgccggtgcatgtttacgtcggggcgcgggaactagcacacactggggcggggtcgccagggcgtgaggcttcagcaccacagacagcaatccgacagtccggtcgagggcgctgccggcgaggtagcccagaccccctaactggagagcggcagtccccacccaatcctcgttcctgcacgccctttaggctccagactgtcagagagcgccaccagcgaggagagcctaatttgcccaatcaggggcggcccttgagataaccagttactggaagatgccctagagatcgagccaatgggagtgcgcgcaccaggggatgctgccacgcctggaaagggcaggccaatcgcagtggcccgcgcaataggggcggtggcggtgcagatccccgggtggcccctcttgggctcgccggggcgacctggctgcgggcgctaggggccccaagcgatggtctgttccccaccccgtgttcctcccggtttccgtcatcggaaactgagctaggaggggggctgctcctgggcgcgcggaccccgctgcggttcccatggaaacctgccggctccggcagtgcggggagagtggaggggacctgcctcgcggggggagggagctcgcgggggcggccccagcggccggactcgctcatccttgccgattcttctgtccccggctggggtagccccccggtccgcagcaggaactgaggcatagctggggccccgcctcatcccccgaactggtgaggaaccggcggggccaatctgcgcgtggcgccacagggctcccccgggcacgtgcctgagctcgcggctgcggtccccagggtcacgtggctgcggccaccagggcctacgcgcctcgcacgccacctagcggccgcgcctcgctccccgcccctctctctagcggcccgcaggaggcggcggcctcagcatcct

SEQ ID NO: 55649 - DNA, 31 bp, Homo sapiens; identical to SEQ ID NO: 12048
  chr19:11593855-11593886
  hyper

SEQ ID NO: 55650 - DNA, 30 bp, Homo sapiens
  chr19:11616655-11616685
  hyper
gcgcgcatcttcggcgccgccgagaaattt

SEQ ID NO: 55651 - DNA, 30 bp, Homo sapiens
  chr19:11639996-11640026
  hyper
ggtgtaataggtcccgcccacaacgcgagg

SEQ ID NO: 55652 - DNA, 256 bp, Homo sapiens
  chr19:11689315-11689571
  hyper
cagctgtctgcaggccctccacgggaccgcagcctgggagggcaggaggccctgcacctgcggccggtctgacctgctcctcacctccctgcctgcctcctccgtgctgggcgccgccgcgacacgtcccgcggacattcaggagtcccttcagtccctgcgagcgcggacccgggagagagctctcattcaacgctgaggccactggctcacagatctccccgggtcaccctgcgaagtgcttggtcccccccat

SEQ ID NO: 55653 - DNA, 30 bp, Homo sapiens
  chr19:11708122-11708152
  hyper
agtcaacactgctacgcacagccacgtttc

SEQ ID NO: 55654 - DNA, 30 bp, Homo sapiens
  chr19:11750346-11750376
  hyper
atgcagatattccccgggaggggtcaggtc

SEQ ID NO: 55655 - DNA, 747 bp, Homo sapiens; identical to SEQ ID NO: 12049
  chr19:11805240-11805987
  hyper

SEQ ID NO: 55656 - DNA, 789 bp, Homo sapiens; identical to SEQ ID NO: 12050
  chr19:11909168-11909957
  hyper

SEQ ID NO: 55657 - DNA, 537 bp, Homo sapiens
  chr19:11925065-11925602
  hyper
ggggaagggggaagggacagtcgccctccgtccattcctttagtgctgcgccgacagcggtcaggatctcggctttcttgcttcgagagggactaggtgcctccaccagagcttctgtcgctctgtaacctgcactgtgacctacactagtcgcgggagccacgcagaggacgccggaacaccctggaagccgagaaatggtgtgtgtgagggggctggcgtccgggcgactgggagaggggctggaatcggccggaaccggctgaggcgggacccgggcctccacgcggcgactccggggtcgtggacgcgagtcccctcggtcgcagggtggggctgggccggcagccgggaccccgggcctcctgtcccgtcccttcacggcgactgcggccccggctccggagcctaatctgggcagctccgcgtctccccacattatgcgggggccacgggagggatatggggggatcccgcctcggatatggggtttgttagaaacaagtgcccggtgccgcaaagaaaaccagcatctag

SEQ ID NO: 55658 - DNA, 31 bp, Homo sapiens; identical to SEQ ID NO: 12051
  chr19:11950106-11950137
  hyper

SEQ ID NO: 55659 - DNA, 777 bp, Homo sapiens
  chr19:11959421-11960198
  hyper
tagaatctgtcagtctggctccgcagggcctgatacccagggcttccgctgtcacttagacgtggggggcggggccgaacattccatccaatcagaggcactggctcggggccctgcccactgtgcatccaggcacggaggatgttgcattcctgccgtcacctttgtcgctgcgagggcggcggttgggatctggcctttccagccccgagagggacctagtgcctctacccagatttctgtcgctctgtcacctgcgctatgccctgctttactcacaggagctgtagagaggaccccggtacatctgaaagccgggaaatggtgcgtgtgctggccgggagtggtgcgatgggggaggggctgcctggaactggcgggacccgggcctccctgtgggcgactccggggtctgggaccgagtcctcctagagctgctcggccctcggtccccgcggccgctggatgtgggtgggccggcagccgggactccgggcgtcctgtcccgtccctgcccgtcgactgcggccttggccccgaagcccttttgtgcagctccgcgcccgcagcccgacgccccagcttgtgcgggggccacgggagggtcatgcgcggatttcgactcgggtgtggatttcgtccgtaggaggagcagcggtctgtggggcccacagcctccactttctcctgttaaaaattatactgaggtacgttaacaaaaagttcatttgaggaaacagccattcacgaatgagaaacacccggtcctggcttgtg

SEQ ID NO: 55660 - DNA, 821 bp, Homo sapiens
  chr19:11998435-11999256
  hyper
accagagtgcaggaaggagctcgcccttggaaaagctgtggtcagaatccgtctgtctggctctgcagggcccgatacccagggcttccgctgtcactcagacatggggggcggggcctagcattccatccaatcagaggcattgtggcgggtccctgcccactgttcctccagacactgagggggtcgcattccttacctcacctttgtccctgcgcgggctgcggctgggatccggtctttccagccccgagagggacctggttcctctgcccaggcttctgtcactctgtcacctacgctatgccctgctgtagtcacaggaggtgtagagaggaccccgggacatctgaaagccaggaaatggtgcgtgtctggggccgggtgtcgtgagacgggggaggggctgcctggaccgaccggaaccgactgtggcgagaccctggctttcctgcgggcgactttgggatctgggaccgagtcctcctggagccgctcggccctcggtcccctcgactgctcggtgtggctgggccggtagccgggacaccaggcgtcctgtctcgtctctgcgcggcgactgcggttccagagccctctatgggcagctccgcgcccgcagccacgcgtctacccagattgtgcgggggccacgggagggtcatgtgggtgatcccgactcgggtgtggggttcgtgcttgggaggagcagcggtctgtggggcccccagtgtccactttttctcctgttaaaaattaaactgaggaacgttaacaaagagttcatttgagcaaacagcgattcacgaatgagacacacc

SEQ ID NO: 55661 - DNA, 30 bp, Homo sapiens
  chr19:12035862-12035892
  hyper
cagaggtgctggggcgtggcactgcccaca

SEQ ID NO: 55662 - DNA, 653 bp, Homo sapiens; identical to SEQ ID NO: 12054
  chr19:12075733-12076386
  hyper

SEQ ID NO: 55663 - DNA, 806 bp, Homo sapiens
  chr19:12098300-12099106
  hyper
cggctggaatagcagcgaccggctctgcagcgccctgttacccggggcttctgctgtcactcagggctgagggggcggggtaggatgccctatccaatcggggtgctggggcggggccctgccaactgtttaatccgccggaaggagggcgcagcattgccggtcttctcattgcctggctgctagaggaaacccgaagtcgggattctttctttcctgctctgagagggaccaggtccctcctccgtagcttttgtctctctattgcctgcgccgtgtcctggactgctcacgggagttctgcaggagacgccggaatatctggaagctgaaaaatggtgagtgtgcggagccggaaaccccgaggtgggtttgggggttaggggacggtctagtcagaaccgcggaatcggaacgcgggcctccatgttgcgactcgggggtctgaggcccgagttcccctggcgcagctcagccctgggtccccttggcctcagggtgggtctgggcggcagtcgggaccccaggcgtcctgtcgtccctgctcggcgactgggacccctgccccggagctctctctggggagctctgcgcccgcagccgcgcgtctccccaaattgtgcggaagtcgtggagggaatcccgcctcgtgtgtggggttcccagtcgcacgtttcttctgttaaaaattaaactgagacactgttaacaagtaaagagtattttgggtaaacagccaatcatgaaggagaaacaccgggtcatgacttgttaacggaaaaaaaaaaccaaacagtaaaataact

SEQ ID NO: 55664 - DNA, 30 bp, Homo sapiens
  chr19:12146148-12146178
  hyper
gggacaggacgagacgcccgggtcccggcg

SEQ ID NO: 55665 - DNA, 220 bp, Homo sapiens
  chr19:12146424-12146644
  hyper
cacctgaaccctctcggaggggaaagccaggctcccaacctcagctcgccgcctggagccgggaaccgaggagagcagggccttcgccctccccgatggacactcggcaggccccgcccagcgcccctgattggacgaagcgccgggccccgccccctcagccgtgagtgacaatagaagcccttggtaacggggctctgaaaacgggtttgaccggatc

SEQ ID NO: 55666 - DNA, 1017 bp, Homo sapiens
  chr19:12163010-12164027
  hyper
tgtcaggagctgcctcgggattgcttactccagacttcgcggggttgtgtttccctcagccgaggtctctcctattcggctcagaataaacttattctacacgatttgggtttttccgttaccaaaccacaagccaggactgggagtttctcattcattaatcgctgtttgctaaaataaactctcattttttaacagtgcctcagtttaatttttaactggaaaaaaaaaggaactggggaccccacagcccacagctcctcccacacgaaccccacacccgaggcaggatcccccatgacccttccatggtcaccgcacaatctggggagacgcggggctgcgggcgcggagctgctcagagagggagccggggccggggccgcagtcgccgcgcagggaccggacaggacgcccggggtcccggctgccggcccagctccacccagcggccgaggggaccgagggccgagctgcgctagggggactgtgtctggagcccagagtcgctgcaggggggcccgggccccgccacagcgggttcctctcggttccacccagtccctcctttcgccttgggactccccagcaccgcatgctcaccatttcctggcttccaggtattctggcgtcctctctaaaggtcccgtgaacagtgcaggtcacagcgcagtcgacagagcaacagcagctacggcggaagtaactggtccctctcggagcaagaaagccccagaccttaactagcgcgagcagccctaggagtgaagagagcgggaatgcaacctccccttccctggaggacagtggcagggccccgccctagcgcccctgattggataggggtctagactccgcccccttccctgagtgacagcagaagccccgggtaactgggcgctgcagagccgaagcgactggttctggccacactttccaaggtcagctccctccctccctcccacctttacttcgaatatttgccttcggccaaacttgctccgaactgctagaagg

SEQ ID NO: 55667 - DNA, 638 bp, Homo sapiens
  chr19:12175439-12176077
  hyper
tgtcactcaggatgcagggggcggggcctggcgctccacccaatcagagtcgccggggtggggcccggccaactgtttatccgcgggtcacattgccgttcgcctcagtctttggcccctcccgccgggtgaggttggcaccccgtttttcctgctctgagagggaccggttgccaccgccatacttctgtcgccctgtcgtctgtgttgtgactgctttggacgtgggagtcacctgaaagccaggaaatggtgagtgtgagcccccgctgggagtcccgagacttgggggagggtaggcggaggctggttggaactggctggaaccggctgtgccgggacccggacctccccgcggcgactcgaggtctggggcccgagccccgctggcgcagctcggccttcggtccattcggccgccgggtgcggctgggccggcagccgggacccctgggcgccctgtctcgtcgccgcgcggcgactgcggccccagcccgggagccctctctggacagctccgcgcccgcagcccggagcctctccatattgtgcggggccacgggagggtcatgggggcaatcccgccttgggtgtggggctcgtgcgggaggagctgcgctgtgaggccctcagtgccc

SEQ ID NO: 55668 - DNA, 681 bp, Homo sapiens
  chr19:12203012-12203693
  hyper
ctcagggctctgaaggcgaggcggggagcacggtccaatcaggagcgccggggcggggccctgccaacttttttcggggaaggagacggctgcaagcccgcggtctcttgttgctgtgctaacgaccgttggaaccctctttctggctcttggaacgctcggctctgagaggctccaggtttctccgccagagctcctgtcgctctgtcagttgcgctgtgttcctctctagtcacaagagccttggggaagacagttggaagctcagacatggtgagtgtgtggggccaggcgtcctgagacgggggcgaagggcttcttagaacctgctggaaccggctgtggcgggacccgggcctccccgcggcgactccggggtctgtggggctgggccggcagccgggacccggggcatcctgtctcgtcccttcgcagcgaccgcggccccggacccggagccctctttgggcagctccgcgtcttcagccgcgggtctcctcagattgtgctgggccatgaggaggatcatggggggaatcccgtctcgggtgtagggttcttgcgtcagaaaagcggtggtctgtggagtccccagtcgtcttttctcctcttaaaagttaaaatggccgggcgcggtggctcacctgaggtcaggagttcgagaccaacctaacatggaga

SEQ ID NO: 55669 - DNA, 46 bp, Homo sapiens; identical to SEQ ID NO: 12059
  chr19:12204538-12204584
  hyper

SEQ ID NO: 55670 - DNA, 30 bp, Homo sapiens
  chr19:12251251-12251281
  hyper
tcagaactgagtgacggcagaagccctggg

SEQ ID NO: 55671 - DNA, 923 bp, Homo sapiens
  chr19:12266888-12267811
  hyper
tctcgaatttctgggctgaagcaatccccccgcctcaacctgccaggcgtgacccactgcgcctggccttcaatttagtttttcaggaaaaaaggggggactggggaccccgcagcccaccgctcctcccacacgaaccacacacccgaggcaggattgcctccatgaccctcccgtggtctccgcacaatctggggagacgcgggactacgggcgcggagctccccagagagggctccggggccggggccagggccggggtcgcagtcgcagcgcagagacgggacaggacgcctggggtcccggctgccggcccaaccccaccctgcggccgaagggaccgagggccgagctacgccagggggactccgctctgcagacccgaagtcgctgcaggaaggcctgggtcctgctagagccggttcgagccggttcctcccggcccctcccccgtctcgggacccccggccccgcacactcaccatttcccggcttccaggtgtcctggcctcctctccacggatccctctaacagtccagtcacagtgcgggcgatggagcgacagaagctatggcggaggcacctggtccctctcggggccggaaaaccgagatcccgacctccctttggtgcaagacgcctgggagtcaggaaagcgggaatgcggcctccccttccccggatggacagttggcaggaccccgccccagcgcccctgattggatgaggctccagtccccgtcccatcggtcctgagtgacagcggaagccctgggtaacaaggcccggcagaaccgaaatgacctgttccaaccacagattatctaagcgagctccctccctgcgtcttgctctttgggtatttgcatttcagccaaatttgctccgaattgctagagggggtaccgttgtcttcctcact

SEQ ID NO: 55672 - DNA, 161 bp, Homo sapiens
  chr19:12306032-12306193
  hyper
acccggggctcccctcggcgactctggggtctgggacccgggtccctctggcgcagctgggccctcagtgccctcggccgcagagtggggctgggctggcatccgggaccccgggcatcctgtcccgttcctgcgcgacgcctgcggccccggcctcagcc

SEQ ID NO: 55673 - DNA, 18 bp, Homo sapiens
  chr19:12306229-12306247
  hyper
cgtgtctccccagattgc

SEQ ID NO: 55674 - DNA, 802 bp, Homo sapiens
  chr19:12475987-12476789
  hyper
ctgctgcaggccttggagtctcggtgcagtgactcggaccgcgaacctgtgccggttacagccgcacaatctgggaagacgcggagctgtgggcatggagctgccccagagagggcgcgggagccggggccgcagttgctgcgcagaaacgggacaggacgcccggggtcccggctgccggcccagcccccagctcccaccccgcggccgaggggactgaaggccggctgggccaggggaactcgggtccacagaccccgcagtcgccgcggggacgcccgggtcccgccacagccggttctggccggttccaaccagtccttcgccctgccccaggacgccgggccccgcacactcaccatttcccggcttccgcggtgtcccgtgttctccccaaggttccccgctgccagcataggactcagcgtgacagtgcctgccactgacctgccagggcttctctcagctacagagccaggagcgggagctcagaggggtgtagaaagctccaccctcctcccggcagcgcgcctgactggcagttcccaagaactcgcccccaacactgattgggtagagctccaaattccgcccccccagggaactgattgacagaagaaggatcttacacggctgagtggagcgagatgaagcggttccagacacagcccttgatagggtgggcttcctcccttcgctgtgacctgacccctcccaggggacatttgcatttaagcggaatttcctgcctgtactcaatgggctcttcctgctccttcttcctggacggggacccacaagt

SEQ ID NO: 55675 - DNA, 91 bp, Homo sapiens; identical to SEQ ID NO: 12061
  chr19:12551332-12551423
  hyper

SEQ ID NO: 55676 - DNA, 870 bp, Homo sapiens
  chr19:12595122-12595992
  hyper
cacgcacgaaccccacgaccgagacgggattccctccatgaccctcccgtgccccagcacaatctggggagacgcgaggctgcgggctcggagctgcccagagagggctccgggactggggccgcagtcgccgcgcagggacttgacaagacgtccggggtcccggctgccggcccagccccatcctgcggccaaagagaccgagggccgagctgcgccaggaggactcgggtccacagacccgggagacaacggcggggaggcctgggtcccaccacagccagatccggccggtttcaacccgcccctctctcccatctcaagacccccagccccgcacacttaccatttcccagactctgggatgtcctggtgttctgtttacctctcccgcggccagcacaggtcctacctccacctgaggcccttcctccacctgagggccttctggggtgaggagaccccagagcggagcgcagcggctggtagccacgccctcgccgtttgcgcagcgcccctccgcccgccttcccggcggcgcccctgattggacattgcactcttggacccgccttcgttgcctgagtgacagctagtagggaagtcgcgtctctaagcaacctgcattcgtccggggtcaggaatctgttcccctgccacggatatttgcgtctaagcagaatttgttaacgtacccggggtcgggcactggtgtcttcctgcagctccttctgagcgcggagacacaagcgtgcacagcgcaggaaattccaggctcagtttccagaaaaaggctctttgtccacagcgaaaaaggacgcccgggccatgccagactagaacggaagggtcagacgctcccagacttag

SEQ ID NO: 55677 - DNA, 30 bp, Homo sapiens
  chr19:12662262-12662292
  hyper
gaacccaaacgcagcggacacgaaacagga

SEQ ID NO: 55678 - DNA, 74 bp, Homo sapiens; identical to SEQ ID NO: 12063
  chr19:12721073-12721147
  hyper

SEQ ID NO: 55679 - DNA, 30 bp, Homo sapiens
  chr19:12721434-12721464
  hyper
ctggacttgctcctcgaggggtcgctccat

SEQ ID NO: 55680 - DNA, 346 bp, Homo sapiens
  chr19:12750860-12751206
  hyper
gcaccctactccgctcacctgcgacggcagcagccagtccccacgggcggaggggacctcatgcgacattcagcccgcgagattctcagagactgctcgcccgcaacacgcagtaacgatctcaggagagcccatgatggggcggcgcgtgtcgtagccgagaagactctgtcatcgccggcgacctcctggaactctctcttgcggtttgcagccagatcacttcccatacacgcggcagccaagctcaggggatggcatcagactgaccctaggtggcgctcgaacacccgccggacctcaccagacaggcactttccccagtctacaccgcctggttcgggtc

SEQ ID NO: 55681 - DNA, 30 bp, Homo sapiens
  chr19:12777552-12777582
  hyper
aaaggccgggcaaacgccccgcccccagac

SEQ ID NO: 55682 - DNA, 281 bp, Homo sapiens
  chr19:12806991-12807272
  hyper
accactgggtagggcgcgcgtacgcggcgtagcgcgcgtagcctccaggtgacatggtcagacacgaggtcgcggagcgcgtggcacacccgcgacaggacgtggagcacgaggcgggcgtccaggtaggagcagatctcgagcagcagctccgggggaaggctcagaaggcccggctcacttacggccgaaaccctggacgcggcccgaggctccgaagcgctcggggacgcggcgggtgtggatagctgcgaggggcgcgagaacgccagcccggattt

SEQ ID NO: 55683 - DNA, 30 bp, Homo sapiens
  chr19:12807482-12807512
  hyper
cccaccggaagcgacgaagtcagacactgg

SEQ ID NO: 55684 - DNA, 155 bp, Homo sapiens; identical to SEQ ID NO: 12066
  chr19:12885825-12885980
  hyper

SEQ ID NO: 55685 - DNA, 30 bp, Homo sapiens; identical to SEQ ID NO: 12067
  chr19:12886189-12886219
  hyper

SEQ ID NO: 55686 - DNA, 30 bp, Homo sapiens
  chr19:12889071-12889101
  hyper
acagctgctccccgcgcgcatcgcacgaac

SEQ ID NO: 55687 - DNA, 31 bp, Homo sapiens; identical to SEQ ID NO: 12068
  chr19:12897558-12897589
  hyper

SEQ ID NO: 55688 - DNA, 238 bp, Homo sapiens; identical to SEQ ID NO: 12069
  chr19:12899528-12899766
  hyper

SEQ ID NO: 55689 - DNA, 639 bp, Homo sapiens
  chr19:12900113-12900752
  hyper
aactggaagcctgaccgtctgcacctcgccgcagcccttcccgggaaggggctctgggttccctcatattctccccttagattttcaggtcttctctgactcggggagggaagctctcagatgacagagctactctagggaaggaggggggctccctctaggtattctggatgatagtaggatgggacctgcagactaaaacgagagtggggcccctgactcacatgagtgagtggggggtgttggggacggagctccagatctcctggcagaagggaagggcaccccacccgagggaggaggcagccgccgttccagcccgcccaggcgccgggggcgcctcgaggcatcggcccgccctctccgcgccccgtcgggccgggggcgaagtccgacccaggcccgcgggcaggcggggacctgccgggctgggttgggccaggccgggcctggcaggacgcagccccaaagcggcggggtggggcggggccgggccaggcggccgtgggggccccgggggcggcggtcggggctggtcgggactagcagtctgggggcccaggcgcgccctgggacctggcagatagtcgggttccccgcttctggctcggggccccaggacagcgctggtcccacctc

SEQ ID NO: 55690 - DNA, 252 bp, Homo sapiens
  chr19:12902438-12902690
  hyper
ggctggctgctacccgcccgcgccagcccccgagaacgcgcgaccaggcacccagtccggtcaccgcagcggagagctcgccgctcgctgcagcgaggcccggagcggccccgcagggaccctccccagaccgcctgggccgcccggatgtgcactaaaatggaacagcccttctaccacgacgactcatacacagctacgggatacggccgggcccctggtggcctctctctacacgactacaaactcctg

SEQ ID NO: 55691 - DNA, 30 bp, Homo sapiens
  chr19:12904379-12904409
  hyper
ttggagtgcgcaggcgcgtccccgcccagc

SEQ ID NO: 55692 - DNA, 30 bp, Homo sapiens; identical to SEQ ID NO: 12072
  chr19:12912575-12912605
  hyper

SEQ ID NO: 55693 - DNA, 122 bp, Homo sapiens
  chr19:12912809-12912931
  hyper
gcgtgggtaatgcgcccgccgcagactccgcgcacgactccgcctgggagcgcgttgggggccgttggagtccagcatggcgcggaccccgggggcgctgctgctggcgcctctgctactcc

SEQ ID NO: 55694 - DNA, 37 bp, Homo sapiens
  chr19:12917227-12917264
  hyper
ttgcaaagtgaccccgtccaccgaattccccaagctg

SEQ ID NO: 55695 - DNA, 30 bp, Homo sapiens
  chr19:12917469-12917499
  hyper
ggtggcggctgaggcggcatggatctcagc

SEQ ID NO: 55696 - DNA, 30 bp, Homo sapiens
  chr19:12943578-12943608
  hyper
tcctggtgaatacccggacccagcctcgcc

SEQ ID NO: 55697 - DNA, 65 bp, Homo sapiens
  chr19:12946213-12946278
  hyper
ccaggttgggtccgcgccgtcgggtttctgagaaaagggaggaaagaggcggggcctgcacggtg

SEQ ID NO: 55698 - DNA, 395 bp, Homo sapiens
  chr19:12946982-12947377
  hyper
tgagattggaggtggcgtctgtttacactgacgccaaagacccgaacttccgccgctccagtttgaccctttcttcgtccctagaatgtttgggggcgctagcgggtggggctgggttccaggtcttcttcgggtggtgcttaaaagccctccaggggcttaccctccaaggccggttacccggatctggacaccctgggctctgtggccagaaaatccaggtcttgatttcgcttgggccattgcagacacgcagccaggtcgactggtcctcattcactccggtcatgcaaagacagagggaaaacctggtttggattatcggtcacccgtggctcgggagggcagggctgccctttggccccgcctatatgtttgtccgttgtacaacgggg

SEQ ID NO: 55699 - DNA, 716 bp, Homo sapiens
  chr19:12951462-12952178
  hyper
agtttggataaggggcggggccatgcttgtgtgggtgtggtcagtcgcagagggacggtcattggggggcggagactcaggtgggcggagactcaggtgggacggacagaaaggaggagtcgtacctgaggggcggggccatcccagatgaagccagaatcgtcttggaaggggccaggctgactcggcaacgaaaaaatttagagaggcggggccacaggcgaaggggcgtggtctccccataataggcgggactagactaaagacaggacatgctgctgtttgcacgccgctttagggaacgagagacctgacaggatttgccccctctttctctcataggcagcagtcccctggacagcccccgaaacttctcccccaacacccccgcccacttctcgtttgcctcctcccgaaggtgagtccctcccctccagggccccagaaccctgggcagaccctccccaaccactgtctgggccgccatctgttctcctcctaattgcacccgagctggggcctgaggggaccagcgagtgccccaaggtctcagcgggaaggagcgcctagccttcggggcggggcctataagaaggcggggtccaatcgccgatctggaacggggaaggcggtggggctccctttgcggcaggtcgaaagcgcgtgcgccctgggcgcggggtcttagtctctccgagccttgctctcctggccag

SEQ ID NO: 55700 - DNA, 182 bp, Homo sapiens
  chr19:12991903-12992085
  hyper
tgcagccctctctgcgccgcctccccggaccctctaagagctggcagcttgtagaccacgaacctggaggtcggagaatgcacagaaataggagagagggaagagaaggcaccccagggttccccgaggaggtagccatcccggttgagtgaccgcagccggaccccggggcgatggtaggc

SEQ ID NO: 55701 - DNA, 760 bp, Homo sapiens
  chr19:12996030-12996790
  hyper
aggccagccaagtccaagtcccgccctctgcaacccttcttcccctgtaactacagcgggcgccgcgccctttctcatgtccggggccccgccccctcacctgtgtgcgtgcgcagatgcgccttcaggtgggagctcttggtgtagctcttgccgcaacccgggtgcgcgcacgtgtgcgctgcctgcctcttgcgcgcccacgaacgtcggcctcgcttggatggcgcggtctcggctatcacacctggatcctctgcagtccccccgagtccagtgcccaccgtcccgggtcccaaacaactcaggaaggagggggacgtggcgggaccgggcgcgggtccctggagcccgcggaagagctggaagtgcccttggtactgaggcgccgggtacatcgcggggtacccggacagtagcccgtagggggcgcccgacgccgcaggcactgaaagcccggtccgcgggaagtagccacccgaggagccggcgccgggccccgggtacaccggttgcagcgccagcgccttgggctcgggggccggggctggagccagggctgggcccacgaaggcgtcgggagcccgggctcgcagggcagggcgcacccaacccgagtgatcctccgaacccaaaagcccagccaccagccccgggccgccagcatatgcgcccagagtctcgggcggcggcggatattgcgccccggaggcctcgctgggcgccagagcgcaggtctggggcgcgccaccgggctccg

SEQ ID NO: 55702 - DNA, 30 bp, Homo sapiens; identical to SEQ ID NO: 12075
  chr19:13001975-13002005
  hyper

SEQ ID NO: 55703 - DNA, 30 bp, Homo sapiens
  chr19:13002467-13002497
  hyper
taaggcagtgagtgcgctgtgcctgcgggg

SEQ ID NO: 55704 - DNA, 37 bp, Homo sapiens
  chr19:13029430-13029467
  hyper
tgtgtgttggctggagtccttcgagaaaggagaagag

SEQ ID NO: 55705 - DNA, 584 bp, Homo sapiens
  chr19:13029785-13030369
  hyper
tgaaagaaacgggtgcggtgcgtgggtgtttgtgcctttctctactccgttccggccacgcgccatgtgtggaaatcagacccgtcagtgcgtcagtcagggccgggttcagtcagtcaggaaatttgaggccaggcctgatgagagggagccccaatggcaaaggacaagcggccgggctcgggtccgctggagatggctgggatcgcagccgttccctgcctatctgtccgcccgccccacgcgcgagaaggaaacaagcgccgcgtactccctgtcgctccattccgtattttcccgccttcaagctcgcaccctctgcgcatgcgccgaccccgcccctggccagctgcgctcccgcggacgagtgtgttgtgacgcgtgctcccggccccgccctctttgagaacttgcgcggccaactgggcggggccgaccgttaagcagcagtttcgcggtccgcgggctgcgcgcgcagtcggcgccccttgggagcaggacggcgcgctctgggtgcgcttgtgtgcccctgtgaggctcctgggttccacggggcgcccaggttatacggatctcagagtcct

SEQ ID NO: 55706 - DNA, 30 bp, Homo sapiens
  chr19:13044623-13044653
  hyper
agggctcaatgtgtcgtcatcttgagtgtg

SEQ ID NO: 55707 - DNA, 472 bp, Homo sapiens; identical to SEQ ID NO: 12077
  chr19:13049976-13050448
  hyper

SEQ ID NO: 55708 - DNA, 829 bp, Homo sapiens; identical to SEQ ID NO: 12078
  chr19:13050857-13051686
  hyper

SEQ ID NO: 55709 - DNA, 932 bp, Homo sapiens; identical to SEQ ID NO: 12079
  chr19:13054372-13055304
  hyper

SEQ ID NO: 55710 - DNA, 30 bp, Homo sapiens; identical to SEQ ID NO: 12080
  chr19:13057191-13057221
  hyper

SEQ ID NO: 55711 - DNA, 62 bp, Homo sapiens
  chr19:13067539-13067601
  hyper
tgcggccaggtgagcgtatacataaatctacaacatgcagatgctgcgacgtgaccccgaag

SEQ ID NO: 55712 - DNA, 30 bp, Homo sapiens
  chr19:13068136-13068166
  hyper
tcgggggagggcggcgaaggggatagtatg

SEQ ID NO: 55713 - DNA, 132 bp, Homo sapiens
  chr19:13094455-13094587
  hyper
ccctgcgcgcgggccgcgcgtgccaagaggatgccatggttacgtcaggcgcgtgcccgtcgcgcgcgccgccgtcccgcgcgctcttgcagggaggggccaggccagcagggggcgcgcggcagtagcctc

SEQ ID NO: 55714 - DNA, 1033 bp, Homo sapiens
  chr19:13106027-13107060
  hyper
catgtgtggcggggtccgagtcccgctgcgtgtcagcgtgtgtctgcgctggaacgcgggccagcacgtgtcagggcggccgcgtcggtgtgcgcccccgcgcgcgcgtgtgcgtgtgttcgtgtgtgtgtgtgcatgtgtgtgcttgtgtgtgtgcgccggccgccgctcccccgccctgcccgcccctccccgcgcccctcctcccgcccgcgccgcccgcccgctccctctccccggagtgcgccgcttccaaactttgtctaaactttcactttcacagcgcggcggctgcggcggcggcggcggcgggcgagggtgaccggccgagcggcggcggcatggagtagacgcgcggcggcagcggcggcggcggcggacgcgagaggcagcggcgagcgcggcggcggcggcggcagcggcggccccggagccggcggggccgagcttgcgagcggcgagcgcggagcggcgccgggccgagcgcggggccgcgggccgggcgggcgcagcgcggcggaggccggaggagccgagccggagcccgagcccgagcgcggccgccgcctgccgggcctcccctcgccgcggccggccgccgcgctcccgcccgggcgcccagctatgtactccccgtactgcctcacccaggtaccggccgccgcccccgcgcgaccgggggaggggagcgggcgcgggaggccggccggcggcgcgggcggaggggacgcgcggcggccgggaagggggggccgagagcccgcgggccgccgaggggtgcaggctgtgccgcggggagcccaggcacgcgtgcgggcgtcaccgtgcgcgtgcgaccctggccaccgggcggactccttttgggggttccgggggtggccagctgcgtcgtggcgctgcccgtggagcgcaggcgggagtgcgtgtacgtgtgtgtgtgtgtgtgtgtgtgtgtgtgcgcgctcgactggggtgcgatgggcagcgggactccggctgacctgtgggctactgtagcgcgcacccgggcagc

SEQ ID NO: 55715 - DNA, 31 bp, Homo sapiens; identical to SEQ ID NO: 12084
  chr19:13107273-13107304
  hyper

SEQ ID NO: 55716 - DNA, 30 bp, Homo sapiens
  chr19:13134239-13134269
  hyper
tcccccttttcctccgatcaggcagctcga

SEQ ID NO: 55717 - DNA, 808 bp, Homo sapiens; identical to SEQ ID NO: 12085
  chr19:13208696-13209504
  hyper

SEQ ID NO: 55718 - DNA, 53 bp, Homo sapiens; identical to SEQ ID NO: 12086
  chr19:13213413-13213466
  hyper

SEQ ID NO: 55719 - DNA, 89 bp, Homo sapiens; identical to SEQ ID NO: 12087
  chr19:13213673-13213762
  hyper

SEQ ID NO: 55720 - DNA, 3 bp, Homo sapiens
  chr19:13213789-13213792
  hyper
cgg

SEQ ID NO: 55721 - DNA, 30 bp, Homo sapiens; identical to SEQ ID NO: 12089
  chr19:13227406-13227436
  hyper

SEQ ID NO: 55722 - DNA, 30 bp, Homo sapiens
  chr19:13229411-13229441
  hyper
ggaggcccagctaccgcgggcggccttgag

SEQ ID NO: 55723 - DNA, 30 bp, Homo sapiens
  chr19:13260760-13260790
  hyper
cctgcctctgcccccgactgcaaacccaaa

SEQ ID NO: 55724 - DNA, 30 bp, Homo sapiens
  chr19:13262970-13263000
  hyper
tcccaacctaaccccgcctccccgaacgcg

SEQ ID NO: 55725 - DNA, 82 bp, Homo sapiens
  chr19:13263792-13263874
  hyper
gcgtccttcggttgggcggggtgtctcagtgacgtcactgggggtataaaagggcctgggtggcgggcgcctgggcagagcg

SEQ ID NO: 55726 - DNA, 465 bp, Homo sapiens
  chr19:13264168-13264633
  hyper
cccgaggtgtcgttgccggccgccctcccctctgaccctcgcctgcacccgccccgagaagccgagtccacggccgagacagcgacccccgacggtgagcacccgtttccggagccaatggacacgcaggaggcgccgacagccgaggagacctccgcctgctgtgccccgcgccccgccaaagtcagccgcaaacgacgcagcagcagcctgagcgacggcggggacgctggactggtcccgagcaagaaagcccgtctggaagaaaaggaagaagaggagggagcgtcatccgaagtcgccgatcgcctgcagccccctccggcgcaagcggagggcgcctttcccaacctggcccgcgtcctgcagaggcgcttctccggcctcctgaactgcagccccgcggcccctccgacggcgccgcccgcgtgcgaggcaaagcccgcttgccgcccggcggacagc

SEQ ID NO: 55727 - DNA, 1230 bp, Homo sapiens; identical to SEQ ID NO: 12090
  chr19:13265820-13267050
  hyper

SEQ ID NO: 55728 - DNA, 63 bp, Homo sapiens
  chr19:13274018-13274081
  hyper
cggcccagcgggaaggcggaggcgggggtcgcgcccaggtcccgggggcgtcagaggcaatgg

SEQ ID NO: 55729 - DNA, 30 bp, Homo sapiens
  chr19:13507622-13507652
  hyper
cagaatgctttgctccgtttccggtttggt

SEQ ID NO: 55730 - DNA, 285 bp, Homo sapiens; identical to SEQ ID NO: 12092
  chr19:13616671-13616956
  hyper

SEQ ID NO: 55731 - DNA, 306 bp, Homo sapiens; identical to SEQ ID NO: 12093
  chr19:13617158-13617464
  hyper

SEQ ID NO: 55732 - DNA, 105 bp, Homo sapiens; identical to SEQ ID NO: 12094
  chr19:13617489-13617594
  hyper

SEQ ID NO: 55733 - DNA, 55 bp, Homo sapiens; identical to SEQ ID NO: 12095
  chr19:13617922-13617977
  hyper

SEQ ID NO: 55734 - DNA, 105 bp, Homo sapiens; identical to SEQ ID NO: 12096
  chr19:13618305-13618410
  hyper

SEQ ID NO: 55735 - DNA, 30 bp, Homo sapiens
  chr19:13953210-13953240
  hyper
acctgcccaagtcgcgcggggacccgccct

SEQ ID NO: 55736 - DNA, 196 bp, Homo sapiens
  chr19:13954424-13954620
  hyper
ggcaccctcccccacccgctgggacctctgggaaactccccgggctcccggagtagctctgggagcaaggccctccctggatccctccctctttcccggtgtgcctgtctttcccgctccatcctccagcctccaccgggaggaacgcggctgcattgttcctcaggaggaggccctgcctcggggcctggcccag

SEQ ID NO: 55737 - DNA, 74 bp, Homo sapiens; identical to SEQ ID NO: 12098
  chr19:13961396-13961470
  hyper

SEQ ID NO: 55738 - DNA, 31 bp, Homo sapiens; identical to SEQ ID NO: 12099
  chr19:13961694-13961725
  hyper

SEQ ID NO: 55739 - DNA, 30 bp, Homo sapiens
  chr19:13976941-13976971
  hyper
ggggccaaggtttgcgaacaggaacccgcc

SEQ ID NO: 55740 - DNA, 30 bp, Homo sapiens
  chr19:13984076-13984106
  hyper
gtgggtggggctctcgggggcggggctctc

SEQ ID NO: 55741 - DNA, 30 bp, Homo sapiens
  chr19:14017419-14017449
  hyper
taagccccggtccccgcctccccccaggtg

SEQ ID NO: 55742 - DNA, 1344 bp, Homo sapiens; identical to SEQ ID NO: 12100
  chr19:14073500-14074844
  hyper

SEQ ID NO: 55743 - DNA, 30 bp, Homo sapiens
  chr19:14116492-14116522
  hyper
cccaccctggttcccgaggtggaggttggg

SEQ ID NO: 55744 - DNA, 30 bp, Homo sapiens
  chr19:14117264-14117294
  hyper
tctggacttcccggcgatctgatttatcag

SEQ ID NO: 55745 - DNA, 30 bp, Homo sapiens; identical to SEQ ID NO: 12101
  chr19:14117526-14117556
  hyper

SEQ ID NO: 55746 - DNA, 30 bp, Homo sapiens
  chr19:14184728-14184758
  hyper
ccagccgcccccaccgattgcccaacttca

SEQ ID NO: 55747 - DNA, 175 bp, Homo sapiens
  chr19:14202316-14202491
  hyper
aaagggcagtttgacgctcgtttctcctgcggggccgaaggagtgccggaatttcagctaaaccctggttacaaggacttcaagccaggacctgatcggcctgcacgctggggtccgaaattccctttccaaccccctgggggtgtgtgggtgggtgatcgaagtcgagaacacc

SEQ ID NO: 55748 - DNA, 31 bp, Homo sapiens; identical to SEQ ID NO: 12103
  chr19:14205671-14205702
  hyper

SEQ ID NO: 55749 - DNA, 30 bp, Homo sapiens; identical to SEQ ID NO: 12104
  chr19:14228458-14228488
  hyper

SEQ ID NO: 55750 - DNA, 31 bp, Homo sapiens; identical to SEQ ID NO: 12105
  chr19:14306908-14306939
  hyper

SEQ ID NO: 55751 - DNA, 49 bp, Homo sapiens
  chr19:14316560-14316609
  hyper
ggcgctccgtgggggccgcccctcccaggcccctcgccagtgggggtga

SEQ ID NO: 55752 - DNA, 30 bp, Homo sapiens; identical to SEQ ID NO: 12106
  chr19:14529908-14529938
  hyper

SEQ ID NO: 55753 - DNA, 215 bp, Homo sapiens
  chr19:14542784-14542999
  hyper
ggacgactgaaaccacgcagagccacgggtaaccaaggtacccgcagcccacggcgcttcctcgggtcccaaagggcgccaatgtgcaggcaccgccgccagggagcgctccctgccggagccccggagaccaaggtttggctccctcgcctggtttccgaaggagtgagggtccgacggcggccacgaacaaagctgcacgctctgcagacccc

SEQ ID NO: 55754 - DNA, 251 bp, Homo sapiens
  chr19:14583264-14583515
  hyper
gtcctgcctgggctcgcagaatggctttttattcccaaaggctctgcgccgcgcacctgggcccagcccagggtgggctggcttagtcgttgggcctctggttgtgcttagaagtggctgaggccgctgtgccgggagctgcgcagcgagctggcctcccaggcgctcggtgttaggcccagccccgcggggccgcccttggctccggccctcgggggcaagaggcgaagcagttggcgcagcacggcctg

SEQ ID NO: 55755 - DNA, 182 bp, Homo sapiens; identical to SEQ ID NO: 12107
  chr19:14583613-14583795
  hyper

SEQ ID NO: 55756 - DNA, 245 bp, Homo sapiens; identical to SEQ ID NO: 12108
  chr19:14584167-14584412
  hyper

SEQ ID NO: 55757 - DNA, 353 bp, Homo sapiens; identical to SEQ ID NO: 12109
  chr19:14584536-14584889
  hyper

SEQ ID NO: 55758 - DNA, 58 bp, Homo sapiens
  chr19:14607123-14607181
  hyper
gtggaccgttccgccccgcctaagccgcggctggctgtaccaccggagggctgaggag

SEQ ID NO: 55759 - DNA, 30 bp, Homo sapiens; identical to SEQ ID NO: 12111
  chr19:14640085-14640115
  hyper

SEQ ID NO: 55760 - DNA, 30 bp, Homo sapiens
  chr19:14640324-14640354
  hyper
ggggcgaacgtgggcgcctcgtgccctgat

SEQ ID NO: 55761 - DNA, 30 bp, Homo sapiens; identical to SEQ ID NO: 12112
  chr19:14800715-14800745
  hyper

SEQ ID NO: 55762 - DNA, 198 bp, Homo sapiens; identical to SEQ ID NO: 12113
  chr19:14887409-14887607
  hyper

SEQ ID NO: 55763 - DNA, 563 bp, Homo sapiens
  chr19:15089970-15090533
  hyper
ccctctgacagagaaggcaaccgagccctataaatgcacaaggcatcgggctcggtgctggaaacgtgcctgtgtgcggaggccacgggttggggaggtggggagacgggcagggagacccggggataactaaggggataggaaactcaccagaacgaccaggagaaaagcggtggcaacggctctaaggggcaagcaggagctcagagacaaagggcggcggagaagtggggacgtgggcgcagggagcgccccacacgcctgaccccagcgcctcggatcccccacctgcccgcaacctccgcgccgcagccacaccgagtccccgcgccgagccgcggagtccccactcaccggcgtccggagcggcgggggcggcctgcccgcgcctcggcctgcgcgctgcgcccggatgcaggagccggagcccggcgaagcgcccggccggggccgcggggacccgccagggactgtgcagcaccggcgcggggaccggaccgtggaggcaccggcgcggagccgggacgcgctatgctgcgggagggatccgggccggccctgcg

SEQ ID NO: 55764 - DNA, 276 bp, Homo sapiens
  chr19:15090813-15091089
  hyper
caggccctggcaccgcgggacccgctccagcagcctcggcggaggcctggggaaggcgcggctctagtgtcccagtaacaacagccagggagagggctccgctgcccccttctccttgcgggtgcaccttccggccttggccacttggctgctgtgtgcccttgggccaactcctctccctctctgagcctggcttcctccgctaaacaaggaagatggcttggccgaccccacagaaaattaaagctgagaaaattaaagcgcgtgaggctggaa

SEQ ID NO: 55765 - DNA, 615 bp, Homo sapiens
  chr19:15121587-15122202
  hyper
ttccgctccgcctagggttcccggccaggccgagagaccaagcagggaccatgcgcgtgttggtacccccggctgagcgcagccaggacacacgcgttggggccccagcatggcgcgaggcagctcaggccatggcgaggaccgcgcacattctgaccgatcgctgcgggcaggaggcggtgaccatgtggcagcccaaggacagcgtgctggacccgaacgtggcccaccacctcggccgcgccgcctacatccagccctggcgcttccgcgtggagatgatcaaaggcggcggcaccttggagaagccgccgccaggcgagggcgtcacgctgtggaagggcaagatgaagccgcccgcctggtacgcccgcctgccgctacccttgcaccgcaaagcgcgcgccctgcagaccaccgaggtggtgcacgcgcacgcgcgtggagcgcgcctcaccgccgcccgcctcggccgcgcgcagcaccagattaacgggcgggtgcgacagctgctgcgccagcgcgaggtcaccgaccacaggctcagcgaagtgcgcaagggtctgcttattaaccagcagagcgtcaagctgcggggctacaggcccaagtctg

SEQ ID NO: 55766 - DNA, 220 bp, Homo sapiens; identical to SEQ ID NO: 12116
  chr19:15218124-15218344
  hyper

SEQ ID NO: 55767 - DNA, 210 bp, Homo sapiens
  chr19:15235758-15235968
  hyper
gccccaggcggtgagcggcgcccagcaaggcggccaccagcgtcccgcaggccaggagcaggaaggaggggaataagctcccagcgggggcggcggccgcgggggtctccatgaggtggtacctaagagagaaagggcacttcccagacttgggcgcgacagggaacctctccggaagaaatcgcgccccttctcgcagcaggatccagg

SEQ ID NO: 55768 - DNA, 573 bp, Homo sapiens; identical to SEQ ID NO: 12117
  chr19:15288254-15288827
  hyper

SEQ ID NO: 55769 - DNA, 368 bp, Homo sapiens
  chr19:15306317-15306685
  hyper
cggcttgtcccagacgcctgagactgaactcaacaagcggctgactcagtccttagcgtcacccgcaagatcccccccaccccggcccccagcgaaacaggtcggggcacggccgagcaagcaagggtgcgggtggcgttgggaggggagggcacagctcccgtcccctcctccaaggcccgcagggcgaccactgcggccccgaccgcgcgtcgggagggggcgcgctgcgctgggcgccgaggatagctggtcccaccgccaggcagggcgcgacccgcgcgggccccctcccgacgccccgggcgggttcccacgctctgcgtcccgcgcccccgccgaccggtcgggccggttccagccccagc

SEQ ID NO: 55770 - DNA, 374 bp, Homo sapiens
  chr19:15310945-15311319
  hyper
gccccttcccctccccgcgcaggggcggggtcccagggcctccgggtccccgcggccagaggagagaggcgggctgcgggcgggggagggggcgcgcgcgccgccgaggctccggctcggaatccggctccgggtcttgctgcgcgccggcctgggaagttttctccgagttcagagctcccagaacttcgcgccccctccccaccccccgcctggcccagcccgcccggggtgtcgggggcggggtgggggggcttttgtgcgagaggtccccggcctagaagtacctgggcccccaatcataacctacccaggactccaggcgtgagttggatggggacgagtcccgaactctgtacgcacccccccacctc

SEQ ID NO: 55771 - DNA, 741 bp, Homo sapiens; identical to SEQ ID NO: 12120
  chr19:15334101-15334842
  hyper

SEQ ID NO: 55772 - DNA, 706 bp, Homo sapiens; identical to SEQ ID NO: 12121
  chr19:15342706-15343412
  hyper

SEQ ID NO: 55773 - DNA, 30 bp, Homo sapiens
  chr19:15479820-15479850
  hyper
aggccagggacggacgctgaaaaaaggttg

SEQ ID NO: 55774 - DNA, 30 bp, Homo sapiens
  chr19:15490643-15490673
  hyper
cgtcactacttccgcgcgcccccattggct

SEQ ID NO: 55775 - DNA, 30 bp, Homo sapiens
  chr19:15529836-15529866
  hyper
cgagccccgcctcccgaccgcattggctca

SEQ ID NO: 55776 - DNA, 30 bp, Homo sapiens
  chr19:15560159-15560189
  hyper
tccctacccaggcccggaggaagcacctgc

SEQ ID NO: 55777 - DNA, 391 bp, Homo sapiens
  chr19:15619209-15619600
  hyper
tttctagggggcagcgctggagtccccgcccagaaccctgcgggagcccggggcgggatgtccgggggcggacccctcggcacggccgggcggggttaaagggttgggccgtgggacggcgcggtcagatcccaggtagtggcgccggtggatccggatcgagggcaggaggctgagacccgcgggtgagtgcgcgcgtggtgagggctgtaacctgagcgcggccgcggcgctgcgctggaacccgaggctcgcgcggttcggtgctggcggggcaagggcgaaggtctgcgcgcggcggcgggcggggcgcagccggccacggggacccccccaggacccaggacggggctgcatgcccggggcactcgtggggagaggggcacgtggg

SEQ ID NO: 55778 - DNA, 512 bp, Homo sapiens; identical to SEQ ID NO: 12122
  chr19:15695277-15695789
  hyper

SEQ ID NO: 55779 - DNA, 30 bp, Homo sapiens
  chr19:15947133-15947163
  hyper
actgctctgtggaacgatgatcatttaaat

SEQ ID NO: 55780 - DNA, 826 bp, Homo sapiens
  chr19:16186793-16187619
  hyper
cctgcacctcggggacgtgaccccccccccaggctgacccgttcctcgctctgtcgtccccaggtggaggaggagctgacgcacctccagaagaaactaaaagggacagaggacgagctggataaatattccgaggacctgaaggacgcgcaggagaagctggagctcacggagaagaaggcctccgacgtacgtgtgcagggatgcgggagcccgcggcggggccaggccggagccccggggccgggaaggcggggagagccgcagggggaggaggaagaggaggaggagaaggcggcgcctcccagcgctttctccaaataagtcccgaaaaggggcactttccagcagctgtggccagcggtgccgacgtcaggccctcccccagcggtgctgacgtcggcggtccggccgggtgacctcatcgccccgacggcagccggcccggggggcggggagaggcgggggcggcccccgcgcaggcaaaggcttggggggccggggcgcggctgtgcagctctcgccggagccgagcccagccgagcgtccgccgctgcccgtgcgcctctgcgcctccgcgccatggccggcctcaactccctggaggcggtgaaacgcaagatccaggccctgcagcagcaggcggacgaggcggaagaccgcgcgcagggcctgcagcgggagctggacggcgagcgcgagcggcgcgagaaagtgagcgccccggcctcgggccccgcacccgcagcctcctcccccgcgcgccctcctttcttcccggcttcccgcgctgcccgcccgcgcgcagtcctcgggccgccttttt

SEQ ID NO: 55781 - DNA, 655 bp, Homo sapiens
  chr19:16187640-16188295
  hyper
cgacccacatccctgcgcccgcagccaggaccccctacttcctccgccgtcctccttcctgggcctgggacaggggagggggcgccgcctccgggtcgggcggggccggccaagcgggaaatggggggatggggcggagggggtgagcgatctccgggtggagaagtggagcggcgggagggggcgtatcgtgcaggctccgactccggggctggcgccggggtcccgggccgaggggaacccgcgaccggacttgtgggggagaatgaggatgaaaacgtggagcttccattgtctagggtttgaccggccgacagggatttcgacgggggaccggggatctggggagggggtcgcactttctcgcctctttcgcggcttcccggcttctgcttgcttccctgaccgttcccaggggcgcggcggcgacgtgtctgctccaggcggcgggggggatggggggtggaggaagttcagccccaagccgcccgcctttctccagctgattcctgcgggaaccggggcggcgggaccctgcctctctccagaaggccccgggaacgctggcgcggggccctgaacccacgatcgtttgagcgcctgctgtgcgcctccgccgcgagtcgcagggcccgagataaacaatgggtctgaa

SEQ ID NO: 55782 - DNA, 225 bp, Homo sapiens
  chr19:16222188-16222413
  hyper
gcgagctgtgagggcgggacccagagacacccgccccaactactggcgtgcgccctctgctgtcgcctaacggaactccgggcgcgcgtgcgcacgcaccccaagccacgccccgccaggctgccggcgcgcgagcggttggcgccgctccctgccttccctctcctacagtggggcggggccgggccgcccgagtcgggggtggaaggcgggggccacataatg

SEQ ID NO: 55783 - DNA, 82 bp, Homo sapiens
  chr19:16222616-16222698
  hyper
tggagccaataaggggcgggctcggtgctgatggacggtgctggtggccagtggagaggcgctggccgcacttcccgtcggg

SEQ ID NO: 55784 - DNA, 30 bp, Homo sapiens
  chr19:16296639-16296669
  hyper
ggtcagggctgggacgctccgagggcaggg

SEQ ID NO: 55785 - DNA, 179 bp, Homo sapiens
  chr19:16308330-16308509
  hyper
tttccaagtaaccacgaccttacctctctcttttgagcttatcacaattggtgactgtacacttgtttcatagacttccccaccagactgtgagctccatagggctgggccccaggtcggtttcaccaccaggctctctcgcctaactcggcccacgggaggccgtttccagctgctct

SEQ ID NO: 55786 - DNA, 30 bp, Homo sapiens; identical to SEQ ID NO: 12127
  chr19:16436107-16436137
  hyper

SEQ ID NO: 55787 - DNA, 30 bp, Homo sapiens
  chr19:16583102-16583132
  hyper
tctgttagggatgccgtccccctgccagtg

SEQ ID NO: 55788 - DNA, 31 bp, Homo sapiens; identical to SEQ ID NO: 12128
  chr19:16638140-16638171
  hyper

SEQ ID NO: 55789 - DNA, 30 bp, Homo sapiens; identical to SEQ ID NO: 12129
  chr19:16771073-16771103
  hyper

SEQ ID NO: 55790 - DNA, 30 bp, Homo sapiens
  chr19:16771323-16771353
  hyper
ggggtccctagaaacgggtgccccaaccaa

SEQ ID NO: 55791 - DNA, 673 bp, Homo sapiens
  chr19:16772105-16772778
  hyper
cctcagttacttcatcgtctccatcctctacctcaagtatgagccaggtgagccggggcggggggctggaggggaccggcagcgggtggcgcgggccggggcagctcgggggtcgcagagaggggaagcccgtgcgtggtggagggagcgagggacaggttcaaggattgcatcgtgggagtaggcaggcgctagaatcgtggggttctctcacgccggggtgagcccgggggagaagcccccaggacgatgaagctgggggaggggaaggagaggcgtgcgcgggtttagaggagggggaacaggtgcttggggtcggggctcctggttgggtcagagctgcaggaacttgggcaaggggcgccggctgtggcgagggtgcaggtgggggtcggtgcatctgttctggccgcgcgcaggtgtgacctccctccttgaccttggcacgcggattgagagcgccagcggagtgtctataagggccactgcgctgggggctgcggtcaggttcagcgaaagtgacaccggttctcctccccactgcaactgcccagcaccctccactcccctcccttcccccacggtgctgaatctccgagcccccacgggaattcttccagccctggctccagatcctttccacttacggagcagaaccggccccaaggctggg

SEQ ID NO: 55792 - DNA, 30 bp, Homo sapiens
  chr19:16830271-16830301
  hyper
atggctaacatctcacgggcccttcctgtg

SEQ ID NO: 55793 - DNA, 334 bp, Homo sapiens; identical to SEQ ID NO: 12131
  chr19:17007054-17007388
  hyper

SEQ ID NO: 55794 - DNA, 336 bp, Homo sapiens; identical to SEQ ID NO: 12132
  chr19:17007446-17007782
  hyper

SEQ ID NO: 55795 - DNA, 385 bp, Homo sapiens
  chr19:17008133-17008518
  hyper
tcacctccccctcgccgctcgaccccgccctcaccacactgaccaccctcaacccattgcgcccagtccccaccacagtgaccacaccctcactggctcggccctgcccccagtatactgaccattccccagccacttcccttccgcacttaccactcccccagccacgcccctccccgctgaccgctcctccagccccgcctcccccgtacaggcagagcgcccgcccacctctatgctgcgttctcctgactttacgttggcccctcctctgccaagcccccaggggagccctccctggcgtccgagggtgggagtcggggtgtggcaggccgcggtggggggcggcagtggctccgcgcactcacccgggccccgggcaggg

SEQ ID NO: 55796 - DNA, 113 bp, Homo sapiens; identical to SEQ ID NO: 12134
  chr19:17008585-17008698
  hyper

SEQ ID NO: 55797 - DNA, 31 bp, Homo sapiens
  chr19:17008820-17008851
  hyper
gggcgcaggctcgacccgggccaggaggccc

SEQ ID NO: 55798 - DNA, 190 bp, Homo sapiens
  chr19:17137168-17137358
  hyper
tgtacctccacagagccacttcggaaactttagggcgccccctcctcaagacgattcgggaacaagaggccaggtccagcccagcgcggaggctgtgtggccttgggcaggtcgctgcaacactctgagccagtacccgcgacccccaccccagaaggcgaccgacctcctctgtcgccggaggatactc

SEQ ID NO: 55799 - DNA, 99 bp, Homo sapiens; identical to SEQ ID NO: 12135
  chr19:17355756-17355855
  hyper

SEQ ID NO: 55800 - DNA, 198 bp, Homo sapiens
  chr19:17356127-17356325
  hyper
gcgcgcggggggcacgggctgcaccccccaaaaaagttttgcagcaacttcctgcggccggtcctcgcgcccgggcggaactggtcgggccggttccaggccaactttcccacgcgtgcgcggggccgggcccggggccgggaggggcacgctagaggcgcgggccgggggcccagaggactcgcgtcccgccgccct

SEQ ID NO: 55801 - DNA, 30 bp, Homo sapiens
  chr19:17389688-17389718
  hyper
gggtaccagctacaagtatgaggtggcact

SEQ ID NO: 55802 - DNA, 377 bp, Homo sapiens
  chr19:17392549-17392926
  hyper
taaagctctcgaaccccgatgtggacccccgtgcggcgcggggcagcctggctgggaaccctgctcggccctggagaggggccccccgagccgaggggaggagcggcgcatgcccacaagccccccgcgggaagtaggaaatcgaccgaccaggcggtgcgcttcggacccagccagggcatgtgctcggaggcccgcctggctcgcaggttgcgggatgcgctgcgggaggaggagccgtggtgagggcggggccgggggcgggccaggagtgggggtctttggccggggtccactctgaccgcggtgtttgcagggcagtagaggagctgctgcgctgcggcgcggaccctaatttggtgctagaggacggcgca

SEQ ID NO: 55803 - DNA, 69 bp, Homo sapiens
  chr19:17393042-17393111
  hyper
cggggtctccccaagccgaagtctgggaatccgggaaggggcgccccatcatcccgggccaggcctcgg

SEQ ID NO: 55804 - DNA, 55 bp, Homo sapiens
  chr19:17420264-17420319
  hyper
gcggccaatggaagcgtgcaaagcgctcctatgtgggggcggggctagactgcac

SEQ ID NO: 55805 - DNA, 30 bp, Homo sapiens
  chr19:17445058-17445088
  hyper
gattctgtattcttcgcggagaggctctct

SEQ ID NO: 55806 - DNA, 513 bp, Homo sapiens
  chr19:17448122-17448635
  hyper
ccttattcctattgtcagcctcgctgcgctaggaccctaaaaatttggtctcatgttgcccggggaacaacatttcgctacacctacctccataccgcctcccgctcccgctctcccttgcaccagccaatggaagcgagtatcttcagacggtgggcaggacgtatcctaagatacccaatggtggtcgagaatagttgagcactttactagtcaagccgcggagtgggcggggccccctgcccagacttgaagccacacaggcaggtcgggcaggcgggtcgcaggttgtaaatccatgtggcgggggctttggaccctggcggcccaagcggcacgtgggcctcgcaggtggggctacaggggaaggggtgcgacagcttggggtgctgcttggaccccagacccactccctgggttttaggggcccaattccctgcggcagagcaatcattcgcgttcttccgtgcctcaatcgttcatgacccttgcggcagagcccatatctgggtc

SEQ ID NO: 55807 - DNA, 30 bp, Homo sapiens; identical to SEQ ID NO: 12140
  chr19:17501242-17501272
  hyper

SEQ ID NO: 55808 - DNA, 30 bp, Homo sapiens
  chr19:17501923-17501953
  hyper
aagtaatgattggccgaaagaatgcagccc

SEQ ID NO: 55809 - DNA, 16 bp, Homo sapiens
  chr19:17502609-17502625
  hyper
cgtccatctcaatctt

SEQ ID NO: 55810 - DNA, 30 bp, Homo sapiens; identical to SEQ ID NO: 12141
  chr19:17530727-17530757
  hyper

SEQ ID NO: 55811 - DNA, 232 bp, Homo sapiens
  chr19:17531153-17531385
  hyper
ctttggcaagagcttcgcgcagaaatctggctacttcctgtgccttagttctctgggcagcctagaggtaagaggtgcccaccttcggaaccaccagggtctgcccacctcccctgcccattcacggtgccctatgccaggtgcgctgtccccgctgctagccaccctcgccgtgtcccccttccacccccagaacccgcaggagaacgtggtggccgatatccagatcgtg

SEQ ID NO: 55812 - DNA, 30 bp, Homo sapiens
  chr19:17581951-17581981
  hyper
ggggctcacagggacgacccaatagatagt

SEQ ID NO: 55813 - DNA, 150 bp, Homo sapiens
  chr19:17622144-17622294
  hyper
aactcaccaaaatacgccctccttcagaaaatccctgccacctcgataggacgtcctcttcttgagctcccctctccggccctccctgatacagcaaggttgagcattcgggcactggcttcccgaactcacttcgactcaggcacagca

SEQ ID NO: 55814 - DNA, 30 bp, Homo sapiens
  chr19:17667139-17667169
  hyper
ctccctctggggcacgtacacctccaaagg

SEQ ID NO: 55815 - DNA, 1043 bp, Homo sapiens; identical to SEQ ID NO: 12144
  chr19:17716508-17717551
  hyper

SEQ ID NO: 55816 - DNA, 479 bp, Homo sapiens; identical to SEQ ID NO: 12145
  chr19:17790866-17791345
  hyper

SEQ ID NO: 55817 - DNA, 53 bp, Homo sapiens
  chr19:17792548-17792601
  hyper
agaggcgcgggcaggcgctgtccacggtgctgaatgctcggtcccacccgtgt

SEQ ID NO: 55818 - DNA, 30 bp, Homo sapiens
  chr19:17797518-17797548
  hyper
tttaagaacacccgcgtccacgccggccca

SEQ ID NO: 55819 - DNA, 28 bp, Homo sapiens
  chr19:17798705-17798733
  hyper
agaaccccggatacccgtccacgtccac

SEQ ID NO: 55820 - DNA, 298 bp, Homo sapiens
  chr19:17798754-17799052
  hyper
cgtccacacgacccctccagcagcggccaccaggacccccgagagccctgccgcgtctacacggatcaccccctccggggcccagctgcgtcgacaagggctacccctctcaaaagtccagccacctggactcgggtcaccccccaggaaccccctgggagccgcatccacgcggaccccgaccccagcccgcgtccacacgggtcccccgacccccagcctcgcctcctacctccaacgcaaagcagagacatgtctccgagctcgcaggtgggccggaggcggccgggccggctct

SEQ ID NO: 55821 - DNA, 89 bp, Homo sapiens
  chr19:17799310-17799399
  hyper
gggacaaggggcgacggcggcccccaagcaggtttcctcctgtgcagaccctcacctgcactgaaatggtgcacgtgcccccgccaccc

SEQ ID NO: 55822 - DNA, 30 bp, Homo sapiens
  chr19:17830236-17830266
  hyper
cagcccttccggtgcggcccctttaagagg

SEQ ID NO: 55823 - DNA, 29 bp, Homo sapiens
  chr19:17858814-17858843
  hyper
gcgaaaatggggaccgctccccaaatccc

SEQ ID NO: 55824 - DNA, 476 bp, Homo sapiens; identical to SEQ ID NO: 12150
  chr19:17958345-17958821
  hyper

SEQ ID NO: 55825 - DNA, 30 bp, Homo sapiens
  chr19:17982744-17982774
  hyper
tcacgagctgctcccgtaagccccaaggcg

SEQ ID NO: 55826 - DNA, 663 bp, Homo sapiens
  chr19:17983002-17983665
  hyper
gcggggacaggctgccgagcatcctcccacccgccctccccgtcctgcctcctcggcccctgccagcttcccccgcttgagcacgcagggcgtccgaggacgcgctgggcctccgcacccgccctcatggaggccgtggagaccggggaacggcccaccttcggagcctgggactacggggtctttgccctcatgctcctggtgtccactggcatcgggctgtgggtcgggctggctcggggcgggcagcgcagcgctgaggacttcttcaccgggggccggcgcctggcggccctgcccgtgggcctgtcgctgtctgccagcttcatgtcggccgtgcaggtgctgggcgtgccgtcggaggcctatcgctatggcctcaagttcctctggatgtgcctgggccagcttctgaactcggtcctcaccgccctgctcttcatgcccgtcttctaccgcctgggcctcaccagcacctacgaggtaccggacagaggcccgggggtaggacctgccccactggcagtgctgggaccccgtgtgggggaggcgctggggctttgggccgctgtacaggaggacgcggatggcacctcggtgctttaacggaaggggcccctaggcagacacgtggggagggttctaggaagaggccccaggcgc

SEQ ID NO: 55827 - DNA, 34 bp, Homo sapiens; identical to SEQ ID NO: 12152
  chr19:17983839-17983873
  hyper

SEQ ID NO: 55828 - DNA, 30 bp, Homo sapiens
  chr19:17984944-17984974
  hyper
agtacctggagatgcgcttcagccgcgcag

SEQ ID NO: 55829 - DNA, 30 bp, Homo sapiens
  chr19:18043527-18043557
  hyper
accacgtgtgtagtcgcagctgccatcttt

SEQ ID NO: 55830 - DNA, 122 bp, Homo sapiens
  chr19:18059917-18060039
  hyper
atgtggggtgtacccccgggccccgtcatcccctcccccagccatctgccgtcctcctggccttgaacaacagcctgaagtcgagtccgggctaggcaggggaaagcgcaaaggtgcagcac

SEQ ID NO: 55831 - DNA, 90 bp, Homo sapiens; identical to SEQ ID NO: 12153
  chr19:18062903-18062993
  hyper

SEQ ID NO: 55832 - DNA, 30 bp, Homo sapiens
  chr19:18063298-18063328
  hyper
tccaacaccgatcccgggagtcagctcctg

SEQ ID NO: 55833 - DNA, 30 bp, Homo sapiens; identical to SEQ ID NO: 12154
  chr19:18112418-18112448
  hyper

SEQ ID NO: 55834 - DNA, 261 bp, Homo sapiens
  chr19:18118052-18118313
  hyper
gaggtcacgccgtcccgtggccacaccgcagctgtggacctgggggtgcccgagcgtcccctgcattcagctctgtggcgggacgggggctgaggatgactggagcaggcacaagggctgcggggaaggtagggtttgccagaggctgaaaattgggaagggaacatcatttcgtaggtaccgctcctgggcgaatgcgccgaggcgcgaccgagtgacggtatgtcaagagcaggttgatgacccgggagcgaggctctt

SEQ ID NO: 55835 - DNA, 385 bp, Homo sapiens; identical to SEQ ID NO: 12156
  chr19:18118522-18118907
  hyper

SEQ ID NO: 55836 - DNA, 177 bp, Homo sapiens; identical to SEQ ID NO: 12157
  chr19:18118965-18119142
  hyper

SEQ ID NO: 55837 - DNA, 31 bp, Homo sapiens
  chr19:18119199-18119230
  hyper
ccaggccgtggcgggccgggtgctgctggag

SEQ ID NO: 55838 - DNA, 30 bp, Homo sapiens
  chr19:18272022-18272052
  hyper
ggagggggctgtagcgggtgggagggccca

SEQ ID NO: 55839 - DNA, 30 bp, Homo sapiens; identical to SEQ ID NO: 12158
  chr19:18316087-18316117
  hyper

SEQ ID NO: 55840 - DNA, 30 bp, Homo sapiens
  chr19:18335167-18335197
  hyper
gggtcaaaggtcaccgtatccccgtccacg

SEQ ID NO: 55841 - DNA, 264 bp, Homo sapiens
  chr19:18335414-18335678
  hyper
cgctcggtctgcttcgaacaagtccgggtgacgctcgggccgggtcgggcatgttcggtcacgtccggctacatgagggctagttcgggcatctccgactaagaccggccgcgctcggcctgttccgtccgactccagcgggtttagcagcaccgggatgaaccccacggccagccgaaggggcggggcttcttaacccttccctggcccgtctggggtgcgccgtgggcgctgtggtgcaatgggagacgctcttaggggcgg

SEQ ID NO: 55842 - DNA, 629 bp, Homo sapiens; identical to SEQ ID NO: 12159
  chr19:18336508-18337137
  hyper

SEQ ID NO: 55843 - DNA, 507 bp, Homo sapiens
  chr19:18343302-18343809
  hyper
ggacattccacaaccccgaaaaccttcggacccccagctatgttagcacaaggacagtcacactcagccacatacctacaggcaccacaaggggagacacacaggcacacccacaactacctgggacacatggaatcatacccaagcatgaacgtacaggagcaccccaaacacatctggtcaccccagtctcacgcgcgcgcgcgcacacacacacacactctttcagtcccaaccgcacgtgggcacacccggtcacacagacccacaagccatgatgacaccagcaccctcagctccacccctacgtagaaatagctttttccttccaggcgccagcctcaaccaagcagcagagacccccgccccctggagaagcaaggaccctcccccactcccgccaggccccgcgcgcccctcccccgcgctgcaggaggcccctgccccggccacctaccgcctgcaggaggaaacgggccaggagagccgcgacttcctgagctccgg

SEQ ID NO: 55844 - DNA, 337 bp, Homo sapiens
  chr19:18343879-18344216
  hyper
cggatggggcgccggggttgccgccacaggtgcttcggggctctggtcatgctgtggcggccgcgagagcgactcaacctgctgcaagcctctgccccttcgccgacccccaggttctccatgcgccagagaaaggggtctgggatagcagggagcaggactcgtccccgtgagcgggcgccgaggagcgtctgctcccgggtccggcccagggccgggagtggaggcgacagcgaggagctgtccgcgccggaggtgctgaagcggtagaaggtggaactggggctcaaggtggggccgacaccgaggagctgtcgatgcccagatggtgctgaag

SEQ ID NO: 55845 - DNA, 254 bp, Homo sapiens; identical to SEQ ID NO: 12161
  chr19:18420496-18420750
  hyper

SEQ ID NO: 55846 - DNA, 30 bp, Homo sapiens; identical to SEQ ID NO: 12162
  chr19:18525427-18525457
  hyper

SEQ ID NO: 55847 - DNA, 546 bp, Homo sapiens
  chr19:18528684-18529230
  hyper
ggtgggggcggggggttctcacgtactggggggcggcctctatcggggaggcatctgcggggtcagctggcagcgagagacatccagacattcacacacaaacacacacacgaaacgtgagcacagagccacacacaggtcctagggagctggcggcccacccacgcgcggagacacacacgtgcacattcggcacacacttgtgcacgcaacctcactgagcgactcggcccgactcggacccacaactgccaccgcgcagccagggacagtcgccgagacagcgataatttattgggtgtttgcccgccccccacgcacaaggatgcacacgtgcactcacacgggagccgcgtgtttgcacacacgcgggcttgcctaggaaaaaagaggaatagccgtggcaaacacagaaacatctagacccagagtcaaccgcaccgccttcccctaccctgcccatccacacacgacccactggtacccgggcatccctgccctgcgggggtccctgactcagtatccgcccccaccctctctgaacac

SEQ ID NO: 55848 - DNA, 30 bp, Homo sapiens
  chr19:18529592-18529622
  hyper
cgtgggctctgtccacggctgttggaagct

SEQ ID NO: 55849 - DNA, 30 bp, Homo sapiens; identical to SEQ ID NO: 12163
  chr19:18547989-18548019
  hyper

SEQ ID NO: 55850 - DNA, 572 bp, Homo sapiens
  chr19:18548567-18549139
  hyper
cacctgaagacaggccgcgcagtgaatcccgggtcccgtgcccttctccccgagccgccccgctctccccagcacgcctccttcctcagccccctggtccaccttgagaacgccaccctcgcggctgacgcgcgtcgtccggtactcgtattgcgcctcgatggcctcggggccgtagaccacgtccgggctctcgacgaagaactgggcggcggcctccatcgcggcgggctgggggcccggggtgagcagggggtcagcggggactctaagcggccggggccaagccagcctgggtccccacggaggccgtccctgccccgaaccgcactcaccggcgcagagtcgactcaggcagcggcggcggacagcgcgggctctcgggcgcgcgacctccggagaaaagcgctgcggcccctcccccgccccgcccccttccccgcctctcccgcgctgggagggaggggcccaacgtctggagacccggttcgaggcccgacaacccagagccaccgtggccatcgggtccccgcctggcggaagtggccaggcgtccacgagcgcggcgcgta

SEQ ID NO: 55851 - DNA, 30 bp, Homo sapiens
  chr19:18571125-18571155
  hyper
atagaagcaagaagcagacgagctgtccag

SEQ ID NO: 55852 - DNA, 30 bp, Homo sapiens; identical to SEQ ID NO: 12165
  chr19:18632978-18633008
  hyper

SEQ ID NO: 55853 - DNA, 30 bp, Homo sapiens
  chr19:18668822-18668852
  hyper
ggtggggtggggtgcgccactggccacatc

SEQ ID NO: 55854 - DNA, 64 bp, Homo sapiens
  chr19:18682792-18682856
  hyper
tgagctggctcatgcgggccagtctcggcagggtggctgggcagggctcgcgaggccacggctc

SEQ ID NO: 55855 - DNA, 151 bp, Homo sapiens
  chr19:18705871-18706022
  hyper
ccaggtgggaggcctgcctgtcggtccagctgccggctgcagccagcccccagcaggccggcggataaggacatcggcctcacgtcataaataaagccggggacccgctgacaggccctggcacggccccggcccccgccgcccctgctgg

SEQ ID NO: 55856 - DNA, 187 bp, Homo sapiens; identical to SEQ ID NO: 12166
  chr19:18714393-18714580
  hyper

SEQ ID NO: 55857 - DNA, 40 bp, Homo sapiens
  chr19:18715041-18715081
  hyper
cagcagctgcagctgccctcccggggctgggcgggggaca

SEQ ID NO: 55858 - DNA, 104 bp, Homo sapiens
  chr19:18715120-18715224
  hyper
cgggcctggacagaccaatctcccacccccttagccccagccggtaaggtcagaaggacactttctcctcccgggatatgggcgcaacaccagtgggagaacct

SEQ ID NO: 55859 - DNA, 242 bp, Homo sapiens
  chr19:18716578-18716820
  hyper
tccagggcaggggtcttggcccgtagggcagcgggttcccagtgggccccctcaaagtttgggcccgctggtgcccggactcactggctcccgctccctctccctctcacccactcgctcacaaagattcctctcgctggaggctctccgcccgacgcagcctggctgaaaacggttctaagcgccgccggtggcggggactccgcggacccccgtgcgccgggtcccgcagggggagggcg

SEQ ID NO: 55860 - DNA, 339 bp, Homo sapiens; identical to SEQ ID NO: 12168
  chr19:18721516-18721855
  hyper

SEQ ID NO: 55861 - DNA, 146 bp, Homo sapiens
  chr19:18722211-18722357
  hyper
tggaggggttaggcgcgcgcgggcctctggaattagcatgtgtgggcttgaatcctgactttgccaacgcgtcccggagcctaagtttcccacctgtgaaatgggggacagtattggtcataacgcacagggctgtttcccaaggt

SEQ ID NO: 55862 - DNA, 102 bp, Homo sapiens
  chr19:18722386-18722488
  hyper
cggaattctcctgctggattctggcgcaaactgcgggctggaggccctcgccgccgggtcgcagcggcctagcatgggaggggaggggaggggcggggcggg

SEQ ID NO: 55863 - DNA, 456 bp, Homo sapiens
  chr19:18722521-18722977
  hyper
cggggtccgccaggcacagccgcgcctgattaagccacgtgggggccggccgggggccgctgagatgaaagcgcggccgcaggccagagtagggggtgcgccgggcccccacccgggacaccctcttcccaggccgaaacctgagccgccctctaacccgcagaccctgcgaggctgccgccccgtctgcgggggcggagcgtaggtgggggacctgcgggctgctgcgcggcgctgcaggcacctgcgccaggcatgccagcgaaagcgggggcatctttgcagaggatccgggtttagaggggcgtccccactcccttatctggcggagaggaagctgggggtaccctctaaccgagattcggctcctggggctacagtccatcgccctggggtgtgatggttatggaagtcagaagtgtcgctatttgccccgttttcccatgagaattagac

SEQ ID NO: 55864 - DNA, 464 bp, Homo sapiens
  chr19:18723527-18723991
  hyper
gtgtcctgggacccccgcgatgggatagacggtgggggccgcgatgcacctgccccgcccgacccgcacgcctcgggtgccgcagcgcagctaccccgcccgctctccgcatctcccaccccccgcttcccaggctgcctcgctcgggtgacgtcagcgccccggtccccgccgcagccgctgcatcctccgtgcccggcctgagctggagtcccccgcgccccccgcgttccgcccggccatggctgcggtggcgctgatgccaccgccgctgctgctgctgctgctgttggcgtcgccgcccgccgcctccgcgccgtccgcccgcgatcccttcgccccccagctcggggacacgcagaactgccagctgcggtgccgcgaccgcgacctcggcccgcagccctcgcaggtgaggcgcgtgcggtgccaggtgccagcgggggacgcgggatctctccgaa

SEQ ID NO: 55865 - DNA, 166 bp, Homo sapiens
  chr19:18811448-18811614
  hyper
ggtgcatgccagctggtcattcgcccggaaatctctgggaggaagtatcagcacagcctagcagggcgcctgggactggctctgtgggctggccgtccctctggctggggacacggggaggccgagcgtgtccgcaaagacacgcgagctgtccacctttctgggc

SEQ ID NO: 55866 - DNA, 90 bp, Homo sapiens
  chr19:18880024-18880114
  hyper
agcccgttgggcacagcgcctggggcccagggctgggggctgcagctcagaccattggacttttctgcctagggccggctcaggcagaca

SEQ ID NO: 55867 - DNA, 30 bp, Homo sapiens
  chr19:18880167-18880197
  hyper
tgcttgctccagcggcgcgggctgggtggc

SEQ ID NO: 55868 - DNA, 30 bp, Homo sapiens
  chr19:18880785-18880815
  hyper
catcacccacgcaggcgagctcaccgccac

SEQ ID NO: 55869 - DNA, 362 bp, Homo sapiens
  chr19:18900553-18900915
  hyper
gtcccgggtggtgacggggatggtccttgggttgggcgtccccccgcggtaaggaggtagtctggccgtgcgcccccggaggtgagaggctcttcggggcgaacactcccagtggaggaaggggtctcccgggcggcgagagattggggggcggtagagggagtcgtcagggcggtggagtgtcggggctagcgcacctcgttgacgtcggtgcagtgcgagccgttgcccgtgaagcccgcggggcaggggccgcagcgcgcgccgctctccgtctggatgcaggccacgccggggaagcagaagccgggcgcgcagtggagcaggggccgcacgctgggtaggccggtgcgtactgactg

SEQ ID NO: 55870 - DNA, 841 bp, Homo sapiens; identical to SEQ ID NO: 12170
  chr19:18901312-18902153
  hyper

SEQ ID NO: 55871 - DNA, 259 bp, Homo sapiens
  chr19:18980911-18981170
  hyper
ggcgtcgaaacaggcgccacatgaccgggggaaccggccggagcctgggggcaccctggggctcatcgcgcagtcctagagcctggagcagggcggcggctgggcctgggggcacgggggcgcgggtcaggggcagcgagggcagcagcagggccaggaggaggaggaggtggtggccgcagggaccttgctgcggcggtggcatcttcctcccaggcgatgaccagagagtgcgcagggtccgcggcggcccgggacc

SEQ ID NO: 55872 - DNA, 30 bp, Homo sapiens
  chr19:19006424-19006454
  hyper
aagggggcgcgcggcggcccgagagacctt

SEQ ID NO: 55873 - DNA, 30 bp, Homo sapiens
  chr19:19030079-19030109
  hyper
gaaggcgttctttacgtcgaacagctcgtc

SEQ ID NO: 55874 - DNA, 30 bp, Homo sapiens
  chr19:19050956-19050986
  hyper
acagggtctgaaaccggagcccctgagtgg

SEQ ID NO: 55875 - DNA, 30 bp, Homo sapiens
  chr19:19144811-19144841
  hyper
gcgaccctcgggtacgtggtttggggggaa

SEQ ID NO: 55876 - DNA, 30 bp, Homo sapiens
  chr19:19174942-19174972
  hyper
catggatcccggggcgaggggcggatgagg

SEQ ID NO: 55877 - DNA, 30 bp, Homo sapiens
  chr19:19249466-19249496
  hyper
gaggcctgcgtggccgacctctcttaaggc

SEQ ID NO: 55878 - DNA, 30 bp, Homo sapiens
  chr19:19250602-19250632
  hyper
cctaagcgcactatcgcacgccacctcgtg

SEQ ID NO: 55879 - DNA, 30 bp, Homo sapiens
  chr19:19303374-19303404
  hyper
ctttaagttccagacgccccgcgtacttcc

SEQ ID NO: 55880 - DNA, 30 bp, Homo sapiens
  chr19:19314200-19314230
  hyper
caaatcttgggacccggaaccgcgtgggct

SEQ ID NO: 55881 - DNA, 154 bp, Homo sapiens
  chr19:19322763-19322917
  hyper
agcggagcgcagggcgcaggggctggacccggcgcggagctggctgagtcggagcgcagcgtcctttgtgcccggcggccgccccgggatgcgtccgagctaggagccaggtgggggatccgtgagggggccgtgttgcgggagaagacttcgg

SEQ ID NO: 55882 - DNA, 120 bp, Homo sapiens; identical to SEQ ID NO: 12173
  chr19:19336135-19336255
  hyper

SEQ ID NO: 55883 - DNA, 150 bp, Homo sapiens; identical to SEQ ID NO: 12174
  chr19:19431244-19431394
  hyper

SEQ ID NO: 55884 - DNA, 30 bp, Homo sapiens; identical to SEQ ID NO: 12175
  chr19:19517597-19517627
  hyper

SEQ ID NO: 55885 - DNA, 30 bp, Homo sapiens
  chr19:19626943-19626973
  hyper
tcctagccgtgccgcggaccatctcaagtg

SEQ ID NO: 55886 - DNA, 390 bp, Homo sapiens
  chr19:19648965-19649355
  hyper
gggcgacccagaggggttgctcgagcgccgtcacccagggccagggggcgtggcctgaatggggcgtggccagggcgggatctgcggtcgcatcccgcccccactctcagtcccagcggccgccagacccgccggagttggacccgagcacgccgcggagcccggaccctccctcggacgctctgccccggccatggcgtcgctgctgccactgctctgtctctgtgtcgtcgctgcgcacctggcgggggcccgaggtgaggcgcctccagcccccgcgcccagcccctgaggctcccgagggcctggcagccggccttgggtgaagccgcactcggggagagaacccagggacccacgcgcttccccggggactgggtccccttcacc

SEQ ID NO: 55887 - DNA, 28 bp, Homo sapiens
  chr19:19651027-19651055
  hyper
cgtcctggttcaacgtggaccaccccgg

SEQ ID NO: 55888 - DNA, 418 bp, Homo sapiens; identical to SEQ ID NO: 12177
  chr19:19729111-19729529
  hyper

SEQ ID NO: 55889 - DNA, 162 bp, Homo sapiens; identical to SEQ ID NO: 12178
  chr19:19729585-19729747
  hyper

SEQ ID NO: 55890 - DNA, 1062 bp, Homo sapiens
  chr19:19738577-19739639
  hyper
gggcggtgccgaggcgtggaggtgatcggagtggacagagaggcggccccagaagttagtcggcgggatttgggcgcgagtgcttcccaagcgggcggggcaataggctgttccgggtgggacggaggacactggcggtctccgggacaaagacagcggttggggaagggatggatggccgggcctccaggcgtctccagactggggaaggggtagggggttaagggatcagagggcggcgtcctggccccgcaggcacgtgccgcgcccttcccccgggcccaggcccgcacccgcccgcctcccgtccgtgcaggcctcacctgggcctccagtcacgccgcagacaaggcgggctcgcgggggttcggggcgggctcgaggcccatggcccggcgactgcggcgggagcggtagagcgtccgggtgcgccctgtgcgggttgctgagagggcgcgggaggcggggtctccccggcgccccgcccccaccacctgggggagccctgccccgccccgccacctgggggagccccgcctccacggccgcgtcgggggcggtgtcgcccggaaccgcagcccccctgtttcctccccgcctcgcggcccctcagtcgcccctatttccggcgcgggacccccaccccggtacctgcacacctcatgcgcccgcagtttcgagcctgcggggctgagtcactcggcgacccgaaaattcccgccgtgaccccgcgctgcccgggcggagctccaggtggtcttgggtccgcgcccccgctccggacccccaaccctcccagccccaccccgctctcttcttcgtgtccaatcggccgccgagttacaagccactccctgatccgacttggctcccaccgcccggacccccgcccagcttcggctttgccagctcgcagtatcagcgagccgcggcctcctgtgcgaggcccacctctgcggccccagctgatcatcgggcgcacgctagggttttgcaatcccgcccccgtacccctcaccctgggacagcgctgccccctgcaaagcccggccctgccctgcc

SEQ ID NO: 55891 - DNA, 30 bp, Homo sapiens
  chr19:19754559-19754589
  hyper
cagggccccctgagcgaccactcgaggctg

SEQ ID NO: 55892 - DNA, 30 bp, Homo sapiens; identical to SEQ ID NO: 12181
  chr19:19774930-19774960
  hyper

SEQ ID NO: 55893 - DNA, 818 bp, Homo sapiens
  chr19:19843294-19844112
  hyper
ccctggtgatgagggcaggggcgtttgaacagccacaggaacctgaccccggcagcaaggacctagccaggcttcggttctcacaagtgaggaaacgcacccgtggattcatcgtaaggtttccaaccaagtggtttcttaaacgcacaaaccccacagaccgagatgggatctccccaggaccctcccgctgtcaccgaacaatccggggagacgcggggctgcgggcgcagagctgcccatagagggctccaggaccgggggccgaggtcgccccgcggggacgggacaggacgctggggctcccggctgcgggtccagctcccacagagaggaccgagggccgaactgcgcccgcggtggcccccgggtctgcaaaccccggagttgactgcaaggaggtccccggcctcggccacagacggttccaaccagaaacctcccctcggacactggccccgcacactcaccatttcccagcgtccgggaagtcacggtgtcctccctacggatctgtcagtacctgcaggtcacggcgcgacaaaggatgcgctagagccaccttcggccttcaggagcaggtgaaacgcaatcttcccatgggccaggaatggcgacgtccgcactgcgcaggcccagcgtggcgccgctcacatcttttcagctgaggtcctgattggacagatccaatggccccgcctctttatcactgagtgacagcggagcaggaaggggcgtggttgagctggcctggcttcagtccggcttgtccccgccaggacgtttgcgtttaaaccgaatgtgttctttgcctccca

SEQ ID NO: 55894 - DNA, 260 bp, Homo sapiens
  chr19:19887241-19887501
  hyper
gttacgcaccaccccgatgcatactgggattgtagttctgaagctacctacccatgggctgagagcagtaaagagactacaactcccagcataccaggcgcggcgcgcaccgccctgccccttcctctggggttgcgaaccgcccccgagcctggtacaggctgggattgtagtcctgcagccttgtggccgaagggctgggactggccatgagattacatgtcctagcatgctcagccaggcgcgcgcagctctgcccc

SEQ ID NO: 55895 - DNA, 301 bp, Homo sapiens; identical to SEQ ID NO: 12184
  chr19:19932100-19932401
  hyper

SEQ ID NO: 55896 - DNA, 301 bp, Homo sapiens; identical to SEQ ID NO: 12185
  chr19:19932460-19932761
  hyper

SEQ ID NO: 55897 - DNA, 757 bp, Homo sapiens
  chr19:19976597-19977354
  hyper
cgctgggccggaaaccgtccaatcaggcacgcagctggagcgaaccacatggtttctgggggcctttgtttctcgctgcagcgggagctccaggtttatcctcagtgttctgtgtcctgtgcttatagaggcccgtcctctgtggccgtgtgacctgcaagtattgggagagccacagctaaaccccgggacccctggaagcctagaaatggtgagtgccgggtccaacgtcccgagagaggggagaggctgtttggaacggtgggaagtggctctggcgggactctgcttcctcacagtcagctccacaatctgccgccggagttctccctgcccagctcggcctcagtccccttcagccataagatggcggctgcggtgacatccggggcccggcacagtgattgtgccctggcctggagccctctttcagcagctctgcacccgcagcaccgcgtctctcccagatcatgcaaggaccacgggagggtcgtcaggggagaatcctgactcggttccctgcgggttcatgaatgggaagagctttggtccgtgaggttgttagaaacaagcgcttggtgccgcaaaacaacacaaaacaaaaaactacccagcacttagaaaatttcacaggaaggcatatttacttctgaagaagagtgctgctcgcgtccgacctgatcgcaagagcacacagaagaaaggaaggaaggttttttttttttttgaggcggagttttgctcttgtggcccaggc

SEQ ID NO: 55898 - DNA, 34 bp, Homo sapiens
  chr19:19977533-19977567
  hyper
cgaactcagttgatccgcccgcctcggcctccca

SEQ ID NO: 55899 - DNA, 167 bp, Homo sapiens; identical to SEQ ID NO: 12188
  chr19:20011423-20011590
  hyper

SEQ ID NO: 55900 - DNA, 181 bp, Homo sapiens; identical to SEQ ID NO: 12189
  chr19:20011649-20011830
  hyper

SEQ ID NO: 55901 - DNA, 121 bp, Homo sapiens; identical to SEQ ID NO: 12190
  chr19:20011889-20012010
  hyper

SEQ ID NO: 55902 - DNA, 121 bp, Homo sapiens; identical to SEQ ID NO: 12191
  chr19:20012069-20012190
  hyper

SEQ ID NO: 55903 - DNA, 181 bp, Homo sapiens
  chr19:20012429-20012610
  hyper
aaaattgtaaatcaaccctaccccttctttttccccattctccttttctcaaaacatcgcgcgtttaccctatatggaaaaagtttgtgtctagcccaaccaggatcagcttagattgtgcggtgggacctcagccaatatgggaaggacacaaaaaccggaactgcgttagggttaaatc

SEQ ID NO: 55904 - DNA, 875 bp, Homo sapiens
  chr19:20149645-20150520
  hyper
ttccttcaagctcttcggctggacccccaaccacaaaccgtggctgggtgctctctgagcataaatcactgttaacttcaataagttttcaacattttaaaggtgactcccatagtttttaaacaggagaaggaaaagactgaggacccccgggatcacagcacttcccacgcacaaaccacacacggggtctggactctgccctgaggacgcttccattgtccccgcagtcggggcagacgcaagaacgcgcgcggctcttcccagggtgggctccgggcgggaagcgggagaacggaacgggatgcccgcccagggtcccggctgctggcccacctcgcatcctgtgcccggaggtgatcgacggccgagctgtgcctgccggggactccagtccgcagactccggagctgacagctgggaggccccagtcccgtcactgccggttccggccggtttcaaccagccctgcccccacctcgggatgcgcggcctggcacactcaccatttttcggcttccgggatgtcgtggagtcttagctctggatctcacagcatctgcaagtcagagggcaacagaggctgcgacagtcaccgggaactactagagcagaggatactaagcaatgaagatggaccctgagctctggctggagcgagacaaaggccccgccagctccaggacaccgccccctctaccttggctgcgcacctgattggacagttcccactctagcgcccatgattggatacagttccatgccccgccccctcaggtcatgagtgacaggaggcgtgatctgagaatgtgttgaataaggcaagagttacaggtttttcctgaacccttttctggcgcgcttccttcctgaat

SEQ ID NO: 55905 - DNA, 908 bp, Homo sapiens
  chr19:20162580-20163488
  hyper
aactttgagcaggctgggaaacgatcccagacccttgagggtctgtgagaaatcaaactttcggcactttggaagtcaggaaaccagcacgttgggggaggcgggatcacagttacttgctgagacaagctgccctggctacgttcactcccgtcaggtaggagaggttaaagaacaggaaggctccccctccgcagggcggaactgctctgaaggcatggaggagcgacgctgaaggtggaggcttcgcccaccatgccgggagctaaaatttcttaaccaatgccggccagcgatggcagggctgcgggactacaatcccagcgcgcacagggatcagggactgtgcgcatcactggaagaagcggcagaacggcgcgcgcctcgctgagctttctgggagatgtagtctcatggcaactcccagccttttggccacaaggctacgggacctacaatcccagcctgtaccaggatcgggagcagttcgcagcactagaggaaggggcagggcggtgcgcgccgcgcctgatatgctgggagctgtagtctcttcacggtttttagccaatgagtaggtagcttcagaactacaatcccagtatgcatgggggcggtgcgtagtcctggaggtaggggctgagaggtgtggacttaccggtgtccaaagcattgctagcagccaattccatgccgccccgttgccagggagagtgaatacagctagggacgtgaagggtaggtctgggctgggcattgaggagggtattaggctaggaagtatacctcacctttgtccaaatcgggtggttcggcctcctctcattggccctatgcagctgggttgcctctctcacccgcacccaagggtctttccagagtgttgcgtcatttccagcccagggagc

SEQ ID NO: 55906 - DNA, 30 bp, Homo sapiens
  chr19:20164020-20164050
  hyper
catcaggttgccgggcgcggtggctcacgc

SEQ ID NO: 55907 - DNA, 301 bp, Homo sapiens
  chr19:20188716-20189017
  hyper
taagcattatccaatcagggacgctgggttggaaaccgtccaatcatgcaggcagctggagcgaagaggaaggctttcgggtttggcgcggccatttgtctcttgctgcagctggtgctccaaatctggtcttagctgcttcgtgtcttcttctccagcctctgtggccctgtgacctgcaggtattgggagatccacagctgagggacccccggaagcctagaaatggtgagagtgcctttccagcattccgagagaggggagggactggttggaaccgatgggaagtggctgtggcggg

SEQ ID NO: 55908 - DNA, 121 bp, Homo sapiens
  chr19:20189076-20189197
  hyper
ggcctcagtccccttcagccataagatggcaacagcgccgacagccgggccccgcggcgtcctgtctcttccctgccctggcctggagccctctctgggcagctctgcacccacagcgctg

SEQ ID NO: 55909 - DNA, 181 bp, Homo sapiens
  chr19:20189376-20189557
  hyper
gaggtcgaggcgagcggatcacttgaggtaaagggttgttagtacaacgtagttcttcttcaaagacgcaacttcctggtcataagttggaaaagttgtaaatcacccctaccccttcttctcccttctccttttctcacaaatcgcgcattacccgatttggaaaaagcttgagtgtaag

SEQ ID NO: 55910 - DNA, 55 bp, Homo sapiens
  chr19:21512126-21512181
  hyper
cgagaccggagctccggctgcagcaagagacaaaggccgcgccaaacccggaagc

SEQ ID NO: 55911 - DNA, 121 bp, Homo sapiens; identical to SEQ ID NO: 12196
  chr19:21541708-21541829
  hyper

SEQ ID NO: 55912 - DNA, 181 bp, Homo sapiens; identical to SEQ ID NO: 12197
  chr19:21542068-21542249
  hyper

SEQ ID NO: 55913 - DNA, 336 bp, Homo sapiens
  chr19:21579818-21580154
  hyper
agggcctgaaggggcgggcccttaaaccgtatccaatcagacacgcagaactgggaaccgtccaattaggcacacatttggagcggcgaggacggcttccgggatgtggctgggccattgtttctctctgctgccggagctccaggtctacccttcactgctctgtgtcctcagcgtgtgtggcttcgtgacctgaagatactgggaaatccatagctaagatgccaggaccccctgaaagcctagacatggtgagagtgctgggtccgacatcacgagagaggggaaggagttgctcggaaccggtgggaagtggctgtggcgggactcaggcct

SEQ ID NO: 55914 - DNA, 101 bp, Homo sapiens; identical to SEQ ID NO: 12199
  chr19:21580233-21580334
  hyper

SEQ ID NO: 55915 - DNA, 304 bp, Homo sapiens; identical to SEQ ID NO: 12200
  chr19:21646229-21646533
  hyper

SEQ ID NO: 55916 - DNA, 256 bp, Homo sapiens
  chr19:21657507-21657763
  hyper
atgcactaatgctggggaagccgcgctgggaggtgggtcctgaagctttatccaatcagtggcgctggcgcgggaaccgcccaatcaggcgcggagttggagaggagggcgtggcctccggcatttggcgggccctttgtctcgctcctgccagagttttagttgcctgtctctgctattctgcgtcctccacctcgggagccccaggtgactttgtcacagccggtgggtgtgcgggttgagcatcccgagatgg

SEQ ID NO: 55917 - DNA, 31 bp, Homo sapiens
  chr19:21664417-21664448
  hyper
attaagtaaggccaggcgtggtggccgattc

SEQ ID NO: 55918 - DNA, 165 bp, Homo sapiens
  chr19:21688336-21688501
  hyper
gtcactcagggcctgagagggcgggtcttaaacattatccaatcaggcacgcagctggagcgacaggacggtttccggaatatggcggggcgtttggctcttgctgcagccagagctccaggtctcgtcttcatttctgtgtcctttgttcttagaggcccagcc

SEQ ID NO: 55919 - DNA, 181 bp, Homo sapiens
  chr19:21688740-21688921
  hyper
actgtgctgacagccgggccccgggcgtcctgtcttccctccgcagtgactgtgcctgacgtgtagccctgtctggggagctctgcacgcgcaattccgcagtctctcccagattgtgcaagaaccatgggaggggcgtcaggtgagaatagtgactcgggatgcgggttcatgagcggga

SEQ ID NO: 55920 - DNA, 30 bp, Homo sapiens; identical to SEQ ID NO: 12202
  chr19:21769175-21769205
  hyper

SEQ ID NO: 55921 - DNA, 241 bp, Homo sapiens; identical to SEQ ID NO: 12203
  chr19:22018453-22018694
  hyper

SEQ ID NO: 55922 - DNA, 272 bp, Homo sapiens; identical to SEQ ID NO: 12204
  chr19:22018873-22019145
  hyper

SEQ ID NO: 55923 - DNA, 70 bp, Homo sapiens; identical to SEQ ID NO: 12205
  chr19:22034351-22034421
  hyper

SEQ ID NO: 55924 - DNA, 599 bp, Homo sapiens; identical to SEQ ID NO: 12206
  chr19:22034446-22035045
  hyper

SEQ ID NO: 55925 - DNA, 220 bp, Homo sapiens
  chr19:22610480-22610700
  hyper
tgggggtgtctgtgcttccctcgcccaatctgagagtggcctgttccagggggcgggcttcctctttgtttggcagccaggagtctggagcgcaggtgccgggcaggcagcactgggagcgctcggcgacttggctggaggccgaaggtgccgcccctggggaaccagagcgcctttgcaaggtgggctcggcgtacactcccctatccttctgtggccc

SEQ ID NO: 55926 - DNA, 306 bp, Homo sapiens
  chr19:22610883-22611189
  hyper
gggcaggggctggtcttagctgacaccctcacctccgccctccagattccagcctctgactctggccaatctggccaggacctggggtctggggccgggacagtggacgcccctgggccgggctaccagctggggcctcgcacttggatggggaccttaaggctccaggcgccacacacaccagtgcgccctctctggccgtgaatttcagggaggggcggcagcagagcccgcgggctggcctggtggggacgatcaccttttcccacctagtcgcccttgccagtccccgcgtcgcctgcaggg

SEQ ID NO: 55927 - DNA, 4 bp, Homo sapiens
  chr19:22611241-22611245
  hyper
cgcg

SEQ ID NO: 55928 - DNA, 30 bp, Homo sapiens; identical to SEQ ID NO: 12207
  chr19:22715395-22715425
  hyper

SEQ ID NO: 55929 - DNA, 106 bp, Homo sapiens
  chr19:22817096-22817202
  hyper
ggaaagggcggcttccgggatgtggcggggtctttgtctctcgctgcagtcggagtatggtctagtgttcgctgttctgcgtcctctggtcctagaggcccatcct

SEQ ID NO: 55930 - DNA, 121 bp, Homo sapiens
  chr19:22817381-22817502
  hyper
tctgcgccccaagttcgccttgcccagcccagcctcagtccccttcagccatcagattggcggctgcgctggcagccggacccccgggcgtcctgtctcttccctgcgcagtgacggtgcc

SEQ ID NO: 55931 - DNA, 19 bp, Homo sapiens
  chr19:22817621-22817640
  hyper
atgggaagagctttggttt

SEQ ID NO: 55932 - DNA, 71 bp, Homo sapiens
  chr19:23257936-23258007
  hyper
cagtggcactggtgtaggaaccgcccgatcaggcgcgcagttggagaggagggcgtggcttccggcatttg

SEQ ID NO: 55933 - DNA, 293 bp, Homo sapiens; identical to SEQ ID NO: 12209
  chr19:23258305-23258598
  hyper

SEQ ID NO: 55934 - DNA, 33 bp, Homo sapiens
  chr19:23258705-23258738
  hyper
agaaatgcattcgagttgggttttagatttttt

SEQ ID NO: 55935 - DNA, 205 bp, Homo sapiens; identical to SEQ ID NO: 12210
  chr19:23299706-23299911
  hyper

SEQ ID NO: 55936 - DNA, 121 bp, Homo sapiens
  chr19:23432612-23432733
  hyper
ggcgtgaaccaaagcgcccggcctgccataaatttttaatagggggaaagatgaactggaaacgcagcggactaaagcccttcccattcatgaacccgctccccgagtcaggattctcccc

SEQ ID NO: 55937 - DNA, 169 bp, Homo sapiens; identical to SEQ ID NO: 12212
  chr19:23432792-23432961
  hyper

SEQ ID NO: 55938 - DNA, 324 bp, Homo sapiens; identical to SEQ ID NO: 12213
  chr19:23433023-23433347
  hyper

SEQ ID NO: 55939 - DNA, 28 bp, Homo sapiens
  chr19:23456223-23456251
  hyper
agaagcggctgggcgcggtggctcatgc

SEQ ID NO: 55940 - DNA, 628 bp, Homo sapiens
  chr19:23456490-23457118
  hyper
tgggcaacaaagcaagactccgtctcaaacaaacaaacatgtttaacaagagactgggagtctcacctgccacagctccttctacgcacacacgagtcggaattctgccctaatgacccgcctggcatccctgaacaatccgggaaatactcggcgctgcgtgcagagctgcccagggagctccagacacggcgccgcagggtccgggcgggacgccggggtcccggctgcgggcccagccgccatcttacggcgagaggggtctggggcggagctccgccagcggagactcaggttggcgacccgggagcggactgtggggaggccggtcccgccggtttcacagctcgctctcccctctcgggatgcccagccccgcacactcaccttttcccagcttccaggatgtcctggcatcttagctgtgcgtctcccagaacctgcagatcacagggcaagaggctgtgacagtcaccgggggctcccgaggtggaggacgtaaaacagcagagaccgatcccaagctgtggcgggagtgagatacaaaggccccaccaaatgccggaagccacgccctcctctccaactgggcggttcctgcgctagcgccactgattggataaagcac

SEQ ID NO: 55941 - DNA, 145 bp, Homo sapiens
  chr19:23577690-23577835
  hyper
gattaaattatttaatcttttcgcggtgacgcccataaatttttaatagaaaaaaagaggccctgggaaccccacggactaaagtgcttcctattcatgagccagcacctccagtcaggattctcccctgacgaccctcccgtga

SEQ ID NO: 55942 - DNA, 121 bp, Homo sapiens; identical to SEQ ID NO: 12217
  chr19:23578014-23578135
  hyper

SEQ ID NO: 55943 - DNA, 121 bp, Homo sapiens; identical to SEQ ID NO: 12218
  chr19:23578194-23578315
  hyper

SEQ ID NO: 55944 - DNA, 25 bp, Homo sapiens
  chr19:23578434-23578459
  hyper
agagtgacagcgtaggctgcagcct

SEQ ID NO: 55945 - DNA, 83 bp, Homo sapiens; identical to SEQ ID NO: 12220
  chr19:23598012-23598095
  hyper

SEQ ID NO: 55946 - DNA, 623 bp, Homo sapiens
  chr19:23598334-23598957
  hyper
aacaaaccaacaaaatgtttaacaaaagagactgggagccccaccggccacagctcctcctacgcacacacgagtcgggattctgccctgatgacccgcctggcatccctgaacaatctgggaaacactcggggctgcgtgcagagctgcccagggagctccagatagggcgccgcagggactgggcgggacgcgcgggtcattgctgcgggcccagccaccatcttgcggccagagggacctgggacggagctgcgccagcagggactcaggtcggcaacccaggagcggtgaggaggccagtcccgtcggtttctcagccagctctcccctctcgggatgctcaacccctcacactcaccctttcccaccttctggaatgtcctggcatcttagctgtctgtgcacgtcccaggacctgcagatcacagggcaacagcctgtcaccggctggggcgagaggggggcagaggtggaggacgttgaatagcagaaagcgatcccaagctctggctgcagcgagagacaaaagccccgccaaatgccggatgccacgccctcctctccaactgtgccactgattcgataaagcaccagcactcgcccagtaccactccctccac

SEQ ID NO: 55947 - DNA, 200 bp, Homo sapiens
  chr19:23653879-23654079
  hyper
atttgcagctagttccggggcttcccttcctcctcccacaccggcccgcatcctagtgttgctttctctgcccccagcaccagcctcttcttgggctccctcctccccttcccactcgcgtctcttaggaaactgcgaccctagtgtttgctaaggagcaggggaggtccttcccgtcgccgacgccccccgcccggaaa

SEQ ID NO: 55948 - DNA, 185 bp, Homo sapiens
  chr19:23654103-23654288
  hyper
cgcatcgaggatgtgacccattccctggccaagggtgtgggtggggaacggcaaccgatctcactgcctggcggggcagcttcctttccaggcaaggcggagacctgcagggcgtggagaccccgcccggcgcagaacgcgctggccagtgggcagcttgacagggtccccgtgtgcctagcgac

SEQ ID NO: 55949 - DNA, 181 bp, Homo sapiens; identical to SEQ ID NO: 12222
  chr19:23869521-23869702
  hyper

SEQ ID NO: 55950 - DNA, 211 bp, Homo sapiens; identical to SEQ ID NO: 12223
  chr19:23869881-23870092
  hyper

SEQ ID NO: 55951 - DNA, 701 bp, Homo sapiens; identical to SEQ ID NO: 12224
  chr19:24216103-24216804
  hyper

SEQ ID NO: 55952 - DNA, 100 bp, Homo sapiens; identical to SEQ ID NO: 12225
  chr19:24216923-24217023
  hyper

SEQ ID NO: 55953 - DNA, 30 bp, Homo sapiens; identical to SEQ ID NO: 12226
  chr19:28284105-28284135
  hyper

SEQ ID NO: 55954 - DNA, 812 bp, Homo sapiens; identical to SEQ ID NO: 12227
  chr19:28284337-28285149
  hyper

SEQ ID NO: 55955 - DNA, 30 bp, Homo sapiens
  chr19:29704207-29704237
  hyper
gggggcggggcttgcggcccacctgtaggt

SEQ ID NO: 55956 - DNA, 202 bp, Homo sapiens; identical to SEQ ID NO: 12228
  chr19:30015760-30015962
  hyper

SEQ ID NO: 55957 - DNA, 904 bp, Homo sapiens; identical to SEQ ID NO: 12229
  chr19:30016024-30016928
  hyper

SEQ ID NO: 55958 - DNA, 58 bp, Homo sapiens; identical to SEQ ID NO: 12230
  chr19:30017451-30017509
  hyper

SEQ ID NO: 55959 - DNA, 144 bp, Homo sapiens; identical to SEQ ID NO: 12231
  chr19:30017577-30017721
  hyper

SEQ ID NO: 55960 - DNA, 850 bp, Homo sapiens; identical to SEQ ID NO: 12232
  chr19:30017765-30018615
  hyper

SEQ ID NO: 55961 - DNA, 530 bp, Homo sapiens; identical to SEQ ID NO: 12233
  chr19:30019080-30019610
  hyper

SEQ ID NO: 55962 - DNA, 270 bp, Homo sapiens; identical to SEQ ID NO: 12234
  chr19:30019660-30019930
  hyper

SEQ ID NO: 55963 - DNA, 357 bp, Homo sapiens
  chr19:30019993-30020350
  hyper
cggttcagaggtgagggctccctgggtgtttgttgagagccgtagagcagtacttcccgaagtccccaccggggcgcaggggaggagcacttcgctggggggcttctggagatcccgcggaaaggcgggttggtagcaggtggccagggagccaggcagcagcctcagcgttgcttgccttcttaagaaagcacagtgttagctgtaaagggcggggtccggtgacagggtggctttccttaggaagcgattcgggcaggccctccgtgctccgggaggtgaggagggccggctggggcgggactgtcggttggagcgcgtcggggcgggaaagacgtggggaagttaaggaacaag

SEQ ID NO: 55964 - DNA, 35 bp, Homo sapiens
  chr19:30020576-30020611
  hyper
gggtgaaagggaagccggatcgtgatggtgggcaa

SEQ ID NO: 55965 - DNA, 168 bp, Homo sapiens
  chr19:30020870-30021038
  hyper
tgctctcgcgcttcgcgccgcccaacatgcaggccgccgaggccgtgtcccacatccagagcagcggcccgcgtcgccacggcccagccagcgccgccaacgccaacaacgcgggcgccgcgagccgtaccacctccgagcccggccgcggcgacaagagcccgccgc

SEQ ID NO: 55966 - DNA, 97 bp, Homo sapiens
  chr19:30021252-30021349
  hyper
cgccgggacgccccggggggctccggacccaggacccgccccctgggcgcatttgcatatgcatactccttcctagttaggtcgggagcgccccccc

SEQ ID NO: 55967 - DNA, 30 bp, Homo sapiens
  chr19:30097060-30097090
  hyper
aacaccgcctacgacgttctcagtagccga

SEQ ID NO: 55968 - DNA, 100 bp, Homo sapiens; identical to SEQ ID NO: 12237
  chr19:30155979-30156079
  hyper

SEQ ID NO: 55969 - DNA, 88 bp, Homo sapiens; identical to SEQ ID NO: 12238
  chr19:30156298-30156386
  hyper

SEQ ID NO: 55970 - DNA, 30 bp, Homo sapiens
  chr19:30165118-30165148
  hyper
cacatcgaggagtgcgtgcggcggcaactg

SEQ ID NO: 55971 - DNA, 30 bp, Homo sapiens
  chr19:30206602-30206632
  hyper
gtgaatgtgtgggccggagccagatttcct

SEQ ID NO: 55972 - DNA, 30 bp, Homo sapiens
  chr19:30215218-30215248
  hyper
ctcaaagattacagcgctcgcacggcagga

SEQ ID NO: 55973 - DNA, 30 bp, Homo sapiens
  chr19:30296837-30296867
  hyper
taggaggctcactggtaggcacaaatgggc

SEQ ID NO: 55974 - DNA, 140 bp, Homo sapiens
  chr19:30713452-30713592
  hyper
gtcctggaggcatgcagagggcgtcggcgccgacagggggagccggagagccccctgcccggccgtctgcggggctcaggcggggcttggcctccgatgagcgcgctgtctctgcccggtgggtcccaccccgcccggcc

SEQ ID NO: 55975 - DNA, 30 bp, Homo sapiens
  chr19:30713830-30713860
  hyper
ccaggcgaggccggcggctcgagggttaaa

SEQ ID NO: 55976 - DNA, 176 bp, Homo sapiens
  chr19:30715579-30715755
  hyper
ctgaggacctctccgcgtttgtatcgcggcgattggcaacataactgccttatttacattaaatacgccacaaggttacagcgcggatcaacgtcatttgatcgctgatgactcccttaaacgcccgggctgtgactgattcttcgcgtcccgctgtccaccgagattcacccggg

SEQ ID NO: 55977 - DNA, 609 bp, Homo sapiens
  chr19:30716160-30716769
  hyper
tggctcatcaaagctaaatgccgcaagacctatctagttgctgtgaattatgccagggcgacaatggagagcgtttttaatggtacaatgcatttcacctaccagatagggggaggccgagccggggatggggatgtctgctggggctgggtgatgagtatcaatgaacggggcgattctgaaaagaggctgatgaaaatcgagcccgccctgccccggctgggctgggaacagttcgcagggctctgccgagtgggcgagtgaggcgcgcgagcagggcgcccgtcccccctcagccccggaaaatgatcaagtcaatcgtgtgggcatgtttcattattcattgaacacaatcttttacaacgctccgtttacgtgcccgagtttgctcctgacgcccgcgtttcaatgtttaaggtaaggaaaacaaaggtgggggggggatcgcggggcgcggcgcggtgcggggggcgcggcgcgggggggcggcggcgggtgggggggcagcttcggcgtccgggaggtggcaaagtgagtttggactcttggcgcggcccccccgtcccctccccctccccatctcggcgaggcctgccgcccggttccttc

SEQ ID NO: 55978 - DNA, 3088 bp, Homo sapiens
  chr19:30716952-30720040
  hyper
cgcctccccgcccgcggtcccgggaccgttactttgaaaaggagtcccgaggcctggcgcccggcgcgcgatcgggaccccgcgtccagctccggggacccggccggcgccccccacccgcgagcggcccgcgagccactctcaggccccgggaaactttcaagagggtctggggggtggggggagtaaaaaggggagggggtaggctggggccgcggaaacttctgctcaagtgactttccccattttctcctctgcctgggacgggggttcgccttgcgctctttctctggtccgcgctcactgcggggttccggcccctccgcccgtggagagagggtaatttgcaaccttttttttttttcaattaaagttagctgatgcttacaatgtgtcaaacttgcgggcgccgagagccgctgagatctgccattttgtgattgcatcggcctcctgtgccccgggagcctggccaggctgaggccggagagttggtttcagggctgaggtgccagggtccgaacccgcgaccccaggaaaggccgtggcgcctgcaagcgcaggcggcgcccgcagcacctgccccagccgggcctcggcctgggggcccagccgggggccaaagaggaaataaataaataaataagtaacaggttatggagggaaaagagccggccagtcccaggctggagaaatgaggccaatcagagcgaggaagtgcgggcgtgggggctctggaaggcagaggagaggcagggcttgcgcggcgtctgggaagagtgcaatctggggggacgcctcccgtccccccagcgcagatgcatgactggggtaggaatgatctttgctgataagcctttttctgtttgcttcaagacattatttttcgaagatgaattgaggaaaacagtcgtaggcgagactcggggtgtattttaggcaaaaaaaaaaaagttagggttgggggagagctttcctttgatgagtaggaaagtgtccagatctcgacgcgcccatctgttgcagttttgcaaataatttaaaatatagatatctccatatagacggatgtatgtgaagtggaggaaggtcgaaacgcggggaagttagggaaaaagaaagaaaaagggctgggcagagagagacctgtgttgctcactcttcactctgcggagtgaactccggcagggctttctttggggacaggtggaaagttaagtcccccccttttcacttctgtattgtgagtggttcctactgtgtgcctgttggagaacatgtccaccgttcccgagttaggtggaggattggaatgttggggggcggggagcgttggagttgaggacgcagtggccaggggctgggggccgagaaagagcagggcggggtctcagccccgcgtgcgggtggcagcggcggccgggttttgtttgccagatattgttatgtctaacgggtgcctcgccggagacgtgatttgtcagccgccttcgttttcactttagcagaaaatacggcagctgcgaggtgtcccggcctgcggggctcgggcacccggtgcgtcctgggggctgggtcgtgtgcgcgggtgggagccggcggccggcggggccggggcgaggggcgagcgggaggggcggagtgagcgagcgcgcggtacggccctccggttcctcctgcgccttctcccggcagccgccgccgccgccgccgccgctgtgcaatttagcagaaatccgacaggggccgcgtttgctgagcgcatccggcggccgggcagcccgagcgggccgccgggcctggtcggccggtgtagaggcgcggagggggccggcggaggggaccggcggggatgggcgcgggaagcacgcctgaccagagcacgcgccgttccccaaccctggtgtccccggcgagttgggcagccccgcgcgccctgaccttgacgccccagtctccagccagggcttaggtgaacttggggtggggtgtgcgtgcgtgcgtgtgtatgtgcgtgcgtgtgtgtgtgtggaaggggtggtgagactgggaacgcgctgttttctttcccagtttgatactagcaactggatttttactttaagaccggctttgctctctgctggggttgggagggggggcgatcttttcccatcactcacatctttgttcattgttcactgagtggaaggcaggcgacttaaagagacgaaagagaggaaaaaggggtgagagacggagagaggaaaaagaggggggcggccagaagagggaaggagaggcgtggggacagggcccccgcccccgccggggtcgggtttgatggtgaaatagtaaacccacgcacggagggtcgccaggaaagtggacattaccgctttaattaacttcgagatgctccggcggcgggacctggcgtagccgtgacgcgcccccataaatctgcccggcccggggctgctccgagaactcgtacagtagcggcgtcagatccatcccgcgcctcccagtccggagtccatttgcataattggattttttttttttgcctccttctttctccctgaaacttgtttgaaaacccaagtgaaaaccgcgacgatctgcacactcaaaagcaagtgccaagtaagtgccctgcggtggcctcggcgcgccccggggtgagcgcgcaaagccgggagcgaggtgccgcgagctgcgcgccgccccgggccggcctcgcgtgtgggcggctgggcggctgggcggcgggaggacggcctccgcgggctccgggactgcccggctggctgctcgcacaactttttttttttcccccgtctgctgacttttcgggccaggtgaagtgtttgggccacgcgtgtacctgtggcgagactcgggaggcgatcttggggggcgcgcggtcgcagttgggcatcttgcctgggtcgggggcgggcagtcggtcccagtggccgccgctgagggcagagctgcgagcgagcggggccggctgctggtcgcgccgcgccgtaaatgcaagcctgtagccaaatgcttcccccattattctaaggtttgtgtctgcgtgtgcgtgtatgta

SEQ ID NO: 55979 - DNA, 31 bp, Homo sapiens
  chr19:30730220-30730251
  hyper
cttttgatggagaaagcgaggcttatccatg

SEQ ID NO: 55980 - DNA, 419 bp, Homo sapiens
  chr19:30865605-30866024
  hyper
tctttccctcctgcaacttctcggaccgtctctgccctctctcctccagagagggcgagtttcatcctggagggaggccgggggagctgcgaggccacccccagccggcgcccgggcggattgcgagcccccgcgggtccggccgggggagcggagactggccccccgcccgggctggggcgcctgccgcccgcgagccggaagagcgccccattcacgagcaggcagccctggcagagggttaattgaggatcattgttgttggttccaggaggagcgaagcgcctggagatcgggcgcgcgggcgcggctctgggagcgggggaaggtgaggggaaatgggacatgatggcattaataatcgttaccaaagacggtgggagtaacaaaggaatgcgtctccgagacgccgcccagcc

SEQ ID NO: 55981 - DNA, 30 bp, Homo sapiens
  chr19:31210699-31210729
  hyper
gctctggaccagcccggtggctccaaggga

SEQ ID NO: 55982 - DNA, 25 bp, Homo sapiens
  chr19:31839540-31839565
  hyper
tgacaatacccagaccctgtgcgct

SEQ ID NO: 55983 - DNA, 90 bp, Homo sapiens; identical to SEQ ID NO: 12245
  chr19:31839837-31839927
  hyper

SEQ ID NO: 55984 - DNA, 182 bp, Homo sapiens; identical to SEQ ID NO: 12246
  chr19:31839941-31840123
  hyper

SEQ ID NO: 55985 - DNA, 36 bp, Homo sapiens; identical to SEQ ID NO: 12247
  chr19:31840722-31840758
  hyper

SEQ ID NO: 55986 - DNA, 188 bp, Homo sapiens
  chr19:31841146-31841334
  hyper
cagccctcagaccccgcgccacccagctcctcccccaggacccgccgtagccacttcccccaattttttttccccggacaaactttcctgggcccgtcccgggggtcggtgtgggagggggttccttcaagtttcctctcctgactttgggatgatcagggtccctccaccccgcccctcgcccccgg

SEQ ID NO: 55987 - DNA, 543 bp, Homo sapiens; identical to SEQ ID NO: 12249
  chr19:31841937-31842480
  hyper

SEQ ID NO: 55988 - DNA, 48 bp, Homo sapiens
  chr19:31842828-31842876
  hyper
cgcgtagccggccgccgccgctgggtcgctgcctggccctcccccgct

SEQ ID NO: 55989 - DNA, 172 bp, Homo sapiens
  chr19:32532871-32533043
  hyper
atgctgcgagatcctgcagcacggcgagcggcaaagcgttgctcaaaagcgccacccaaaggcgggaggagtgtaacggcattcagggaggatcgtttttgttaatttcagcaatccgaatgtaaaaaatgacagcgccacgcaagttgacggaggcttttgattgaattga

SEQ ID NO: 55990 - DNA, 399 bp, Homo sapiens
  chr19:32715442-32715841
  hyper
cgaggatgcagaaggcaaccgagtccccgggcggcggcggggcaactgcggaaatcacgcagccagatgaagctcataaatttcccctatgaacaattgttttcatttccctcccatgccactagatattataagtggaaagcaaaacacaagtaaatatgttcattccgctcttgcgatcggtgataaaccggaggcggccgaggccgacagaggtcagcaggccgctcgccacgggtctgcgagcggacactgccaccctccggccgcgcgcgggactgcaccggccccaccgcccggctctcccgcccgctcgctgcccgccaatgttcgctttgcgcccttcgctcaatgtgcgtgcaaattacagggacattcgaaaggacagagagctcccat

SEQ ID NO: 55991 - DNA, 30 bp, Homo sapiens; identical to SEQ ID NO: 12250
  chr19:33072491-33072521
  hyper

SEQ ID NO: 55992 - DNA, 114 bp, Homo sapiens
  chr19:33166108-33166222
  hyper
gtggggcggagccgcgccacagctgacccaatgagaaaccgtcgtttcccagagtgacgtgtacgcagagcaatcatggagtccagcccagccgggggcggggctcaggcggct

SEQ ID NO: 55993 - DNA, 175 bp, Homo sapiens; identical to SEQ ID NO: 12251
  chr19:33166793-33166968
  hyper

SEQ ID NO: 55994 - DNA, 499 bp, Homo sapiens; identical to SEQ ID NO: 12252
  chr19:33166988-33167487
  hyper

SEQ ID NO: 55995 - DNA, 455 bp, Homo sapiens; identical to SEQ ID NO: 12253
  chr19:33167496-33167951
  hyper

SEQ ID NO: 55996 - DNA, 145 bp, Homo sapiens
  chr19:33182511-33182656
  hyper
tggcaagtcatatgcgcccttaagcattcctgcttttggtccaagcttcctgcgtgggaatactgcggtcctcctttcaggcagctgtgaatgacaaacggtcgctggctgccgtgacacccattgtcccgcgagagtgccctag

SEQ ID NO: 55997 - DNA, 30 bp, Homo sapiens
  chr19:33183262-33183292
  hyper
tttgaggaggcgggcgtgctgctgctgcgg

SEQ ID NO: 55998 - DNA, 30 bp, Homo sapiens
  chr19:33462927-33462957
  hyper
ctcagctcggccctcgaccaatcagagcta

SEQ ID NO: 55999 - DNA, 30 bp, Homo sapiens
  chr19:33532284-33532314
  hyper
tgccctatttgttttcgggaaaccgttggt

SEQ ID NO: 56000 - DNA, 40 bp, Homo sapiens
  chr19:33555230-33555270
  hyper
aaaataaatatgagaccgccaacacgcctgggatggtctg

SEQ ID NO: 56001 - DNA, 585 bp, Homo sapiens
  chr19:33555490-33556075
  hyper
cacctgcccgggacgccggggacatcgccgcccccactcctccccgccagcctccgtccggccagcgccggcccagtgcgccccctccccctcccggcctagtggaccccgactgcgcgctcccacggcccctgcagggcccgggggaaaggaggtctggagcccgcaggtccccgcccgcccgcccgaagccgcccaccttccgaaagtagccgtcgttctccttctccagcggctggggggccgcgggcaacagcgcgtcggtcatgctagcggcgcgggcgcggagggcggacggcggactgaggcgcggcggctgaggctggcccgagaggacgtgcggccccgcccctgtccccgcccttccccgcccctccactcccaccccgtcccgcggcccttctagccccgcctgaggccgagcactggagccctggagacgcgccccgccccgtcgcgggccccgaacccgcgccccttgaggcgctcgtcacccggagagctgcgccctgggcgcggcgcctcggggttgtctgtgggcgtcgtggctgactcaactttgcgagtgccgcgagagcgcaggaa

SEQ ID NO: 56002 - DNA, 30 bp, Homo sapiens
  chr19:33572234-33572264
  hyper
acaaaagcacaagtcggtgctggaccattg

SEQ ID NO: 56003 - DNA, 30 bp, Homo sapiens
  chr19:33575048-33575078
  hyper
ctgtctgtattttacgatataacacactag

SEQ ID NO: 56004 - DNA, 166 bp, Homo sapiens
  chr19:33685229-33685395
  hyper
aggactgacagacccacggacgctctaccggcggcacccggccgggcgggctgggcgcagcgcggggcggcccggggacgccggggccgggcgggctgcgcgccgcggggcatgggcgcgccgggggtccccgggcccaggccggccgcggcggggctcccggggc

SEQ ID NO: 56005 - DNA, 236 bp, Homo sapiens; identical to SEQ ID NO: 12258
  chr19:33685802-33686038
  hyper

SEQ ID NO: 56006 - DNA, 311 bp, Homo sapiens
  chr19:33717597-33717908
  hyper
cacggagaaggaggctgtggtcgcgggagagggtcgggagtgcggggatccgagggaggctgcctcctcccggaagccgtccggactgtgcagccgaggccggcggaaaagatccaggggggccgcgtcggggccaccggggcggcgggcggggcgagcctggcactgtgcggccggcggcggaacagcctttgtttcttcctggcggccgccgcgacgcgccgtcccctgcatgtggatgaggcctcgccgggcgccccgtccttccccccagtggcggcctccgggtttgctggggccctgccaggggt

SEQ ID NO: 56007 - DNA, 6 bp, Homo sapiens
  chr19:33717938-33717944
  hyper
cggggc

SEQ ID NO: 56008 - DNA, 3867 bp, Homo sapiens; identical to SEQ ID NO: 12259
  chr19:33790838-33794705
  hyper

SEQ ID NO: 56009 - DNA, 30 bp, Homo sapiens
  chr19:34012744-34012774
  hyper
ggcggggcagggggcggggcatggagtcct

SEQ ID NO: 56010 - DNA, 284 bp, Homo sapiens
  chr19:34112445-34112729
  hyper
ggcccgccccggtgacgcctggtccttttcccgggttggcgccgcgtgcgacccaccgaggcagtggcagcactggccgcggtctggagcctagcgtcaggccggagtccggctctcctgaaccgggagaccggcgcagccccagccacgaccgctcccacccccgcggccgccggaccgcgcccagcagcgactctttctgagagcgctgccagaggggccgcgggagccgcagagcgcgcgtgggcgcggcgcccgcgagcccccgggagggccgagtgcat

SEQ ID NO: 56011 - DNA, 157 bp, Homo sapiens; identical to SEQ ID NO: 12261
  chr19:34113145-34113302
  hyper

SEQ ID NO: 56012 - DNA, 683 bp, Homo sapiens; identical to SEQ ID NO: 12262
  chr19:34113366-34114049
  hyper

SEQ ID NO: 56013 - DNA, 87 bp, Homo sapiens; identical to SEQ ID NO: 12263
  chr19:34114286-34114373
  hyper

SEQ ID NO: 56014 - DNA, 216 bp, Homo sapiens
  chr19:34175218-34175434
  hyper
taaattgccttccccgggagtagcgtgccgcccggcaggggcctgggtgtgccaaggcccggctctggggatttcaggacccaggccagcgctccccagcagcagggcaggaggcagcctgagagtcggcagccccgccttggagtctgagcactcgcgcccatccgtcaaccttgcagagcattgcaactttatgcctacgcataaaaactggag

SEQ ID NO: 56015 - DNA, 840 bp, Homo sapiens
  chr19:34263011-34263851
  hyper
ctccgccagcgccgtcgccgtctgctcatcaagaaaatgccagctgcggcgaccatcccggccaacagctcggacgcgcccttcatccggccgggacccgggacgctggatggccgctgggtcagcctgcaccggagccagcaggagcgcaagcgggtgatgcaggaggcctgcgccaagtaccgggcgagcagcagccgccgggccgtcacgccccgccacgtgtcccgtatcttcgtggaggaccgccaccgcgtgctctactgcgaggtgcccaaggccggctgctccaattggaagcgggtgctcatggtgctggccggcctggcctcgtccactgccgacatccagcacaacaccgtccactatggcagcgctctcaagcgcctggacaccttcgaccgccagggtatcttgcaccgtctcagcacctacaccaagatgctctttgtccgcgagcccttcgagaggctggtgtccgccttccgcgacaagtttgagcaccccaacagctactatcacccggtcttcggcaaggccatcctggcccggtaccgcgccaatgcctctcgggaggccctgcggaccggctctggggtgcgttttcccgagttcgtccagtacctgctggacgtgcaccggcccgtggggatggacattcactgggaccatgtcagccggctctgcagcccctgcctcatcgactacgatttcgtaggcaagttcgagagcatggaggacgatgccaacttcttcctgagcctcatccgcgcgccgcggaacctgaccttcccccggttcaaggaccggcactcgcaggaggcgcggaccacagcgagg

SEQ ID NO: 56016 - DNA, 30 bp, Homo sapiens; identical to SEQ ID NO: 12265
  chr19:34287110-34287140
  hyper

SEQ ID NO: 56017 - DNA, 687 bp, Homo sapiens; identical to SEQ ID NO: 12266
  chr19:34310889-34311576
  hyper

SEQ ID NO: 56018 - DNA, 30 bp, Homo sapiens
  chr19:34396701-34396731
  hyper
gctaactcgcggtgcggccttgggacagtg

SEQ ID NO: 56019 - DNA, 30 bp, Homo sapiens
  chr19:34850560-34850590
  hyper
gaaacgccacgccacgccccgctcccgact

SEQ ID NO: 56020 - DNA, 30 bp, Homo sapiens
  chr19:34919113-34919143
  hyper
tgtgggaataacaccgccggtctcagctgg

SEQ ID NO: 56021 - DNA, 154 bp, Homo sapiens; identical to SEQ ID NO: 12267
  chr19:34972209-34972363
  hyper

SEQ ID NO: 56022 - DNA, 125 bp, Homo sapiens; identical to SEQ ID NO: 12268
  chr19:34972522-34972647
  hyper

SEQ ID NO: 56023 - DNA, 448 bp, Homo sapiens; identical to SEQ ID NO: 12269
  chr19:34972675-34973123
  hyper

SEQ ID NO: 56024 - DNA, 214 bp, Homo sapiens; identical to SEQ ID NO: 12270
  chr19:34973242-34973456
  hyper

SEQ ID NO: 56025 - DNA, 195 bp, Homo sapiens; identical to SEQ ID NO: 12271
  chr19:34973553-34973748
  hyper

SEQ ID NO: 56026 - DNA, 30 bp, Homo sapiens; identical to SEQ ID NO: 12272
  chr19:35168379-35168409
  hyper

SEQ ID NO: 56027 - DNA, 30 bp, Homo sapiens; identical to SEQ ID NO: 12273
  chr19:35168633-35168663
  hyper

SEQ ID NO: 56028 - DNA, 219 bp, Homo sapiens; identical to SEQ ID NO: 12274
  chr19:35168867-35169086
  hyper

SEQ ID NO: 56029 - DNA, 104 bp, Homo sapiens
  chr19:35169516-35169620
  hyper
ccagggagagattgacgctccggcgagtgattaccagtgtgcttttccattaaggtgtgtgacaggtgccgcaagataagcccgatttttcatgactgcttttt

SEQ ID NO: 56030 - DNA, 536 bp, Homo sapiens
  chr19:35263667-35264203
  hyper
gcggatgggtgcatgcgggcggtgacccgagctcgcgcgggctgcggaaccctccactcaccaacgccggcgccgccatgggcccagggggctgggtgaggccgtgagagtcggcgaggaagccggtcctgcgggctcggccgaccccgggctccggctctgggctgcgagggacctcagtccccgccgtcgtgtaaaatgcacacaaggttcgcggcgccgcctctgcgcgccgtgaggacacagggctgtcgccaaggccccaggaagggttttgcagacgcttgtgggggtgggatcgcggctgacataaaagcgtgtaagtgggtcctatcctcctcactgtccgtctctactcggtctcgaaaagtggcccctgtctggcgttctacccagtgtagcgttggcaaccacagcagccgcaacctaacggcggacgaagactggacgccggaagtcccgcccacgccgctacgggaacgcccctctgcgccttccgtctatggcttggggtcggcttccgtcccttgtagcac

SEQ ID NO: 56031 - DNA, 12 bp, Homo sapiens
  chr19:35395936-35395948
  hyper
gccggcgcaccc

SEQ ID NO: 56032 - DNA, 168 bp, Homo sapiens
  chr19:35396250-35396418
  hyper
cgcacaagctgctcttcacgggcaactacctctgcaagcttcacccccggccccgccacgccccgcagggttccctgtctggtctggatcacctcgctctccctgcgcctctctccttggcctagctagacaagtgcttctcacgatccagcgcgtttaccgctcggt

SEQ ID NO: 56033 - DNA, 509 bp, Homo sapiens
  chr19:35417721-35418230
  hyper
tggctcccagcaactcgagcgcctgcgcctgcgcattctcagccggacgggagcgcccagaagtctccgggcgccggtgggcggccttgtggactgcgccgggcatgctcggcggtgtgacggctcaggactgcatttcccagaggctgcagctatccggccaatgtagcctgaaactacatttctcagcggccactggaacgacctcaatctctgcctcctcgccagttcattgtggtcgttgacccggcagcgagctttggagttcatcgagggagaagtcagcgcccagctccgaggttggagcagccccgccgggcaacttgaatttctgcaaacgaacacagcaccgggagctctgcagacctgtgtcggcgcggaacccggactgagacatgcgtgagcgttgggtggaccgggcgaggatcccgggccggcgagtgcgggagcggcagggcagggagggtgcgtcggccggggccggtgtgcatccgcgaagactgggtgca

SEQ ID NO: 56034 - DNA, 344 bp, Homo sapiens
  chr19:35490294-35490638
  hyper
gcgtaccctggagagcgctggggagccacagccccggagctgtgaggtgggactcgcatttctgtgtggttgggccaggagtccaggacaccacctgactctgacctcttgcagacggggcgggggaggggggacgcaggttatggcgtcagagcaggatcgaatccaactctgccgcctacctaccaggtgaccccaacaagtcacttcccatcttagaggccgggcttctccttccgtaaaaggactgattttgcccgttcctgcgctgtccccgggaaaagcccttaccaccgagttagtgggactcccagcactggggtgatgagcgcaaggtctcagca

SEQ ID NO: 56035 - DNA, 30 bp, Homo sapiens
  chr19:35490968-35490998
  hyper
ggctccccaacctgcgggcaggcagctgcc

SEQ ID NO: 56036 - DNA, 381 bp, Homo sapiens
  chr19:35531731-35532112
  hyper
gctgagtggaggaaatgggtgcggtggaggtgggtttggctgggcacagcgggcacgtgtgggtaagcgggtggggccggttgtgcgggtggcctatctggggcaagcagccgaggccgactgtgtccggcgtgtggttgagcacgggcaggtgtctggcggtgaccctgcacgtctggtgtttacctggccctgggtctgacgtgggccgcgcctggctgctggcgggacagtgtgttatctgcctgcggacgcttccggccacttggcctgggcctctgcccttagcgctgtgttttcccggccaagccccccatcccccctatctagtgctaggactttctggctccagaggtcaccgcggccgggcggaggctgcca

SEQ ID NO: 56037 - DNA, 30 bp, Homo sapiens
  chr19:35605852-35605882
  hyper
ttagagccctaccccgaggtccccccgccc

SEQ ID NO: 56038 - DNA, 30 bp, Homo sapiens; identical to SEQ ID NO: 12278
  chr19:35626434-35626464
  hyper

SEQ ID NO: 56039 - DNA, 262 bp, Homo sapiens
  chr19:35738723-35738985
  hyper
agtagaacaaagcacgcctgggtaccgaaaccagccactggccagttggcaacctgggggagtctaacgcgaggaagcgcccagggttcccccaggatgcgctttccctcgccgccacctggagacagcagagtcacgcccagcgctgcgcaggctgatcgccgcgccgcgcccccgccctcggtcgcaggtggctcgttccgggaattcctaagcggaaaccggtcccaagccccgcgccttcgctcggcccctttaagag

SEQ ID NO: 56040 - DNA, 30 bp, Homo sapiens; identical to SEQ ID NO: 12280
  chr19:35760846-35760876
  hyper

SEQ ID NO: 56041 - DNA, 30 bp, Homo sapiens
  chr19:36000502-36000532
  hyper
cacagtctgttccccggctggatagaggac

SEQ ID NO: 56042 - DNA, 30 bp, Homo sapiens
  chr19:36049108-36049138
  hyper
gacggggccataggcggagcgggagatggg

SEQ ID NO: 56043 - DNA, 136 bp, Homo sapiens; identical to SEQ ID NO: 12281
  chr19:36123861-36123997
  hyper

SEQ ID NO: 56044 - DNA, 30 bp, Homo sapiens
  chr19:36139218-36139248
  hyper
gctggtagtagttccgcttcctgtccgact

SEQ ID NO: 56045 - DNA, 30 bp, Homo sapiens
  chr19:36193392-36193422
  hyper
ccgcctgcttgaggcgccctggcgtctcat

SEQ ID NO: 56046 - DNA, 30 bp, Homo sapiens; identical to SEQ ID NO: 12282
  chr19:36232203-36232233
  hyper

SEQ ID NO: 56047 - DNA, 187 bp, Homo sapiens
  chr19:36236367-36236554
  hyper
ttgccctctccaggcgcttaccaagcgctcggaaacgccccagggcgcttgcgcgtgggaggcgcgcgccctccccatagactccccggtaggagttcttttaacagcgcatgcgtgcagtgttgcctcgcccaaagaagactacaatctccagggaaacctggggcgtctcgcgcaaacgtccata

SEQ ID NO: 56048 - DNA, 244 bp, Homo sapiens
  chr19:36239183-36239427
  hyper
cacactacaagtcccgggaagcctcgcgatgccctaatcctttgtttcccaccgtgccccgcgcggcgcaggcgctgttactcagggtgagtctgggaagctggaactacacctcccaggaagctagggggtagatggtttgtttccggaagcaaagccccaggtgggtgggacctaaagctgggagactacggaggcagctctcaattggtcaggatgcgagattgacggctgcaataactaa

SEQ ID NO: 56049 - DNA, 30 bp, Homo sapiens
  chr19:36248724-36248754
  hyper
agttagaccggggtcgggacaggacttctg

SEQ ID NO: 56050 - DNA, 192 bp, Homo sapiens
  chr19:36334973-36335165
  hyper
gggtgtggtttccatggtgggcggggctcacagtgcacgtccagccgcagccgcgcttccgcggtgccctcagagttctggcagtgcagctgatagaggccgtcgtccgcgcgggtcacattccacagatgcagagccccgctggacaggatgcgatgccgggggccgcccgctggggaaggccagaataag

SEQ ID NO: 56051 - DNA, 224 bp, Homo sapiens
  chr19:36336411-36336635
  hyper
tctccggggtggggcggccacgccctccagcctgtggaaccggggtcaagccagggctgcgagcggagccagaggctggagaggcactaggcgggggcgggacatgcgtggagggggcgaggccagaccagagaggggagggatccctcgcactcccacctctccccttccttgtcccaggacaagttgaccggcggattgctgctgacgctgacgcatgtcaa

SEQ ID NO: 56052 - DNA, 263 bp, Homo sapiens
  chr19:36336895-36337158
  hyper
gtgcgagccctcacactgcaccgccagctgcgtggacgcgctgagctgtccagccttgcacgtgaacttggcctggttgtccgacggccctgtgaccagcaccagctctcgggagaaggtgctcccagatttctccacgctgccgagatgcacgcgccgcgactcctgcggcagccgcgactcggtcacggtgcgcgagtcctacgggccgggagtgactggggttcgcaggcagccctgccgcttccaccaacccccaaccc

SEQ ID NO: 56053 - DNA, 42 bp, Homo sapiens
  chr19:36347892-36347934
  hyper
gagactaggctgggcgaagagtcgagcgtgaagggggctccg

SEQ ID NO: 56054 - DNA, 837 bp, Homo sapiens
  chr19:36351560-36352397
  hyper
atgtgctgtgtgagctggggccggcctgtgggtgtggtcaaaggtggccgtggctttcagggctgttgagggtcggggcctggaggggcggggccgggagagcgagcgtggggtattaggaggaggagagtgtggagctggggcatattcttgcgccctagagggtgtggtgtttctgtggggctggctgatcccaggtcagtggctgcattccgccccggccatgtgacccctagtctctttcgtccagttgggccgattctgcaggcaaagccggagcccgtgtccgtggacgtgggggaagacgcttccttcagctgcgcctggcgcgggaacccgcttccacgggtaacctggacccgccgcggtggcgcgcaggtacagccctaaatctgaggcggtggctggagggggaccaggcttccttacaaatccggcttctgacgccccttccctgtcgcaggtgctgggctctggagccacactgcgtcttccgtcggtggggcccgaggacgcaggcgactatgtgtgcagagctgaggctgggctatcgggcctgcggggcggcgccgcggaggctcggctgactgtgaacggtgagaaggcggggcttcctaggggacctggcccgtcctgggatagggagcggacagagggggcaagggctaatgcagtgggagtggcctggaaggagctttacacccagcgggggctggagaccggacctattgaaggcgaggcttttaggagaatcggagtttggaggcggcgtggcctgattgattgaggttagcggagagtgcgctggacagacccggctttgttacagcctttggg

SEQ ID NO: 56055 - DNA, 30 bp, Homo sapiens
  chr19:36360590-36360620
  hyper
ctggactatgcgggcgcctaacccttcacc

SEQ ID NO: 56056 - DNA, 30 bp, Homo sapiens
  chr19:36360819-36360849
  hyper
ggccaataaagaggcgcaactatgctaggg

SEQ ID NO: 56057 - DNA, 30 bp, Homo sapiens
  chr19:36391102-36391132
  hyper
ccctcggggccctgcgatcctggatcccca

SEQ ID NO: 56058 - DNA, 30 bp, Homo sapiens; identical to SEQ ID NO: 12285
  chr19:36394467-36394497
  hyper

SEQ ID NO: 56059 - DNA, 30 bp, Homo sapiens
  chr19:36422604-36422634
  hyper
ttcgtctgccaggccggaaccaccgctcaa

SEQ ID NO: 56060 - DNA, 82 bp, Homo sapiens
  chr19:36427252-36427334
  hyper
gtgcgcgcggagcctgcgcctttaagcgccggtgcgcgcgctgccctgggttgccggcgaggaggccgcgggagcgcctgga

SEQ ID NO: 56061 - DNA, 69 bp, Homo sapiens
  chr19:36427553-36427622
  hyper
cctcccagtcagcctccgccgcagcccaggaagccagccgggacgccgccgccccggaccccgcgccct

SEQ ID NO: 56062 - DNA, 95 bp, Homo sapiens
  chr19:36450200-36450295
  hyper
cgctggctctgcggcgctacctgctgggcactccctaatcgatggtgacgccgtcgctgccgcccggcgaccggcacaaggagtttgcggtggtg

SEQ ID NO: 56063 - DNA, 183 bp, Homo sapiens
  chr19:36485957-36486140
  hyper
gcgaccagcgactccgcccacttctcccagccggctgttacgtaactgcaacgacagccagtcagacgcggcagcgccggatggcgggaggcgggagttggaggccaagggaagcgctgggcggaagtggctgtggctttgccctttggcctttgctggctgtgtggcggctccgcggttcgc

SEQ ID NO: 56064 - DNA, 30 bp, Homo sapiens
  chr19:36486422-36486452
  hyper
ggggagcctggcggcgtgggttgccagcct

SEQ ID NO: 56065 - DNA, 30 bp, Homo sapiens; identical to SEQ ID NO: 12287
  chr19:36523569-36523599
  hyper

SEQ ID NO: 56066 - DNA, 31 bp, Homo sapiens; identical to SEQ ID NO: 12288
  chr19:36544541-36544572
  hyper

SEQ ID NO: 56067 - DNA, 215 bp, Homo sapiens
  chr19:36705177-36705392
  hyper
acatgaatcacaaccgcacacccgcagtggtcacacagtcacaactgtactcacaccccaggaacagggcgaacaggccacatatacaacggggacacacgcagtatcacccccggtcacaaggaccctgcaccccgatactctctatcacacatggttacacaaaaaccaccagacaccctggagacaggcggttacacgtgcacagttgcaga

SEQ ID NO: 56068 - DNA, 30 bp, Homo sapiens
  chr19:36706038-36706068
  hyper
ttttggtctttgtccgcgggtcagtacggc

SEQ ID NO: 56069 - DNA, 31 bp, Homo sapiens; identical to SEQ ID NO: 12289
  chr19:36708803-36708834
  hyper

SEQ ID NO: 56070 - DNA, 198 bp, Homo sapiens
  chr19:36736097-36736295
  hyper
tgggctcctttgaatcgctttggcagctccctcggtttagagctacagggttttctccctcccctgagactctaacgcgtgcaccaactcgcgcctagagggcgtgtatgaccccagctcagttctaagccgaggggctgctgccggacattctagggtctgatctggcgggctcgaagggaggacagtcactgcgac

SEQ ID NO: 56071 - DNA, 284 bp, Homo sapiens; identical to SEQ ID NO: 12291
  chr19:36736314-36736598
  hyper

SEQ ID NO: 56072 - DNA, 56 bp, Homo sapiens; identical to SEQ ID NO: 12292
  chr19:36736765-36736821
  hyper

SEQ ID NO: 56073 - DNA, 230 bp, Homo sapiens; identical to SEQ ID NO: 12293
  chr19:36822236-36822466
  hyper

SEQ ID NO: 56074 - DNA, 335 bp, Homo sapiens; identical to SEQ ID NO: 12294
  chr19:36822557-36822892
  hyper

SEQ ID NO: 56075 - DNA, 270 bp, Homo sapiens; identical to SEQ ID NO: 12295
  chr19:36909078-36909348
  hyper

SEQ ID NO: 56076 - DNA, 319 bp, Homo sapiens; identical to SEQ ID NO: 12296
  chr19:36909623-36909942
  hyper

SEQ ID NO: 56077 - DNA, 46 bp, Homo sapiens
  chr19:36912303-36912349
  hyper
tttctgggactgctcagccaccggccgctcccggcaccaggggacg

SEQ ID NO: 56078 - DNA, 30 bp, Homo sapiens
  chr19:37064151-37064181
  hyper
ggcccgggtcacctcgactcgccaggctta

SEQ ID NO: 56079 - DNA, 199 bp, Homo sapiens
  chr19:37095613-37095812
  hyper
gtctccagtgggtcacaacagcgctgtcacaggatcactgataacagcatgacacattcatagtcaccgctcagcgccgtcacacaaacggccccgcccccactcagtcccgcgggcccaatcggggacagtcagggctgtcccgggctgtgcacctgctgtgcacacacaccccctgctgtgcacaccccccgccccc

SEQ ID NO: 56080 - DNA, 210 bp, Homo sapiens; identical to SEQ ID NO: 12298
  chr19:37096487-37096697
  hyper

SEQ ID NO: 56081 - DNA, 683 bp, Homo sapiens
  chr19:37157511-37158194
  hyper
cctaagggctgatcccgcactcagaggcctaaaactatagacattcccttccgcggcactggtgagccaggatttcttaccttcagcattctcagggaaggctctggtccaagctctgattcggattccaagcgaagccacacgcccagctcttccttctccaccggcccgggacatccttacctgcctctacccggagaccattcctgcgaggctcctaccggaagtagctgtggacagcagtgtcctctgggaaatgcagtccgaggggagagcgcctggggtggagcgggtgtgttccgccgggctccgggatgcacttgcgcagtttcacccgaggctggagtgacgccaacctgttaatgttcgttttcggattctggacttcgggttccgctgaggacggatttcggaataggcacagtggctgccccgaacccctcaaggcggcctccgcgggctgtggctgaagataattttcggcgggcgcggactaacccggcttccctttgtggagttgtggtgagaaaggtgttttgttgtgcgcgtgtccgaaggtgactccggaggagaaggtggatatgaactgacggtgagggtgtagcgcgtgagatttgtatgtgaaacgatttaaaaaaaaattttttttttggccgggcgcggtggctcacgccaaggcgggc

SEQ ID NO: 56082 - DNA, 30 bp, Homo sapiens
  chr19:37262512-37262542
  hyper
agtgaaagcttggcccgggaccaatgaggg

SEQ ID NO: 56083 - DNA, 163 bp, Homo sapiens
  chr19:37262837-37263000
  hyper
accccagcctggaagcggcagtgggctctggcatttagttggtccccgccatagagccgccaactctctctctttctttaaccctcgccttcccttcaaaatctaacagagcccaccgtgtacatgcccacaaaagaagcgactatttcgtggaagcccgctg

SEQ ID NO: 56084 - DNA, 1113 bp, Homo sapiens
  chr19:37263315-37264428
  hyper
cagccacagacctgcaactcacgcacacaaggtactgcacagacacgcaaagtcacacacccaccccgggacacgcagtccaaccacacagtcaccggttcttcacatccgcacgcacaacgagggtcgtccaggacacacacacccactccgggcgcgcacagtcacaagcgcccacctgatcacccagagtcagcaccacacagccacagtcacagaccacggagacccacggcagccatcgcgatcacacacgcaaactcctctcctcagccctccacacacaaaaggaccggagccggattcctcaccctcagcattctctggttccgctcggggccagcctagccaagttcctcaggactccaaggcgcggcggcagctaaatcggcacagcaaacggtcccgccacctggctaagaggaagccaaaatctcgcgagacgtggcgtcggcctgcgggatcctctgggaaatgtagtccagagcccgactgcgggcttccctatgcctctcatttccaagcctggcttgtttccttttaccgctcctctccaacgaggatcgcagagccctcatgccgagcggctcgctatggggccggctcgcccgctagagtggtcaggcctgattatccctggcagctctgttatctggggtaagacacaggaaaacgtgcttccggttctcggcggaagtagccccgaacggtagaaccgatgggaaatgtagtccagggcagaaaagcggtcaacccagccacgatgcgagccaaaggattcttggctccaagcctggtcctggctgttagtttggaactcatgcacccagatgctaactcgccctcagaatgcagaggggatgaaacactgaccggacaattcaatctgtatatgggtgagtccagggctcagtctgcattgcgcggaaaatgaaggtgaaggtggaggtgggacctgatggtctcgtcccggatagggttgaagaagtgggagaaaaggaatcaaaatcgtggatgggataagattgtgcgcgaatgctctctgggagcggatcgtggccgacgagggcccgaagatgctgccttgtgatcgcaggtgtgagtggaagctgt

SEQ ID NO: 56085 - DNA, 156 bp, Homo sapiens
  chr19:37266862-37267018
  hyper
gggccttccggtgggcgggaagacagcgcaaccccgccaggcctttctcgtcgctgcgcctgctcgctgaaggagtcacctacccgacgagactaacggctgcggcgcggaagccccacagcccgccgagaaccaggaatacgagagccaggcggc

SEQ ID NO: 56086 - DNA, 31 bp, Homo sapiens; identical to SEQ ID NO: 12302
  chr19:37282770-37282801
  hyper

SEQ ID NO: 56087 - DNA, 96 bp, Homo sapiens
  chr19:37287860-37287956
  hyper
gggtaggcgttccagcgcagaaatgcgcaggaaagtttctgctgtgcttgtaggaaggtcggccacaagcacttcttttgttttttgaaaccgagt

SEQ ID NO: 56088 - DNA, 229 bp, Homo sapiens; identical to SEQ ID NO: 12304
  chr19:37288195-37288424
  hyper

SEQ ID NO: 56089 - DNA, 225 bp, Homo sapiens; identical to SEQ ID NO: 12305
  chr19:37288606-37288831
  hyper

SEQ ID NO: 56090 - DNA, 30 bp, Homo sapiens
  chr19:37289216-37289246
  hyper
tattattatttttttttgagacggaatttc

SEQ ID NO: 56091 - DNA, 147 bp, Homo sapiens
  chr19:37328860-37329007
  hyper
tttttggccccatagcggctgctatcaccacctttacgaacgtggtcacgcacaacgcgacgcagtcataatcacgtacatacagtcacatttaaatagtccattagggtcacacacagcgcctgtcaacgtcgtgtgcgcgtgcgc

SEQ ID NO: 56092 - DNA, 322 bp, Homo sapiens; identical to SEQ ID NO: 12307
  chr19:37329066-37329388
  hyper

SEQ ID NO: 56093 - DNA, 185 bp, Homo sapiens
  chr19:37329447-37329632
  hyper
cgcccacacaccgctcacatctgctgccgagagcttccagaattccaggccgcgtttaggaagcttcagcggaggcatgcaggctgccctacctctgcaaaaggctcccagccctgggaacaggacagtaagcccaggccatcttaggctggaagtaaccttggtcccgacggccctgggaaatg

SEQ ID NO: 56094 - DNA, 262 bp, Homo sapiens
  chr19:37340839-37341101
  hyper
caccagcacaagcaggcccaccgcggtctcacacacactcgagccttcctttgcccagtctcacatgcatgactgggatcgcggatttgtccccttccgactccccatgctggttcggtcccagacgctcaggtgccacattggggtgcgctctcccggctcctccacacgctacgcagctgcccgcctcaagagcgtctgcgtgcttccagcgttaagtggaattccaagcagcctccggggcacagttagtctggtcact

SEQ ID NO: 56095 - DNA, 117 bp, Homo sapiens
  chr19:37341165-37341282
  hyper
cggcgaggcttggactacgtttcccaggagaccctgcggtccagtatgtctcccgaggaggggcggaagcccgggagccgccctctgaggctgggcggggtgaaagaaagcttgccc

SEQ ID NO: 56096 - DNA, 682 bp, Homo sapiens; identical to SEQ ID NO: 12311
  chr19:37341571-37342253
  hyper

SEQ ID NO: 56097 - DNA, 1053 bp, Homo sapiens
  chr19:37406728-37407781
  hyper
cctcgtgatcctcctgcctcggcctcccaaacacaacctccacctttcaggccgctccgcccgcaggggcccaaggcgccagctccccatcggtcttcggtatcctcacctaagccctttccagtcatcccggatgggaacttgcagacctgagccagttctcctggggaccaaaatatctcacctcccagatctaagggtcccgccaggagtgacgaaacgttcgaattcctgcgagaaaagtggcaggccaccaggccctctgggaaatgtagtccagagcgggacccacgccgattcctgtcagctcctcgcctgggcccacccgaaacggctgctccctcaactctcaacatccagccgagcctcggagttgcgggtcgccgtagcgctgcgcaatggagatgagcctcccggggaacccggcccaagcctcaccctcacacaggaaagcagatgtgttctggccggaagttgagtggggccgcggggcctgctgggaggtgttgtcctcggaaacgtcgctggcgcggagggatggttcggcgctttaggcgtctgtcacagacctatctgcgggtcgccttcacccagcatctcagaaactgcgcgcgggatgaacattcgggtgtttccggcaggtgacgctgccgagtccccgcagcagggggcgagcaagggactcgcggttgacgggacacggatcctctaaggcccagagtgtcccgagtagcggcagtggggagtgctcagggtacgctaatggtgagtggttgcagttgatgggacaaaaaactgtgatgggagttagtgtgggtgtgtggttgtgtgtgtgagtgtgacggcacgaataatctgatggggtgattgtgatatttggttgcgcgggattatgatgaaatgtgtgatatgtgtgtgattatgattaaggctgtagcgagtgtgaacgtggcgaagtgtgcgtgattgtaatatgtctagtagttcttgtcttgagctggcttttctgtagcatttggcacagttggtaacggcttgaaaaacacttatttg

SEQ ID NO: 56098 - DNA, 636 bp, Homo sapiens; identical to SEQ ID NO: 12313
  chr19:37463931-37464567
  hyper

SEQ ID NO: 56099 - DNA, 79 bp, Homo sapiens; identical to SEQ ID NO: 12314
  chr19:37464666-37464745
  hyper

SEQ ID NO: 56100 - DNA, 504 bp, Homo sapiens
  chr19:37663373-37663877
  hyper
ccatcaatgacctgagaaatccgtcacaatcaacaacggacgccacagaaccccatcaccgaagcctgaaaccgcaatcactaactccacaggcaacctcgacaccccctattactggctccacagaaaccccaatcgtgatcaaccaaaatcacctcaaagatttatcggtattggaatatgaaaatactcctgacaccagcggcaaaaaagccttggaagaccacttccacttccggtccgacttctagcacctcccctttgtaggctgttgatatggcgcatgctctgaataaacttggaagccagtttcctcgaacagtcaacagggcgcagacacagcgcacaggttccgtaatgtggcgctgtccggcagagaacatggccgcgcccttatggtgtttattcgcgtgggccgccattttgaaagcatatccattccgtagagcagaggaattggccgctggcagggtttcctagagcgaggcaggtatagttacatag

SEQ ID NO: 56101 - DNA, 498 bp, Homo sapiens
  chr19:37701188-37701686
  hyper
caaagagccccatcaatgacccgagaaatccctgtcacagacaaccatcaacggacgtcacagacccccatcaccatgccccgaaaccaccatcactaattccacagacaactcctctattactgacttcacagaatccctaattgcaaccaaccaaaatcgtcacagagacctctcggcattaaaacgtgaaaatagtcctgacgccagcggcgaaatagccttcggggaccacttccacttccggtccgacttctagcacctccccttatggactgttgatattgcgcatgctctaaattaacttggaagccaatttcagcccacagtcaacagggagcacacacatatttagagacatcgtgcagtttccgtaatcggcgctcacgggcagagaatataaccgcgcccttatggtgtttatttgtgtgggtcgccatctttgatgcgtatcgattccgtacagtggaggagtccgcctcctggagtgttgactag

SEQ ID NO: 56102 - DNA, 30 bp, Homo sapiens; identical to SEQ ID NO: 12316
  chr19:37862257-37862287
  hyper

SEQ ID NO: 56103 - DNA, 922 bp, Homo sapiens; identical to SEQ ID NO: 12317
  chr19:37957585-37958507
  hyper

SEQ ID NO: 56104 - DNA, 41 bp, Homo sapiens
  chr19:37959759-37959800
  hyper
caccctgcatcccccccaccccgctcccctcccaatttttt

SEQ ID NO: 56105 - DNA, 896 bp, Homo sapiens; identical to SEQ ID NO: 12318
  chr19:37959873-37960769
  hyper

SEQ ID NO: 56106 - DNA, 1026 bp, Homo sapiens
  chr19:37997166-37998192
  hyper
attctttcctcaggtcggcttctcgggcaagcctccttaggtaaaaaccttgctttcaacatttcctttccattatgcgctaagaactctgatctcttcccgctgcggcagccccgccctttccttgcggctccgccctttccgtgaagtcacgcccgtccttaggctgtctctgtctccctaagagcgagtctcttcgctgctctctaactcctagagctggctcagaaagagtttcacattgccataggggagctcctaggagaggctgcacccattgcacgtaagaagcggtaaaaatgtacgcggccatcttaccaggctgccggagacaaagaaagctcagctttgatgtctgggcgccaccatgttggccacaggaggttttggcatctgagatgctgagttaagagcagagacgacatctctgtttagggatccagggacacttccttctccttgtcctaaaatagccttatcttttggtctagcaaagggcttaatcatccgttttacggcacagttttaaacatggccgccccaggtaggagtcaagtgggcgtcgccatcatacctccaattacagctttgagaaacccagaatcctgttcactggaaggttgccgggtggcggctgacagcctcaaagtcgcaattgagtctgcgcaccggccattcaggatgggacgaccttataccgcggtgaggcggcgtggcaggacgaccaatttcagattcagggcgcggatgcagcataaatgggaaggcacggtttgagaaacggtcaaacctgggactagtggaggatagtgagctgccgactacggtggccgactgggtcagctatgggtgcccgtgagggtcaatgacaagggaactgaagggttaagagattcggcgtctgagcctcgcggggcctcagtggtggcggacagaggtttgcgggagtcagtggcacggtctctgaagaagatggattgggagtgtgtgggaatcaataaatgcgagttctgtgaaatgtcttga

SEQ ID NO: 56107 - DNA, 443 bp, Homo sapiens
  chr19:38042356-38042799
  hyper
gctgggctatggccccctcctctccgggggatcgtcgccttggtcccccgaccctaggagtcgggcagggcagaaccaggctaaagaaacgtccagcgtagcttcaaggatgcaccgcgtgatccctatcggatctccccgacgcgtcaggcctgcctagacggtgctgggagcgcgtctccttgaacgttgtcccgcctgggattgcgaggtaggtaccgcctgcctgtgtgtaccggggctgctgtctccggggaggggcttctggcggacaggagaaccaagcagcctcaggagctgcctgggtgtgtgtgtttctgtgcgagtgttgcatatctctgtgtgtgtttctgtgcaagtgttgcatgtctgtgtgtgtggggggggtggtgtctggtgaaaagaatgtgtctcgtgcggtggagcgccgtttctctgtagtc

SEQ ID NO: 56108 - DNA, 787 bp, Homo sapiens
  chr19:38085127-38085914
  hyper
agaaactgcagcagctgtaaccgcacgattctcagctggcttaatgatgtccgtgtcacacgaggagtactgcggcccgggaggggccaagcgctaggagcattaacaggcggcaggtgagcccaccccgcggccgcacaagcgcacacgcacacgtccagggcggaggaacactactagtaacacccgcctccttctagcctccctatcccaaagttatggtgccgattttgtccgcggcaggggctccaggggcacactcataaattcggtgcggaggaacacaactagcagcaccacacccccgccactgccagaaccaaagtgacggtgccgacacccctccgcaagcgcaaggccgacttccataagtaattagccagagcaccgtcccgttcctgtcagcaccgagccccagccaggacaccggtattcccagcaccatacaagaactactttttcgatgaagcaacccaaaagctgcgagcggttcccggtgaggccgcccactcacctggccggcgcagacaagctccgtgcgtcaagacataacagcgtaagtgtacgacgttgcgcagcgacgcgggggccttcgggaaatgtagtctacaactggaaaccggccggatcgtgtctgcgcaggcccagcagctaagatcgggtccggcgctccagaacagaacgatccctgaggctcccttgctcgaactgtgggacttaccctactatggtccgagcctaccctatttcattatactcaagtaacgccccagaaattccagagaat

SEQ ID NO: 56109 - DNA, 1785 bp, Homo sapiens
  chr19:38145545-38147330
  hyper
aagcaggattttaaacggaaggaactcgaatgcatttcacagaaacaaagcagcagcacgaactcacagggaaccggcttttagaagagcagcagcgattcgtttctccttctcaagcgccttctctggaaactggcagggctggggaagcaggcagagttcaggacaccccaggcttttcttgactcgattggaacccaccctccacgcttccctggccccaactaaccgccacctgcatgcacaaatggaaacgacagggcagagggtcagcagtcacccgcgtctgggttcgcagctccgggtacgctgtagttccgcacccggttgcccacgcccgggaccacccactgtgtcttttcggaactgtccagcgtgtcctcctagaccccagacacccaccccaaatctaggtcccagcgttttgcaggggaccttcatcctggggcgttcacctctgacttccctcttgggccttttcgctacggccgagcctaagtggctgaagcgcggacgaggatgcgcggggcctcggtctccaactgcaccacaggccgcacccacgaacctggtccggcacagttactaccgcccgggcctccaggcctcagggctgcagaagctcagtcccgggaaaaaaagcacaccggcctgaggctccacaggaaccttttctccaccttggcccggcctgcaaaacctggcccactccgcgctcttttccctcagaaaagcagcggccacagtggcgcccggctcccagccccagcctcacccgactcagaggatagcccagccctgggagtcagcggcgccagaatacgggagagcgcctgtctccgtcgcgaatgcgctagcgcgcgggggggcggaggcaagtcccgcagctgctccgggccgggaggggcgcgtggggccgggtctcggcggggatagtcgggccggggagacggagccagaggggccgcagtgtccctcgcctcaggcctctacctgtaatggccgccccgtgactgaccagtgccattaaagataatccaggcctgctcccctgtggacactgcggtccaaaatttaaaaaaacaatattccgcctttttatttttcatttggttctcggctcggagacaggcggaggctgcgagccccgccccgcccccagcgacgcctcaccggaacctttggaaatcggcttctgcctcgagtgcgcaagcgcgcggggggcgaacgctggggcccttcagggagcaagggagaagtgtggggccgcacctgccgaggggtcgggaggtttggaggagggtggaggttggctacaggatcccgatggggatggagtgttcaaatctaggcctgtagccgtgaccctggcgtgagttggatggaggaaaccccagtatcgcgagcctggaccaaggcgcggcgcgtgctgcctgtggtgtttgctgagtgacggccgccgcgcccccgcgtacctggaccgagtgcctggccgctggcggagtagtgtttccgtgcacggggctgctgcgtgcgcgtgtgccgttctctagcgggggattaggatggtgccgcagagaaggctgcgcggtggtgcctgactctgacgctggctgtagcgggtctctggggtctttgcggtttgtgtctgcgtttgtgacgtacctgacatcggatctgtgactgtggctctgcctcatccagcgttatttccagaatccttctgatagggcagcgcttctggttctggttttccatggagacggtttgtgggtccctatgaaa

SEQ ID NO: 56110 - DNA, 260 bp, Homo sapiens; identical to SEQ ID NO: 12321
  chr19:38182699-38182959
  hyper

SEQ ID NO: 56111 - DNA, 370 bp, Homo sapiens
  chr19:38183111-38183481
  hyper
cgctcccacgtctccgggcgcagcttgtgccagcgactactaggtcagggggcgcagctgagagaattcaagcaacctccccgcaaccggttccgccgcgtttgtgggctggtagcccggaatacatttcccagaggccttcgcggccgacgtgcttcgcgcaggaacgcagccgcctcccgactggaggacgcggtagcggagctgctcaaagcgaggtgctcagccctgggaggctcagggctgcccgaggggcttagtcccagagccagtgctgtcaggggctgagcatgtgaatagggcagtcggaagaccatgtgtgtctgtggcttttaaatacaccccgaacgtctatctcttttaactggag

SEQ ID NO: 56112 - DNA, 71 bp, Homo sapiens; identical to SEQ ID NO: 12323
  chr19:38210086-38210157
  hyper

SEQ ID NO: 56113 - DNA, 447 bp, Homo sapiens
  chr19:38210326-38210773
  hyper
cgcctgggggcctccgcgctctgagcgcctcctgcagccccactctcaccgccacgcagggtaccacgcgggcggcgggctggggctgcagaggctcccgcagtgacctgcgccgccttcttcaggtggaaccaaaaggtcccggaaccggagccaggggtccaagttttctccgttgcctttgtaatatgtagtccaagccagaacagtcaggaccgcaggtaccggtgagaaatggagtccagaatcctaaaaacctacgagaaatacggcagcgaccacttggaccgcgcctcccacccaccgctcgagccccggagacttctgggagtggccgccttgcctcgagtgcgcatgcgcagatcggccactactgggcccctggcctgaggcttagggtggagttagtgcgttcttagggccagtaggaggcgagtctgagtagaa

SEQ ID NO: 56114 - DNA, 30 bp, Homo sapiens
  chr19:38270415-38270445
  hyper
gaagatggctgaggcgaaggcgtgtccgac

SEQ ID NO: 56115 - DNA, 62 bp, Homo sapiens
  chr19:38307857-38307919
  hyper
gccctaagaacacaggaacaccgcccttgacctagcgtcagaaacgttccctcacgggttgg

SEQ ID NO: 56116 - DNA, 359 bp, Homo sapiens
  chr19:38307977-38308336
  hyper
cggcggtgggcgtggcgggcggtcgccgtggtcaccacggcttttctcagaggttttaacgcccctagacttcatttcccgacagggactgcgggtctggatattccgtcgtggactacgtttcccactgacgacggagaaaacttggtcctttggctccgcgctgcgcgtgacctgcagtcacctgagcaagagggcggcgtgggtcgctgcgggagcccctacagccccagcccgcagcccacgtggcaccctacagggctgtgagagtggggctgctggaggcgttcagagcgcggaggccccaggcgcgggccgggctctctcccgcctcctcaggcccgggggtgctggagctg

SEQ ID NO: 56117 - DNA, 30 bp, Homo sapiens
  chr19:38397139-38397169
  hyper
tgcgacaggattcccgacaagggacgggta

SEQ ID NO: 56118 - DNA, 58 bp, Homo sapiens
  chr19:38398220-38398278
  hyper
ggggagcggtggattcgcgtcccggctgtgccactcgggagccgcgatctgggaaaac

SEQ ID NO: 56119 - DNA, 31 bp, Homo sapiens
  chr19:38417473-38417504
  hyper
taggcaatgtatgtagcgtctgctgcatgca

SEQ ID NO: 56120 - DNA, 126 bp, Homo sapiens; identical to SEQ ID NO: 12325
  chr19:38700327-38700453
  hyper

SEQ ID NO: 56121 - DNA, 93 bp, Homo sapiens; identical to SEQ ID NO: 12326
  chr19:38700504-38700597
  hyper

SEQ ID NO: 56122 - DNA, 1154 bp, Homo sapiens
  chr19:38701092-38702246
  hyper
agttccctcactcctcactcccgccccccacccgtcgcccacatctcagtctctctcccagtgcccgtgtctagataccctcctgccctcccttagcgcctctctttccaccttatcgccaccgctgatttgccccacatccaggacacggagccccctggagatgtctgggtctgggatgacacctcctgacacccccgttccccaccccagcctcaggaggggccaacccaccgtcctcttcccagcccttcccttcccccggcccggctcccgcctccctcccggctgcgcccgctgcagctgcagcagcccgttgccagggcaaccacagctggctgggcgggagcccctccaccccatcccccttctcctcctttctggcaaagcagggcggagctgggacaaagccggggagaggcagggtgcaggcaggggaagaaggaggtggatggaggtaggggctggctggtcgcctcacccccaacaaggcccgtcgacccccggtcctccttcttggtgatgccccaaaccagacgggagaacgaggcagtcgtgggcagaggggtcaggcccagtttaatacacagaacaagttaattcacagcagaggcaggcaatagaggagactcggtgacaagtgagggggcactcctggattaggggacatccccccaaaacccaccacctcccccacctgcagtctcagtttcccttttttaaaacccgaacaacaaacacacacaaccacaagaaacaaccacgccccctcactcccccaaaatggccagcgaggggggcgggggccgccaggcctggcggggcgggaggagggagagaaaaggagtccgtggcggagtctgtgcttctcattccagcaggcgctgggcgggggcccacccggccccaccaccgccacccaccagccacggcaggcacggggcgggcacaggctggggcggtcggggaggggcaggaacagagttcaaaaccaaggttcacatcatgcagtatccaccgtgggcaccaggaggggcgggtggacaccacgcccaccgccctgggcacaagaggggaaggcgcccaccttgggtggggcgcgggacggctgcagctccagaaattggggttggggcgcccggcggggggccggc

SEQ ID NO: 56123 - DNA, 164 bp, Homo sapiens
  chr19:38715049-38715213
  hyper
atatcctgctctcgcgtgcacacaaccacatgcacacctggactcgcacacgcccacgcatggcagtttacacacacattcacgcggatactcacagcctcccacacactcctactcacacaccttcgcacggactcacacagccacacgcacacacactgcaa

SEQ ID NO: 56124 - DNA, 30 bp, Homo sapiens
  chr19:38720220-38720250
  hyper
cggtggccatggcccgctcggctgggccgc

SEQ ID NO: 56125 - DNA, 86 bp, Homo sapiens
  chr19:38720561-38720647
  hyper
tcctccctccctgggagtgctcggtctccaactcgggatctccaccctccaggcaccgcgggcgcggaagcaggtggtccctagct

SEQ ID NO: 56126 - DNA, 262 bp, Homo sapiens
  chr19:38746815-38747077
  hyper
cacttctccacgtccagccgccgctgcagctcccgccggtcatacttgacggtgacgcgcgcgtgccgcttctgcagccccccgggactgccccctggcccgcgggcccgcgatggagactgcagcttgctcagcacgcgcttgcccagccgctgagctgccatcgcgctgctggacccagcctggccccgcgctgtgcgccttcgcctcgcgccccgggtgcttcttacgggccagggcggggctagccgggggcgggggc

SEQ ID NO: 56127 - DNA, 143 bp, Homo sapiens
  chr19:38747106-38747249
  hyper
cggccgcctcaggcctcagtttccccgtctgcagtgcgagagtaggccgctgcgtcggcttgaggcacgcagtcgtgcgaagttgaggtatgggcggggacccagagtcccgggcgggtccctgcatcgggggctcccgggcc

SEQ ID NO: 56128 - DNA, 658 bp, Homo sapiens; identical to SEQ ID NO: 12330
  chr19:38754870-38755528
  hyper

SEQ ID NO: 56129 - DNA, 42 bp, Homo sapiens
  chr19:38806819-38806861
  hyper
atcccaggaggaggcggtgtctgccacgacagaaaatgagtg

SEQ ID NO: 56130 - DNA, 30 bp, Homo sapiens; identical to SEQ ID NO: 12331
  chr19:38810523-38810553
  hyper

SEQ ID NO: 56131 - DNA, 434 bp, Homo sapiens
  chr19:38852094-38852528
  hyper
tctcagggatcaagggagggacgtccgaggggatgtgtgcagaggcctctgggcagcaggggctgacgctgaggaggaagattcgggctggattcgatacgggaagtgggtggggtgggaaagaggcctgcggaagcttccagtgcgcggggtgccttagagccagcagcctttcccccttgccactgcccaggggctacttgatgctctccttcatcgacttctgccccttctcggtgatgcgcctgcggagcctgcccagtccgcagagatacacgcgccaggagcgctaccgggcgcggccgccgcgcgtcctggagcgctcgggcttccacaacgagaactcgctcgccatctaccagggcctggtctactacctgctgtggctgcactccgtgtacgacaaggtgggcgtccggcggcgggcgggcagg

SEQ ID NO: 56132 - DNA, 740 bp, Homo sapiens
  chr19:38852765-38853505
  hyper
taggaggtggtctggggatgccgcttgcctggaggctctcgccccgctgcccaatcccttcacggtgccgggcgatccctgcagccgtacgcggacccggtgcacgaccccacctggcgctggtgggcgaacaacaaacaagaccaggtaggcggagcggattgggagccgggaaaggggcggcgcccggacacccctcaccgtgccccacccccggcgctgactctgccccgcgcatccggtaccccaggattactacttcttcttggcgagcaattggcgaagcgcgggcggcgtgtccatagaaatggacagctacgaaaagatctacaacctcgagtccgcgtacgagctgccggagcgcattttcctggacaagggcactgagtacagcttcgccatcttcctgtcggcgcagggccactcgttccggacgcagtcagaactcggtctgcgcgggaccagagtggagcccgaagggcggggcgagggctaccagaatctgggagcctggggggcggggacaccatcggaggggcggggcctgtctgtgagggaggccttaaccccgtttactgcccggagcaggcaccgccttccagctgcatagccaggtggacgtgggcgtggtgctggccgaccccggctgcatcgaggcctcggtgaagcaggaggtcctgattaatcgcaactcggtgctattttcggtgaggccccccggggagttgggatcaagggag

SEQ ID NO: 56133 - DNA, 248 bp, Homo sapiens; identical to SEQ ID NO: 12333
  chr19:38877688-38877936
  hyper

SEQ ID NO: 56134 - DNA, 30 bp, Homo sapiens
  chr19:38878538-38878568
  hyper
cgagatgtaggccccgcccccggagctcga

SEQ ID NO: 56135 - DNA, 30 bp, Homo sapiens
  chr19:38878846-38878876
  hyper
agacccggcaacatcgcttctcaagaccct

SEQ ID NO: 56136 - DNA, 30 bp, Homo sapiens
  chr19:38879658-38879688
  hyper
cattcacaaaattccgtcctggaccctcac

SEQ ID NO: 56137 - DNA, 30 bp, Homo sapiens
  chr19:38893532-38893562
  hyper
gacagcggagatcccgaacgcactgcaatt

SEQ ID NO: 56138 - DNA, 31 bp, Homo sapiens
  chr19:38943562-38943593
  hyper
acttcgagcctccctccgaggacttgcagca

SEQ ID NO: 56139 - DNA, 617 bp, Homo sapiens; identical to SEQ ID NO: 12334
  chr19:38976231-38976848
  hyper

SEQ ID NO: 56140 - DNA, 30 bp, Homo sapiens; identical to SEQ ID NO: 12335
  chr19:39109669-39109699
  hyper

SEQ ID NO: 56141 - DNA, 508 bp, Homo sapiens
  chr19:39139397-39139905
  hyper
gaagtagaggggatacggagagtggggataatttggggagggatttctaaagaattgatgggaagctgaaaagctaaagcgttggagagaatgaggaagtgtagagggagaaggtgagatcggtgggagggagggtgagctggaatggtggataatgggagagaggttcgtttaggaaaatgaaagtctcattagaaagggaatgcgtaatggatagactgagaaaggaatttgaggagggggtgctggctcctggaggtgcagtcccgggactggagagcgtgtgtgtgtcgtgcaggcagaatgagtttggggaggaagcgttgagagtgtccaggaagaattgtgtcttttttggagagaccggaggtaggtgaagggatcctgaagcagagactgtgttcaggtggcactgtttttttggggggcggggggggcaacttggtagggccccacagcagtgaaaaggtgatcagaagtggagtgggatccccgagcgaggtgtcag

SEQ ID NO: 56142 - DNA, 64 bp, Homo sapiens; identical to SEQ ID NO: 12337
  chr19:39140556-39140620
  hyper

SEQ ID NO: 56143 - DNA, 30 bp, Homo sapiens; identical to SEQ ID NO: 12338
  chr19:39340232-39340262
  hyper

SEQ ID NO: 56144 - DNA, 31 bp, Homo sapiens
  chr19:39379455-39379486
  hyper
aggaggtcactgccaccgcactgcagacctg

SEQ ID NO: 56145 - DNA, 30 bp, Homo sapiens
  chr19:39466280-39466310
  hyper
ttctgggaggcagtcgaggggctccccgtg

SEQ ID NO: 56146 - DNA, 30 bp, Homo sapiens
  chr19:39521916-39521946
  hyper
ccagccgtccccaccgtgttgcaccatcca

SEQ ID NO: 56147 - DNA, 643 bp, Homo sapiens
  chr19:39574161-39574804
  hyper
tctttttgtggcagccgctcctcacgttcaaacagattgcaaaggtttacaggggagaaccctaacttgttccctagacgtcagtttctggagttcctgcattaatacgattaaaaagaacagctgattcttatccagcccttactctgggccgggccctgttatcggcatgaaatttcatgcagcaactcgtttactcctcacaacagcccacggggtatatacgagcatcacctcctttttacaggtgaaaaaacccaaggtccagcgaggttgaataactcacctaggtcgcacagctcagaaagcccactgcaattccgggattctggttttgttttgaggttgccccgggcttctgaggaggggtcagtgggctcagcatggaaaggaaggaagccggaaggctggaggaagatgcagcgaggctggaaaggttggggatcccccggtcctgcacacctgggtacctggggatcgggcagggccaggataggggccggtgtccgtgccctggggctccccagctgatgagtgggcgcctgagggacgagcgcagggttacctgcctgggctctcacctggtggccggctcagaggtggcgcgccggagacgtatcataaccttcctgggtcccccttc

SEQ ID NO: 56148 - DNA, 165 bp, Homo sapiens
  chr19:39574877-39575042
  hyper
cggggccctggctgtctagggaggctgtcaccccgaggcgaccggctcttccggggctgggacggctgtaggcggcaagaggcctcggcacccgcgaactcataaataccggggcggcgctggtggcgggagaggcgcgtgcgggcagccggcgcccccgagggt

SEQ ID NO: 56149 - DNA, 100 bp, Homo sapiens
  chr19:39687546-39687646
  hyper
ccagggtgccctgccccttcccgctcccagttaaccccagccctgtgaaaccgggacagtcgcgcagcctcgagggatggaggaggtgcgtgagggacac

SEQ ID NO: 56150 - DNA, 267 bp, Homo sapiens
  chr19:39687755-39688022
  hyper
cgtcgctgccatcgcccgcagccccggaggcccccgagctccccgagccggcgcagccgtccgaggctcacgcccggcagctgctgctggaggagtgggggccgctgagcgggggcctggagctgccccagcgcctcacctggaagctgctcctgttgcggcggccgctctaccgcaacctgctgcgctcgcccaaccccgaaggtgcgcaagggcccagagcagccaggaggcaccaccctgaccgtctgtctcttcctctttccc

SEQ ID NO: 56151 - DNA, 427 bp, Homo sapiens
  chr19:39754805-39755232
  hyper
ccaggggacagtggccggcagcacctgctgcagcacgaggcacagagggtgcactgcagggagaagtgagggcagaggccaaggcgaggagggggccggctcccgctctctctccctctgtgtgtgctgcgcctcccctgtgagcctaacccaaggcaggggactggacgcgtgggaccctctctttggcctccctgacgtccctcaggagcagagatgcgaccgagtgtgtgggccgcggtggccgcgggactgtgggtcgtgtgcacggtgggcgcggcgatccgccagcgctgcctgctctcgcactaccgctcgctggagccccggacgctggcggcggtcaaggcgctgaggaaccgctaagtgagtgaccgcccagcccttgcgccccccggtacactggccccgccgggttcccacacac

SEQ ID NO: 56152 - DNA, 133 bp, Homo sapiens; identical to SEQ ID NO: 12342
  chr19:39755264-39755397
  hyper

SEQ ID NO: 56153 - DNA, 12 bp, Homo sapiens
  chr19:39755652-39755664
  hyper
aggagggatcct

SEQ ID NO: 56154 - DNA, 118 bp, Homo sapiens
  chr19:39818897-39819015
  hyper
ttcctctaggtcagcccgccccctgctggcccaagcctcgtactgcaggaaccgtcggctagagcccagaagaggcagaaactgagtccaaactgaggatctccgagtttttgcattt

SEQ ID NO: 56155 - DNA, 30 bp, Homo sapiens; identical to SEQ ID NO: 12344
  chr19:39881515-39881545
  hyper

SEQ ID NO: 56156 - DNA, 30 bp, Homo sapiens
  chr19:39881950-39881980
  hyper
aattgcctagggggcgggactaactagcaa

SEQ ID NO: 56157 - DNA, 30 bp, Homo sapiens; identical to SEQ ID NO: 12345
  chr19:39882179-39882209
  hyper

SEQ ID NO: 56158 - DNA, 30 bp, Homo sapiens; identical to SEQ ID NO: 12346
  chr19:39898000-39898030
  hyper

SEQ ID NO: 56159 - DNA, 108 bp, Homo sapiens
  chr19:39902954-39903062
  hyper
tcaccggagggccccgccttgtgttatatatgcaaattaaacattttgcattgaccaataggagacagtgcattgccagttccggattctcacgcctcgcggcccttg

SEQ ID NO: 56160 - DNA, 13 bp, Homo sapiens
  chr19:39936017-39936030
  hyper
agtttcagcctgg

SEQ ID NO: 56161 - DNA, 30 bp, Homo sapiens
  chr19:39971801-39971831
  hyper
ccacctcccacccacgtgggtgccggagga

SEQ ID NO: 56162 - DNA, 520 bp, Homo sapiens
  chr19:39988485-39989005
  hyper
ctaaagggtttctgaagggcccgggatgtccccccccccagttcttctggggtgggggagcgggtccctgtatgtgaagacggaatttcctgcccatttgctcctcacaccttccggaggccaaacgggcagcccagctgcggcccgaagggggaggggctcggccgcccggcagatggcggcatttacatacagctgggagccccctcttgaggccgagctcctcgccctggcgtctggtgcgtccgcgatgcggggtttgggagggtggctttgtcttgcggagggggaacacacacacgcctgcacacaggggtccacaaagagccctggatcttcatcgtatccacacacagctacacccgtggatctcccaaacccagtctcattcacacaaaccagcgcacacaggggtctacaaagaactccggatcttcatcgtattcacacgcggctgcatccgtggacctctcaaacccagtctcattcacacacaggcgccctcagccattcaccacct

SEQ ID NO: 56163 - DNA, 659 bp, Homo sapiens
  chr19:39989527-39990186
  hyper
gctgcctgaaggggcggggccattctctcagatataaggcttggaagccagcagctgcgactcccgagacccccccaccagaaggccatggtctccccacggatgtccgggctcctctcccagactgtgatcctagcgctcattttcctcccccaggtcagagccaggtgggaggtggcgtggaaagggatgaatgcggaggggaggggtgagtgcgacctgaaggtcctggggaaggagcgtggggcggacgggaagcctgggtcctcccggccgcctcaccctgcgcccgtctccgtcccagacacggcccgctggcgtcttcgagctgcagatccactctttcgggccgggtccaggccctggggccccgcggtccccctgcagcgcccggctcccctgccgcctcttcttcagagtctgcctgaagcctgggctctcagaggaggccgccgagtccccgtgcgccctgggcgcggcgctgagtgcgcgcggaccggtctacaccgagcagcccggagcgcccgcgcctgatctcccactgcccgacggcctcttgcaggtgcccttccgggacgcctggcctgtaagtgctgcccccgggggactcccggtgctggaggcctaaccctgccagcgaaacctccacctcctctccc

SEQ ID NO: 56164 - DNA, 185 bp, Homo sapiens; identical to SEQ ID NO: 12349
  chr19:39993471-39993656
  hyper

SEQ ID NO: 56165 - DNA, 35 bp, Homo sapiens; identical to SEQ ID NO: 12350
  chr19:39993711-39993746
  hyper

SEQ ID NO: 56166 - DNA, 109 bp, Homo sapiens
  chr19:39997623-39997732
  hyper
ggcaggtgggtccccggctcccggactgcgccctctgatgctcccttccccacaggcggactctgcctggacctgggccacgccctgcgctgccgctgccgcgccggct

SEQ ID NO: 56167 - DNA, 410 bp, Homo sapiens
  chr19:39997748-39998158
  hyper
cgagcacgacctggacgactgcgcgggccgcgcctgcgctaacggcggcacgtgtgtggagggcggcggcgcgcaccgctgctcctgcgcgctgggcttcggcggccgcgactgccgcgagcgcgcggacccgtgcgccgcgcgcccctgtgctcacggcggccgctgctacgcccacttctccggcctcgtctgcgcttgcgctcccggctacatgggagcgcggtgtgagttcccagtgcaccccgacggcgcaagcgccttgcccgcggccccgccgggcctcaggcccggggaccctcagcgctaccttttgcctccggctctgggactgctcgtggccgcgggcgtggccggcgctgcgctcttgctggtccacgtgcgccgccgtggccactcccaggatgctg

SEQ ID NO: 56168 - DNA, 261 bp, Homo sapiens
  chr19:40006186-40006447
  hyper
cggctcggaccctgactcctccagtccgggtcccagccccagccccagcccagctcctggcagggattcgggccgcgctccccgtcttggactcctacctggccccggccctacctttggatccgcccccggaacctgctccggagctgcctttgttgcccgaggaggaccctgagccggcgccgagcctgaagctcatcccgtcggtctccagcgaggccgggcccgccccggggccccttcccacgcgcaccccgctgg

SEQ ID NO: 56169 - DNA, 142 bp, Homo sapiens
  chr19:40006498-40006640
  hyper
cggccatcgggctggcggatccccccattcccagtcctgtcccctcgcccatcctggggaccatcccgtcggccatctccttacagaattgtacggaaaccttcccctcctccagcgagaacttcgcgctggacaagagggt

SEQ ID NO: 56170 - DNA, 40 bp, Homo sapiens; identical to SEQ ID NO: 12352
  chr19:40022936-40022976
  hyper

SEQ ID NO: 56171 - DNA, 754 bp, Homo sapiens
  chr19:40324313-40325067
  hyper
ggcaacaactgtaccattggtcgctggtgccaagagctcagccaatcacagcctagggcagctgttgctaggcgacgaagaagcggcccgcggagctgagcccaaacaaagggcgggagtggggcccggctaccccctcccagcctccctcctgcaactgcttcctcgggcttggccggttccaggaattcaactatgaatagccaggcagggcccgcacctgcctgccacccccctcctctcctcccttggcctcgtgctaagtctcacggcgacgggagcagggcggatcccgtcctgcccacctccctgcgaccgcttgccgccccacccgtccccgcgccgttacctgaaggagcgggcaaggggactcaaactgctcggggagcccgagctcagacctgcccactggctgagggtatccggcggacgcggcaagccagggccccgattacccagtaatgcaaccagcaaaatggcgaccacaacaaaccggcccccccacgccctggactccgcccccatccctccctctccgctcccctcacgtgacccacactgacactccgcctgcgcgagatggccgcttacctgcacgcatgcgcagcgagctaccaatcccacccaagaaccgaaatccaggctgccgctgcgcaaaggcagctagaaacggagcatgcgctctgtgaccgagtgagaatttacccaaccccgcaaaattgaccaagggtgcgtgctccctgtgtcagcaggt

SEQ ID NO: 56172 - DNA, 30 bp, Homo sapiens
  chr19:40424134-40424164
  hyper
tgtcatggcagacagcgaaggggccatcga

SEQ ID NO: 56173 - DNA, 30 bp, Homo sapiens
  chr19:40503343-40503373
  hyper
ctctaccctcctcacggcctcggtgtttgc

SEQ ID NO: 56174 - DNA, 1031 bp, Homo sapiens; identical to SEQ ID NO: 12354
  chr19:40561465-40562496
  hyper

SEQ ID NO: 56175 - DNA, 31 bp, Homo sapiens; identical to SEQ ID NO: 12355
  chr19:40727912-40727943
  hyper

SEQ ID NO: 56176 - DNA, 30 bp, Homo sapiens
  chr19:40732098-40732128
  hyper
cccagcggtagaaacggcgctgtgtgaaaa

SEQ ID NO: 56177 - DNA, 400 bp, Homo sapiens
  chr19:40791316-40791716
  hyper
ataccgccctctcgcgccacaaacaggaagtgacgtacaaagagccagagacgaactctgagagagcgagagcgcaagagcagggcagagaaggaggcgggctcacagcagggcgcctgcgcacattagacaactttgggcctgtgtgggttagagatgggcctcgctaggccgtggggcggaaaggcgagatggggctacgcaggcgcactaggactccgacgtctgctttccctagggcctagccgtagtgattatttcccggcagcccctagtccgtatttacatacgctttgatcttgttttactcagttctgggttctgacgctcttaaaggaccccggagcgggagttagttaggaggggtttccttttcagtgtgctcgtcatggttgagctc

SEQ ID NO: 56178 - DNA, 320 bp, Homo sapiens
  chr19:40854359-40854679
  hyper
gactcgtccgcggccgctctaccccaacaggccgccaccagcgagagtgcggccataaccatcacgtgaccgcccaccgacaccagcgagagtgcagtcgtaaccgtcacgtgaccgcccaccgtcggcccggcgctcccctccgcccgaagctagcaagcggcgcggccaatgagaaaggcgcatgcctggcccccgccggcctgcagtctagccgtagtgcgcctgcgcgcggctaggaggggccgtcaggcggggatacagcctggaaggtgcgtgtggggctgggtctcggagtgggagacgtggagtgcaggtac

SEQ ID NO: 56179 - DNA, 30 bp, Homo sapiens
  chr19:40927348-40927378
  hyper
aggtggccccagctcgtccgggtctgggtt

SEQ ID NO: 56180 - DNA, 187 bp, Homo sapiens
  chr19:40932004-40932191
  hyper
gagcttgtagggggcggattctgaaggaggggcttcagggcgcatgcccgggcagctgcgcgagtgaggggtggaaagaggtggctttttactccggggaacggtggcgagtgggggcttttgcctctcaaaatacgagcccctcacaactacccatgcacctgccaaacccggcaattaagcttct

SEQ ID NO: 56181 - DNA, 44 bp, Homo sapiens; identical to SEQ ID NO: 12359
  chr19:40939938-40939982
  hyper

SEQ ID NO: 56182 - DNA, 440 bp, Homo sapiens
  chr19:40948766-40949206
  hyper
ctcgatcaagagttaattgccagttattcgctcaacagatttactgagtgcctactatattcgaaatctcctggagccctgttggggaacctatgttgagattcttcttcaacagtcgggatatttctatgtcctcttccttaaccgactgggagcgctcccaagagtaggaaaggggcctgtctcattccctctgcccacgctttcagattcccccaaagcgcgccccataggaaaacttgctagaactcagctcagaccaagccccgccccctcggaggtcccactcaatcagaccgcgacactgtaaggccccgcccccccatgggtccttacagagcatccaggaacgccccaatttggcccaggggcttctgggaaacgggggccaacagccgccaggtacacgaattgacgtcgagcacgcactacaatcccca

SEQ ID NO: 56183 - DNA, 30 bp, Homo sapiens
  chr19:40950479-40950509
  hyper
tcagctacagtcctcgctccaagatcgtca

SEQ ID NO: 56184 - DNA, 30 bp, Homo sapiens; identical to SEQ ID NO: 12361
  chr19:40971189-40971219
  hyper

SEQ ID NO: 56185 - DNA, 122 bp, Homo sapiens
  chr19:40971817-40971939
  hyper
ccgccctctctgcgcgccacttagactggaaggcggggccacagaaggccacgcctccacatagcaacaaatagagtggacggagccgagataacttgtcactcagcgccctgcctccgcgc

SEQ ID NO: 56186 - DNA, 558 bp, Homo sapiens; identical to SEQ ID NO: 12362
  chr19:41018504-41019062
  hyper

SEQ ID NO: 56187 - DNA, 26 bp, Homo sapiens
  chr19:41019075-41019101
  hyper
cgcctggcagccgccggtgacttcgg

SEQ ID NO: 56188 - DNA, 629 bp, Homo sapiens; identical to SEQ ID NO: 12363
  chr19:41025293-41025922
  hyper

SEQ ID NO: 56189 - DNA, 387 bp, Homo sapiens; identical to SEQ ID NO: 12364
  chr19:41055083-41055470
  hyper

SEQ ID NO: 56190 - DNA, 445 bp, Homo sapiens; identical to SEQ ID NO: 12365
  chr19:41059939-41060384
  hyper

SEQ ID NO: 56191 - DNA, 269 bp, Homo sapiens
  chr19:41073588-41073857
  hyper
acagagcaagcagccgcctaccccactgctggggcgcaagttctttggggaccccacggaactggcggccaaggcggcgcccctgctgcggccagggggctatgaaaggggcttggagcccctggcccgccgagcctcggacacgctctcggccgaggtgcggactcgggtggggtatgtgcgccaggagctcaagcccgagcgcctccagccgcgcattgaccggctgccggagatcccggggagggtggagcccgcggccctgccgg

SEQ ID NO: 56192 - DNA, 31 bp, Homo sapiens; identical to SEQ ID NO: 12366
  chr19:41074216-41074247
  hyper

SEQ ID NO: 56193 - DNA, 105 bp, Homo sapiens
  chr19:41082276-41082381
  hyper
ccgcctggagaagccgctggggcccgggggtgtggggcggtgtggcgggcgcacactgtatgtacctataataaaccctttggctttgacggtctatggtccttt

SEQ ID NO: 56194 - DNA, 30 bp, Homo sapiens
  chr19:41082734-41082764
  hyper
gcagcctatggaggcggggtccgggtgcac

SEQ ID NO: 56195 - DNA, 31 bp, Homo sapiens
  chr19:41103204-41103235
  hyper
cagccgccacctccgccgccagccccagccc

SEQ ID NO: 56196 - DNA, 98 bp, Homo sapiens
  chr19:41105081-41105179
  hyper
cttccactccactatttatagcgttgctgtttgtcgctgctgcccgggccagacgtctaggaggagccgctgcatccgaggtgggttctggaagatgg

SEQ ID NO: 56197 - DNA, 78 bp, Homo sapiens
  chr19:41105405-41105483
  hyper
cagtcccagccccagcgtgaggaagagacaggtgtccctcaactggcagccactgacgtgagtgggcagtccctcccc

SEQ ID NO: 56198 - DNA, 60 bp, Homo sapiens
  chr19:41105941-41106001
  hyper
tgacagcagcttttccgtcctctcccacccaggctccaggaggccagagctctactgaag

SEQ ID NO: 56199 - DNA, 176 bp, Homo sapiens; identical to SEQ ID NO: 12369
  chr19:41106351-41106527
  hyper

SEQ ID NO: 56200 - DNA, 699 bp, Homo sapiens
  chr19:41111116-41111815
  hyper
cgcgacgacgagcacggtgaggaaagggtggccagagtcccctccgacccctgtcaagcatttcactttgcccctgaccctcatatttcccgccttcccgagcacctttgcccagctcgccctccccgccttgtctagccccaccccgtaagaacccgtgtagacatccgtttgcccggccgtgcctcccctaggcgtggcatctatggtgagcgtccacgtggagcacccgcaggaggcgtcggtggtggtgcaccaggtggagcgtgtgtctggcccttgggaggaggcggacgctgaggcggtggcgcgggcggaagcggcggcgcgggcggaggcggcagcgccctacacggtgttggcacagagcgcgccgcgggaggacggctactcagatgcctcgggcttcggttactgctttcgggagctgcgcggaggcgaagtgagaggaggcccgtggggaggggcccggagcttgcctccgcgcgggggcgcgctcacccaacacttccccgcagtgcgcgtccccgctgcccgggctccggacgcaggaggtctgctgccgaggggccggcttggcctggggcgttcacgactgtcagctgtgctccgagcgcctgggtaagccccaggacgtccccgaagtgctcggagctggggagtggtgacaacctcaccgttcctcctactctgccctag

SEQ ID NO: 56201 - DNA, 379 bp, Homo sapiens
  chr19:41115508-41115887
  hyper
ctacacctgcgcttgcgactctggcttccggctcagcccccagggcacccgatgcattggtgagcaagacggagggcgcggaaggaggcggggcggggggctttgcctggtcaccttgtcaccagccccctccgtgtcctcagatgtggacgaatgtcgccgcgtgcccccgccctgtgctcccgggcgctgcgagaactcaccaggcagcttccgctgcgtgtgcggcccgggcttccgagccggcccacgggctgcggaatgcctgggtgagaaatttgccccacccggctccaggcccaccccagggtctcgctcctgctctcactccagagcctctccagccctcccacgcttcccctctcgggtcccgccccag

SEQ ID NO: 56202 - DNA, 30 bp, Homo sapiens
  chr19:41116096-41116126
  hyper
actgtcctgcaactgcggcaaccaatctcc

SEQ ID NO: 56203 - DNA, 14 bp, Homo sapiens
  chr19:41116402-41116416
  hyper
tgccccagtcccag

SEQ ID NO: 56204 - DNA, 172 bp, Homo sapiens
  chr19:41119104-41119276
  hyper
gagcagcatagggacccgccagagagtctgggagtagggcctgggttccagggcaaagccggctggaaaggtggaggcgggaccaaggcgctgtgggaggagcttagaaacctggcattggtgggggcggggttactgcgatgtgggcggagcttgtctgggaggccgggtc

SEQ ID NO: 56205 - DNA, 38 bp, Homo sapiens
  chr19:41119370-41119408
  hyper
cggctcctttgcctgtacttgtgcccctggctaccgac

SEQ ID NO: 56206 - DNA, 21 bp, Homo sapiens
  chr19:41119669-41119690
  hyper
ggggggcggtgtttgcaggga

SEQ ID NO: 56207 - DNA, 31 bp, Homo sapiens
  chr19:41120295-41120326
  hyper
gctgtgtccgggactgcgatcctgggtacca

SEQ ID NO: 56208 - DNA, 390 bp, Homo sapiens
  chr19:41190145-41190535
  hyper
tgtatttctagtagagccggggtttcaccgtgatagccaggactgccggcctcacgctttttaacaccaacttcaaacgacttgggctggtgtcccagccaggccgcgcacccgcacagcacagcacagcggcccccgtccccctcgccccgccgcaccctgccgcgcccactcaccctgaccgggaagctgcacgtgcccttccgcaccgcgtcctcgtctgcctgccactggtgcgggcgcgacgcctcgggcacgtaggctggcttcctccgccgcaggctctgccgtaacttgttcatggtgcccgccccgtctggtgacacaggacagtgatgtgggtcaagggtgggggtcagaaggtatggagctcaacggggagggaccagt

SEQ ID NO: 56209 - DNA, 30 bp, Homo sapiens; identical to SEQ ID NO: 12375
  chr19:41222269-41222299
  hyper

SEQ ID NO: 56210 - DNA, 107 bp, Homo sapiens; identical to SEQ ID NO: 12376
  chr19:41223421-41223528
  hyper

SEQ ID NO: 56211 - DNA, 30 bp, Homo sapiens; identical to SEQ ID NO: 12377
  chr19:41256380-41256410
  hyper

SEQ ID NO: 56212 - DNA, 30 bp, Homo sapiens
  chr19:41304118-41304148
  hyper
cccttgtgctcacgcgaaccgccctacgcc

SEQ ID NO: 56213 - DNA, 3 bp, Homo sapiens
  chr19:41596078-41596081
  hyper
cga

SEQ ID NO: 56214 - DNA, 30 bp, Homo sapiens; identical to SEQ ID NO: 12379
  chr19:41641727-41641757
  hyper

SEQ ID NO: 56215 - DNA, 498 bp, Homo sapiens
  chr19:41698799-41699297
  hyper
tggcgcggggtcaccgccagatgcggggtgtggcaacctccaggcggccaaagtctctgacttccaggttcttctgtttgcttactccctatccgggggcccaaggcgctgtctccgccgcccaagccccgcgtaaacctgggtgacctcggagacatccgttggagcatgagttcccgacatcaggcggcggcggtggtccgggagaaacccggcggcggggagataagcctgcccaggaggcagggggctgggctagctgccccgccccgcgcctgacttcgttggggagggagacgcccggctcccgcccctaactagcccagccgcgcggagcgcctgggagaggagaaggagccgacctgccgagatggaggcgaccggcacctgggcgctgctgctggcgctggcgctgctcctgctgctgacgctggcgctgtccgggaccagggcccgaggccacctgccccccgggcccacgccgctaccactgctggg

SEQ ID NO: 56216 - DNA, 451 bp, Homo sapiens
  chr19:41732032-41732483
  hyper
tcccggctctggctccgcgcccccgaagccggccggaagcgctggggtggggaggtgcccccggtgactcacgcgggggcaggaatgctgcggtcggaacgggacccggctccagaacccacctccagccccagggcttctccggccggcggcgccagctcccgcgcgctgaccctggcggggccccacgtgccaggtggctggacccgacccaggctccccgcccccactcgggccgcccgcccgggactgtactgtttctcctccgggcggcgcgggggctgcgggcgcggggccttcagggcgcggaggctgcgggagcgggcacctgaccttgtctgggaacggccacctaggaagccgcgactgaggagctcccctaccctcccctttccggcctctgcagactttgcaccattccactccctccgctgacggagaaaaggaaact

SEQ ID NO: 56217 - DNA, 30 bp, Homo sapiens
  chr19:41768441-41768471
  hyper
acgtgggcgaggggcggggtgtctggactg

SEQ ID NO: 56218 - DNA, 30 bp, Homo sapiens
  chr19:41770620-41770650
  hyper
gctggaggggaccgcgcagccaccgccgcc

SEQ ID NO: 56219 - DNA, 30 bp, Homo sapiens
  chr19:41815854-41815884
  hyper
acggctccaggctccgggggaaagtccttt

SEQ ID NO: 56220 - DNA, 327 bp, Homo sapiens
  chr19:41831044-41831371
  hyper
cccctcccagttctcccggggtcggggtaggtggaaaggctgagtcagggagggcgggccccgctgggagacaacccctaggtgggcatccggcccccacccccgtgtctcctgtccgtcctggccctggcctggctcgctggcctggccgccaccccgccccccacgtctgacacctccatgcgtcctgccaaagcaagctgcctccctgcactcttccccctccagctccagtcactctgtccctctgtcccccgtcccttctccctgcttctgtgcgtttctttccagccctctgccttcctccctcaccgccactgctctgtc

SEQ ID NO: 56221 - DNA, 51 bp, Homo sapiens; identical to SEQ ID NO: 12384
  chr19:41832011-41832062
  hyper

SEQ ID NO: 56222 - DNA, 30 bp, Homo sapiens
  chr19:41857235-41857265
  hyper
ggctctgaaccacgcgggacgcctgggtcc

SEQ ID NO: 56223 - DNA, 30 bp, Homo sapiens
  chr19:41857539-41857569
  hyper
ccccttggtggaagcgcaggctcctccccc

SEQ ID NO: 56224 - DNA, 30 bp, Homo sapiens
  chr19:41858801-41858831
  hyper
ggatggcctcgatgcgcttccgcttcacca

SEQ ID NO: 56225 - DNA, 31 bp, Homo sapiens; identical to SEQ ID NO: 12385
  chr19:41859851-41859882
  hyper

SEQ ID NO: 56226 - DNA, 30 bp, Homo sapiens
  chr19:41860280-41860310
  hyper
caacaggacacctgaaggatggaagggtca

SEQ ID NO: 56227 - DNA, 125 bp, Homo sapiens; identical to SEQ ID NO: 12386
  chr19:41870307-41870432
  hyper

SEQ ID NO: 56228 - DNA, 34 bp, Homo sapiens
  chr19:41882552-41882586
  hyper
gggatccctcgccggacgccgcggagggacagag

SEQ ID NO: 56229 - DNA, 178 bp, Homo sapiens
  chr19:41945497-41945675
  hyper
tgattggttagtcgcgtcgctcttcggcagccactccctcatccccattggatactctcagccaagtccctgcctcctctcgctcgctaaagcgtctcctccgcctgcgaccctcacagatccttcctggcccccactagccacaggtttgcactcccagtacggggcttgccaggct

SEQ ID NO: 56230 - DNA, 471 bp, Homo sapiens; identical to SEQ ID NO: 12387
  chr19:42028282-42028753
  hyper

SEQ ID NO: 56231 - DNA, 30 bp, Homo sapiens
  chr19:42257264-42257294
  hyper
gaaagctcgctgcgccgccagggggcgcca

SEQ ID NO: 56232 - DNA, 182 bp, Homo sapiens; identical to SEQ ID NO: 12388
  chr19:42297159-42297341
  hyper

SEQ ID NO: 56233 - DNA, 30 bp, Homo sapiens
  chr19:42363944-42363974
  hyper
gttccgccgtggggcgccagctgtggccca

SEQ ID NO: 56234 - DNA, 30 bp, Homo sapiens
  chr19:42364646-42364676
  hyper
cgatccagagaggccgtgggcgtcggtgag

SEQ ID NO: 56235 - DNA, 188 bp, Homo sapiens; identical to SEQ ID NO: 12389
  chr19:42444455-42444643
  hyper

SEQ ID NO: 56236 - DNA, 30 bp, Homo sapiens
  chr19:42463595-42463625
  hyper
agttgtagtcctgacggtgactaagaggat

SEQ ID NO: 56237 - DNA, 35 bp, Homo sapiens; identical to SEQ ID NO: 12390
  chr19:42498241-42498276
  hyper

SEQ ID NO: 56238 - DNA, 31 bp, Homo sapiens; identical to SEQ ID NO: 12391
  chr19:42498570-42498601
  hyper

SEQ ID NO: 56239 - DNA, 31 bp, Homo sapiens; identical to SEQ ID NO: 12392
  chr19:42501310-42501341
  hyper

SEQ ID NO: 56240 - DNA, 30 bp, Homo sapiens
  chr19:42580135-42580165
  hyper
aaggattggttgggcgctgcggggaatctc

SEQ ID NO: 56241 - DNA, 456 bp, Homo sapiens
  chr19:42636376-42636832
  hyper
gggttagcggggacccggcatgggagagagggagttgctagagtacagaggagaaggacaatggagacagctgaggaggaggggcaggcagggcccgcagagcaaacctaaatgtgctgcctgtcctctgagcagtggcacaggcaccagcccccttacctggagcccccatgctggagtgaaccatgctgcccgccccgccagggctgggggaacaactgtgtcatctccccaccctctctgggggccgagccctccctgccggaagtcactcagggaggaaaccacagggccggtccgcccccttcagaagggaaaataccctggcccacagacccgccccggcagcccggcccaccccaaatcatgtgtgtgtgctggggggtgggggctagtggggcagaggataagcaggctggaagagccgactcctacggctgcgatccaagaggtgcc

SEQ ID NO: 56242 - DNA, 30 bp, Homo sapiens; identical to SEQ ID NO: 12394
  chr19:42637615-42637645
  hyper

SEQ ID NO: 56243 - DNA, 416 bp, Homo sapiens; identical to SEQ ID NO: 12395
  chr19:42680241-42680657
  hyper

SEQ ID NO: 56244 - DNA, 30 bp, Homo sapiens
  chr19:42721461-42721491
  hyper
gcccaaacaagcctcggggcccaccccggg

SEQ ID NO: 56245 - DNA, 30 bp, Homo sapiens; identical to SEQ ID NO: 12396
  chr19:42754953-42754983
  hyper

SEQ ID NO: 56246 - DNA, 30 bp, Homo sapiens
  chr19:42757831-42757861
  hyper
gcccctcctcggtccgggtcccaatcccct

SEQ ID NO: 56247 - DNA, 30 bp, Homo sapiens
  chr19:42759020-42759050
  hyper
aactggggatcactcgggctcccccggacc

SEQ ID NO: 56248 - DNA, 114 bp, Homo sapiens
  chr19:42774788-42774902
  hyper
tgcggggggctagccgactcagccaccctgccagagccagcccagccagggcggggatgcatgcaggcaagaagaggggggctgggcttgcgggtatcacgctgggtgctgtgg

SEQ ID NO: 56249 - DNA, 30 bp, Homo sapiens
  chr19:42806828-42806858
  hyper
gtcacggggaggggcgaactacctgaagag

SEQ ID NO: 56250 - DNA, 598 bp, Homo sapiens
  chr19:42901073-42901671
  hyper
ggcgggtccgacacgcgaggcgcttctttggagtctggcggcgaaagctatccatgacgtcagtcactatcttccagccaatggacactcggccttctacctccctgggccactcaggaccctttgcctggtaggcggggcccacagcccaactcgggcagcgataggctttcggagacgccagtctctgccaggcccagtcagtcggccaatagacccggaacctgagggatcggaatcctggtccactccgcagaggcccgagcgggctcgcgagggaacgggttctccgagtctggccgggtaagccctttccagcacgcctagtattaggattctgcacatagctcgggtggaaaaccgtgaggcttagtgaggcttgaggcggaggggggaggagctcagtcccggcgaacccatcttgctttcttggagaaactgagaccgggatactggatctgttattcatccatccgttcctcccaccctaagcctgattctcgtctgctcctgccttcctgttccttcatccgttctgcccttcctgccctcaattctctcactcacggattccctcgtctagccactcactcacaca

SEQ ID NO: 56251 - DNA, 30 bp, Homo sapiens
  chr19:42905726-42905756
  hyper
ccctgcggcggtcgccgcagcagcagcagc

SEQ ID NO: 56252 - DNA, 208 bp, Homo sapiens
  chr19:42906127-42906335
  hyper
gcaggtcctccaccacgcgcagcgtcaccggctggcccaggttgcgcagtcgccgcgcgagcatgaccgagtcgtccagcatggggtccagcgcgcacgcctacgggacagcggggagggacgtggagagagggtgggggacagacagaccggggtcgggtagagcgaggaggggtttgatgaacaaagggagcgggaaatacggata

SEQ ID NO: 56253 - DNA, 525 bp, Homo sapiens
  chr19:42927409-42927934
  hyper
ccttctcacaatggatcatcccgttgtccccgcaagcggcaatgggccagtccgcggacccccccaactccctgtggcagtgggccagtccacgctgtccccactgccccgtaggatgtacgaggttccttccgggctgctgccggtctccgcgcgctcacctttggccttgtcttttcgccaccgccggcgaccgtggctccttgagccctctttggcattcttcgaggccggggccatagcggcctcggcgggctccgttcccccggccaactccatcaattccccgcggtcctcccgcgggggccaattccagccgcgaggccctgcccggagggccaatcctcgctacacactactgtcgggcccccctattacccaatcccgagcttgctcttctctgggtccagctccctaaccaattctggtctccctccgctgccgtgctccgcccccaaccgccagaatttaagatctggctccgccccctaccgcgcattaaagggctcgcggccaacaaaaagg

SEQ ID NO: 56254 - DNA, 30 bp, Homo sapiens; identical to SEQ ID NO: 12399
  chr19:43032572-43032602
  hyper

SEQ ID NO: 56255 - DNA, 31 bp, Homo sapiens
  chr19:43866888-43866919
  hyper
gggtgctccagccaaacgtatttgggcatca

SEQ ID NO: 56256 - DNA, 442 bp, Homo sapiens
  chr19:43967733-43968175
  hyper
gcccggcccccacggacctgccgggtcgagcgcccgcgaggtgaggttgagcttggcgttgcagcgatcctgagcgcattgctgcagctggatgaacgccagaagcccgtgaagatccaggccgcggtcattcttgccggggagtcccgaaccgcaaccccgcactgccagcgagaattgtccgtggactagggagagggacaagggcgggattagctgtgggcgtggtctcagatggggcgtggcccagagttgggtagggtctgggaggggcggggcctcaaataggccaacaccacaggaccgacaggcaggaattggcggatggacgcccccaaagagccgctcagagcggaaagaacgaccgaagcagggaggagcggggtcacggaacgggggcggaacctcaaagagctgagtcggaggagacagcctggttgac

SEQ ID NO: 56257 - DNA, 30 bp, Homo sapiens
  chr19:43968480-43968510
  hyper
ctccaccgcccccacggcctcggtgcagac

SEQ ID NO: 56258 - DNA, 97 bp, Homo sapiens
  chr19:44008461-44008558
  hyper
gctccaaggcgacacgccaccggagacgggaccggaatttgagtccgggtcgtagcacgccccctactgacctcttcgaccccgcctcccctccctc

SEQ ID NO: 56259 - DNA, 194 bp, Homo sapiens; identical to SEQ ID NO: 12401
  chr19:44029817-44030011
  hyper

SEQ ID NO: 56260 - DNA, 122 bp, Homo sapiens
  chr19:44031482-44031604
  hyper
gactggggcgagggcgagaccgaggaaagccagagtgcaatgcctggacgctttgagacccagaaaaaacagagaacagggagacactcaaagtgcgagggacagacgctcagagacacaca

SEQ ID NO: 56261 - DNA, 399 bp, Homo sapiens
  chr19:44099000-44099399
  hyper
ggcgctctagctcctcgcagccgtcgctgctgccgcagttcgccggtagcacaaacagatccgcagctcctaaccccgcgctgttcagcagagctgctgtctgatcacgggcctgggcggcagtctgtgaatccccaggacggaggttccgcacagccagtagcggggtccctcgggccagggcggccagcgctgcctctcccagggctggagccaacggttccccgttcccctcgggtccgggcagcaccagtaccagcacgttggcttccgccgcccagggccccggcgctgcgggtgggcagctcagctcgcccagaaaaaggcctgggcccgcagctcttaggctgggaaccccggagtccggccgtccctcgggggcctcgagcgtctccacat

SEQ ID NO: 56262 - DNA, 223 bp, Homo sapiens
  chr19:44100423-44100646
  hyper
tcaacgcgcctgcgcgccacgagagcctacccacgcatgcgcaaaaggcttagctagctaagccgcgggaggctgaacgtcatcaaacgcgccatagggcagagaaggacccctcccgttattttgaggaccgggctggtgcgactatactactgccggatggcaaatccgggatctcggctccgagaggctcatctggcaaaagggcgcggaaaccacgggg

SEQ ID NO: 56263 - DNA, 30 bp, Homo sapiens
  chr19:44124160-44124190
  hyper
gccttactccagagcgcagtgattagcata

SEQ ID NO: 56264 - DNA, 555 bp, Homo sapiens
  chr19:44143853-44144408
  hyper
ggccgaccccggcccccgaccctacctggccccgccgcggccgcccacagcagcagcagcggccactggaagcgccgggcccggcccatggtgccgccgccgccgccgccgccgctcgctcccggcccggcacctgcaccgcccgcgccgcccgccccgccccccgcgccccgccccctgcccgcccgggggcggggcgccgaggccggggcggggccggggaggggagggggagacggaggagaggcccggagacaatcggggggacggcacggtgggggaacggtgcggggtgcgaaagctggagaggagaggggtgaggagggcgggaaggggtgcgcgggagggcgacagcggcgtgggagcaggtgggggatctcggtgagcgcgggaaatggagggtgttgggtgagggtgctgcgtgcgggcccaggtgctgcgcgcgagggtgcggagttgctggcatgcagggtgcttgcgctgcgcggaggggagggtggcagggtgttgctggaggctgtgcgagggtgggggcgcgggcgtcgtggggtgcgg

SEQ ID NO: 56265 - DNA, 30 bp, Homo sapiens; identical to SEQ ID NO: 12404
  chr19:44174056-44174086
  hyper

SEQ ID NO: 56266 - DNA, 30 bp, Homo sapiens
  chr19:44174389-44174419
  hyper
gtcagccccagatgcgtgggcgcctccccc

SEQ ID NO: 56267 - DNA, 30 bp, Homo sapiens
  chr19:44286497-44286527
  hyper
aacgcaaaacacataaacacaatgttttcc

SEQ ID NO: 56268 - DNA, 478 bp, Homo sapiens
  chr19:44302744-44303222
  hyper
ggtcgggtgctggcaagagagcgtagatgcacactcaggcagtggtaccctggcacagtcgtgcgggctgcgcactgcgccagagcccgcgcctagcacgtctcgggggttgggatcctagcgcgccaagagcaggcgcccagcggaggccacgccttccccgaggctgccaggcctctcatcgtccctcccggagcccagccccgctctcccgcgcaccttggctcaggttggggagggcgtcatgagtcatgaggtgggcgttgcatttgtcagttgtgcagccgcgcaccaccgagtagtctggcggcagcgcgtccgcgttcgattgcgtctggcccgcaggaggcccggtccagcagcccttccgcaccagggtcaccggcgcgcgataccctgggggcgggatcggggctcgtgctctgcttcccgaaacccttctccctccagtctcagcgttcttcctcctccctctatc

SEQ ID NO: 56269 - DNA, 381 bp, Homo sapiens
  chr19:44405796-44406177
  hyper
actgaaactccagggatgacacgccccgttcacgccctgggtcttctggtcttcagcgcctctcatcctcaccgccggttccattccaaccagggactgtggaagcctccgctgatttctgtggagacgatctactcaccacgtaggggctacagcagctcggacaccggaaaaagatctagagctcgagggtgaccctagcgcggtgacttctgggaaatgtagtccacccggaataaccatgtccacggcgcccgccattctgtagcctatgctcggagggcacatgagcaagagcttgaccatctgtaccgttggttgacttgctctattaagggctatgatttcaggtcgtcctgcgtgtttagaggaggcgagtgg

SEQ ID NO: 56270 - DNA, 505 bp, Homo sapiens
  chr19:44455255-44455760
  hyper
cctggagggtaaaactgtgaacgtttactccttgggcattctgggaagtgtcccaacggtcggtggggttgcgggcacttccggtcaggcaggcggatccggggaattctgggaaatgtagtccagacgctctgtggagtcgcgggagctacggctgcgggagttaccctttattctgtgatattttgagctgttctgcgtctcgcaggcccttctgaatttcctggacctactctcggaaccctcaacgagctagcgatagatttagaggaaaggaagcaccgtcggaaagcaaaggtttggaagggtgagggcggcggtttgcgatccccgcggcagagccttcttgcgtttagggctgtcctagcatcccgagggactcggtcctgtcacgtttcgccctatttgggggtttctggggctctcagctcgcccaatccgcatccctccactactggcgcggggccgattcccccggtacaacgttggggtgttacttaatctc

SEQ ID NO: 56271 - DNA, 123 bp, Homo sapiens
  chr19:44488312-44488435
  hyper
aagtgtagtccagacgcctgtggcatcatcgacacttccggtctccgagcaggacactgctacttaacaaggtggtttgagccaagtatgtgtcttgcgggtctttgcgaaagtgaaccagtt

SEQ ID NO: 56272 - DNA, 213 bp, Homo sapiens
  chr19:44506685-44506898
  hyper
ctgtcatcgtgggaggcgtttagacttcaggaattcctgtctatacactattttcgctcaaagactcaggaagagagacggacgactcacagggtcacagtccacattccccaccaggcgctcagagatatggaatacgttcccggtgggcactgcggtgtgtgtagtcaaggaccaccgcggagtccaacgcttcccgctgaagagtgagat

SEQ ID NO: 56273 - DNA, 73 bp, Homo sapiens; identical to SEQ ID NO: 12407
  chr19:44507928-44508001
  hyper

SEQ ID NO: 56274 - DNA, 30 bp, Homo sapiens; identical to SEQ ID NO: 12408
  chr19:44511186-44511216
  hyper

SEQ ID NO: 56275 - DNA, 401 bp, Homo sapiens
  chr19:44529436-44529837
  hyper
gaagtggagtccacacgctctgtggaggctcgagcacttccggtccccaactgtgacgttgctatttcatttaccacagtagtttgagtcatttccacatcttgcgagtccttccgaacgagtctcctttccttggggctcgcaaccacccaatgatcgattcaggagaaaagaagcctgggcggagagcagaggtttggaggggcgcgggcggggattgccgttccagtcagctgagccttctggcgtcggggggctctgctagggtctcagggagtgggattggcgcggcccggtgtgccctactttgacctcgcttagtccgcctccctcctccctacgtgtgcagcccctttcagtgtggtgtggagtgtcacttaatgtccgtttatcttccattg

SEQ ID NO: 56276 - DNA, 30 bp, Homo sapiens
  chr19:44556470-44556500
  hyper
caggactttgacctcgctcagtccgcctcc

SEQ ID NO: 56277 - DNA, 591 bp, Homo sapiens
  chr19:44576035-44576626
  hyper
cagtccatattccaaaccaggcgcttgggtctatgggattcattcctcgtgggcattgcaggaagtgtagtcaaagagcaccgcggagtcccacgcttcccgccggaaggtgatactatagaacgtctcctttgagattcaaggaagtgtagcgcaggagatctgttgaatgacgagcaagtaggctcaggacggcgtatccggggaattctgggaaatgtagttcacacgctgcgcggggtaggggcacttccgctcccggggggcgaggttgctgcagtgcattcggtggtagtttggtgtcagtcctgtgtcttgtcggtccttctaaacgtgtccccttacgatgctggctcgcaaccacctggaagttgactaaggggagaaggagtctcgttggaaaacggaggtttggagggacaacggcctctcttttcgttcttgtcagcggagccttcttggtcttggggctgtcctcgcgtccccgggcatgaggctgggggttgggacttggtcgggacgcgtctcgcctggtttgagggtttttggggctctcagctcgctcagtccgcctccctccatcccacctgt

SEQ ID NO: 56278 - DNA, 30 bp, Homo sapiens; identical to SEQ ID NO: 12410
  chr19:44598549-44598579
  hyper

SEQ ID NO: 56279 - DNA, 30 bp, Homo sapiens
  chr19:44616704-44616734
  hyper
cgaccacgttaaaaacgttttgcatagcga

SEQ ID NO: 56280 - DNA, 251 bp, Homo sapiens
  chr19:44617148-44617399
  hyper
ttccccactaggcaggcgctcgtggctttgggattcgttcccagtgggcacctcggagtggcaacgcttccccctgaagaatgagattttgagcgtttttccttcagcattcggaggagtgtaatccaaatgctctgtggagtcgtacacactggctccagaaggaggatacaagcaattctgggaatggtagtccagacgctcagtggagtagcggtcagcttggctccggcaggcgaatcaggggattt

SEQ ID NO: 56281 - DNA, 365 bp, Homo sapiens
  chr19:44617606-44617971
  hyper
cctggtagtttgggtcagttccgcgagacccttctgaatttcctggacctacgcattggatccttaacgaactggtgatcgaattaggggaaaagaaacctcgtcggagagcagaggtttggcggagcggggccgctgttttcgttctcgtcagtggagccttcttgggcttggggctctcctcgcgtccccggggtgtttgggacttggtcgggtcgcgtctcgcctggttttagggtctccggggctctgagctcgcccactcggcctccctgcaccccacgcgcgtggccacttcctcgcgataaaacgctgggatgttacttaatctccttgggtctcccgttacagttctttaagatggg

SEQ ID NO: 56282 - DNA, 852 bp, Homo sapiens
  chr19:44645330-44646182
  hyper
tccttgaagattgtatctcctcgcttgttctctttccaataatcctccgtagtcctgggaggcgtttagacttcaggaattgctgtctattcaatattttcgctcaaggactcaggcagagggaaggacgactctcagggtcacagtccacattccctaccaagcgctcagcgatataggattcgttccccatgggcagtgcgggaatcgtaggcaaggagcaccgcggagtcccatcgcttttccctgaagggtgagattctgaacgtttttccctcagcattctgagtgtaatccaaacgctcagtggagtcgtggtccatttgacccacgcagggggatccggggaattctgggaaatgtagtcccgccaatcagtggagtcgcgggcacttccgctccagggaagagggggcgattgtcacggcacattccacggtagtttcttccagttccgcgactcgcgggcccctcctaatgtcagggacttaagattggggctcgctgggacctggtggtccggttatgggaaaagaagcctcgtgggagagcagaggtttggtggggcgagggcggcggcttttgttgtgtcagcggagccttcttgggctggggctcccctcgtgtcccgcggcgggaggcggggggcattgggacttggttgggtcgcgtctcgcctggtttgagggtttccggggctctgagctcgcccactccgcctccctgcactccaggcgcgcagtcacttttttacagtgcaaggttggcgtgttaatctccctgggcctctccttgctgttctttaaaatggggacgttaggaccatctttgtagaatcgttttggtaactgg

SEQ ID NO: 56283 - DNA, 30 bp, Homo sapiens
  chr19:44669229-44669259
  hyper
ctcgcaggcacttccgcccaggaagacgac

SEQ ID NO: 56284 - DNA, 543 bp, Homo sapiens
  chr19:44711509-44712052
  hyper
gctctggctttctaggatacccggaagctcaggttactcggaagtatttccgctccaaggagcggaactatggccggtttcccctggggcattctgggaagtgtagtcaggggcccgcgtagcctggggcacttccgcttttggatggcggagctagggaattgtgggaagtgatccggggtttctctttagttgctgggaagttttttcgctctaggagggcgaaaacaagtgtttggatccgctgggaccctccaagttttctcagcctcgtcagggagcaagcggggccctggccctcgtctggaggaaggctagagaagctgtggccagctgggaggctggagttgggagcagtttgtgttctttcctctcggctgagcctcacgtttggagcagttcttgcgtccccgggttgggagcgtcctggatcggttgtcgcttggttagagggtctcctggcgttccgcagccagcctctcccacctacttgccagctctgccacttactagtgttataacgttttgtgagttaatcttaat

SEQ ID NO: 56285 - DNA, 381 bp, Homo sapiens; identical to SEQ ID NO: 12414
  chr19:44763971-44764352
  hyper

SEQ ID NO: 56286 - DNA, 246 bp, Homo sapiens
  chr19:44808915-44809161
  hyper
agcagaccctcaacctcgaaggacgacgcgagcccgcctcccacgcaagaggttctgccgaggggacgcaaactcccgcagcctcccaaccccgccctccagcgctggccgcggcttctcttccccaagccaaggacgggttcattgctggccccacgcctaggcaaagagggctcggagaagtcttggagacccggagctgactcacctccctgggagatatctcagatccgacctcgccttcct

SEQ ID NO: 56287 - DNA, 166 bp, Homo sapiens
  chr19:44905547-44905713
  hyper
ctatcccgggtaggtcgggccgctgaacttccctagtctaccccacctacgaggccttatcattggttaccagtcccctcttccactcctcctacttcagtccacagggacgggtcacagctgcacatcctacacccctactcctggctacgcctccaagaggggc

SEQ ID NO: 56288 - DNA, 165 bp, Homo sapiens
  chr19:44905766-44905931
  hyper
cgtccagtaccacggcgcatgcgcaaggaggcctatggcctacaatccccagaaagccccgcgcgcagcagtggccattcgcaaggctaccctggtgaaggtggcctttgacttccgtgcatttggaagtcctttgacttccgtgcattcgtctaaaataacgac

SEQ ID NO: 56289 - DNA, 434 bp, Homo sapiens; identical to SEQ ID NO: 12416
  chr19:44952395-44952829
  hyper

SEQ ID NO: 56290 - DNA, 601 bp, Homo sapiens
  chr19:45004315-45004916
  hyper
cccctaccaacctgggcgtccgctggcccgcagcccaggctgggcctgtcaccgcctcagtgcctagcacggctctgcggcaggacgaactcgggttaggcaaccccctgccccgattctgcaacacggccgactcgggttaagctagttcggtcccctctcctagtcagcatccgcaaggccgctgggggttaagtctgaagggccgagctgctcggcgacagcaagcgtccgcgcgcgggacaatggctgctcttgtggccgaacccggaagtgcacttgggctcggagagccagaactacaattcccagaagcctccgcggcgcggacggtcagtaggcggggttccggcttctccaaggaagtggggcgggggaccgggccagaagctaagagggcgtcctcgtccggggcccgggggggcgccacacctgtgcatgtgcaggtctagggggagcactaagaccagccgcggcgccgggaggccgaggccagtgcagcgacgcatggggagtcgctctggcgtgacgtcagaatccaatagaaatggcggggaccctttctgggtgccccctgcctgtcagacgctgcgcgcgaccc

SEQ ID NO: 56291 - DNA, 883 bp, Homo sapiens
  chr19:45146960-45147843
  hyper
gccactcggcaaccgcgagccgttagtaagttgctgaatctctccgtgtgcctccgtttcctcacctggaatgtgggcgacctcacacaggaagccgcctcttctagtgggcaccgacggagcgagcgcgcgtctgcagcgggactgagcgccgggagagacctgcgcaggcgcaggcgcgcgggaagggccagcctgggtggcccaccccgcgcctggcgggactggccgccaactcccctccgctccagtcacttgtctggagcttgaagaagtgggtattccccttcccaccccaggcactggaggagcggccccccggggattccaggacctgagctccgggagctggactcgcagcgaccgcggcagagcgagcgggcgccgggaagcgaggagacgcccgcgggaggcccagctgctcggagcaactggcatggcccgagccatggccgccgcgtggccgctgctgctggtggcgctactggtgctgtcctggccacccccaggaaccggtgagtgacccccgcgcagtccggtggcccctgtctggctcccgctccgcatccaggccgggtacttgcccccttgggttcccgaagatgacggccccgccgcggcgccacccaccccccatctctgccccggggttggaaggaacacggtgcgagggtgcgagggcaggaccctcctcttggccacccggagagcggtcggagttgggtacagaaattcctcgaaattggcagcaacacgggtcgggcacaagaccctcctctgggcccctcggaaaggggatggagttgggtgaggaaatttcccaaaaaggcaagtgaatcccggaaaatcagcagatggtgacgcatgccggattaccttaccc

SEQ ID NO: 56292 - DNA, 74 bp, Homo sapiens
  chr19:45195330-45195404
  hyper
gcttgagaccagtgtccttgacgggaactaagacgccccccacgcccatccccggctcccaggctctctccacc

SEQ ID NO: 56293 - DNA, 30 bp, Homo sapiens
  chr19:45195607-45195637
  hyper
caaaaaggttttgtgcgggttcctagggtc

SEQ ID NO: 56294 - DNA, 262 bp, Homo sapiens
  chr19:45207312-45207574
  hyper
ggccaacagcacagcgctggtggaacgtcgagacaccctgcgccttatgtgcagcagccccagccccaccgccgaggtccgctggttcttcaacggtggggccctgcccgtcgctctccgcctgggcctgtcccctgacggccgggtgctggccaggcatggcatccgccgggaggaggccggcgcctatcagtgtgaggtgtggaacccggtcagtgtcagccgcagcgagcccatcaacctgaccgtgtactgtgagtcc

SEQ ID NO: 56295 - DNA, 30 bp, Homo sapiens
  chr19:45257290-45257320
  hyper
ggtgaaactggtcacgccaaggggcctgaa

SEQ ID NO: 56296 - DNA, 162 bp, Homo sapiens
  chr19:45257689-45257851
  hyper
ccagggtagatccccggcgggacaggcttccctcccccgggagcaggaagcagagccccgcccagcagacctgttactggaagtccgagggctgggtcgcccctcccgtccccacttcctccagccccgccccaccccctgcggcccgcgcgtttatgggaa

SEQ ID NO: 56297 - DNA, 135 bp, Homo sapiens
  chr19:45281277-45281412
  hyper
gcaatgcgtcgacccccggctgtccgtgagtcccccttcgctgcgggacctgctgccccgcacagcgcagctgcttcgagaggtggcccattctcggcgggcggccggcggaggcggccccgggggtcccggcgg

SEQ ID NO: 56298 - DNA, 31 bp, Homo sapiens
  chr19:45300245-45300276
  hyper
ttaggaggcactcagccggctcccagaggac

SEQ ID NO: 56299 - DNA, 199 bp, Homo sapiens
  chr19:45312125-45312324
  hyper
ggccccccgctgcaggcgctggtcagtaagcccggacagctctaggcttgggggcggacgagccccgagcctggccccgtgcactgggaggtccgctccgggcagtgggaggtcctggccccgcgcccgggcatcgggggacgaggggggcctggagggcggggcggggcggggctgccgggggcggggcctctggctc

SEQ ID NO: 56300 - DNA, 369 bp, Homo sapiens
  chr19:45347905-45348274
  hyper
cccggcctcccgcttcgcgccctcatcccgccccccggcgcggcctcaccagctccccctgggcagcccaaagaatgcgaagaggtaggtgggggtagggaggagggcgagccgctgggagagacaaagggcccgagtctgagcgagagacacaaagacgcgaggaggctggggagataggggaagtgggacaaggacgcggggagtgaccaggtccggaggccggactggagcccagccccacccagcccggccgggccagcgcagcgcgggggccggtctctgctgccccctggcgggtggctgcggtgagaaggcggcgcggagcaggtgttgggaggggaggaccagggcgcgcagggaggtagg

SEQ ID NO: 56301 - DNA, 264 bp, Homo sapiens
  chr19:45348807-45349071
  hyper
aagaccagaaacagagcgacaccgaagcatgaggacggaaagacccagagaggcagaaatacagggacagagaggaagacccaaagagagtgagagagacacaaagacacgtaagagagacagagaaatccagaaagaaacgagtgcagcgacacctagagttcggggcagagattagaaacgcacgagggtacgagaaacaggctcagggcgatgggctcgacctgcggggaggtcgcacaaccgggacgtgctgggggcaga

SEQ ID NO: 56302 - DNA, 553 bp, Homo sapiens
  chr19:45349504-45350057
  hyper
gggccggagccagggtcggcttgactcgggggagcagcgggtggatcctgtgacgtcagcgggttcgaaccgccggagctgagcgagaggccgggggtgccgagccgggcggggagagctgggccgggagagcagaacagggaggctagagcgcagcgggaaccggcccggagccggagccggagccccacaggcacctactaaaccgcccagccgatcggcccccacagagtggcccgcgggcctccggccgggcccagtcccctcccgggccctccatggcccgggccgctgccctcctgccgtcgagatcgccgccgacgccgctgctgtggccgctgctgctgctgctgctcctggaaaccggtgagacgagcggacggccccctgccctcgcgcggaccccctccaaccttaccttccgagctggggaagccgagcaccttccccgcccacccccggctccccgagccccctctcgcgtgcccccttcctggctggccccacagactccgaccccctacacgtccgattctctcgaggagactctgac

SEQ ID NO: 56303 - DNA, 42 bp, Homo sapiens
  chr19:45350286-45350328
  hyper
taccgcagtaaggtctcgaggaagaggcgagaccacctccct

SEQ ID NO: 56304 - DNA, 239 bp, Homo sapiens; identical to SEQ ID NO: 12425
  chr19:45418005-45418244
  hyper

SEQ ID NO: 56305 - DNA, 30 bp, Homo sapiens; identical to SEQ ID NO: 12426
  chr19:45579363-45579393
  hyper

SEQ ID NO: 56306 - DNA, 30 bp, Homo sapiens
  chr19:45582909-45582939
  hyper
gtgtggggagtggacgcctgggggccggga

SEQ ID NO: 56307 - DNA, 30 bp, Homo sapiens
  chr19:45647943-45647973
  hyper
tcaggccaggcctgcggcagggcaggacgg

SEQ ID NO: 56308 - DNA, 109 bp, Homo sapiens
  chr19:45648468-45648577
  hyper
accactcactgctgcgcctggacctcgaccgtgaacccaagaaagaggcggtgagcaggggacggtcctgcagccctggggcgggcggaaggccgggtggtggggccgg

SEQ ID NO: 56309 - DNA, 57 bp, Homo sapiens
  chr19:45655080-45655137
  hyper
gtgggcctcacagggctcattcggaccctgggttgcggccccagtccagccccctat

SEQ ID NO: 56310 - DNA, 91 bp, Homo sapiens; identical to SEQ ID NO: 12427
  chr19:45655465-45655556
  hyper

SEQ ID NO: 56311 - DNA, 1095 bp, Homo sapiens; identical to SEQ ID NO: 12428
  chr19:45655647-45656742
  hyper

SEQ ID NO: 56312 - DNA, 522 bp, Homo sapiens; identical to SEQ ID NO: 12429
  chr19:45656790-45657312
  hyper

SEQ ID NO: 56313 - DNA, 77 bp, Homo sapiens
  chr19:45681392-45681469
  hyper
ccccgggccggggtcggggtcgtgagcccacagctcagccaccatctccgtgtgaagaaactcaaacaacacagtat

SEQ ID NO: 56314 - DNA, 16 bp, Homo sapiens
  chr19:45681509-45681525
  hyper
cgcttccagctctcat

SEQ ID NO: 56315 - DNA, 42 bp, Homo sapiens; identical to SEQ ID NO: 12430
  chr19:45755077-45755119
  hyper

SEQ ID NO: 56316 - DNA, 30 bp, Homo sapiens
  chr19:45826902-45826932
  hyper
tctgccgcaaaggccgagacccgaggcgct

SEQ ID NO: 56317 - DNA, 47 bp, Homo sapiens
  chr19:45843862-45843909
  hyper
accagttccgcgtgcgaagttctgccattcccgcggggctggagccc

SEQ ID NO: 56318 - DNA, 62 bp, Homo sapiens
  chr19:45844195-45844257
  hyper
agggccttggggctcccggatgccccctgccccgtcctggggctctccgggatctggaggcc

SEQ ID NO: 56319 - DNA, 30 bp, Homo sapiens
  chr19:45874017-45874047
  hyper
tcactgaggatcgtcgagggccaatcaaaa

SEQ ID NO: 56320 - DNA, 311 bp, Homo sapiens; identical to SEQ ID NO: 12431
  chr19:45888913-45889224
  hyper

SEQ ID NO: 56321 - DNA, 22 bp, Homo sapiens
  chr19:45889315-45889337
  hyper
cgcctgctgcaccacctccagc

SEQ ID NO: 56322 - DNA, 35 bp, Homo sapiens
  chr19:45908309-45908344
  hyper
tggggagcggagaacggggcggggcaggagctggg

SEQ ID NO: 56323 - DNA, 47 bp, Homo sapiens
  chr19:45908809-45908856
  hyper
ttgtagtcctggagcccgcaggggctgcaccccggtgtctctctcgc

SEQ ID NO: 56324 - DNA, 30 bp, Homo sapiens
  chr19:45909109-45909139
  hyper
aagggaagtgggtgcgtcccccaaatctgt

SEQ ID NO: 56325 - DNA, 30 bp, Homo sapiens
  chr19:45927244-45927274
  hyper
gttctggaggaccgcggaggtcgtgggagg

SEQ ID NO: 56326 - DNA, 263 bp, Homo sapiens; identical to SEQ ID NO: 12433
  chr19:45959072-45959335
  hyper

SEQ ID NO: 56327 - DNA, 133 bp, Homo sapiens
  chr19:45971122-45971255
  hyper
cttgctggacagtgcgggactcgatttggcggggccggagatttggggaagtttgtccagcaaggggcgggtgacgtaagcaggggggcgggtcccgggcatataaatacaggctggcgggtctgtgcttcat

SEQ ID NO: 56328 - DNA, 85 bp, Homo sapiens
  chr19:45996036-45996121
  hyper
gctcctagtggccggcgccggtggatgggggaggggccaggtcgcctgaggcgggggctaagtttaggcacgctggggggagggg

SEQ ID NO: 56329 - DNA, 30 bp, Homo sapiens; identical to SEQ ID NO: 12434
  chr19:46000139-46000169
  hyper

SEQ ID NO: 56330 - DNA, 30 bp, Homo sapiens
  chr19:46000727-46000757
  hyper
acttttggggcacgcggaggagctcaaacg

SEQ ID NO: 56331 - DNA, 632 bp, Homo sapiens; identical to SEQ ID NO: 12435
  chr19:46001720-46002352
  hyper

SEQ ID NO: 56332 - DNA, 275 bp, Homo sapiens; identical to SEQ ID NO: 12436
  chr19:46002431-46002706
  hyper

SEQ ID NO: 56333 - DNA, 30 bp, Homo sapiens
  chr19:46010701-46010731
  hyper
gtggaattttggaacgaaatgtaacgaaga

SEQ ID NO: 56334 - DNA, 30 bp, Homo sapiens; identical to SEQ ID NO: 12437
  chr19:46012673-46012703
  hyper

SEQ ID NO: 56335 - DNA, 30 bp, Homo sapiens
  chr19:46087995-46088025
  hyper
cgccatagggaacgcgcccaccaccatctt

SEQ ID NO: 56336 - DNA, 30 bp, Homo sapiens
  chr19:46088260-46088290
  hyper
cggatgctggaaggcgtgtggattcccacg

SEQ ID NO: 56337 - DNA, 30 bp, Homo sapiens
  chr19:46102048-46102078
  hyper
ggcaaacctcctgtcgctgttaactaaaca

SEQ ID NO: 56338 - DNA, 30 bp, Homo sapiens; identical to SEQ ID NO: 12438
  chr19:46105299-46105329
  hyper

SEQ ID NO: 56339 - DNA, 240 bp, Homo sapiens
  chr19:46142559-46142799
  hyper
ctaagccccgggagcgcggagaggagatggggggtggtctgcgaaagggtctcacccagctccaaagctactcatggcggcgggtggcggagcttcggggccgggggtggagccgggaccggctctgccgcttccggccctgggaggcgcccgggccgccgcgcccctgccccgccctccacagccacccctggagccggagggtcccaccgggtcacacatcccgggctgtggactccc

SEQ ID NO: 56340 - DNA, 863 bp, Homo sapiens
  chr19:46144642-46145505
  hyper
tcctcacccagtagacctgaccgtccagcttctaaaaactctggccacgcccctcaatattgactccgccctcccagaccttccactgttaccgtgccacctcaagattggtccctccaaggctctggcaccgtccccgcttttgaactagctggccccactctaggttacgacctcgtggcctggggcatgactacatttctcgaccatttcctccctatctctttctgcggcttgacgccgccccagtccttacccttcctttttggcgctacagttgctgctggaggatgtggtccggctgcgggggtcctcacggcgcaccgaggcgaggcgctctggtgacaagtagcggcggacactgctaaaagagagcacacaggtgggggcagagccttctaggccagcaggcgagtgccgtgagcaagcgagattctccctgcaccctctgctgctggagctcaggcaaacaaaccacctctgtctcccacgaggtcttggaagaggctgggggtcccggccttgtgccttacctgcgcccggaggtcgcctccttcttgggagaggatggggacgtggcatagccacccacgcgccgcgggggtcccgagccattaaggggcgtcctggtgggaaggcctttcaagagctgacacactggagggatggggttaggggacagaagagggtgagtataaggaccaggccccggtcctccccatcccacccctccagtctaacggggatacccgaggcagtggtgcctaagcgcggaggcgcccggcccttgggggtgccccgcgcgcgtagcgccgctccctgttcttcgcatgcccgcaggcgacgcagagcatccgccagcg

SEQ ID NO: 56341 - DNA, 88 bp, Homo sapiens
  chr19:46145557-46145645
  hyper
cgccgacacgcggtcgtccacttccataccgctcgtgcccgacaaattgtcatctggaagacgggggagtgccggctgcagggccacc

SEQ ID NO: 56342 - DNA, 419 bp, Homo sapiens; identical to SEQ ID NO: 12442
  chr19:46180190-46180609
  hyper

SEQ ID NO: 56343 - DNA, 30 bp, Homo sapiens
  chr19:46180871-46180901
  hyper
ctcaagtgcggtgggcggggcctagcgagc

SEQ ID NO: 56344 - DNA, 30 bp, Homo sapiens; identical to SEQ ID NO: 12443
  chr19:46220698-46220728
  hyper

SEQ ID NO: 56345 - DNA, 349 bp, Homo sapiens
  chr19:46271266-46271615
  hyper
agagctggacttgcgccgcccgaggcccctcacctcttgcagggcgcgccgcctccggccccggtccggtcgcgctgtcgccggttcttgaaccagttgctgacctgcgtgagcgacaggccggtgagtgtggccaggcggcgcttctcgtccggcgtggggtagcggttgccgcggtagcaggccttgagcgctgcgcgggagcgctccttgaagcagtagactgtctcctcgccgtcccagatggtcttgggcagcgggaacttcttgcgcagtcgatacttgtccactgcgccaagcgcgcggccgcgggcccgctcggcctcatggtagcgcgcgcgcaggtaga

SEQ ID NO: 56346 - DNA, 30 bp, Homo sapiens
  chr19:46272645-46272675
  hyper
cccaggagcggatgcgcgtggcgtgcgcag

SEQ ID NO: 56347 - DNA, 34 bp, Homo sapiens
  chr19:46273812-46273846
  hyper
ccaatgcagcccagggcggcggcacgagacagaa

SEQ ID NO: 56348 - DNA, 30 bp, Homo sapiens
  chr19:46295865-46295895
  hyper
gcggaagccggacccgacctgcgagcggcg

SEQ ID NO: 56349 - DNA, 30 bp, Homo sapiens
  chr19:46367761-46367791
  hyper
ctactacccggaggcgggcgaggtgtgtcc

SEQ ID NO: 56350 - DNA, 38 bp, Homo sapiens
  chr19:46379819-46379857
  hyper
tctcccagctctctgggtttccgcctctacctgccacc

SEQ ID NO: 56351 - DNA, 515 bp, Homo sapiens
  chr19:46379893-46380408
  hyper
cgccttgccggctgcgtgtcacccccgccccctgccgcgctggctccccgtccgtcccaccagccttgctgtcctgggcaggccggggaattcctcccggttcctggaaaaaacaactggggccgagagaaaggccctcagtctccccaggcacccgcccccctccctcgggcctgggggtctctcccggagtcggccagcccgaggcaggaagccctgcggtttctggcttctcccaggcggcctccggatctggcccccgccccccggccaacagcccaaatattattccgcgggaggagtcggtggtggcgggaggaggcccaggctgaaagaggctttcagggcggccaggcctggggcttcctgtccccaggctcgggcctcaggccgccccagtggggacctcaggtggccggaggggcggggtgttgttgtagggtcctcgggggagggtggggccatccgtcggggtgtctggtggccaccagctctgctggcgtgggcaggtgtga

SEQ ID NO: 56352 - DNA, 30 bp, Homo sapiens; identical to SEQ ID NO: 12446
  chr19:46388917-46388947
  hyper

SEQ ID NO: 56353 - DNA, 70 bp, Homo sapiens; identical to SEQ ID NO: 12447
  chr19:46405102-46405172
  hyper

SEQ ID NO: 56354 - DNA, 30 bp, Homo sapiens
  chr19:46405935-46405965
  hyper
tgccaaggcgcaggcgcgcccagggccagt

SEQ ID NO: 56355 - DNA, 31 bp, Homo sapiens; identical to SEQ ID NO: 12448
  chr19:46476432-46476463
  hyper

SEQ ID NO: 56356 - DNA, 31 bp, Homo sapiens; identical to SEQ ID NO: 12449
  chr19:46476797-46476828
  hyper

SEQ ID NO: 56357 - DNA, 95 bp, Homo sapiens
  chr19:46477258-46477353
  hyper
gagcatcttcttcccggaggctcccacagcgcctggcccctcccacccaacgaggtcacgcccatgccgggtagggccacgcccttcggcgcccc

SEQ ID NO: 56358 - DNA, 856 bp, Homo sapiens
  chr19:46519146-46520002
  hyper
gaggtctgggggggaagatatcgagagggtcatgggcccaggagtgcacgtctaggagttgatggggtaggcctgagggttcggagaaggtgcggtcggggaggagtctcgcgattgagtttgtcggggcgggcgggaagctgacagctgcctctgtggtctcaggaggcggactccgccggtgcagccgcccccgacgcgggaggaccgggcctcatcgtcccgggagcgctccgcgtcgcgaggccgcggcgccgcgcgctcctcatcccgggagagcggccgcgggagccggggtcggggccgccctgcgcgcccctcgccctcgcccacaggtctgtgcccctgccctgcggtagggaggggacgcactggcgctgccaaggcccgtctccggacctagccgcctcctctcccacgccgtcctaggtggtcgcgcgctccgcttcgaccccacggcctttgtgaaagccaaggaaaggaagcagagagagatccagatgaagtcagtgccccttcctccctcacctgcccctgtccctggcccgtgcccgctcccgggctctcatctctccacgccaccatcagtctccatcccctgccacctgctcgcttctcgccggataccccgcctgctctcccttccgtccgtcctacctcctcgtctgtgtttctgcgtgctttccgctcgtaggcctgtcacctcaggctttcgctggcgtggctgtgacctttaggggcgcagtgacccccttgcctgcaggagttgggcgtacagaccggcgtctcctttcttttttcccaggcagcagcagcggaaccgcttaggcagtgggggaagcggggacggtccgtc

SEQ ID NO: 56359 - DNA, 396 bp, Homo sapiens; identical to SEQ ID NO: 12452
  chr19:46580426-46580822
  hyper

SEQ ID NO: 56360 - DNA, 42 bp, Homo sapiens
  chr19:46800452-46800494
  hyper
gtgcgagccaagaacgccccggggcgcgcagttggaggcaca

SEQ ID NO: 56361 - DNA, 30 bp, Homo sapiens; identical to SEQ ID NO: 12453
  chr19:46850467-46850497
  hyper

SEQ ID NO: 56362 - DNA, 447 bp, Homo sapiens
  chr19:46916540-46916987
  hyper
aggcccactccaagctggaaacgtggtgtcccagctccaagttggggcgcgcgggctgccagcgactcttcctgccccaggccccagggacgcggctggaacttgggacaggacttcgcagacaaagacggtccagtcgaagctattcaatatggccgaggcgctgggaggccccagcccgggcctccagtagggtcccccgcccccaggcaggccgccacccagctccaggctgaccttgacgcgccgcagcctgccagcccgcgcgcttagagctctgcaccgtggagcgcgcgggcaggaagttcctcctcgccctccgccagaatgaggcccaccttcccccgtctcatcttacactcccagactctggaagactgacaggggggctgtccactcccttcggggcggcctccttcccctcccccacaggggtgtggccgcgcc

SEQ ID NO: 56363 - DNA, 30 bp, Homo sapiens
  chr19:46919711-46919741
  hyper
ttgcagagccaggtcgttgggcttcgctgg

SEQ ID NO: 56364 - DNA, 104 bp, Homo sapiens
  chr19:46930026-46930130
  hyper
attttctgcaaagggcgcaggcgcctggggtcagcctgtggtctccatagcaacggtcggacgcgctgctaggttctggctctgactgcgcctgcgcggctggt

SEQ ID NO: 56365 - DNA, 238 bp, Homo sapiens
  chr19:46932085-46932323
  hyper
caggcagggaggcgcgtccctcaccgctggcccagaggttgcactcagtgccctgtcgccggactaggacgaggatgtggccgctgcacttgctcccgcggtgacgtcaccgcctccttccgctctgcggcctggcggtctccatggcaaccgctgaagcatccatctcctctgccattggccgactggccgcattgaaatcaagagtctgagggggtcattcggaggtgaggggtcg

SEQ ID NO: 56366 - DNA, 46 bp, Homo sapiens; identical to SEQ ID NO: 12456
  chr19:46974562-46974608
  hyper

SEQ ID NO: 56367 - DNA, 155 bp, Homo sapiens; identical to SEQ ID NO: 12457
  chr19:46974831-46974986
  hyper

SEQ ID NO: 56368 - DNA, 641 bp, Homo sapiens
  chr19:46992619-46993260
  hyper
tgccccggccctcctcgggccccctgcttgccggacttttgtcccccagcaggtctcaccccctaatgcatggatttcgtcctcatctagggagcgtaaccccagcctccccaccgcatgctccctgcgggagggtcctgtttcctgcaccaagaacagggcctgggacgcgccagccctggataaatctcatggactgcgcggatggcgctgagggctcctcccagacagtcgccttctctcccaggagggggcaaccgcgctccgctccacccgtcgccagaggctccacgcgcgggacagacccggctgctgcagcctgtgctggtctctgtgcaccgggacccttccctgcaggatctcaaggcctttacgcggctgctccttcgaccccaaacactcctccccatccccgccggagcactccctccaggaatgagggaatgaaaacaatgtttctttccagcacattccccaccaggcctatctgggatctgactcacccagtccgcgtggttcattccgaccgtcagtcattcaacaaataacagccgccgccgcgtgccaggcacggtgttggggctggggacacgaaggggaaaggccaagccacactttttccctacggagctggccctaag

SEQ ID NO: 56369 - DNA, 251 bp, Homo sapiens
  chr19:46993281-46993532
  hyper
cgccacgcccacctgcccccatgccgcataggtccccacagccaccgctcagggccctctgcaggggctgctgctgctgcaagcccacggggcgctggggggagtttgaaagcaggaggaaagggacgccatttgggggaatgctcaggccgtggtggcagcagcagctggcggtcactgcggtgaaccaggggctcccgggtctctcctcaagcaagccggccccgtgcgtggaacttggcagtcctaca

SEQ ID NO: 56370 - DNA, 84 bp, Homo sapiens; identical to SEQ ID NO: 12459
  chr19:46996430-46996514
  hyper

SEQ ID NO: 56371 - DNA, 261 bp, Homo sapiens; identical to SEQ ID NO: 12460
  chr19:46996577-46996838
  hyper

SEQ ID NO: 56372 - DNA, 56 bp, Homo sapiens
  chr19:46997221-46997277
  hyper
cgttggaccccatgttctcccgggcggccaggagcgccaatacctcccccagtttg

SEQ ID NO: 56373 - DNA, 230 bp, Homo sapiens
  chr19:47137303-47137533
  hyper
ggcaggggagggtaagctgtccggagggctcagagcagaacacaaaagaggcgcttgtcgcggaaggggttctccgcggcgggtactggcgtcaccagcgggtcatctttggcatgcgtctcgcagaaagccaggagttccgctgctgcctgcgacacctgcgagcacccgggtggagatgtcaccgccctgcccggctccttggagccgcccacttaggccccgcctct

SEQ ID NO: 56374 - DNA, 30 bp, Homo sapiens; identical to SEQ ID NO: 12462
  chr19:47137882-47137912
  hyper

SEQ ID NO: 56375 - DNA, 30 bp, Homo sapiens; identical to SEQ ID NO: 12463
  chr19:47141841-47141871
  hyper

SEQ ID NO: 56376 - DNA, 30 bp, Homo sapiens; identical to SEQ ID NO: 12464
  chr19:47142444-47142474
  hyper

SEQ ID NO: 56377 - DNA, 30 bp, Homo sapiens
  chr19:47164767-47164797
  hyper
tggactgtccggcgcgaggggaagggtgat

SEQ ID NO: 56378 - DNA, 30 bp, Homo sapiens; identical to SEQ ID NO: 12465
  chr19:47217222-47217252
  hyper

SEQ ID NO: 56379 - DNA, 365 bp, Homo sapiens
  chr19:47217681-47218046
  hyper
gcactggggtggggcgagctggaaggaggacttttcggggctcctgggaaagtgggggggggggccgggggacttggactcgagggcgctggagataaggagggcgcctgccacccaatgctcaaaggacccaggtgtctgggtcctcagctttgggggcctgggggcaggaaatgaaacctagtagaacagaaagtgaaactgccccggtggggcctcgggaaggaaggtaagcggccctaacacacctggacctggcagaaaaataaaactggggtgaagcctgagcggggcaggctggggacttgagcactggacaaagaagttcacccaagggacaatctgcccccgtacccccactgcca

SEQ ID NO: 56380 - DNA, 30 bp, Homo sapiens
  chr19:47249922-47249952
  hyper
caggccccgcgcgacggtccccctcgctgg

SEQ ID NO: 56381 - DNA, 30 bp, Homo sapiens
  chr19:47250249-47250279
  hyper
gtaacctaagtgtccgtggtggtccttctg

SEQ ID NO: 56382 - DNA, 30 bp, Homo sapiens
  chr19:47292145-47292175
  hyper
ttcgttccctggtgcgagggtcgctagaaa

SEQ ID NO: 56383 - DNA, 30 bp, Homo sapiens
  chr19:47353746-47353776
  hyper
ccaaccatctacaacgtttcccacctgcac

SEQ ID NO: 56384 - DNA, 117 bp, Homo sapiens
  chr19:47363285-47363402
  hyper
gcacacaggaccaggccgtcttccctctcctggggatcagtcgttcacagaaccaaaaacaagttgcatggacgcgcgcgttggctgcagattttcttcacagccaggagaaagagc

SEQ ID NO: 56385 - DNA, 30 bp, Homo sapiens; identical to SEQ ID NO: 12468
  chr19:47363930-47363960
  hyper

SEQ ID NO: 56386 - DNA, 44 bp, Homo sapiens
  chr19:47494572-47494616
  hyper
ttgtcttgacttggcgccatctagaggtgcgtgaaatcctgcca

SEQ ID NO: 56387 - DNA, 31 bp, Homo sapiens; identical to SEQ ID NO: 12470
  chr19:47516068-47516099
  hyper

SEQ ID NO: 56388 - DNA, 31 bp, Homo sapiens; identical to SEQ ID NO: 12471
  chr19:47523252-47523283
  hyper

SEQ ID NO: 56389 - DNA, 30 bp, Homo sapiens
  chr19:47524468-47524498
  hyper
gtccaattcacacccgatgttctgtccccg

SEQ ID NO: 56390 - DNA, 30 bp, Homo sapiens
  chr19:47524903-47524933
  hyper
cggcgcgctcgcggcgcgggaaggagaacc

SEQ ID NO: 56391 - DNA, 30 bp, Homo sapiens
  chr19:47526642-47526672
  hyper
agcatggacttaatcgatcccacctcgacc

SEQ ID NO: 56392 - DNA, 30 bp, Homo sapiens
  chr19:47551878-47551908
  hyper
cactacggccgccgcgcgccgtaccgcccc

SEQ ID NO: 56393 - DNA, 30 bp, Homo sapiens
  chr19:47633927-47633957
  hyper
ggggccttaagccgcgccatttttggggct

SEQ ID NO: 56394 - DNA, 30 bp, Homo sapiens
  chr19:47676049-47676079
  hyper
aagcacatatcttcacggatgacagagttc

SEQ ID NO: 56395 - DNA, 31 bp, Homo sapiens; identical to SEQ ID NO: 12472
  chr19:47729938-47729969
  hyper

SEQ ID NO: 56396 - DNA, 30 bp, Homo sapiens; identical to SEQ ID NO: 12473
  chr19:47730015-47730045
  hyper

SEQ ID NO: 56397 - DNA, 283 bp, Homo sapiens
  chr19:47730759-47731042
  hyper
ctccccttgggctgccgggacaagatgggggatgggaaaccaggacacactttccctagagcgcctgccggcagggatggggctccacgggcaccacagggttaacagcccatcaggcaggggacctttaacccttccctccccaagactcccccacctccccgaggggacttcccaacacaatggcccctccccctctccttcctccgccgggactgctgaggacagcccctggccaaagagatgcaaataaaagcaaaaggcctctcgacccctccccaga

SEQ ID NO: 56398 - DNA, 294 bp, Homo sapiens; identical to SEQ ID NO: 12474
  chr19:47731297-47731591
  hyper

SEQ ID NO: 56399 - DNA, 16 bp, Homo sapiens
  chr19:47734361-47734377
  hyper
cgcaggcgcgtccgcg

SEQ ID NO: 56400 - DNA, 31 bp, Homo sapiens
  chr19:47738880-47738911
  hyper
ttgcagggtagatactcggaggccagatgta

SEQ ID NO: 56401 - DNA, 30 bp, Homo sapiens
  chr19:47742814-47742844
  hyper
ggggcgcgggcgtccgcagggtccgagcgg

SEQ ID NO: 56402 - DNA, 30 bp, Homo sapiens
  chr19:47747582-47747612
  hyper
tgcggacttgcccccgctcctttcccggcc

SEQ ID NO: 56403 - DNA, 87 bp, Homo sapiens
  chr19:47750796-47750883
  hyper
tgtctcaagcggcagggagtgcgccgcaccgccccctggtggagagtgggaaacgtgtccgccggcgtgattatcaaatttcctggg

SEQ ID NO: 56404 - DNA, 285 bp, Homo sapiens
  chr19:47776506-47776791
  hyper
gggctcgaactggatgagagacgtggctagacgggggaggggtgctgggccgggggggaggtgggaagactgctcccctccgctgactcagccccttctctcctcagaggcaggccccgaaggccaggagacggcggagatcaccgacttccagagggtgcgtttctgcaaggtggtggcggcccctccgctgccgggggccgctcgctgaccgcgcccgccggaccgcggcctccgcgctctgcactaacctcccaccgcctcgctcctctgtcctctgcttct

SEQ ID NO: 56405 - DNA, 31 bp, Homo sapiens; identical to SEQ ID NO: 12476
  chr19:47778088-47778119
  hyper

SEQ ID NO: 56406 - DNA, 30 bp, Homo sapiens
  chr19:47852513-47852543
  hyper
ctgtggtggcggggcggggtcagaacgaga

SEQ ID NO: 56407 - DNA, 216 bp, Homo sapiens
  chr19:47910162-47910378
  hyper
cgtgtggctgcgtctcggtatagcccccgatgggctggccctctgggctgaaggctgcaccctgccctgcgaagggggttcagaggtgcaggctgagccccaggaagcccgggacccggctttgacgccctcctaagaaccccaggctctccgtccccgccttccccctgtacctgtgcggttggattgatcgatcataggttgcacgatgcgtct

SEQ ID NO: 56408 - DNA, 25 bp, Homo sapiens
  chr19:47910558-47910583
  hyper
gcccgggctctcgccccgggccggc

SEQ ID NO: 56409 - DNA, 58 bp, Homo sapiens
  chr19:47910679-47910737
  hyper
cgggtgctgcagccaccagcaagagtcactctgcctgcctggccggccgcagtctgaa

SEQ ID NO: 56410 - DNA, 30 bp, Homo sapiens; identical to SEQ ID NO: 12479
  chr19:47921384-47921414
  hyper

SEQ ID NO: 56411 - DNA, 141 bp, Homo sapiens
  chr19:47923309-47923450
  hyper
tgagtctgggggtccccatgccggcgggctctgcccccgtggctgtcctgcggtgaggctggccgtttaaggcagtccgaggggaagggtctggaggccttgcctttcctcaaggccggcgcaccccagataggggttttg

SEQ ID NO: 56412 - DNA, 223 bp, Homo sapiens
  chr19:47925410-47925633
  hyper
cccccttcccctcccgccccaccaagcaatcataccattagccacggctcagcggtggcgggaaggacccggcctgacccgggcggggggcggggcacaggctgcggctcccaccgagacccctctctccctcttttccttccctttctatctctcctcgccctctccgtcttttttgttggaatctgctttcctctgccagtttctcgctgtgcctctgggt

SEQ ID NO: 56413 - DNA, 314 bp, Homo sapiens
  chr19:47931514-47931828
  hyper
tggttagtggaaacccgtaattgacggatgcgggcgtagcaagtggaggagcttggctgatgaatgggggcgtggttagtggaaacccacgactgacgaatgggggcatggagagtggaggtgcgtggcttgtggaagcccatgactgatggatgggggtgtggctagtggaagagctaggctgacggatgggggcgtggctagtggaagctcattactgatgggggcgtggcgagtggaagagcttggcggctggaccccggcgctgctgctatatgtgggtgtgtcccgcagacgaccgcgggccgcaaaaa

SEQ ID NO: 56414 - DNA, 573 bp, Homo sapiens; identical to SEQ ID NO: 12482
  chr19:47933274-47933847
  hyper

SEQ ID NO: 56415 - DNA, 499 bp, Homo sapiens
  chr19:47950994-47951493
  hyper
cccctgagccacatcaggcctcgcccattccgaagccccgcccctctccgggccgcctcgggcgtgctcacatggtctcgtcgtcgccaaactccagctctccgcacgcgtcctcgtagtgcacgccgccgccgcgcgccgtgccgtccaccgtgcggtagggaaggcgcacggtgccgcgcgcgcccgagctgcgcacgacgcgcacgtccacggtgcccatgcactcgctcacgtgcagcaggcggtcctggaaggagaagatgcctgcgtggtcgtcgtccaggatggtgacggtggccagcagcggcgccaccagccgccccttgggccgcccgccgccgtccggctcgaacatgccctgcgcgtcgcccacgcgcaggttcagcagccgcacgaagaaatgctcgtcctcctcgaagatgtcgtcgtcgatgatgccgatgcgcagctccttctgcgtctcgcctggtttgaacaccagcgtgccctcgctgcg

SEQ ID NO: 56416 - DNA, 150 bp, Homo sapiens
  chr19:47960799-47960949
  hyper
cgaataccacgcacaccgggaagaagaccagggtcagcagcgcctcccacacctgcgggcggcgggcgtcagggcgaggccgggcgggccgccttctccctccccgcctctctgtctcagtctctgtccgcctctgccactcctcatctc

SEQ ID NO: 56417 - DNA, 30 bp, Homo sapiens
  chr19:47974886-47974916
  hyper
ccccacagaaggtacgcgtgctgggccagg

SEQ ID NO: 56418 - DNA, 30 bp, Homo sapiens; identical to SEQ ID NO: 12484
  chr19:47975472-47975502
  hyper

SEQ ID NO: 56419 - DNA, 30 bp, Homo sapiens
  chr19:47987692-47987722
  hyper
tggccacggcctctcgctgtatgctgtgtg

SEQ ID NO: 56420 - DNA, 30 bp, Homo sapiens; identical to SEQ ID NO: 12485
  chr19:48113095-48113125
  hyper

SEQ ID NO: 56421 - DNA, 30 bp, Homo sapiens
  chr19:48216487-48216517
  hyper
gctggaggtggaggcggaattcgaacccca

SEQ ID NO: 56422 - DNA, 30 bp, Homo sapiens
  chr19:48216798-48216828
  hyper
agtgctcccagcaccgcagctgtcgcctcc

SEQ ID NO: 56423 - DNA, 272 bp, Homo sapiens
  chr19:48229019-48229291
  hyper
gggtctgatttctgccccttgcgcccctgtctctccactcccactccaggctacgacttcccggccgtgctgcgctggttcgcggagcgcgtggacctcatcatcctgctctttgatgcgcacaagctggagatctcggacgagttctcagaggccatcggcgcgttgcggggccatgaggacaagatccgcgtggtgctcaacaaggccgacatggtggagacgcagcagctgatgcgcgtctacggcgcgctcatgtgggcgctgggcaa

SEQ ID NO: 56424 - DNA, 30 bp, Homo sapiens
  chr19:48246709-48246739
  hyper
tgtgtattcgggcacgaagtgctctcccag

SEQ ID NO: 56425 - DNA, 30 bp, Homo sapiens
  chr19:48248715-48248745
  hyper
tgccacaggaagtacgtcacggaagagggt

SEQ ID NO: 56426 - DNA, 30 bp, Homo sapiens
  chr19:48281595-48281625
  hyper
ttctgtccccaccgcgccgtccccaagccc

SEQ ID NO: 56427 - DNA, 30 bp, Homo sapiens; identical to SEQ ID NO: 12486
  chr19:48614075-48614105
  hyper

SEQ ID NO: 56428 - DNA, 318 bp, Homo sapiens
  chr19:48774330-48774648
  hyper
aagaaaagaaaggaaggaaggaagaaaaaaatcatttcaagggtaggcgacgggagccttgcggtttagccgctagtcaacggatgggggggagtggtagcaaaaacataaaaatggggacaagagagaaactggagactccccaacctgtctgtttccgcccttttacagtactgaggggaaaaaaaagccttctttccttgggaaatgcaggaagccagcaagcggccggagtctccggagcccgcaaggaggcgcgttggctgcgcagagagcgcgcttcccagctggagagcctaggaacggtggcgcgggcgg

SEQ ID NO: 56429 - DNA, 30 bp, Homo sapiens
  chr19:48775011-48775041
  hyper
gacgctcctgggctgcgcgcgcttttgggc

SEQ ID NO: 56430 - DNA, 159 bp, Homo sapiens; identical to SEQ ID NO: 12487
  chr19:48823577-48823736
  hyper

SEQ ID NO: 56431 - DNA, 30 bp, Homo sapiens; identical to SEQ ID NO: 12488
  chr19:48824607-48824637
  hyper

SEQ ID NO: 56432 - DNA, 30 bp, Homo sapiens; identical to SEQ ID NO: 12489
  chr19:48825136-48825166
  hyper

SEQ ID NO: 56433 - DNA, 30 bp, Homo sapiens
  chr19:48825605-48825635
  hyper
ctgagtcctagactcgtgtttttcacctcc

SEQ ID NO: 56434 - DNA, 370 bp, Homo sapiens
  chr19:48833450-48833820
  hyper
cagcggcgctgcccacgggccctccggcgcttctttgcccccatgggatattgggaaatgtagtcttgagggggcactgcatgacgtgtggttttcatcttccgcaggcgtggcggtgtttactggcgccttgatctatgccattcacgccgaggagatcctggagaagcacccgcgagggggcagcttcggatactgcttcgccctggcctgggtggccttccccctcgccctggtcagcggcatcatctacatccacctacggaagcgggagtgagcgccccgcctcgctcggctgcccccgccccttcccggcccccctcgccgcgcgtcctccaaaaaataaaaccttaaccgcgggctctgcctt

SEQ ID NO: 56435 - DNA, 30 bp, Homo sapiens
  chr19:48896932-48896962
  hyper
tgagtgtgtgtgtgcgagaacacagcgagt

SEQ ID NO: 56436 - DNA, 642 bp, Homo sapiens; identical to SEQ ID NO: 12490
  chr19:48901492-48902134
  hyper

SEQ ID NO: 56437 - DNA, 24 bp, Homo sapiens
  chr19:48902532-48902556
  hyper
aggaatgggcctgggcgcggtggc

SEQ ID NO: 56438 - DNA, 30 bp, Homo sapiens
  chr19:48918697-48918727
  hyper
attggggcctggggcggggtcgcgggaggg

SEQ ID NO: 56439 - DNA, 116 bp, Homo sapiens; identical to SEQ ID NO: 12491
  chr19:48947361-48947477
  hyper

SEQ ID NO: 56440 - DNA, 30 bp, Homo sapiens
  chr19:48949426-48949456
  hyper
gctctaccaccgagcgcagactggtagggc

SEQ ID NO: 56441 - DNA, 21 bp, Homo sapiens
  chr19:48955644-48955665
  hyper
gcacccagcccatgccctcct

SEQ ID NO: 56442 - DNA, 89 bp, Homo sapiens
  chr19:48972323-48972412
  hyper
gctccgcctccgcgcgacacttttccggggcttctcattggagagcaagcctgtcaagtgctttctgttgtttcggaggcggggcctgc

SEQ ID NO: 56443 - DNA, 31 bp, Homo sapiens; identical to SEQ ID NO: 12492
  chr19:48996514-48996545
  hyper

SEQ ID NO: 56444 - DNA, 198 bp, Homo sapiens
  chr19:48996832-48997030
  hyper
gcctccctccaggccccgcccaactctaagctcggcctcccgccaggcccttcccggctctaggctcctgctccctccaggccgcgaccccgaaaccgcgccctctcgggttccgcacctggtcgaagaggtagacggtcacgtccccgtggaaggagaccatcttgcgcttcctctccagctcgctgtcctctggct

SEQ ID NO: 56445 - DNA, 30 bp, Homo sapiens
  chr19:49122473-49122503
  hyper
tggcgccgccgtgacgtcacatgggtgcga

SEQ ID NO: 56446 - DNA, 468 bp, Homo sapiens
  chr19:49127265-49127733
  hyper
tctgggcctttgttacgcgtgttagagtctctgtctttgcagctaaagacctcctccctcacgccccttttcttttgtgaattcaatggatgagacaggcccactctcccttaacaaagatggcgacaacggcgctgtctatggggccgcgacgtcgtctccgctgcgcgtcggccctcacccacgatggcggccagtctcccgaagcgcgaggccccgcccagctctcggcctctcccgcggccggtccctgcaccaagctcgcgagctgactggctccaccccccgcgccctcgtattggtgcggcccaggccggctgcacggccattggctgagcggatgcacaccctccccccacccctaggtctgatgggggctgttggtgctgacttgcgggaccgcctggaggaggacccggcgtgtgaggagggtgcgggggtcggggcagggaccggagtctaggggac

SEQ ID NO: 56447 - DNA, 217 bp, Homo sapiens; identical to SEQ ID NO: 12495
  chr19:49141162-49141379
  hyper

SEQ ID NO: 56448 - DNA, 30 bp, Homo sapiens
  chr19:49149534-49149564
  hyper
cggcaaacactcctcgggttggcttggggt

SEQ ID NO: 56449 - DNA, 51 bp, Homo sapiens; identical to SEQ ID NO: 12496
  chr19:49199688-49199739
  hyper

SEQ ID NO: 56450 - DNA, 247 bp, Homo sapiens
  chr19:49199950-49200197
  hyper
ggaagtgataatgccgggaatccgggaatcccggggaggtgcaggaagacagcgagctcgaggcagtggggtgcgactgagccggatgtgctgagctgcccggggcacggggcggttggggtagagaaaggctttcagagctgggggacaggacggggccccgggtgagcggagagctgggttatttcacgggaacagctggtgacaaagccggaggggtgtgcggggccggcgagagactgggatt

SEQ ID NO: 56451 - DNA, 504 bp, Homo sapiens; identical to SEQ ID NO: 12498
  chr19:49216984-49217488
  hyper

SEQ ID NO: 56452 - DNA, 51 bp, Homo sapiens; identical to SEQ ID NO: 12499
  chr19:49217526-49217577
  hyper

SEQ ID NO: 56453 - DNA, 203 bp, Homo sapiens
  chr19:49242423-49242626
  hyper
cgcacaaagcgaaggcgtccacgcagctgctctcgccggggccaccgccggggctgcctgctaggccgtagcgctctagcgcctcggccacgagctcgcgcgccgtggagcgcgccgtggccagcacgctcttgtagttggcgcccgatgccagtccggcgccgaagatcttgaggacccccggaggcgccgtggcgcgggta

SEQ ID NO: 56454 - DNA, 121 bp, Homo sapiens
  chr19:49244869-49244990
  hyper
gggaacccctgtcctcggggccagaggccacgcccccggcaggaagccacaccccgtgccccgaaaccacacccaacaggaagtcacgcccccatcgccaaggccacgcccccgccgcgga

SEQ ID NO: 56455 - DNA, 673 bp, Homo sapiens
  chr19:49255763-49256436
  hyper
ggcagatccacagtccgcttttcgtggccggagcgcaccctccgcaaaggcaggccacatccggccgcccctggaacgccaggcgtccggctatccggcccggcagccctcccctccgcgcagcctgtccggactggcagcgagggcttggggaggagaggaaggagagggcgcggccgggagtctcgcagcgtccgccctcccgggccgggcggatggctggaaggtggagccccgcccgtcacttggcgccgagccccagcgccaggggctaaggcgatggcccctgggcccaccgctccccagatcggggatgcaggggaccgcgccctgcccctccgccccgtcattgacctgcgcgaaggcttcacccagggcaggctacctggcttctgagcagccgcagcatcattgcgtggaccaggagacggagcgcccagttgcaatgctggagccgggaggtccaatccgccgccctctctcttccggtgccagggcttagagtcggcccccgacacctgggtgcttcgagcctggccacgccccagcggctgggcagggcccccgcacctggtcccggcgagtggagcgatcgtccgccctctgccgcgtcctcctgggggatggagaacctgtttgccaggctgccgccggagcgcgcgagggcctccag

SEQ ID NO: 56456 - DNA, 529 bp, Homo sapiens
  chr19:49298384-49298913
  hyper
accaggggtctggcctgagaacggagagatccggaatcggggccaaggtgtatccttgaccgcacgacaaggagtaatgggcggacctgaacccgcgacgaggggctgggggccaagatgcctgggtcggcccttacggctttgggagtgtcgcaaccacatgggggcgccagagacccagacgccgcccgctggccttttatttcgtattgcacttcaggtgagtcattggtagggaggcgagtgctggcgtgacgagatgctacgggtcggtggatctggagcacagcctgcagcttcacaccgggaacatccactcgtgggctctgattccgtactgcggaacaacggaggcagtgcgtgaggtggaagctgcactacaactcccagtaggccctggggtgttccaggccgagtgcctacggagctgtgccccagcggctcacgggaaatgtagtccacttcccagagggccccaacaatgatgggaacggggaatcaaggctaaggcggcgcagaggcttccggg

SEQ ID NO: 56457 - DNA, 154 bp, Homo sapiens; identical to SEQ ID NO: 12502
  chr19:49314167-49314321
  hyper

SEQ ID NO: 56458 - DNA, 30 bp, Homo sapiens; identical to SEQ ID NO: 12503
  chr19:49315664-49315694
  hyper

SEQ ID NO: 56459 - DNA, 30 bp, Homo sapiens
  chr19:49376411-49376441
  hyper
ctcatagtcacgcccggatgccatcctcta

SEQ ID NO: 56460 - DNA, 211 bp, Homo sapiens
  chr19:49436771-49436982
  hyper
ttccctctgtaaggcggagctaaacggtgcattcgcccagcggggaagctagaactaaatgaccgctctgccgactggagccaacgagaatcggcgtaggcgcaatacgggcggaggatggggacccgcccccggggtgggcggggcgtcaggtacttaattcgcgcctggagggaccgaaggtgccgagggctccgcatcgcaaccatgg

SEQ ID NO: 56461 - DNA, 31 bp, Homo sapiens; identical to SEQ ID NO: 12505
  chr19:49466992-49467023
  hyper

SEQ ID NO: 56462 - DNA, 585 bp, Homo sapiens
  chr19:49467050-49467635
  hyper
tggggtagggggcccgatttgggtctgagccaggtctagttctgagggtcccaccaaaaaagtcggggagtgccaaggggatgaggtcagcgagtggccccacccccatccgtccccgcgggggccccttcccgcgctgagctcagcatgactcagcagtcgctgcctgcaacaaggaccccagataccggcctggcggggcatctgcagatcccctcggtcaggggctgccccgcctgggctgttcggagcagctcctctgtagggcagggcctgacctcaccccacaccccagtggcttcagctccctgcccagcgcacgggctgcctccatcagggcacttaagtagagtcaaggtttgcgccgactccgtctcccagaaatcaacgtggaccaggcccacttaaaaaatatgcattagtcgaagacagacgtctcgtccataggtccccagactgtttgtccacaacgcagggcttctctttgtgggcctgaaggagcacacgtcaggcaagacacgagggcaacttcagagacactgttcagggccacggagaattctcgaagtctgtgagttgtctcca

SEQ ID NO: 56463 - DNA, 30 bp, Homo sapiens
  chr19:49496686-49496716
  hyper
gaacgggttggagtcgctgtgtcccggccc

SEQ ID NO: 56464 - DNA, 203 bp, Homo sapiens
  chr19:49575271-49575474
  hyper
acgccccgcctctcaccgggccggctgcggctgcagcagcaagccccgtgccgtcgcggtcgtcgcggaagtcaggcagcgtctcgaggcagaagacgacgatggagacgaggatgaccagcacggagactacggcgagcacgcgcgcggcctgagagctctcgggaaactcgaaaagcagccacagctggcgggcgaaggcg

SEQ ID NO: 56465 - DNA, 194 bp, Homo sapiens; identical to SEQ ID NO: 12507
  chr19:49577261-49577455
  hyper

SEQ ID NO: 56466 - DNA, 30 bp, Homo sapiens
  chr19:49588347-49588377
  hyper
tctttgctaggcggcggagaggtacgttac

SEQ ID NO: 56467 - DNA, 30 bp, Homo sapiens
  chr19:49621631-49621661
  hyper
accacagatctggacgttcacgtgcactct

SEQ ID NO: 56468 - DNA, 84 bp, Homo sapiens; identical to SEQ ID NO: 12508
  chr19:49646031-49646115
  hyper

SEQ ID NO: 56469 - DNA, 83 bp, Homo sapiens; identical to SEQ ID NO: 12509
  chr19:49646245-49646328
  hyper

SEQ ID NO: 56470 - DNA, 447 bp, Homo sapiens
  chr19:49660927-49661374
  hyper
atcgcggcctgggacccgccctctccccgcctcccgctttggcgtctccaagactccccgccccccagacctcgccccgccccaggctaggctggaaagtggaggatccggtttgctctgggcgggtctggaagcagagccggcggagggagcgccggggccctgggctgcaggaggttgcggcggccgcggcagcatggtggtgccggagaaggagcaggtgagcgccggaccagggtctgcgggagcgcggagctggggacctcgcctccaggctcccagagaggagggcgctggacacccagattcctgggtcagacggaggagggggatgggagggtccaggttccagggtccagggcatgggggtcgagactcctgagtctggagcgggagggcgctgggggcccggactcctgtgtccgtggggagcgcacggggtgggtg

SEQ ID NO: 56471 - DNA, 30 bp, Homo sapiens
  chr19:49866841-49866871
  hyper
tccgaaacgagggccgcaatcagagaacac

SEQ ID NO: 56472 - DNA, 640 bp, Homo sapiens; identical to SEQ ID NO: 12511
  chr19:49925605-49926245
  hyper

SEQ ID NO: 56473 - DNA, 30 bp, Homo sapiens
  chr19:49926478-49926508
  hyper
cgaccgggggcagggcgactcccgaggcag

SEQ ID NO: 56474 - DNA, 30 bp, Homo sapiens; identical to SEQ ID NO: 12512
  chr19:49926733-49926763
  hyper

SEQ ID NO: 56475 - DNA, 233 bp, Homo sapiens
  chr19:49929635-49929868
  hyper
ttaaccccttccttcccgctctcccccgcagctataggtatctgccagagctatgaaatcattcagccggatcctcttcctcgtcttcctcctcgccggcctgaggtccaaggccgctccctcagcccctctgcctttgggctgtggctttccggacatggcccacccctctgagacttcccctctgaagggtgcttctgaaaattccaaacgagatcgccttaacccagaat

SEQ ID NO: 56476 - DNA, 30 bp, Homo sapiens
  chr19:49931427-49931457
  hyper
ccggcactacagggcgccagccaaaaaagc

SEQ ID NO: 56477 - DNA, 27 bp, Homo sapiens
  chr19:49931744-49931771
  hyper
ttcaaatgcagaatcggaatcctctct

SEQ ID NO: 56478 - DNA, 30 bp, Homo sapiens; identical to SEQ ID NO: 12514
  chr19:49935878-49935908
  hyper

SEQ ID NO: 56479 - DNA, 31 bp, Homo sapiens; identical to SEQ ID NO: 12515
  chr19:49939532-49939563
  hyper

SEQ ID NO: 56480 - DNA, 30 bp, Homo sapiens
  chr19:49954989-49955019
  hyper
agaccgaacaccatcgtcaaatccgtgggg

SEQ ID NO: 56481 - DNA, 109 bp, Homo sapiens; identical to SEQ ID NO: 12516
  chr19:49956759-49956868
  hyper

SEQ ID NO: 56482 - DNA, 30 bp, Homo sapiens; identical to SEQ ID NO: 12517
  chr19:49977303-49977333
  hyper

SEQ ID NO: 56483 - DNA, 30 bp, Homo sapiens; identical to SEQ ID NO: 12518
  chr19:49990679-49990709
  hyper

SEQ ID NO: 56484 - DNA, 30 bp, Homo sapiens
  chr19:49991046-49991076
  hyper
tgtaggaaatgccgcggctctctttaggcc

SEQ ID NO: 56485 - DNA, 30 bp, Homo sapiens
  chr19:49991502-49991532
  hyper
gtgttactggaagtcgagagctgtgatgaa

SEQ ID NO: 56486 - DNA, 30 bp, Homo sapiens
  chr19:49999402-49999432
  hyper
ccgtacgactctcgcgataatacgggcggg

SEQ ID NO: 56487 - DNA, 31 bp, Homo sapiens; identical to SEQ ID NO: 12519
  chr19:50003947-50003978
  hyper

SEQ ID NO: 56488 - DNA, 325 bp, Homo sapiens
  chr19:50016228-50016553
  hyper
aggggttgggggcccggactcctgggtccgagggtagagcggttgggggcccggactcctgggtccgagggtagagcggttgggggcccggactcctgggtccgagggaagagcggttgggggcctggactccggggtctgagggaggaggggctggggcctgaggggggcggaaggggcgtggcggagctcggggccgggactctcagcctatcaagtgtctgtaattaattaaccaactgagatccagttcaggggtgaaagttcttcaggtacgaggagggcattgttgtcagtctggaccgagcccgcagagcccctcctc

SEQ ID NO: 56489 - DNA, 274 bp, Homo sapiens
  chr19:50058956-50059230
  hyper
gcgccacgtcgttgcgcacccaagccggtttatttggtctcccgcacacactcaggcctgcatcaccggccgtgatttctccgcttgcagcttcactccggagcccgcgaagccggtaccgccctgggggaggtagagagaaggacgaggtagaggccggcccgggggtgaccagtggggctccaggtggtagtggggattcctaagcgggtcaaggtgaagcgggttgctggctaaggagtaggagttggggagggggcgaggcgaccgcagt

SEQ ID NO: 56490 - DNA, 97 bp, Homo sapiens
  chr19:50083835-50083932
  hyper
ctattttccccctccgctccgcccacttccgcccagcagaaggcaccggaagtagagctgcccctagttgcggaagtgcctcgcctggcttgctcaa

SEQ ID NO: 56491 - DNA, 30 bp, Homo sapiens; identical to SEQ ID NO: 12521
  chr19:50144982-50145012
  hyper

SEQ ID NO: 56492 - DNA, 30 bp, Homo sapiens; identical to SEQ ID NO: 12522
  chr19:50167911-50167941
  hyper

SEQ ID NO: 56493 - DNA, 30 bp, Homo sapiens
  chr19:50169167-50169197
  hyper
gagcgtgcacccagcgttccgccctttcta

SEQ ID NO: 56494 - DNA, 173 bp, Homo sapiens
  chr19:50194504-50194677
  hyper
gggagatttggggccggcgctcaaaatcggggggcgggggtggactcgggtttggaccccaggatccgatcagcggacccttgattcaacgtggtaagtactggaccccaggggctcgggctccggcggggcctggagtcctgtgtctagggttgggcgtgcaagcctctcca

SEQ ID NO: 56495 - DNA, 444 bp, Homo sapiens
  chr19:50316284-50316728
  hyper
tcctgcagaatagggggaccccgctggaggccgcgaggcacagcagatgcacagtgccgcccgtcccctcctcccccatttaggactcccaccgcggtccctcacgtggggactgtcagtgcgggtcttggagcatggcggtaatcagagtaactcggcctgtggtccggagccgccagagggcgagatggggagctgattggaagaggattaacttcccgccttcttcacccaactcaaacagaccctcaaaccctattcaggcacctcccccaaacccattaggttctcttccgccctagccggaagtcacggtacccctaacaaagatggcggcaaattgaatttgcaaagctttctagtttctccgaggaggtaaagagaaccaagaagccggattgaagatgatgactgcgccaaggcgttgcctagccaccatcctgt

SEQ ID NO: 56496 - DNA, 107 bp, Homo sapiens
  chr19:50316961-50317068
  hyper
cggcacgtcgaagtccgagcaccctccttggggcgaaatcgagaaaaacaccatctcccctacaaccttcgagggtggttgagtccagcgatcgttgcctagtaacc

SEQ ID NO: 56497 - DNA, 30 bp, Homo sapiens; identical to SEQ ID NO: 12525
  chr19:50321445-50321475
  hyper

SEQ ID NO: 56498 - DNA, 214 bp, Homo sapiens
  chr19:50380585-50380799
  hyper
ttaggccatgccctcgagcaaaatggtacctccttggcttcaattccagtatacaatatggagaaggaagtgggcgtttcaaggcgtgcttgccccaggtggtgcagctctcagaccctcccacttgtttacttcgtggcgagagggcgaacactgcgcctgcgcactctccgtagccggatccaccttcagcgtctgcgccacgtgactccga

SEQ ID NO: 56499 - DNA, 62 bp, Homo sapiens
  chr19:50393345-50393407
  hyper
gcccgtgcaatgccgccacgtcgtcgagcgccaagcgcaacgcctcttcccggctcaagccg

SEQ ID NO: 56500 - DNA, 40 bp, Homo sapiens; identical to SEQ ID NO: 12527
  chr19:50393536-50393576
  hyper

SEQ ID NO: 56501 - DNA, 46 bp, Homo sapiens; identical to SEQ ID NO: 12528
  chr19:50393796-50393842
  hyper

SEQ ID NO: 56502 - DNA, 31 bp, Homo sapiens; identical to SEQ ID NO: 12529
  chr19:50401022-50401053
  hyper

SEQ ID NO: 56503 - DNA, 30 bp, Homo sapiens
  chr19:50529273-50529303
  hyper
cgcgcacaggaagtcgctgcgaggaggcgc

SEQ ID NO: 56504 - DNA, 604 bp, Homo sapiens
  chr19:50553868-50554472
  hyper
gcccctattcctctcggtggcctaaatccccaactgctcggggccacttttcaggccaaaatgggcccaaaatggggagggcaagtgatgaatgtcactagacagtggggccctcaaggacctggcaaatgggggcttggacctcggatcggcctcccacgcgaagcttgctccccaccagcatccccacgttggtggcgacgctgccccggccccacggatacttccgcgcctgtcagactccctgatgaactacccttcccagagtaccgcgggagctcgggctcctgagggcgacggtcctctgatggcagatgcgggagaaactctggcgtcaggcggccctcgcgtggagcacacgaagtcgtggcttattctggcttcagtatgtggggtggagaaggcgatccacgcagctgcgtctatttcctgtggatcaatcgcaaaatacgttctgtaagccccgcccccactgcgtgcgggcggcttttgtctccacggcaaccgtcaactctggaaacgcctgtctttctccatggcaactgtctacgccgcaggctggagctgcccattaccggagcccgtaagcagtatgggtgctgga

SEQ ID NO: 56505 - DNA, 67 bp, Homo sapiens
  chr19:50651180-50651247
  hyper
gtcccacgctccgccggactcctggcaaacagcagacgcccaattcctgcgcgccgagtcgtctgag

SEQ ID NO: 56506 - DNA, 116 bp, Homo sapiens
  chr19:50651307-50651423
  hyper
cgccctccccactcccaaccagacccaacttgggcccgcccccggagcttctgctagcctgtctggcccggcctgcacccacctgctccggtcgggtccgcgagttccgtgcgtcc

SEQ ID NO: 56507 - DNA, 30 bp, Homo sapiens
  chr19:50706859-50706889
  hyper
cggggctgtcctggcggacacgcccctctt

SEQ ID NO: 56508 - DNA, 381 bp, Homo sapiens
  chr19:50708475-50708856
  hyper
gcggggtttgaatcccgggaatcctcagccttctccgcggcgggccctcgacctttgccctccataagggggaggagcccctggcgccgccgccgccgccgcccacctggcaacaggctcaacccccgccttcccccggcccccgtcagaggccctgaagctccaggcccgccccgttcccagccgggcaggtgctgggtgacatcagagccgggctcccgccctgtgacgcgacggggccccgccctgcgctggaccgcggaggtcgctgcacctgaagagaacggggattcccgcgccctcaccccatctccccgctccggtcggcgcccccaggtagccccgaggatctgcgagttgagggggcggcgacacaggcgc

SEQ ID NO: 56509 - DNA, 894 bp, Homo sapiens
  chr19:50815573-50816467
  hyper
tgtgtgttggggagggtgagccgcggagctcaggaagaccccccgccattcattcctccccaatcgccccgccccctggcccgtgtccgtgcgttcccggagcgcaggaggggtgcgacatgcgtgtggggggcgcgtcatgcagcgcatgcgtgtaggtgcaggcaccctggcggccggggggaaaagggggagccggacttggaaagagtccctttagctcgctctctccctccccgaatcccacactattgacttgggggatggggtgggaggggaggagaatcacgttttgtagaagtttatcatgattgtggttattttgaaaagctgaactcaaaagctgggtacgtgtggcggactggcgagcagggggagacgttgggaagaggtcagtaccctttggaaaagaccctcaccccctttccccgcctccttcggctttcgtgaaggtcaggggaaacgggggggcttgttaaagaagttgaaccctttggcaatataatcagtccccaccccgtaccctggtgtctggagcccctagccctttgccccgcccccaccaaaacccgccccacccctcacccctgcttcaccagggtttagggtccgagggaaggatgggggggactcaaaatgccccttgcataggaatcgttgcatcgagaatcgtgctcagtgacgccccccatccaccctcgggtggggggttcctgaggccgtgggagcagagggagggaggtggctaattccgtgggaccccggctccaaaaggggggtccgctaaagagtctgggaccggtgtggtctctgggcttgggggaggtagcgcatccttgagccaggataggaggtgggaaatgattttccacccgcgagcgtgacgcggtgagg

SEQ ID NO: 56510 - DNA, 30 bp, Homo sapiens
  chr19:50817681-50817711
  hyper
cctgcccctcaaacccgcgcatgcggcccc

SEQ ID NO: 56511 - DNA, 30 bp, Homo sapiens
  chr19:50817942-50817972
  hyper
tgggggtgaggggcccgggggtgtctgctg

SEQ ID NO: 56512 - DNA, 30 bp, Homo sapiens
  chr19:50818197-50818227
  hyper
caccccgctcaggcccgcgatgctgctgag

SEQ ID NO: 56513 - DNA, 30 bp, Homo sapiens
  chr19:50818505-50818535
  hyper
ggagtcagtcaacatcgatgagaaaggggg

SEQ ID NO: 56514 - DNA, 68 bp, Homo sapiens
  chr19:50819425-50819493
  hyper
tggggggatggagaaacgccgccgggatcatttcctcctctctggtgttttccgcgggaggggagcag

SEQ ID NO: 56515 - DNA, 206 bp, Homo sapiens
  chr19:50828890-50829096
  hyper
aggccttcgcagagcgcatgcctagttccccgccccctccgagccgggcgcgcggcgctagctgcggcaccgcagtgggggcgggccagccgggccggggggcggggcgcacggcggccagtaccgcggacagctcccccgccgcagtgcgcagccgcagcggctaggggccgtcttaaccccttccgggccggagcctattcaac

SEQ ID NO: 56516 - DNA, 445 bp, Homo sapiens
  chr19:50831654-50832099
  hyper
ccgcctcgtcgtccaggcctccgtcgtgggcgcctgcggcgttggcggcgttggcggcgcccgcggggtcgggcgcctcgaaggagtcgagcgcctcctcagcgtcgcgatgctgccggtaggtcatccagcagcaggcctccacgtcggtctcgtcgatgccccagaagccgagctcctcctcaaacaggggcccgcacacgtcggctgggcagtgcagcttgccggtgcggtagtagttgagcacgtacgcgaagactcccgggtgccggtcaaagaagaactcgtcggcgcccgggtcgtagtcgaagcgtgccgccgcctcgggctccgtcaggccggccagccgcgtccccggcagggtgcgcagcgtcgagcggtacgtctcatggcgcacgccgcccacgttgatcacgatcttgccgctgtcgccaccgccgccgcc

SEQ ID NO: 56517 - DNA, 339 bp, Homo sapiens
  chr19:50832537-50832876
  hyper
ggacgagtcggggccgccaatgagacggagcgattggctctttctaagagagcagggaggaggggcggggcggggcgtcaagggaggcgggaccggttactactaattgtgttcggcagcactggtagccaggggaaggcggggctagatacgatagagagagaccttactgaactgaaaaaagtgcgggcggggtagagggaggaggggacacatccaagctatttaaagacgcccgactggcctggaggggcggggccaccatgagagaggccgtcctgattgggctgagaaaggggcggagagaaacaaaacagatcgcacgccctcacctaaaac

SEQ ID NO: 56518 - DNA, 344 bp, Homo sapiens
  chr19:50833792-50834136
  hyper
aggtcacagggtctcaaagggcgaggcgagaacttctaacgaacgctacaccgcggcggactgcagattggaggaccgagggtagatgaggactggtgaggagggggcacgcaaggaggcagagaggacgggagaggggagaggccaaagcgccaggaagcaccgtcaagactgaggcaatataggcaggaccgataaaaaatggggtgggctaggagtctcagaggtcgggttctggggaagaatggagtgaggggcggggccagaaaaaggggaccgcctcggagcgggccgtccccgccccctgggcggtcgtaggctccgagaggcagagcgcaggctca

SEQ ID NO: 56519 - DNA, 1401 bp, Homo sapiens; identical to SEQ ID NO: 12536
  chr19:50836198-50837599
  hyper

SEQ ID NO: 56520 - DNA, 31 bp, Homo sapiens; identical to SEQ ID NO: 12537
  chr19:50860731-50860762
  hyper

SEQ ID NO: 56521 - DNA, 241 bp, Homo sapiens; identical to SEQ ID NO: 12538
  chr19:50871937-50872178
  hyper

SEQ ID NO: 56522 - DNA, 31 bp, Homo sapiens; identical to SEQ ID NO: 12539
  chr19:51052519-51052550
  hyper

SEQ ID NO: 56523 - DNA, 30 bp, Homo sapiens
  chr19:51055346-51055376
  hyper
gggggtggttgggccgtgccaagccggagc

SEQ ID NO: 56524 - DNA, 30 bp, Homo sapiens
  chr19:51071279-51071309
  hyper
tggggtgcaaggcccgctgcggggaggcgc

SEQ ID NO: 56525 - DNA, 13 bp, Homo sapiens
  chr19:51142565-51142578
  hyper
ttcccggcaggtc

SEQ ID NO: 56526 - DNA, 170 bp, Homo sapiens
  chr19:51142587-51142757
  hyper
cgctgctgcggcttcatagacccggcgctgcaggatctgctgggagttgaagtccttaatgcctccgggctgcagagaggatgggattttttttttttttttaaggttttggggggttaagatgctggggtcccaagacgcttcaggggaggggaacgatgtccgggact

SEQ ID NO: 56527 - DNA, 388 bp, Homo sapiens
  chr19:51142834-51143222
  hyper
cgaggggtgggatacacccaggtgtttcgggacccccttccagggccacgtgcccctcccccggggtggccagagagcgctgcagcgctcccactccccggcccgagatccacgcgcctctgcatctaccccgcccccatgcgccggggccgaccccagggatttgactggggctggggctgtggcaggaggagggggaggagcggactcacccggagccgccgctgccgccgctgccgccgccgccgccgccgcagccccgcgcgccagccgcggtgccggctcggctcctcccctcgccactgtcgcaggtccgcggctcctccccctgcaccccctccttcccccactccgaacccgcggcaagaaagccgaaatcacttggcct

SEQ ID NO: 56528 - DNA, 30 bp, Homo sapiens
  chr19:51161467-51161497
  hyper
agagcgctgagggacgtggccaagagtgaa

SEQ ID NO: 56529 - DNA, 351 bp, Homo sapiens; identical to SEQ ID NO: 12543
  chr19:51161902-51162253
  hyper

SEQ ID NO: 56530 - DNA, 394 bp, Homo sapiens
  chr19:51162427-51162821
  hyper
gcaccgccccgcgggctggggccacccacccggagccccggaggacagggggcgttgccttcccaggaaggaggcggggccggctcgagggggtggatactgtgagtttaattataaagaatgacctggtacaaaagccatttctctctgcaaaatcttggtggggagtcaggggaagggaggtgatggggggtaggaatgaacccccatgttataatcccgcgtccctaatcttcctccagtccctgtacgtggacgcctgggtcccaatcccttgagggatgaactgaagcccgcgaaagggaagacctgggcaccggggctttcagcgcgtgccgagccctgtctcagcgagaatcagacgtcctcatccgcccccctcctcttcccctcc

SEQ ID NO: 56531 - DNA, 33 bp, Homo sapiens
  chr19:51198090-51198123
  hyper
ggagggtcgccaccgcgggccggggcctgccgg

SEQ ID NO: 56532 - DNA, 144 bp, Homo sapiens
  chr19:51198175-51198319
  hyper
cgctgcgccgccggggccccagggctggccagctggaggacagcgcggggggcggctgcggcagggagctcccaccggggccgcccccgagacccccgccgccgaccgcagacaaagccatcgccgccgcggccccagccccgg

SEQ ID NO: 56533 - DNA, 30 bp, Homo sapiens
  chr19:51198547-51198577
  hyper
gtagcgcgaggaccgcggacggcgccggct

SEQ ID NO: 56534 - DNA, 45 bp, Homo sapiens
  chr19:51198873-51198918
  hyper
gccgcgtgcacggacgcgcggacggagccccgcttccccggcagg

SEQ ID NO: 56535 - DNA, 32 bp, Homo sapiens
  chr19:51221588-51221620
  hyper
cgcacagcccacctcgcgatctggggcccgca

SEQ ID NO: 56536 - DNA, 628 bp, Homo sapiens; identical to SEQ ID NO: 12546
  chr19:51227640-51228268
  hyper

SEQ ID NO: 56537 - DNA, 270 bp, Homo sapiens; identical to SEQ ID NO: 12547
  chr19:51228368-51228638
  hyper

SEQ ID NO: 56538 - DNA, 201 bp, Homo sapiens; identical to SEQ ID NO: 12548
  chr19:51228702-51228903
  hyper

SEQ ID NO: 56539 - DNA, 30 bp, Homo sapiens
  chr19:51307935-51307965
  hyper
gcgtccaatacacacgcctgtttgggaaac

SEQ ID NO: 56540 - DNA, 217 bp, Homo sapiens; identical to SEQ ID NO: 12549
  chr19:51324263-51324480
  hyper

SEQ ID NO: 56541 - DNA, 325 bp, Homo sapiens
  chr19:51412502-51412827
  hyper
ctcacttctggaaacagtgtgcggctgacagcacccactgcggatgcaccaggacgcccgagcagaacaattcgttttccatgaccagtgccgcctgccagggctgcgagtgcgggctgcagtcctcgccgtttatgatttggctgcagctaccagagacgagcgatcctgagggcggagtcagggatgggatcgggaccaggaggcgggcccagggttcctgggggtgggcttaccgagcaggggcgtggtcagaggttcaggagcagtcagggctcctcggggcggagtcagggctgggaacgggctcaggaggcgggcccag

SEQ ID NO: 56542 - DNA, 30 bp, Homo sapiens; identical to SEQ ID NO: 12551
  chr19:51415666-51415696
  hyper

SEQ ID NO: 56543 - DNA, 361 bp, Homo sapiens; identical to SEQ ID NO: 12552
  chr19:51415994-51416355
  hyper

SEQ ID NO: 56544 - DNA, 304 bp, Homo sapiens
  chr19:51520244-51520548
  hyper
aggacaccggggaccgcacctccagctgtgggagttccgagagaccccgccctgcccgctcctccctggaggccgcctccacagccccccgtggcgtcctcggggatggatctcctcctacttgtttccgcagtgcgcggccgtcagcacccaactctggtccaccaggacacccgcgcagtggaacgagaggccgttgaagagcgagacctgccagggctgcgagccgcgcgcgcacggggagccataggcttcggggtccaagcgcgtgtcgttttgggggagcagcgccgcctctgcggct

SEQ ID NO: 56545 - DNA, 1278 bp, Homo sapiens
  chr19:51521989-51523267
  hyper
tagtgtaaaatggagcggggccgggatggggcggcgtaagaggaggagaaagaacgcggcgaagagtccacggaagagcgaggatccgggtggcagaaatcggacagggcctgagtggggcgggtcacccaggggccgagccagaagaagggcccagctgacttgggggcgggccgtgctccggagcgctgggtgggtgctggggtctcgggggaggagaggtgcgcggggcttggtgacgggaacacattctcctcccgcccgtgcctcccaccggcgcctctccccgccccctgcccccgaccttaccccagagttgcgccatcagcagcggcagcagcttcgccagagcccgggcgccagaggcggcggagaggtggaggtgcggagctctcatggccaggatctgctggggtgtgtgcaggggcgggttaaaacagatgctccgttagagacccccacctcgccgcgctcatccgcccagcctgggccaccccagcccgcaagcacccttttgacctgcagccgataaccccaggggctggcagacgggagattcgggctggaacagcggtaatgggcacaattaccctaatgacgcccctcgcggcatcttcccgtcctccctgtgcccgagtggagcgctctccgcgccccagctaccctggctgcagccacgccgcgcccgaggtttccccctccttcacgcgcggggtggggatccgaggctcggagccagtgggagcctctttctcaacctcacagcggggggacttccgcgtcccgcaggtggagaaaccgaggctctaagccggctcctgcctgtggcccgggggtccccacccatcctctcgcaatccaccccaacccgggtggggtgcaggtagcttcacctgggagtcgccgataggaaggagggaggggacccagacgtgcctctgccctgcctgtggtctgccgctggtatcctctgcccagggacccctggcgggaccttcccttttaaccccaaggagtccggaagcttctccaccctcccctacccccacccccgggctccctccctttccctctgtctaattgtaccgtgggtgaggctggcactcctgggtcccagattcctgctctgggaggggccctggaatacaggcttctcccagtgcccgaaacgcccccttttcatcccttttggaactggcttccgtggggattctccgggtcccggtgccaagaaggcttcccaggcgcggggagagggttcacgtccccagcaaggct

SEQ ID NO: 56546 - DNA, 118 bp, Homo sapiens; identical to SEQ ID NO: 12555
  chr19:51527587-51527705
  hyper

SEQ ID NO: 56547 - DNA, 545 bp, Homo sapiens
  chr19:51568029-51568574
  hyper
cgggaggggctgctgcgagggtattttgggaggtgaagggtctggggtcggagggccaacctcagccgggaaaccaggtcacccagggacaagcaggaagagctctgagctgtccccactggacccggccccgagtgggcggggggcggagctcgcggctcccacgccccctccccctccggcctgacccctcctaccattgtcccgaatggccgccgcgcctccacccccgcgcattcttacctcctgacaaggccaaggtcagggaggcgatcactagggccaggggccacatggctccgggatcgggaggggagggcagggcgggcggggcctgaggagaaggtgaagggggtgttgagggcgtgcccggaacctccgcgtctgaaacctctctgctcctgaatgtctcctcgcctcattcactcttgacagccctgaccctggaatctgccccccgcctccaattccatccttggtgggggtgcagtggcgaggtgggaggaacagtgtgcaacctcctggggctccggcgtgcagcccct

SEQ ID NO: 56548 - DNA, 31 bp, Homo sapiens; identical to SEQ ID NO: 12557
  chr19:51815072-51815103
  hyper

SEQ ID NO: 56549 - DNA, 204 bp, Homo sapiens; identical to SEQ ID NO: 12558
  chr19:51830798-51831002
  hyper

SEQ ID NO: 56550 - DNA, 5 bp, Homo sapiens
  chr19:51831120-51831125
  hyper
cgcct

SEQ ID NO: 56551 - DNA, 217 bp, Homo sapiens; identical to SEQ ID NO: 12560
  chr19:51842631-51842848
  hyper

SEQ ID NO: 56552 - DNA, 30 bp, Homo sapiens
  chr19:51843586-51843616
  hyper
agggtcacctgggacgccgctaggactccc

SEQ ID NO: 56553 - DNA, 30 bp, Homo sapiens
  chr19:51869338-51869368
  hyper
gaccccggagggatcggatgttagaacttc

SEQ ID NO: 56554 - DNA, 339 bp, Homo sapiens; identical to SEQ ID NO: 12561
  chr19:51869655-51869994
  hyper

SEQ ID NO: 56555 - DNA, 30 bp, Homo sapiens
  chr19:51871218-51871248
  hyper
catgcccaccacgccgacacccaccgccag

SEQ ID NO: 56556 - DNA, 30 bp, Homo sapiens
  chr19:51897776-51897806
  hyper
ctccctctggttggcgagcgcctttctgcg

SEQ ID NO: 56557 - DNA, 261 bp, Homo sapiens
  chr19:51925113-51925374
  hyper
gggcgcaggtgcggcgtgaggaccgcgtcctgaggagggaggggcgagggccagggtcctggagaggatggagagcccacgagtggctgcagctgagaccccgagggagcccaggaggttttgtcggaagaagggcgatctggaccttccctgaccagcgtctttgtgtcctttgagctccggacctggtcctgggttcctcccacctcgggctgtgctgcagttcaggacgccgcccccagggggcgctccaccttcaga

SEQ ID NO: 56558 - DNA, 30 bp, Homo sapiens
  chr19:52056549-52056579
  hyper
aggctggtggctctcgctgcacatccagac

SEQ ID NO: 56559 - DNA, 480 bp, Homo sapiens
  chr19:52074271-52074751
  hyper
ttccatttgtccttggctgtacggaataaaagccctttgacgatggcggcctccaatatcataatccgtatgggtgcggccatgccgtcctccctaccaagtttctgaagttgaatgaaccgcggaataaaggtacgccgttatacgccatgataactgttggcggagcgtagcttcaaaagtgttagtgggcatgcgcgcggttcaacagcgcctacggaaatcctaacgggaatgtaacccaaaccggaagtggcctagagcgaccatttagcttctgttgttaagtggatctaagcctatgtcgcttactggacgctgaagtgattgggaatattagcagtgggggttctgtagggtcaggaaggggcggctggctttgggggagtgatgaggggcttgttgggggtgggggtgcgtgataaagggatttctcggctgaagacgaggctgtgaggtgagtgacgggcttgttttggc

SEQ ID NO: 56560 - DNA, 646 bp, Homo sapiens
  chr19:52097284-52097930
  hyper
cccgagagttgcgcacgcgtggagatctgcaaaacgctccctttcagctccgcgcatgcacagagaccccaccccgcaagtccttgcccttcggcctgggcaggcgtccactcccatggctgcagggcgcgccgaagagcccactctgcatccccgagacgcggcccaatcctaggaatgtgcttagcgcaggtgctatcttcccttttcacattcccaatctctttctccgccccctcaaactcttgccatactcccacaacagcagaaaatctgaaaaaaaagtccatcccatctttgcactgacagcagtgcacagcagctggcagagaattctggcacggctattgtgcttgcgcaggcgcagacgggaagcgggccggaccggcctagtacactctgggaggcgtgcgcagaatgcgcagcgctgccgcgaggatctctgggaactgtaggcccagtttgtccgagagccgcaagtgtttcgggacgacgcaacgcaggggcacctgggagtcgtaggcggatgggcccaaagccttccgggagtcgtagtccttccgcccgctcctcgtttctttggaggttggcccttccagctccagttctgcccaggtgagcgcccatcccgcggccggccggtcct

SEQ ID NO: 56561 - DNA, 31 bp, Homo sapiens; identical to SEQ ID NO: 12565
  chr19:52160024-52160055
  hyper

SEQ ID NO: 56562 - DNA, 30 bp, Homo sapiens
  chr19:52193761-52193791
  hyper
aggggttaagggggcgggaccagctagttg

SEQ ID NO: 56563 - DNA, 687 bp, Homo sapiens
  chr19:52207057-52207744
  hyper
aaaaaaatacataaataaaagcagtttctaggggtaggttatgcgtaagggtttaaggagtgaggggaaggggtgcgtttagggcaggggagcgagaaggctcgggggcgggctcaaggctcagggccaggactccagggggcgtggtctggctcggggggcggggcttgtaggttactcagtggcaagccggagttgaggcgtttaaacccgcgtgtcccgcagctccggactcaggacttgtcctatttccgagatatgccgcgggccgaaggatacctggcgcggatccggccggctcagctcacgcaccgcgggacgttctcctgcgtgatcaagcaagaccagcgccccctggcccggctctacttctttcttaacggtggggcggggcgcggccgcgtgagtgagcggggtcgggagaggggtggggctcgtgcctggctgacgtgcgcgcccccgcagtgacgggcccgcccccgcgggcggagacagagttgcaggcctcgttccgggaagtgctgcgctgggcgccgcgggatgccgagctgatcgagccctggaggcccagcctgggcgagctgctggccaggcccgaggctctgacgcccagcaatctgttcctgcttgcagtcctcggggccctcgcatcagcgagtgcgacagtgttggcgtggtgagttctgg

SEQ ID NO: 56564 - DNA, 300 bp, Homo sapiens
  chr19:52222620-52222920
  hyper
ggcgcccaccgcgcccgccgccgcgggttcccagggctggtggtagttgccgtcccacacgtacgtggcggggtcctcgtcagcgaagacctcgcggaacatgtcgaccatgtagaggtcctcggcgcggttgccatccaccaccatgaggacgcgcagccgcgcgcgcgggtacagcagggcgcgggcggacgccaggcactggcgcaggtacgcggggtcctcctggtaggcggagatggtcagcgccacactgcgcgcggtggctgcatccagcggcccccgcgccgccgccgccac

SEQ ID NO: 56565 - DNA, 101 bp, Homo sapiens
  chr19:52489608-52489709
  hyper
tactcatccgaaccacggaccagacactctacagcgatggacatcctcccagactccaacatcactgagttccaaattaaatcctgaacccgaagcagacg

SEQ ID NO: 56566 - DNA, 64 bp, Homo sapiens
  chr19:52489782-52489846
  hyper
cgttgatcactacagacccttagtcactgtactcacaccaaaggcacgcggaccacagacaggg

SEQ ID NO: 56567 - DNA, 162 bp, Homo sapiens
  chr19:52490053-52490215
  hyper
tcaacgttacacttccgtaaactgctcctacttctggagtcctcgcacgggtttatggtccacctacggcggccgaggagaacctaaaatgtttaaaagagcaaggacaagcgcatttacggcatttcctactctgtaaaatggccgcgcccatagccgtgg

SEQ ID NO: 56568 - DNA, 249 bp, Homo sapiens
  chr19:52511393-52511642
  hyper
ttcccagaacttggtgggctccggcctcatctctcggcctcctcagtgcctgacggcgactatccagggtcggaggcgttcccagcgtttgcgcagatgcaagatggccgcgccctcgtcgccttggctccatgggggccgccatctttgagtatctgacgtacacaaggcaaagggcgcgttttggcgctggtgaccgggggtgaccgggggtgaccggggatggccgggaagatgaaagagcactga

SEQ ID NO: 56569 - DNA, 822 bp, Homo sapiens
  chr19:52531284-52532106
  hyper
taaagggtgactcacaagggccccagacccagacagagtcggactcgtcgctgatttcctcagactcttcatccctacagccaaaggacccgtcattaacgccccgcttcctcagcgactgcgttcaaatacagccccaatcaggacgctccacgcaccatcggtacacagacccacaggccgcgagtccatgcccagaactcgactcacccgagcccgaacctctccagacaccactggcagcgacaaaacgccgcatccacgtccgaaaacgcttcctattcagacgcgctcctgcgcggactccgggaagctgagcggtaaagaccgtgaagcgaggcgaggaccacggagcctgcccgggatcgcgagttcagactgcgggcgccgctctatgaggtcacagggctgcgcccatcgcagcgtttctgacaggagcggccataatggctgtgggaatcactcttagtcacctcagtgcctttctctcttcgttgcaagggacactcaagagtcgggtgcccagccaaggccaacacggcgcagtggcattctattcagcctgctgtggaaaaaagatggcggcgccctttgtgcccattatagctgagagtggagccttagctggagcaccatgggcacggccatcttagaggaaggcagcagccgtacggcagagaagatgctcatatccaggacaatttggaaaaataaacaaggtttgaagaagtcacggtgctggccaggaagcggtcacagagttgccaaaaccagtggtcactgaaagtgttagatttggggatagggcgggggttctgggct

SEQ ID NO: 56570 - DNA, 309 bp, Homo sapiens
  chr19:52551810-52552119
  hyper
tcccctccaaaaggaaacacccgcccccgcctcccccaacccccgcgctacctccaccatatagcgccaccaacaacgcagacgccctcagaaagctccctcccaccacgtttccacgccctgacccacacactgacctgactctccttggaatcgccgcgacctcttaaaagctgaacttacttccctaaacttcttccacttctgggcccctcgcccaactccctccccctctaaacctccagagacggtcagccgcgtttccatggagagcggaatgcggccttccggcttttcctcaggaggaga

SEQ ID NO: 56571 - DNA, 486 bp, Homo sapiens
  chr19:52552233-52552719
  hyper
gatttccagacacctcagccctggcagaaaatggagagcttatcagaggcttgagttcacacaggcagacacggcgtgggggtaaagtcctctgaacagacacggaacagaaataagttagtcttctcctcgcaggggacagtgaacggcgcaaacttctcaaaggccagaacccattattaccacaaaggcgcggcatcccttcttagcggttatgatggctgtgacgtctcagctcaatggaaaattaaagtcacctctgggcacctcagtcactattgtaaatgcgaagcgttttagaagccgtataaaaactgaagcaagagagactagaacaaaaaataagcgagcggtgcgttgcaggtaacggagccagagcccttaggggagagcatcatgggggcggccatcttaggggacgttcggtgtccgtacggcagaacatattctctctgagaagcttgcggtggaactggcccatggaaa

SEQ ID NO: 56572 - DNA, 30 bp, Homo sapiens
  chr19:52598638-52598668
  hyper
gggatcgcgaagggcgctagtccacatccc

SEQ ID NO: 56573 - DNA, 30 bp, Homo sapiens
  chr19:52598984-52599014
  hyper
tggcctttccccagcgcgatctgcttccgg

SEQ ID NO: 56574 - DNA, 31 bp, Homo sapiens; identical to SEQ ID NO: 12570
  chr19:52643470-52643501
  hyper

SEQ ID NO: 56575 - DNA, 36 bp, Homo sapiens
  chr19:52674676-52674712
  hyper
gttcgattcaggcagacggggcgaagcaaatgttta

SEQ ID NO: 56576 - DNA, 30 bp, Homo sapiens
  chr19:52693144-52693174
  hyper
aaatcggaagtgggcgggacttcacaagtc

SEQ ID NO: 56577 - DNA, 161 bp, Homo sapiens; identical to SEQ ID NO: 12571
  chr19:52715131-52715292
  hyper

SEQ ID NO: 56578 - DNA, 175 bp, Homo sapiens
  chr19:52800145-52800320
  hyper
ttcctggatctaatcattagccgactttgctcagtcccggcaagagtacagttccgagacagctgagttgctccagtctccttgacaggtctccccggcaaaacccggaaaacagaggcactggaagcgaggcggagggaagcgcaagccccactccgccccgcccccgcccccg

SEQ ID NO: 56579 - DNA, 35 bp, Homo sapiens
  chr19:52800379-52800414
  hyper
gcccccgcccccgccccgctcggacccctccgctg

SEQ ID NO: 56580 - DNA, 334 bp, Homo sapiens
  chr19:52839383-52839717
  hyper
agcctcactgccagcaaaacccggaaaacagaggcactggaggcgtggcctagggaagccccgccccgtcccgtcccggtccgctctctatgctgcgcgcgcgcagttttttgcagacccggaagcggatcgcgtgggtagaaggtcacaccgcagcgcgtcagtttccctttgtttagattcaatctgggcttcccagctcccccgcgcttctgtacccgggatctgagagtcaacacagaccttgaaatccccgcaccgctccctccaccccgtgtaaattcaggcgtctccgtgagagtccggcgctcgcttccctgtgtgttaaaatcgc

SEQ ID NO: 56581 - DNA, 340 bp, Homo sapiens
  chr19:52839741-52840081
  hyper
cgttctgccttgggccaggtaaacacggattttcgagactcctttccgcttaaaactctttactgacccaacgtcctgccccgcgcttttaaaagtccttaccgcaaggtggattcccgcccggggagcctcccaacctcgcccccggcccctgaagcgcagcgccgcagccccagtcccggcgggggaggccgcgtcctgtactgggtcctgggacccttgagaccccacacttctaataattcagccccacccttttcctccttgatccgggccttcctactccccaggcctccccttcgcagccatcgctactcccgacccccgggtgtggggacgt

SEQ ID NO: 56582 - DNA, 609 bp, Homo sapiens; identical to SEQ ID NO: 12575
  chr19:52872924-52873533
  hyper

SEQ ID NO: 56583 - DNA, 22 bp, Homo sapiens
  chr19:52873570-52873592
  hyper
cgccctcttttcacaggcctgc

SEQ ID NO: 56584 - DNA, 255 bp, Homo sapiens
  chr19:52900860-52901115
  hyper
cattttaatagaaggaattttcgtggatataatctacaaccgattttgctctgcgcaggtaagatccgttttcagaccaaaaccctgaaaacaagcgcagccagtcaagcgaacggaagcgcaggcccggcccaggctttgtcccggcccgccctggtcccagccagtccggcctctaggatgcgcgcgcaatttcgtgcaaacccggaagcggaccgcggggggcgaacgcctagagcgcagtttccggtagac

SEQ ID NO: 56585 - DNA, 185 bp, Homo sapiens
  chr19:52901156-52901341
  hyper
cgtgagtttccctttgtctatgttaagtctaggctagccagttcttctctgcttctatacccgggagctgaggggcatgcagaccttgaaatcccggcaccgctccctccaccccgagtaaattcagacatcctttgagagtctgggagtcgctttctgcgtgttaaaatcgcttggaggctggt

SEQ ID NO: 56586 - DNA, 133 bp, Homo sapiens
  chr19:52956714-52956847
  hyper
cttctctcgggtctcgcccatccctggcctcagctgcgcgcggtttcctggaaacccggaagtgaatcatggggcgtgaactcgcaagcgcagtttcctgaagacccggaagccgatcgcgtggggagccggt

SEQ ID NO: 56587 - DNA, 30 bp, Homo sapiens
  chr19:53030695-53030725
  hyper
actttctggcgctctcgcctccacaaccta

SEQ ID NO: 56588 - DNA, 492 bp, Homo sapiens
  chr19:53030933-53031425
  hyper
gatcgggtggagtgaaggtcacgtcgccatggtgagttttgctctgtgttgcattaagtctccgcttcccaggtccccgccgcttctgtccctgggacgtggggtccccacagacctggaaattctcgcccgtcttccttcgcccagagcaaattgagacagcccagtgagaggccgggtgtcgcttcctttcgggtttaaagtcgtctggaggctggtcccgtcccgggtctgtctgctatagggcaatgtatacactttctattgcgtagtttttctgctcaaaaccttcttctgactcttccctcctcgcgctatttaaagtcttcacccacgaggtggattcttgcccggggcgcacctcccagccacccctcgtcggcccctggagcgtcgcgccgcagccccagtcccagggaggccgcgtcctctgcctggtcctgggatcttgcagaccccatccttctcccaaggcgccgtcccccctcctcc

SEQ ID NO: 56589 - DNA, 459 bp, Homo sapiens; identical to SEQ ID NO: 12580
  chr19:53073313-53073772
  hyper

SEQ ID NO: 56590 - DNA, 240 bp, Homo sapiens; identical to SEQ ID NO: 12581
  chr19:53073819-53074059
  hyper

SEQ ID NO: 56591 - DNA, 1006 bp, Homo sapiens
  chr19:53104156-53105162
  hyper
cagggtggactctgcccccaccgccgacccgccctccccgaccccgagtgaatggagaatagaaagggagaggatttctgttctgtcctgtgggccctcagtatgaaatcgtagttctgcccaggcaggactttgcatttcacattctagtttgcatccccgttccagacaattccagggcttttgactcatgcctcagccttcccggccagtctcccttccaaaacccgaaaaacggaggcgctgggctcaagactgactctgtcccgccccggccccgccctctgccggttctaaagggcaaagtctctccgcctcgcgccccgcttccgcctgcccaggccccgcccacctcctcctggaccccgcccaggcctggcttctgtcctgcgcgagcagatcagcgcgaacctggaagcggagagcgtggagtgaaggtcccacggcagcgcgtgagtttctctctgttttatattaagtctgtgcgtcccaggtccccggcgcgtctgtacctgggacgtggggtccccacagacctggaaattctcgcccgtcttcacccagagcaaattgagacttccctttgagagtccggggttcacttccttttgggtttaaaatcgccttgaagctggtgcggtctctggtcttgctgctatagggcaatgtatacactttgtattgggtagttttcctgctcaaaacctttttctaactcctcccgccccgcgctttttaaagtccttacaggtgaggtggattcccgccctgggcgcctcccaccctcgccttcgacggcccctcgagtgcagcgccgtgcccccagtcccgcggaggctgcgtcctctgcctggtcctgagatccttcagaccccaccattgtcttaaggcgccgtcgtcccccacctcccttctcgtgccgggccctgctgctccccaggtctcctctccgccgtcaccgcttcccctgagcccgcgttgggaaggtgtccggggcctgtcctgt

SEQ ID NO: 56592 - DNA, 725 bp, Homo sapiens
  chr19:53140893-53141618
  hyper
ctgtctcccaatgcctttggccgacacaatcacaggagggtttggataagacgcctgcatcccggaggagctcgttttccgggggctggagctgggcaggcaagaacaccccgtgtcacaggacaggccccgggtacctccccaacgcgggttcaggggaagaggtgactgtggaggagagacctgtggagcagcagggcccgccacgaggagggaggtgggggggagacggcgccttaagacaaggttggggtctgcaggattccaggaccaggcaaagtacgcggcctccctgggactggggccctggcgctgcgctccagtggcctacgaaggcgagggtgggaggcgcccagggcgggaatccagctctcgggtgaggactttaaaaagcgaggggcgggaggagtcagaaaacagttttgagcaggaaaactacgcgacaggaagtgtatacatcgccctacagcagaaagaccggggacagcccagcctcagggcgactttaaacccaaaaggaagcgatatccggactctcatggggacgtctcaatttgtcctgggtgaaggaagaagggagagaatttccaggtctgtggggaccccacgtctcaggtacagcagcgccggggacctggtaagcgcagacttaatagaagagcgaaactcaccgccacggtgtaactttcactccacataatccgcttccgggtttgcgcgcatgt

SEQ ID NO: 56593 - DNA, 136 bp, Homo sapiens; identical to SEQ ID NO: 12584
  chr19:53141647-53141783
  hyper

SEQ ID NO: 56594 - DNA, 798 bp, Homo sapiens; identical to SEQ ID NO: 12585
  chr19:53193141-53193939
  hyper

SEQ ID NO: 56595 - DNA, 490 bp, Homo sapiens
  chr19:53237840-53238330
  hyper
cccaggacctggcagaggactcggcctccccgggactggggctgcggcgcggcgctcccggggctgaggagggggaggctgggaggcgccctgggcaagaatccacatcgcgggtgaagactttaaaaagcgcggggcgcgaggagtcagaacaaggttttcagcaggaaaactacgcaacagaaagtgtatacattgacctatagcagaaagaccggggacgagaccagcctcaggacgactttaaacccaaaaggaagcgaccctcgggctctcacggggatgtctcaatttgctctgggcaaaggaagacgccggagaatttccaggtctgtggggaccccacgtcccagggacagaagccctgggaacctagttagcgcagacttaatacaacacagagcaaaactcaccgcggcgatatgacctacactccacccgatccgcttccgggtttgcgttaatctgcgcgcgcaggacaaaagccagg

SEQ ID NO: 56596 - DNA, 30 bp, Homo sapiens
  chr19:53289509-53289539
  hyper
ggcaccaggagggacgtggtgggcgacggc

SEQ ID NO: 56597 - DNA, 35 bp, Homo sapiens
  chr19:53360912-53360947
  hyper
ggagccaacgaggaggcgagcggggcccgggtgag

SEQ ID NO: 56598 - DNA, 667 bp, Homo sapiens
  chr19:53400383-53401050
  hyper
gctttcttgattgcatatattcgttttccaggagttggaactaggtagcaacaccgcacaaggagggaggtggggagcgacggagccttcggacaggggtggcgtctgcaggatcttaggaccaggcagaggacgcggcctcccgggaaccggggttgaggcgcggcgctcctgaagccgccgagagcgacggtgggaggcgcctagggctggaatccagctcgcgggtgaggacttgaaacagcgcgaggcgggaggacaggtcaggaagggttttgagaaggaaaattccgcgataggaggtgtctgcacgaccccactgcagaaagaccgaggacgggacctgcctcagggccactttaaactcgaagggactcacggactctcacccggacgtctcaatttgctctgggttgagaaagaggggccgcaatttccaggtctgtggggactcaacgtccccggtatagcagcaccacaggactgggaagcacacataaaacagagcgaaactcacgcgctgtggtgtgaccttcagtccctgccatccgcttccgggtctatgccaatcagcgcaggacagaggccaggcctgggcgggacccccgagaaggtaggcggggcctggactaggccgggatgagacgcgaagaggtgggcggggcct

SEQ ID NO: 56599 - DNA, 30 bp, Homo sapiens
  chr19:53426373-53426403
  hyper
acgggaaaactacgcgatacaaactgtata

SEQ ID NO: 56600 - DNA, 30 bp, Homo sapiens
  chr19:53426787-53426817
  hyper
ctgccctgtagaaccggcagacgcggggcg

SEQ ID NO: 56601 - DNA, 697 bp, Homo sapiens
  chr19:53445370-53446067
  hyper
gagaaacggtgattacggagggaagacctggggagcataagggcccggcacgaggagggaggtggggggcgacggcgccttaagacaagactgggaggcgcccagggcgggaatccgcctcgcggtaaggactttaaaaagtgcgggttgggaggagtcagaaaaaagttttgagcaggaaaactacgcgatgggaagtgtatacgttaccctatagcagaaagattcgggacgggaccggtctatggtgactttaaacccaaaaggaagcgacccccagactctcacggggacttctcaatttgctctgggtaaagaaagacggaggagaacttccaggtctatgaggaccccacgtcccaggtacagaagcgcctgggacccgggaagcgcagacttaacacaacacagagcaaaactcacccccgcggtgggaccgtcactccacgcgacccgcttccgggtttgtgcgaatctgctctctggggacagaagccaggcctgggcgggacccgcggggaggtaggcggggcctgagcgaggtaggggcggggcgcgaggcggagagaccttgcccttcagaacagacagagggcggggcgggggcggggccggggcgggacctgtgcgtctctcagcctggctcccagagcctcaatttttcgggttttggaggcgagaccggccaggaaggctg

SEQ ID NO: 56602 - DNA, 157 bp, Homo sapiens
  chr19:53446325-53446482
  hyper
tgcttaaacacagcaggaatgcgggcgcgggggcggaagtctgaggtcccagctgctcaggaagcagcggcgggaggatgctgagcctgggggtccaagccagcctgggcgacaaagtaacaccgcctcccgcagcgctcccttccttgtctctctc

SEQ ID NO: 56603 - DNA, 770 bp, Homo sapiens
  chr19:53465743-53466513
  hyper
ctgcgctccaggggccgactagagcgaggctgggaagcgctcttgcccagggcaagaatccagctccgggtgaggacttgaaacagcgcgaggcgggaggacgcgtcagaaagggttttgctaaggaaagtttcgcgacaggaggtgtctgcacggccccactgcagaaagaccggggacgggaccagcctcagggcaactttaaactcaaaaggaagcgactcacggactctcacccggacgtttcaatttgctctgggttgagaaaagaggggccggaacctgcaggtctgtggggaccccacgtcccctatatagcagcaccagacaactaggaaacgcacacgccgccgtgcaactttcagtccacgccatccgcttccgggtctgtgccaatcggcgcaggacagaagcgggacctgggccagatccccgagaggtgggcggggcctgggcgaggccggggcggggtgcaaaggacaaggggcccggcgcggaagagaagagtcttgggctgggaggagtccgcgggggcgggaaaggggcggggcctgagcttttctccatctcgctctccgcgcctctgttttcaaggttttagaggtgaaacccgccagtgaggctggagcagctcagcagtcagggaaatagtacctccctgagaagtcgccgtgtggcggtaattggatccgggaaagttccttgctattgaaatttattttagcaatttaattccaaagcctggaagttgtctacggcaggaatgcaaa

SEQ ID NO: 56604 - DNA, 30 bp, Homo sapiens
  chr19:53466751-53466781
  hyper
ctcaggaagcaggggcgagaggatcgctga

SEQ ID NO: 56605 - DNA, 361 bp, Homo sapiens
  chr19:53496081-53496442
  hyper
ggagttagggggcgacggctccttaagacaagggtggggtctgcaggatcccaggaccaggcagaggatgcggcctcctcgggacgggggaggcggcgctgcgctccagggaccgacgagggtgagggtgggaggcgcccagggtgggaatccacctctcgggtgaggactttaaaaagcacggggtggagggagtcagaaaatagttacaaacaggaaaactacgagatacgaagtgtatacgttgccctatagcagaaagaccggggacgggtctagcctcagggcgactttaaacccaaaaggaagcgacttctggactctcaccgggacgtcaaattttgctctggggattagccgg

SEQ ID NO: 56606 - DNA, 165 bp, Homo sapiens; identical to SEQ ID NO: 12591
  chr19:53496621-53496786
  hyper

SEQ ID NO: 56607 - DNA, 589 bp, Homo sapiens
  chr19:53496813-53497402
  hyper
cgggacatggcagggggtgggcggggcctgggcgaggtgggggcggggcgcgaggcggagagaccttcccctatagaaccggcagggggcggggcgcgaggcggagagaccttcccctatagaaccggcagggggcggggcgcgaggcggagagaccttcccctatagaaccggcagagggcggggcgggatctgtgagtctctcagcctcggcgtgtttttgggttttggagacgagacctgccaggaaagctgaggcatgattcaaaagccctggaactgtctggaaggggaatgcaaaccagaatgtgaaatgcaaagccctgcctgggcggaacgtattatttcatgctgacgaccacagaacagaatagaaatcctctccctttctattctccactcactcaagagggagagtccaccctgtgtcagcttcagagacttccctagagccaccgcctgggatgcgggatggagtgctcaggccagggaggagtgaggtcaccacctgctggttaaacacagcagagatgcgggcgcacaagggggcgtgggagggcgcggggtgggatcctgagttcccagctac

SEQ ID NO: 56608 - DNA, 556 bp, Homo sapiens
  chr19:53561276-53561832
  hyper
cagcagggcccggcacgaggaggagggaggtggggggcgacggcgccttaggacagggtagggtctgcaggagcctaggaccaggcggaggacgcggtctgcggcgctgcgctccagggccgacgacggagaggctgggaggcgctcaggacgggaatccacctcgcaggtgaggactttaaaaagcgcggggcgggaggaggggtcaggaaagggttttatgcgggaagaagacgcgaatggcaggggacagggactggtctcagagcgagttttacccacatggcgaggtccgtatttacctcgggtgaagggcgcgatgcggggattttaaggtcagcagagcgggtgtggaaaagcgggacggcgaatcgaaggcttaatctacacctaggcacactcttgctcggcggtgtcaccttcacacaccgcgatccgcttccgggactccaagaaactgcacgtgcgcgcagagcccgggtagcctggggcggagcccggggagaggcggggtctgcagagggaccgcgggggcggggcctgtgcagttgtaagg

SEQ ID NO: 56609 - DNA, 636 bp, Homo sapiens
  chr19:53606065-53606701
  hyper
tcacaggacgggccccgggcacctccccaacgagggctcaagggaagcggtgactgcgaaggggaggcctggggagcagcagggcccggcacgaggaggagggaggtggggggcgacggcgccttaggacaggggtgggatgtgcaggatcccaggaccaggcggaggcgcggcctccccgggactgggtcggcggcgctgcgctccaggggccgacgagagcgaggctgggaggcgcccagggcaggcggtgaggactttaagcgatgcggggcgggaggaggagtcagtaaaggattttaagcaggaaaatcctgcttaaacgtttaaaaaaccgggaaaggccgtgtttacttggcccaaggcagaaagaccgggggcagggaccagcctcagggcgactttaacccaaaaggaagcgtctccgggcccacacagcaaggcctatttacctgaggtggagggtgcggtgcggagattttaagtccgtagcgacccccgggcatcgggtgtgcgaatgggggacggcgaggcgcaggttgagtctacacagaggaacactcatacgccatggtgtgatgcttgctccgcacgatccacttccgggtctgtgggcaactgcgcgaaggaaagcga

SEQ ID NO: 56610 - DNA, 310 bp, Homo sapiens
  chr19:53606926-53607236
  hyper
ggaaggcgaagggaccgcgggggagggaggcagagggaccgccaggaagggacccgggggagaggcggggctggacgggacacgttagggtctgcgatttcgtgtgatgcccacagcccagcgcccagagccatctgtagtgtcttgtggaacggcgtagatgtttcaaacggtttcaagttaaaagcacagttgtgtaggttattttggaaaccaaactgctttcctcttagaatggaggcggtttatgttgaaagcattttttgctagcgcgtttacccagtaatgttattgacgctgaagcagccca

SEQ ID NO: 56611 - DNA, 247 bp, Homo sapiens
  chr19:53635516-53635763
  hyper
cggtttggggtaagacgcctgcatcctggaggagcgcattttccacggggtggaggagggcaggcaagaacatcgggtgtcacaggacaggccctgagcacctccccagcgcgggctcaggggaggcctggggagcagcggggcccggcacgaggaggagggaggtggggcgcgacagcgccttcagacaggggtggggtctgcaggatcccaggaccaggcagaggacgcaaggctccccgggact

SEQ ID NO: 56612 - DNA, 466 bp, Homo sapiens; identical to SEQ ID NO: 12597
  chr19:53635784-53636250
  hyper

SEQ ID NO: 56613 - DNA, 457 bp, Homo sapiens
  chr19:53661430-53661887
  hyper
cgggcacctccccagcgcgggctcaggagaagcggggactgcgaaggggaggcctggggagcagcagggcccggcacgaggaggagggaggtggcggggcgacggcgccttagaagaggggtggggtctgcaggatgccaggaccaggcagaggacgcggcctcgccggtaccggggctgaggagctgcgctccaggggccgacgagggcgaggctgggaggcacccagggcgggaatccacctcgcgggcgaggactttaaaaagcccggggcgggaggaggggtcaggaaagggttttaagcgggaggaagacgcgaaaggccggggacagggagaagcctcagagctacttcaacccaaagagaagcgactccgaacccacaccgcgagtcagctggggtggagggcgcggtgcggggatcttaaggtctgtagctgccgggcgcagtggctca

SEQ ID NO: 56614 - DNA, 508 bp, Homo sapiens
  chr19:53662186-53662694
  hyper
tagcgagcccgggaactggctgcggaaacggggcacggcggttcgcaagtttaatccatactgagggacactcacgctcggcggcgtcacccgcacccaacacgatccgcttccggaactgcagaaaactgcgcgtgcgcggaaaagagcccgggcactctgggggcggggcctggggagaggcggggtctgcggacgaaacgctggggcggagctggggcggggtctgcgcttccctcagcctgcctagcccgcagtctcatttttcccggtttagaaacgctggagtgttcactatgtccccgggagcaccgttccaatttgaagcagttttaaggtgaaagaatagacttacgtggaccacttatgatagaaaccaaaatgatttcctcttaccaagttgaaaacggtttatgttaaaattgtttgccggcgggttggacccagtcctgctagggagtctgctgcagctcaggaacggggatctgggaatcggggatctcggtct

SEQ ID NO: 56615 - DNA, 635 bp, Homo sapiens; identical to SEQ ID NO: 12600
  chr19:53696029-53696664
  hyper

SEQ ID NO: 56616 - DNA, 30 bp, Homo sapiens; identical to SEQ ID NO: 12601
  chr19:53700095-53700125
  hyper

SEQ ID NO: 56617 - DNA, 355 bp, Homo sapiens
  chr19:53700348-53700703
  hyper
tctgtagacccggaagcggatcgcggggagtgaaggctgcgccgccgagcctgagtttcgctctctctagattaaatctgcgcttcgcagtcccccttcttccatcccccgggtctggaggggtccctacagatcttaaaatgaccacaccgcgccctccaccccaggtaaattctgacgttgctgtgagaatgcggagatcgctttccctttgggttaaagtcgctctaagcctacttcctgaatctggtctttctgctttgcgctaggtaaacatggcctttcgtgtcttttgctgcctaaaatcctttaccgatttttcttcccgccacgcgggagggcactttttttttta

SEQ ID NO: 56618 - DNA, 400 bp, Homo sapiens
  chr19:53757804-53758204
  hyper
ttttaagcagagaaacgacgcggtgggcggtcggtgtccacactgacctaaagcaaaaaggtcggggccagtacccacttcagaacgattttaatccgaaatggacgcagatctctagaccctctcggagcgacgggactgggaacgtcttagggccacgccgcgagaggaatgagcaggttcggggttttaacctacagggcgaccccaaaacccgacagcggagcgtgggaacctgtggcccgcgaggcgcaggcttgaacccgaaagacggagactcacccgagagcgccagtagccccgcgagatccgcttccgggtcggcaggaacctgcgcgtacgcgagtgcactggggcggcgcaaggggcaagggcaggggcagggcgcggacaactgtgg

SEQ ID NO: 56619 - DNA, 232 bp, Homo sapiens
  chr19:53836985-53837217
  hyper
gcgcgcagattcgcgcaaacccggaagcggatcgcatggagtgatggtcccaccgcagcggtgagttttgctctgtgttgtgttaagtctgcgcttcccaagtccccggcgcttctgtacctgggacgtggggtccccatagacctggaaattctcacccgtgttccttcacctagagcaaatttagacgtcctcgtcagagtccaggggtcgcttccttttgggtttaaag

SEQ ID NO: 56620 - DNA, 253 bp, Homo sapiens
  chr19:53837281-53837534
  hyper
cgtagtttccctgctcaaaacctttttctgactcctcccgacccgcactttttaaagtccttaccgcgaggcggattcccgcccttggcgcctcccagtcttgtcttaaggcgccgtcgccccccacctccctcctcgttccaggcccttatgctccccaggtctccccaccgcagtcaccgcttaccctgagcccgcgttggggaggtgcccggggctgtcctatgacaccgggtgttcttgcctgccctgc

SEQ ID NO: 56621 - DNA, 337 bp, Homo sapiens
  chr19:53868442-53868779
  hyper
tcaggctcccgcgcccgcgtccgcatccttgctgtgtttatccggcaggtggtgacctcactcctcgctggcctgagcactccgtccagcatcccaggcggtggctttagggaagtctctgcagctgagcacagggtggactctccctccggagtgaatggagaatagaaagggagaggatttctattctattctctgggccgtcagcatgacattgtaagttctgcccaagcagggctttgcatttcacattctactttgcatccgcgtttcagacaattccagggcttttgaatcatggatcggccttcctggccatctcgcctccaaaacccaa

SEQ ID NO: 56622 - DNA, 355 bp, Homo sapiens
  chr19:53868994-53869349
  hyper
aaggtccctcagcggcgcgtgagtttcgctccatcttgtatgaagtctgctcttcccaggtccccggcgcttctgtccctgggacgtggggtccctacagacctggaaattctcacccgtcttccttcgcccagagcaaattgagacgtccccgtgagagcccgggggtcacttccttttgggtttaaagtctccctgaggctggtcccgttccggatctttctgctatagggcaatatatacactttctatcgcgtagttttcctgctctaaacctttttctgactcctcccgccccgcgctttttaaagtcctcacccgagaggtgaattcccgccctgggcgcctcccagcc

SEQ ID NO: 56623 - DNA, 178 bp, Homo sapiens
  chr19:53869376-53869554
  hyper
cgtcgcagctccggtcccggggaggccgagttctctgcctgtcctgggatcctacaaaccccacccttgtcttaaggcgccgtcgccccccacgtccctcctcatgccgggccctgctgctccccaggtctcccatccgcagtcacagcttgccctgagcctgcgttaggggaggtgc

SEQ ID NO: 56624 - DNA, 27 bp, Homo sapiens
  chr19:53970396-53970423
  hyper
ggggtgttactttgtcgctcaggctgg

SEQ ID NO: 56625 - DNA, 557 bp, Homo sapiens; identical to SEQ ID NO: 12604
  chr19:53970482-53971039
  hyper

SEQ ID NO: 56626 - DNA, 479 bp, Homo sapiens
  chr19:53971109-53971588
  hyper
cgtggggtccccacaaacctggaaattctcagccgtcttccttcacccagagcaaattgagacgaccccgtgagagtccgggggtcgcttccttttgtgtttaaggtcgccctgaggctggtcccgtcccgggtctttctgctatagggcaatgtatacactttctatcgcgcatttttcctgctctaaacctttctctgactcctcccaccccgcgctttttgaagtcctcacccaaggggtggattctcgcccacttcggccggtggagcgcagaaccgcggccccagtcccgggaaggccgcgtcctctgtctggtcccgggatcctgcagaccccacccttgtcttaaggcgccctcgcgcccccccccccccacctccctcctcctgccgggccctgctgcttcctaggtctcccctccgcagtcacggcttcccctgagcccacgttggggaggtgcccggggcttgtcctgt

SEQ ID NO: 56627 - DNA, 684 bp, Homo sapiens
  chr19:54023877-54024561
  hyper
gcattctgacggccgcgcttccagcgctaaggattcccgcgtagtgagcatttcccagaggtctctggggcatggctccattagggccgtgtgcagttgcctgcagggaaacactgatgggcgcccttccagatacgtcgattcccgggttatgagctacatttcccagaagccctcaaggcaggacgcccttagggtcgcgtagagttgcatgctgggaaatcctgacagccgcttccaactctgtggatttccgggttatggactacatttcccagaggcctctgggtcacggctccatttgcgccgtgtagagttgcatgctgggaaacactgacgggcgcccttccagctgcgtcgaagcttctctggtttcgcattacatttcccagagggccttggggcacagtccaatgaggagcgagccgggtggccggctgaggggcgtgcttcatgctcgcgggatttttaaaaatggtttctcctggatcttatcccaactgcgcctgagaccttgtttcacctcctgatgtgctgggtgtggttaggcctcgagccgggagctatttgcctcccaggaggaagccagggcagggttccgcggggaatggcggtgagggagccactcgggacgcggaggccctaaaatgaagaagcttcggcctgaggcttcgggagcggcga

SEQ ID NO: 56628 - DNA, 323 bp, Homo sapiens
  chr19:54024620-54024943
  hyper
agccagaggctgcctggtggggccccgccgtggcccagtgactgagataattgtcttcgtctgtggggtaatgcgaacaagccccgttcccctaagccgtgatgcatgcggggttgacgcggccgggctctgtccccataaactgtgacacaggtgtgtgtagacgtctatgagggccatagcgccgggctgtaagggcatctgtaggggtgacgcagccgggctgtgtctctgcacctccgttctgtgcgaggtcaatgctggtggggtctgcagaggtggcacggccaggacgggtctccgtgtctctgaaatgtgccttt

SEQ ID NO: 56629 - DNA, 81 bp, Homo sapiens
  chr19:54206967-54207048
  hyper
atttagtgtaatcaatcgaaatcatttccttcattaagagagtaagtagccggggcatggtgcctcatgcctgtaatccca

SEQ ID NO: 56630 - DNA, 30 bp, Homo sapiens
  chr19:54371915-54371945
  hyper
gagcgatgggtgtggcgtctggagtggacg

SEQ ID NO: 56631 - DNA, 229 bp, Homo sapiens
  chr19:54372392-54372621
  hyper
gggcctcgggcctgacgccagcaccgcgtgcagtttccggcctggagcctgagcccctcagaggcccgggtccctgcccactccggtcttagagatgctcttgggggggctctcagcccatgtttatagggatccagaaatgcaggcctccaaccctgagagtcggggtccccaccccccggaaatccgggagagggcgggcagccccggaggcgggcgggggtccggg

SEQ ID NO: 56632 - DNA, 30 bp, Homo sapiens; identical to SEQ ID NO: 12610
  chr19:54373028-54373058
  hyper

SEQ ID NO: 56633 - DNA, 505 bp, Homo sapiens
  chr19:54382456-54382961
  hyper
tttcggggccatccccgccgcctatccttcgccctaggtcacctggaggtggctggaaggccagtggactccacatttagggagagtggttacaagaggactcggattcccccaccttcccttcggctttgggaatcccaggaaacccgccccgaacccctgaaaagtcccagagaaggtaagctgggcgtccagagtccctcccaggcgccgccgcagcgtcccgcccagcctcgcggggcacgccgggaggcggagttctcggtcgtgtcccgagagtggctggtccgcaggctcggactaccagtcccagaatgcactgcgcccgcagcccggggcgggccgtggttgcccctggcaacagagagggtctcccgggagcggggactgggaagcgctcccgagccggggaggcgcagagcccgaccagagagaggcggggacgcgggtagagcgaccaagaggtgtggaggccggaagagactgaccgcgccggcccttggag

SEQ ID NO: 56634 - DNA, 30 bp, Homo sapiens; identical to SEQ ID NO: 12612
  chr19:54401930-54401960
  hyper

SEQ ID NO: 56635 - DNA, 103 bp, Homo sapiens
  chr19:54410015-54410118
  hyper
tgacccctccagaccgcctagtcctggccagcatcgaccaggccgatttccagggcttcacctacgtgaaccccgacttcgtgcacccggatgcccgcagccc

SEQ ID NO: 56636 - DNA, 135 bp, Homo sapiens
  chr19:54411653-54411788
  hyper
tgcggacccgggcacgtcttcttccctgcagtctcctgggtttccatgacccggtccgggtggatgctggggctgcccctctctccctcatcaccgccgcgacacccccatccagtgcccgcaggccccagcccc

SEQ ID NO: 56637 - DNA, 2 bp, Homo sapiens
  chr19:54412746-54412748
  hyper
ga

SEQ ID NO: 56638 - DNA, 161 bp, Homo sapiens
  chr19:54412808-54412969
  hyper
cgcccctcgaggtggctgcgagccgggtttggggcaacaagggacccgagtggctccaggggtggtgagatcctggcggtcgggacgcccgaattcgagcggctatgggggatgcagggacacctgggcctggcgatcccggaggacggggtccgagggtc

SEQ ID NO: 56639 - DNA, 99 bp, Homo sapiens
  chr19:54413008-54413107
  hyper
cgagcgtgggctggggagggcagaggccgggtccctgaggaaggcgaggtacggggcgagggcggaggacccaggcccggccagagcaggatgtgggtc

SEQ ID NO: 56640 - DNA, 31 bp, Homo sapiens; identical to SEQ ID NO: 12614
  chr19:54415929-54415960
  hyper

SEQ ID NO: 56641 - DNA, 30 bp, Homo sapiens
  chr19:54445873-54445903
  hyper
ggagcagccagaggcggtgcaagcgcccag

SEQ ID NO: 56642 - DNA, 30 bp, Homo sapiens; identical to SEQ ID NO: 12615
  chr19:54461000-54461030
  hyper

SEQ ID NO: 56643 - DNA, 319 bp, Homo sapiens; identical to SEQ ID NO: 12616
  chr19:54465292-54465611
  hyper

SEQ ID NO: 56644 - DNA, 30 bp, Homo sapiens
  chr19:54466172-54466202
  hyper
ctaatgcgagatctcgctccttgccctcca

SEQ ID NO: 56645 - DNA, 30 bp, Homo sapiens
  chr19:54480936-54480966
  hyper
aatgtagtcctcatcggcttccgcatcact

SEQ ID NO: 56646 - DNA, 133 bp, Homo sapiens
  chr19:54481304-54481437
  hyper
gggtttggggaagggaagggtcggttgtcagtggggttgccccgcccccaaccctgaagtatccgcccccaccactgccctccccgctcctccagggttgaaaagaggcgtctgcgtgaagatcaatcatttc

SEQ ID NO: 56647 - DNA, 435 bp, Homo sapiens
  chr19:54481540-54481975
  hyper
cgtcggggtgggtgccgggaaaaggcactgggactccggcacttggatcgacacgccgaggttagcctcccagccaatccgagtccagatagtgagatcctctggtccccgattggctgactgatctcgttcccgccccctcctctcaccttggggcgggctgagggaggatcctgggcgctaattggccgctttgctctctttggccctcgcggcgactctgcgccgtgactggttgtggaatcccggactgggattggccaccgcgccgcagagctgtggggcaatctgcggcggtgacgggccactactgggagccggctgggaaagcctgtattgccattggtagctaccccgagaacgcggcaaatcctaaatgatgattggctgcggcctcagccaggttccgaaatcgcaaaatctagttgcctgggg

SEQ ID NO: 56648 - DNA, 291 bp, Homo sapiens
  chr19:54483013-54483304
  hyper
agaactgtcgggaggcgccgcgagatggggggccgggaagggggcgcaggcggccgcgtctgaccgccctcgctctccctccttttcctttccttcctcccccgcaggagttgtccgggcctccagcatcttccccatccttagcgccatcctgctgctgctcgggggtgtgtgcgtggcggcctcccgcgtctacaagtccaagaggaacatcattctgggcgcagggatcctgttcgtggcagcaggtgagaggcagagggagggggcgaccggggcggcccacctggg

SEQ ID NO: 56649 - DNA, 5 bp, Homo sapiens
  chr19:54483364-54483369
  hyper
cgcgt

SEQ ID NO: 56650 - DNA, 88 bp, Homo sapiens
  chr19:54483483-54483571
  hyper
cgccttcggaggagtaaaccgacacaggcaggtgtctggcgcgtaagacgccgggcgcttaggatcccaagcccgccgtcctggagac

SEQ ID NO: 56651 - DNA, 263 bp, Homo sapiens; identical to SEQ ID NO: 12619
  chr19:54485383-54485646
  hyper

SEQ ID NO: 56652 - DNA, 324 bp, Homo sapiens; identical to SEQ ID NO: 12620
  chr19:54485672-54485996
  hyper

SEQ ID NO: 56653 - DNA, 229 bp, Homo sapiens
  chr19:54486106-54486335
  hyper
cgcggcgggggagccgaggggcgtgtccggggcgcgtgcgcgggcgcgcgtgcatcgaggctgccggggtcgggggcgcccccgctttcccccgtgagcgcgctggagactgctgggcccgccccacgcccaccctccccgcccccctccccctccgaagcagggaccccgagggagggggcaggggagggagggggccgctgtgagggagcgtcgtgttttatttttt

SEQ ID NO: 56654 - DNA, 175 bp, Homo sapiens
  chr19:55597888-55598063
  hyper
gagtggtggggacgccggctgcggggagcggtccttatccttgctttccaggcagagaaacgggggctcagaaagagcaaagggactcccgtcccattctggggacgctggagcgcccccccgccccgccctctggccccaggacccctcgccctgagcccgcactccctacctc

SEQ ID NO: 56655 - DNA, 6 bp, Homo sapiens
  chr19:55598488-55598494
  hyper
cggcca

SEQ ID NO: 56656 - DNA, 30 bp, Homo sapiens
  chr19:55672021-55672051
  hyper
tccgggcttccctccgcgtgctgctgctcc

SEQ ID NO: 56657 - DNA, 378 bp, Homo sapiens
  chr19:55677499-55677877
  hyper
tcctctgagtattctgggattcgcagtccgcagacaggacctcggggctgcccctgggagcgcgccctctgccgctggagcgttggagaacgttagcgccccccttgccaccgacgctgggactacgagctctaaaaggccgtctgctcaggctgggaaggcagacggtgtatcagaccttgcgtgctgggactcactttcagcctgcaggtccagcgccggggacaggccccaccaggacacggagccgaagccgctgccggagccggcaggtgtggtcatcaccctgcggaaaagacattctgggaatcgcacacattgcccgccccgctcccctctcaccgcccctcacttctcgcccctttgcctccacatgat

SEQ ID NO: 56658 - DNA, 30 bp, Homo sapiens
  chr19:55678404-55678434
  hyper
ccgccccagcacaacgtgggctctaccaca

SEQ ID NO: 56659 - DNA, 87 bp, Homo sapiens
  chr19:55684867-55684954
  hyper
agcctcactcggtccgggggccgcagcgagtgccactgggcaatgggccgccgcgggttggccagcatgtccgcccagtgccgcagg

SEQ ID NO: 56660 - DNA, 30 bp, Homo sapiens
  chr19:55685277-55685307
  hyper
gaaccctcaggactcggttgcggagcgggt

SEQ ID NO: 56661 - DNA, 946 bp, Homo sapiens
  chr19:55690244-55691190
  hyper
ccgagtacacccgtccgaatcccgcccctcggaatcctggccaggctttctctctgctcggccccccacccccgggtcttgctcacctgggccgtggctgatgcgactggagtcgggaggcgtgtcgggcgatggaggccccggggttgggggctccgggaacatggtggcggggtcctggagtcttttctgcagagacactcaagcaccctagtcccccattcccaccccagacgtcctttgagccccacgcacaacaaagaactccaactcccatgaggcctttgcgcgaacagccgcgcagaaaccggacagccaccgcgagtcatgctgggagttgtagtatcagcctccccgcacttgagagggggtgtccaggacctagttccatcctaaagggataccctcttcctccacggccccacaggcatcccgctgacttctgcctcgtcctcgcccctccgcagggtctgaaccggaagcgggcgaaggcagacgtgggaaccagcagaccgcgttgcccagagcaacagccgggctcctctcaagcggggtgagagcaaagctggttgcccgggcaacgggttgttgccaggacaacgggcggggctgacgcacagacgcggagtcccggcggggcaggctcgctccggggcccaccggtgcctgggaaccccccaatagcccgactgggatcctgaggtcccgcgaggtggggagcgggcagcctgtggtccgagcgcccacagccgactgctccctccgcacctggtcctgggagctgagacgcaggttccctcttccctctccccaattttgctggagggcgggtcgggggctgcccggtgcctgtgctgagccccctcatccttcttggcctgttggtctctccacgcatccgtgctgctctcgtgaccgcctcggtctccacgctgcctcttgaccc

SEQ ID NO: 56662 - DNA, 61 bp, Homo sapiens
  chr19:55691715-55691776
  hyper
ggaaagccctgccccgcccctcctcccgcctccacccgggaacctcgatgacgcccacaga

SEQ ID NO: 56663 - DNA, 417 bp, Homo sapiens; identical to SEQ ID NO: 12626
  chr19:55728162-55728579
  hyper

SEQ ID NO: 56664 - DNA, 22 bp, Homo sapiens
  chr19:55764189-55764211
  hyper
gccactgcgcctggctgtacac

SEQ ID NO: 56665 - DNA, 30 bp, Homo sapiens
  chr19:55770717-55770747
  hyper
tttggctccagggtcgggctcttgcgaaat

SEQ ID NO: 56666 - DNA, 30 bp, Homo sapiens
  chr19:55813324-55813354
  hyper
gcgcgtgcgcggggcgatgcactcagtcgc

SEQ ID NO: 56667 - DNA, 30 bp, Homo sapiens
  chr19:55850629-55850659
  hyper
gtcgccttggtaaccgcaggcctcgcgggg

SEQ ID NO: 56668 - DNA, 471 bp, Homo sapiens
  chr19:55865889-55866360
  hyper
ccacgaaggaggcaactcctgcgagacgggacgggacggggactccgtggggccgagggggcgccctcgctccgacccgtctccccatcctgacccccgcccctgaaccccacccgtcgtgccctcaccagcctgacgttggcggccactggatctgctgtgggatggtcccggggtgccgctcgcttctgagtccgcggggtgcggtcccacccgggtcaggagaaacgcaccccgcggccggattggctaggacgcccgagccccagccaatgggagccgtcgtgcaccgcggggctggtaggggcgcccccaccccaccccttgctcccccgacgccccctcgggggcctgcgcgtgcacacaggcaccgaggtgcgactcgctgagtctcaggctcaagctttaatctctgcgaagttgggcggctccacgggctcgcccccgcccccccccgccccccaatatata

SEQ ID NO: 56669 - DNA, 30 bp, Homo sapiens
  chr19:55896827-55896857
  hyper
acccgagcgggcctcggcgccctcattggc

SEQ ID NO: 56670 - DNA, 203 bp, Homo sapiens
  chr19:55951858-55952061
  hyper
cgtagggggtgagggcgggtcctgggcgatgggggtggagccgccatggagggcggggctacatgatgaaggggcgtggccagagacggaggctgcgccggatcccacgttccactcaccgaggttgggggtcttcacggtgttgtagaggttcttgggcgtcctggggggcatgctgtcgggaccgccgatccccggggtca

SEQ ID NO: 56671 - DNA, 30 bp, Homo sapiens
  chr19:55953357-55953387
  hyper
tccctgcatcactccgcaacagccgggccg

SEQ ID NO: 56672 - DNA, 279 bp, Homo sapiens
  chr19:55953783-55954062
  hyper
gcccccggcgcccccagctagcggcggcggcgtggtggcccagcgcggcgtgtcgtagttggagcaggaggcctgcgccaggcgcatgtgacggtgctcacagcagaagcggtagtggcaggtgccacagcagaagcggtaggagccggtgctgcagttgaaggtggcgtcgtactggcccatgacatcgtagtagccgtggcagagctcggcgggagggggcgcccgggccgccgcgcccgccccgcccgcggggccggtcctggtgccgttggcgcc

SEQ ID NO: 56673 - DNA, 30 bp, Homo sapiens
  chr19:55958478-55958508
  hyper
ttcctgcctgtgcacgtgctgtttccttcg

SEQ ID NO: 56674 - DNA, 41 bp, Homo sapiens; identical to SEQ ID NO: 12629
  chr19:55962683-55962724
  hyper

SEQ ID NO: 56675 - DNA, 30 bp, Homo sapiens
  chr19:55987794-55987824
  hyper
gctcaccggggcctcggcccccaagacctg

SEQ ID NO: 56676 - DNA, 197 bp, Homo sapiens
  chr19:56015150-56015347
  hyper
gcaggagagtctcgccgcaagcgtcctttcccgccttttttttttctggcgctcagcacgcatgcgcaggcgcggtgggcccgggaatggagggacgggatggggcaggcgttcatctgcctcgcacctcgtgacgtcacaggcgcgctgcgcctcctgattggccagccggcgcatcgcccgcagtaataatagct

SEQ ID NO: 56677 - DNA, 30 bp, Homo sapiens
  chr19:56028672-56028702
  hyper
tccctccgcctctccgggacccccaggccc

SEQ ID NO: 56678 - DNA, 68 bp, Homo sapiens
  chr19:56098516-56098584
  hyper
ttgcaacggttgagatcgtcctcagggtaaaattcccgctcctgtcctctcctcgcttcccacccccc

SEQ ID NO: 56679 - DNA, 103 bp, Homo sapiens; identical to SEQ ID NO: 12631
  chr19:56111237-56111340
  hyper

SEQ ID NO: 56680 - DNA, 176 bp, Homo sapiens
  chr19:56112770-56112946
  hyper
catggcatgtctgggcaagtacgtagaactatgtgtcccattttgcaaaagtcttgattaaggcttagagaagcgaacaccttgcccaaggccacgcagagagtaaagatttgaacgaatgatgtcttgactccagggcccaggctcttaacatcgcagatatgtttcctcatcca

SEQ ID NO: 56681 - DNA, 414 bp, Homo sapiens
  chr19:56151955-56152369
  hyper
gctgggtggagaatcacggcccggccacatcggagccaatggctggtctctggacctcggtctccacatttgctcagccggcaggaacatcccttctcccgccctctacctcggtgggtggccacggccgagcaggcagcgacggcccagtggaaagaggacaaacccttgtgggccttagggcgaagacgtaactttgcttagtctcggtttattggccgatctcttgtcaagcggcggaatcgttccgttcgggaggtgggaggggagcggggccgccgggggcgggcgtcttcagtggaccccacgcctccggtcccctccccgcagggcgctccgcagaggcgaggggtgggagcgccggctccaggcggcggaacctccgcactgggctcgcgcgcttccggccggcgc

SEQ ID NO: 56682 - DNA, 39 bp, Homo sapiens
  chr19:56159540-56159579
  hyper
gggtgggcgcttccctcggctccccgtgacactttgcag

SEQ ID NO: 56683 - DNA, 30 bp, Homo sapiens
  chr19:56165292-56165322
  hyper
accaagagggtggccggatttaacggctgg

SEQ ID NO: 56684 - DNA, 31 bp, Homo sapiens
  chr19:56186172-56186203
  hyper
gggacgcccctgctgccggcgccggcagcct

SEQ ID NO: 56685 - DNA, 30 bp, Homo sapiens
  chr19:56632731-56632761
  hyper
caccctgtcctcgccgctctaggaaggcga

SEQ ID NO: 56686 - DNA, 30 bp, Homo sapiens; identical to SEQ ID NO: 12632
  chr19:56652051-56652081
  hyper

SEQ ID NO: 56687 - DNA, 30 bp, Homo sapiens
  chr19:56652495-56652525
  hyper
ggccaattggcagccgcctttgccgcgatg

SEQ ID NO: 56688 - DNA, 35 bp, Homo sapiens; identical to SEQ ID NO: 12633
  chr19:56728567-56728602
  hyper

SEQ ID NO: 56689 - DNA, 130 bp, Homo sapiens; identical to SEQ ID NO: 12634
  chr19:56728658-56728788
  hyper

SEQ ID NO: 56690 - DNA, 31 bp, Homo sapiens; identical to SEQ ID NO: 12635
  chr19:56809209-56809240
  hyper

SEQ ID NO: 56691 - DNA, 541 bp, Homo sapiens; identical to SEQ ID NO: 12636
  chr19:56879474-56880015
  hyper

SEQ ID NO: 56692 - DNA, 198 bp, Homo sapiens
  chr19:56904505-56904703
  hyper
gattaaaaaaaaaaaaaggcacgcataacagtgaatgcaaaacatccgcaatttcagggggtcggagacccctgcgcacccacctaaggggtccatgcacctgggctatgaggctggaagcagaaagggggcgccagaaagcgcacgccgcgagggccggcgggaaatgtagtctcacgccggtaaagccacagagcg

SEQ ID NO: 56693 - DNA, 577 bp, Homo sapiens; identical to SEQ ID NO: 12638
  chr19:56904723-56905300
  hyper

SEQ ID NO: 56694 - DNA, 841 bp, Homo sapiens
  chr19:56915126-56915967
  hyper
ctgctgtgtgcccagggcccacgacagtgcccgatacagcaggcgctcaataagtggcgaatgaaagacagggcaaggcggagagagaagaaacagaaagggaaagagaaagcccgggccgccagagcgcttaatcacacgtacatcctaccgggcccctctccagctggctcaggctccacactggtcctccagctcccttttctcagcgatggactcacagccccacccggagcgctggagcgcggacgcggtcactgcgcgtgcgcctcaccgcgctggcaccccggcctggcagcctttggggacctgaaccagctgcgcctgcgcaggtggaacgggtggaacgggtgggggagcggacagtcgaacggcctgagagggctcagctggtccgggtgggattctgaaggccagcggaggtgggcttactagggaaaggggcgcagcagtaactacccgcaactgagcggcgggatctgcggccgcccggggccctcggccaacatcccagcatcctctgcgccgcgccggccccggactccatttcccagcggcccctgcggcctgccctagggctgcggcgcctttgtgagcgcggccgccggccaggatcgagccctggcccgggccctggcccagccccggcctccaaggaccgcgccgaaggaggtgcccactggagggaggaggcggtgaggagcgcgggatggagctgacgccgggagcggccatgccaccatgtgtgggaccgtgtgtgacagtgtgtgagaatgtgtgagacattaaggaaccgtgtgtgacaatgtgtttgacagtgtggaatcgtgtgtgagaccat

SEQ ID NO: 56695 - DNA, 113 bp, Homo sapiens
  chr19:56987541-56987654
  hyper
ccaggagtcaacaccagacagcggggcgccacagtccatgctcttatttttccaagctaccttggtaggaaggggacacaaccatacttagcgtcagtggagggctctgtcct

SEQ ID NO: 56696 - DNA, 172 bp, Homo sapiens; identical to SEQ ID NO: 12641
  chr19:56988111-56988283
  hyper

SEQ ID NO: 56697 - DNA, 280 bp, Homo sapiens
  chr19:56988383-56988663
  hyper
cgcctcacacgcggcgccaacttcacacttgggcgcacaagccccgagaaccacagcagcgaagggcgcaaaccccacgccgtggcgggccgagaacccacgcaggcgcgagcccaccgcccacgcaagcacccgcgcagacgcccacgccatcgtggatgcgcaaacccacgcgcgccttggcaggaacgtccacgcagtggcgggcgcgccgcccacgccctcagacacacccacactctcgccagcccccttacctcggtcttcccgggctcagacc

SEQ ID NO: 56698 - DNA, 137 bp, Homo sapiens; identical to SEQ ID NO: 12643
  chr19:56988963-56989100
  hyper

SEQ ID NO: 56699 - DNA, 178 bp, Homo sapiens; identical to SEQ ID NO: 12644
  chr19:56989173-56989351
  hyper

SEQ ID NO: 56700 - DNA, 124 bp, Homo sapiens; identical to SEQ ID NO: 12645
  chr19:56989501-56989625
  hyper

SEQ ID NO: 56701 - DNA, 176 bp, Homo sapiens
  chr19:56989696-56989872
  hyper
cgtcccggtcatctgggcgtgcgggtcccgggttttgatcgcgcgtttgtgtaggtgagacccacattgtgttaccctgaacatgtgtgaggacgaacctttgtgttttcttatacgtgtgtctctgaggcgatttttgtggttttgtacgtggcggggggcactgattttgaata

SEQ ID NO: 56702 - DNA, 1137 bp, Homo sapiens
  chr19:57018806-57019943
  hyper
agaaagataatgacactcccacggactggcacagaaggccgcgctccgaatgacatcgcgatcacagaggcacagacagcgtcacaaagccccacgcgtactcacaccgaaggctcagccgtcgcgcgtttccctcccaggccccaggaactagtaactagggacgcttctggtctctaggcgaggagagggggagagcgcaatctttgcgcctgcgcacactcctgctcttacccgccggaaccctgggccacgcccggctcgcgtaatcacgcactgcgcaggcaccgcccgctctgctctaaggtccctctcactccttcagcagcccgaggacaatcccctcaacactaggccacgccttgtctccgcccctctcgtccgacccctggagagaggctggcgcctgcgcgatggggggttccagcgtcgactcacggagtccttcggatgagagcgtctgggtgccagacgaggccgggggtttgttttgggtggtttgggagtccgagctcgagggctgggccaggaagggcaggcgaggcgggcggctccgacgcgggtcgcgaaggcccagccgcgtcctctgtccccaggacgactacatttcccagaggccagcggggcgcgcgtactcgagtctgcggggcggaggccgcggctcggggctgctgggcgttcggggcggcttggggcggcgggaccactggagtgagctgtgggagagatgggggtgtgcctgtgtgtaaaagatctgtcagagtgtgaggctccgtgagagggtgtggtttctgtgtgtgtgtgtgtgtgtgtgtgacagaccgagagtccagtgtgagaccagggtatgttcgtgtgtgacagagcgagacgggccagtgtgagagaccagtgagtgtgagagagatagggatgtgcctgcatttgaaagagagcgtgtgaagctcagtgagaggttgcgaggtgtgtgggtgtgtaagtgtgtaacagaccaggtgtccagagcgtgagaccaggatgtattcgtgtgagagagtgagacgggctggatggagtgtgagagaccagtgagtgtgagagatgggcgtgtgcctgtgtgtgaaaggccggtcggtcggtgggtgaggctcaatgaga

SEQ ID NO: 56703 - DNA, 124 bp, Homo sapiens
  chr19:57049660-57049784
  hyper
ttgcctttcccttcccggtcggcagtgacgctcccgcaaggagctgacgcccaggcccttagcacctgtcacagccaagcacccttttactccggccctgcggtcccacccctcgccgcaagcc

SEQ ID NO: 56704 - DNA, 179 bp, Homo sapiens; identical to SEQ ID NO: 12648
  chr19:57049807-57049986
  hyper

SEQ ID NO: 56705 - DNA, 15 bp, Homo sapiens
  chr19:57050064-57050079
  hyper
cgaggccacgcccgg

SEQ ID NO: 56706 - DNA, 171 bp, Homo sapiens
  chr19:57050428-57050599
  hyper
gctcccgggtagaggcgccccccgcacaaagccccgggcgggccgaggcccgactgtagggactccagccaccttggccctccctgcccggggaaggccgcgctcaaggaatggcctcgcatccaaaggccagcgaggagcggcccctacggggcctgggcacagaggtga

SEQ ID NO: 56707 - DNA, 862 bp, Homo sapiens; identical to SEQ ID NO: 12649
  chr19:57078350-57079212
  hyper

SEQ ID NO: 56708 - DNA, 27 bp, Homo sapiens
  chr19:57106523-57106550
  hyper
agctcagttggctccgctcggctccac

SEQ ID NO: 56709 - DNA, 412 bp, Homo sapiens
  chr19:57106588-57107000
  hyper
cgcgcgcgggtttctgggaagcgtagtccggcgcagtccgcgcaggcgcactgccgtcgggcgggcctagcgggcgcggtcattgtcctggcagagcggcgagccggtgagtgtggctgcggggtcgcgcccaccctctacctgtgccgggggccggaacctggccccggggagggcgcggcctcggggagacggcgtgcaggcccaggtacggggagtgcagggctgggtgctggtccagggcgtgcgggcgcaggagagggcgtgcaggccgggaccgaggtgcgcctggagaggctgagcggccgaggagaggctgaggggaagctgaggggctaaggagaggctgactggaggctgaggggctgaggagaggccggggccagggagggagaggcgtgagtgggttgga

SEQ ID NO: 56710 - DNA, 249 bp, Homo sapiens
  chr19:57149402-57149651
  hyper
ctccagctattctgtgtagagcgtcagcaccaccgaacgctaatgcttgaatggtttagaactgcggacagctcacgccagacagattcagcaccacggacagcccccaaggcagctcgtgatgtgaatggttcagcaccgcagacagctcaagcctcgccggacagccctgctggaagtggttcagcaccacggatagccccgctaatatccatcagaaccccgggcggctcaggccagaatggttca

SEQ ID NO: 56711 - DNA, 260 bp, Homo sapiens
  chr19:57182866-57183126
  hyper
aggtgcagacacaatggcactcggggacgggctcacacgcggtcacacacctgcaggaacacgcgcacactacacaccgttgctctcgcctcccggtatcaccttcgaacgcgctggccggccccctcctagcctggtgcagtcggctccgcttctactcagtctcgggtcctcctgggccaacgcagaccctggtgcctccttccttagacgagctaaggtcaagacttctgctgctgcggaggagcccgcgcaccagg

SEQ ID NO: 56712 - DNA, 22 bp, Homo sapiens
  chr19:57183373-57183395
  hyper
cgcttccagtaactcaggggtg

SEQ ID NO: 56713 - DNA, 152 bp, Homo sapiens; identical to SEQ ID NO: 12651
  chr19:57610675-57610827
  hyper

SEQ ID NO: 56714 - DNA, 62 bp, Homo sapiens; identical to SEQ ID NO: 12652
  chr19:57610895-57610957
  hyper

SEQ ID NO: 56715 - DNA, 446 bp, Homo sapiens; identical to SEQ ID NO: 12653
  chr19:57683239-57683685
  hyper

SEQ ID NO: 56716 - DNA, 101 bp, Homo sapiens; identical to SEQ ID NO: 12654
  chr19:57683805-57683906
  hyper

SEQ ID NO: 56717 - DNA, 683 bp, Homo sapiens
  chr19:57702751-57703434
  hyper
aaggctgtgcattatgcgtacggcgggagctgggccaacgacggcctaggacggggacgtttccgacggctcacgccggtgggggcgggacttccgggttgctcgctgcggacgccattttcttctgcacttctgtctggagaggtctgtagccactgagggccccggtcggggccgctttgcaggtccctagtcaggaccgagcaggggagtaggataggaatccccgccgcacctttgtacgagcctgaccccttccgtgggtttgttcctgggtcgccgtcaagctgcggtctctcctcccccgcccttcagccccgcggtctccaggggcggcgccctgggtctggaacgcggttgccaccgaggaggcggcggccctgcgtctggaacgccgttgccaccgaggaggcggcggccccgagcgcgcctggaagccccgggcaaccggccagggtcgggcacaggtggggtccgtcaggccgcccggggctcctctgtcccagctctgcggcccagggggtgacgtgatggcggcagcggtgctgacggaccgggcccaggtgagtggacggtggcttcgcggttgccgcttccttgccagcgctgaggcggtttccgaagtgggtgggagcccaggtatcccctggatttgtcttcgcagtcgtcgttcgctttggtgt

SEQ ID NO: 56718 - DNA, 23 bp, Homo sapiens
  chr19:57751676-57751699
  hyper
tgactcctggggctcgatttcct

SEQ ID NO: 56719 - DNA, 178 bp, Homo sapiens; identical to SEQ ID NO: 12656
  chr19:57791724-57791902
  hyper

SEQ ID NO: 56720 - DNA, 464 bp, Homo sapiens
  chr19:57831522-57831986
  hyper
ggcccagcccatgatctcaatcggggcgaatatccccgcctcctgacctcaattttcctaagctagaaaggacctttcgaccctccgacttgtgcccatagtaaagcggcggccctaagacgacgcgggggtccttgtgcgcacttaaatggagtcggctgcgcttggtgagttcccacacccggtagatgtgagggaaaaactgccttactcagaaggcaccaccccttgcgtcggccgcggactctaggccaatgacgggccaggacacgggcgatttctgcgggccagggcggcggaggtgggacttccgcttcgtcgcgtgacgtcatctccgtgagcaggattggccctggaacagtgtggggcctggaccgctgggtaggcgcgtccagcggcctgagcaggggagggtaatgaggctgttacgcgccttctccgcatcttggcgggagcctgacgcc

SEQ ID NO: 56721 - DNA, 409 bp, Homo sapiens
  chr19:57832024-57832433
  hyper
cgaggcctaggcctccgcagccgccctccgtctcctcagccccgacgctgcgcccgctttgtgcgcatttttctctggggaaactgaggctccgagtgcgaaagtcagccgaggtcgccccgcccaggacagagaagggctgggggtcggctgagccgcggcattcccgggccccgctagggctgcagggtctcaggatggcagcctcggcgcaggtgagtggacgaggttttggccttgctgctgctctgctacttctggaggcctcgtgggcaggcagaagccaagacagccacaggatgtttctttgtcgccgtcgtttatttaagagaagtggccgtagcttgtcatttcctttatccgcagtcctgcaatagtgttggcctccgacaggtgctcagtccttggt

SEQ ID NO: 56722 - DNA, 577 bp, Homo sapiens; identical to SEQ ID NO: 12659
  chr19:57862380-57862957
  hyper

SEQ ID NO: 56723 - DNA, 35 bp, Homo sapiens; identical to SEQ ID NO: 12660
  chr19:57863221-57863256
  hyper

SEQ ID NO: 56724 - DNA, 914 bp, Homo sapiens
  chr19:57874396-57875310
  hyper
tagtgtgtccctttggcggtgtagccgttgagaacttgctgtgcttcacaatccgatatcataggtccctcacatttctgtgagtatcctagaccttacttcaagaaaatctggttatgtcgcctttaagagcaacccaagccccgtcctgtccgtggagtccggcactctgtttaccagctcccctgacggtgccactgagcctctatccgccatataaggactgaccaacgctctaaggcaagtccagaagcggtgtcgaaacttcataacccagaagacactgcggttctcggcagcgcgactgacccaatgaatgtgcaggaaggaacctttgcgtgcgtgcgtgcgtgcgtgcgtccgtcctcgtgctcgcgcatcgtaggagggcgggacttccggcgtcctcttgccgtggttgatttgattttctctggtgttttcactagttccggcctttggcgctctatgacgtcaccgaagtgacggagcggaaaagcgcgagaagcggcttggttccttgtacgcagaggcggtagtgacacaggcacaactgacagtggcagaagctcagctgacaaggactggggacggcggtgtccttgtcttgcctttgtcgcccccgcccctctcttccctggctggacttgcggagtccccgccgaagaacccgaggtgggtgccccgtcccaggcccccccccacctccgcccgacccctccttccagtgctgaagcccatagaaggggccctgcaggtcaggccccttgtctcgaagagaggggcgttcctgtgtggggtccccgtatcagctggtttgatgcagcctcagagctcccttcggggatctcaggttcagagcatggaggtgctgccaagtgggccgcgtcggggagcccggagtgtgggttgtt

SEQ ID NO: 56725 - DNA, 31 bp, Homo sapiens; identical to SEQ ID NO: 12663
  chr19:57901091-57901122
  hyper

SEQ ID NO: 56726 - DNA, 84 bp, Homo sapiens; identical to SEQ ID NO: 12664
  chr19:57901384-57901468
  hyper

SEQ ID NO: 56727 - DNA, 30 bp, Homo sapiens
  chr19:57946272-57946302
  hyper
atggtcagccatgtcgcttctgatgttctt

SEQ ID NO: 56728 - DNA, 496 bp, Homo sapiens
  chr19:57998875-57999371
  hyper
ctccatctcctattccgttatctccatctccatcatcatctccatctccgtctccatctccatcatcatctatcatctccaatctccatctccgaagttatgcccacttcctggaagtttggaggcacgggaactacattgcccaaaaggcgcagcgccgcgaggcggcgatccctgaccaatgaaaagaggtctgcccgagcgtgcgacacgcaatgggcgggacttccggcgtctcgtttggtattcactttcgcgactcaggtgaactaacctgcgagaagctggttgtgcgctgaggcgaccagcgccggaaggcacggtggcgactcacgctgttctcgccgctcagaggcgggtctgaggctcggtggcggcgcccagggtggcccgggccctttcctcggtcattgtctcccctccagctctactcacaggctccgatggcggcggccgccctgagggaccccgctcaggtgagcgccgcgtcctcctg

SEQ ID NO: 56729 - DNA, 432 bp, Homo sapiens; identical to SEQ ID NO: 12666
  chr19:58011064-58011496
  hyper

SEQ ID NO: 56730 - DNA, 15 bp, Homo sapiens
  chr19:58038569-58038584
  hyper
cagcgcggcggactg

SEQ ID NO: 56731 - DNA, 376 bp, Homo sapiens
  chr19:58038923-58039299
  hyper
cgccccgcctaaagtcccatggccgaggcagcgctagtgattacgccgcaggtgagagcggagtcctcggatcctcacctgggtcctgaggccccggactggggtcacctgcgtgggtctctgcagttcaggcctcttctccaggacagcgaggagttctgggtggggtcctcagagctgacgggcggtgaggtgaagaagggagagcgttgcgtaccgtgggggctgcacgcgcagagcctgggaggtgcgccggggtcgcgagcattcggaaacttgggggcggacctgtgtctgcagggagcagagagaatgaggagaagaaggcacggctgccatggcagcctgagcaaccggggtttttaattctgagtct

SEQ ID NO: 56732 - DNA, 814 bp, Homo sapiens; identical to SEQ ID NO: 12669
  chr19:58070514-58071328
  hyper

SEQ ID NO: 56733 - DNA, 860 bp, Homo sapiens; identical to SEQ ID NO: 12670
  chr19:58094924-58095784
  hyper

SEQ ID NO: 56734 - DNA, 718 bp, Homo sapiens; identical to SEQ ID NO: 12671
  chr19:58111072-58111790
  hyper

SEQ ID NO: 56735 - DNA, 729 bp, Homo sapiens; identical to SEQ ID NO: 12672
  chr19:58125364-58126093
  hyper

SEQ ID NO: 56736 - DNA, 770 bp, Homo sapiens
  chr19:58144249-58145019
  hyper
attggggaaaaaaaacgcctacgtgtaaatggacccgcacagctcaaacctgtgttgttcaagtgtcaacctacttaagacctcaaacaccgaagcccctcagtcgccctggaaggcagcagacgcagcttcctagcgctcccagctgtctgcacacaaggcgccctccgtcgcagcctgggggagactacattacccagaaagccttgcgtcgagcggcagtactttgatccaatgaaaatccaagacaggggcatttccgtgtgggtctacccccgccccccccagggcgggacttgtggcgtcttcgcagcggtcattttggctgccctcccggaggtccgttctgtctgtcagccgctttggtacgctgcatcgggatcgaagtgacggaccgtgaaggcgcgagagtcaggtctgagggtcgggggcagagccgcccgcgaggccggcctggggatagcgatgctcgggttccccccgggtcgcccgcagctcccggtccagctccgcccacagactcggatggcgaccgcactgagggacccggcttcggtgagcgctgcgatctccgggcctcccccggccgagattcttaagtcccaagtgagaggcaccagctcacgtctctgtagcacagggtcggggacactgaggctcgtgggtggggcccctatttctgacatccgatgtggtgggcagggggacaagggacaggaccggcgcgtgcagggcttggacgggcaaccgagaagggggcattcaggaac

SEQ ID NO: 56737 - DNA, 576 bp, Homo sapiens
  chr19:58175630-58176206
  hyper
cggggtcgggcgcggcgatgccgcagctgcggggctcggtggactcggcgagcaagagccccaggacgctgctggcggcgggcgaggagctggggcgcggcgcggggcggctctaggcgctgtggccgctcagcgtctgggacccagcgccgcccaggtcagggaatccttggtgttcccgccccgcagcacccggggcgggggaggagtcggcgcggtcgtgcggccgtggaggacagcgagacccggggctgcggctgcaggccgaggggcccctgggacagtgagaagcagcggcgggagctagtcacggggcagggagcgctcagcggtaaagacggcttcatctgactccagggctggcaggcggcccggatggcatgccgtctcctgcggagaattccaatttccccctaaatcgctcaacaagcgagaaggttttgggattcgaattcagtggggcaagcgaagtcgcctttccttcttaaacagatggaatccctggtccacaaacgtaccctgtgccaatttcatacaacacgctatggctgctgcggatgagaacacagcaactct

SEQ ID NO: 56738 - DNA, 829 bp, Homo sapiens
  chr19:58193122-58193951
  hyper
acctccttctcccctagaggccgaagtcgccatttccctgcacggggcacagcacctcagaatacaagttcgcagaggtcaaagcagtggacacactccgaagagctccgtggagttttggaaactacattatccagagtgcagagcgcaaaacggcggcggagttgagccaatgacagcccaggatagcaacacttccgcgcacgcgcagcgcgacgggccggaacttccggcgtcctcctcgtggcggtcattttggcctctgtcctgtttgtccagcccgccagtttctgcagtggaggtcgcgactgagggacgggacagagaagtcgcgaaagtgggccagaggttctgcgacaccacctcgggtgagctgcgccaggcccgggatagggactgttgtgttcgaatgcccgccccggtcggccgccgctccccgcctagtccacggagctcaatggcggcagtcgcgctgagggactcggctcaggtgagttgtgcgtcctccgggtctcgcctacctcccccagcagaagccttaaggcccagtgagggatgcctgctcacagccctgcagcccaggccccagtaccctggacaagaaggcgcttgtggattggacccgtttgtgacgcccagtgtgtacggaaatgtgacgggcagttgactggcgcgtgcagaacttggagctgcgactaagctgggggggattcaggagcctggggtccgtctcgggtctgcaggaacatagagtgaggcagagttgcacctgacgaatttgacgattctgaggacactggcagccttcgagatttgtgaacagataggg

SEQ ID NO: 56739 - DNA, 441 bp, Homo sapiens; identical to SEQ ID NO: 12676
  chr19:58219951-58220392
  hyper

SEQ ID NO: 56740 - DNA, 110 bp, Homo sapiens; identical to SEQ ID NO: 12677
  chr19:58220515-58220625
  hyper

SEQ ID NO: 56741 - DNA, 98 bp, Homo sapiens
  chr19:58220669-58220767
  hyper
gcagagcattctaggtaatgtagttttcatagatcccgaggtgggtgccggggaccctttgcaccaacctcttggagtaaaagcgaagctccagggcg

SEQ ID NO: 56742 - DNA, 413 bp, Homo sapiens; identical to SEQ ID NO: 12679
  chr19:58238325-58238738
  hyper

SEQ ID NO: 56743 - DNA, 249 bp, Homo sapiens
  chr19:58238987-58239236
  hyper
gctacaaggaggagccggaagtcccgcccacgcaccccccgcaggcactgaaacacccctctcctgggccctcattgggtatgcaacgtataggtttgtgggtagagtgtggttcccactgagctatccttcaaggcaggggattctcggcctgggctcttgggaaaactcgaagtaggagggccaagttgtttgggaaaagtaacccgagtttcaaagggctgacaggacttccgtcctctttttttt

SEQ ID NO: 56744 - DNA, 669 bp, Homo sapiens; identical to SEQ ID NO: 12681
  chr19:58258067-58258736
  hyper

SEQ ID NO: 56745 - DNA, 808 bp, Homo sapiens
  chr19:58280745-58281553
  hyper
cacagtacccccagaaatgtgcgtatggcctcttctaagatgggagaccctcctccgcatctggacctggagtcgccatttcctagcgcccctcgcagtggagcttgcccctttcttcggaaagtcggaagaaagccaccttaagcgctgcccatgtctgggaactacattacccagaatccgccctgcgaaatggtaacgtggctgagccaatgaagcttcagagaagccgtgccattgccggggcacgtaaagtcaagccaggacttccggcgtcctagccgtggcagccattttggcctgtcaggtccatccggcgatgctgggtctggacgagctcgggaggagtggttgtggccattgcacacaggcggatctgaggttcggcgacgccgctggtcgcgacccgggacaggacaacgacaggaacaccgccgagcccgcgttccccccccgcccagagtcatggcggcagcagccgctctgagggcgcctgctcaggtgagcgctgcgacctccgggccttacccaccctacccacccagaccctgaggcccctgatcgtgagggccgcctcctcgcgtccctgcagcccaggcctctgtcagggacggagaggcgccggcgggtgggatccctgtttccgacacccagttgatgcggtcggcagagcgagactggcggagggcaaaggcctgcaggcgcgactgaggcaggaggatgcggaacacggggacatcgtgtgtctactgggaaagaagtgtgatacggagttatttctttttttttttttttttgagacggagtc

SEQ ID NO: 56746 - DNA, 30 bp, Homo sapiens
  chr19:58326431-58326461
  hyper
tcccaggggcgcttcggaaggaaaagccca

SEQ ID NO: 56747 - DNA, 30 bp, Homo sapiens; identical to SEQ ID NO: 12683
  chr19:58330901-58330931
  hyper

SEQ ID NO: 56748 - DNA, 78 bp, Homo sapiens; identical to SEQ ID NO: 12684
  chr19:58331142-58331220
  hyper

SEQ ID NO: 56749 - DNA, 546 bp, Homo sapiens
  chr19:58361165-58361711
  hyper
ctcggaaagaaggcatttccacgtgtgcacgtaacgtaaggccgagacttccggggtctctagtagcggctgtgtatcggcgatgcgggtgtttccccagtttgtggcccctgagtgctgggtgggaccgcggtgactgaacctagaaggtggagaggaatcgtcctcggtgcccagaggcggctctgcagccccgtgacggcgaccactgctcccgggccgtgcttccccaagtagtccgatggcagcggctgtgccgaggcgcccaactcaggtaattgtggtgccttctgtgccctcaggtcaccccatcgtcacccaggtcctaaaccagcgagggagcggctcctgctcgtgggtctgtagccggtacccggcgtaggaacactgaggcgctcacaggaggcctctccttgtaaccgtccagtgggttcacgttgccagctgcctagacagagccgatttatgaagactggggaattgcgatggagaaatagtaattcacgcagagccgtcctgctgttcgggagacaggagttttattat

SEQ ID NO: 56750 - DNA, 246 bp, Homo sapiens; identical to SEQ ID NO: 12685
  chr19:58385531-58385777
  hyper

SEQ ID NO: 56751 - DNA, 99 bp, Homo sapiens
  chr19:58400131-58400230
  hyper
tacctgagcggagagcctcagcgtagccgcggcagccatcgaaccacgtggttttaagcagagtcgggaggatagggcgaccagccaggagatatgggc

SEQ ID NO: 56752 - DNA, 88 bp, Homo sapiens
  chr19:58446252-58446340
  hyper
aagcttcgcctcacacgttgttccctacaggcgcctgtggaccccaggttccatcctcccgggtctgtcctccaggccatagcccgcg

SEQ ID NO: 56753 - DNA, 267 bp, Homo sapiens
  chr19:58446423-58446690
  hyper
cgacgccgggtccgggctgcagacctgtgaacagtcgccgctctctcgctgcttcaggattcgggttaggatgaggtgacctgagggcagggaaggcacaattacctgagccgggagcctcagcgcggccgccgccatcccgagtacgcggggaaagcactgccgggagcggcgggcgccgttacggggcctaagatctgcctctgtgcagcaagaaggactcttcaccttctgggttcagacaccgcggttcggacccatagctcc

SEQ ID NO: 56754 - DNA, 464 bp, Homo sapiens; identical to SEQ ID NO: 12686
  chr19:58458426-58458890
  hyper

SEQ ID NO: 56755 - DNA, 370 bp, Homo sapiens; identical to SEQ ID NO: 12687
  chr19:58458978-58459348
  hyper

SEQ ID NO: 56756 - DNA, 608 bp, Homo sapiens
  chr19:58520707-58521315
  hyper
cttccacacccatgctcctctcggcacctttcacccagcccaagcagcggcggcccagtggtggaaaaggtgccacggccaaacggattggagactcaccccgcattctaggccggagaagcgggcgggcttgggatgccggcaggaggcaatgactctccccaggcgctgcatcctggctccggggcacaagcgcctctccgccctgacgctgatgctcgtctggctgcccgttctttggcatcaaaataccagacgatggtggcgcaccctgtggcctgggctgcctcacctcattcggtcccgcctagaaagaccagaggaccagaaaaccagaagcctgtcagagcgactagaggctggctccagccaacagccgcgcgcctcagcgtccacgagggttacctgggtaacgcgccgcttgggctcggcgcccagccgatgacgtaacccgcgcttgcgtagtggcgccgccctgatgtgtagtctccaggccgccccgaacaccagcccagcgggtcctggacccctaggtcatgtggctacagtggaatccaggcttggccgaatccaggacgaccaggccagacccaccggcagtaccttgc

SEQ ID NO: 56757 - DNA, 105 bp, Homo sapiens
  chr19:58609254-58609359
  hyper
tccacgagcctacacggggtgggggttgcactagttccctacctgcctgcagggcccctcaccgatctggatctcagccacctccggggggacccggcccctgcc

SEQ ID NO: 56758 - DNA, 53 bp, Homo sapiens; identical to SEQ ID NO: 12690
  chr19:58609472-58609525
  hyper

SEQ ID NO: 56759 - DNA, 318 bp, Homo sapiens; identical to SEQ ID NO: 12691
  chr19:58609712-58610030
  hyper

SEQ ID NO: 56760 - DNA, 591 bp, Homo sapiens; identical to SEQ ID NO: 12692
  chr19:58661716-58662307
  hyper

SEQ ID NO: 56761 - DNA, 542 bp, Homo sapiens; identical to SEQ ID NO: 12693
  chr19:58665952-58666494
  hyper

SEQ ID NO: 56762 - DNA, 238 bp, Homo sapiens; identical to SEQ ID NO: 12694
  chr19:58666550-58666788
  hyper

SEQ ID NO: 56763 - DNA, 982 bp, Homo sapiens
  chr19:58694196-58695178
  hyper
tccccactccccccgcgacttccgtcttccagtccccctccttccccaaaagttgcgtggactctagccccgcctcctacattctccccgccctccctgtccccgcccctccacccagatggacggccagttaggcccgccccctgcacttccggccctacccgcccttcctcttcccaagggacgtcataattaatcccgcccccaccgccacccaaccaagcatcacccattccagcacttccggcctgacccctgtccagcgcctttcctttctccagcttctgctctgccccaagagtggtcgccttcgtggcagggcacgactctctcccagctcgggtcgccgcccacattagtgtggggccctgcggcctagcgtccctcaccagaggcctccccttgcctagctggaccgccgagggacatcgacgagtatcctcctcctgctgtccccggcttcgcctgccgcccctaaccggccagtcaagatggccgccgctgggtgaggcaagctggcgcgccgcgggggcgtctgggagttgtagttcgggacggcgggctgacgcacttcgccgccggccgacgggcgccattgtgcggcgcgcgccgggtgagtgccgcgcgaaacctgcgtccgtcgggggctgcgctgggcgggtccagaaccgttagttgggggcgagcgcggcctctgcattttccgccgagctcgggtaccctgagccggccgtgcctgcagtcctcccgccgctctgtgggatggggtcggtgacccggaaccccgaggggagacagtgctttcggggcgccgcggtggagagaacagatcgcctccggaagcgtggggtctgggccagggaggcgatcccctccgatgcgcgggacagaggaggctcggtgtcctctcggggaggggaaaactggtcctatccagtcctgtgggagtcctatgactcactctgggcgttttccagtttgg

SEQ ID NO: 56764 - DNA, 671 bp, Homo sapiens; identical to SEQ ID NO: 12696
  chr19:58739922-58740593
  hyper

SEQ ID NO: 56765 - DNA, 35 bp, Homo sapiens
  chr19:58789723-58789758
  hyper
acttgcttttactttgcactgcggactcgccctga

SEQ ID NO: 56766 - DNA, 1175 bp, Homo sapiens
  chr19:58789817-58790992
  hyper
tgtaacacaaccaccgctcccagcctccccgcttccagccgctaagcccaaagtcttttatatgaacaaacctctaactcgtcctgtgactttgatgcgtgtgcgttttaggcaccggggagcagagggtaaagcggcgcagctccgggcctcctcccgcgcaagttcccgagaagagcaggtccggcccgcgcagacgtgcacggtccccagccattaggaggagcagacggtccccacccccacaatcagtcatctctcggggtccgcccttgcttcctgcccacgagtgaggcctctggttgcccgcaacctaaggggcatcgcagccccgagcaacaccgcccccaccagccttagctgagtgctcccattggccagaggccagcgggtgggggctcccattggccatcggccataatgcttccattggtcgaaggccagaccagcggagactcccattggccgagggctgtggttcgccgcacggcctactgggagttgtagtcgccgcgtcgccggtgcggccgccattgtccggcgttcggcgagtcgggtggtccctttggctggagtgcctctctggtctggggatcacctcaggcgctgtccttcactgggcgatccagcatggaccccgaggacgaaggggtagcgggagtgatgtctgtggggccgccggcggcccggcttcaggtaacaataacaacaataacgacggcggcgggctccgggcaagcgtctcccgcgcagactgaccctttcacctcgcggcgcgatgagagcggcaccgctgttaatgcccttgacacgtggggaaactcagacgcgggtcggggcgtggtgaccgtcctggctggtcagagagggggccgggattccaaccaggcgcctggcccccgaatgcgcatgctccacgcggctctgtcctccccagggctggggtcggtcattcccgagagaatcgagcaggcccatctcctgcgttctgctccgccccgccgacacccttgcccattccaggaaggtctgtcctcgtgttgactgataacagtaattgtagcgttggccgggtgcccagatggcaagaatcatcgaatagagatgctttaacgcgtggagtcagcggacacccaccgggaccccagcaccgcggagcccctgccctggggctt

SEQ ID NO: 56767 - DNA, 8 bp, Homo sapiens
  chr19:58838198-58838206
  hyper
cgcctttc

SEQ ID NO: 56768 - DNA, 166 bp, Homo sapiens; identical to SEQ ID NO: 12699
  chr19:58858590-58858756
  hyper

SEQ ID NO: 56769 - DNA, 27 bp, Homo sapiens
  chr19:58858901-58858928
  hyper
cgaaggtgacgtcggggatgggtccct

SEQ ID NO: 56770 - DNA, 30 bp, Homo sapiens; identical to SEQ ID NO: 12701
  chr19:58859150-58859180
  hyper

SEQ ID NO: 56771 - DNA, 166 bp, Homo sapiens
  chr19:58874183-58874349
  hyper
gcgtttctccccactgcgcctgcgtaactatgccgcggctgcgggcgcgcgccttctggttcccatggggacggcgccacagccaagctactcgggcgtcctgcgttgccatggatgcgctccgccccttcctgcacccggccagcctctgcggcacacacccaac

SEQ ID NO: 56772 - DNA, 114 bp, Homo sapiens
  chr19:58892480-58892594
  hyper
cgctgcggagaaagcggtgtagggagaggcttgggcttcggttatcatagaaacagaggccggctacacctaaaaggcggggcgtggacctaagtcgtcgccaaagaaacggcg

SEQ ID NO: 56773 - DNA, 30 bp, Homo sapiens
  chr19:58898385-58898415
  hyper
tgcgcttttgcaggcgcccacaagacaggg

SEQ ID NO: 56774 - DNA, 30 bp, Homo sapiens
  chr19:58898754-58898784
  hyper
cggggatagtgccccgcggcctgggccttt

SEQ ID NO: 56775 - DNA, 61 bp, Homo sapiens
  chr19:58907575-58907636
  hyper
ggaggaggaggaggaaggggacggcagcccaggctccggccctatcctgccccccgcctcc

SEQ ID NO: 56776 - DNA, 30 bp, Homo sapiens; identical to SEQ ID NO: 12703
  chr19:58912403-58912433
  hyper

SEQ ID NO: 56777 - DNA, 20 bp, Homo sapiens
  chr19:58919417-58919437
  hyper
ctgctgaccttccccctaag

SEQ ID NO: 56778 - DNA, 379 bp, Homo sapiens
  chr19:58919475-58919854
  hyper
cgctctttgaagacttgcctgatgacaggcatgtaccatgtttttggctgggacatttttctgagccttgctccgggctccgtaaagcggacacggtgccagggagagaatttcggggcggttgcgggcacaggcgggcttctgcggaggccctggcgaacgcccccgcgcggcgcggtccgatggccccatggggccgcccctccactgtgaggtcaccggggttcagcaacattcactgcggctaggacgcgtacaggtcactgaggcagaacttcccgattctcgcgccttcgttcgtttctgcggaccagcggagactcctccacaccgcccaccgcccaatgatcccactgccgcaaaccgccccaaagccagc

SEQ ID NO: 56779 - DNA, 72 bp, Homo sapiens
  chr19:58920315-58920387
  hyper
ggcgccgtgggtctcccgggcctccgtaccgtcctccttcccagcggctccgggaagcggttccctgtcttc

SEQ ID NO: 56780 - DNA, 167 bp, Homo sapiens; identical to SEQ ID NO: 12705
  chr19:58951233-58951400
  hyper

SEQ ID NO: 56781 - DNA, 554 bp, Homo sapiens; identical to SEQ ID NO: 12706
  chr19:58951525-58952079
  hyper

SEQ ID NO: 56782 - DNA, 30 bp, Homo sapiens
  chr19:58962990-58963020
  hyper
cacttggctgctcgcgtcaggccacaccgg

SEQ ID NO: 56783 - DNA, 30 bp, Homo sapiens
  chr19:58987607-58987637
  hyper
ggagggcttggggtcgccctctggggcctg

SEQ ID NO: 56784 - DNA, 30 bp, Homo sapiens; identical to SEQ ID NO: 12707
  chr19:59031448-59031478
  hyper

SEQ ID NO: 56785 - DNA, 567 bp, Homo sapiens
  chr19:59049757-59050324
  hyper
agggtggtgggctggagggggcgggccggctagcgaggcgtggccctatgaaggggcaggctgggcgtggaggcggtgactatgccgcggatggggtgggcccagatctggggggccgcgcgcccgggctggaacaaaggcagaggcggggacaaagccccgcggcccccagtccccatcaggaacaaaggccacacccggcccagcggtcgacgcgcccgtgctgcagccacgtgcggacacctgggagcggggcccggggaggcagtgccccgttaccctcacgccccgcccggctagccacctttacctgtgcgcgccttgggagtggcgaatgggtttcatggttgttcgcgccagtcctcgcggcctccaaacatcctccggaagctgccacctaccccgcccccagccgttgtcacctggaccggagacctcacgaccccaggggcaccgcacagggggctgaggcccacccccccggggccagcctcaatgcacccacccaccacgttttcaacgcgctgatagtccctaggcgggttcgcctctacctacagaccctgc

SEQ ID NO: 56786 - DNA, 30 bp, Homo sapiens
  chr19:59055772-59055802
  hyper
cgcggcggcgtcggcgccagttatttctgt

SEQ ID NO: 56787 - DNA, 249 bp, Homo sapiens; identical to SEQ ID NO: 12708
  chr19:59066307-59066556
  hyper

SEQ ID NO: 56788 - DNA, 30 bp, Homo sapiens
  chr19:59071084-59071114
  hyper
gccagccccgtgagcgcatggtgtggcact

SEQ ID NO: 56789 - DNA, 30 bp, Homo sapiens
  chr19:59084980-59085010
  hyper
gggcgggccctgaacgtctccatggtaacc

SEQ ID NO: 56790 - DNA, 30 bp, Homo sapiens
  chr19:59086688-59086718
  hyper
gactctgtgcggtgcggcctcgttgccaaa

SEQ ID NO: 56791 - DNA, 30 bp, Homo sapiens; identical to SEQ ID NO: 12709
  chr19:59087186-59087216
  hyper

SEQ ID NO: 56792 - DNA, 30 bp, Homo sapiens
  chr20:278976-279006
  hyper
gtccagcttgaagacgctcttcatcctctt

SEQ ID NO: 56793 - DNA, 116 bp, Homo sapiens; identical to SEQ ID NO: 12710
  chr20:291046-291162
  hyper

SEQ ID NO: 56794 - DNA, 160 bp, Homo sapiens; identical to SEQ ID NO: 12711
  chr20:291220-291380
  hyper

SEQ ID NO: 56795 - DNA, 30 bp, Homo sapiens
  chr20:305902-305932
  hyper
ctaagaaaagaaaccgatctcgccggtctc

SEQ ID NO: 56796 - DNA, 30 bp, Homo sapiens
  chr20:307305-307335
  hyper
gtcgggggaggagtcgctgggctttctgtc

SEQ ID NO: 56797 - DNA, 30 bp, Homo sapiens; identical to SEQ ID NO: 12712
  chr20:327796-327826
  hyper

SEQ ID NO: 56798 - DNA, 30 bp, Homo sapiens; identical to SEQ ID NO: 12713
  chr20:329001-329031
  hyper

SEQ ID NO: 56799 - DNA, 30 bp, Homo sapiens
  chr20:361888-361918
  hyper
cggaagcctctgggcgtctgcgtgttgccg

SEQ ID NO: 56800 - DNA, 42 bp, Homo sapiens; identical to SEQ ID NO: 12714
  chr20:362797-362839
  hyper

SEQ ID NO: 56801 - DNA, 30 bp, Homo sapiens
  chr20:388541-388571
  hyper
agccccggctccggcgccgactcctgctca

SEQ ID NO: 56802 - DNA, 30 bp, Homo sapiens; identical to SEQ ID NO: 12715
  chr20:443316-443346
  hyper

SEQ ID NO: 56803 - DNA, 30 bp, Homo sapiens
  chr20:524228-524258
  hyper
ggaagcgtgagggtcggccgcgctccgctg

SEQ ID NO: 56804 - DNA, 142 bp, Homo sapiens; identical to SEQ ID NO: 12716
  chr20:524513-524655
  hyper

SEQ ID NO: 56805 - DNA, 295 bp, Homo sapiens
  chr20:590303-590598
  hyper
gccccccgcctaccccgacctggcggccgcagcgagggacgcagcacactcacccccttgcgctggttgctgaggcagaaggtgcagatggagcgcggctggcggccgccgtcggcggcggcggggacggcgcccttggcactgcccgcggcacggaagcacggctgcccgtcgtcggccgagtcgcccagcagcagcacgttggccaggtgcgcgatgtagctggacgccaggcgcacggtctcgatcttggacagcttgcggtccaccggctcggtggggatgagcgtgcgca

SEQ ID NO: 56806 - DNA, 104 bp, Homo sapiens
  chr20:590967-591071
  hyper
ggcccccgccttataggcgagggaggggccaatggcaaggccgccccggccgggggcggagggctccgcccggccaatggggaggcgtccgcccggccaatggg

SEQ ID NO: 56807 - DNA, 142 bp, Homo sapiens
  chr20:656431-656573
  hyper
gatcgcgggagctgcgctcagcactccggctgccggctttatatgggacgcaggctggagatcaggtggtcccctagcaatggaaccgctcggcgctctaatccatcaaatgtcccccaggacaatcgctccgcacacgttc

SEQ ID NO: 56808 - DNA, 371 bp, Homo sapiens
  chr20:656931-657302
  hyper
gtgcaaaagagagggggaagccgaggggaacggagggaaagcggtcccgagcaggcggggttcaggcacatggggccgcagggaaggggatgcagaggaaagagtgcgcactggccagcggccaccctcccgcctccagtcctctccctctcccccagttctgaagtggccagggtggacgctcagctttcactagagtaagtctcccctcccccctgctcgggctcccactggagccccctgttgggtttggggttcaactttcttcttccagaactggtggggggagcaagtcccccacgccgatgcctggccttgctcggttggtcctgttccggtgcctagctcaggcgggcgctgcaagaggaagt

SEQ ID NO: 56809 - DNA, 361 bp, Homo sapiens
  chr20:708540-708901
  hyper
gctgggattacaggcgggagccaccgcgcccggcgggatattatatttccataaggccctccgggggcctgggaacggactggtgcttgcgtgcggggcttttccactggttcccttccgtactcgggcttcccccgctgttgttactccctcaacgggaacacaactccaccgccgcctccgggacacacccccgccgcgtgggccggggtccgggacgcgcgctcagctcggccccgcgggggcggcgcaggagggaagggggtgcggaccccggaggcgccgcaggaagccctcgcccacccttcccggccgggccgggtccgcagctgacggtgggggtggggagcagacgggcggg

SEQ ID NO: 56810 - DNA, 474 bp, Homo sapiens
  chr20:708944-709418
  hyper
cgggccgactccgggccagctgcggaggcgggggaggggaccccgctttccatggcagtgccgaggcggcgcgcacaaaggcgccgcgatcagcgcttcatcggttcgagtcaattatctgaggcgcggaggcggcgggcggggcgaggcgattccccggtggggctgcggagcgcggcgccgagactcagaggagggggcgctggggaagcggcttctccgtctcctgctccgccccgggcttcgtggcgaggcgccgtcgccccctggtggggcctcatccattcctcgctcactcgctcgttcacctttttctcaaccttacagcgggtggctctacggtacgagctgagggtgaagtgctgagaacagggcaagcgggccgtacctttaaatgccctgtcgggagctgggcccctctgagtggccaacctcaccaggaaagggcgctcagcctcgcgctgcagatggact

SEQ ID NO: 56811 - DNA, 30 bp, Homo sapiens
  chr20:1099721-1099751
  hyper
cccagagtccctcacggcacagctggcaca

SEQ ID NO: 56812 - DNA, 287 bp, Homo sapiens
  chr20:1165688-1165975
  hyper
cgcgaggtcaggctcgccgtccttcgccgccactccccgcccccggccctcggcctcctgccgcccccagcggtcccctctccgcgtgcgtacctgtgccgggcctccctccccgcctcaccacgctggggcgaagggcgcccggccgccggcgggcgagggtgcgtcctctccggtgcccgtccgccttcctgcagccggcgtacgcctgcgggggtctcgcctgcgggggtctctctcctgcggcgcagcccggagggcgcgggcccggccgccaccgcctcgcc

SEQ ID NO: 56813 - DNA, 30 bp, Homo sapiens
  chr20:1206206-1206236
  hyper
aacgccctgcgccctcgtccctctcagtcc

SEQ ID NO: 56814 - DNA, 722 bp, Homo sapiens
  chr20:1206687-1207409
  hyper
gcagacgcccagcggcgccaagaacccggccaagctgacttggcgactcctcgcagcccctgctctggcacgccacacctcagacgaggctttgaaagtagggcgcagcctgagaggccggccggaccccgagtgctgtaggcgggctgggagatgggggccgccgccacccacattcccacacgcacccggcgccggcgcctcacgccgtgttagctcgcggcgccaagcccggagggtcccgcctgaggaagaaaggtcgtcgcccgcagcccagctggggctggaggcgcgacccggggtctcctcgcccgcacgcggaagaaaatgggcgctgtggcctcagtttccctctgtgagcacccggcccggaactctgaggagtcgtctgtggaggagcctttggcgtccccctgcccctgagcgtggccgtcagctcttcccagcccctgcactttgctttcccctccctcacgcccggaagggtctcgccctgcccggctcagccctctctccccacgcccctctcccagggtccccgcccggtccccttccgaccccttcctccctcccttcgctccctccccgccaccgccgccaccctgccctttgcgggccggtttccacggagtggccccatcccggtggcttcacgttgcacgaagtcagttcaatctggagactgaaaaagcctccgggacgtggggcgggagggtgcgggg

SEQ ID NO: 56815 - DNA, 30 bp, Homo sapiens
  chr20:1294286-1294316
  hyper
ggggcgagaggagacgtggctccacgcggc

SEQ ID NO: 56816 - DNA, 30 bp, Homo sapiens
  chr20:1306603-1306633
  hyper
gttcttggcttggccgggcaaatcaattcc

SEQ ID NO: 56817 - DNA, 30 bp, Homo sapiens
  chr20:1373578-1373608
  hyper
tccgagccgccgcgcgccactactcaccgt

SEQ ID NO: 56818 - DNA, 30 bp, Homo sapiens
  chr20:1373901-1373931
  hyper
cgggtgacttgcttcgttctcctgcccttc

SEQ ID NO: 56819 - DNA, 30 bp, Homo sapiens; identical to SEQ ID NO: 12722
  chr20:1447713-1447743
  hyper

SEQ ID NO: 56820 - DNA, 985 bp, Homo sapiens
  chr20:1783320-1784305
  hyper
ttccaggcagtaggttcgccagccattgcttgtgcgtcttcgcggagagagaggggggagatgccccggcgctccttacccggctggataagaccctttggggaacttgctgcttcgcaagtcttacttgtgaggacccggagggtttgcctttgaccccgcctgtgaccttaagaaaacccctttctaccctgcgcctgtcccacagctggaagtgataattttaagaatgaattaagcactcggtgtgtgacactgcggcactaagcactttctggactgtgttaggccccattttacagacggggaagctgaggcctccagaggcggagtaacctgctcatggttacaaagctggtcagcggcgggcaggatttgaatccagggttcccggttcctaatcctctgcttttaccacttaatttatcctgcctccaagggctgctgggaaaaaggcggatttcaaaggagaagcagctaaggaaaagctctggaaagggccaacggagcggatattcccggagcccctctgcgagccacgcgcccctctgggaagcccgcttccccctgcagacaggcgctgtgacacgcttgcgccccggtcgaacaggcgaagaggccgaggcccagagcggcgcagggcgagcctggaggctgcgccccagacctggaccagccacggacgccgctcccgccgctccctccgctccgctgcgctccgcacgctggcgccggctccccgaggccccgggcgccccggccgcacgcctgggtaaaaggtcccgaggagtccgcagaagcgcgcccacgcccgagacggccgtttccgccggcctgggaaaggggcggagaagggggtcgcccgggccgcagcgtgccggtccccgccggccgagccgtgtttggggccagtccccgcaccccgcttcttccccacctggggagcggggcgccgcggtaggggcactggagcgcacgatgcacc

SEQ ID NO: 56821 - DNA, 39 bp, Homo sapiens; identical to SEQ ID NO: 12724
  chr20:1875079-1875118
  hyper

SEQ ID NO: 56822 - DNA, 129 bp, Homo sapiens
  chr20:2082433-2082562
  hyper
ccggcaaggcgtgccggtgcgctcggctgcggctgctccgtcgacctttgcaggaccgggcggtgcagggctcactcggctggcgtcccgggggatgggccaccaggagtctccgctggcccgggcgcc

SEQ ID NO: 56823 - DNA, 850 bp, Homo sapiens
  chr20:2187673-2188523
  hyper
gctctggtgtatctcttttgacgtctgctacccacagcctggggcaggagagtggcgacggcgaggagcaactgcacgcgacttgggaccttgccctgccccgcggcccgcgtcaccatggcaactgcaggcagccagcaccgacggcgggaaaacgaggaccggagccgcgttacagccttggccttcgagcagcccagggagagtctctgcgtcctccagcccccgcttcccttcatgtcggaggtcctaagcccgcagcgaagtccgcaaagagctttccccgacgcctacgagaccggaagtgcctgggcccaggtggaggaaggacccgcgtggccgcctccgcgctctccctggggtccgtgccccttccggcgtttctcccgcgtccttcaccatggcaactcgggcgtcgggagcgtgggctgcgagccgagtgggtgggggagccgccgggctctatccgccagcccacgagaagtgacgcaggtgacgggaggccgcagggacctgagggcggagaggggaattcagaaagtgccgggcggcggcttccgcttcctctgcggggtctctgggtggtcgtggctgggagctgccggggcccggtggccgtgcgcctctgctccgggcaagctctccctgcaaggcccgggcggcggcagggggcagtagcggcccgcgatgctcagaggctcgctggcacggagctcccgggctggggcgtccagatctggagaagccgggggccttggtcacactcagagctgacgtccagtgcggcccttgctgaggactcgagcgaacagatctctacccagcccccgccccacgcgcacccagcctg

SEQ ID NO: 56824 - DNA, 278 bp, Homo sapiens
  chr20:2444390-2444668
  hyper
acctgttgggatggcccgccaaccccacggactggcccagcaagtcctgcaggagcctggggcatgggaaccccagctgggattcctctgccagcagccctgccgatccctgggcccccggcagctccagcaagtggaactcgagcaataccagtctgaaaaataaacaaatatgctctgatgcccagtgatctgaagatcagaagtatactttggaatatcattgccaagagagcccctcgaaatagcttataaatactatcgaaatagcttataaa

SEQ ID NO: 56825 - DNA, 30 bp, Homo sapiens
  chr20:2451193-2451223
  hyper
ccgcccagaccgagcggcctcggcccaggc

SEQ ID NO: 56826 - DNA, 30 bp, Homo sapiens; identical to SEQ ID NO: 12726
  chr20:2489270-2489300
  hyper

SEQ ID NO: 56827 - DNA, 30 bp, Homo sapiens
  chr20:2489877-2489907
  hyper
cgctgtctgtcaggcgtgtgttgggtacag

SEQ ID NO: 56828 - DNA, 30 bp, Homo sapiens
  chr20:2505963-2505993
  hyper
ttgccgccccaaaccgaagtcccaattttt

SEQ ID NO: 56829 - DNA, 467 bp, Homo sapiens; identical to SEQ ID NO: 12727
  chr20:2539211-2539678
  hyper

SEQ ID NO: 56830 - DNA, 31 bp, Homo sapiens; identical to SEQ ID NO: 12728
  chr20:2627686-2627717
  hyper

SEQ ID NO: 56831 - DNA, 28 bp, Homo sapiens
  chr20:2633139-2633167
  hyper
gcccgcgctccgggcgataccaccctgg

SEQ ID NO: 56832 - DNA, 114 bp, Homo sapiens
  chr20:2633590-2633704
  hyper
gtgggctcctttggcggccccgcagaccctcatcgcgcgggtcccagcatgcacagcgcgctcccacgtggccggccgagcggttcggggcggggggacgggcctggaaagctc

SEQ ID NO: 56833 - DNA, 30 bp, Homo sapiens
  chr20:2644634-2644664
  hyper
ccggcggagaccagcgcctgcaacagggac

SEQ ID NO: 56834 - DNA, 202 bp, Homo sapiens; identical to SEQ ID NO: 12729
  chr20:2668733-2668935
  hyper

SEQ ID NO: 56835 - DNA, 22 bp, Homo sapiens
  chr20:2674696-2674718
  hyper
cgggctgtctatggctctgaga

SEQ ID NO: 56836 - DNA, 20 bp, Homo sapiens
  chr20:2731223-2731243
  hyper
cacttctcctctccacccca

SEQ ID NO: 56837 - DNA, 1049 bp, Homo sapiens; identical to SEQ ID NO: 12731
  chr20:2731391-2732440
  hyper

SEQ ID NO: 56838 - DNA, 23 bp, Homo sapiens
  chr20:2780741-2780764
  hyper
tgcactgtgagtgtgagtgtgcg

SEQ ID NO: 56839 - DNA, 621 bp, Homo sapiens
  chr20:2780883-2781504
  hyper
cgtgtgtgcgcgtgagtgcgagtgtgcgtgcggggtgagtgtgcatgactgtgagtgtgcgtgggtgtgcgtgtgcccgcgtgttagggagggatcgccccacggggcaggagagccgggcagtcggcttgcgggggagcggaccgtcggtcggggaactcaccgttagctgtctccgccggcggctgtgccgggctgctatgcagggccggggtcgagcctgggaccttggtggtcccgggctgcgcgaggcccagcaccgagttcctgggcgcccccagagccgggccgacggccggcgcgaaggcggccagggcgagcaggagcccccacatggcggggattgagtgccaggggcgcgcgggctacggcgggtggcgggtcggtctcttcctgccgagtgcgccgagccccccgccccttcctgccccccgcccctccgcagcctcctgcccgcccacagcccgctgcccgcctcggacctcggagaggaggagagggccgggaggagcgagcggggctgacctccaaggggccgccccaagtctcaggaccgccgactctgcccttcctctccgccgtctggggccaacccgcctcgttggcgcgctgcgcctttat

SEQ ID NO: 56840 - DNA, 282 bp, Homo sapiens
  chr20:2785584-2785866
  hyper
gaagaggcggcacggcggcgcttcccaccaccaccatcaccaagcccggccctgcccctcctctcctttcccttccctcccctactccttcgctcactcacccggctgccacgtcccgtcccggggttacataacccggagagagaagcctgagcgatagcctgcgggctggggctgcggtggaggagccaagggttgatgcactgcctgacctgccctccggctcctcgcccccagcccgtattctcctcggggagccggcagccctgggtctgcccagat

SEQ ID NO: 56841 - DNA, 6 bp, Homo sapiens
  chr20:2785955-2785961
  hyper
cggtgt

SEQ ID NO: 56842 - DNA, 30 bp, Homo sapiens
  chr20:2821801-2821831
  hyper
tcagaccacaggggcgctccgaggggggcg

SEQ ID NO: 56843 - DNA, 30 bp, Homo sapiens
  chr20:2853887-2853917
  hyper
ggtgcactcgcagccggtccttccggggtc

SEQ ID NO: 56844 - DNA, 30 bp, Homo sapiens
  chr20:2854619-2854649
  hyper
gtgccgacccctcgcgactgcccaggaact

SEQ ID NO: 56845 - DNA, 571 bp, Homo sapiens; identical to SEQ ID NO: 12735
  chr20:3052453-3053024
  hyper

SEQ ID NO: 56846 - DNA, 16 bp, Homo sapiens
  chr20:3073375-3073391
  hyper
acgcagccagacaccc

SEQ ID NO: 56847 - DNA, 359 bp, Homo sapiens
  chr20:3073560-3073919
  hyper
cgcagactgctaagagcagcatgagcacggctccggcggcccccagggccccgcgggtcggcgccaccccggagcgcggtgcccggaatcacttagcgccatcagccgggcggctgggagggggaagcggccgatccgggcggctgggagggggaagcggccgatccaggcggcagcggagggggctgcagcggaggcggccccggcttgcacgctcgcccttccgcctgcccggcagggccccgtctgagccccaggccccaggcccagcggcgccgctcgccggtgaaggaaaccagcgcagagaggccgcgctgccaggcgcgtggtggtccgggggtccacgtgtgagcctcgcc

SEQ ID NO: 56848 - DNA, 87 bp, Homo sapiens
  chr20:3140550-3140637
  hyper
gcgagtgacggatgcggccgaggctcaaaagactctgtcagcgtttcccaaggacattttccactggaggacgttgttgaggaggca

SEQ ID NO: 56849 - DNA, 301 bp, Homo sapiens
  chr20:3154655-3154956
  hyper
tccgctagggaggggtcgggacgagccgtcgcgggtggatccgcccggccgagcaacgacccgcccgggcgcgaggaccacgggctgtcgtgcgggaggcgtcgaggggcagtaaactccgttcgtgaccaaacggagacgatttgaaacttgctgctcacactggatcaccgtctggaaggtgcgacggggaaaaaatacacattacactccagcaggattgaacgctttcaccctgtgccccgcgcctggcgtaacgcgtggccccagaccacacgctgtaacccggggtgagagggag

SEQ ID NO: 56850 - DNA, 30 bp, Homo sapiens
  chr20:3185362-3185392
  hyper
actactcggagccccgcccagcggcacatc

SEQ ID NO: 56851 - DNA, 30 bp, Homo sapiens
  chr20:3189662-3189692
  hyper
cctaggagtgaaaacgggtgagaagtttgg

SEQ ID NO: 56852 - DNA, 141 bp, Homo sapiens
  chr20:3218779-3218920
  hyper
cagtcctgggaccgcgtcccggccgcctggaagccagagccgttggtccaaaagggagaacaattgggggtgggaggagtatctgagggacacatgggtcgggggaggctgcgccctccctgggccggtccccggatggtc

SEQ ID NO: 56853 - DNA, 941 bp, Homo sapiens; identical to SEQ ID NO: 12741
  chr20:3220009-3220950
  hyper

SEQ ID NO: 56854 - DNA, 299 bp, Homo sapiens; identical to SEQ ID NO: 12742
  chr20:3229180-3229479
  hyper

SEQ ID NO: 56855 - DNA, 238 bp, Homo sapiens
  chr20:3229526-3229764
  hyper
cgccaagctttcactgcgcggaaacgcgcccatcaggctggaaaggcgtggttcctactacagctcggccgcggcaggctggggccgagaaccggcacccgtgcacggcggactaagacgagggtgagggacacgggtgggccgggagagccccgttcccatagccggcttccttgagcccctccccaagttctgggactccccaagttcccaccccgcaagccagtgtggtttcttc

SEQ ID NO: 56856 - DNA, 30 bp, Homo sapiens
  chr20:3388247-3388277
  hyper
gggtctcagttgcccgcagggcggctccac

SEQ ID NO: 56857 - DNA, 437 bp, Homo sapiens; identical to SEQ ID NO: 12744
  chr20:3451348-3451785
  hyper

SEQ ID NO: 56858 - DNA, 60 bp, Homo sapiens
  chr20:3452265-3452325
  hyper
ggagagggtagggccgccctatggggtttgagggccatttgcttccggggagatcatcgt

SEQ ID NO: 56859 - DNA, 30 bp, Homo sapiens; identical to SEQ ID NO: 12746
  chr20:3632574-3632604
  hyper

SEQ ID NO: 56860 - DNA, 237 bp, Homo sapiens
  chr20:3641310-3641547
  hyper
cggggaccctgagggcgaagtcatcggcccacccgggcggagatatcccctggagaacccccgccctcgcccggatcccggccgcgcgtacccacgaggcccgcgtaggcgcgcaggcagcgggcgccctggtccagcaggcagccgtcgggggcgctgggcgctggggtgcacgagacctgaaaggccaggaggcgaggcctgcgcggcgggagggcggtgagccggagagaggcc

SEQ ID NO: 56861 - DNA, 173 bp, Homo sapiens
  chr20:3641773-3641946
  hyper
cggcgcagggcccggcggcagcgggcgcggggacagcccccctgcgcagcccggcccaggcactgcgccacatactcggagcgcaaacgctggcaccgcgcgtccgccgtgcaggcttcggccgcgtccacacatcggttccctccgaccgagctcgccgaccctgggaaagg

SEQ ID NO: 56862 - DNA, 584 bp, Homo sapiens
  chr20:3662531-3663115
  hyper
gcgcaccccgcccgcgtcctcaccttgaagcaccccggcgcctggcactggccagagcagcagcagtagtagcagcagcagcaacggggtcccccgagctctccggggcctccagcccatagctgtgagctcctcggcctctaggcagcggctcgcaactccggctccgcccaggctggattgcggccgacccgtgcccggtgcagcctcaggccgccgccttcggaccttcccgcccccacctcccaccgcccgccctcgctcccgcctcccctccccgccaaccccgctcggagcctggccaggggccccgacggcgcgcgccatgggggagccgggtcgccactcccggaccgccgcccctcgagggggtggagctgggcggaggagggaatccgtgcggcccctcggatgaccggcccgagccgtccctccccgtcggtctcagagggcctctactcctgagaggaggagagaaccgctgggaaggttcttggaggaccgcggcgtggtgggatgaggcggtgggcaaaggccgcctctcgctgctgaagttggccccaggagcgcgatcttccgtggtc

SEQ ID NO: 56863 - DNA, 717 bp, Homo sapiens
  chr20:3758562-3759279
  hyper
gggacaggctaggtctctgcacgtggcttctgggctctggaaagcggtccattctcctgacccggatctccggagtggtaggaggcggctcagtcccgggcctgcgctcctagagttcctgtcccatctcctcccacgctcacccatcccaaggaaggagggcactcgggccccagcaggctcgtgagagcagcgggctccgccctcccaatggtctatccatcggtgggtgggtccggcgcggcgtcggggctctggcgggtacccgggcgtccccgcgcggcccgggccgccgctcaccgctgcttacgctccgcctgctggagccgccgggagaggtcttcgatccgcacattcttgagctggagcaggtgctccaggcgccttaccttcatctgcaggacctaagccgcaccgcgcaggcgtcaagcctggcggtctgctccctcctgcccggcctctgctggccgcgagcccccacccgcagccttcctagacccctcacctgcacggtctcttgagaggccaacagctcctgctccttttcagcgatctggaggacgaagctggggtcgccctgcaacgcccggttatacgctggaggccgaggcgccggcggccggtcccagctggggtgggaagcagcttagcggaggcttggacctcgggccctacactcacccttccagggccctcgaccaggccttcccttctccc

SEQ ID NO: 56864 - DNA, 30 bp, Homo sapiens
  chr20:3762152-3762182
  hyper
ttttatcccctccccgctacctcctctcag

SEQ ID NO: 56865 - DNA, 58 bp, Homo sapiens; identical to SEQ ID NO: 12749
  chr20:3766678-3766736
  hyper

SEQ ID NO: 56866 - DNA, 30 bp, Homo sapiens
  chr20:3766946-3766976
  hyper
ccaccccgtacttgcgctccgacgccagga

SEQ ID NO: 56867 - DNA, 30 bp, Homo sapiens
  chr20:3767610-3767640
  hyper
atcgctactgcgcccggcggacagcgactt

SEQ ID NO: 56868 - DNA, 30 bp, Homo sapiens; identical to SEQ ID NO: 12750
  chr20:3801303-3801333
  hyper

SEQ ID NO: 56869 - DNA, 19 bp, Homo sapiens
  chr20:3869439-3869458
  hyper
acctctctctccaacgcag

SEQ ID NO: 56870 - DNA, 892 bp, Homo sapiens
  chr20:4129264-4130156
  hyper
agggagggagggggtgcgggcccagatgtgggcgtgggacccgggtttccgaggcagggatccagcagtctccggcttcaggggcttctagcttcccggctcccggcggggcgggcccggggaggagctcggcgggtccccgcccagaggcggagcggagggccgggccggagcggggtgggtaggggacgcgaggcggagcggggccccacacaggccgcggcggctggctcgggcccctacggtcccggcggcggctggaggaggaagccaggcggctggcggaggaggagagacggaggaggccgagaccggagcgccgctcgccgcagacttacttccccggctcagcagggaaaggtacggtgcgcccgctctccggccccgggccccggctctcagcctcccccgggcgcaggcaggggctgcggccgccgcgagagggtgaggggcccggagcggtccccgagggctcggccggcccggggcttgggcggccagcgcggcgctcgggcgctcgggcgggggtgcggggcgttccgggaggctcgcggggagcagggggcgccgcgcccccctggcttccgccggggtaagcagtggtgtgggccggggtggcggcgatcccggcgccagggctgctcggcccgggccgggcgccgggggtagagggccggacggacccccgggctacgtgcgggaggggagcgtcccgggcgccctgcaggcgcgctccgtgggcgcagacaaagccgggcgcggacgccccgcgacgactcgggctgccgggagggtgggcaccggggagaggacagaaggctcccgggtgatggcccgaacgccaggagaggctgtgctgacttccccctctgggctccgggcgtccgggtgg

SEQ ID NO: 56871 - DNA, 30 bp, Homo sapiens
  chr20:4229996-4230026
  hyper
ggccgagagacgggcgccacactccagggt

SEQ ID NO: 56872 - DNA, 1406 bp, Homo sapiens
  chr20:4803015-4804421
  hyper
aaaaacacgttctaggcgccgggattccagatacctgggaaatagagtgcacgcagctgttgagaggcctcgcgcttggcttctcctatcactgaggcgcagaggtgctgtggacagcccagacccacacggcgcccgaggtgaaacagaaccctcagtctccctatgaggccactggcactctcggctgtccccagagctctccgacttagagctgaatgcaaagtaagcgctcgaaatgcagaagtagccggggccgcccacggcacctgcctcgctcggggcgagagaagacgccaggctgaggtcccagcgacctcaggcaccagctccgaaggagggcggggagaccgcaaaggggaagtgcccggagggccaacggcccccgcgcaccctgcgcccctctgaagcgcgccgcctccccgcgccggggactgggacctgcctctggggaatccgcctagaagacggcggcggactggggtcgggcactctccagggctgtcaggccctccccagccctgcacctgccgcgccgccccacctcgccaggaagtctcagagaccccggggatggggtgggagcgccttcccatcgcgggctcaaaaagaaggaaggacgcccccaggggtcgtagaaggaggactagctccaagccacaactttcttcggacccaaggcaggccggctggggctccgcgcctacacggcccctggcgggggtccgcgcgccccgggagccccgcggctcggggaggaaagaggagacaagagacaggcgaggattacggggctgacccagccggggtagggaccatcgtggaaaaactttggcgaggtggggggacgcggaaagagagcggcccgcgccctgcaccttgcgccgggcatcccgcgccagtgcctcgctcccagtgccccgcgccccgcgccccgcgccttgccttcaccccgggccagctgcatcgcgcccgcgccgcaggaaccgtggagttggaaagtgggggcgccgcggctggggggctgcttcagctgcgcctcggccagcgatcggcgggccgggctcaaatccagccaggctgggcaggcggtggccgcgcgactggggaccgggcgccccgccctcctcgctcccctcctccttcctctccctccctccagccccttggcctttttcagcccctaccggatctgctcgtccgctgtcctctcttttctctcgctcttcatatcactctccaccccttcgccttgccttcgcctttcttcctccccttgtctcctgccccctcctcttctcccctcccctctaggggcggagcttctcccctccctcccagacaatgctgtggctgcgtccccttccccgccagctcgtccaggctcccgccgccagcgattcttc

SEQ ID NO: 56873 - DNA, 1001 bp, Homo sapiens
  chr20:4981390-4982391
  hyper
ttaaagtagtcacactcgaaatgtcattttttccccccgaaaggtggcaaggagggggactcgcgaccccccagggaacaggccagaaaggccccggggtcggaggagctgcttctaaaattacttcgcgcagtctttgtagaagggaagaaagcaagaatgtaaaaggcaccctcttgccgcccctcctgatgcccctgaattccagggggcgagacgatgcccgtgcgcaccaccgggggaggggcgagggaagcgaccccaggacgcgcgggcgcagagcccgggaggaggcggcggcagccagtggggttctgggggcgccccatttgcctccccgctgcgcggcctgagggcccgagcgcgctgtggctcccgtggcgggaaggggtgggtaccccgggggcccggcccggccggcagaacggcaggagctgagggccgccgggcatcttgggccccggggccagggtggccggcgggcgcggggtcccgggagatgggtcggggtgggggcgcgcaggccgcgccgcggggccggtgggtgacagcgcgcgggggccgtgccaggccggcctcgtgggcgcggcgagcacctcgcggccccgccggcaggtgcggcccgcaggccgggcagggggcgcggcggccgggctctcacctggctgcagctcgcgtggttcccgtcctgccgccgcgcctcggcgccgcagtgcccgctgcagcctccgcctccggtccccgcgacagccgcctgcaaaatggcgccgcggaggggcgggccgggggcggggtgcagcggagccgcccgcccccgcgccggtctggggcccacctccctccccgcccccgacccctgccctcgggcctccccccggggaggggctgctccctggcacccggcagcgctccccggaacatcccgggcctcgcacccagccgtccccttcccgttcctttcatttccctcccctgcgcagaaagatcgccccccttcgcga

SEQ ID NO: 56874 - DNA, 30 bp, Homo sapiens; identical to SEQ ID NO: 12756
  chr20:5100005-5100035
  hyper

SEQ ID NO: 56875 - DNA, 30 bp, Homo sapiens
  chr20:5100892-5100922
  hyper
tcagcctcccactacgtgggtagaaagttt

SEQ ID NO: 56876 - DNA, 30 bp, Homo sapiens; identical to SEQ ID NO: 12757
  chr20:5107431-5107461
  hyper

SEQ ID NO: 56877 - DNA, 790 bp, Homo sapiens; identical to SEQ ID NO: 12758
  chr20:5296191-5296981
  hyper

SEQ ID NO: 56878 - DNA, 42 bp, Homo sapiens; identical to SEQ ID NO: 12759
  chr20:5297005-5297047
  hyper

SEQ ID NO: 56879 - DNA, 193 bp, Homo sapiens; identical to SEQ ID NO: 12760
  chr20:5297225-5297418
  hyper

SEQ ID NO: 56880 - DNA, 168 bp, Homo sapiens; identical to SEQ ID NO: 12761
  chr20:5297672-5297840
  hyper

SEQ ID NO: 56881 - DNA, 580 bp, Homo sapiens; identical to SEQ ID NO: 12762
  chr20:5891857-5892437
  hyper

SEQ ID NO: 56882 - DNA, 30 bp, Homo sapiens
  chr20:5931594-5931624
  hyper
cggacagatctgcgcgtatcctggagccgg

SEQ ID NO: 56883 - DNA, 30 bp, Homo sapiens
  chr20:5986816-5986846
  hyper
atggagaagcggctcgccagtgtcccaggc

SEQ ID NO: 56884 - DNA, 787 bp, Homo sapiens
  chr20:6032594-6033381
  hyper
aagaaagtgactcctgtgtggcgcttcaaactgggcccgcttgctcgaaaaatgtagctggtgtctttttgaaccctcctacgagctgggcacccgggtcacccctcgaggaagaacgcagccctgccccccggagcgcacgcgcagcctggctctgcgctcaggccggctgaaaacgcggggcgcccggactcaccccgttcaaggaacgtgccgctgagatccaggacttcgagcgtgaccaggggcgcgccatcctctccagcgaacgccgcctcggcgatgcccccctgggctccgcgacccagcgcggtgcaggagaggttgaggagctgcagcgcggggaagcaggcgaaggcccggggctgcagcgcccgcagcggattcccggcgagcgccagggcgcggaggctgctcagcgcgggcccggtgcacggcggcagagcggccagctggttgtagctgaggtccagggtgtgcagccccgccggcccacccgggccccagcgcagcgcggcgatgcggttgtggcgcagggtcagcacctgcagctgctccaggtggccgagctcggaagtgctcagggcgcgcagcaggttgtggctggcgtcgaggctgcgcagtgtgcgcggtaggcagccgggcaggcgctccaggttgcggttcgccagggtcaaggccgtcgcatccgcggcgggcagcccctcgcagggcgagtcggtggcgttgctgccactgctcccccaggggccctgctgagtgacccggaagagcgggaccttctcct

SEQ ID NO: 56885 - DNA, 646 bp, Homo sapiens
  chr20:6103387-6104033
  hyper
ctagctccccagccctagctccggagcacccacctcctttccaggagcccgtagcgtccagcctcgcagtcgcgcacgtggagagctgcgtccctacaaactaccccgggccgagccgaggagcgggcgctggcgaagtggggagcggggggcgcccagtggcggcggctgctcagctaaggctgcggcaggtgagggctggagccagggcgagcaggcgaagctgcctcgggacctcccacggaggctcggtgcctgcccccagcctggcgcggcgtgcccggtgcactgcacggccccagcggcccggctgagggcagcgcgcagcgtggcaggcgagggcacgcccagccccgggcctgctaggtctcgctcccgcggagaggaggcgcagtctgcagatttttaagggcaaagggtggccgaagggctgctcggcggagagaaggcggcgagaacccggggcgcacgctcagtatctgcagctcctcttgcgatgtctcatcctgacgctttaaggccgcctccagtttccctgttcccccaggcccgccggggactagcccagatgattaaagccgcgccacttcccctcctttcaggcatacccatcactcacaccccggggtgcgtccaggcccaggag

SEQ ID NO: 56886 - DNA, 30 bp, Homo sapiens
  chr20:6404265-6404295
  hyper
aaattacatcaagtacattcagaaagatta

SEQ ID NO: 56887 - DNA, 1193 bp, Homo sapiens
  chr20:6748426-6749619
  hyper
gggactggcagccgccgccgcacatctgccgccacagcctccgccggctacccgaacgttctcggggccagcgccgagtggatcaccggggaccgcgaggcacccgcgcgccgcagaccccgcgcgggctggagcacccggcagagcgcgccacagcgccgtggcctctgctgcccgggctgcgccagagccgcggacgggcgcgcagagcgccggggactccggagccgatccctagcgccgcgatgcggagcacctactgcaggagatcgggggcctgggacgcgctggccgaggtgtgatcggaccccaggctagccacaaagggcacttggccccagggctaggagagcgaggggagagcacagccacccgcctcggcggcccgggactcggctcgactcgccggagaatgcgcccgaggacgacggggcgccagagccgcggtgctttcaactggcgagcgcgaatgggggtgcactggagtaaggcagagtgatgcgggggggcaactcgcctggcaccgagatcgccgccgtgcccttccctggacccggcgtcgcccaggatggctgccccgagccatgggccgcggcggagctagcgcggagcgcccgaccctcgacccccgagtcccggagccggccccgcgcggggccacgcgtccctcgggcgctggttcctaaggaggacgacagcaccagcttctcctttctcccttcccttccctgccccgcactcctccccctgctcgctgttgttgtgtgtcagcacttggctggggacttcttgaacttgcagggagaataacttgcgcaccccactttgcgccggtgcctttgccccagcggagcctgcttcgccatctccgagccccaccgcccctccactcctcggccttgcccgacactgagacgctgttcccagcgtgaaaagagagactgcgcggccggcacccgggagaaggaggaggcaaagaaaaggaacggacattcggtccttgcgccaggtcctttgaccagagtttttccatgtggacgctctttcaatggacgtgtccccgcgtgcttcttagacggactgcggtctcctaaaggtagaggacgcgggccagggcccggggtgggtggtgggtgggagggggatttgggcagccactgcggtagagcccttccttacgtccaggccagaag

SEQ ID NO: 56888 - DNA, 30 bp, Homo sapiens
  chr20:7812334-7812364
  hyper
tgaccagagtcaaaatagttgtgcagtcat

SEQ ID NO: 56889 - DNA, 30 bp, Homo sapiens
  chr20:8000153-8000183
  hyper
tgctccggcggcagcgcggcctcctcgggg

SEQ ID NO: 56890 - DNA, 30 bp, Homo sapiens
  chr20:8000573-8000603
  hyper
gttagaacatgcaccgctgctgcccaggct

SEQ ID NO: 56891 - DNA, 1596 bp, Homo sapiens
  chr20:8112346-8113942
  hyper
gtctcgaaagcacaacgtaaccgtttgcccgggtttcaagatcagcgcgctgcaaactctcaggcgcggccaggtttcctcaaagagcctctcaactgcgctcttctctgctgataaatgataattctcttcaaaaagctggtttgtggctggcgctggagagctccagctagagccaaaagccaggggttgcctctttggttcctcccgatgggccccttttcccagccagttgggatccaaagacgctccggagctcgagcccaaattcccaagaaaaccccaaagagcgtaaggctcctggggacccctagcacctctgcaaccagggcacggggcatgctcagagcgaatgcgggaggcaggcgttggctgcaatggggctcgggagccaggaggtgccgctgcgtccccgcttcctggcgcctgacccagcgtgcaaagttgggctgggagccgcggggggaaggaaggacccagcgagcgagggtggcggggaaggggggcgggggggaggaggagggaggagggaaaagagcggttagggggggcgccgggcgtgtgtcactcgctctctccctctgtgtatagaggatgtgctgaatggtgcgctttgaggcggcggcggcggaggagcagaatccgccgcgactggcagcctcggctgaccggctcggcttctcttcgccttccgaggctcctcatccaccgcgggctccagacctcgcgtcccgcccggggcatggccgggcgctgcgcccccgcgcgctctgcctgctgagcggcgccggagggaggtgcggaggccgggaggccggggaggccggcggggagcagagtcgagcgcctccggagcagagaaaggagcccgcgccccgcgccccgcgccccgcgcacggtccccagtccctgccgcgctcgcccgggccgcccggagcccagatgagcccagatggccggggctcaacccggagtgcacgccttgcaactcaagcccgtgtgcgtgtccgacagcctcaagaagggcaccaaattcgtcaagtgggatgatgtaagtattggggcggcccgagtcggggcgctggctcgggcaccgggcagggcgggcgtcgtgggggtggggcaaggggcgcgttatgcaatgggcgcactgggagcgggcaggggcagcctcgggcgcacaggttggcatctgccaaagcggatgtccaagggcagaagctttgcgcgcgctcctgtttcatcgggcttcagtagttgccatcctttctgggtctggcaggcgccccctgagggtcttacatcttttgggccagtggagagggaggggcaagctttgcctggtgacaggtcctgagagttcggaaagtagggagtgtgaagttgggaccaactggaaagcgcctggtgtgaacaaatcgcgtccctctccgcctgcggacgcaccccctattacctcttttgcccgatttcaagaaggaaggacctgaagttcaaaacactttagtgattgcgaaccctcttggcgcttttgtgggagccaaggcggcggaggacacaacggtccagccaacaggtggtcgttgatgccaaact

SEQ ID NO: 56892 - DNA, 1412 bp, Homo sapiens
  chr20:9048804-9050216
  hyper
agggattaaatgaataaaaagcgtttagaacactgcaggacgcattgtaggcgctgtatgggtttatgaaaccgaatataaacaaataagcacgtcccccacccagccaacggctttgggggccccgttctggccagtcctgagcccctccacacggcccacggcgggctgcgggtctcccatccgaggagggtgccgcttttctgcccccgctccctgggttctgcgcccagcgccatcccgtgcgcccccgacccttgggcatggggcacatgccgcggggagccgccagggagaccccagaggagcgcgccgcgggccggcttccccggatgccccacccacctcctcttggcgctgcccaccacctgcctcggctgctcggcccccggctcgcgaggctgcgcccccgacccagtcggcgcccactcctcgccctgcgggctcgcggcaactgggcggccggcccggcccctgcccacccccagcccagcccggcgcgccgcactgggcatgctccgtagcctgggcaggttggggctgcgaggcgacagctcgggctctggagccgggaggcgagaacgaggagggaggctcgggggcaggggaggaggaagcggctggccgctgaggggcggcggggcccggagcgggggacgcgcagggcccggcggtgggcgggcgggtcggcgctgccccgtgggctcgctggggagccacggcggagacccccgccctcaactgaggtaaggaccgcgcggcgcggagacggggaggcggggaggccagggagggggtgcggaggcaggcgggagggcgggactggggtgcgccgggagggggcttggcggcggctctttatggcgaggagggggtggtggcgccgcgccgggagcagtaagtgagctgcaccgccaacaagatctctcacacacagacacacacacgcacacgcacacacgggcgcgcacacacacgcgcgtacacactgggtctccaggcagcggccgtcgccgcatccccggcagcagctccaggcaaagtgacaggtaggaaaaggcatttcgggtcccgcccgaggatgctcccgcccgccttggccctcagggcttgtttgctttccgcgggtgcgtcccggacgcgcgcgcgcgcgcacccggatgcccagcggggaccccgtgcaggtgccgggtgccaggcgccctgtgcgcgcgggaggcaggggacccagacgccatcccccttcccctgcagtcatcgcctgctgggtttcctcagactctctccagacgttcaccctcttctgggctagaaatagctcggctcgacgtgtatatgattattttggttggaaatagttggcaccgtgcaacgcatgtaaatgtgtatgcgtgtggatcttcttgcctctt

SEQ ID NO: 56893 - DNA, 30 bp, Homo sapiens; identical to SEQ ID NO: 12766
  chr20:9112082-9112112
  hyper

SEQ ID NO: 56894 - DNA, 30 bp, Homo sapiens
  chr20:9329023-9329053
  hyper
gattaactgggagtacgatgatacagctaa

SEQ ID NO: 56895 - DNA, 508 bp, Homo sapiens; identical to SEQ ID NO: 12767
  chr20:9487211-9487719
  hyper

SEQ ID NO: 56896 - DNA, 209 bp, Homo sapiens
  chr20:9487788-9487997
  hyper
cgcgttgcctgctgtggctttgctgctctgggctacaaggccgggccggcttgggttgagactcccgaggctgcaggcgaggcggtgggtacaaacttccgtagatcctgctgtttctctgaagaagaagaaaaacattggccccggagaattagataatcctggggaagaaatagatttgggcctggggcctgcgggggtaggtgccc

SEQ ID NO: 56897 - DNA, 76 bp, Homo sapiens; identical to SEQ ID NO: 12769
  chr20:9488205-9488281
  hyper

SEQ ID NO: 56898 - DNA, 1440 bp, Homo sapiens
  chr20:9488328-9489768
  hyper
cgcacctggcgggctggaccgggacagggggcggtgcgcaccggggctcccaagcagccttagcggtggagaccttccgaggggaggcgagcctgcggtttgtctcccgttaaggtggaagactggatttttcctccagttccgatctagggtgaagtcccttctcccgcgccctcatgcccagattggggaatgaggggacagcagaaaaaaagccctgacatagcccagagcctccagcagctttgggcgccctgaggcgttggaggtaggaggaggtgtgaatttcattcccgcctctctgggcatggagcttagcttagcgaatagggaccctacagagggaacaccaatgaatgagtccaccttctctcctggtcctagggcccgaacccacttgtctccagggctggcgccagccccgcgcacaaacaccgcttcctctgggtaaccgcctggactgcctgcgcgccctcggagcccgcctggttggcagtctctgcttcgatctcctctaagcagaatctattttctgtttggaaaatctcttacaggtcctggggttgtcccaggaccaaactgcagcgaggccgcgcgcccctggccctggaacgcagcatcctccccattttacctggaggctagatcgttggggctcttcgggggaatttccctgggcacggatactgtgctggcggtttagaaaagaaaaagaaaaagaagcgaagcctctgtaacctggtctcctccctctcctcggtttaataccctgcctcccctactagtctccaggcttttctctggacaggggagggacccgagaagcccgcggccagtgatcgccagggtctgtctcgtcgcccatcctccccgccccagagcaaggtcggcagaggcttcccggggcataagaacttcaaagaaagtctcagaggagccacgctaccaggaactttcgtcgccctttaaaattgtcagatagacaagtaaaaacagtaactaactaagggaacaatggactcttgtgacatgtgtaactcttccaggtaccccaacactaaagaccccgtggttcctgtcgccatggcctgaacgtactcaactccagccccggggctgacctctctccctgagctttggagcgggtttggacctagccgttgcaagtaggcatgacttttatcacccatcgctatacccagagcagctgctcgaatgtgccaaggagcccaactcgggtgcaaagcgccgacgtctttcccaggttgaggacatcgcgagccagaggtgcaggcagcgaggcgcccaacagtagaatgcatcttccttcccgcgggcagaagccgtcaagtctggagtccgcagcgggcgcgcgggccagcccagggatactgagccatgagcaaccaggcccacctaccgccgcgccatccaaaggta

SEQ ID NO: 56899 - DNA, 755 bp, Homo sapiens
  chr20:9494982-9495737
  hyper
ccaccgttttctttcgggaaccagatgcgttttcagaagacagtactccagtgataaggtatctacaccacttaataactgtacctggtaaggagatttaataaggctgagggtggtattaagtttctcagaacagactcatctttgcggatgcagttgcagaacaggaaacagacccagggagaagtttagtccccccagatctcattggccctccgcacaagccaagccacagccactcctgccacacaatcggattgctttcagcactcgcagccgtggaccgccgtgcggtcctttcctccgcagtgagccgatttgctctgccagcagctgtcggtgccgcgctcgacaccgagtcctagctaggcgctcacagaatacgcgctccctccctcccccttctctgtcccccgcctctcgctcaccccggcccactccagcggcgactttgagggattccctctctggcggcctctgcagcagcacagccggcctcattcggggcactgcgagtatggatctccaaggaagaggggtccccagcatcgacagacttcgagttctcctgatgttgttccgtgagtagcgatttggcgactgggagagaggacgggcactctttgcagagaacagagccggcaaagtaaagtcaattagcttgagataaaaaatatggcccttaatgttttgcggtgttttttctttttttcttttaggggaggagggagggccttcctcgccggtggcaggga

SEQ ID NO: 56900 - DNA, 99 bp, Homo sapiens
  chr20:9495961-9496060
  hyper
aaacggctcgtagagcgcacagctgctggcagagaactttgtcactccaaagcctgcagagcactgtctccccaccctagcgcccgagacgcgtgggct

SEQ ID NO: 56901 - DNA, 200 bp, Homo sapiens
  chr20:9496330-9496530
  hyper
ttcctcaaggctcttcgaagacctgggttgcccgccttctttcccacaccccggcaggctgctcccgaatgctgcatggggattccagcttgtaatgccttctgttcccctgcctgctttgaaagtaaacccccttctctccgcttccctatcggggctgcacgtagagcatctaaccgcatgttcccggaacctgggat

SEQ ID NO: 56902 - DNA, 853 bp, Homo sapiens
  chr20:9496580-9497433
  hyper
cgccctttacagcccccgccccggggccgggcgagctgagggggcgcggggcgtctgtgttcccagctgatcacagaacaggccgatatcgcattgacccggggagctgaggtgaagggccgctgtggccacagccagtcggagctgcaagtgttctgggtggatcgcgcatatgcactcaaaatgctctttgtaaaggtaactccgagcccagcgggcagaggggccgcaggctccgcgtgggtgtgggaagtggcggcccctaggtttaagaacccagacgctgcggggacgattgaagcgcacctccccggctcaacaggaaagccacaacatgtccaagggacctgaggcgacttggaggctgagcaaagtgcagtttgtctacgactcctcggagaaaacccacttcaaagacgcagtcagtggtgagtggaggctggcatggctggggagggagcctgggaactcgcagaacaggcttggagagagaattcctcaaggttttggaaaccgtcccacgctttgaggtcccaggccaagtcttccctcggcttgctctttagggcggaagaggcgggagcgcccatgagtcttctgggtctcaggccttgtagatccgccaggaaccgcaggcgtggggacccaaacgtcacccgtggcctgatcctagataagaagtcccttgaaggcctgtcgttccctggtgcttcaaaacgacctcttatgatttggcctttgaaggaccacggagaagggcaaagctgcattttaattttcttccgcatcctggttttgtttcttatgcgctaaaactgcaagggggcagtgcgactttccttttcagtcagga

SEQ ID NO: 56903 - DNA, 16 bp, Homo sapiens
  chr20:9819466-9819482
  hyper
cgctcccagcgccatg

SEQ ID NO: 56904 - DNA, 105 bp, Homo sapiens; identical to SEQ ID NO: 12776
  chr20:9819682-9819787
  hyper

SEQ ID NO: 56905 - DNA, 2 bp, Homo sapiens
  chr20:9819833-9819835
  hyper
cg

SEQ ID NO: 56906 - DNA, 512 bp, Homo sapiens
  chr20:10015467-10015979
  hyper
cgcagctaccccatcccgcccaggccggccacctggcgtcgaagccaggcgcgaggggcggaggcggaggcgggggcgggggcggaggcggaggcggaggcggaggcggaggcggaggcggaggcggaggcggaggcgagcaccgccccaccgcgcacgctgcggttgccccggcagccgcgccctgcgtggcggaagctcacaatcagcccggtccctccggcttccaccccgccccctgcgctcacctgcccgcgcgctcgccttccggggacccggggcccatggacacatacacccagccctgctgtcccgcgcgccagctcaccagccctacccaagggacatcattcacgcctgggcgcctccgccgggctccgggagcccaaggtcgcggctgggccagcgctgagcgtcagaggacgagagcaggggcctccccggtcgccccagcaggcccaggcacataggtgcccagagatccctggcttctgatcgcccggaagactaag

SEQ ID NO: 56907 - DNA, 592 bp, Homo sapiens; identical to SEQ ID NO: 12780
  chr20:10198138-10198730
  hyper

SEQ ID NO: 56908 - DNA, 64 bp, Homo sapiens; identical to SEQ ID NO: 12781
  chr20:10198940-10199004
  hyper

SEQ ID NO: 56909 - DNA, 860 bp, Homo sapiens
  chr20:10199254-10200114
  hyper
gcgtttgcccaagaccgagtgttaaaatggagtcataagagtcgccccgtgcgggtgtttatagaaggtgaaaacacgcaggtttgcaggccagcgcactgggaaccgagtcaagcgcgccgcagcccgggccccgcccccgcccccgccgtgccccgcccccacttcctcccgcccctcgctgggcggctattaaaagctgctgacgtcaaaacggacggccatctttgatgagggcagagctcacgttgcattgaagacgaaacctcggggaggtcaggcgctgtctttccttccctccctgctcggcggctccaccacagttgcaacctgcagaggcccggagaacacaaccctcccgagaagcccaggtaagaacccccctccccaggtcgtggctctggctcgggatggctgcatacccagaagggacagcagctgggcagtccgagtgggcttgggtaaatacaagtattggtgcacttagggtgcggtattccgtgtgtgcacgtctggtgggggctttataaagtgttttcgaggtgagctgctggggaaaagggaaacgggagccctgcaaatggagcgacggggaggaagagcgagggtacgtaccgaataataacttactcttttgaaacagtagtgggaccccctctttcttccattttgcgatgcagttttcagagatatttaggctgttgagttttcctcccctgtcgttctaaccctattattatgactgttgtcgttagggtgctattatccagggaagaattaagggggagacagggtgtgggtgctggggaggcgaaaggagaaagggggagttcccgccccgggcaagctgagctgctgca

SEQ ID NO: 56910 - DNA, 173 bp, Homo sapiens
  chr20:10200153-10200326
  hyper
cgcctgctccacgtcaactgcaggctggcgggaggcgggcgggtcgtgccgggtgggagggctctgcggagggctggcgcgggtgggctggcttcggggactgcggcggcccgcgctcagcaccctggatagcaacaccgagggctcgcgcgggcgccctcgacctttcagca

SEQ ID NO: 56911 - DNA, 48 bp, Homo sapiens
  chr20:10200350-10200398
  hyper
cgcctcatctgcctgcggcagaaatgcctggccggggctggatgtgcc

SEQ ID NO: 56912 - DNA, 30 bp, Homo sapiens; identical to SEQ ID NO: 12783
  chr20:10414357-10414387
  hyper

SEQ ID NO: 56913 - DNA, 575 bp, Homo sapiens; identical to SEQ ID NO: 12784
  chr20:10415534-10416109
  hyper

SEQ ID NO: 56914 - DNA, 31 bp, Homo sapiens; identical to SEQ ID NO: 12785
  chr20:10491693-10491724
  hyper

SEQ ID NO: 56915 - DNA, 30 bp, Homo sapiens
  chr20:10653149-10653179
  hyper
aatgggacccacctcgactaccccagccga

SEQ ID NO: 56916 - DNA, 401 bp, Homo sapiens
  chr20:10653623-10654024
  hyper
ccaactcgaactgacccgaggccccacacacctgccggcgagggaaggaggtaggtcagcgcgggagaaagctgttttcttcgagtatagaggtggcgactccctcccactccccgccccgacgagccctcctcgccgagtgaaaataattttgcgaaactacgttcaaggactcaacatgattccggggcaaaaaaaaaaaaaaatgcacgagtgcggaagaaatccgacgacttcccggggggcaacagcggagcgaacgcgcccctgtccggcctggaggggtcaccctcaggaggcaggggctcccgtgggggagttggcgcgctcagcccaggtgcagccgctcgggcgcaggggcgaggagtcgggcgctcgagggctgccgagcctgctcgcgg

SEQ ID NO: 56917 - DNA, 30 bp, Homo sapiens
  chr20:10654405-10654435
  hyper
tcgcttctttgagacgctccccctcctctt

SEQ ID NO: 56918 - DNA, 1020 bp, Homo sapiens
  chr20:10654668-10655688
  hyper
ccacctctacccagcacgccgggcagggcgcatgcgcgcttattaatattcatgagagggcgtgctcaccctgggcacgcccctccccttcacgttgctggggagggggtagtgcgaggaggaacttggaaggggttgggggcagcgggatgctcagggcggcgtagaagaaccagggccccacaccaacccccgccctcgggagcttcgggccaggagggaagggagagtgcggggaggtacttggaagggatcgttgctcagggacgcctggaggcccccagcggggaccgccccctcgggcgccccgggccgtgcgcctttgcccgcgcgtcggggccccaggtgtaggcgccgcggcgctgactgagcggtcggagcggggcagcttccgccttccgaaccgcctgcgtcagctgcggctttcgccccgggaggagggcctgcctgcccgccgggagttcggcccgcttcccgcgagcgagccgcccagagcgctctgctggcggcagaggcggcggcgaggctggcgcgcttgccgccgtctgctcgccccgcggaggcgacctgggcagacgctgctgggaactttgaaaaactttcctggagccaggcttgccgcagattcgaggggaagcctcggccgcgtcccaccccctcccaaatccgagtctgcggagcctgggagggctcccagcttcctatccaaaccgcgccggggcagaggcgcggggaaaccgggggtagaaggcggcgggcacgccggggccctgttcaggctttgggaagggccggcggagatgctggtgggcttggacgccctccccggcccgacgccccggccgcagtgccgggattgcacctgtaggcggcctccgagcagctctctgggtggcaagagatgggcctgggagggaccgtgtccccagcaccgccagccgcggaacttgccttctctggggtggcagtggaaaccgatactgttttccaccttgaggcaagcctcgcaattaacagcta

SEQ ID NO: 56919 - DNA, 30 bp, Homo sapiens
  chr20:10961919-10961949
  hyper
tcattatttgcagagccaacacctgctaac

SEQ ID NO: 56920 - DNA, 30 bp, Homo sapiens; identical to SEQ ID NO: 12789
  chr20:11667840-11667870
  hyper

SEQ ID NO: 56921 - DNA, 1710 bp, Homo sapiens
  chr20:11871114-11872824
  hyper
caaagccaaatgcaatcggccctctattaccggaggatgccctgtatcccgcacatccactctgccagtgcaagtgttcaataaatgcttaatacattcattgatgaatgacccagagagaaaaactgcagttcgtgggacaaggacgaagtggcctctcagagatgcgggagtgctggctctcctccaccctccccgccttctccaagcccgggttcccgcccacccctcactcctgcttgaggacagggcagacattgcgcatgccccgtatccaaggccgcctccgggagcacctcccatgccgctccgctccctcccggtgaccgggcacgcgcgctcgctcccgcagagcgtgccctgcgtgcgggtgcccgccgagcccgccgggcgctggatctccgagtgccccggccggggcctgaggagcgggcacagggcaaggcggcggacggctgcgtcgcccgaggcgaggaggagcgctggcggtgagtgagggcgccgcgggcgagcgggtcggcgcctccgcgcgtgcgcagcgcgggaccgcccgggcaggggcgcgcgccctgcggccggccggaggggccgagcgaagcgaggagaggccgggctggtggccgcaggtcggcctcggacccacgggaccagaggatcccatatccgtcccccgggctcgagaggcgctggccgcgcgggctggctttccgagggggggggggtcccagtggggcgcgtcgggcccgcgcggaggtcctggtgccgggggcggaggggcagggccgcctcagccgaaagaccgcggggaggggcgcacgagcccgcctggccgtgcggacgcccgcggggtgcgcgaccccggaggtggcggaggtccaggcagggggcgcggtcgggaagcctcggcgcctagcaggtggcgggggccgcgcccctctcccggggaggcgcgcggtgggaagcggagcaaacttcccctaagtaactttcctgaggcgctgccggcggggactccggggaccgacgctccgggtttgcgcggcctcaggcgccgcgggaacccagcgagtggcggcgggcgatggcgggggcggcttcctcctgaggctggactagtcctccgagttctgagtggcatttgtggcccgtttgctctaaaaatagacgtacaagtttggtgttcgggaagaaggatgtttgctctcttgggaagaaaaggcttttacctcctggccttttcaaagaaagtattgttcgggcctgctggggatccctatttatcaagcaacccattgtcctgtgtgtgcctggtgaaagcgagctaattctattattagtcctcaaaagaccaagggagatcacggtgctttttcttttttaaatattccccgccacctcgccaaatcctgtaatacagtttccccaaacttggctgcacagaggagtcgctggggagttttaaaactcttaaagcccaatcgcacaccagaccaattaacacagtgtattttttaaagatccccaggtgatcgcgcagccgagtttggaaacactggtttaatataagaaagtcaaggctttagtttcacatagtagtagcattcagtttgtaattggtgagatgaaactcaaattcattttcctagacaggaactcacaaagagcggtttgtttcccaccagggagggagggaagcgtctctaacggttc

SEQ ID NO: 56922 - DNA, 30 bp, Homo sapiens; identical to SEQ ID NO: 12794
  chr20:12947867-12947897
  hyper

SEQ ID NO: 56923 - DNA, 30 bp, Homo sapiens
  chr20:13200670-13200700
  hyper
cggaggctccatcccggaggcactggggtc

SEQ ID NO: 56924 - DNA, 130 bp, Homo sapiens
  chr20:13200914-13201044
  hyper
caaggagggaagtgcgcggtgccacggaccgacacagttcgctctagcatctgacgctcggactccgcgccctcagccggatcccagagcccttccattcgccaaccgcccactgcaaggcatgagccgc

SEQ ID NO: 56925 - DNA, 416 bp, Homo sapiens
  chr20:13201055-13201471
  hyper
cgaggctgcagcgcggtcatgaggcggtggcccgggatcgacagctgcgcgacgccagcccccaaatcccctctgggcgcggcacccccgggatgagccccccacagaggcaagcccactagagctgagattcactccgagttcctgagcgcctgagccgcgggcactgcgtctctgcagcttccagccaacacctgcgcccgtgaccagacgaacgcctagagagtcggactcccctcccttcccaggctctacggggcgccgcggatccgcgaacagccgtgcccggctagcgggcggcccagcaagtgtcaagacccttcggaacgacactttggcactcctcctctcccccgactgcttcaggcaggggtcgcaggcagacgcatggcttgtccggcgccccctccgttttc

SEQ ID NO: 56926 - DNA, 30 bp, Homo sapiens
  chr20:13202422-13202452
  hyper
gatggtgcgcctggcggccgagctgctgct

SEQ ID NO: 56927 - DNA, 30 bp, Homo sapiens
  chr20:13202687-13202717
  hyper
gcagtagttttgcccgggccacttgactta

SEQ ID NO: 56928 - DNA, 120 bp, Homo sapiens
  chr20:13619689-13619809
  hyper
cctccgcttcggagcggctcacctggcctcagaggtgcagcgctaactccacctggggcttcgttctgagctgcgcatgcgctattgcttatctctacccaccccgcccctgaataagcc

SEQ ID NO: 56929 - DNA, 30 bp, Homo sapiens
  chr20:13765749-13765779
  hyper
gcgaccttgggcggcgagggtcccagcgga

SEQ ID NO: 56930 - DNA, 30 bp, Homo sapiens
  chr20:13976388-13976418
  hyper
gccagccacccccacggcaacatgtacccc

SEQ ID NO: 56931 - DNA, 360 bp, Homo sapiens
  chr20:13976722-13977082
  hyper
gaggcggtgctgcgttcgcctcgcttgcggcggggacccccaggcggcagccccgggcgcggcacaagttcctctgcaccgcagctgggacttgggcactgccggcctgggtgtcccgcggacaggtgcccgtcggcgggcgctcaggctgcagctgccgctgtgcctccgcgctccgtgcaccctcatttctttccttctcgcccctgtccccccagcccccgaatggcaaagcgtacccaccatcgggtgtttaccccttgtctaggtttccttccttcgctgccgcagcgtgacttttgaaacctggaactctaggggagccctaaaacgagcgtgttgtccgtgaggataagtgcc

SEQ ID NO: 56932 - DNA, 30 bp, Homo sapiens
  chr20:15816804-15816834
  hyper
atctaataatagtgacgttttaccttttga

SEQ ID NO: 56933 - DNA, 30 bp, Homo sapiens; identical to SEQ ID NO: 12798
  chr20:16553757-16553787
  hyper

SEQ ID NO: 56934 - DNA, 30 bp, Homo sapiens
  chr20:16554234-16554264
  hyper
agaggttatgggggcgacccggagcggatg

SEQ ID NO: 56935 - DNA, 454 bp, Homo sapiens
  chr20:17206507-17206961
  hyper
tttgagtagctttgaaacagtcgtcctcatttcgttacatacagaacgttcgtgcttcctccctctcaggcaagaagcggagtccgtcgtcagcagttagcagagtccagtgcgagtgcacgtttcttaaccggataacttagttgcccctgccccccgtcgctgcgcccgaattcgcctccagtagaagacgttcagcgggcgacttggcccggcgcctgggatcggtggctatgcgttccccaactagcaccctcgctgtccttgtgcagtggaacgtccccaggtctgagaatgcacctcccgccgtgtccaccccggccgcgtctctcctgaaggcagatcttggaggtgcagccaggactcctagaggagcctcctccagtcaccatcgcgggtggggcgagccgggtctcctgctgggcttcccagccgcttcgctccggacctgcct

SEQ ID NO: 56936 - DNA, 948 bp, Homo sapiens
  chr20:17207231-17208179
  hyper
ggcacagaggccggcgcccctgctcccctcggggcctctgagagcggcacacaccgtaattcccttcccagagcctacagattcccacaaacaatgacatcactccgccgccgctggcctgattacagctggggggattttcctgggcgcgcggcgggccaggctgagatgggggagctctccggtgctgaaaggggcgggggcgcgggctcgctgcgctgcgctgcgctgcgctgcgcccccagaaggcggaggcggccgggccgggccgggccgggggtgggcgggggcgggcccggggcggcccagggcggggcccgccgcttcccccgccctcattggccgctggcggactcacgtcacccgagctggtgctctcccccagcccctagggaattggagctgaggaggagctgaaaatgcagatttagcatcaagcacagacctacactcgctctttctctccggtacacacagctccccacattcgcacccctgcccgcgcgccgggccgcctgactgcacggcttcccctccagccagatgctggagaacacacactgattcgctgctttccaagaccctgttcagtctctttctctatacaaagatttttttaaaaactatatataagaattctttatttgcaccctccctccgagtcccctgctccgccagcctgcgcgcctcctagcaccacttttcactcccaaagaaggatgaagggtggttgtgtctcccagtggaaggcggccgccgggttcctcttctgtgtcatggtttttgcatctgctgagcgaccggtcttcacgaatcattttcttgtggagttgcataaagggggagaggacaaagctcgccaagttgcagcagaacacggctttggagtccgaaaggtaagctctcccatgcatttcgcatgttgtttcaaaacggggggacgggggg

SEQ ID NO: 56937 - DNA, 152 bp, Homo sapiens
  chr20:17208504-17208656
  hyper
gtctcccccacccccatcccccggagaaagaatagtttcctacagacgaggctggacgtttggacactgcaattcacctcggtgtttctcccaccccgcgccgggaggacttccctcccagggacttcggtccctgctcctctccgggaaca

SEQ ID NO: 56938 - DNA, 117 bp, Homo sapiens; identical to SEQ ID NO: 12803
  chr20:17208739-17208856
  hyper

SEQ ID NO: 56939 - DNA, 30 bp, Homo sapiens
  chr20:17209596-17209626
  hyper
ctgtggttttggcccgtggcctgccggctg

SEQ ID NO: 56940 - DNA, 30 bp, Homo sapiens; identical to SEQ ID NO: 12804
  chr20:17429350-17429380
  hyper

SEQ ID NO: 56941 - DNA, 30 bp, Homo sapiens
  chr20:17511464-17511494
  hyper
agggatgaggtcatcgatcgacaggggacc

SEQ ID NO: 56942 - DNA, 30 bp, Homo sapiens
  chr20:17512193-17512223
  hyper
gggttggaaggttacgctgggcaatgaggt

SEQ ID NO: 56943 - DNA, 30 bp, Homo sapiens
  chr20:17518082-17518112
  hyper
aactaactgcacacacgcagttgactctga

SEQ ID NO: 56944 - DNA, 242 bp, Homo sapiens
  chr20:17549809-17550051
  hyper
ccagacctgaaattaacggtgactcacagagcactctgcatggccacggtcgcctcgggaaggaggaaaaatgtgcagacttttttcccctcacgcgagggcaggacaagccagactgggccaatcaggggagggcggcgggaatcgcaccaaagtaggtaaaaaatgcgggaggcgtccccgctgccgcggcccgcgactccgctcccgtgggtcctcccccagtgcgttccccctcctcg

SEQ ID NO: 56945 - DNA, 179 bp, Homo sapiens; identical to SEQ ID NO: 12806
  chr20:17661563-17661742
  hyper

SEQ ID NO: 56946 - DNA, 43 bp, Homo sapiens
  chr20:17919941-17919984
  hyper
aaacctcacaaagaaaaggtgcgcaaggcaaatgttcagaaaa

SEQ ID NO: 56947 - DNA, 296 bp, Homo sapiens
  chr20:17949250-17949546
  hyper
cgagcagggcgccacgtgctcccccagagcagcctcccagtccccgctgccgtccatcttggagccgggcaaagacgccacgtggggcctacccttgctccgctccacgaggaggccgccaaccgcagggccgcgacacggacgggaagcaacggacactctcccagcaagacgcgtctagagaaagaccgcgtttcggtgcggggggaatttattactcagcccgagtccaagatggcagcgagcgctgacgtcaccagatctcgtgagagcagaagggcgcgatttggaggctc

SEQ ID NO: 56948 - DNA, 30 bp, Homo sapiens
  chr20:17950596-17950626
  hyper
cttactcatgtggccggaagaaaaaagtga

SEQ ID NO: 56949 - DNA, 144 bp, Homo sapiens
  chr20:18037544-18037688
  hyper
cgacacacacactcggcgtcaacccgcacgcccgcggcagtttgacctgcgggcggtgctgccgccgccccgccccggacctgggcacctcgccaagtgggcaacgtcgcgggggaggccagtaagccccgaatcggcccacag

SEQ ID NO: 56950 - DNA, 92 bp, Homo sapiens
  chr20:18038074-18038166
  hyper
gatgaggtggggagcccgcccctgccgatgagcagagaagacccgccaccccttcccccaccccgggagcccagcgcccaggcccggccccc

SEQ ID NO: 56951 - DNA, 121 bp, Homo sapiens
  chr20:18038209-18038330
  hyper
cgggagctcatcccagctgcggaccgagacccccaggctcctcctcttcaccaggaagactttgggcatggtggggtcccctctcccgactgcggccccctcctcccggctgctccccgct

SEQ ID NO: 56952 - DNA, 30 bp, Homo sapiens
  chr20:18038589-18038619
  hyper
ggtgtcaacaagctcgctacctgtccgacc

SEQ ID NO: 56953 - DNA, 168 bp, Homo sapiens
  chr20:18039163-18039331
  hyper
gcttctcctcacaagacgttgcaccccccgagagccccctcaccccaagtaaacacacaatagaaacaaaagccaggagcatattatgcaaatgcagcttcaaaacaagcccccaatcctcgcccactcccaccgttgcctctcctaaccacccgatccccaaattct

SEQ ID NO: 56954 - DNA, 305 bp, Homo sapiens
  chr20:18039722-18040027
  hyper
cctgtctgtaacctgaccctccgcgctcccagcctacagggcccgggaatcaacacagcggttttccctgttcccttccgccctgaatggcccttggggacacaaccgcctggtaacggatttctcggcgctactggcggactcgcgcggcgcagggagccggggcgcagctctgccggggctgcgggcgggaccggtgcgcggcgcctctaggtctgccctcaaggagtcaccctctctggactgaactctgaactccagcttttctctaagaaaaaccagctaagaacgaaaaagactttgat

SEQ ID NO: 56955 - DNA, 30 bp, Homo sapiens
  chr20:18118691-18118721
  hyper
gcaggtcggtgtcacgtgaccgtctcttcc

SEQ ID NO: 56956 - DNA, 30 bp, Homo sapiens
  chr20:18268963-18268993
  hyper
ctcgggagctcctacgtgttttatgcacgt

SEQ ID NO: 56957 - DNA, 30 bp, Homo sapiens
  chr20:18447680-18447710
  hyper
gacgcggcgagccgcgccccgcccactggg

SEQ ID NO: 56958 - DNA, 30 bp, Homo sapiens
  chr20:18477952-18477982
  hyper
ccttccgctggctgcgtggggcagccaaga

SEQ ID NO: 56959 - DNA, 30 bp, Homo sapiens
  chr20:18488002-18488032
  hyper
aggagagcttgtaacgtgaagcaccaccac

SEQ ID NO: 56960 - DNA, 84 bp, Homo sapiens
  chr20:18488297-18488381
  hyper
ctgcgcttaggcaacggtgcggcaggcgccggggttttctgaaacagaaacgtttaggggtggggaaacgtgttccgaggaact

SEQ ID NO: 56961 - DNA, 30 bp, Homo sapiens
  chr20:18488607-18488637
  hyper
tctagctaggtgagcggctccggccaggtg

SEQ ID NO: 56962 - DNA, 30 bp, Homo sapiens
  chr20:18547876-18547906
  hyper
tgtcatttagtcctcgtcacgtggtaaaaa

SEQ ID NO: 56963 - DNA, 30 bp, Homo sapiens
  chr20:18548220-18548250
  hyper
gacaatggcgaagtcgtcaggtagggctct

SEQ ID NO: 56964 - DNA, 48 bp, Homo sapiens
  chr20:19192642-19192690
  hyper
cttcttggtgaagatcggcctctgggaggcagcgtgtgtgcttcccga

SEQ ID NO: 56965 - DNA, 30 bp, Homo sapiens
  chr20:19192928-19192958
  hyper
gctccggcccggccccggcccccatcgcgc

SEQ ID NO: 56966 - DNA, 305 bp, Homo sapiens
  chr20:19193407-19193712
  hyper
tcctgccgctgtccccgccgcggccgcccgcgacaggagcggccgccgcccgccgaggccgccgcccggccgcccgaggatgcggccgtccggcgacgaggaccgcgcgcgtcgccgccgccgccgccgccgccggagggaccttctgctgagccagctctgcttcctggcctcggtggcgctgctgctctggtcgctgtcgagcctgcgagagcagaagggtgagtgcacgctgcctgccccgagtgggcgctgcggctccggcggctcggggctcccggggctgggcgcggggctccttcggg

SEQ ID NO: 56967 - DNA, 120 bp, Homo sapiens; identical to SEQ ID NO: 12812
  chr20:19673386-19673506
  hyper

SEQ ID NO: 56968 - DNA, 31 bp, Homo sapiens
  chr20:19738269-19738300
  hyper
ccccggaaccaagagccgcagccagctcagg

SEQ ID NO: 56969 - DNA, 30 bp, Homo sapiens; identical to SEQ ID NO: 12813
  chr20:19738506-19738536
  hyper

SEQ ID NO: 56970 - DNA, 152 bp, Homo sapiens
  chr20:19739199-19739351
  hyper
tgacattccggagcgcgaggtggccgctggtcccggcagggtcaccgggtgtcctcagctgacctgtgcggggctggggtgagggacagctggagggtgcaggcactatggctcgaggtgcggaggtgcgggtgtgcgtgcgtgtgcaccgg

SEQ ID NO: 56971 - DNA, 134 bp, Homo sapiens; identical to SEQ ID NO: 12815
  chr20:19739431-19739565
  hyper

SEQ ID NO: 56972 - DNA, 268 bp, Homo sapiens
  chr20:19739612-19739880
  hyper
cgggcggaggaggagccccggattcctgccgggaagggacggggccactttcccactttgaggcctccccgcccccttctgggcttggcctccacccttggcctgggctcccaccagctcggcgtccacccaccggcggtggcgcgcccctcgaccgcgcggggacagcaggatttgcagaagttcagcttgaaagcctatgatatgttgccaagaaatacagggcaagatcggtcccctgggccctgagaggcgcctgtcttctcag

SEQ ID NO: 56973 - DNA, 31 bp, Homo sapiens
  chr20:19997854-19997885
  hyper
gcgacctggcaattcccgccgccggccgcca

SEQ ID NO: 56974 - DNA, 30 bp, Homo sapiens
  chr20:20033077-20033107
  hyper
aacaaacaggatctcggaaccggaagcgga

SEQ ID NO: 56975 - DNA, 1228 bp, Homo sapiens
  chr20:20344402-20345630
  hyper
tcctcctgcggcaggcgaggcggggtgcaggtgtgagtggggtgggaggaaggggaaaggatcggggtcgccgcagcctttctggtcagtttcgctgggttttgtcagttccgtttgagaccgaggcgcacggactagcggccgccagcacctcacaggtggaggacacctcttgcgccccaaggtcaatgtcatcccgatgggtcccgtgccgtcctgactctccctgacctaattctttggttatgactttctcaccttctgggcttcgcctctgccagctttcgccgacgtcgcccttcccgccgcccgcccgggccttcctacccgctctcctccctccctggcccgacggtcccactgaggcaaaaacaaacagccctgagggcacttcaaggagcgtgcagtggccccgacggtactctcggggggataaaagaggtggccagccacgccgtcggcccccggccgaataatgggcgcgcagcagattgccagggggcacttgaaactcgaggggagggaaatacttgagcgcggtccctccccgcgaggacgcacgacgcagcctcgcggatcgtcccttgttcgctctctttcatgcactctccttttgtgtggaattatctaaacgggagatccctggcagctttatgctaatgcgccgaacaaaggcaacggcccgcgggcgggaggcccggaaggtgcctggggccgggccgggcggggtggcggccaggcgggctgcgcgtgtctctcgcgtgcccctgggactgacacaacaacccctcattcctgcaaatacaaagcctctcaccggctcgggtcgggcgcacccggcgcagggaggcgctggtccctccgggcggcgggcactgcagcggtaacgcacggttcctgccggttgtggctcgggggactgagggccgggagtgggggcttctgtgaagccagaagagaagtctgcagcagagtggtgatgaggggcgctgacacctcacccccaacgccgacgtctccaaacgcgataccctctgcggggtgagaatgcgggcccgcccggctcctcccgtgaggccagggcctcctgttctcctagacaccccaaggagccaactcctccgcagaagttccccgcttctgctcttatttccaagcttcgcgctttctacaaactccctgttgccttgactttgatttccagccgtggtgagggtcagagtgaacc

SEQ ID NO: 56976 - DNA, 489 bp, Homo sapiens; identical to SEQ ID NO: 12818
  chr20:20347220-20347709
  hyper

SEQ ID NO: 56977 - DNA, 485 bp, Homo sapiens; identical to SEQ ID NO: 12819
  chr20:20347736-20348221
  hyper

SEQ ID NO: 56978 - DNA, 2586 bp, Homo sapiens
  chr20:20348257-20350843
  hyper
cggctccggctcgcggattgaaccctcctgacatatttggggccattcttctcctttgttgctattttgctagcgacccgcgggtaatccccgcgcgggaggggggcgtgcattgtcgcgctgatggacgggcccatttggcggctccgcgccccccggaggagagacacaaagcccaggcacgtgcgcctccccatagagaagcagcagaccgtgaagggaggcggggccgggcgtgtgcctggaccgggcggggcggcggcgccgggcggggcgaccaggggcgcgcgcgggggccccgcgccctcaggtacatctgccgcacctaccgggcgacccccgagtcccggcccccttttggccgccccatcgccctcccaccctgccaggctgaggagctgcggacgcgctgattggctccaggggaagcgggaggcgagaacaatggccccctccccccgttaaaagggagcggctgccgggcccggggacagggacgcgcgtgcagggcgcagagctgggccgagccgtcgccggcgccacgcgagtcccgcagccgccgcgcccgggcaatgggccgggggcactgagggccgccggggccgagcgcggaggggggaccgagccagtgccgtgccctcgggccgcgccaacatgccccgcggcttcctggtgaagcgcagcaagaagtccacgcccgtttcctaccgggtccgcggcggcgaggacggcgaccgcgcactgctgctctcgcccagctgcgggggcgcccgcgccgagcccccggcgccgagcccggtccccgggccgctgccgccgccgccgcccgcggagcgcgcccatgcagcgctcgccgccgcgcttgcctgcgcgcctgggccgcagccacccccgcagggcccgcgggccgcgcacttcggcaaccccgaggctgcgcaccccgcgccgctctacagtcccacgcggcccgtgagccgcgagcacgagaagcacaagtacttcgaacgcagcttcaacctgggctcgccggtctcggccgagtccttccccacgcccgccgcgctgctcggagggggcggcggcggcggcgcgagcggagctggcggaggcggcacctgcggcggcgacccgctgctcttcgcgcccgccgagctcaagatgggcacggcgttctcggctggcgccgaggcggcccgcggcccgggccccggccccccactgccccctgccgccgccctgcggcccccgggaaagcggcccccgccccctaccgccgcggagccgcccgccaaggcagtcaaggccccgggcgccaagaagcccaaggccatccgcaagctgcacttcgaggacgaggtgaccacgtcgcccgtgctggggctcaagatcaaggagggcccggtggaggcgccgcggggccgcgcggggggcgcggcgcggccgctgggcgagttcatctgccagctgtgcaaggaggagtacgccgacccgttcgcgctggcgcagcacaaatgctcgcgcatcgtgcgtgtggagtaccgctgtcccgagtgcgccaaggtcttcagctgcccggccaacctggcctcgcaccgccgctggcacaaaccgcggcccgcgcccgccgccgcccgcgcgccggagccagaagcagcagccagggctgaggcgcgggaggcacccggcggcggcagcgaccgggacacgccgagccccggcggcgtgtccgagtcgggctccgaggacgggctctacgagtgccatcactgcgccaagaagttccgccgccaggcctacctacgcaagcacctgctggcgcaccaccaggcgctgcaggccaagggcgcgccgctagcgcccccggccgaggacctactggccttgtaccccgggcccgacgagaaggcgccccaggaggcggccggcgacggcgagggggccggcgtgctgggcctgagtgcgtccgccgagtgccacctgtgcccagtgtgcggagagtcgttcgccagcaagggcgctcaggagcgccacctgcgcctgctgcacgccgcccaggtgttcccctgcaagtactgcccggccaccttctacagctcgcccggccttacgcggcacatcaacaagtgccacccatccgaaaacagacaggtgatcctcctgcaggtgcccgtgcgcccggcctgctagagcgcgccctccaccccggcccccgaactgtgccttcgcttggagacccacaaagagagtgcgccctgcactccccgaacccgagtccgcgctgggggagcctcgcccccgcccccaccgggtgaaagtgtcgtctccgcttctctcggtgtggcgtgacggtaaccccatactctccttttgactccttttggaacccccacttttacgttgtgtccctccgcctcccccatggcgcaacaggagtcagtctctttctgtacaagggagaaaagctgtacgcgtttgtctcgtggttggaagcctccccttggcggggagaagctttttttcttgctagtattcgctgtgttcatggtctagaaatgcggtctggtctcgcctcgcctaccaatctct

SEQ ID NO: 56979 - DNA, 31 bp, Homo sapiens; identical to SEQ ID NO: 12822
  chr20:20692668-20692699
  hyper

SEQ ID NO: 56980 - DNA, 30 bp, Homo sapiens; identical to SEQ ID NO: 12823
  chr20:20693478-20693508
  hyper

SEQ ID NO: 56981 - DNA, 522 bp, Homo sapiens
  chr20:21080434-21080956
  hyper
gagacactgccaaaacgtttccaaactgaatagtcattgggctgccagataattcagaaactatctgtatgagctgtttatcaaattattaaccgcacagatgttgtttggctgaagagcagctgaatcccctctctggcagccgcggagacaaaggtctccaggaataattggagatgtgcatggaatattaaattaatttactgctcttaattcttatgcaaattctgacctccgatggcgcctatcaattaccccgcccgcagtgaaagcgaaagcgacagtttcttctcttcgcttttttttcttttttaagaactcgaaaaaggaaatatttgcaataagcaggcggtagtagcacttcgtagctggaattatttaattgaatcttcaagtttttagggatgcccgtagaggataaaaccccagtgctcagcggagagggtgggaggggtacagggggcggaggaatctgttggtttgactgtacacctgcgggcggcggcaaaatacagccacgag

SEQ ID NO: 56982 - DNA, 816 bp, Homo sapiens; identical to SEQ ID NO: 12825
  chr20:21081028-21081844
  hyper

SEQ ID NO: 56983 - DNA, 29 bp, Homo sapiens
  chr20:21082094-21082123
  hyper
ggctctggcccggaaagagagtgacagag

SEQ ID NO: 56984 - DNA, 403 bp, Homo sapiens; identical to SEQ ID NO: 12827
  chr20:21082215-21082618
  hyper

SEQ ID NO: 56985 - DNA, 1129 bp, Homo sapiens
  chr20:21083480-21084609
  hyper
tctgtggtgatgggtgtgcagcgaaccccagctcgccggtggccgctcaccccgctcgcctctctctccctctggactcggtgctgaagccccagtgcagctcgctcctccttctgtcagcagctggacccggaagccctgactcccggcttggcgcctgtgctgagagcggagaaggacgtcgcgaccggcaggcctggagggcgcattggtgtgcagagtgtagcggctggtctggccctgggaaccccagacccgcgaagctggagggcgcactccccggcctcagagccccaaaccggaggcgctgtccaaacgcgccaacgctgcaagcaatgtggcagggcacaccgaaatgcgtgtctcgcacacctgcccatctttccctgctcaacacgaaagcgccttgtggctctaagcgcttccttggggtggctggggctgtgcattttaattccaaagtcaagaggttgaaccatctcaaagttggcgggtggagggggcggtggcagggaactagatggctggatgcctttgcctgcggggtggcagggctgtccctaccaatagccacggctcggggctggctttgtagttatttttccaagttctgcccggtgcccatcatattgccctgaaaagcaaaagaggccgatgcaatttattccaatgggcggtttttaagaagctggcaatttgaaccggctgggtgttatttagtgcaatatgaaatcaaatgatcctatttctcaaataacagtgtctgtgaggagaagtgaatcctctgaaagggtaattgtctgctgatggtgtttcccattatacccgatcttggcctaaatggtgttcggcagcggggcggagagcgaggggtgaaatcaatgtgcgccaactcgcgctctggagacaggaaaaggtagcaccgctggcgtcctggcacgtcgagcgaacaatgccaccccacgcgtcactgatcgactcatcttgcaggtgtccgaaatcattagacttgagtgatcttgtggacgggggtataagactaactgtttttcctttcgcaactttgggaattgttagtctcctggcatcagtcacgcagcagactgacgataatctgggaaatacaacc

SEQ ID NO: 56986 - DNA, 48 bp, Homo sapiens
  chr20:21085662-21085710
  hyper
tctttgtctaggaggaaggttcggccactgcacctggagcccgaagca

SEQ ID NO: 56987 - DNA, 384 bp, Homo sapiens
  chr20:21085767-21086151
  hyper
cgggcagcctgggttcagcccaccgggtcccctttcgaatgccatttcccagctgaaaatccagccagcacagcctggacgccgagccctctggagccctggtcaggacgctttaattttcaccctcccgctctgggtctgaacaacccccccgtcccccgccccccaccccaaggtgttgtttcctagggtcttctggggacatccctacctgtcgagggcctgccctcctcgggctaaaagttcagcccttcgacagagccatggaataagaggcgactctccctgtgtcccgcaagtggtttctcgaggtacccctctgaggctgcagcccccggagcagacctggctctgcatagcagcaaaagcaaccgcctacctggg

SEQ ID NO: 56988 - DNA, 521 bp, Homo sapiens
  chr20:21086194-21086715
  hyper
cgccggccccctcacccggcgagggccctgcgctcacacttcttccaggggaaggagtggccacgcctgagcccccctaaacgacctcttcaggagaaaagagtgccggccaggagtccctccagtaacctcagtttagatcgggttttcgcgcctcccctaggaatccggctggaaaccccggagactctgcgcctagagttttgcgggcgtctctctgcctccccgcagcttccggctctcgcaggcttcatccactccctcttcccccggacctgcctgaaccccgccgagcactaggcaaggccgggctctgcgggctggggaaaagaaggggcttggggtggcccaacccgaccgccacctcggcccggcctgcggggaaaccccacaaagtcaaggcgcggggcggggtcggggggatgggatccagagagagactcagaggggcgccccttccccccaggggtctccgaatcctagggactctctaagcccccgtggcagagaaaagaggaatt

SEQ ID NO: 56989 - DNA, 238 bp, Homo sapiens
  chr20:21087060-21087298
  hyper
aatttaatcacacgcgatattaaattatcaagctgctcattaatcatcacgcgagttattgggactgaacacgccgccgcgtgttttgacagcccagaaccattcgcgggggtcggggtgtgtctgggtttgggggctgggggatgtctagccactctagagaaacactgcgagccccacgcgggctggtggagcctcttgcctggaaaaagatgtggaaacgcgcaggctgggcgtc

SEQ ID NO: 56990 - DNA, 30 bp, Homo sapiens
  chr20:21106951-21106981
  hyper
aggcccgcgcgcaacgccccccaggctccc

SEQ ID NO: 56991 - DNA, 128 bp, Homo sapiens
  chr20:21372294-21372422
  hyper
cgcccggcgcctgggtctcccctgcggctcgctagtcgcccggcccagcccgcagaccccgcggctggccctcccgggagccccgcgagccggccgcacgcacaggatgggcgcggaaagccccttcc

SEQ ID NO: 56992 - DNA, 31 bp, Homo sapiens
  chr20:21376702-21376733
  hyper
ggcggctgcggaccggcctggccgggggtgg

SEQ ID NO: 56993 - DNA, 252 bp, Homo sapiens
  chr20:21376876-21377128
  hyper
cgtttcatcttgtaccggtggttctggaaccagatcttgacctgcgtgggcgtcaggtggatcatgctggccaggtgctcgcgctcgggcgccgacaggtacttctgctgcttgaagcgccgctccagctcgtagacctgcgcctgcgagaagagcacgcggcgcttccttcgcggagcggctgccgccgccgccgcgtgcagcgggcccagcgacttggcggcgtccgcgatgccggtcagcgaccccatg

SEQ ID NO: 56994 - DNA, 167 bp, Homo sapiens; identical to SEQ ID NO: 12831
  chr20:21377473-21377640
  hyper

SEQ ID NO: 56995 - DNA, 753 bp, Homo sapiens; identical to SEQ ID NO: 12832
  chr20:21377737-21378490
  hyper

SEQ ID NO: 56996 - DNA, 39 bp, Homo sapiens; identical to SEQ ID NO: 12833
  chr20:21378678-21378717
  hyper

SEQ ID NO: 56997 - DNA, 748 bp, Homo sapiens
  chr20:21485911-21486659
  hyper
gccctggtgtagaggacacctcgcggagacatctcgagtcccgcaggtgtctgagctgcgctgcgcgccccagccgggaagccttttcttatccaaccgcgccgccccgcggaaagcctgggtactgcagacgccctcaccggcccaccgacagctggttttgaagcgggggcttagaaaagtaaaggggacagtgtttggagccacgatgcctttgatgtgaggcggttccacccaacaatcaacgaatcaagctggaactgcaggccctacttttgttggggggaggaccttaaggaatgtcacccccttgtcccctaccctctgccccacgcccagcctctcagaaggcaccaggcgtgagtagagtgcgaggcgtccacaccctcgtgtcccttccattcccggacacctttgcaccctagccgaggcctcagcacggagtgagggttgcctggggtgccctgctgtgtgtggggcgttcttgcctcccgggccctgaccccacggtctgggtcggcgaggcgtctctccctggcgtctggactgtgcgcctgccccgcttccaggcgacgaacggcaggagccgggggtccggcgggacccggatccagggcgggcggaaggcgagggtctctccttcccggaacccccgccccggaaacctgcaaccaaaccgggtccctcctccgcatcgctcccgcgctcccgggccgcctccccacgcgggcacccactctccgggccc

SEQ ID NO: 56998 - DNA, 131 bp, Homo sapiens; identical to SEQ ID NO: 12835
  chr20:21486785-21486916
  hyper

SEQ ID NO: 56999 - DNA, 670 bp, Homo sapiens; identical to SEQ ID NO: 12836
  chr20:21486954-21487624
  hyper

SEQ ID NO: 57000 - DNA, 109 bp, Homo sapiens
  chr20:21488404-21488513
  hyper
cataattcaaaggaacgcgcgcgtctttagctcttcggggttggtaaccaagtggtccggccgggcgcaagtcgccttggaaccggctgcagcccaagtctagctgggc

SEQ ID NO: 57001 - DNA, 15 bp, Homo sapiens
  chr20:21488591-21488606
  hyper
cggggccggtcggtt

SEQ ID NO: 57002 - DNA, 72 bp, Homo sapiens
  chr20:21489086-21489158
  hyper
tcctccccaatagatatagcacgaatttttaatgcgtcttcctttcacagacaacaatacagggtttgaaag

SEQ ID NO: 57003 - DNA, 207 bp, Homo sapiens
  chr20:21489239-21489446
  hyper
cgtggatgacaaagggacccagtgacaggcccaacaaaaccccaaggagacttctgcctgactccgggattcactgccggcgataagcgcgctgaatggtgcggggtggggcggggggtggggggcgggccccttctccttcttcccctctctctgtccccgcgatcctttctctgtccctttttaatatgcacgcctctaacatct

SEQ ID NO: 57004 - DNA, 264 bp, Homo sapiens
  chr20:21489621-21489885
  hyper
cgggcgccgggtccacctcccgggctcccggccggccacaggagcgcacacccagattgcaggcccgcggtcctggccacagctccaaatttgtcctcaatgagcaagtggtggaagcctgccagggtgaggaccttccacgcttcccccttcctctctggaaacctgagggtctcttgtgatcattctcaccctggaagccctggggcctggaaaagtcaaaatggcctcaggccttctgacagctccgctccaagagacttg

SEQ ID NO: 57005 - DNA, 615 bp, Homo sapiens
  chr20:21490147-21490762
  hyper
ctggggtattagaaagacttccgagccctcaattatccaggggcggtgtggaacgcgggaataaagtgtcatcgcgtccctgggctgctgcgcagagtgctatcgacgcacagatttggtcgcacggataatcatgtttgctttagatattgaattaaacctgatcatcaactacagggagcgagaaagtcagctgggaccgctccttttgcccggcctcctcactgccacccaaccccccagccttgatggtgcagcttcggagagaacagagatacaatttccaaatgcgccgacgttcagtccctcagcgtctgcagcacccgctgggctctgagctagagtcccaagtatttttagaaacccgcgagatagaggagaaaggctcatcctccagttggccaggcttcctaagacgctcccccgcgtggccaagtgtgcgccagcatctgccaaggagatcttcctccagcaacaagggtgggacggaatccgttccccgccggaaagatggatgcgcccttcccgggcgtgcccggggctgtgtgcccacttcccatccggggagctcaccccacccccaaacctctacttcctagcaatccacccagttcc

SEQ ID NO: 57006 - DNA, 531 bp, Homo sapiens
  chr20:21490814-21491345
  hyper
cgctggagggaaggaggcccgggatccagtccccggagagaggcctggaagcccggaaaggatgggagcgtaagggaagggagaggcatggtttgctgggattgccaaagattctcgctccctggcttcctggggccaaagatcctagggagggctgcagtatcccctccctcccccgagcccagaaccccgcgtacttcccccaagccccctaagccaaagcctcgcgcgccctgaccgttcccacccccagccttagcggtctcctaggtcagcaccagcccgcagattttgaaaaggagtggggagtggggagaaggcagccagtcttaacctcagacccccacccacccactttcttagcgtgaggtaagtcaaatgtaacaaagtgaaagtcatcgagtgtagtggcttcaacagcttctcaggctgaaggagccactcatagatttgggccagcgaggggggtttgctctcctcgcctttgcggctcccgaagtcacttttcctcccgtagccggacgctgccgc

SEQ ID NO: 57007 - DNA, 318 bp, Homo sapiens
  chr20:21492507-21492825
  hyper
cgccgccggggtggggcctgggcctggggccgcgagtctcgttggggcggcgctcaccaagtccactgctgggcctggaccagggggtgtgctgtcgggtactggggggtgctggccgagctgtactgggcgttgtactgcatgtgctgcagcgactgcgcgctgtaggcagaaaagggaatgcccgcctggaaggtggcggctgccaggtcctgggctttgagcgcgtgacatggtttgccgtccctgaccaagacgggcacggccacccggcgcggcgagggcaggggcgtcacctccatacctttctcggcccgg

SEQ ID NO: 57008 - DNA, 1003 bp, Homo sapiens; identical to SEQ ID NO: 12840
  chr20:21492990-21493993
  hyper

SEQ ID NO: 57009 - DNA, 47 bp, Homo sapiens
  chr20:21494360-21494407
  hyper
cgtggcgctcccctgccccggcgggcgggggaggggggagttggggg

SEQ ID NO: 57010 - DNA, 328 bp, Homo sapiens
  chr20:21494664-21494992
  hyper
tcggcgcgcggtggcggctggtggcgaggaaaaaatgggccattgcccgagcgatcagtccatataaggctgggctccactcacgaacctggggaggcggggagagggggagaaagagagggagggagggaaagaaagagggagggagggggagcgagagagggagcgggagaagggtggaaaaaagggggaagagacattaaaaacgcaaaggttggccacgtgtgggcgggtcttgggagtcaagtggatgaagacagtatttgcagatgtgaaattgtgggttttggggagctccgcgctcccagccaacggccctctagagcaa

SEQ ID NO: 57011 - DNA, 30 bp, Homo sapiens
  chr20:21495461-21495491
  hyper
attccagttaaccgcgagagagcccaaaac

SEQ ID NO: 57012 - DNA, 363 bp, Homo sapiens
  chr20:21496114-21496477
  hyper
tttccagccactctcggctctgggaactgaactttcccgggacttgcacttcctcctcggcgctggggttggaaaagaccacgccgcatttgccaccccttcttctagttaaaacttttttggggggggggtgcaggggtgtagattggctacctgatgctcgttcgccccagaggagtgtcaggaaggagctttgtctgggggcggggaggggcacagaaggccacccctgcggggtccaggtctagtcttcccacaacctgggctcctccgcgcgggccaagctgagcgcgcgggcaccgggtcctcctcgcgcgcagctgcagcggacgccgccgcgccccagctgcccccgggttgcca

SEQ ID NO: 57013 - DNA, 94 bp, Homo sapiens
  chr20:21496683-21496777
  hyper
cgctcccgttggaagcctttgtcccggctcggtttttgcatttatttcagtggcgaaataatacatgattgacgctctctttcaatgtgtccta

SEQ ID NO: 57014 - DNA, 30 bp, Homo sapiens; identical to SEQ ID NO: 12842
  chr20:21497165-21497195
  hyper

SEQ ID NO: 57015 - DNA, 443 bp, Homo sapiens
  chr20:21497414-21497857
  hyper
ttggcagcaagtgtcgtttctcgcatatccccagagccctcttaggtgggggagtgcccgcagaggcctcccaaagcgtgttcatttcttcagctgggaaccacctcgctgaagttccatgtagttcccaacttctctcccccttccccagcatagtgaccctttcttctcaggatctaaatcagcaccgctgctattgatcaagtcccctcccctcacccgtgggagcctgcaaggtccgcagagcgcctgagagaggattgctttcctaggggaatcctggctcctggaattaatcacggggagggagtgctgccataggcgcctagagaaggaggccctcagcccagttctcaaaggtcgggtttgcctttgcgcctgccccttagcctcaatgaccagccgaatccttctgggtctcagcttgcggtgtcctcttgtcg

SEQ ID NO: 57016 - DNA, 225 bp, Homo sapiens; identical to SEQ ID NO: 12844
  chr20:21498084-21498309
  hyper

SEQ ID NO: 57017 - DNA, 543 bp, Homo sapiens
  chr20:21498562-21499105
  hyper
ccaccactcccaccctgtcagcgtctgcctgcaccagtttcagctcctggtctcccccactcggcattctttagtaaattctttccaggtaccgtcttgcacccaagcgagttcaatgtcctccgttccgtcaagtttgggtttgagctttgggctcagctgccgtggtctggagacctcgtaggcactctgcaagatgcctcgttctgctgcatgcttggggaggaagttgagctgggtgctggaagttctgaacccagcatgccccgggccggaggagatttgcttggtgtctccttagcgtcccgaacaccgcgcgcccctgctggggtaacctgaacagctggacccctcaactcgatctttattatcagcattggggctccagattccgtacacatctctagctctattcattcttcctaggttgagaacggacgcattgggagtcctacgcccgggggaaaggcaggagaggggaggaagagaacctgtgcccctggaagctagaggagagcctcgctctctctgctgctctgggtt

SEQ ID NO: 57018 - DNA, 473 bp, Homo sapiens
  chr20:21499132-21499605
  hyper
cggctggagcgggcgcggggaggctgaacaatcgccggaggcccaggaggggaggcgaatgtacacaggctaagtggccccactccaggacaagtggccctctaagtcggctcagtgtttacctgtttactttcccaggtagctcaaacacgagcgccttttctgcgctccagggcacgggggccgcccagaggcaccctgctttcccggcttctgccctcccacgcctcagctttacgccccctgttgtgggggtgcgctctaaacaacagcaaaccaggcaagaaaggaagatacaggagagcaggcgaggcctcggcacaccctacggaggggagcctttcttgtgcctgtggaagaagtgggctccgtggacggcatccgaccctccccccatccctgttctgggcacctctttggagacggcgctcgcatccttccccgttcaagccggtggtgaaagcttgcagtgc

SEQ ID NO: 57019 - DNA, 397 bp, Homo sapiens
  chr20:21499955-21500352
  hyper
attagtttattgtctggttagcgccaaggtgcaagcgtttgtcttcattcactccggaaacaaagcgcgttgcaccttcctgctccagcaaggattaacggcgcggacacaaaggttttgtcggagggggaaggtttattttatcttgggttggagactcagagcgtggcatgcacttgaaatcaatggggaaggaaaatgtcacccaatctggtccctgagtgtggcgataaagacgttcaccttaaggatggcatctccaaaacagccccactttggcttcgacttccaatgcgggagcaggggctgcaggaagcagaggtgtcagctctcacgtcctggatgaaagaaataggggaatgcaccccaggagtactaccccgtgctgggacctttg

SEQ ID NO: 57020 - DNA, 120 bp, Homo sapiens
  chr20:21501239-21501359
  hyper
gctacaaaatggaaccggcctctctccaatattttctttaaaaacctagctttaagcccccctcgggccaaacgagcctgtcccagccaatccattatcaccggtttattggggaaccaa

SEQ ID NO: 57021 - DNA, 700 bp, Homo sapiens; identical to SEQ ID NO: 12848
  chr20:21501444-21502144
  hyper

SEQ ID NO: 57022 - DNA, 256 bp, Homo sapiens; identical to SEQ ID NO: 12849
  chr20:21502443-21502699
  hyper

SEQ ID NO: 57023 - DNA, 336 bp, Homo sapiens; identical to SEQ ID NO: 12850
  chr20:21502837-21503173
  hyper

SEQ ID NO: 57024 - DNA, 557 bp, Homo sapiens
  chr20:21503454-21504011
  hyper
gcgctctgtttgttttccttgccggactgacgtgagtcaaaatattggccatatgttcagcggtaataaattgggtatgagcgcaaacacacttgggcttcgatggctctttcagctgccacatggtaggctttgcggggagggggcttccaccccgcctcggccccctgcccccaaacgcgcgggtagattccctccctcctgcgcccctctgagcaggagatctgggaccccaggtttctcctgaccctcgcccctcctccgtccccagcagtgccttggactccgcagctcctggcgagcccggactgctggttaacaaggtcgccatctataaattgctcggtcgctaagacgccataaaaccaaagggccagatgtggcacgttatttatgtgtgaaaccgcgtttacactagatacgcggatccaaggccgatagcacgacttcgcgggaggtcacagacctctcgccccggctccaggctcctcccccagcacgatctcctctccaggttgaggggtgtcggtcttgccgggaaagggattcacccctgc

SEQ ID NO: 57025 - DNA, 30 bp, Homo sapiens; identical to SEQ ID NO: 12852
  chr20:21681907-21681937
  hyper

SEQ ID NO: 57026 - DNA, 16 bp, Homo sapiens
  chr20:21682361-21682377
  hyper
cgcggagtttcgttgt

SEQ ID NO: 57027 - DNA, 345 bp, Homo sapiens
  chr20:21683426-21683771
  hyper
tgctaggagtccagccccaggcggaggagttttgccccaggtttctgagtgcgccctcagctaacaggctcccgcgaccctggaagcggaactttgttgcactccgcttccagaggacgctgaaatacggtgccaaacccagccaagcaaaaacgcagaatccgcgagctctttacctctgtgcgctcagcgctgactagtagctgtccccgggccatggagagggctaagctgcctccttgggaggtgggagagacgtttcttttccttctgcaatctcatcttagggccatctctcaccaagcctagcctgcagctcgggaacccgcgatacccggccggggg

SEQ ID NO: 57028 - DNA, 310 bp, Homo sapiens
  chr20:21683899-21684209
  hyper
cgcggactctgctaccggggagaaccaccccctctcatcgtgcgcaatccccagactcacccctctacagtagcccccagccacgggcggccttcacggggacgggggcggagttttgtcctggactgcgactccttgccacttttccaagctcggcagcagaggtggggtggacgttcccctgaaagggtagttgggcgaaccagctctcacggtgtcacgaccggctttatttcctcgtctttagagtgtgcctgttgactcctcacctactggggggaagaagcggctttagctgcttttccggatc

SEQ ID NO: 57029 - DNA, 111 bp, Homo sapiens
  chr20:21684347-21684458
  hyper
cgtccccactccccgcacccccggagccccgagcatactgtgcgtgcttagtcctctcttcgctgccttcgcggaactcctggcttaggcgtgcccactttaatccaaacc

SEQ ID NO: 57030 - DNA, 1176 bp, Homo sapiens; identical to SEQ ID NO: 12855
  chr20:21686206-21687382
  hyper

SEQ ID NO: 57031 - DNA, 45 bp, Homo sapiens; identical to SEQ ID NO: 12856
  chr20:21687755-21687800
  hyper

SEQ ID NO: 57032 - DNA, 30 bp, Homo sapiens; identical to SEQ ID NO: 12857
  chr20:21690021-21690051
  hyper

SEQ ID NO: 57033 - DNA, 30 bp, Homo sapiens; identical to SEQ ID NO: 12858
  chr20:21694292-21694322
  hyper

SEQ ID NO: 57034 - DNA, 240 bp, Homo sapiens; identical to SEQ ID NO: 12859
  chr20:21694602-21694842
  hyper

SEQ ID NO: 57035 - DNA, 30 bp, Homo sapiens; identical to SEQ ID NO: 12860
  chr20:21695758-21695788
  hyper

SEQ ID NO: 57036 - DNA, 30 bp, Homo sapiens; identical to SEQ ID NO: 12861
  chr20:21696452-21696482
  hyper

SEQ ID NO: 57037 - DNA, 30 bp, Homo sapiens
  chr20:22515568-22515598
  hyper
tgagacacagtccctcggttacccaacgtt

SEQ ID NO: 57038 - DNA, 697 bp, Homo sapiens
  chr20:22557157-22557854
  hyper
tgcacattccagatctcatctcggccacccctccctccaagccagggccacctccagacccccggatgtgtagaagcatgcactgccccgaagaaaacgcgttgcccccaggtaacttcaggtacctcctagggctaacgcctccttctatgccatattgagccttatctcttgcttcttcccgcccccctcccacattaaaaggcccccaaagcattgaggagcggcttctctttatgaagctggggagaaggcgggcgataaagattgggcgtttaaattggccatttggaagattacatctcttcagcgagggtctttctttcaaaactcgcactgaattaagggtcatggctactccgtacccggctctcaaaggcacggcacctttgaattaggttgcggagtggcctgggcgaggggacccggggccatcaaaggcccgagggaaggccgtggggcgacacccgtctaatgacaagtaattgaaggattcgacgccgcgcattaccagcggaacgggaggcattaattatttaaaaacgattagccttgccgtgtgtcctgcaggcgtcccatcatgttcagcgaagataaccagccacccgaggcgagccggggctcggagggcggcgggcgcgctccccagcaggcttcgggtgcggtggacacgggcgcacagcccaaggcaccaggg

SEQ ID NO: 57039 - DNA, 320 bp, Homo sapiens
  chr20:22558253-22558573
  hyper
ggcggcggaaagacgcggctggttctgttgggtcctacaaactcgcgtcctccggaattcccgagggcaagcccggcacgcgcgagcgtgctcctgcccgtggaaggggggaaatcggcgactgggttgcagggagaatgcgatgataaatggccctgcgtctgctttctgactttctctcctggacccagctcgtaaccccagaggctccccaacctgcctgccgccaagcacggctgtgcgcaaaaggccaccagccgcttcctgcagccagagctaaggttcactcgcctcttagaaaggcgcggcccctcccctgc

SEQ ID NO: 57040 - DNA, 55 bp, Homo sapiens
  chr20:22558819-22558874
  hyper
ccccagacccgagccgctcgaggggcctgtgtggcttcctcggggccctaccaaa

SEQ ID NO: 57041 - DNA, 37 bp, Homo sapiens; identical to SEQ ID NO: 12864
  chr20:22559324-22559361
  hyper

SEQ ID NO: 57042 - DNA, 590 bp, Homo sapiens
  chr20:22559616-22560206
  hyper
aatgagtagagttggggaaagcgcgcagtggcgatttgtgagctcgttatctcggaacccgggctaggggagggatttaagcgggaggggggcgtgaaagacacaagaagcacagaaaagcctccgaaagcgcctgctccccgacatcctttttatgtattcggacagaactatatcttatcggccgggatcagtgaaggggggcgcgctaagtagtttaaaacgaccctcgcacaatgggcgtgccatacgaaacatagcaggttagggcagcgctttcagcctccattgtcccccactcggcccccggccctgcctctcggctccttcgccacgggagccttttatgtgataatgaaacacatttcaggccgggctcacgacgtgtgtgtccttgctaggaggagagacggcctgattgctggctgtggcctccggatccccccctccccaatttctcttccttgtgttcttcgggacaatgtggcatgttaagaaagggatttggtggcgggaggggggcagtggcgggtgggaggcggaggcgatgccaaacccccctcaagcgcgtgggaaggccaggcttgttg

SEQ ID NO: 57043 - DNA, 30 bp, Homo sapiens
  chr20:22560465-22560495
  hyper
cactgatcctgccctcgcccagccagcaga

SEQ ID NO: 57044 - DNA, 116 bp, Homo sapiens
  chr20:22562392-22562508
  hyper
aacaccgtctccccaaagtctcgacccccacttgctctctcacttgtcctcgatccggggtgccagagttagccgggcctgaagccgtcgtcttcttaagaggagttcataatggg

SEQ ID NO: 57045 - DNA, 184 bp, Homo sapiens
  chr20:22562568-22562752
  hyper
cgttttgttcgtgaccgggcccatggccaagctgccaggcatgggggaaccgtagccggggtagtgcatcacctgttcgtaggccttgaggtccattttgtggggttggtggtggtggtggctgtggtggtgctgctgctccgaggacatgaggttgttgatggagaacgggtggttgaaggcg

SEQ ID NO: 57046 - DNA, 220 bp, Homo sapiens
  chr20:22563415-22563635
  hyper
ttggggtcgcgggcgcggctcaggcccgcctgcccgtacatggggctcatggagttcatgttggcgtagggggccaggccgcccatggccccggccgcctgccccccgagcgggctcaggctgggactcaagtgcggccccatgcccgccacgccggccgccccggccgagccgcccatgcccgccatggcgcccgcgccgggggacatccccgccaggg

SEQ ID NO: 57047 - DNA, 1497 bp, Homo sapiens
  chr20:22563663-22565160
  hyper
cgacatgttcatggagcccgcgctcatgttgcccgagccgctgcccatggcggccgccgacatgctcatgtacgtgttcatgccgttcatccccaggccggcgttcatgttgctcacggaggagtagccctgcggacagagccccgggagggaggcgacagcgttagcaccgcggctggagggtgcccagacctcccacccaccgcccaggcctccgcgtccggggaggcctccggggagccctttcgtccccgatggcccagtctccggactccgagtctgtttcattcagggagagtcatgatcgatcgcccttgggaaggtggcgagcggattgctgcttgggcatgtggcccgttcctagcccttctccacctcgcccagattctagaacaggggtcccatggagtactcccaagccagcaccccaaatacattcccctaccccagagtctccccaaactctcccaccagcatactgagctggcgccgaggcccgaagtccccggacgccacctccggtcgcagcaagcaacctgcgggacaacgcgcggggcgcctcgggctgcctccagcgaagactgtcccgggccccctctgtccggtctccctccagggaccccctcccttgtcccagggaaactgcaaggcagtgcctgtgcggagtgcgggggcggctggaggcactgaacggggcaatagggaaagaaccgagacctgaaccacacgcggctgagctttgcaggcaaaaactttctttctctttgtccactagtctttgactctgcctccacttcagcccccaactcctacccatcttctcctcctcagctccccaccccctcgccggccgacctcccacccctccccagccgcgcgctgccaaacataactctgttaggatagtgcgtggctcggccacgaagaggatttggaggcgccgcaagtcaatatttgatcacaaagttaatattatctcaaggctaacagtgtgtcgtataaaaaagagacccatttgattccaaggagggcggaaaaggcggctgcccagaaaggctggggttgtggggcggggtgggggggtgccagcgagggaagcggtcctgaggttggggaaggagcgagcgccgccgctccacttccccctggaaaagacgagcgcttacctcgggctctgcatagtagctgctccagtcggacggctcgtgcccttccatcttcaccgctcccagcatactggaagccgagtgcatggcagtttaaaatttaacagccacaacaaacgaccagcaatcaccccccacccccaccctcttttaaaaaaaagtcagccaaagcaccgtcccctcctccctccctctctcgcgctccctctccctgggctccactccctctctctccctgggcaggccggaggcggtagttggaagtgggcgggaggtgggggggggcgaggagcggaggaggcccaggccagcgccccgcggtagggagcac

SEQ ID NO: 57048 - DNA, 30 bp, Homo sapiens
  chr20:22565400-22565430
  hyper
tgatatagcgcggcgcgctggcgcgggcct

SEQ ID NO: 57049 - DNA, 541 bp, Homo sapiens
  chr20:22565672-22566213
  hyper
ggaggaaaccaccctctggggcggctccggcctccagcccccgccccgtctcatcgcgccgggcgcccggtgcgcctgtcggagggcgcgtccagcctcagtgcccggcagatccctatgaaagccggatttatttatgccgggtttcttcgctctcagtgctcattctctgtcaaaacagcaagtccatgacagccaatttgcaaagcgctgtcctatttagaaaaactacgtacacacctttaactcgcccgctgctgctcctgcgaggcccctccctgttacagttcagacccggaacggcctcgggagaagcgcggggcgcacggtctggccgcctcggctctccgactcctcagacaccggccgccagggacccgcagtggggcggccggcgcctggcgcaagcagcccctctagcagcggccgacggttgggaggctgagatttgtctctgatattcaggccggcgtgtttcaaggttacttttcagtcacaaccgaggtgcccacagcatttcgtaactaaaacaaacagggca

SEQ ID NO: 57050 - DNA, 154 bp, Homo sapiens; identical to SEQ ID NO: 12871
  chr20:22567410-22567564
  hyper

SEQ ID NO: 57051 - DNA, 209 bp, Homo sapiens
  chr20:22567605-22567814
  hyper
cgccttcggggggactcggcctttttggagccccaacccctaggttctgcgcgaacccaaaacggcctcctgcaccctggcgaggttctgggagctccggtagggtagggctggatgacgcctcctagagtctcggagcagccgctcccgcaccctcccggcacgcctgcccatgggaatgcgagcggggtctacggttagctttaggt

SEQ ID NO: 57052 - DNA, 110 bp, Homo sapiens; identical to SEQ ID NO: 12873
  chr20:23029121-23029231
  hyper

SEQ ID NO: 57053 - DNA, 497 bp, Homo sapiens; identical to SEQ ID NO: 12874
  chr20:23029588-23030085
  hyper

SEQ ID NO: 57054 - DNA, 1093 bp, Homo sapiens
  chr20:23030291-23031384
  hyper
cgaggcagcctctgacatgcggatcggccagggctcgagtttataagtgcccggccctccctccctggacgttcgggaaaaggaaggaagtgcctggtgggaagggctgatgccgcatactcggattgctgggttctctggccgcccttgcgcccgccctcgcgcatgggatcacctcgccgggatgagtaaaccctgccctggcgcagggaggttctcgggcggggccgacaggggcaggcgccagggaaggccagcacccctgtaacaagacgactgtccccgcccaccactcgggcccccacgcgtgcagccctctttcatctcttggtcctcctttctttcttttcatacatgttacagccacttccaaggaaagcctggattgcaagagctctgggaaccggagacttcagagaagagggctttgaatggggagtgggggaggtggtgcacaggacctgcaagacgctgggaggggtgatcggcaccaagggcactttgggaggacctgcctaggacgtggacttccccgaagacaggatcgcaaggagagacagctggatcctgtccgcggccaaggtgcctggctcaggaaaccagcggagcgcgcttggcctcacaggacagtgggtgtggctggggtgacggggcagggtggggaagactggcctaacaccagcgccctctgccccatggctggccagggacccgcgagtccctggacacgcactggccaacgccagaccccatctcatcgggtggggaagtcgcggggacactgtcagggcgccgaagtccggacccggctcagaggcggtggcaggtgaattgctgcggcgccgggtaggggcgggcgcgtgggagcgagtcagcctggccagtttcggcccagcttccgaaggatggtgcttcttgcaccccaacagagtggctggcaaccccccaggggagcgcgcaggatcccagctgatcccacccgggtcggctaaggaggtttccatttcgtccagagtccgaattgatacccacgtgcatagaaacgccacttgctcggcaaagggcactgaagagccaccgtcctgtggatggg

SEQ ID NO: 57055 - DNA, 30 bp, Homo sapiens
  chr20:23031663-23031693
  hyper
ggggttggaagctccgttcccgggcagctc

SEQ ID NO: 57056 - DNA, 30 bp, Homo sapiens
  chr20:23331464-23331494
  hyper
ccgcggaactgcgccggaaagtcccccggc

SEQ ID NO: 57057 - DNA, 30 bp, Homo sapiens; identical to SEQ ID NO: 12878
  chr20:23338902-23338932
  hyper

SEQ ID NO: 57058 - DNA, 687 bp, Homo sapiens
  chr20:23618040-23618727
  hyper
ggacctgacgtgtccgtgcggttccaggccaggccagactcagggcattcccggacacgcccgccaagggctcgggggtgacagcgaagaccgggaacagggtccgggtgagaagcccaggcgccggagaggagcagcacggggtccgggagcagcgcggggggaggctgggacggcggggccggggcttcggaccctgcggggggcggcacgcacctgcttgcgggcgcgcaccacctgcagcgcgcggctgtggtacatgtcgttgctggctttgttgtactcgccgacggcaaagtccagtgcacgccgcacaccctcctcctccacgctggcgtccatggggcctcccactaggcgcggcggcttgccgggactggagccggccgcggggctcacggccagggccacggccaggatggccagcaggagcagcggggcgcgcaggggcccggccatggtcggctaggacgcgggacgcggggagtggggcgcaggcgagaggctggagctagatagagaggacccgctgcgataccgaggcgaggccgtgagccccgcgaggccggcgactgcggttttatcccttccggccttcgccgccccaccccaccgcggcctgcactcccttttccggaacgcctcgtccctcccacctcccttctccctccccgcctcccctgcctc

SEQ ID NO: 57059 - DNA, 944 bp, Homo sapiens
  chr20:24449759-24450703
  hyper
cgggcagcaaattcctgtcctcctagtcccccgcagctatcccccgcccccagcctctgtggccctcacattgtcagacactggccgcgggccaccatctggacgcgatcccccgctagggcctccctggtctgggccaaagttggtggccaccttcgcgcgggctgcgccctccttctcttccctgccctcctcccccggggcccgcgcccgctgcctccagcacgcgcgtcggcaggctcggcaagcgaagaggagcggctcgccccagggcgcccctcgcccagcctgccggccaggcgagcgcgacgagagtctccccgcaccccttcctctcccgggggccgagagggttgggctccgccccggcgccgcagctcccgactccccgccgctcgggctgccgccgctgccccgcgcccggcgctcggggcagccgggggcgcaggcggagagcgcagggcggggagaggcgtggggagcagagcggcgctgaggggagggcagaggaggagagagcctggcagcggaggagcagaggcgggcgccgcaccgccccgcacgctcgctcgctcgggagagtcgcgggcggccgcttgggcgcacttgccgggtcaccttgtcccggaggtaagtccagacctcccggccgcgggggcgggcggaggggcccgcagtgggcggggtcgcggcaggggccgcgagctggcggcgggagctggaggctgccctgcgctggcgggtgtcctagtcctggctccgcctcggagcgcgcagacccggcggcggcgtggcgcccgcggtaagtccgggtggtcgccgcgacgagacttgggagacacggggtcgcagggcgggagggggagctgagccggcagagaaaatgcccaggaaggggtcgatgctggcctgggctgcaccttggtgccttgccaccccgggag

SEQ ID NO: 57060 - DNA, 329 bp, Homo sapiens
  chr20:24450819-24451148
  hyper
cgggttcgggctgcccctcggagtgacccgaaggagaccagccagggctggtgagccgggcggccacggagctggggacctaggtctgtttgggagtaggaagggaaacagactaattctccgagcggagcggcaggcaaggtgcaagcgcgcttgggatggggaatcccgacgggcgaccgtggcggaagcagagactcctggagcctctttcctctagccaggacaagacctgccttcaaaagctgtctggcccctggcagccgcgacagcctgcagccctgggagccacagccctggcgccgagatgggagcgagcacatacgctt

SEQ ID NO: 57061 - DNA, 787 bp, Homo sapiens
  chr20:24451359-24452146
  hyper
ggcgtttctgaaagacgagaggaaggggtcttctggtagtcctgttttcctttgggggtttcgttgcacgcagaggcttgggcgcttggcacccagacttcaggtgcgcacagtcctcctgcgacgtcagatgcgctggcgccgcggcgctcctggctcggaccgatgcctgcgccttccctggccacgtcctggtgtttagtgcagcagacaccggccgaaggcttggctgattgggggtgtcgaggggaggggggctgggcgttacacagtggctccgttttctggttggaatcagttggtgaggcgtgcgcgcgcgagtccgtgtatctgtccgtctccctcctacagcccagcgtgtttggtctgagtccaaagaaggaggtggtgtgtgtgctgcgtagacctgcgcctgtggggtgagcagcctcatagcccccagagccggccaacttctccgtgctaggctgcgacctcaagggctgccgcgtcggggatcggaagtggtcttcaaagaggggtctaggtcgcgaaatcctggcagcagccgaagtgaaaaggagctgctaggaggcgggcggggggcagtctgatgtccgttctggcgcggacaggaagaaactgaagtcgaatttttagttgaattgcgtgctctgtgtttggcggtggtgtggcccgttcttttggaggtccacaccacaggtatgaggcctgtgggccctgaggaagcgcgatccccttaattcctccctcccctctctctccaccgcccgcccctttgcaagga

SEQ ID NO: 57062 - DNA, 31 bp, Homo sapiens; identical to SEQ ID NO: 12884
  chr20:24564177-24564208
  hyper

SEQ ID NO: 57063 - DNA, 31 bp, Homo sapiens; identical to SEQ ID NO: 12885
  chr20:24638561-24638592
  hyper

SEQ ID NO: 57064 - DNA, 30 bp, Homo sapiens
  chr20:24973684-24973714
  hyper
ggggatgctcatgacgcacttgggaattgc

SEQ ID NO: 57065 - DNA, 502 bp, Homo sapiens
  chr20:25058267-25058769
  hyper
cccccacctcctacaacacctcgagccgtgcgatcccgggggcccttccttacccaggagccagggcgcgcaggagcccagcaggccgccctcggcggagttgagcacggagtctggcagcgggatgcagtggcgcaccatggccccgtacagcccgtactcggccatcacgctgctgccgccccagcgcttctcccgcttgcgccatttggccctgcggttttgaaaccagacctggttggaggcaggagaagcagaaggcacacagaagagacagtgaagaggggcgcctggaggagcggaggcggcgtcccagggctcggatcttctctcccgagcatgatcccatgctatttctgaaggaaatagctcccgagggccaaccagccgccctcagggagagcgcccaggagcccccagcagcgcccacgtgcggtccggactcacgggcattcaacgcagtagggacacttgtgaccacgtccactgaagtttccataga

SEQ ID NO: 57066 - DNA, 21 bp, Homo sapiens
  chr20:25061767-25061788
  hyper
gccggcagaggagcgcggtac

SEQ ID NO: 57067 - DNA, 333 bp, Homo sapiens
  chr20:25061978-25062311
  hyper
cgcctggcgctggggggaaaaatggccctctggagatggttgttgaagaccccagggtctcatcaaaaggttccacccggaaccaggtggtggcggtctcacatcgctgagggaacaggaccccggatgagaggcagggatttaggatgcagcaaggggcaggcggcgcagctccgcgaatgcccctcccgcgacggggcctcgctctgggctccccgcctagatctgggccgctggggccaggggtgcggtggggcgatggtctgtgacccctgcgcggctcagagcctaggggacaggggcaggagcggaaagcgcgggcctgattaccgg

SEQ ID NO: 57068 - DNA, 135 bp, Homo sapiens
  chr20:25062510-25062645
  hyper
cgccaggctggagccgtcaagccccgggcccgggcacggcgcgactgccggaccctcgcagccagatccctgtcctgggccagcgggcgccggcagctcggcctccaagcccagcaggtccgtgatggcgaagcc

SEQ ID NO: 57069 - DNA, 110 bp, Homo sapiens
  chr20:25062707-25062817
  hyper
cggaaagcgagtcccggccggtcatggttccttagcaagcaaggcgcgagcctctctggatcccgtttgcggagggcccagcttagaggaagctttataggattgggctg

SEQ ID NO: 57070 - DNA, 4 bp, Homo sapiens
  chr20:25062870-25062874
  hyper
cgcc

SEQ ID NO: 57071 - DNA, 30 bp, Homo sapiens; identical to SEQ ID NO: 12888
  chr20:25064112-25064142
  hyper

SEQ ID NO: 57072 - DNA, 223 bp, Homo sapiens
  chr20:25064523-25064746
  hyper
gagggcggacgcgggcgccgtgcctgcagccccgggtgccgaccaagtggcctcacctgggacaggtcttggggtctccctcccctaggtctccctggaaggtaggcgatcacgggagtgacagaccccgagtagatagccagtgatccaaagacaccaaaaggccaggcggtaggagcccagcctcagacactctctatagtgaccgcggcgcctcgggaag

SEQ ID NO: 57073 - DNA, 471 bp, Homo sapiens
  chr20:25065018-25065489
  hyper
ccttgtgtttcgcagcgtggcggtggcaggagcccagcgcgggaggacattttcatagcctcctacagtgagaaacgccccccacccgacgctgcgctcatctgtgtccccgctgttgccggggctctggtatccacttgcgcgccctatgtggtggggatccacccagagcccagcgtcaagttatacgggcgcttcactcagcgtcagccaagaccagggaagcgcttcttgccgtttaggagacgtctgcaagagataaaaagctagcccacgatccacccacaatcctcgtgtccccggggtgccctcgcagttgccaaacctacgggccgcgtttaggggaagcctccgcgtcctggcggccaaaagaatgggctccttccagcttccccctaccggataccacctgcaaatctattgccagaggcgcagctcccgcgaacgttcccgccccgggcggcccccagg

SEQ ID NO: 57074 - DNA, 30 bp, Homo sapiens
  chr20:25065697-25065727
  hyper
tgggcttctcagagccgcggctggccaggc

SEQ ID NO: 57075 - DNA, 166 bp, Homo sapiens; identical to SEQ ID NO: 12890
  chr20:25129464-25129630
  hyper

SEQ ID NO: 57076 - DNA, 30 bp, Homo sapiens
  chr20:25203124-25203154
  hyper
gggactccgggctggcggagggggaatgta

SEQ ID NO: 57077 - DNA, 84 bp, Homo sapiens; identical to SEQ ID NO: 12891
  chr20:25228117-25228201
  hyper

SEQ ID NO: 57078 - DNA, 30 bp, Homo sapiens
  chr20:25228554-25228584
  hyper
tggcgtggacaggtcgctgccgcctcggac

SEQ ID NO: 57079 - DNA, 30 bp, Homo sapiens; identical to SEQ ID NO: 12892
  chr20:25370882-25370912
  hyper

SEQ ID NO: 57080 - DNA, 30 bp, Homo sapiens
  chr20:25371424-25371454
  hyper
cggagcccggaacccgccgctcctcacatc

SEQ ID NO: 57081 - DNA, 30 bp, Homo sapiens
  chr20:25371685-25371715
  hyper
ctctgggctccatccgcaggctgcagctgt

SEQ ID NO: 57082 - DNA, 69 bp, Homo sapiens
  chr20:25565599-25565668
  hyper
acgcgggtcccgctccgtggggggccgcagccacactggcaggagggaatcctgggcctcgaccagacg

SEQ ID NO: 57083 - DNA, 370 bp, Homo sapiens
  chr20:25565825-25566195
  hyper
gtcgggaaaccgggttttcaagcgttcggcccagcgggcgctgtattttagggcgtgacccccgccccgccctcgagggcgaccggaagagcaggcaccacagcagatgcgccgagtctgcgccccgcaccgcgaggagcacccgaggccgcgctcccggagccgggtctggtgactaaggcgcgggtcgcgacgcaggggcggccccggactctcgaccccaccagccgcctgaatgtcccgccggacgcccgggccggctcacctgggaggcgcctccgccgtccgcccgcgcggggccaggagcgcggcaccacccccgtaccgccggccgctctttgtgtctggaggccgcgacgcaacactcctc

SEQ ID NO: 57084 - DNA, 30 bp, Homo sapiens
  chr20:25566411-25566441
  hyper
cggagcttggcggttcgcagctctcggggt

SEQ ID NO: 57085 - DNA, 30 bp, Homo sapiens
  chr20:25604725-25604755
  hyper
attccctgcgccgccgagaaaagtgagatc

SEQ ID NO: 57086 - DNA, 16 bp, Homo sapiens
  chr20:25677622-25677638
  hyper
cgggagtcgtccaggt

SEQ ID NO: 57087 - DNA, 309 bp, Homo sapiens
  chr20:30062955-30063264
  hyper
gaaaagtcactgagcggccagggccttggggcggggaccccggggctgccctaatggggcggggctggatggggcggggtcgcggctcctcccccggccgaggcggcgaggggaggggaactggcctgaggggctgctcactgaggcgggtggtacagcctggagcatccagccgctggagctgcgagggaccctggacccctcccacgccgaggtaaagccctgcgctacgcgccgccaacttgctcaagttggagcagagttcgccaggcgattgaagggggattcggcagcgttggcaggaatagg

SEQ ID NO: 57088 - DNA, 1267 bp, Homo sapiens; identical to SEQ ID NO: 12895
  chr20:30192833-30194100
  hyper

SEQ ID NO: 57089 - DNA, 304 bp, Homo sapiens; identical to SEQ ID NO: 12896
  chr20:30196328-30196632
  hyper

SEQ ID NO: 57090 - DNA, 30 bp, Homo sapiens
  chr20:30310625-30310655
  hyper
ggaaccagccccctcgcttgcttcctcctc

SEQ ID NO: 57091 - DNA, 30 bp, Homo sapiens
  chr20:30311224-30311254
  hyper
aagtggctttctggcgcccccgggagggct

SEQ ID NO: 57092 - DNA, 30 bp, Homo sapiens; identical to SEQ ID NO: 12897
  chr20:30327414-30327444
  hyper

SEQ ID NO: 57093 - DNA, 30 bp, Homo sapiens
  chr20:30410841-30410871
  hyper
gtctggccagattgcggtgttattaggatg

SEQ ID NO: 57094 - DNA, 448 bp, Homo sapiens
  chr20:30448990-30449438
  hyper
caccaggtggctgcagcaggccggcccggacacagagacgcacaggttggggacgctgactgcagacgcggacgagcagggcgggcgcgggaggcagggttcaggccgccgcggggctcccccagcctctgggcccgtcctggggggcgtggaaggcgcagacagcccccgaagggagccagtcggaagtggggagccacggctggactgcatcctcacttgccgcccttgcgggacagacaccgggggaggcaagagaaagtctgcttgacgcgcgccagcagcggcagcggccggtgggcttcccggggcgtgcgcggcaccaggcgctgcacggttccctcggaggctgctgagtgcggcccggcggaggaggccgaggtcgcggagccctgccggcagcgcttgcacagcggcagcagcgcgcgcaactcctcctcgtcgcgga

SEQ ID NO: 57095 - DNA, 30 bp, Homo sapiens; identical to SEQ ID NO: 12898
  chr20:30457819-30457849
  hyper

SEQ ID NO: 57096 - DNA, 36 bp, Homo sapiens; identical to SEQ ID NO: 12899
  chr20:30458088-30458124
  hyper

SEQ ID NO: 57097 - DNA, 54 bp, Homo sapiens; identical to SEQ ID NO: 12900
  chr20:30458609-30458663
  hyper

SEQ ID NO: 57098 - DNA, 70 bp, Homo sapiens; identical to SEQ ID NO: 12901
  chr20:30458690-30458760
  hyper

SEQ ID NO: 57099 - DNA, 30 bp, Homo sapiens
  chr20:30539529-30539559
  hyper
cgctcacttagtagcggccgaatatttatc

SEQ ID NO: 57100 - DNA, 30 bp, Homo sapiens
  chr20:30539893-30539923
  hyper
ctctaacactagtgcgccagccggctgcga

SEQ ID NO: 57101 - DNA, 1282 bp, Homo sapiens
  chr20:30555390-30556672
  hyper
tctcagcttcaaaacgaagacaataagaaaaggggacccctcaagatcaaaggaggggatggaacaatatgtgagcactcaggaaactggaaatgagcgttagcatggagtgactgctaaagggttactggggggcccgcccaagtcccccagctcctttcttccaagtcccccacccacccccccgtcagacccaggccactggaggtgaacacaggagaaaaacgaagtggagagaatgggaagggggaggcgataaacaaaaaagaaggaagtgcagtccgaggggagatgagagacagaaagcatggggttggagccccgcgcctccgaggaaggagggagagggtgacctggggtgcgccccgcctcccctgcttccgcattcccgggggctgcccccccttcggccgcagctcaggcgggtgggggcggggcggggcggcgccgaggagaatgaataattgaagtggaggggaggaggaagaagaggagaaggaggaagaggagccgcccgcgcagggtcctccccacgccgcacccccctccgccgcccggaagtcgctccccgcctccctctccgccaacatggccgcgaagtcggatggagcggcggcctcggccagcccggacccggagggggctgccggtggagcccggggcagtgccggcgggcgcggggaggcggcggcggcggccgggcccccgggggtcgtcggggcgggcggcccggggccgcgctacgagctgcgggactgctgctgggtgctgtgcgcgctgctcgtgttcttctccgacggtgccacggacctgtggctggcggcctcctactacctgcagaatcaacacacctacttcagcctcaccttgctgttcgtgctcctgccctcgctggtcgtgcagttactgagcttccgctggttcgtctacgactactcggagcccgcagggtccccgggacccgccgtcagcaccaaggacagcgtagccggcggagccgccatcagcaccaaggacagcgccggcgccttccggaccaaagaaggcagccccgagccgggtccccagcctgcgccctcctcggccagcgcctaccgccgccgctgctgccgcctctgcatctggctgctgcagaccctcgtccacctcctgcagctcggccaggtctggaggtaggagaagcgcaggtggagggacctgagcccgaggagtgggggtggcgaagggctacctgacgtcccagccctgatctgacctttccgggctaccctcctgtcctgac

SEQ ID NO: 57102 - DNA, 236 bp, Homo sapiens
  chr20:30639099-30639335
  hyper
aggaagccagggtggttccttcgggcagggaactttgcatggccatggtggttccttcgagagaggaactttgcatggtgtctgaatggagcaggcctgcggaagagaaaccgctgaccacagacctgcctggaagtctcgggccgcggagttggggagggccgggccagaagggaggggtcggagtggtggggaaaagagatcacgatgcttccggggtagggtaaggcctttcc

SEQ ID NO: 57103 - DNA, 606 bp, Homo sapiens
  chr20:30639975-30640581
  hyper
taggacacttggggcggagttagcctcgctcagggcgcggctaaggcgcccagatggcctgcgggcgccaccacgtccctggtcccagctcgggagcacatcagaggcttagaggcgagtgggaagggactcagacagtgcaggacgagaaacgcccgcggcaccaaagcccctcagagcgtcgcccccgcctctagttctagaaagtcagtttcccggcactggcaccccggaacctcaggggctgccgagctgggggggcgctcaagctgcgaggatccgggctgcccgcgagacgaggagcgggcgcccaggtgagtgccgcgcacaggggaccgggaatacccggcccgcgaggggtcccaggaggcggagggagcccaggagcctggggagggctggctacgggtgcggctgggggcagcgaggggagacggaacgtcgggggagccgcgggtagcccgggggatgaggggtcgacagcgagtggagggtgccctagggaggggcggcactgttgcggactgctggattcccggggaaggggacgctcgggcccgtgcagtgactttatccaccacttctctgggccgtccaggttcccct

SEQ ID NO: 57104 - DNA, 299 bp, Homo sapiens
  chr20:30697226-30697525
  hyper
agtagtaaagatggcgctgagagcacgagcgcactttcgcacacccccattacccacaatgcagcgggaataagggaggctcagtttctgccaggagctaatatggcttccttagttacaccgttctctctcttcacctaatcagcgaccttactttcccagaccagactgtcgagcaggagctaagactccttttcccctctgctgaccgccactacaggagcggttgaagccagacgaccaccttgtggagttaaactccgtaaccagggagcaccacttccgctgacgtcattacg

SEQ ID NO: 57105 - DNA, 325 bp, Homo sapiens
  chr20:30778024-30778349
  hyper
cggcgggcgcgccgcggcttctggggtccccgccctcttgtccgccatcgcctgcgggagcctctggcctggaggggctcggggcgcgctggcgactgcgggctcggcgacaggggcggctggtggcgggaggacagtgggaggaaggctccgccccacgcgcccccctctcggatgtgattcgccggggtctcccgcagccggggcgagcggcttggaagcccggaggaggggtacggaactgcccgatggggatgcgaccgcgggcgccagacgaactgtccccacattcgttggcgctggcggtggaggtggggagaagtgt

SEQ ID NO: 57106 - DNA, 30 bp, Homo sapiens
  chr20:30795268-30795298
  hyper
ggcctatctggggccgggttggcgcagacc

SEQ ID NO: 57107 - DNA, 96 bp, Homo sapiens
  chr20:30946057-30946153
  hyper
ctacgactcccaggcgccctttcggtttgtttttgttcaaaaaaaaaaaaccccacactccccctcctcactcttcacacacactcacacacaccc

SEQ ID NO: 57108 - DNA, 111 bp, Homo sapiens; identical to SEQ ID NO: 12905
  chr20:30946218-30946329
  hyper

SEQ ID NO: 57109 - DNA, 290 bp, Homo sapiens; identical to SEQ ID NO: 12906
  chr20:30946345-30946635
  hyper

SEQ ID NO: 57110 - DNA, 30 bp, Homo sapiens
  chr20:30947126-30947156
  hyper
atctaaaccaggtgcgtggagggaagcaag

SEQ ID NO: 57111 - DNA, 84 bp, Homo sapiens; identical to SEQ ID NO: 12907
  chr20:30954185-30954269
  hyper

SEQ ID NO: 57112 - DNA, 30 bp, Homo sapiens; identical to SEQ ID NO: 12908
  chr20:30955515-30955545
  hyper

SEQ ID NO: 57113 - DNA, 110 bp, Homo sapiens; identical to SEQ ID NO: 12909
  chr20:30956816-30956926
  hyper

SEQ ID NO: 57114 - DNA, 387 bp, Homo sapiens; identical to SEQ ID NO: 12910
  chr20:30959965-30960352
  hyper

SEQ ID NO: 57115 - DNA, 296 bp, Homo sapiens; identical to SEQ ID NO: 12911
  chr20:31015929-31016225
  hyper

SEQ ID NO: 57116 - DNA, 105 bp, Homo sapiens; identical to SEQ ID NO: 12912
  chr20:31017139-31017244
  hyper

SEQ ID NO: 57117 - DNA, 154 bp, Homo sapiens; identical to SEQ ID NO: 12913
  chr20:31017702-31017856
  hyper

SEQ ID NO: 57118 - DNA, 360 bp, Homo sapiens; identical to SEQ ID NO: 12914
  chr20:31019122-31019482
  hyper

SEQ ID NO: 57119 - DNA, 107 bp, Homo sapiens; identical to SEQ ID NO: 12915
  chr20:31020681-31020788
  hyper

SEQ ID NO: 57120 - DNA, 635 bp, Homo sapiens; identical to SEQ ID NO: 12916
  chr20:31021085-31021720
  hyper

SEQ ID NO: 57121 - DNA, 4889 bp, Homo sapiens; identical to SEQ ID NO: 12917
  chr20:31022233-31027122
  hyper

SEQ ID NO: 57122 - DNA, 30 bp, Homo sapiens
  chr20:31071929-31071959
  hyper
tcaggaactctcggcgcccggggccccttc

SEQ ID NO: 57123 - DNA, 117 bp, Homo sapiens
  chr20:31072614-31072731
  hyper
aggcaggactggcatcgcggggtgggagccctggacctccgagcaacctcggactcggcccgaaaagcaacactctcatcaccaaaccgcagaattagaccccgatggagaaaatgg

SEQ ID NO: 57124 - DNA, 30 bp, Homo sapiens
  chr20:31124861-31124891
  hyper
ccgcccccccgggacgctgcccacctgtcc

SEQ ID NO: 57125 - DNA, 30 bp, Homo sapiens
  chr20:31170807-31170837
  hyper
gggtcccagccttgcgcgggctgggtcact

SEQ ID NO: 57126 - DNA, 36 bp, Homo sapiens; identical to SEQ ID NO: 12918
  chr20:31172327-31172363
  hyper

SEQ ID NO: 57127 - DNA, 72 bp, Homo sapiens; identical to SEQ ID NO: 12919
  chr20:31172881-31172953
  hyper

SEQ ID NO: 57128 - DNA, 32 bp, Homo sapiens
  chr20:31173483-31173515
  hyper
acgccgacctcccggccgccccgccccactta

SEQ ID NO: 57129 - DNA, 163 bp, Homo sapiens; identical to SEQ ID NO: 12920
  chr20:31351104-31351267
  hyper

SEQ ID NO: 57130 - DNA, 30 bp, Homo sapiens
  chr20:31408108-31408138
  hyper
tccctgcgctgcagcgactggaggtcccag

SEQ ID NO: 57131 - DNA, 141 bp, Homo sapiens; identical to SEQ ID NO: 12921
  chr20:31797661-31797802
  hyper

SEQ ID NO: 57132 - DNA, 30 bp, Homo sapiens; identical to SEQ ID NO: 12922
  chr20:31989402-31989432
  hyper

SEQ ID NO: 57133 - DNA, 30 bp, Homo sapiens; identical to SEQ ID NO: 12923
  chr20:32031936-32031966
  hyper

SEQ ID NO: 57134 - DNA, 30 bp, Homo sapiens; identical to SEQ ID NO: 12924
  chr20:32032428-32032458
  hyper

SEQ ID NO: 57135 - DNA, 30 bp, Homo sapiens
  chr20:32077504-32077534
  hyper
cgctcaaaggcatgcgcaaaagccatcagg

SEQ ID NO: 57136 - DNA, 31 bp, Homo sapiens; identical to SEQ ID NO: 12925
  chr20:32090525-32090556
  hyper

SEQ ID NO: 57137 - DNA, 30 bp, Homo sapiens
  chr20:32262416-32262446
  hyper
gaacctaggggctgcgggcctacccagagg

SEQ ID NO: 57138 - DNA, 30 bp, Homo sapiens
  chr20:32273878-32273908
  hyper
cagcaggtcagggtcgcaggggccggcggc

SEQ ID NO: 57139 - DNA, 364 bp, Homo sapiens
  chr20:32307858-32308222
  hyper
ggacatccctcagccccagcccggcccgacggccccactcacacagccccgttccggaagcccttaagcacggccaacgcagcgtggtagcggcgcttgcgcagcagtgcgttgacgactacgagcagagcccttagctgcggcggggctgccatagtgcgggctgcgcgcagggtcggggttaggaactgtaagcgcactgacagccggaggttccagctgcgcgcccacagcccctcggtagcgccgccgactcgtggcgtctataggctgtttctgcgtcactcatgcatggaagaccaatcagagagcgtacttgtctcatgggacaatagcactcatcgaaatagttgtctgactggaa

SEQ ID NO: 57140 - DNA, 30 bp, Homo sapiens
  chr20:32320538-32320568
  hyper
ccgacagactgttccgtgctctgcaagaac

SEQ ID NO: 57141 - DNA, 30 bp, Homo sapiens; identical to SEQ ID NO: 12926
  chr20:32342006-32342036
  hyper

SEQ ID NO: 57142 - DNA, 30 bp, Homo sapiens; identical to SEQ ID NO: 12927
  chr20:32398867-32398897
  hyper

SEQ ID NO: 57143 - DNA, 30 bp, Homo sapiens; identical to SEQ ID NO: 12928
  chr20:32699010-32699040
  hyper

SEQ ID NO: 57144 - DNA, 30 bp, Homo sapiens; identical to SEQ ID NO: 12929
  chr20:32700242-32700272
  hyper

SEQ ID NO: 57145 - DNA, 30 bp, Homo sapiens
  chr20:32891250-32891280
  hyper
gccggaggggatttcgatccctgaaaagaa

SEQ ID NO: 57146 - DNA, 185 bp, Homo sapiens; identical to SEQ ID NO: 12930
  chr20:32899355-32899540
  hyper

SEQ ID NO: 57147 - DNA, 85 bp, Homo sapiens
  chr20:32899769-32899854
  hyper
ccgcgggtttcttccgttgggggagccctccagactcgtagaatataagagagcgcccctccctagccgcgggccatctctaagc

SEQ ID NO: 57148 - DNA, 30 bp, Homo sapiens; identical to SEQ ID NO: 12931
  chr20:32900061-32900091
  hyper

SEQ ID NO: 57149 - DNA, 30 bp, Homo sapiens
  chr20:32951395-32951425
  hyper
cttccggaggccttcgcctcgcgggctcca

SEQ ID NO: 57150 - DNA, 634 bp, Homo sapiens
  chr20:33103990-33104624
  hyper
cgtccagccagaaccagcatcttttctgcacggctggagttgggaattttccacagcttagcgcactgctccttagcttttcgctttgccacagtggaaagcagattttccaagaatcctggcggagccaagatcggctcgcccgcccccgcctcacgctggctcctgataggcagctagagctgtccgttttgacagaaacctttgcgcaggcgcagaaaggcacaggactcgctaagtgttcgctacgcggggctaccggatcggtcggaaatggtgagcgtgcgccggggtcttgtggctggcggccgcccaccaccccacgccaggccttcagtcttccgaggatgaggggatctcagagctccggacagggaatcggtggtggctgggcgtggccgggcccgggccccagccgacttgagggtggaacccggcggcggaggcctctaaagcctgaccgaggcggggccgccggatcccgctgccccttgaccggaagcgggagcccagcctcggccaggaagagatgatgggcgaggggtgggcggcggccctgcagcctagagttttggggccttggtgcgcgatggcaaccctggcaacgtttcccgggagctcagtttgtggcagg

SEQ ID NO: 57151 - DNA, 34 bp, Homo sapiens
  chr20:33292056-33292090
  hyper
ccggtgacgcgaggcgggcgggcccctttgtgac

SEQ ID NO: 57152 - DNA, 69 bp, Homo sapiens
  chr20:33297164-33297233
  hyper
cctggactcggtcccgcccgcctccagagcagtcccctggaggacctcctcatcgagcaccccagcatg

SEQ ID NO: 57153 - DNA, 30 bp, Homo sapiens; identical to SEQ ID NO: 12934
  chr20:33345729-33345759
  hyper

SEQ ID NO: 57154 - DNA, 30 bp, Homo sapiens
  chr20:33460459-33460489
  hyper
gtctcccagaaaggcgtcctcgtccttgcg

SEQ ID NO: 57155 - DNA, 590 bp, Homo sapiens
  chr20:33464342-33464932
  hyper
aggccccgcccctctacggaggccccgcctctagttcggcctgttttctcagtcccggcacccgccgcgaccgcaaaggcggccgcggttctaggaacttgacgtgatggggcttcctgaggagcgggtccggagcggcagcgggagccggggccaggaggaagctggagccggaggccgggcgcggagttggtctccgccgcccgaggtcagccgctccgcgcacgtcccctcgctgcagcgctaccgcgagctgcaccggcgctccgtggaggagccgcggggtgaggcccggcccgggcgggcctggggtgtcagtgaggagaagagtgggggctccctgggggagtcgggggctcccttgggaagctgaggggtgggtgaggagatggaggttctgtgaaggaagaattgcggttctttgaaaatggaaaagggattccgggaggagacgagggttccatgggagctggggagttccctgcagacttggagggtccgtggtggagatgcgggtttttgcgaggagacgcgggattccgtgagggaagaagtgaggttccttgagattgggacggggaggtcggcca

SEQ ID NO: 57156 - DNA, 30 bp, Homo sapiens; identical to SEQ ID NO: 12936
  chr20:33680735-33680765
  hyper

SEQ ID NO: 57157 - DNA, 30 bp, Homo sapiens
  chr20:33734736-33734766
  hyper
ccctgggtgggggacgagaaatcaggcatg

SEQ ID NO: 57158 - DNA, 75 bp, Homo sapiens
  chr20:34129912-34129987
  hyper
aagacctgcgggggcgccaccggtaggccgcagcggggccggggtcgcgtggaggggggcgtcctagagcttagc

SEQ ID NO: 57159 - DNA, 6 bp, Homo sapiens
  chr20:34188625-34188631
  hyper
ggtgag

SEQ ID NO: 57160 - DNA, 341 bp, Homo sapiens; identical to SEQ ID NO: 12938
  chr20:34188747-34189088
  hyper

SEQ ID NO: 57161 - DNA, 325 bp, Homo sapiens; identical to SEQ ID NO: 12939
  chr20:34189166-34189491
  hyper

SEQ ID NO: 57162 - DNA, 326 bp, Homo sapiens; identical to SEQ ID NO: 12940
  chr20:34189679-34190005
  hyper

SEQ ID NO: 57163 - DNA, 30 bp, Homo sapiens; identical to SEQ ID NO: 12941
  chr20:34203950-34203980
  hyper

SEQ ID NO: 57164 - DNA, 30 bp, Homo sapiens; identical to SEQ ID NO: 12942
  chr20:34330349-34330379
  hyper

SEQ ID NO: 57165 - DNA, 191 bp, Homo sapiens; identical to SEQ ID NO: 12943
  chr20:34359741-34359932
  hyper

SEQ ID NO: 57166 - DNA, 30 bp, Homo sapiens; identical to SEQ ID NO: 12944
  chr20:34360181-34360211
  hyper

SEQ ID NO: 57167 - DNA, 185 bp, Homo sapiens
  chr20:34680179-34680364
  hyper
ctaagctagggaaaatcgaggtcggcgctggcgggaacccgggaggacgtgggggccccgggtggggtctgctcctcttcttcgcccggcctctgagcccgccgcagctcaggttgacgccgggcccacgtggggaagccggcggcgggtccccagcgccgggagggttcgcggggctcagcccc

SEQ ID NO: 57168 - DNA, 988 bp, Homo sapiens
  chr20:34680572-34681560
  hyper
cgaggagggggctgagcgccgtgggagggagagcaggagcgagcgcgcgagagagcggggcatttctgcgcagctctagcgcgcctcggagcccgccggggcagccgccggacaccaggaccgcgagccagacagctcccggaagccgcgccgccgccgccaggttagccgcacccgccgtccccctccgcgtcccggggaccccgccgcgtcgggtcccgcgtgtgcgtgtggggtggccgccgagggcggcgggctcgattcccgatctttgggcactgacaggccggcgggccggctccaggagccgcgggcttcggttcgtgtgtgtggggactgtcgcgggtttgtgtgtcggggctccagtctctgggtgtgtgttaggtgtgagcgcgcgtgtgcccgtggatccgtgcgagcggctgctcggtgtgcgcgcgcgtgcgtgtgtgcgccgggtgtgcatctgtgtgtgcgtgtgtgagggtgtgtgccttgcgtgtcttcgcgagtggtgcgtgcgtatctgggtgagggtgcgtgtgtctgcgtgtgtctgtcggtgaatgtatctgtgagagggtgtgtccgaatgtgtagcagtgtgtacacctctgggtgagggcgtgtgccagtggcttcgcttgtggctgcagcctgtggcgggtgtgggtgtgtgtgtgcgcgcgcgtcgctgtgtgcgcgccagtgtaactcccgtgtgtgcgcgtgtgagtgcgggtgtgctcccgcgtagcccccgtgtgcgtgtgcgcggctttgtcttcgcactgccgggaggaagcggtgggggcggcggtccaggcgccgccgccgctgggagctgggcacctggcctgggcggtgggtggcggcggcgggggtgtcccttccccgtcgggcagagactccctgctggcaggtgggcggccacaccccgggggtcgggggaactgggctgacagcagagcccgcgttctgacctgag

SEQ ID NO: 57169 - DNA, 30 bp, Homo sapiens; identical to SEQ ID NO: 12947
  chr20:34742314-34742344
  hyper

SEQ ID NO: 57170 - DNA, 30 bp, Homo sapiens
  chr20:34824472-34824502
  hyper
atgtgtggctgggccgcccctcttctcggc

SEQ ID NO: 57171 - DNA, 282 bp, Homo sapiens; identical to SEQ ID NO: 12948
  chr20:35201302-35201584
  hyper

SEQ ID NO: 57172 - DNA, 125 bp, Homo sapiens; identical to SEQ ID NO: 12949
  chr20:35201647-35201772
  hyper

SEQ ID NO: 57173 - DNA, 30 bp, Homo sapiens
  chr20:35202291-35202321
  hyper
gtcccgacggcccccggggggtgtttgtga

SEQ ID NO: 57174 - DNA, 30 bp, Homo sapiens
  chr20:35233927-35233957
  hyper
ttcccctacctcctcggtctccacagcgcc

SEQ ID NO: 57175 - DNA, 30 bp, Homo sapiens
  chr20:35235102-35235132
  hyper
ccaccagatatgtgcgagaattggttggga

SEQ ID NO: 57176 - DNA, 30 bp, Homo sapiens
  chr20:35374638-35374668
  hyper
ggagaggccggcggcgccatctttgatgta

SEQ ID NO: 57177 - DNA, 30 bp, Homo sapiens; identical to SEQ ID NO: 12950
  chr20:35491340-35491370
  hyper

SEQ ID NO: 57178 - DNA, 30 bp, Homo sapiens
  chr20:35492706-35492736
  hyper
gtgcatgcctggctcgcgcaccttgaccgg

SEQ ID NO: 57179 - DNA, 39 bp, Homo sapiens; identical to SEQ ID NO: 12951
  chr20:35579323-35579362
  hyper

SEQ ID NO: 57180 - DNA, 30 bp, Homo sapiens
  chr20:35917909-35917939
  hyper
ctctttgtccagctcgaacccacagaacag

SEQ ID NO: 57181 - DNA, 30 bp, Homo sapiens; identical to SEQ ID NO: 12952
  chr20:35974254-35974284
  hyper

SEQ ID NO: 57182 - DNA, 377 bp, Homo sapiens
  chr20:36012929-36013306
  hyper
gggtgacttgggtgtccggggggtgggggggcggccgtacacactgtgaagcgtccgcgccgccgccgctggctttggggtggagcaagcgcaaaagacacggggtgtggttaatgggttctaattggacgcttaagcccaagaagaagaagggcggcgcgggaccgggcctgttgctgccttggcgcccagtcctttttcgttgcctgggtccgcccagagatgagtcgggacgcgcggcccacgtgcggcggaggggcagctgggtcgctcggggaacggggcaccggatggccccggttgggcccgcgccaggatgcgcccctgcgccctctgctggcgctctgcggtcaccgcagccccggagagggccgttt

SEQ ID NO: 57183 - DNA, 30 bp, Homo sapiens; identical to SEQ ID NO: 12953
  chr20:36034971-36035001
  hyper

SEQ ID NO: 57184 - DNA, 30 bp, Homo sapiens
  chr20:36040888-36040918
  hyper
tggtgggattccggcgtgggcagcagctgc

SEQ ID NO: 57185 - DNA, 31 bp, Homo sapiens; identical to SEQ ID NO: 12954
  chr20:36235666-36235697
  hyper

SEQ ID NO: 57186 - DNA, 30 bp, Homo sapiens; identical to SEQ ID NO: 12955
  chr20:36322247-36322277
  hyper

SEQ ID NO: 57187 - DNA, 460 bp, Homo sapiens
  chr20:36531540-36532000
  hyper
ggccggctgggcgtgcgctcgctccccgaagccggggctgggccggagccgggcgagggctgggagctgggccgggtccggggacagcgggcgaggggcagctgccggagccgggcagccaggccgctcagggcaggggacagctggcgccggttctgcggtctccggggcccagatgtgaggcggcggcgcccccggcccgagagcgcacgatgggggccccgctcgccgtagcgctgggcgccctccactacctggcacttttcctgcaactcggcggcgccacgcggcccgccggccacgcgccctgggacaaccacgtctccggccacggtgagttcggtcgccgcccccgcggacttccccaccaaaccccaacccgggccgcgccactccaacttggccgccccggggctcgaaccggcgccagtcgtggcgggcatcccggggcgccccctgc

SEQ ID NO: 57188 - DNA, 30 bp, Homo sapiens; identical to SEQ ID NO: 12957
  chr20:36662295-36662325
  hyper

SEQ ID NO: 57189 - DNA, 308 bp, Homo sapiens
  chr20:36781071-36781379
  hyper
gtcccattttccaggcagacccggccctttcccacccatcagactgatttcctcccgcagcgcccctgcgctcaccccagcccaacttcctgcctctgcatcaccagctccacagttcccgccccgggatgtgggtcactttagtcactgtgccgcttggctgaccgccactccaacccgccgccgggtgaggccaagcaggaggaagggggccatcccccagaaccacgcttcccattccctgaactctgaaaccttgtggtgtggacgagggtggggacaccggcgtgttcctgtcctgttggcag

SEQ ID NO: 57190 - DNA, 36 bp, Homo sapiens
  chr20:36793593-36793629
  hyper
cggccatggtcgggcgggggcggtggctccttccac

SEQ ID NO: 57191 - DNA, 30 bp, Homo sapiens; identical to SEQ ID NO: 12959
  chr20:36793851-36793881
  hyper

SEQ ID NO: 57192 - DNA, 285 bp, Homo sapiens
  chr20:36888951-36889236
  hyper
ggtctgtgggtccgcgggtccgtctgtctggggcagccctcggtcccgcctagccctggagccaggggatagggcaggcccggggcaccgaccccggcgtcatctcggaggagcggccggggaggacagggagagagactgagagagagacagagagggactgaggctggagacggcgagagacataagggagccgcgggcggcgcgggtcgggccaccagacggggggcggcagcagaggcggggcggggcggggcgcggcgggacagcggcccctttgtgcct

SEQ ID NO: 57193 - DNA, 73 bp, Homo sapiens
  chr20:37075185-37075258
  hyper
gcttggataaagggcgttagtggagggacagaattgcagctccgtcctcccagggggcgctgcaggcacgtct

SEQ ID NO: 57194 - DNA, 30 bp, Homo sapiens
  chr20:37101455-37101485
  hyper
ggggagttatttgacgccgccgcccctggc

SEQ ID NO: 57195 - DNA, 484 bp, Homo sapiens; identical to SEQ ID NO: 12962
  chr20:37274670-37275154
  hyper

SEQ ID NO: 57196 - DNA, 862 bp, Homo sapiens
  chr20:37302481-37303343
  hyper
aggcagagggaatcaggaaagcgatgggcttgtctgaggaacagaaaggacaacgaacgtgtgagtcacactaaggggcgccgtggtgcggcatgaggctggagcctgatcactcggggtcttactggccacggtgaggagtcagggtttcatgcgcccctgcagtcagaaagcatggcccaaccccagtgccctaagtccggaaacattcaaagctggacccagggtagcgggatccggggcctctggggacccgagagggacgttaagttcagggcttcagggtgcagccctggggtcggtacccccagcctccaacccagagctggcagcgctcgcccccttctccgcgcgggccctcagctcagctccctcttcgctccccgtgtccccgcgagcgggagggaggggatgctaggacgccctgtcggcgtcgtcgccgctttccgccattgtttagtcgtgatgctctcattttctctgaatcaacaattttctgctcggctccgcgccgaccggcgaacgcggggcttttcctcgcccgcctgatgacagcagagcggcgcggagcagctggtccggaaggaagcgccaggcgcctgcccggtcccaggcgtccgctgccgcccacccacaccagaccccgcccccgcgcgtcaagccccgcccatccataccaagtcccgcccccacaccctcacccacacaccaggccgtccccaccccgcccccagagccccggggcgccccgcccgctagccgcgcacgcgcagtgagcacggcgacccccggtggtcgggtgtctccgcaggccgaacacgctgctcgcccagctgcggatcattaccgcccttttgttctc

SEQ ID NO: 57197 - DNA, 31 bp, Homo sapiens
  chr20:37351616-37351647
  hyper
cagggagaaagggcctcgagagaggggagat

SEQ ID NO: 57198 - DNA, 626 bp, Homo sapiens
  chr20:37351889-37352515
  hyper
attcgggaacacatacgtaatccaacacactagctctggcacacacactggaatgcgcgcaaaaccacacagacacagaacacacgcggttaccaaacctcattctcagaggccacactgatccaacctcaagcagagtctgatacagcatcggtctttgtctctgggtctctcccttactcgcgctcacacacccgtaccccaatcaacacaaacagcccaagctttcacagcctggaggcggccgtcggagcagggccccagcgcaccgcgagcctctgcttcctccgccttgcagcgccgcgagcccttctttcctccgcgcctggccccgtctgcgcccctctcggcgtgggcattcgcagacccgctaggaggctgacgagaggtgtcctcatagagtcctgccttcttccagacccccaaacgaaaagaaagagaaaagccaacctttcgcctccattctgcacgcatttggagagcggctggtggcgagcgatccgcacaatcgcttccctcgcggcgtccctggacgggcggagagaacccgggtgactgagcctgaggctgagcttccttgggagcgatccatgccagccacttctaccttcaagggggactcgcgg

SEQ ID NO: 57199 - DNA, 1112 bp, Homo sapiens
  chr20:37352606-37353718
  hyper
cggggcgcccagaccagtccttagccagaggatctggggctgcacagctcccggaccctggagggggtggtccgggggtgggagactgcgagcatcagcccacgccggccccctcccaccctgcggcggcgaggtgggaagggccaggatgcgagcttagcacctcccctagaaatgcagcacttcgcccccccacctcccctgccctcggcgctccctctttcacgcgctccctcccgcctccttcccaagggcgcccttcttctgcccccagctcacgtctgaatccctcggcgccccctttctcttctcctagccccttcctcacgtcccctgcctccgggtatttcctctctccaatcccccacccccgcaccgcctgattccgaggggcgggagcgcattgggctgcgcacgggtgggggcgccgcgccagcttcgcgtagctgctctgacgccgctgccgccgccgccgccgccgccgccctccgcagcccagctcgcgccccgcggcagctccgcagtgcactagccaccaccgccgccgccgccgctccgccagacctgctgccagcttgcccggtccagccctgagagagcctcgaacgccagctgcgagggtcatgagccagagagccccggggcgccgcgcggagagcaagcggagatagcgactttgcgccccccagccctcgccttcttgcatcgcgttccccgcatcctcgggtccttctgtcctttccgctgtccccaccgccgccatggccaccttgctccgcagcaagctgtccaacgtggccacgtccgtgtccaacaagtcccaggccaagatgagcggcatgttcgccaggatgggttttcaggcggccacggatgaggaggcggtgggcttcgcgcattgcgacgacctcgactttgagcaccgccagggcctgcagatggacatcctgaaagccgagggagagccctgcggggacgagggcgctgaagcgcccgtcgagggagacatccattatcagcgaggcagcggagctcctctgccgccctccggctccaaggaccaggtgggaggtggtggcgaattcgggggccacgacaagcccaaaatcacg

SEQ ID NO: 57200 - DNA, 463 bp, Homo sapiens; identical to SEQ ID NO: 12966
  chr20:37353806-37354269
  hyper

SEQ ID NO: 57201 - DNA, 269 bp, Homo sapiens
  chr20:37354562-37354831
  hyper
ctcgcccctctcgcccgaaatcccggctgcaccgcaaagaggcggccagctcctccccgtgtgaccctggcgaagccctctccagaggctaagaatggcccctgctctctaggccctctccccttattcctaaccccccactccccaccaggcggcgcaggactcctacatagggagcaggtttggagtcttggcaacgacctccgagctagcaggggctggcaggccgcagctttctgggccgaaggagacttcagctctaggcaacc

SEQ ID NO: 57202 - DNA, 94 bp, Homo sapiens
  chr20:37354993-37355087
  hyper
cgctttccgctccggggcccggcgagacggccttgctggatcacggacccggggctgctcccgccttcgctgtgccccgcgacttcccggggcg

SEQ ID NO: 57203 - DNA, 155 bp, Homo sapiens
  chr20:37355887-37356042
  hyper
ctctggctcgacacccgggctcactattagttcccctacatccaccccgcagcctgctcttaacctctcctccccggcggctcagacccaattctcagtgtccttagcgcccccttcgggccacagcgttaagccacgccccccgggcccctcat

SEQ ID NO: 57204 - DNA, 266 bp, Homo sapiens; identical to SEQ ID NO: 12969
  chr20:37356168-37356434
  hyper

SEQ ID NO: 57205 - DNA, 1085 bp, Homo sapiens
  chr20:37357215-37358300
  hyper
cgtgtccggcttcgtgcactccctcgagggcctcatcgaagcctaccgaaccaacgcggaggactagggcgcaagggcgagcccccgccgcgcttctgcgctctctcccttctcccctcaccccgcccccaccagcccagtgcgccctgccgccgcgcttgggaggccaagctttaaacatctctggttcctagtttctgattattcggggatgggggggatgggaggggacagggattcacgatccatcgcgtctgcgtttctgttgtcctttcttttccacaacaccctggttttggggggaggcggggtgcatttgcgggcagggttctctgtccttccaagtggggccccgacactttggttccagtcatcgagggggttgggaagggagggagagggggcgcagctcgcaggcgtggcaacttgaccttgggggaatatttcacatccatccagagctcggaatctacagcgtccagccatttccagcaagagcgcttcccattccggagacgtttcaaccctgcagcgggaaaggctgactgggaaatccattttgggtgggcaatttccttcaacgaagccggaaggcgagaagccgcggcggggccagcttgcctgccggttttcaggaatctaaactctcatcttgtgcaatttatcaggtgtggaactgttctactgtgcgtgtggtgtgctcgtggtgaataagatgaaatgtatatcagaaaaaaatctatctctaatttagagtgcggtacataattatatccgcaaataaagaagagacaaaggcttgcgcggcccggtgtcgggtttgtgtgttcgtaccagccgggatcccctggcgctgggaggcgtgggaactggctcccgccggctgaaaccggagatggtgagcagctgtggttaaagggtccggggagggctctagggagtacaaagattagttggcggcgaggaggctcctcaggtgtgaggaggaagctgaagacggagagtgctgtagcggccccctcagctgccaggtcgaggtttgttcgaatctctcccctgggggcgggtccatctgagaatttggt

SEQ ID NO: 57206 - DNA, 152 bp, Homo sapiens
  chr20:37434200-37434352
  hyper
cccacccgagagcgccgggaccctgtcccgcgctgcctcccaagccggatggggttgagcgcgcccaccccagtcccaggagctcaggccccgccttgggggaggagccgagaggcggcgcggaggctcgcggccgagcagagccagctctg

SEQ ID NO: 57207 - DNA, 233 bp, Homo sapiens; identical to SEQ ID NO: 12972
  chr20:37434488-37434721
  hyper

SEQ ID NO: 57208 - DNA, 157 bp, Homo sapiens; identical to SEQ ID NO: 12973
  chr20:37434736-37434893
  hyper

SEQ ID NO: 57209 - DNA, 439 bp, Homo sapiens; identical to SEQ ID NO: 12974
  chr20:37434930-37435369
  hyper

SEQ ID NO: 57210 - DNA, 429 bp, Homo sapiens
  chr20:37435487-37435916
  hyper
cgcgccaggcctgggtcccggtgctcccgggcacctcaggagcggagggagagggatgtggcttcatcagcgcttctaggaaccgaaaaccgagctgcctgcgcgcccatgtgattgcatttcacataaagggcccctgttttcactgtcagaagagccccccagctctccgcggctctggacaccaggtgccgcctctgaatcaccctctgtggaggacccggggcccggaggtacaggcgccctttcccgcagggctctccctggaaagggcctgccgatggcggcctcagtccgcaggggtacttccctgtgtaccctgccatttcctgcggctggtgaagcaccggagaaaaaccgtccatctaggaggcctcctccaaggctggtaataaagcttcttagcccagccagcgactagctgtctac

SEQ ID NO: 57211 - DNA, 30 bp, Homo sapiens
  chr20:37590540-37590570
  hyper
aataaaacagaagtcgacaagttgaggtag

SEQ ID NO: 57212 - DNA, 30 bp, Homo sapiens
  chr20:37591283-37591313
  hyper
gcctcctcaggcctcgtcttcctcgttact

SEQ ID NO: 57213 - DNA, 811 bp, Homo sapiens; identical to SEQ ID NO: 12976
  chr20:39316041-39316852
  hyper

SEQ ID NO: 57214 - DNA, 2220 bp, Homo sapiens
  chr20:39316983-39319203
  hyper
cgcttggtgatgatggtgatggtgcgggtgagcgtgcgggcccagctcgtcgtgggccacgccggcgcccgggtacgcgtggtgcgggtgagggtggtggtgatggtggtggtggtgagcgccgcgaaagctgtcgaagctttgcagcggctgtggcactgggtgcgagccgatgagcgcttccaccgcgtcctcgggcgtcaggttgagcgcctcggggttcatctgctggtagttgctcgccatccagtacagatcctcgaggtgtgtcttctgttcggtcgggctgaagctgggcgacgagggcacggagctacacggagtgctgagcggtgtggaggacaccgagccggctggctgcaggcgtgtgcagggcctgcccggacgctccgcgcgccccagtggctccttcttcacgtcgaacttgagcaggtcgaagtcgttgacatactccatggccagcgggctggtgggcagctctggccccatgctcagctccgcggccatcgctgaagcgaggcgcagccgccgctgccgcccgggaaactttgcggccggccggagcgcgccgagccaagcgcgggggggaagagcggagaagagctggggaggcggggagcgagggcgcagcgggccggggccgccggccaagcctttgtctggggacgcggcggcgcgccggagagtcccgaggctgcctgcaccgccccagagctctgggctgtgcccgcgcagggaccgggccgggtagagtcgggcggggtggagaggcaagcggagcgcgcggtggggctgaggggaggcgtggggcgagtgcccgttgctcgctctctagctctcttgctcttacgctctctcgctcgcagccgctcgcagctcggcggtgcagctgtgctggatccggcggcgccgcagccttttatcgcctcctgatgtcactggggtgcgggggcccgggcggcccggtgcgcgggccaatagctgcacggcctccgcggcccagcggcgcagggcggggcgcgcctgacagctcccccgccccccgcgtcagctgactggcggcccgagcggccccggagcggcggaggcctggcggagcgctggagcggagtgggacggccagcctgggcccacccccgtaccctgcaggtcccggcccacgcacgctcgcctggagtgcgcgccccacctctaggccaaatcaccgctttcccctcctcgcgcactctcctccctcagttccctttgcaccccacccccatcccgtgtcacccccaaggaggctcagaatgagcgccgggacaacgcctcctgggccctttgttcccaagcggcccccgcccagtgggcgacgctctgtgtgtcctcgcggcttctggccgtgtgtgtcgtgcgttcctgtttctggagatctgcgcgtatttgtatgttggggagggcgggctcgaggctccgagagttgtgttcagacccaactcttaacctcaggggacctttctcaggccaagcgagggcccctcctggcgggtgcagtcgcagagccctgaggttcgactccactggccccgccgctccccgcgttcaccccaccgcacaatgttcacagtgaaggcgacgggaaaagcagcagcccaaaggctctgaattcctcttccccgccacacgcacggaatcctgagcccccggagcctcggggccgaggccggcccgggacggtgctccgagtagctctccactgctggggagccggccctgtttttgtttgaacgttttgtaacgattaagcagatcccggcgtcagcccgccgcggagaggctcaaacaggcataaagtgcgaccccaagtggccactgtgcgcaaaggcgccgcgaccgcccggcccacggccggaaggcttggacggcgcctcgtacccagccaggtctcccctacctggcccaacccaagccagcccagaacgcatactatgtgtgcaccagagcccaggacaggttcccctcgagcgatgtacaggtcctcgggtcccgtcttcgtactcagccgcgagcctcgagccgcgagctccgctctggtcgccccgttgaaattccgtgccccagcgttcgggggtgcccgtcggctgctccctgggccggaaggtcctgggcggaggaaggccggtagccaaaagtggaagcgccacagtgaagcggcccagggccaccgggtgagaaacctcc

SEQ ID NO: 57215 - DNA, 114 bp, Homo sapiens
  chr20:39319514-39319628
  hyper
cgcgtgagccacaccggtgcagacgcgcctagattatttttaaatgttagaaggtaaaatatttgcctccaattaatctgaaaactctctattctcttgcgccctcggagaggc

SEQ ID NO: 57216 - DNA, 30 bp, Homo sapiens; identical to SEQ ID NO: 12980
  chr20:39968593-39968623
  hyper

SEQ ID NO: 57217 - DNA, 36 bp, Homo sapiens
  chr20:39969364-39969400
  hyper
atgaagtctggccccgcccccgcctccgaggccaaa

SEQ ID NO: 57218 - DNA, 76 bp, Homo sapiens
  chr20:39994654-39994730
  hyper
actgcgagagggcagcggccgcccggatgcgcagctctatctcctacctggccgggccaggggagagaagggaggc

SEQ ID NO: 57219 - DNA, 961 bp, Homo sapiens
  chr20:39994762-39995723
  hyper
cggaccgcctttcctcctctccctccacctggtccgctcgcccggagtctgcacacagcgcagctggaaaatgttacttcgctggaaaggtttccgctggcactgccaggatcccaagccgccgcgccaggccccctcggttcctttttcctcgccagccccgcaacctcccggagcgtagggcgctcgcctgggcaggggctcggccccgggcgccgccccctctgtgcagcggcctcggggtgcccggggcctcgacgccccccgcgggtgcgggcaggtgggagcggcgacgcgcgcgggcccatccctccctcttcccgcccgccgcccgcccgcgcttacttgtgcggccccgggcgcagccgcgggcgccatcccgtcgtgtagagactgtagcgggaggcaccgggcggcgcaggccgcgccaggagcggggtgcccctggcctgcgcccccgagagcagcgccgcgacggcgcacagccagacgagcaggcggcggcggcccatagcggcccccgcgcctctgcccggccccgcgcggtgccccccgccgggtgtccgcctgcagcgccgcgccgcccccgccgctggtcggcccgggtcccgccccgagggtcccggggtccccttcggcccccgagctcgctggcccggccgcctggcgcttcgcggcggctgcgtcccgcggagtggccggcgctgctagcggctggggccgcggaggggaggcgggaggcgggctctttgcggattagcataaacttggggccgcgccgctcgccgccgccagcccctcgccccagctccgagcggacggccgaggagccgcctgcgaacaggaggttccaaagggagcagccccaggtggcaggggcgcaggccgccgcgccctgggaggccccccgagcacaccagccactctgtcgcctgcgggcacggggcgagacgcagagaag

SEQ ID NO: 57220 - DNA, 191 bp, Homo sapiens
  chr20:40247055-40247246
  hyper
accctaacccatctcgggcccgccttccctgtcgcgccattgggcttcgccggtccaaaacacagacccattggtcatcccggctgccgctcagacagaagcccatttcaagcttgcttgcaggggcgagtgatgggctcgctccattgtgctcgtatttgcatggatgtgatcgcggccttgattggccg

SEQ ID NO: 57221 - DNA, 30 bp, Homo sapiens
  chr20:41816996-41817026
  hyper
cccttcacagaagtcgcctattccgcttcc

SEQ ID NO: 57222 - DNA, 415 bp, Homo sapiens
  chr20:41817500-41817915
  hyper
caggcaccacccccccgcccccgctccccctactctggggaactacctctgctcaccgccttcccgtggccaaacccaaatatgagttccccgaacttttcaggagcggacgcgctcacgggtcaaatccactcccctccaagggccttaacacgggcgcccagctacctcggagaaaagccagcgggtagggcggaggtattgctctcggtcatcaacgcaaacatcccctcgggtgcctacagcggcctgcttaggggagcagcgtgttcagagcaaatggagagcttcctgtatctccgaggaaaaaagaaaagccgccgccccggcagcctcggcctgctggggacctgtcctccccactaaaagcgcgcgctgcccgaggagctgcccgggagagaacgctccaccccgg

SEQ ID NO: 57223 - DNA, 741 bp, Homo sapiens; identical to SEQ ID NO: 12983
  chr20:41818007-41818748
  hyper

SEQ ID NO: 57224 - DNA, 343 bp, Homo sapiens
  chr20:41818804-41819147
  hyper
cgcacccacacgccgggcagggtcctcgcctcttcgccccgcgccgcgccgcgcagccaagcatcgtctgccctgtgggggcgcaggtacgggggcggtgcggggaggaggaagctgcagcagccgtttgaactcggggtggggaacaggtgaatgggggttcggtggcgagaagagggagggagggagcagccctcgcaactcaagataaggggccaggtgaattgcgaaagcgggtgggggcgtctgcccaaagctggggcaggcggctgctggccagggtctcgggcacaccctgagatgagaatttcatctaagagcgcgcgcgcgcacacacacacaa

SEQ ID NO: 57225 - DNA, 30 bp, Homo sapiens; identical to SEQ ID NO: 12985
  chr20:42086251-42086281
  hyper

SEQ ID NO: 57226 - DNA, 30 bp, Homo sapiens
  chr20:42086772-42086802
  hyper
aaaaatgggtgagtcgggcctgggcgcccg

SEQ ID NO: 57227 - DNA, 30 bp, Homo sapiens; identical to SEQ ID NO: 12986
  chr20:42136655-42136685
  hyper

SEQ ID NO: 57228 - DNA, 30 bp, Homo sapiens
  chr20:42220137-42220167
  hyper
tgacagtacaggaacgcagacctgctactc

SEQ ID NO: 57229 - DNA, 30 bp, Homo sapiens
  chr20:42286274-42286304
  hyper
ggcggcccgtggcgcgggcgctgccatgga

SEQ ID NO: 57230 - DNA, 30 bp, Homo sapiens; identical to SEQ ID NO: 12987
  chr20:42286509-42286539
  hyper

SEQ ID NO: 57231 - DNA, 30 bp, Homo sapiens
  chr20:42295528-42295558
  hyper
gtcacatcccggcccgctccacaactccga

SEQ ID NO: 57232 - DNA, 41 bp, Homo sapiens; identical to SEQ ID NO: 12988
  chr20:42296222-42296263
  hyper

SEQ ID NO: 57233 - DNA, 193 bp, Homo sapiens
  chr20:42543090-42543283
  hyper
ttccccccgcacccacgccgcggggcggggactagcgccgcctcaaatatttagggcaagggagtgtcccacttctggggaggggtgccgttcgggcttctctcctcaccgtgggtggcgaaaggcgggacggaaaagcgccgtctggacaggcgcgcccccctcagggatgcagggccgggcgggggacccg

SEQ ID NO: 57234 - DNA, 1012 bp, Homo sapiens
  chr20:42543521-42544533
  hyper
cgcgcccgccatggacgtccgcctgtacccctcggcgcccgcggtgggcgcgcggcccggggccgagccggccggcctggcgcacctggactattaccacggcggcaaggtaggcgggggcgggcgggggtccccggcgggcggggccggagtcacctggcagctcgggactcaggcgctcccggggtcacacggggccgcgcacatcagccccgccgacgggcacgggcggctcacatcgatcccctcgcggccacgctcacgccctgagttgttgggatcgcgggcagaagtcatcccgacagccacccgtgcgacgacacagtggcccctcactcgcgtccccctgacagcctcgcagtcattcacaagccgtcacagtgacccacagccacacgcaggcggccaggcactgcttacacggtcccgccgtcccacgcaagtcaccctgacagtcacttatacacaacgacacgcaaccactcacccgcaaacagcctcaccgccacagacgagtcacccacagacgctccgatgccccacacaccgtgacatgcccccacccgctgtcacacccaggcacaacgggggacagtcacacaaagaagtcgcccgacagtcacactctcgcagccacaacgcctcacccaggcgcacgctgtcacacacagccacccccctggacggtgagcctcagacacagatcgtcctgacggccacacagtcacacgcggtcacacccagggacggccacacctcggtcatccacactcgcgcgtcgaggtttaacttctcagcgccgcagcacactaattgggcagtttactaattggccgtcactgcctggcggggcctcggattccgagtaggctgcggccaatcgaggcctgtgtcctcccgggagcggtgagccggcgtccctccaggctggggctgtagtgccggacaccctccctcctccatgtttccaggatctatccccccaccccagccaggtcccagctgcgctgcg

SEQ ID NO: 57235 - DNA, 267 bp, Homo sapiens
  chr20:42544727-42544994
  hyper
cgtcggtcccgggccggctggagccaagcgcgggttttcgtcactcggagcccggattgaacagcgcgcgtgggtttcccgcagccctggcgcagacgcgtgggctccgtggcgatgcggggtgagtgcgcgtccagtggctggatcggcgccccccagggtctctccccaacctcgcaggcttttcgtcaggcccctggtagtggggatgaggcaggagagaggcgtcccggcgcggatcccggggcctcccgggctgggcctccc

SEQ ID NO: 57236 - DNA, 30 bp, Homo sapiens
  chr20:42839716-42839746
  hyper
ggtgagtgagtaggcgtcattcttcacagt

SEQ ID NO: 57237 - DNA, 564 bp, Homo sapiens
  chr20:42876029-42876593
  hyper
cgctggagagcgatgcggccaagccagcggaggcccccgacgctcccgaggcggccagccccgcccattggcccagggagagcctggttctgtaccactggacccagtccttcagctcgcagaaggtagagccgggccgggagccgcctgcgccggtggccaggaagcttggggaggggagccccagggcttgagggatctgagggcggcgaaagactggaggggggaacctggggtttgggggtcccggaggtcgggggacgcaagggttccttccaggactgctcacctgggaagcgacaggccctgtctgggccccaggagcacagttctcaattttaggagcatccattctgcctctttccctcccagaaacagccggtctgttggggtgcggggcgggttgggggggctgagaaaagagacaaaggcgaggggaagggaatgggcactgctgggaaggcggcttggtggggtgggaggtgctgctgctgcggggagggagaagaagcgctacttggggtccagcctcggtagccccctctcagtcgctccctgcacgct

SEQ ID NO: 57238 - DNA, 30 bp, Homo sapiens; identical to SEQ ID NO: 12992
  chr20:43016304-43016334
  hyper

SEQ ID NO: 57239 - DNA, 365 bp, Homo sapiens
  chr20:43017165-43017530
  hyper
cttttaggtaactaaatccaacgagctgtgattggtgatcgaaccgagcaggcctcctctggatttggagagacatagtgcgtctgggcctgtgattggcgggattgctgtgattggtgaagtccctaaggctatctaagtttctgaacaccagttcctgcgttggccacgaggaggagcccaggaagcgcaaagcgcagcactgcggagagtcttggccgcctcctccgggacgccctccggcccagcgcggtgcctgccctgccctgcgccctggggcaaccgcgggatgaggtggggcggcaaagggtgtcagggctcccagctgcggcccgggtggccacgcttctctgcacagttccttt

SEQ ID NO: 57240 - DNA, 30 bp, Homo sapiens
  chr20:43150953-43150983
  hyper
caacataaatgcaccgtgccccaatgtaat

SEQ ID NO: 57241 - DNA, 30 bp, Homo sapiens
  chr20:43374386-43374416
  hyper
ttccggcccccacccgtggcgatcccagcc

SEQ ID NO: 57242 - DNA, 425 bp, Homo sapiens; identical to SEQ ID NO: 12994
  chr20:43438793-43439218
  hyper

SEQ ID NO: 57243 - DNA, 267 bp, Homo sapiens
  chr20:43439247-43439514
  hyper
cgtgccgccgggggagggggcgccgctgcggggcgtgggagcccggagggcgcgggctgcggcctcttctagcagcccccgggcccggcaggtgcgcgcggggaggcaggcgccgggcgaggttgtctgggccctggtccgagggctgttcccgaccccgcctcggcccccaccctcagccggccgacttgcggagaggccggcgtccagtccctcacccagacaggcctctcccagagacactggcgcgctcggaggggatgcgct

SEQ ID NO: 57244 - DNA, 30 bp, Homo sapiens
  chr20:43514312-43514342
  hyper
ggccaggaccggagcggaagtggcgatcgg

SEQ ID NO: 57245 - DNA, 39 bp, Homo sapiens
  chr20:43589205-43589244
  hyper
agttgctagaacgccgtggatgacgcagggaaggaggct

SEQ ID NO: 57246 - DNA, 30 bp, Homo sapiens
  chr20:43594835-43594865
  hyper
aaggaggcgcttcacgcatctcagtctgtg

SEQ ID NO: 57247 - DNA, 42 bp, Homo sapiens; identical to SEQ ID NO: 12996
  chr20:43726587-43726629
  hyper

SEQ ID NO: 57248 - DNA, 330 bp, Homo sapiens
  chr20:43726764-43727094
  hyper
cgagtagcccgggttctccatggtcagccagaggcggcggcgcaggcggccacagcgcgccgcgccatagcgcgccagttctcgctgcacgtcggagatctcgtcggggcacgggtccacgctgctcggcgtgtcgctgtcctcgtcccaggcgtgcggctgggtcagccgcctctccaggtagcgcgcgcggcagcacgcggcaagcgcgttctcgcctaggccccagtagtcggcctcctggccaaaggcgaagacgcacagctcgtcgagcacgtgcaggtggccagtgcggtagaagtgcagcaggctcaggaagaagcccgggtg

SEQ ID NO: 57249 - DNA, 64 bp, Homo sapiens; identical to SEQ ID NO: 12997
  chr20:43729512-43729576
  hyper

SEQ ID NO: 57250 - DNA, 291 bp, Homo sapiens
  chr20:43922129-43922420
  hyper
gaaatccaacaaagaactgagcgcagcacgcggcgagggcgtgccggtctagcacgtgccccttccctcaccacccgctatccccctgacgccgcagtccgcctaatggtccgggcgaggccaactcagctcaatgccggaagcccgccagcgcctccgccccgacagcccaagccggacgggcccaggttctgcctggccccggcgcaccgatggcgcgcaaggggcaccgtccgtggtgccgcgccccagcccgggtctgggccgtccgtggccctcacttctggttgg

SEQ ID NO: 57251 - DNA, 227 bp, Homo sapiens
  chr20:43976985-43977212
  hyper
gaagaacagcagcagcgcgaacagacgggcgggggccatggcaccgcggactggagaaggcgcgcaggctgcggcgagtggccccgggcgggcgcgccacccatcttataggcggcctaccggccccgccccggcccgcccccgccccgccgcccgcaccccgcccggaattccccagtggaagcgaggcctgcggggcactgcgcccgcccgcggagttggaaacc

SEQ ID NO: 57252 - DNA, 30 bp, Homo sapiens
  chr20:43991506-43991536
  hyper
acagtttatcacctcgttaattcccaaaca

SEQ ID NO: 57253 - DNA, 30 bp, Homo sapiens
  chr20:44002507-44002537
  hyper
gagtaagcagtattcgtcttaggtgccata

SEQ ID NO: 57254 - DNA, 288 bp, Homo sapiens
  chr20:44034865-44035153
  hyper
gtggccaagggtgccggaggcagggttcgggtgcgtagtcgttgcgtgggcgctgcccaaaaggcgcagagcatcaagtgtgcgtgggcagaaccggcgcgggcgcccgccgcgggtctgcgcggggcgggggcgcagcaagtgcatccgagcgagcggagactagcgcaccggcgtcggtggcgagggtggtgcagaggagtccggctgggcggagggaggaaggatgggtgcgggtaactttttgaccgccttggaagtaccagtagccgcgctcgcaggggctgc

SEQ ID NO: 57255 - DNA, 1196 bp, Homo sapiens
  chr20:44098523-44099719
  hyper
ggcgcctagaggggccgagccacgagcgccaggatggagccaggcggaggcgtagcctctggaggctggggaagtgggaattccgggggcggaagtggcggggacccttggagcctagggtgtggggtccaatgtgctggaggtggagagaccactgatggctgcaatttgggaggattctgtgctgaacgcggacactccgtggctgcagtgggctgggggtgggggctgctctgcctcgacctcggaagctccgagacgctcagctgtgcggcgtcccctagggctgagatctgagggccccgacgccaagggttagggagctctcgtactcccaggggtcagggactcctggtctggaagaaggagtctctgggggctgtaaggggactcctagggccagagactgagaattccttggggttaaggtttggagcaggaggtgggcatcctctggggctggcgctacgccccaccctcgactgtcccgggcctcccctcccaggcacaggagcagagaagactggcgtgtgccccgagctccaggctgaccagaactgcacgcaagagtgcgtctcggacagcgaatgcgccgacaacctcaagtgctgcagcgcgggctgtgccaccttctgctctctgcccaatggtaaccccacggcggccgagcgggaacggggcggggccgcgctgggctgggaggaggtgggagggcccgggttccgggaacaggggcgcccccggacccggggacccccgggaaagtcaaggcggttgaaaccagatccgtcagtcctctccctcgcacggcccaggggtagacaaaggcgtcgttgaaacgcagccaagggggggtccccacccctagctgggattcgagtctctggtgcatgacgggcttccgggcacgcacagccgggacattgttccccgcggcctggggacccggggccgcagtttccttctcgaaccggccgaagcctgccctgcgggaaagcccggagcctggggcgctcacctctcctcttggagtccctccctgggggcctcccccagccctggggaaagactgggagagcctggcctggcaagattttccccaattcctctgtccaggcggaaaggaactttacagatttaggaaaatgccccgctcatcttaaagatgtgtaagggagcatcggtgagaaaaaaat

SEQ ID NO: 57256 - DNA, 30 bp, Homo sapiens
  chr20:44258369-44258399
  hyper
cttccttcactctccgtagacagctctgca

SEQ ID NO: 57257 - DNA, 472 bp, Homo sapiens
  chr20:44452665-44453137
  hyper
cgtctttcatcagagattcgatctcctcgtccgtcacgtgctccccggaggccctgaaaatctcagccagctcctccgggtcgatgtagccgtctgcattccttcaggtccgagggacagggcagggctcagggccggggcgagctgccctggccaccacactcgacgccccgcttccgcactcccaacacggggaagcttccagcgctgccggccgggttctgactgctaagcccctccctcggctcccgggcccccagcgcacctgtcgaagatgcggaagcactcggccagctcctcctcgctcttccctttcgcgtcctctttcatctggcgcaccatcatgaccaagaactcctcgaagtcgatggtgccgctgcctgcgggcagcaggtggcagactgagcctgagcccagccgctgccgcctctccccaccatcccctgcctccgagggacacccgctcaccgtc

SEQ ID NO: 57258 - DNA, 30 bp, Homo sapiens
  chr20:44462157-44462187
  hyper
ccttcgttttctctcgggagacatggcctc

SEQ ID NO: 57259 - DNA, 74 bp, Homo sapiens
  chr20:44462766-44462840
  hyper
cctcctcctcctgcgccgggctggggtacccctcctccgggatccggtacacagcgtcgcgcgctccccccagg

SEQ ID NO: 57260 - DNA, 30 bp, Homo sapiens
  chr20:44485934-44485964
  hyper
ggggcctgcggggacgacatctagttcaat

SEQ ID NO: 57261 - DNA, 30 bp, Homo sapiens
  chr20:44486182-44486212
  hyper
gtgactggatatgtcgctgaggaggcggaa

SEQ ID NO: 57262 - DNA, 65 bp, Homo sapiens
  chr20:44509803-44509868
  hyper
cactgcgatgctgacgctgtggttggtgagtttggatgtcagtcagagtcggaggcagggtcaaa

SEQ ID NO: 57263 - DNA, 172 bp, Homo sapiens
  chr20:44540033-44540205
  hyper
ggaactctgcatgtgcgcctgccagcagcgctaggaagagggccccgaagagggccatggcgagcgggcctgggggtggggtggggtcgcaggagttatctgagccgcttaaacccattccttggacgtccaaccataagtgggaactagcctggatcgttaccctccagat

SEQ ID NO: 57264 - DNA, 398 bp, Homo sapiens
  chr20:44540444-44540842
  hyper
acgttgccacggcaacgactgcacgcgcattcttggagggtggcttgcggtctcataggcctcgcgcccggggaggagaggaggtggccgaccagaccgtgggctcccgggtctcccggctccctcaggtcctaaatctctcccattagagattctgcctggagcccccatgttagcgttctccttcatcggctctcctccccacgccggcttcagtgcaccacgcggctcggcgagggactgggaacgggatagggacgcgccccaactcactcagcggtggagctggggggcggcgcggtcacgtgggatggcgggcagctcaggggatccgggcgacggggtctggcgggcagggttgttccagccgcctttataaagccggcctccccgacccc

SEQ ID NO: 57265 - DNA, 31 bp, Homo sapiens
  chr20:44591913-44591944
  hyper
cccctccccacattcccgcaagctctgagga

SEQ ID NO: 57266 - DNA, 30 bp, Homo sapiens; identical to SEQ ID NO: 13005
  chr20:44600336-44600366
  hyper

SEQ ID NO: 57267 - DNA, 150 bp, Homo sapiens
  chr20:44600902-44601052
  hyper
gtgttccggaaggtcgctccgaggcctcaaaaccataatcgggtctcaacagactctgggactttatacgtcgcccggtgtttggcactgagcccactatggtttggggactactttatctcggcggagtgttacgtaggaagtggttgt

SEQ ID NO: 57268 - DNA, 145 bp, Homo sapiens; identical to SEQ ID NO: 13006
  chr20:44639092-44639237
  hyper

SEQ ID NO: 57269 - DNA, 442 bp, Homo sapiens; identical to SEQ ID NO: 13007
  chr20:44639267-44639709
  hyper

SEQ ID NO: 57270 - DNA, 170 bp, Homo sapiens
  chr20:44642198-44642368
  hyper
cgggagggggctttgcggaggggctgcccgtcccttcccgcccactggccctgtgtccaaggcttagagcccgtcctttccctcctcgctttctcaggaagtactggcgattctctgagggcagggggagccggccgcagggccccttccttatcgccgacaagtggccc

SEQ ID NO: 57271 - DNA, 615 bp, Homo sapiens
  chr20:44642404-44643019
  hyper
cggctctccaagaagcttttcttcttctctggttagttacctactttccctcccccgcccggtcaatccccatcagtcaaggaggctcaagagaccatcgataacccacgaaacgtcttgtgcgttttagaaaaatacgccccctggcggacgcagtttagcaaacgtaggggcggctgagtttctgccccctcctctccacgccctcgcgtcgctctacccagcgcctctgcccctgggttgcagggactgcgggcacgcgggctaggaaaggcctcgccggaatctccctcctcgcgttctaggagtacgtgctccctctgcgcccccaaaccgacgtgaccctcctcccctgcagggcgccaggtgtgggtgtacacaggcgcgtcggtgctgggcccgaggcgtctggacaagctgggcctgggagccgacgtggcccaggtgaccggggccctccggagtggcagggggaagatgctgctgttcagcgggcggcgcctctggaggtgagcgccgccgcggccgccggcagggggagcccgggcgccgtcggtccgtccgctagccggctcagcacctgtctcctccgcgcctgcccgcaggttcgacgtg

SEQ ID NO: 57272 - DNA, 233 bp, Homo sapiens
  chr20:44650231-44650464
  hyper
attcaggaacccttcgcacagcgggcactaggaccctgcgcggcgccgcgtctcgcggggggcgggcgggcggagggggttgggggatccgctctttctccctcctagagcctggttgcagccacttgtgcgatcccggaccttgccgcggccgcctggctcctttccgcgccatgagccgcaggttcacggtcacctcgctgccccccgcagggcccgccagaagccctgac

SEQ ID NO: 57273 - DNA, 146 bp, Homo sapiens
  chr20:44657693-44657839
  hyper
tcttctcttctctctccctcccgctctccccccaaaaccccgccagtggctcacgcctcctgcatacgggatgaggtgagcagcgccgctgctgagagggggcgcgcgcgggtgtgagcgtgtgtccgtgtgcgagtgtgtgtgcg

SEQ ID NO: 57274 - DNA, 357 bp, Homo sapiens
  chr20:44657944-44658301
  hyper
cggcgcagccatccccggaccaggggccgcgccgccaccatgctaaacaacctgacggactgcgaggacggcgatgggggagccaacccgggtaagctgtggtccgggggcggcgggggagggggcagcgaggagaggaggcagctctggggttagaggcggagcgggggccacctccttcagagaggaggctgggactgacccgggcggtgggcgccagttgcagcctggagctcagctccattggaatgctccgggcgctgtccaaggtgctggaatgcgccgcgcccgggggcagagctgcgggccgggggattatcgctgcccacggcttcgggctgacttgggttagctaaa

SEQ ID NO: 57275 - DNA, 12 bp, Homo sapiens
  chr20:44658361-44658373
  hyper
cgggaggagggc

SEQ ID NO: 57276 - DNA, 607 bp, Homo sapiens
  chr20:44660334-44660941
  hyper
ttagcctgcgccgctcgcctgtttcctccccgggagctctggccgccgcagcttaattgaaagccgattcgggttgagagctcccagggggcgggggcggggagggctcagcctcagtctggccctgcctctcgcgcgcgcgccgctcggcgctcccgccatcacccttactccttggctccggggaatcagggcgagtttccccttagctgttctggtcctttgagaactcggaagctcattccccatccccctcaaccagtgcgcctggcgttcagggaggggacgaaatcagccctggctgacaagtcccgggagcctggcgtcccgcccaggcagctactggaaaggcgggacccagaactagcctacctagccgccctctcccctgccctcatctcctggcccggatccggcctggagtctggctccgcgctgcgcgccgcgttacataagcggctgcgggcgcgcggccggctaggctcggcgctgcgctctcggcctgcgcggtcgccatggagaccggcgcggggccacctagttgcagggtctcgggccaggaagcccctattcctgtcccctgagcgccacccgcccccgcgaagga

SEQ ID NO: 57277 - DNA, 192 bp, Homo sapiens; identical to SEQ ID NO: 13011
  chr20:44669699-44669891
  hyper

SEQ ID NO: 57278 - DNA, 20 bp, Homo sapiens
  chr20:44686016-44686036
  hyper
gagctgagctgttcctgcct

SEQ ID NO: 57279 - DNA, 192 bp, Homo sapiens
  chr20:44686422-44686614
  hyper
cgccgcgcagagaccagagctcctcagtgccagtttggcccctgggtcttcgctgccctttttctaagcccggcctcgtctcgccggaggagacgctgcaataaaggttgggagaaggcgcggaaaggagaggagctggggccttggggacccccaggtagtccatgcggcccattcctccccttcccactc

SEQ ID NO: 57280 - DNA, 58 bp, Homo sapiens
  chr20:44686627-44686685
  hyper
cgctctgcgctcctccggcgctgctccctggctcccggcggcccggaggcccgcgggg

SEQ ID NO: 57281 - DNA, 132 bp, Homo sapiens
  chr20:44718676-44718808
  hyper
ctgagttggggcgtcgatctccttggcaatgagggcccgggaagtggctctcgggcgggagttgagaacgcagggagttgcctagcaacagcgtcctaggctgaggatgggccccacggtggtcgcctcagc

SEQ ID NO: 57282 - DNA, 92 bp, Homo sapiens
  chr20:44746473-44746565
  hyper
ccagctgtggccttcccgttttctgcgtggtggtgtggggggaacttcctcaggcctctccgcagtggagcctctttcggttctgccaggat

SEQ ID NO: 57283 - DNA, 195 bp, Homo sapiens
  chr20:44803231-44803426
  hyper
ggcgaagtcctgctcggagcccgacgagccgctgtgcagggagctgagcgaggcggccggcgagtccgcgccctcgaaggcgtaggtctggaaggcgtcgtagggcggcaccgacaggtccccgtccgccagtgccaccttgcggctgatgaagtccctgaacactgagaagtctggctcggggctcggcggccc

SEQ ID NO: 57284 - DNA, 112 bp, Homo sapiens; identical to SEQ ID NO: 13014
  chr20:44879678-44879790
  hyper

SEQ ID NO: 57285 - DNA, 126 bp, Homo sapiens; identical to SEQ ID NO: 13015
  chr20:44880040-44880166
  hyper

SEQ ID NO: 57286 - DNA, 33 bp, Homo sapiens
  chr20:44880275-44880308
  hyper
cgggttggggccggcagatcctgccaggactag

SEQ ID NO: 57287 - DNA, 225 bp, Homo sapiens; identical to SEQ ID NO: 13016
  chr20:44935839-44936064
  hyper

SEQ ID NO: 57288 - DNA, 156 bp, Homo sapiens
  chr20:44936314-44936470
  hyper
cgcggctggagtcagcctccgggtgtccccggacgcggcacgacctcgcacacacacaccgcgcgcacacgctcgcgccgtgcggtattttcccggccccggaccccgcctctgggaggggccggggagccgagccccgctagcagggttggggga

SEQ ID NO: 57289 - DNA, 803 bp, Homo sapiens
  chr20:44936608-44937411
  hyper
cgaggttgtggggacgggtgggagctgcgggcttcgggccgagaggcggctcggctccgcgccggggaaagtttggacgtgggaaactccctccccgccctcccggccgagaggagggggcgcgcagggccgggcgcaggcaccccggctcctcctgcggctggaggctcgccccccgcgccgcctgcccggccgctcccgccggccagggggctccctccctgccgggcagcctcccctcggcggcgatccggccgctcctcccgcggcaccccgcgctcttacctcggggagcggcccggggctccccctagtcctgccgcctcgggacgctgcgtggggcgggagccccggcgcgggcagcgggcgagtccggagccccgcggccgcccgcaggagccggagggagagcgggagcgagagggggagccgcggcggcgtgtgcgcgcgtgtgtgtgagcgagagagcgagagagcgagagagcgagggagtgagcgagcgagcgggagcgagggagtgtgcgtgtctgactggggggaagtgtgcaagggacggatcccttccttcctcccgcagcctctggtggagactcggagaatgcagggcccgccgggcaggagccgcgcagcgccaagccgcaggcggccgccggcccggacccccgcagccggggaaccccagcccccgccccccggatcgcgcccctcctacaccaggaggggacagcctttccctctctcgggcggcccagtcccaggaaaccccccaggggacagtgcccctccctcctccaaccccagat

SEQ ID NO: 57290 - DNA, 219 bp, Homo sapiens
  chr20:44937425-44937644
  hyper
cgcccccaggagggggaccatctacctcctcgcctggcagctccccaggtggccgcagtttgagaccagagcctatttccccacctgattttactgcgaatagggcttcccatttccgccccctgactactgcgggaggccgccttcagaggagcaggggcgcaggccagggtaggagcaggcttctcgaacagtggccgccccggcttgctgcccaga

SEQ ID NO: 57291 - DNA, 30 bp, Homo sapiens
  chr20:44941527-44941557
  hyper
gaggggcgagcctgcgggagccacaggcgc

SEQ ID NO: 57292 - DNA, 30 bp, Homo sapiens
  chr20:45035360-45035390
  hyper
cactcaagaaggggcgggcacagctgccgg

SEQ ID NO: 57293 - DNA, 14 bp, Homo sapiens
  chr20:45142024-45142038
  hyper
gaggcccgctccgc

SEQ ID NO: 57294 - DNA, 200 bp, Homo sapiens
  chr20:45142151-45142351
  hyper
cgggaccagggattcacgggctgcaggaccctcacccggaagagcctggcgaaccggaagggcgtccaggtaaaaaacaggaacagcacatgcgcagaaaggcccccgggccgcctttcccggggctctcccgggccccccgccggctttccggaccacagtccccagaaggcgtcgcggccaccgccctaccctgaggg

SEQ ID NO: 57295 - DNA, 30 bp, Homo sapiens
  chr20:45317904-45317934
  hyper
ccacggaacacgcgcgcctcggcaccctgc

SEQ ID NO: 57296 - DNA, 30 bp, Homo sapiens; identical to SEQ ID NO: 13021
  chr20:45338381-45338411
  hyper

SEQ ID NO: 57297 - DNA, 143 bp, Homo sapiens
  chr20:45440168-45440311
  hyper
cgggctcgcgggggccacaatcggcccagtgttcgcagcccccaggttggacagggggccgggcacacctgcgcggcgcagatggcgccggggggcggacagcaggcaccaaagtctcctccggggactgggaggcgggaaga

SEQ ID NO: 57298 - DNA, 1563 bp, Homo sapiens
  chr20:45523172-45524735
  hyper
aggatgtgctgccccggggagggaggaggtgcggggtgtcggtgggtggggaggaggctgggccctggcctccaggaccggcgagagtgagcgcgctctgctcggctgcaggctcaggaagcggcgcggcggcacgtgctgggccagagccccgcgccctgcgtccagccgccgggtgtgtgcgcccgcgtagcccagcgtcgcgcctcggcgcccccacgcgcccacgcagcggcgcggggacccgggcgggggcagagggagggcccggcccagggaggagaaggggccggtcctcccggcgcaggcagcagccgcggcagcccaggaggcggaggcagcggcaacggcagagacagcaacgtgcccgccgcagtcagcccggcctcgtcggacccgcaccggcccgcccgcccgcccgcaccgcgtcggggcgccctctccactgcgcgcggtgagtaccgccagcggcgcccaccccaggccgcccgccgggattcgccgggcggggggagttgttcaccgggaccccctcgccctgcgcctctttctggcactcgccaagcggggcctccgcagctgtcgggacgttctggggcgcacgggcctcccagggccaggaaggcacaagggcagaggggacagcagcagagcccccctctggaaaggctctcccaggctcggggccccagtttccccatgcgctttggggcaacgaccctgaagtttgctctcccgcgcgcgggacaagtgcatggcgcgcaggcggtgtagacgcggctgggtccttggcgttttgttcgattatggtcccggcggttcgcgataaggggcgctcccccagtccgcaaactcaagccctcaggtagtgtttatgggataaccaagaagcagagccaaccgctggaatcccggcttggggctggaacggcccgctgagactttgccttctagctattgatatatttcttttcaaaagtccgtttgcgctcggcccgctctggttcaggtctggggctttgaaccggggcagggaatcctggcgcctgctgcgggtagagttgaaacttagaaaagtttacatccgaagggtgtttagaaggcggcaaggatttcgttgtaatgggagaaagtgggaaatggaattgttttttagtcatgaagtctggaggttaaacggccgtgctggcccaggctccttcaatatattcctgcctgcctcccccccagcaataaatagtttataagctcaaggaatactaggaaagcgtgactggtgaacgtactcctatcgcaaaagactcagtgcgcttttctcagctgttgaactggaagcgccttttgcagtgcgaggttcctgcttccccgaagccgaggctgagagttgacagcgtgcaccctgccgcggtctgaattctttttaaaaagcaagaccgatgctgcgtttttatggatacccttttcttttctttccccttccccgaaatgctatgtaatcttcaattactttttaaaatataacgtggaggtataaatcaccccggtaagaggtaccttttaatt

SEQ ID NO: 57299 - DNA, 150 bp, Homo sapiens
  chr20:45985480-45985630
  hyper
agggtttggcacttcggctgatgatctggccgcctaataaaagctcatccccgattggctgccccggcaaatcggagtgtaaagccgccccggattggctgaaacacttcctgagcgattatctttgtgaggctcgggtgagcaagagcc

SEQ ID NO: 57300 - DNA, 30 bp, Homo sapiens
  chr20:46130569-46130599
  hyper
ccggtagtgctgggcgtggcctcgggacta

SEQ ID NO: 57301 - DNA, 920 bp, Homo sapiens; identical to SEQ ID NO: 13024
  chr20:46414674-46415594
  hyper

SEQ ID NO: 57302 - DNA, 30 bp, Homo sapiens
  chr20:47340101-47340131
  hyper
ttgataaacacagctagagaccaaggaaac

SEQ ID NO: 57303 - DNA, 264 bp, Homo sapiens; identical to SEQ ID NO: 13025
  chr20:47443672-47443936
  hyper

SEQ ID NO: 57304 - DNA, 483 bp, Homo sapiens; identical to SEQ ID NO: 13026
  chr20:47443944-47444427
  hyper

SEQ ID NO: 57305 - DNA, 128 bp, Homo sapiens; identical to SEQ ID NO: 13027
  chr20:47444452-47444580
  hyper

SEQ ID NO: 57306 - DNA, 183 bp, Homo sapiens; identical to SEQ ID NO: 13028
  chr20:47444609-47444792
  hyper

SEQ ID NO: 57307 - DNA, 241 bp, Homo sapiens; identical to SEQ ID NO: 13029
  chr20:47444920-47445161
  hyper

SEQ ID NO: 57308 - DNA, 31 bp, Homo sapiens; identical to SEQ ID NO: 13030
  chr20:47663142-47663173
  hyper

SEQ ID NO: 57309 - DNA, 30 bp, Homo sapiens
  chr20:47836023-47836053
  hyper
ggatgacgaggtgccggtggagcccgagtc

SEQ ID NO: 57310 - DNA, 1194 bp, Homo sapiens
  chr20:47934764-47935958
  hyper
gaggtgggtccgaggaggggtcgggtctgggagcctccgcccccaactcaaggcaggctacacaagatctgtctccgttggcgtcccggtacctagcttgagcccgaccatgggcatgcgtggcgtggcgcgaatcctgtccctgtcgctcgtcctggccgcggtggccacgggggcctgggagcgggggccgctgggcgtgctcttgccctggcagggctccgccgcgctgggccgctgctgtcctggccgtgacccgatgtttgtcgcccgcgggcccccgcgctgcttctgcgaccaagcgtgcggcgcggcgcggcgcgggactgctgcgcagactatacgcgggtctgcccaggtgcacccggggaaaggcaaggcactagcggaacgctcggagcggaggggagctggggcgggggatgagcggaggaagggagcccagcacctagggggctctgggcttggaggggtcacacgagccgagggcggggcgcggcgcttggggactggaagggtgcgccgcggggcagacgggacgtgcagggggtcgcgcgggcaaggagggacgcagacactcaggacctaaaggggaagcactggctgtggagctgcgagccgagaaagacgcgcaggttatgaacctgggtgcgttcatctcgggggacctgaaggagagggactcgtggagagttgaggggtgtttcggaggaggggcgcaaggactgctcacaggacttgaagggcggcaggaaggtggaggattcggcccaggtgcgggacgcaggcggtggaagggaaatgagcacaagaggcgcaggcaggaaggagagcgcctggtgcgagagaggaaggagcgcacccagtaagcggtgtcgggggggtcgtgaagcttggagggcctcgaggggagggaggcgcttgggttgaggtagggcgccagatttcgcaaatcaaaatacagcacacccagttaaactcgaatttcagataaacaaatctttctagagaaaaatatgtcctaaatatcgcatgggatatacttatactaaaaaattatttgttgtttttctgaaattgaaatctaactcggagtcctgtattttatctgagagccccagctggggacgggcgcggggccaagagagctgcgagggaggaggggttgcaagcttctttcgggcggaggggtca

SEQ ID NO: 57311 - DNA, 31 bp, Homo sapiens; identical to SEQ ID NO: 13032
  chr20:48098878-48098909
  hyper

SEQ ID NO: 57312 - DNA, 162 bp, Homo sapiens; identical to SEQ ID NO: 13033
  chr20:48099131-48099293
  hyper

SEQ ID NO: 57313 - DNA, 583 bp, Homo sapiens
  chr20:48099322-48099905
  hyper
cggatggtcgctgtccctcccgccggtgctgaagtccgccgcaccccatggatggagggaggggccgcccctcggggcggggagagggccccaagagatgcccctggagcccgggaggccccaccctgggcttctgcggcccaggcgcgacccagccgcccggggcgctgtccgccccttagagtgctgaaactctcttcattatgggtctcccgatcgagtcccgaacctggccccgccatggggagagagggggagctgcatgaaaactttctttctttatctttttctttctttcttcttcttctttccttcttttttttttttttaacgagttctcttcttttccttccccttctcgagataatcaagattttgggggtgggggaatggcagcgggcttttttccaaatcttaaaagatttgggggaattccgggggttccaggtgcccacctgtccgaggtcacaacagacggggtgtgcacaacagcccctctgtcctggagcgacccctcttcccaaacactggagcatctcctgagattgctccagcgacaaggtgagccgcgaggaggaaaagc

SEQ ID NO: 57314 - DNA, 30 bp, Homo sapiens; identical to SEQ ID NO: 13036
  chr20:48100397-48100427
  hyper

SEQ ID NO: 57315 - DNA, 248 bp, Homo sapiens; identical to SEQ ID NO: 13037
  chr20:48184406-48184654
  hyper

SEQ ID NO: 57316 - DNA, 98 bp, Homo sapiens
  chr20:48194979-48195077
  hyper
aaaaaaaaatctcatctcaaacacacaaacatttcactgctttaaaaaaaaaaaaatagaaatctttggtggatgttcagccacgctcatggttcaca

SEQ ID NO: 57317 - DNA, 165 bp, Homo sapiens
  chr20:48330531-48330696
  hyper
cttgcgctcgccgccgaccctcgctcggcgcccacagcagcccgcatggagtaatcgccaaatggcgacagaccctctcccagtgcggccaccgcccaggctttcggggaatgtctcccaagtgctccgcgctagctcgtcccccatctcgggggccaaggggcc

SEQ ID NO: 57318 - DNA, 30 bp, Homo sapiens
  chr20:48595794-48595824
  hyper
tgggccgcagatgtcgcccatttccgggag

SEQ ID NO: 57319 - DNA, 858 bp, Homo sapiens
  chr20:48598695-48599553
  hyper
tgacccgcctcttaacggtcgccgcgtcccgtctctcccccaccaaagcacacttccctttgcattgtaattatctgtttacttcgtctgtctccctcactggaccagaagctacccttcgggagaggctctgagtgttctgtccggggctgtgccctggccccaggtacagtgccccacacgtgctgggcgctccgtaaacactggataagggaaggaacgggtgctcttggctagctgggccaggctgctttgcaaaaaggccgtggcatttcaagccgccgagagccacgtgcggtgtccctttcctcgcttcctccccagtgatgtgcgtttccctcgtcaatgccacgctctccaggcgccagccgggcggaggaaatttccgccccctcccaagcccgaggcgggggcgggcgtcggaaggtcaggtgtcccggccggcgcgcagcgccagggggcgtcagaagcgctcagaccaccgggcgctgagccggtgggcgcgcggcgtcctgccggggtcccacctcgcagaggcctcgcttcgctcgacgtcccgccccggacagccccagcaccggggacgacccgcgctgcgccagcgaaccccgcctcggaggagtccccgcccgggctctcaccgccacgcggcgcgagcccggccagcagccggcgcacctgctcggggagtggccttcggcggagacgagcctccgattggcgcggaggtgacaaaggggcgtggcagataaggccccgcccctcccaccccccaccacccccccggagtacttaagggagttggcggcgctgctgcattcattgcgccgcggcacggcctagcgagtggttcttctg

SEQ ID NO: 57320 - DNA, 30 bp, Homo sapiens; identical to SEQ ID NO: 13041
  chr20:48729934-48729964
  hyper

SEQ ID NO: 57321 - DNA, 30 bp, Homo sapiens
  chr20:48769981-48770011
  hyper
ctccagtctggggtcgctgtccgcagccgg

SEQ ID NO: 57322 - DNA, 204 bp, Homo sapiens
  chr20:48771156-48771360
  hyper
ctttgtttacagcagggcccccgtgccaggatcggggctggaacatggtagaagctcaataaatgcttgatgaatgaattaaggctcagccagatgcgtctaatacttcggcagataaatgacagcagcagggatttaccccaggtctaaccgacaacaaagtatgcaataatttctcatagaaattccatacaggcagccggg

SEQ ID NO: 57323 - DNA, 305 bp, Homo sapiens
  chr20:48788922-48789227
  hyper
ttccgatccaagctccgccctctgcagctctgctctgtgtatcccagagctgaccctgcggcgcctttcccaggctcgcgtccggtgagttcctattggccaacgggaggccccggtcggggagcgccccgggacaggcccctgtgcctcccgctttgcggagtgacgcaggccctgggctacagcaaccttaccagcccctccagcttagaggtggcagtggctctctgcggctgcgatttctttctcggagcgtcctccccatcccgttcggcctctgcctccaccgtcgtctctgtaacccg

SEQ ID NO: 57324 - DNA, 30 bp, Homo sapiens
  chr20:48807312-48807342
  hyper
cgcagcggttgctacgggccgcccttataa

SEQ ID NO: 57325 - DNA, 30 bp, Homo sapiens
  chr20:48909072-48909102
  hyper
gggaggtgccagccccgaatggggccgggg

SEQ ID NO: 57326 - DNA, 31 bp, Homo sapiens
  chr20:49131961-49131992
  hyper
gctgtcattgtagctgcgtctttacaaacat

SEQ ID NO: 57327 - DNA, 31 bp, Homo sapiens
  chr20:49141977-49142008
  hyper
catttattaaattcttcgcttgccatataga

SEQ ID NO: 57328 - DNA, 589 bp, Homo sapiens
  chr20:49224899-49225488
  hyper
ctctccccaggctggacgggactcacttccactgcacctccagctgcagcttgatggtacccaactccgtgatgtccaccacgatgacctgcggccgcgtcgtgaagaagtcggcgatgtcacacgtcactgcacccacagccagcgagcccaggccccgcaactccgtcacctgggggtgggggctggagggtggtgtctgagccgaacacccaggcaccccagccctgcccccgggccccatccccaccttgatgtccaggttctcatgcagcgtggggatgaaggccttctcctcttcgtcccaggtctggctgtcatctgactcgatccgacccttgagcttccaacgctggcggcccagacgcatgagcacctgtgaaccagcccgagaggggccgcgtcagcccaggtgggtgtccccttgctgtccgcccagggccctccctgccaggcagagccccagctgcaaccctggttcccagcagctcccgtcccccaaagacctggcggggagccctgaggattgaccccagagagtggccgtacctcatagtggtctccgggacagaggcgtgcgtagcccacc

SEQ ID NO: 57329 - DNA, 261 bp, Homo sapiens
  chr20:49225975-49226236
  hyper
gccacaggcagagagacgcctccttggggcccagaacacctcctccagcccccactggcccagctctcgatgtccccactgcccggcccagctcttgctgcccctgctgcccagcccagcttggcccggcccacctcggcgcactcgtgcaggctgcggcccagctcctgcaggctctctcgggctgcgcggctcggggggcaccgggcgaaggcccgctgcatgctggaggcgccgtcgcgcaggcggcactggatgcag

SEQ ID NO: 57330 - DNA, 168 bp, Homo sapiens
  chr20:49410882-49411050
  hyper
gaggaccgtcacactcggccttccctaaattccaggaccctccgcccgatgcaaactagatgctttagtaggatgggaacgggtggggggcgggcggctttgggcttcctctaagctagcgcctctctaacccggacgcccgttagaatcacccggggagttttagaa

SEQ ID NO: 57331 - DNA, 30 bp, Homo sapiens
  chr20:49411397-49411427
  hyper
gctgcgggggcgggcgcagcgcgcgccgct

SEQ ID NO: 57332 - DNA, 31 bp, Homo sapiens; identical to SEQ ID NO: 13044
  chr20:49574742-49574773
  hyper

SEQ ID NO: 57333 - DNA, 117 bp, Homo sapiens
  chr20:49575066-49575183
  hyper
actgagccagatgccggaagcggaattacgtaatgtggcgcggaaaaggacgggtcggaccgtaccaaattcggaagcgggggatgacctgtgtgattgatcgctagttcttctagg

SEQ ID NO: 57334 - DNA, 134 bp, Homo sapiens; identical to SEQ ID NO: 13045
  chr20:49639050-49639184
  hyper

SEQ ID NO: 57335 - DNA, 639 bp, Homo sapiens; identical to SEQ ID NO: 13046
  chr20:49639217-49639856
  hyper

SEQ ID NO: 57336 - DNA, 114 bp, Homo sapiens; identical to SEQ ID NO: 13047
  chr20:49639882-49639996
  hyper

SEQ ID NO: 57337 - DNA, 131 bp, Homo sapiens
  chr20:49640094-49640225
  hyper
cgcggtgcaagtgctccggtggtcccgggtccgcgcccctagcagcaccgccccagggtctacatgtgctagatattaaaaccccactctccgctgccccggggccgcgctccacgcgcttacacatcctg

SEQ ID NO: 57338 - DNA, 110 bp, Homo sapiens
  chr20:49708568-49708678
  hyper
tctcattggagcttttgcttccgctcgttttcccctttgcctcctttcagctgccccttcccgaagccgaatatcacctgattttaggcgctggggataaaggagctgtg

SEQ ID NO: 57339 - DNA, 31 bp, Homo sapiens
  chr20:49836918-49836949
  hyper
ccgtcctgcaggtggcgcgcctgagcccgtg

SEQ ID NO: 57340 - DNA, 122 bp, Homo sapiens
  chr20:50157950-50158072
  hyper
acacagtgaggttgggcgtgtggccgcttccccctcctcctcctcctccctctaacgaatgctcctgttaaacacgtgaagtgacagataagcattgggcccagcccggggaagtccccagc

SEQ ID NO: 57341 - DNA, 30 bp, Homo sapiens
  chr20:50158389-50158419
  hyper
aggtgatgggagctgcgtggcctcacttca

SEQ ID NO: 57342 - DNA, 977 bp, Homo sapiens
  chr20:50158712-50159689
  hyper
caagagggagccgaccgccccctaagggtggcaggggccactgacgcctcccctccctggcacctgggtaggggcaccctccctccaggccccttaggaagggggacggctggagccaagaggactcctgtgcccagtccccaggcctgagcccctggcgggctcaggggccaggccaggggtagcctccaccgaccttcgttcggattcaaatactcatagtcgaagaggatggagaagtcaagctcgtcttgggggctgcccccaggctcgtggcctggggcgtccccgccgtcgggttggggctgccgctcgggggcgttcatggcgcgcagggcgggaaggctgcggggccgggggcgagggcgggcgcggctggctctgggacccctcgcagtggggctggcggaggcggctcgagcggcggggtccctttcctcgtagggacgcacgccgggtccggggacggcgcgcctggcgcagcgggtcctggacgcgcccggggaagctgagcggcggcggcgacggcggcgcgagcttcctgctccggaggcacctgttgcagcccggggaggcggggggggggggggcgtggaggcggggacagggcggccaggccggcgggggcggggccgccaccaggggaccggaggggaggggcgcgcggcctgggctggccggtgccgggaggaaggaggctgtccgcggacctgaccacactgtcccgggccaccgctgggcgctggggcggccgctgtctcccaccctccacgggtgagtgcgacacgcgctgcgcgaaccagggtctagacaagaaagctgccgccactaggacttttgccctaagggacccactggccccacactttttcctgcttttcttctccatggggtggaagggggtatccacccccttctattgcagacccgtgtctccaggcgtctccgtgtgcccacgggggcggcatgattttcac

SEQ ID NO: 57343 - DNA, 175 bp, Homo sapiens
  chr20:50179383-50179558
  hyper
ccttccccgcgctccgtgtttataggctttcaatgcagtaaaataacgggattccctcactgtttcctcctgtttatccagcgccatggaaaccactggatcccgtccatctccaaaactaagggctttcctgcaaacttcacactcaggaatccatgacgtcgcctcctccgcg

SEQ ID NO: 57344 - DNA, 1664 bp, Homo sapiens
  chr20:50383654-50385318
  hyper
acccttatggttcactccacccgccgcgtctcctgttccgagcaactgacgctgcaataagcggccgccaccgggaaatgcccagagaggaccagacgcccgaggaagggcggagcagagcggccgcaggccccgcccaacaccgcgctcagcctcccgcgggctccagcctcacctgcgcggcctgtggagctgcacatctccaggccccgccccccagaactctgattggcgggtctaggcgggggccgggaaatctgcatttgcaccagcgcccacccccgtccttcccacccccgcccctcacgcccaggtaagtctatggcaggcgatacgagagccccgcaaacctcaacgcgtcacgctgccatcctccgaacaggaagacggcgaggcgcaaaataccaacccgtcccctcttcccaaatgcagaaaaacccttgcctgttccgcgcctaagctgccctcggggtctcctactgcgggaagggcacagcaggtggcagcccctgtcccagccgtgggattccttccccgaaattgtggggggagaacacaaggggtagtgtcaccaagcggccagtaggagaccctcccaccctcctgcgactgctggttcgggtccaccccgggcggagggggaaggggccaccggagcgcaggtggtctcggcgcagcctcctggggctgggacccaggggcgctgatggggtaccccgaggcgtaggccgcgcccccctaaaagctgagcatatctgggctcccgagtaatgctccaagcgcagagctcggtgtgacactgaccaaattgttacctcagatattaattacggacagatattaattacggaacaataaaacggtgagaaagcacggctgatccgaattccgcgagtgtgtaaacagcactggggcgggcccggcttctcggggtttctaaaggaaggtgggcaaggaggcccaggcaaccgggcgctcgaaccccaaagggccggcatcaggctaggtgccgcccggggctgaagcgcagggaccccctccccacctccccgcctccccagccctgccccaggctcatggcgccgggcgcggcgcgcggccaacctgtcaggcccggccaggctggcccgagcgccgggctccgggaggcgcggacaaaggaaaacacgggcccaggcccactcacccggcgcggggcctgctgtccatccgcttcttctggcgcaccggctgcagcgggatgttgtccgtcatgtcggcggcgccgcccgccttggccgccgcgccccccgcgccgcctgggccgccgcccggtccggcctccgcgccgccgcccgccggcgccgcgccgccccgggggaggaggcggcggcagcgggcgggccgggcccgcagcgagggggcgagctcgcgagcgccgggccacgcgcggagcgcccgcgcggcccgaccgacggacacgggcgcaccatgggcccgagctccgcgctgcgcccgctcgctccgcgccgcgccgcgcctgccacggggggcggccgggccgtgtccgcgccgccgcgaccgctgcagtgtccccgcccccggcccgcgcccgcgccccccacgcgcgcccacccggccacgcgccccccgcccacgcccgccgtgcgcgcaccctgccaccg

SEQ ID NO: 57345 - DNA, 30 bp, Homo sapiens
  chr20:50416950-50416980
  hyper
cgcagtggcagcgcacggccaggcccgagg

SEQ ID NO: 57346 - DNA, 1104 bp, Homo sapiens
  chr20:50417182-50418286
  hyper
tccggaggaagcaggcgggctgagggttaacccttttgttccaggtgggccaggccacgaagccttcacgctcccctcaacccccaccccaccccgcccccaaccaaggcacaaagagagtccctccaggcgcctgggacctcgggtgcgcgctgcgctgaccacccggcgccccgaaaacgcccagccatcccctccgtcaagccgatccttttaatttgccctggaaaaatgttaaacggggaattctattgacgtattataaacttgggaaatgtattacattcagtctccgacaaaaaggcggggatacggaagccaaaaagtggcgaccgtcttctcgggaaaccccgggtatcagagatggtctctgagagtcctccggggttgccgcgcacacccgtctgctgcagggaaattagaaagcaggcggggagcggagcgacgaacaaggccggagaggaggctacaaatcccccctccccccacgcgcacgctaaaaacttatcaggcgacaatttggcgggccgggatggagacgagatagtggaaaaccgcctcgctcctaaaacctccgcggtgaagtgatgaagtgggaacagagttggccccgccgttcctggcgcggctggggtcccgaactcccctcgatctgggaaacgctggccgcggaagcgtgggccaggtcagccgcgggagttcgctctggccccccacctctcccctttcacacccaagcgcaaatgtggaaagccgagcgctccagaaaagccacgcaaaacgggaggccggtgcaccccagtggggctgccgcgcgcccgccaccccggccactgggggctcgcaccctcgggcttgccgcggttatttttaggaagtcggaaatcaaagatggctggaggtcaggccccgaaaggttagggcgaagatcggcaggcggcgcagcccgggcagaaaaggcgaaatccagaaaagaaaaaaattttaaagggaaacattgagccctcctcccccacctctctgggccctccaatcccctgcgcagcgcgggtggcccgcaccccagctcctgagggtggggagaggtcgcgccccctcccccca

SEQ ID NO: 57347 - DNA, 769 bp, Homo sapiens
  chr20:50720431-50721200
  hyper
tactcccctccaccaccacctcgggaagttgtggtcaaaacccaccagaccgactgtggtggaagttgatgcggaagctggagagcccgcggctctggaggggtgagccgccccggagaggggacccatcctcctttccgcgcccggaaagagcgggggagaagaggaagtccagttacaactcctttcctcagccccttaaaggaaaggtatcagctaaccacggggagctggcagcctaagagaaagtaggaacctacaatctcttaatctaagcacaagataagcaaaaagggaagcgccttagaaatgcagattccccaaccccacccctgagattccagtggaggcgggggatggggggatccctaacttgcaggaagaatttggcgagcgagaaaaggtcccctcccgcaggctcttctgaagcggaggatcccgggacgagaaatgctgcccggggggcttaaggtagccgacgatctccttgctacatcctgtgtccacgtggcagccgaggagggggtgtgggggccgcctgttaagtgcgacagcatcactgctctatccccaccacggctcccacttcgctcagataaaatgcagagctcttaccaaggctcacggccgtcccccgccccccaccgtctgcccccatcacctctcgggcctccggtgacctctcgggctacagcagcgctgacgccctgggtccctgcgcttctgttccctcggcctggaatgctcttcccccgggtacctgcacagc

SEQ ID NO: 57348 - DNA, 436 bp, Homo sapiens; identical to SEQ ID NO: 13056
  chr20:50721234-50721670
  hyper

SEQ ID NO: 57349 - DNA, 42 bp, Homo sapiens; identical to SEQ ID NO: 13057
  chr20:50721988-50722030
  hyper

SEQ ID NO: 57350 - DNA, 121 bp, Homo sapiens; identical to SEQ ID NO: 13058
  chr20:50722089-50722210
  hyper

SEQ ID NO: 57351 - DNA, 62 bp, Homo sapiens; identical to SEQ ID NO: 13059
  chr20:50722269-50722331
  hyper

SEQ ID NO: 57352 - DNA, 157 bp, Homo sapiens; identical to SEQ ID NO: 13060
  chr20:50722630-50722787
  hyper

SEQ ID NO: 57353 - DNA, 30 bp, Homo sapiens
  chr20:51589182-51589212
  hyper
ctacagtgagtgatcgctctccccccggca

SEQ ID NO: 57354 - DNA, 485 bp, Homo sapiens
  chr20:51589594-51590079
  hyper
caacctctacttcaaagcagccggcacaagccacccgtgtctgccacccagagaggggggtctctggcccgtggtggaggagttgcaggggggatcgtcagggggacagaggccgagtgacgtcctaggagccaccgggcaagaggcggaggagacccagagaggccagagagacagcgggccccagcgcgcggctcggggctggggcgccagaagtgggactggagcgaagtagaggatgccgaggagaaaacagcaggcacccaagcgggcggcaggtaagagaaacggctccgcttcggggctgccctgtgcgccgagctcctcgcccgccctccttgcccctgggtgcccgggggcaccacccacttaagctttcgggggagtttgcgccgggtgcccttctaataaccccgtcctctctcgccttctctggtctcccaaatcctccccttccaagctccggttgggttggggtgagctat

SEQ ID NO: 57355 - DNA, 30 bp, Homo sapiens; identical to SEQ ID NO: 13062
  chr20:51963662-51963692
  hyper

SEQ ID NO: 57356 - DNA, 167 bp, Homo sapiens; identical to SEQ ID NO: 13063
  chr20:52209196-52209363
  hyper

SEQ ID NO: 57357 - DNA, 408 bp, Homo sapiens
  chr20:52259562-52259970
  hyper
tgtcttcaaaaggaacgtcactgttataaattagacaagggaagaaaaacctcatttctttgatgatttttttaaagagctttgttttcccacgcataattgttcttcctattcattatgcctttatgtagactttgctttttcctttaaagaatacacttcttatgtaatttgttttgcatttctggaatgaggaacttttctgctcatattgttgttaaaatctagacaacacgcccgtgtgatagatcaccctgagccttggaaggaaatgattcaccacaatactgtaactgaaagtcgtctaacaccagggctggaaggcaggctatgaaccgctgcattacctgcgtgcagcagcaatgggaggcagccagaggttccctcggcctgcctagctcacttcag

SEQ ID NO: 57358 - DNA, 24 bp, Homo sapiens
  chr20:52308720-52308744
  hyper
aaactgacctggaggccgggcgcg

SEQ ID NO: 57359 - DNA, 19 bp, Homo sapiens
  chr20:52311457-52311476
  hyper
ctaatttaaagtagaagct

SEQ ID NO: 57360 - DNA, 739 bp, Homo sapiens
  chr20:52789209-52789948
  hyper
ctgccctgttgccagagagaacgcaggtgctgggtgcacagcacggcttttccgtggaccgactctaatctgtacaagagctcagggttgcgatggcacgggagaggggctttggtatccgccctacgtaagaagcttccaaccccagggaactctaactccgcctcttcacaatttccaggcgccgtcaggctcatcaggtctggccgcatgcccaggtccctcggattggactcacaggatcagcagcccgtagccttctttgcggtagtcgcgataggccttccacggtttgatctccagccgctgcgggtacgcgctctcggtgcggtacagcgcttccagcaggcatggcgagcccaggtgcaccgactcaaaggaacccaacttcatgcggaaaatcttgccatacttcttgtggtactccacctgcagccggccgggcacagcgcggtgtcagcgcgcatcctccgccgtgcccgaagcgctttccctcctcccgcctccttcctcctaggggaccggggaccctccctgcccagacgccgaagcgcaccatgcgcccgaggcgcgcatgtcggggagggtttggagcgccactgggagggcggaagagggaggagagagtcaggggcgcgaaaaggggtttaccagggtgtcgtgctgtttcttgagaccccctttccagagaatctgcagcaggctgcccagcagtggccagctggtggggcccggcagg

SEQ ID NO: 57361 - DNA, 146 bp, Homo sapiens; identical to SEQ ID NO: 13067
  chr20:52790081-52790227
  hyper

SEQ ID NO: 57362 - DNA, 30 bp, Homo sapiens; identical to SEQ ID NO: 13068
  chr20:52790574-52790604
  hyper

SEQ ID NO: 57363 - DNA, 780 bp, Homo sapiens
  chr20:53091752-53092532
  hyper
ctccccagacacacacgcaaaatcggcccttctcggggaaagggcaggggctgaagggggaggcggggtgggcggcggctggaaaaaagtgaaatttcctctcctcctaaaataagtcattggagcgaggagagcgagcgctatctcagtaggctgtgggcgaggtgcgggggtggcgggggcacgctccgggtccgccaggaggggagggatcggaaggggaagcggggagggaaaggtgggtgggaggcgcggggagcgttccagggcggctgctcacgggtggccgcagcccagtgctgggactcgcgcggctcctcctcttagccccccaccccttcctcctctttcctcctcctccttcctcctcctcctcctccttcttctcctccttctcggccgggaggaggcagggctggatccctcagccgccgccgctcctcctcctggcaggccggccgcggagtcagctgacgccggcgctccagcctcgcctccccgcgccgcgctctgcgctccccgaaagtggctgcaagccggccgcccactgtcagggttggggggacagagaaagtgatgtgcgccttctaaagcctcgcccagcgccgccgaagcagcttcacctctccaactttctcccaccgactgcttgtcttgaccctgccctccaccctccccagagccacttcgggtgcgcgctcttgggtaaagggggggtcaccggctgtctgggatggcttccaattttaatgacatagtgaagcaagggtacgtgaggat

SEQ ID NO: 57364 - DNA, 181 bp, Homo sapiens; identical to SEQ ID NO: 13070
  chr20:53092686-53092867
  hyper

SEQ ID NO: 57365 - DNA, 255 bp, Homo sapiens; identical to SEQ ID NO: 13071
  chr20:53092912-53093167
  hyper

SEQ ID NO: 57366 - DNA, 30 bp, Homo sapiens
  chr20:54578079-54578109
  hyper
catcaagccaaacacggagcaccaggtcgc

SEQ ID NO: 57367 - DNA, 391 bp, Homo sapiens; identical to SEQ ID NO: 13072
  chr20:54578582-54578973
  hyper

SEQ ID NO: 57368 - DNA, 151 bp, Homo sapiens
  chr20:54579139-54579290
  hyper
cgttctgtgcccagacgggcagccccggcagcgtgaggaccagcagcacggccggcaccgcggacagcgcccggcgcccggagcccatggtgagccgtgtgggcagccgcagccggctggcgctggtgctcgcccgcgtcgcctcctaccc

SEQ ID NO: 57369 - DNA, 35 bp, Homo sapiens
  chr20:54579923-54579958
  hyper
gggcgccgggcgcagcgttcagggcggctggtccg

SEQ ID NO: 57370 - DNA, 50 bp, Homo sapiens
  chr20:54580069-54580119
  hyper
cgcagcgtccggctgggttggcttatcgcgcaacccgcgggctccgagaa

SEQ ID NO: 57371 - DNA, 105 bp, Homo sapiens
  chr20:54919120-54919225
  hyper
gccgcctggtgcaaggtcatccggtgccgggacccgctcctcgccccgccaggacccccgctcacctccaagctggacgcccgcggagccctgatcccctaacgc

SEQ ID NO: 57372 - DNA, 147 bp, Homo sapiens
  chr20:54919287-54919434
  hyper
cgagcgcgcaactctcagcctcggagcgtgctggaaatgctgatgggaaccgtttgaatgaccgggcacgggtctgcaagaaactcagctcccaggccagccgtggctcaggaagcctcccacgtcgggtagaatcccaggaatcca

SEQ ID NO: 57373 - DNA, 30 bp, Homo sapiens
  chr20:54933782-54933812
  hyper
cacccccaaaggggcggggctggtgggcgg

SEQ ID NO: 57374 - DNA, 394 bp, Homo sapiens
  chr20:54934125-54934519
  hyper
ccacctggctcctgggcgccaccgccccctgcgccccgccgcccctggccctggccctgctcccgcccaggctagacgcccggctgctccgcacggcgcgcggggactgccgcggccaccaggtaagcaccccaccccgaccctgatcccgggcggtgtccaggtccccagacgtccgcagggccgcgccggggtccggccgcctccgccaaggacgcctttgcacttgtagctgcccgggaccgagctcttccagggtccccgaaaccccaaatccctgcaagccaaggaagcgatcctcctagttgacagccagagaaactgaggctcgggaaggtgtggcgctctgcccaaggtcgcgcagtcttcggccgagccccgggtctgcagagcc

SEQ ID NO: 57375 - DNA, 468 bp, Homo sapiens
  chr20:54966814-54967282
  hyper
ccaccccagctgcaagttctccgtacgcttaccgtctgtctccccacccactagaacgtgaactccaacacagcagagaccttctgtgcttttcttacccaggtgatctcggaggacaaaatccaatctgaagcccacccacccctcccgcgcatgtcaacaccactcaacaaaccccttgtacctctagctgtaataagtaacaagcagtatcctacagggcgcctcggtgcccaggagcggatgcaaaggcgctgggcgggcacaaggcagcgccaaggacactcagggacggaggaaccgacaggggacttgacgctccgccactccgaccagccgccccttgtccccgccgtcctcgtccgccactgagatatcccccacggtctacccacccgtcggctcccacctgcgacccaaggacccaagtcttccaagagctcagccgttagaattcaaaggttcttc

SEQ ID NO: 57376 - DNA, 411 bp, Homo sapiens; identical to SEQ ID NO: 13075
  chr20:55199899-55200310
  hyper

SEQ ID NO: 57377 - DNA, 741 bp, Homo sapiens; identical to SEQ ID NO: 13076
  chr20:55200615-55201356
  hyper

SEQ ID NO: 57378 - DNA, 1 bp, Homo sapiens
  chr20:55201450-55201451
  hyper
g

SEQ ID NO: 57379 - DNA, 488 bp, Homo sapiens; identical to SEQ ID NO: 13078
  chr20:55201580-55202068
  hyper

SEQ ID NO: 57380 - DNA, 1079 bp, Homo sapiens; identical to SEQ ID NO: 13079
  chr20:55202358-55203437
  hyper

SEQ ID NO: 57381 - DNA, 163 bp, Homo sapiens; identical to SEQ ID NO: 13080
  chr20:55203505-55203668
  hyper

SEQ ID NO: 57382 - DNA, 1973 bp, Homo sapiens
  chr20:55203806-55205779
  hyper
cgggaccgcgctgtgcccacggagggaactgggcgtctctggcgcactggggctccagctgcatgatcccagctcagaccttaagcctcagtggggtgtaggtgggatgggatgtgtttttaggagatgaggagaccccggttgttgagtcgctccccaaatgcgcagtttcttaactccaggtgacatccgtcttttggaggaacgagtgaaggccgtttaggcgaaagaggggtgggtttcagtatttggatcccttcccccagctctgccaatctcaggtgtgtttacggtggaggtgacagaaggaaggcgcgtcgggggacccaggcctcgcaggtcttcggctgtcaacgaggcaccgcccactgactccgcgcttcgtccctcacagcgtggggctcggcgctgcgccaggcccgggtgcggggcggagctaggctgggactggctgggggccgccccgcccggcgcctgggcctccgcgccggcccccggggaggagttatgataatttccttctcattaaggcgctcgggtcccccggctatcgccaggacacactgttcgggcgcggctttccccgtccgcggagcggtcttgacactcgcggcggcagcatctacgctcgcagagccgccgatgcgtgtccagtgacccggacagcaaggcccgcgcgcggcgggggcggcggcagacgcctggtcaccgtgaccccgattttggatttaccgcttgggggctggggggatcctggatttaactggcgactgttttgggggacgccggacgccatgttgtggaaaataaccgataatgtcaagtacgaagaggactgcgaggtgagctggggctccggggtgcagccccgccccgccgaggacagtccgggaggcaggggccactggaccgaggtcggggacgagggcataggagccctggcctctcggtgggacgggatccacttctccggacaccccttagtccatttctgcggggcccctttcctgtatagggccttttcctaaatagcctcccctcgggaacgaggcctggaaagagaatggcaaatcccacccacacagcttaccgggcgctttcctaagcggcaaacagccctgcttcccgttttctcggaaaagtgccccgtctgcaaccctcagacgtggcttttacgcacgaagtctctgtccaaaggggtcagatgaggctacctgctagcgacaccttggcggacactcctccaaggccggcttgtcacctgccccgctacctcctcggggaagcacgaaaacaaccgaagtttggctttcaaaagaagtgggggctggggagtggtggtgggggtgcccgaggccagatggggccgtaagagctcgcgagtgctccagcctgtcggacaggttgagctagagtttcggagagtgggagggaagaaggaggcggcgagcgggaagaggaagaagacgcaggcagcgctaggcgagctcaggggcgccgggagcgcggagctcgggctacggactcgcgggagttcactgcgcctccgggccctggagggctgcccctgcccgcaggcccgggcgcttccgccaggaggcgacagcgccatgttcctccaggttcccggcgccccgagacccctgggcagatggggacgcatcctttagaaactgagtcgggccgcccaggggcgagggaacgtgcgcgggcaaggctgcccaatttccagggttcttcatgccccctctgcgccccgacgtgcgagaacactgcccttggcagtgcagggcgcccccacttattactcccctcggctgggcccggccagcagggagggccgccctgtgcgcgcgctccctcttcacttcccagggcggcgcagggtggcgggccctgctttccgagcgccgcccgctcggaggtctttgtcccgagggcgtggaagggagggtcccgggggcgggggaggt

SEQ ID NO: 57383 - DNA, 136 bp, Homo sapiens; identical to SEQ ID NO: 13083
  chr20:55206293-55206429
  hyper

SEQ ID NO: 57384 - DNA, 134 bp, Homo sapiens; identical to SEQ ID NO: 13084
  chr20:55206463-55206597
  hyper

SEQ ID NO: 57385 - DNA, 22 bp, Homo sapiens
  chr20:55206736-55206758
  hyper
cgaggtgcaggtgagcggcgct

SEQ ID NO: 57386 - DNA, 295 bp, Homo sapiens; identical to SEQ ID NO: 13086
  chr20:55499421-55499716
  hyper

SEQ ID NO: 57387 - DNA, 127 bp, Homo sapiens; identical to SEQ ID NO: 13087
  chr20:55500174-55500301
  hyper

SEQ ID NO: 57388 - DNA, 280 bp, Homo sapiens; identical to SEQ ID NO: 13088
  chr20:55500440-55500720
  hyper

SEQ ID NO: 57389 - DNA, 70 bp, Homo sapiens
  chr20:55501052-55501122
  hyper
cgtaggagcttgccggtctccgaccgctgctggcctgcgaagccggcacgtttacaaggctcagccctgg

SEQ ID NO: 57390 - DNA, 151 bp, Homo sapiens
  chr20:55588946-55589097
  hyper
tccggggctacagagcgctcaagacctttccctcgggtgctgagggaaggatcccctatcagagatctccaaggaaggccccgcctccacctgcccctcccgcaggagagcgctgctgcagaatctgccgcctggccggtgttcacccagc

SEQ ID NO: 57391 - DNA, 305 bp, Homo sapiens
  chr20:55839362-55839667
  hyper
tgttgacacagcgcccgtgggcgtgagtttgctgtcttgacttggttcgggttttcgcagcaagttacacaagtagaatgaaagcggctcaggaaacagcgctatcggggtgtgttatctcggaaaccaaatatttgatcatcagtcccgcagcgcgctggcgctgccggggggttagtttgagcaagtctggagaatgtgcgcgcacatatggagggggagctccccggccctcgctgcagccccaggctcgcgtcgccggggtcgtcgcggctccagtcggaaaccgggacccccagccgccc

SEQ ID NO: 57392 - DNA, 54 bp, Homo sapiens
  chr20:55839692-55839746
  hyper
cgcaacccaatcgccaaaacctgtggtttgcgcgccacacgtggtaaatgctga

SEQ ID NO: 57393 - DNA, 753 bp, Homo sapiens
  chr20:55840350-55841103
  hyper
ctgagaggggcccaggaagggcggcaaggcagcctcgccgggaagggccctttacatccaggtagcgcgagccgcgccggcccgggacagctcacatgaccgagccccgcgctttgaacggcccttgcctccagccccagagatgcggccggcggcgtaacatggaggggacttcggaggatccctccttcccagtaacccctacaggctcaccgaacccagcgcgcccgacctgggggcgcacacagcttgggagtcatagggctgtgggtgggagaccctcgggcaggcactgcgatttcagccaggagcggaaagctgggcgggctgcatagaagaagcggctccctccctcccagtctcaaagtgcccccgaaaggagacgcgtaccctcgcctgcccttactcaccgaggttgacgaagctcatgaccatgtcggcgtcggtgaggaaatggctatcttgcaggctggccagaggggggccctgggtactgaagacggccttgtaggggtaggagaagccctggccgccgggcccgccgccctcctccaccgccatggcgttgtacaggtccagcatgaacatgggtgccgagttgtgcttgccctggaggtgcgggcgcgggcggtggggcaagcccaaaatggagaggatctcgcgctgcatctcccgccgctcctggctgcggaggcgccggtggatgaagctcgagtgcacctcgttgtccaggctgaagtcggccagggcgga

SEQ ID NO: 57394 - DNA, 2 bp, Homo sapiens
  chr20:55841148-55841150
  hyper
cg

SEQ ID NO: 57395 - DNA, 35 bp, Homo sapiens
  chr20:55841254-55841289
  hyper
cgtccgcgccgctcggtcacttgctgcagacgggc

SEQ ID NO: 57396 - DNA, 30 bp, Homo sapiens; identical to SEQ ID NO: 13091
  chr20:55841622-55841652
  hyper

SEQ ID NO: 57397 - DNA, 117 bp, Homo sapiens; identical to SEQ ID NO: 13092
  chr20:55841872-55841989
  hyper

SEQ ID NO: 57398 - DNA, 134 bp, Homo sapiens; identical to SEQ ID NO: 13093
  chr20:55842055-55842189
  hyper

SEQ ID NO: 57399 - DNA, 67 bp, Homo sapiens
  chr20:55926141-55926208
  hyper
aaaagcagtcgcttagtaacttgcagcggctacatcaactttggaccaattcgcaaactgctggtgt

SEQ ID NO: 57400 - DNA, 537 bp, Homo sapiens
  chr20:55964188-55964725
  hyper
gtggagacatggggccgccggagggggggagggattggtgatccagatacccaagggggcccgggggcggggggcgaaggagtgcgactggacccgcacctgggcaaccgcgtctccagcctccacggccctgtcccgcccccttccgggcaggcagaggccccggggctgccctgccgcctgggcccggcccccgcggcagcagccgagcggccgcacccctttgtggggctgtcgtgccgggaggggcgcgggcgaggcgggcccgggcggcgctgggacttgtaggccgggagcccgggcgcctccgggctgaagcccgtggccacgccaccgacgcggctccagcctgcccaggcaacgcgacggctggggacagccttggaaaaactgaaggggaaaccgaggcctggtgaagggatccagctggcgcaaaagcacgcggccgcgcagtggccgcctcccccggcctctagggggcaagtgaaggtcacacttaaatgaaagttttcaaagtcgcttcgaagggcctccggc

SEQ ID NO: 57401 - DNA, 114 bp, Homo sapiens
  chr20:55965025-55965139
  hyper
aggcttccggaagactcgggggtcccatccccactgtgcagagggctagagcgggagctgggggagggagaggtcagaggtcaaggctgccgcgtggagcgtgggccgtggagt

SEQ ID NO: 57402 - DNA, 146 bp, Homo sapiens
  chr20:55966823-55966969
  hyper
gccgtggtcatcaccgaccgccagacgggcaagtcccgcggctacggcttcgtaagtggcccccgcgcccgggcccgcaccccgccgcacaccttatcgcggcccgggcgccgagtccactccggggcacacgcccagacggcccg

SEQ ID NO: 57403 - DNA, 432 bp, Homo sapiens
  chr20:56073580-56074012
  hyper
agtgaacacgcaacccgaatccctctcacttatccatcgtgttgaggagcatttcacaggtcacgccttcatccacttcctctttgactctggctgtggtttctctgcaggcgacaggaaacatctctcctgggaactgttctcccttcgtggtggaagcctcctcagcagcagcttcttgagaaaaagtccaggatgagcaaatttatcagaaagctaaggaattggaatttataaactgtgcaaatatattttggaaaccatcacttaaatttgaacacggcagcaagcatgttagaaaacaatctaattgataagatggtactattctgatctcaactactgccttcagtcagggcttcttagcctcagcgctacagacgtttggggccagagagctgtctgctgggggcagggcgctgttctgggcac

SEQ ID NO: 57404 - DNA, 878 bp, Homo sapiens
  chr20:56284007-56284885
  hyper
cagagccacgcagccacgcacactccacagacgcacggacatccactcagagcccgagacacagcgccgcgaacactccagacacacgcccggagccccagacacctcgcagaccagacagtgtctcacacgcccctccacccccgcccaaagttgataaagagccggcctaaatgctccatcgcgactgccctcagggaaataaaatggaaacttcacggatccgcccgccccaaccctcccgcgccgtgcgccgccgctgagccccgggtccgagtccgggcgggcggggcgcggacagcgggggccgtgccaggctcgcagcgccgcgggacaaagccgggccggccgccagctgccgcgagccgggagggcgcgcccggggcgcggcgggcgctgcccgggcgcagggcgttcggtccgagggggcgcgcagggcccggacccccgctcgcagctgtgccccgacatagggtccgagcccgatggagtctccggggaggggggcgtggggtcactcactgatctccatgctctggaacaaagagcgtttgcagttgcacgtgcaggagacattgggctgcccggcggcggcggcggcggtgctgttgacccccatcaagcggtgcatggacggcgcggcggcgcggcgcggggcgcggggggctcgggggcggccggggggggctccggccggcgcccggagctggggccccgcatgcaggaggcgcgcggcgggggaggcgcgccccggctcgccgggctcgggtcgccgccaagttcccggggcgccgcggggctcagtgcgcgggaccgcgctccgctgcgcccccccggcctcccctcggcagccccgggggcgtcggcagtgcccgcgg

SEQ ID NO: 57405 - DNA, 546 bp, Homo sapiens
  chr20:56285252-56285798
  hyper
cgcaacggaggaggggcgctgtgccctctccccaacggcggtcagcttggaacgcctgcccggcgcacgcccggggccggggagccgaactcggtgccagccgcacccgggcgggttgctggtgcgccctcccctcgcccccgtccctggggtccttgacccaggctcttggggctagcctatcttctgaggagcacaaggtccctgggggctcagggaagagaaattggagaaagggggaggaagcccccaagatggatcacccattgcctggtttcgcaggagactgtccgccttcagttctccagcagctcggggatcatggcccactgaacccccaagcgctttcacccgaacccaaggaggacgaccaggaaagacgggaactcgcgtagacacgcccggaagcccttgtcatgtaaatagctgtcggggactggtgtattgtcgccgccccagccggcgggacctggggcgaatccacacccattgtctgctgcccaaggggcctccggctggggggcgcggctgcggagttcaaaaggg

SEQ ID NO: 57406 - DNA, 23 bp, Homo sapiens
  chr20:56577649-56577672
  hyper
acagaaagccaaacaccgcatgt

SEQ ID NO: 57407 - DNA, 259 bp, Homo sapiens
  chr20:56784986-56785245
  hyper
ctggatccgcgcgaggcgccactcggggagttgatctgcggtctcgcagtgacacctacaggccgccgtggccgcgcacctgcggcaactgcgttcgacagcgccacctggcgggagccgacgccggcaggcccggagaggattttcttcgtgaatccaagacagaggggtggaaagtgctcaggacctctggggtgtgtcctgtgggccgctggggctggggtgcagcccacgaggaagtgtccgtggggtgtgcgta

SEQ ID NO: 57408 - DNA, 721 bp, Homo sapiens
  chr20:56803411-56804132
  hyper
gccgcacccgcaggacgaagacgtcaggggccaagtcgggcaaggcactcgcggccttcgggtcacagacgagccgctggctccggccgcgggcacaggccaggggctgcgcggggagggcccgcgagtccgccgagcccaccctgggcccgccgcacccctgagccccggcccgcgcaccgctcctgcgtcccgcattggggtgcaggcgagaggcgcccccagttggccccgccgcccgcgctccgcccgcccccgccgccgcccgccgcatcccccaggcgcggccgcgcgtcatccgcggctcgagtgcggtggccacgcgtcatcgccgcccccgccctgacgccccaaggcgggcccatgcgccccccgccccactgtgacgcccaggccccgccaggaccgccccctccagacgcaaggcgaggcccctccctgcctgccgcccgagcctccagggagaccgatgggcgggcggccccccaaggtcccgcagtcctttcccgctccgcgatgaacaaagccgcagtttcacgcggccgcgggagacggttcttaaataatggaacaggacataagtgcttcccagagcaaccgggagatttattgataaatacagagacatcgccgggcagccacgctccgacaacccgcactgggcccccgtcccgagctcaggccacgtccccacctcctcgaagcctccaagctgctgtta

SEQ ID NO: 57409 - DNA, 225 bp, Homo sapiens
  chr20:56811735-56811960
  hyper
cacaaaggtcaacagatcaagcgaacactctgagattgcacgaccgccccggcgtttctccgactgcaaaccgaaccggatgctcctgctcgcggctcttggcagcacgaggtggtttcactgcagcgaggtccgcttggagagaactgggagcgcgtgctccttactccgaaagacaaaagcatgcaggagacggctggctgcgaaaacccactaccaaagctt

SEQ ID NO: 57410 - DNA, 58 bp, Homo sapiens
  chr20:56964788-56964846
  hyper
ctgcgcctcctccccgacccccagcctcctgggacttgccttcgaggcacttgtcact

SEQ ID NO: 57411 - DNA, 30 bp, Homo sapiens
  chr20:57090302-57090332
  hyper
tcctggaaaagtcgcgtcaacttggatccc

SEQ ID NO: 57412 - DNA, 281 bp, Homo sapiens; identical to SEQ ID NO: 13101
  chr20:57224798-57225079
  hyper

SEQ ID NO: 57413 - DNA, 375 bp, Homo sapiens
  chr20:57225218-57225593
  hyper
cgcagcccggcccgcagcctcgccccgcaaggggaagccggccctgcacaggcccggggcccggaaggcgccgccgcacagctctgcgcccccgacccgctccggccgcgcgctgggccaggcccttggcctcaagcctcccgggcggctccgggccggacccgggtctccgtcgcgggacgccagcctgtttgtgggtgccgtgctcgggcccgggcggcccctgcccgacgcggccccacggagcccctgcacgaaccccgccgacctggcccggggcggcaagtcgaggtgcttagggcgccctgggcccggccaaccgtggaaaacccggcccggggcacgggggggcgcgggggtcgcagggccagggcc

SEQ ID NO: 57414 - DNA, 48 bp, Homo sapiens; identical to SEQ ID NO: 13103
  chr20:57415187-57415235
  hyper

SEQ ID NO: 57415 - DNA, 303 bp, Homo sapiens; identical to SEQ ID NO: 13104
  chr20:57415538-57415841
  hyper

SEQ ID NO: 57416 - DNA, 2077 bp, Homo sapiens; identical to SEQ ID NO: 13105
  chr20:57428310-57430387
  hyper

SEQ ID NO: 57417 - DNA, 87 bp, Homo sapiens
  chr20:57465843-57465930
  hyper
tgtgggtttttattcgtgttcgtgtgtgtgtgtggacacattttccttttcggttgctctgtcctttggttcgtgctcgcctcgctt

SEQ ID NO: 57418 - DNA, 101 bp, Homo sapiens; identical to SEQ ID NO: 13106
  chr20:57466876-57466977
  hyper

SEQ ID NO: 57419 - DNA, 34 bp, Homo sapiens; identical to SEQ ID NO: 13107
  chr20:57470652-57470686
  hyper

SEQ ID NO: 57420 - DNA, 252 bp, Homo sapiens; identical to SEQ ID NO: 13108
  chr20:57478607-57478859
  hyper

SEQ ID NO: 57421 - DNA, 30 bp, Homo sapiens; identical to SEQ ID NO: 13109
  chr20:57480439-57480469
  hyper

SEQ ID NO: 57422 - DNA, 438 bp, Homo sapiens; identical to SEQ ID NO: 13110
  chr20:57484404-57484842
  hyper

SEQ ID NO: 57423 - DNA, 30 bp, Homo sapiens; identical to SEQ ID NO: 13111
  chr20:57485068-57485098
  hyper

SEQ ID NO: 57424 - DNA, 205 bp, Homo sapiens
  chr20:57485750-57485955
  hyper
ccagtggagatgggcgtcactactgctaccctcatttcacctgcgctgtggacactgagaacatccgccgtgtgttcaacgactgccgtgacatcattcagcgcatgcaccttcgtcagtacgagctgctctaagaagggaacccccaaatttaattaaagccttaagcacaattaattaaaagtgaaacgtaattgtacaagca

SEQ ID NO: 57425 - DNA, 64 bp, Homo sapiens
  chr20:57556037-57556101
  hyper
aggaaactggggctcgcagagccggcgccgcaggggaggggctgtgcacgaatccagtgggaaa

SEQ ID NO: 57426 - DNA, 30 bp, Homo sapiens
  chr20:57556673-57556703
  hyper
gccggaggctctggcgcggggcggcccgag

SEQ ID NO: 57427 - DNA, 248 bp, Homo sapiens
  chr20:57581888-57582136
  hyper
tggaagagaaggagcgacccccaaaacgaagcggctggatctgaccttccaaggcctgttggcgacgcagggcccccaggaggcagagcgcgcgcctggcccgggcgatgggcctcccgtccccccagggctgcctccccgccggtgcccacctgcgccccagcggagccagcccgtccccccgcagaggccggtagcaggtctgtccccggcggaagtagaggccgccctgcgccgcgcccgccagc

SEQ ID NO: 57428 - DNA, 30 bp, Homo sapiens
  chr20:57607747-57607777
  hyper
cctggctttgcgcccgcttcagggaaacgg

SEQ ID NO: 57429 - DNA, 58 bp, Homo sapiens
  chr20:57797334-57797392
  hyper
tgcccgggcgggcggcggggtgggtgcggacccctggctgggcgctcccgagaccccc

SEQ ID NO: 57430 - DNA, 177 bp, Homo sapiens
  chr20:57797934-57798111
  hyper
ggagcaggctgaagccgaaggaagggagagcagggttttgatcctagttccttggcttctgcaaatcggctgggaccccccgctgagcaagcgactgtcgtcacggcccccgcaccagacgaccccagcctgtggatgatgtttcactgccctcacataaacgccacccagaaatgc

SEQ ID NO: 57431 - DNA, 723 bp, Homo sapiens
  chr20:57875350-57876073
  hyper
gtgagtgtgagcgcgcgtgtgcgtgtgtgcgcgcgctctcgtggccttccggcagctggcagctgtcccggcccccaccccaccctaccccaccccacccagccgcgccacgccacgccgcccccgcccctcgctgtcctgggtgcgcctcgggccgctgcgctcctggccagctccccccagcgcctgggaggcgacccccagtgcgcccgggttcaaaggcccggcgaggcagttccagcccctctggggggcggggaggcgacgggggtggtgcagaagccagaaaagcccgagccacagccggccagctccgcgcagggatgggcagcgcgctctgaaagtttatgaccgccgcagccaactcctggccggagctggagacgcagcgagcgatcggccggcctcgaacccccacagctggagggcgaggccagctgtacccggccccagtgccctttcgcggccacaagcggccgtcctcctggtccggtgctccggcgcctgatctaggttcatggagccggggctgtggctccttttcgggctcacagtgacctccgccgcaggtaagcgcacggggcggcgcgcctctcctggcgcgagcgcacacaaaaggacccagggcgggggacccgaggcgcggagaagatgtgcgtcgcggggagcaaactcttgcctgggctctgcactcgtgaagacgcctgggggagggctggggag

SEQ ID NO: 57432 - DNA, 315 bp, Homo sapiens; identical to SEQ ID NO: 13116
  chr20:57978780-57979095
  hyper

SEQ ID NO: 57433 - DNA, 136 bp, Homo sapiens; identical to SEQ ID NO: 13117
  chr20:58090759-58090895
  hyper

SEQ ID NO: 57434 - DNA, 142 bp, Homo sapiens
  chr20:58179411-58179553
  hyper
ggcggctcctaacccggggtccagcccctcctcccccaccccggcgcgcggtccaggtatgtgcgacccctcccagtggccacgcgccttctcacgcccctctcccgtgacgtcatgctcctctcgcgcggcatgatgggag

SEQ ID NO: 57435 - DNA, 162 bp, Homo sapiens
  chr20:58179832-58179994
  hyper
cgcacgccgggatgcgcctggctgcagccggcgaggctattgtctccccgccctgaagccagccccggcgtctttctccagctcgtttcctttcccggccttttttttttttttttttttttaattttcttttttaaaaagacgccccctccagccccctcg

SEQ ID NO: 57436 - DNA, 189 bp, Homo sapiens
  chr20:58180213-58180402
  hyper
cgggtcggggaggcccgaggcaggtggcgctgagagcaggaccccgcgaggctccgcgccccgcctgcattcggggagccgcggcaggaacccgcgctcggccccgcggttcctatccccagtctcgcagggctggggcgcctcggagccctttgtccataaaagagctgatttcctgggtagagccgg

SEQ ID NO: 57437 - DNA, 105 bp, Homo sapiens
  chr20:58180470-58180575
  hyper
cgggtgctgaccggctgggggaagagaggcagacccgtggccgcctccgcccagcgccggttctgggccattccctccctccccactgccgggccccagctccgg

SEQ ID NO: 57438 - DNA, 31 bp, Homo sapiens; identical to SEQ ID NO: 13120
  chr20:58323973-58324004
  hyper

SEQ ID NO: 57439 - DNA, 509 bp, Homo sapiens
  chr20:58514020-58514529
  hyper
cagcagggaaatgacaggaggcgcagcttaggtgtggaggctccaggtggccggtccccgcgcggctcagatgaagtggatccagctctcttcgcactccccgcgaggcatgtgcagcgcgtggttgcgacatgtgaggctgtagtctcggtggtcgttgttgtcccagtactcggcacccgccacttggtagcgcaccgcgaagtgcacgcgggagccgagctccagcaggaagggcggtactggaaagccgaaggtgaaaacgtcctccgtgccctcggggcctgcgggcccgcgccaccgcgccaccgcctcgtgggtactgcgccagcccgagaaagtgtagcgcacagccacctgcttctcgaaggccacgttgcacacgcgcaccgtaccgctgatgccaaggtccgagcaagtgacacgctccaggcacacgagctgccgctgcaggcgctcgccaaagtcggcggcctcgacgggcggcgggaaatcgggcaccaggcaat

SEQ ID NO: 57440 - DNA, 330 bp, Homo sapiens
  chr20:58514800-58515130
  hyper
ggggtcgcagcccgacggcgctggcgttggcggcggcgcgcggcccgggctcccagggggcctacaggcccgcggctccagggccacgccgccgtccaggtccgacaggcagctgaggctccgggggccgagcttccgggatcccagggcgctaggcaggaccgcggagctcgggcctctggacatggccccgccggccgtcggaagatgaggcagggatgagagacgacctcccgaccccgcgacagctccctccgtgctcagaagccgcagagagtccaccgtatctgcaacctgcgggggacctctcgggcccggtgcgccctaccc

SEQ ID NO: 57441 - DNA, 30 bp, Homo sapiens
  chr20:58515464-58515494
  hyper
ggagctgcgcgcctccgcctccagctcccc

SEQ ID NO: 57442 - DNA, 30 bp, Homo sapiens
  chr20:59804406-59804436
  hyper
gcgcaccggctgtgcgcatctctgggcgag

SEQ ID NO: 57443 - DNA, 21 bp, Homo sapiens
  chr20:59826956-59826977
  hyper
aatggaagtgcacactcccac

SEQ ID NO: 57444 - DNA, 67 bp, Homo sapiens; identical to SEQ ID NO: 13123
  chr20:59828340-59828407
  hyper

SEQ ID NO: 57445 - DNA, 223 bp, Homo sapiens
  chr20:59828962-59829185
  hyper
ggggagccaagcaccgctgtgctcctgctccttcagcggggctggcttcccgcttgcacacactgcctctccctccaccacctcctcctgcctgtcacgccccctcccagaagcttggtcggagggccctgtcgtccaccccatccttccctggccctgtgccatgggctctagacttccccactgagcaggaaaggcgagcgagctccggaggacaggagga

SEQ ID NO: 57446 - DNA, 493 bp, Homo sapiens
  chr20:60552008-60552501
  hyper
gaagcatagctgctgcgtgccagctcctgtggagagctctggcggtttcagctgatgacacctgcatgacaccgcccagcagggcacgcgccacacacacgacaccgcccagcggggcacacgccacacacacgacaccgcccagcggggcacgcgccacacacacgacaccgcccagcggggcacgcgccacacacacgacaccgcccagcggggcacgagccacacacacgacaccgcccagcggggcgcgcgccacacacacacaacaccgcccagcggggcgcgcaccacacacacacgacaccgcccagcggggcacgtgccacacaactcccaacagctgtcatttcccccagctggcatgaaaactaagttctgctccgatggtgaaagctgctcacatatatttaagtacaaagattacgatggcatctttacagcacattctcaaccaaagttaagatgctggaaggagcggattctgctgtgt

SEQ ID NO: 57447 - DNA, 37 bp, Homo sapiens
  chr20:60639842-60639879
  hyper
cccccggcgccggcgccgcagccgccgcgccgggccc

SEQ ID NO: 57448 - DNA, 30 bp, Homo sapiens; identical to SEQ ID NO: 13127
  chr20:60697023-60697053
  hyper

SEQ ID NO: 57449 - DNA, 30 bp, Homo sapiens
  chr20:60717714-60717744
  hyper
accggccaggccagcgagccgctttgttct

SEQ ID NO: 57450 - DNA, 181 bp, Homo sapiens
  chr20:60757904-60758085
  hyper
gccggcgagaagcgcggctgcagctgagcgctccgcatccctcctgccgttgctcctgcttccgctaccagggacaaggtcgcctctcggtccgtcggcgtgttttctgcacctgcgcactgggcaagccttgggcttccggagccaaaaggccccggaagtggtcggccgcttgcgacgc

SEQ ID NO: 57451 - DNA, 316 bp, Homo sapiens
  chr20:60794654-60794970
  hyper
aggccgggtcccctggtggggcgtgtgcctgcgggagccacccaggtccgtgttccagtccccgctggcccggccacgctgggcgcccctgggtccccagcggccaggggctggggatttaccgacgaggaagtcggagatggcgaggttgagcaggaagaagttgttctgggtgcggaggctcgagtcggccacgaaggcgagcatgaccagcgcgttgcccagcaccgtggccacgatgagcagcgccatgagcgcggccagcaccgcggtccaggctgccgagaagccgcgcgccccgcccgccgccgccgcc

SEQ ID NO: 57452 - DNA, 30 bp, Homo sapiens
  chr20:60813106-60813136
  hyper
agtggaagcagctacgccccagctatcgca

SEQ ID NO: 57453 - DNA, 30 bp, Homo sapiens
  chr20:60813441-60813471
  hyper
gtcccaccccccggcgcgagcctcgggccg

SEQ ID NO: 57454 - DNA, 30 bp, Homo sapiens
  chr20:60921028-60921058
  hyper
gcaggcaggataacatggtccatcccgggg

SEQ ID NO: 57455 - DNA, 244 bp, Homo sapiens; identical to SEQ ID NO: 13129
  chr20:60941670-60941914
  hyper

SEQ ID NO: 57456 - DNA, 30 bp, Homo sapiens
  chr20:60942757-60942787
  hyper
ctcctcccccaacagcgtccgtcctgctgg

SEQ ID NO: 57457 - DNA, 371 bp, Homo sapiens
  chr20:60943005-60943376
  hyper
tcatggccccacagccgccaaattggctcttaaggaggtcgggggctctggtcacagctgctgagcacctgctgggtgcctggaagcacctgtgctccggggcccggtggactccaccagctctctcggcctggcctccaacccgctgcacagccgcgcacgcgttcctgccacgatcggcggctcgaggacgcctggcaaacagcacaggacctagaggccgagatcaggtcttcgtctgcctttgggtggctgcggccctgggtctcctacttcccttgggctccggggccaaatctgcctccagggaagccccgagggggtggcggcggggtggggctgcagctgccgagctggcagcaaacccccat

SEQ ID NO: 57458 - DNA, 30 bp, Homo sapiens
  chr20:60956901-60956931
  hyper
gtgcacagatacctgcccaggcatcctgaa

SEQ ID NO: 57459 - DNA, 30 bp, Homo sapiens
  chr20:60969435-60969465
  hyper
ctcgggaaagaaaggcggcactggtgtgac

SEQ ID NO: 57460 - DNA, 30 bp, Homo sapiens
  chr20:61274239-61274269
  hyper
actgtcggagtggccggggcaggtgacctg

SEQ ID NO: 57461 - DNA, 54 bp, Homo sapiens
  chr20:61274662-61274716
  hyper
gcaggcttagctgccctagaccggccctagaccgggaacctggaagcagatctg

SEQ ID NO: 57462 - DNA, 101 bp, Homo sapiens
  chr20:61339789-61339890
  hyper
gttcccttcctagccggtgcgagaaattgcggagaacagggaagagggtggcaggaagggtctggtgcacgatacccgccgcgcccgctcggaatcctggt

SEQ ID NO: 57463 - DNA, 609 bp, Homo sapiens
  chr20:61340092-61340701
  hyper
gcggggctggggtgcgcggagagcgcgagggaggagattctgagcgagggaggggagcgcgcccgggcagcagtgcgtgcgctcctcccggcgccacaagctcgccccgcgcagcccgagccgggctgggcgctgtcctcgggggcctggggaaccgcgcggtttggagatcggaggcacctggaacccgtggcaagcgccgagccgggagacagcccgaggaaccacgggttctggagctaggagccggaagctgggagtccggaggagagcggagcccggagcccggagcccggggcggcgcgtctgggtctggcgcttcccgactggacggcgcgcccgctggtcttcgccacgcgccctcccctgggctcccgttcatcggtccccgcctgagacgcgcccactcctgcccggacttccagccccggaggcgccggacagagccgcggactccagcgcccaccatgcgcctcaacagctccgcgccgggaaccccgggcacgccggccgccgaccccttccagcgggcgcaggccggactggaggaggcgctgctggccccgggcttcggcaacgcttcgggcaacgcgtcggagcgcgtcctgg

SEQ ID NO: 57464 - DNA, 30 bp, Homo sapiens
  chr20:61427910-61427940
  hyper
aggcgacaagggcccgggggaggcggccac

SEQ ID NO: 57465 - DNA, 30 bp, Homo sapiens; identical to SEQ ID NO: 13132
  chr20:61435814-61435844
  hyper

SEQ ID NO: 57466 - DNA, 531 bp, Homo sapiens
  chr20:61447608-61448139
  hyper
ttggccggacctggcgacccctgagcttctgggaaatggacatggccagcaccgccttcaggttcctgcccagggcacggttccttcaggccggggatcccggggaggggttcttcccctcggccagggtcatcgttttgcgatctctcctgggagtctgggtttggagtctggtcttagccggtagcaactgacgtggcctgaccacccggcccgtccaggtccacgggtgaggggccgcggtgggggtgctcccagcccagcaggcagcgctggacagtgaccccggagcgggaaccagggctgcgctgggcactgaccgggccctggtaccggggattcaccctccccggggtgttcctgggccttgggtcgcctgggtccgctccggcgcctggggaggggtctgcggcttcggaaactcgcgggtctcccctgcccctccctgaaggcggcccttcagcgccgcgcgcttccgcccccacactcgggttgaggagcaaggagagaaaagagcgtctttctctcttg

SEQ ID NO: 57467 - DNA, 30 bp, Homo sapiens
  chr20:61448519-61448549
  hyper
gctggacgtggagccgcgaccgccccagcc

SEQ ID NO: 57468 - DNA, 639 bp, Homo sapiens
  chr20:61492376-61493015
  hyper
tgttgagcgccccgcccggctcggggggctcggggccgcgcggcgcgggcggcggctcggcggggatgctgttgaagcggtcctccaggcggacgcgcacggccggcttggcccgggcctcgggcgcgccgtcgggtccagccgcagccgcagccgcgcccgcgccctccttggcggcgccgtcggcccgggccctcgctccgtccccgccgcccgacgtcttctccgccgcgcccgcctcgcttagcagcatcatgcgcagctcctggaagtcgatgtggcccaggcagggcgcgtcggccgccagcgcggacgggcacagcacggggtacacgggcgccgcgcccccctgaccgcccgccgcgaagccgcccgcgcctgcgcccgggcccgccgccgccagcagcgccgagttgaggcgcgtctcgagctcgccgtcagccgccgcctccatgtgcgagcagaggatgtgctgcagctgcgtgtactccacctccgtcatctccaccaggctcaggtcggtggtcgtgaagctcagccccggctcgcccagcgccgcgtccccgccgcccgcgccctcgacggccgcctcgccgcctgccgcgcctgcctccggcggcggctcccgcggtccggggc

SEQ ID NO: 57469 - DNA, 64 bp, Homo sapiens; identical to SEQ ID NO: 13135
  chr20:61511890-61511954
  hyper

SEQ ID NO: 57470 - DNA, 289 bp, Homo sapiens
  chr20:61560171-61560460
  hyper
ccatggagaaaaacacgatgggtgcatcacaaataggtgtaaacagtacacttttgtaatgtgtagacaccagtttctgcaacccccatgccacgcaaagtttcagggaaagtctttgaaagtacaatccggaaaactcagcaattcttaaaaaaaaatggctttccgctgttataagcctccttcctaagactcagggtccgcagcagaataccctgacccaaaataaaaatactatgacaaaaatactccaggaggcagccggctttacttcgtttaaagccggatt

SEQ ID NO: 57471 - DNA, 439 bp, Homo sapiens
  chr20:61560528-61560967
  hyper
cggcccgtcctctccaagaaccggaagccggacagcgtcaggacgttttattcttctcacctgggattcagagaggcagcggccaaggacagggcccccgccgaggccaccgggcagcgtccaggtctcggcctttgggaggggagcagcgggggaggggcacggggaggggcgagggcggggcgcgcctgggcctcggcgctgggctcctcctctgcccgctccgggggacacccacaggattcttgcagacctctgccgaggcaggatggaggcctgcagggatgcaccgcgggcccgcgacccgggcggccggaacatagttctttctggccggagatcggcccggtcgtgagtcgtgtctgtgccaggccccccacgctgtgctccagggcctcagtgcccggcgcgccgggggctgtatcgccagccacttggg

SEQ ID NO: 57472 - DNA, 30 bp, Homo sapiens
  chr20:61569739-61569769
  hyper
gcggaattggggcgcgcagtgagtccaggc

SEQ ID NO: 57473 - DNA, 450 bp, Homo sapiens
  chr20:61583881-61584331
  hyper
tgagccagggcgcgtcggacagtcagggcgacccagccagggcgaccgttggccccgctcctatggggcagcagggaccgacgtcagcagggtggggcgggcacccgagtggtatgccccgccctgccccgcctgcccgccctggtggccgtctgggggcgacaagtcctgagagaaccagacggaagcgcgctgggactgacacgtggacttgggcggtgctgcccgggtgggtcagcctgggctgggaggcagccccgggacacagctgtgcccacgccgtctgagcaccccaagcccgatgcagccacccccagacgaggcccgcagggacatggccggggacacccagtggtccaggtgtggcgggggtgaggggagggggggtgggagcggtggagatggggccgtggggagggagctgagatactgccacgtgggacgatgcta

SEQ ID NO: 57474 - DNA, 465 bp, Homo sapiens
  chr20:61585208-61585673
  hyper
ccagatcacagccctgtcaggcgccaattagaggggagggctgccctcagcgggccctgccccttgctctcttcctcttcccccacccacgttcatccaggcctgccgggcagggccagctccccagggattcagggcctcctcactggcggctggtttgagtggctccgccttcactacgtccctcccaggctcgatgtttaaaaaggagcccttgccgcagccttcactacgtccctcccaggctcgatgtttaaaaaggagcccttgccgcagccttcactacgtccctcccaggctcgatgtttaaaaaggagcccttgccacagctcttcaacttcctttgcaggcccttattgggtagcgccaaggattctggaggggcctgtgggtcaaggctgccacacgcacgccttttcctagcccgccctcctgcagccacatcacaaaggctgggccaggcga

SEQ ID NO: 57475 - DNA, 116 bp, Homo sapiens
  chr20:61637532-61637648
  hyper
gggcgcggcgtttacgggcgcggccaggccctggccctggttgaggaaggccaccaggcgccgcatctcgtccagggcctgcgcctgcatgaggatatagttcttggcgagcagca

SEQ ID NO: 57476 - DNA, 221 bp, Homo sapiens; identical to SEQ ID NO: 13139
  chr20:61637735-61637956
  hyper

SEQ ID NO: 57477 - DNA, 249 bp, Homo sapiens; identical to SEQ ID NO: 13140
  chr20:61638220-61638469
  hyper

SEQ ID NO: 57478 - DNA, 263 bp, Homo sapiens; identical to SEQ ID NO: 13141
  chr20:61638534-61638797
  hyper

SEQ ID NO: 57479 - DNA, 30 bp, Homo sapiens
  chr20:61640342-61640372
  hyper
ggctttgggaggtccgaactccccagcagg

SEQ ID NO: 57480 - DNA, 31 bp, Homo sapiens; identical to SEQ ID NO: 13142
  chr20:61640692-61640723
  hyper

SEQ ID NO: 57481 - DNA, 146 bp, Homo sapiens
  chr20:61664529-61664675
  hyper
gccagcaggacgctgaggctgcgtggcgtttccaccgtgctgcaggaacaagatgcacatcgtgcaggagccgcagagcacgcgtgcagaggtttcggtggctttgccccgcagctaacgtgtgcgtgtgtgccttgacttatatt

SEQ ID NO: 57482 - DNA, 820 bp, Homo sapiens; identical to SEQ ID NO: 13143
  chr20:61733166-61733986
  hyper

SEQ ID NO: 57483 - DNA, 357 bp, Homo sapiens; identical to SEQ ID NO: 13144
  chr20:61734251-61734608
  hyper

SEQ ID NO: 57484 - DNA, 696 bp, Homo sapiens
  chr20:61806195-61806891
  hyper
cagctgttcccagatgtgggccgcggcctttcctctttctggaggaatgacaggcctcccgcagaggaggagcgggtggtgacgagggagaaggagcggaaagggaggggttctccacgggttctgttgatttgtttaatcccacgctattcggaggctttcacggatggcggacaagagggagggggagggggtgggggtctcggcccgtgtttcctcccctcctcccgctcccgcccccgccggagccacctgacccgtagcgaagttgccggccccgctgcgcgccggcctttgtgcgcaccgaggcggccgccgggaaccgggagcccgagctggcccggcagcgccgccgcccccaccttcgcgccccttttcactcccccactgtccccggagctggcaaataaacaaatccacaaacaaattatccgtgtgctccggagaggcggcggcgtgggcggcggcggagagaaggcgccgggcaaggcgagactaggcccccgcggagcgggggaagcacagaccccagcccgggcccggcagcagtaagttgacttttatgaaacctacgaagctcgcggggccaccgaaaaggtccccaccggagcggactctgcggggcgggcggggcagaggctgcaggcgggctccccttcccgcgcggctcctaccggccggctccgcccccaagcc

SEQ ID NO: 57485 - DNA, 269 bp, Homo sapiens
  chr20:61808111-61808380
  hyper
ggggaggctccggacggtgaggcttggggaagccactgatccctggccctagagggccagatcgggggcgccccaaggaccctatcgagctggcagtgactgcagtcgggccgtggagtgtcgcctgtgattccgtggtccctacgggcaagagctcccatcccggtctgaaactgtgagaaccgcaagctccgatgggggcggggaaggacgacctttaattcccaccccactgtacggagcccagcagggccatccgcaggaggccg

SEQ ID NO: 57486 - DNA, 339 bp, Homo sapiens; identical to SEQ ID NO: 13145
  chr20:61808666-61809005
  hyper

SEQ ID NO: 57487 - DNA, 413 bp, Homo sapiens; identical to SEQ ID NO: 13146
  chr20:61809218-61809631
  hyper

SEQ ID NO: 57488 - DNA, 294 bp, Homo sapiens; identical to SEQ ID NO: 13147
  chr20:61809840-61810134
  hyper

SEQ ID NO: 57489 - DNA, 397 bp, Homo sapiens; identical to SEQ ID NO: 13148
  chr20:61810159-61810556
  hyper

SEQ ID NO: 57490 - DNA, 7 bp, Homo sapiens
  chr20:61810632-61810639
  hyper
cgccgga

SEQ ID NO: 57491 - DNA, 30 bp, Homo sapiens; identical to SEQ ID NO: 13150
  chr20:61810887-61810917
  hyper

SEQ ID NO: 57492 - DNA, 30 bp, Homo sapiens
  chr20:61846751-61846781
  hyper
gaagcccctgtcttcgacctgtcaaatctc

SEQ ID NO: 57493 - DNA, 179 bp, Homo sapiens
  chr20:61847112-61847291
  hyper
gggcccggcctccgcgaccccgggctctgcgttccagccccaggacctcaacccagaccccgcgcctcggccccggccgcggcccctgtaacccggccccgctacctgggtgtccacgctggtggccgacatgcttcatgaacaactagacgcggggccggggcgcccgccggctcggg

SEQ ID NO: 57494 - DNA, 181 bp, Homo sapiens; identical to SEQ ID NO: 13152
  chr20:61862297-61862478
  hyper

SEQ ID NO: 57495 - DNA, 200 bp, Homo sapiens
  chr20:61884623-61884823
  hyper
tgcaggacctcaggttatctccgcggccccagcgagcctcccaggaaagcgccggaagctccttccttcctgcaggaaggacacgatgcctccgccgtccctaggtccgcccgcaagcctgtgcccctaagccgagcacaggacacccaagctgcacagccacggactccgagggtttcgctgctcaaaactctgaaaca

SEQ ID NO: 57496 - DNA, 2 bp, Homo sapiens
  chr20:61885100-61885102
  hyper
tc

SEQ ID NO: 57497 - DNA, 355 bp, Homo sapiens
  chr20:61885195-61885550
  hyper
cgggggcgggcggggccggtttgctcgcgggtgggcaggacgttctcaccccccgccccctacactcgcaaactcgcaggcacagcctccgtcatcgccccacccgaatctcagaatcggaacttggccgctcactcggcgcccggggccggctgcgggaaacgctcgcacagacagagacaggcgcgcacccgggggcgcacccggggccacacacgcctccccaggcgatggggtccaggcggccccgcccgaaggcttccgtccggccagcccatccagccgctgccccgcacctgtccccgccgctccggacccgcggccgccccccgcgcacgcacaccggggacgggac

SEQ ID NO: 57498 - DNA, 426 bp, Homo sapiens; identical to SEQ ID NO: 13154
  chr20:61885777-61886203
  hyper

SEQ ID NO: 57499 - DNA, 72 bp, Homo sapiens
  chr20:61886256-61886328
  hyper
cgaggcgttttctctgagagtctcagagattccttggcttggagaagtcctggacccgggtccagagctcag

SEQ ID NO: 57500 - DNA, 166 bp, Homo sapiens
  chr20:61903934-61904100
  hyper
tcagcttggttccgcggatgaacggacgcttctcccgcccggcccccaaaagctgccgtcctccgcggccactacgaccagctgcggtccggggcccggggtgggagttggactgcgtggctgcgcgtccccatggcgaccgggcgggtgcgcgcgtcaggggctg

SEQ ID NO: 57501 - DNA, 30 bp, Homo sapiens
  chr20:61904685-61904715
  hyper
tcggacccaggactcggcctggacacatcc

SEQ ID NO: 57502 - DNA, 240 bp, Homo sapiens
  chr20:62103385-62103625
  hyper
gggagcgccggccccggacccagacccaggggcagggagccaaacccgccgcagccagcctggccggggtcgccgatggggtcgccgatgggggtcgccatgggggtcgccacgggggccccgccggccactcacacgtaggcgtggtagatgaacgcccagccgcgcggccgctccagcacgttgtagaggaaattctgcagcttgcggtagaaggcgttgcgcttggggggcttcccg

SEQ ID NO: 57503 - DNA, 98 bp, Homo sapiens
  chr20:62103667-62103765
  hyper
cgcttgggggcctcggagccggcgatcagcagcgccccgtcccgggtggagtcgggcgcgccggggtccagccccacgaagcccaccttcagcttctt

SEQ ID NO: 57504 - DNA, 318 bp, Homo sapiens
  chr20:62119300-62119618
  hyper
cacttgggcagggagggggtccggggggcgcggggcccaccccccagcagcaggcgcacacggctctggggtcgctcagtttattggtaaaacgggcactgagcgtggcgagcgctgggcgcggaagcctggggcgggggcgcctttcctcttgaagaacttccactggaccttgatggcgagcatccagtcgctgaccgagggcctctggcaagcggaggtgcagacatgcgcctggcgggggtgcggggcgccggaccggcgcgcggggcgggggcggggcgggggcccgggcccggggttcggagcgcggcaccg

SEQ ID NO: 57505 - DNA, 184 bp, Homo sapiens; identical to SEQ ID NO: 13157
  chr20:62119922-62120106
  hyper

SEQ ID NO: 57506 - DNA, 253 bp, Homo sapiens
  chr20:62127502-62127755
  hyper
acccccttgctctccgtcggggtcctgggacgccggccccctccgtcgggaccccacacccagaccctgccccccagggccggcctccgcacctgctccgaaatgggcgcggctacgcaggtccaccagcaggtggcgcaagggcctgggagtcgctcgctctacgagcgaagccgccagatgggataaacccctcccgggcgagggctcccctttatctgaagctgcggacgcccccagatcccttcctcaa

SEQ ID NO: 57507 - DNA, 43 bp, Homo sapiens
  chr20:62152086-62152129
  hyper
cgcatataagtgggcgcgtccgcgcgtgcgcaccccgcgcgcg

SEQ ID NO: 57508 - DNA, 415 bp, Homo sapiens
  chr20:62185030-62185445
  hyper
atgggtggcatctgtaatgggcggggccttgctgggcagagcccgcggcgggggaagccgcccctctcctctgtccaggcgctgggtggtccatccgcctggtcaccggccactgcctctctcccaaattcctccgagggattcccgaggagtgcgctcggactggggggttgagcaggaactccctcccagtcacccgaggctcctgcgccccgcccgaagccgggggtgcgtggggagtggtgcgcccgcggaagggctccgggacgggaaccccccttggagcctggctcttggaccagccacccgccgtggcccctcagtcggggacgcgggcccccagaagtctggggctctccaggaagcgaagcggatggaagattactcggctcggggtcccgggtccccacccccg

SEQ ID NO: 57509 - DNA, 394 bp, Homo sapiens
  chr20:62273399-62273793
  hyper
cgccccggccccgccccggcccctgcccgctccgagctccgccccggccccgcccccgcaccttctcgcgcagccgctcgcgcagtgcggccaggtgtgcctcgcggatctccttgctgagctccatcttgtagttgagcttctcctccgcctggcggctgaagttgttattctcctccagcgccttgtgcagcacctcgcgctcgtgctcgcgccgctccgccagctgcttcagcacctgcgcctcctgcgtctgtgcggggccggcgggcgcgcgtgagcggcaaccccgggccctgcccggccggactcctccctgctctccgcctcccgcccagcgcccgctcgcctcacctggcgcctccacctgcccaggcctcggtgggcgccggga

SEQ ID NO: 57510 - DNA, 30 bp, Homo sapiens; identical to SEQ ID NO: 13161
  chr20:62284063-62284093
  hyper

SEQ ID NO: 57511 - DNA, 30 bp, Homo sapiens
  chr20:62289531-62289561
  hyper
ctggccagcggagccggacacagaacgcgc

SEQ ID NO: 57512 - DNA, 30 bp, Homo sapiens
  chr20:62289967-62289997
  hyper
tagtttcctgcgctcgtggcgctggcgccg

SEQ ID NO: 57513 - DNA, 30 bp, Homo sapiens
  chr20:62370781-62370811
  hyper
gctgccgggaagcccgccaagcaatcgcgg

SEQ ID NO: 57514 - DNA, 155 bp, Homo sapiens
  chr20:62371935-62372090
  hyper
tggggtgcggagacaccggccccgacggaggccaggtcagggccccaggtttgtaattaccagccacccccaagctcttcagccctggaggagctgagcagaaatgatcgatgactgggagtccctacacctccctccaccgcagttcctcgggg

SEQ ID NO: 57515 - DNA, 1056 bp, Homo sapiens
  chr20:62383159-62384215
  hyper
tctccccatgaagccccgccccccggtgggtctcccatgaagccccgccccccggtgggtctcccggtggagctcggctcctgcaggtccgctccggaacctgctgactctcctgcgattcctaaactggcagcgatgctccagagcctcttccgccccgacagcagccccacctctgcccggagcccggggcgcctccactgcctctcctcacacagctgcccgccgcgagctccccctgcaccctgcgcctcggggtgggcgttccaggactccccgaacccttggggccgccccgctctgggctgcctgtgccccacccgcctcactggttgatctcacccacttgagatgccctcgccaggccttttttggcaaatctgcctccctgttcccaggctgcctttttctattatttcctccccaagcaaatccatccactccacacctgctacctgacaacgacctgccagtgctgagctccagggtgggcgcggtgggtgcagacaggtcggcaggcacaaggacagggttctccctcccgaggcagggcgggggcgggggggcgcagaggtggctgagggttgggggctccaagcagagcgagctgagtttgccgaggcctggctgccttggcggccagcaggtgagcagggtgggccgaagcctctgcaggggccatgtggcccagccacacccaggaggccggggcagagcagacaggggcccggggcggatctccctgccctgctgtcgtcccccctgtgcagagtggacccggtgtggggtccggggcggtctgcgccctcatcaggacccgcctgcccggacatcgtggccacgcgcagcgcgcggcacgcggaccctccccgcactcaccagcgtgtggcgcttcatgtgctcgcgccgcgtgaacttcttcccgcagatctcgcaggggtagggccgctctcccgtgtgcgagcgcatgtgtcgcttgaggatgcactggtgcatggccgagaagctgcagtacggacacttgaacttcttcctgatcaccgtgaactcattcac

SEQ ID NO: 57516 - DNA, 381 bp, Homo sapiens
  chr20:62384602-62384983
  hyper
tggtgtccgatcagacgcctccctggaggcagagaagaaacaaacactgtggagtaatacggacccaaaagtgtgcaggcgaaatgggagatgtgggtgcaactcaaagtcctgggctcttcttgctggacgccggagaagcagccagacccatttaatcaagttcttttcccccaaccctgagacccaacgtcactcagtggcaggaactccacaccaccatctccatggtgcgtgccctggggccaggctcaaaaacctgggggaccctcagcacgcccagtgccgttatgctactcaggcccagataccagcacgtcagacctgggcatgggccactgagagagcccggagcagccacgtccacgggaccctacggga

SEQ ID NO: 57517 - DNA, 677 bp, Homo sapiens
  chr20:62461227-62461904
  hyper
caatatgaaagattctacaatcgatacaattaaaatgcccgtgagttctcggcgcacaggtgtctgcgcccaggccgcgcgctaaacacgtttctaattagcatttctttaaacaatgctgatcacaatcttgccaccgtaatccactccaaatgcatcgttgagattgcagcacggaaagcgagagaggaaattcgctgcgaatctcaaactttcttttgtttatatttcttcgctgtcagaaaatatccgttcttcgccccatctggtctgtaccctggctcctcggtccagccctattgtgtgtgcttcgttaaacctacaaacagtgaatctgtcagcggggccaggggaaccccaactagcaggagccctccctctggcgcagagaattccccgtttgccttagggattgagttgtcagacaccggctcgcgctcccccgcgaaactgacatgtctatttacagagaaacaaagacgcggctcgcagcggaccccgcttcctccgcgcgccccgtccgccccgcgcgccccgagccctccgcgccccgagccgccccgccccgaggcccctgcgccccggttcggccggcgattaagatggagaccaggccggcgcccggcgtccggggagacaatgaccccccggcctcagggcgccgggacccgcccgcg

SEQ ID NO: 57518 - DNA, 34 bp, Homo sapiens; identical to SEQ ID NO: 13165
  chr20:62463024-62463058
  hyper

SEQ ID NO: 57519 - DNA, 13 bp, Homo sapiens
  chr20:62463386-62463399
  hyper
ctgactaggggca

SEQ ID NO: 57520 - DNA, 165 bp, Homo sapiens
  chr20:62463622-62463787
  hyper
gcattcctggccggcctgcgcaggggtaaaggccacctcgcttcctctccccgggcgcggcgggaagggaggtgagcctgtggccggcagccgcgcgagggagtcgagcccggcccggccaaccaatggggaggcgcccgggccgtccagcctgcctccctgcgg

SEQ ID NO: 57521 - DNA, 31 bp, Homo sapiens; identical to SEQ ID NO: 13168
  chr20:62467675-62467706
  hyper

SEQ ID NO: 57522 - DNA, 30 bp, Homo sapiens; identical to SEQ ID NO: 13169
  chr20:62477875-62477905
  hyper

SEQ ID NO: 57523 - DNA, 328 bp, Homo sapiens; identical to SEQ ID NO: 13170
  chr20:62495255-62495583
  hyper

SEQ ID NO: 57524 - DNA, 1009 bp, Homo sapiens
  chr20:62600639-62601648
  hyper
ctgggaggcagagacgcgactggcgccccggatgagaaggggcttcggccctcccgagcccagcggggacacagagccctcgcggggagagggggctccgccgcgctgcgcgcaggagacgccagcagcgggtccgccgcgtaggccgttcggcccgggaccccggcccaggcctggcgcgcgggtgagcgcggccagggacgcgcacctggggccagcctcgccacccacctgtcacctggggccgggagcgggcgcggggcgcgggcctcggcctggccgggcagggccgatcgcgggcgcggggtgggggggcgaaggcagtgaaccaaaatggcgactttttctggagaaggaggaggcaggaagacggcgccggcgcggggcgcgggggctcgggcgcggcggggggcgggggggctccgggcccggccccctccttggcctgcgcgcagggtcgagatccggggcgcggtgggcgccggggctgcggccagaatgggtccggggcgcggccgggcgcttacctgcggcgcccagcggggctgcggccgggccgggccgggccggggcggggggcgcggggcgcggggcgctgggtccgggcggcgcaggctgcgcgccgcgctgcgcacatgcgcgctcccgcccctcccacctttgacagttttactgcgggggggagggggcgaactctcgcgttattcccgcggccgctccgcgacggggagggggcggggagggggcgggggcgggggcgggggcccggcgctggcctgtggttcccccgctccgcggttccgcccccgtcggccgggcccgcagtccagagtagccggttctgccgtcctggggcgggggacgttttttggacagtggggtaaactgaggcccgataggggcgctaggcactgcccggagtccggcgcgcacggattgaggcgacctgattccgccgcatcctggcccgcgcggcgagtgtggtctctgggctcgggaccctgacctc

SEQ ID NO: 57525 - DNA, 214 bp, Homo sapiens
  chr20:62605237-62605451
  hyper
cgtggtcctctgtcacggcagccgcgggaccctcacgcgctgtctgggccgtcccttccagcgtgtcgggcgttgtgtccagcactggggaccgcccacaggcgtgacttgagccctgtttccagcctctgcgcggggttgcccagacgcccctccagggcgtgacgccactgccccctggtggccgcggctgcccagacgccctctcctcgca

SEQ ID NO: 57526 - DNA, 30 bp, Homo sapiens
  chr20:62611284-62611314
  hyper
ggcacccgcttccccggagaaaccagcttg

SEQ ID NO: 57527 - DNA, 30 bp, Homo sapiens
  chr20:62669742-62669772
  hyper
ggaccgtggctgtgcgcaccgaggcggtga

SEQ ID NO: 57528 - DNA, 30 bp, Homo sapiens; identical to SEQ ID NO: 13173
  chr20:62681148-62681178
  hyper

SEQ ID NO: 57529 - DNA, 140 bp, Homo sapiens
  chr20:62694285-62694425
  hyper
ggggcccggtcgctccgggatgtctgagctctgggaggggcgtgcccggggcgcctccctcgcggggtattgtgggatcacgagtcactggcgacggtgggtcaggactacacttcccaggaggctgtgcgcgccgcgtg

SEQ ID NO: 57530 - DNA, 617 bp, Homo sapiens
  chr20:62694477-62695094
  hyper
cgcgtggactacgcatcctaggatgccgcgcgcggccgcggggccgagggtttgaaccgggggtctgtcgtccgcggcggggctgcgtcggctgcggcgggtgtgggaggtggcgacggccggggccggggtcctgcccggctgcggaggcgggcgcgacgggcgcgggggtcgctgctcctgaggcgatgatgggcaaggaagaggagattgcgcggatcgcccggaggctggacaagatggtgaccaagaagagcgcggtgaggggcgcgggccgccaggaccccgggaaccccgccccgccgagaccccgtcgagcccgccgacccccgttagggccggaagacgacctgaggggcaggacgagacccctccccggcagagactaaccgggacgcaggggagacccccacccgtggccgagacccctgccccgggccagccctgccgttcactcccgcaaccccggcagaggccgcgatcaggcctggaccttgtcccgggagagccacccgctctggactcagacccctccctcgcccgcagtcacaggctccgcacccttccctgtcccttaactccagacccccagcctggcccgtcgactccttccttgg

SEQ ID NO: 57531 - DNA, 1131 bp, Homo sapiens
  chr20:62714665-62715796
  hyper
agcgtccatactccccgcttccctcggggtcctggggagtggcagcaaaaagaccagcgagccttcggagaattataactttatgtgggaggctggggcgcgtcgcacactctcagtcgccgtcaccgcgggaagatggtgccatccacgttctcctccaggatggtctccacgcgcctccgctgccggggagagaggctggggtccggcgtgtgcggaggcgggcagggcccctcccctttccccgcccctaccggggcttgtctgcacctcttggcggtccagggggtccgggatccgcgcgggcttcagctgcggcggcaggaacagctccagccggatggcggcgcgcgcggacttctgccgctggatgagcagcgcgatctcctcggcctgcggggcccgggtagctgagcgcgcgccgagccccgccccgccccgccccggccggctccgctcaacgctcccggtgcgccccctctgccctccgaccccctcgcctcacccgcatgcgggtgtagcgcagccgcagggcgcggactcgcccgcgggcctccgctgccttgaggacgccgaggagccggttctggcgctcggcgggcagctcgagcgactgcgtccacgggcgcgggtcgggcatgcggtaccccggttccaccgacccgcacgggaaggtggaggccgccgcgcccacgtcctccagcaggtcgccgaagagcagatggcggtggcgctgcgcagggagcatggccgccagtccctgcggcgtcagggcccagcccggcttggggggctctgtcgcgggcgcccccttggcacgctcctcaccctgcgccgtgcctggcgcgctcttcccgcttcgctcccgcgggcccttgcgcccgccctccttcgctggcggcggcatcctcccgccctgcggagggaggagggcgtcccgtcggtgccggggctggcaccgggccctgcccgcccctcggcagggccccaacgtgcgccccagctcccgcccgctgggctctccgcagtcggttttgagttccgcacccccagcctctgagctttgcccaggcgctctccctctcccaagcgcacgtccccagcagctctgccatcggctgatcctgctca

SEQ ID NO: 57532 - DNA, 682 bp, Homo sapiens
  chr20:62733447-62734129
  hyper
tgggggaaggctggggcgcccgggagggtcccgggtcgcgtccgacctcaggaaggcggggcttcagcagcggcctcggaccctccctccagggggcgctgtgggctcacgcgggcccagccttgggccccggggcgctgcggcgggaaccgcggtgactagcggggtcttaaagcgggtggcggggccgggctctcctgggaccaggagcccagagcgtggagacgtggcgggctgagccgctcagtgcggcccctgccccgcgcccaccccgccccgtgtcaggaggtccgcggagcgggaggacccgcctcccggggagagctcgcccgcccctccctcccggctggccgcggggcggtctgcagaccctttggccgtgccggatctgcctggtccccggggagaagacgctgaggatcccattgctggtctgtggatggggacaggagacgcccgaggtaagaaggggtccgggttctttggaggaatcctggttggcgccttctctgcagcagagacgcccggctggggccggagggcaaactgggggcagggtgggagacctcggccctgagggctgtaggggctcttgcctgggcgctccttaagctcccccgccccctccgccccccaccccgcggtgctcactctcagtcctgccttgcgcacattcccacgc

SEQ ID NO: 57533 - DNA, 101 bp, Homo sapiens
  chr20:62734172-62734273
  hyper
cgcctcacacctggctctgccgcgggcttggagcgggtgtctgggaaacacagtctcacttgtctcctcaaggggctccggggcaccgtaacagcgtgcag

SEQ ID NO: 57534 - DNA, 30 bp, Homo sapiens
  chr20:62948119-62948149
  hyper
ggaggctgtgggcacgcggcttccccgcgc

SEQ ID NO: 57535 - DNA, 31 bp, Homo sapiens; identical to SEQ ID NO: 13176
  chr21:15270038-15270069
  hyper

SEQ ID NO: 57536 - DNA, 710 bp, Homo sapiens; identical to SEQ ID NO: 13177
  chr21:15588288-15588998
  hyper

SEQ ID NO: 57537 - DNA, 30 bp, Homo sapiens
  chr21:15755437-15755467
  hyper
catcacagtcccgccgaacaggcttgtgat

SEQ ID NO: 57538 - DNA, 221 bp, Homo sapiens
  chr21:15755916-15756137
  hyper
agtttgtgttctttcgttttaattccttttaaagcgcgttcgtttgcctgagatctagcttctagatggcgttcctatagcctcccggagccccagccatcctccgtagaagggtccctgccgcagtgcggggcctgagggaagtcggctctggcgtccgtgctccaacgctgggagcagccctgaaactccagtgaccctcagccgtctgcctttgtttt

SEQ ID NO: 57539 - DNA, 30 bp, Homo sapiens; identical to SEQ ID NO: 13178
  chr21:16130746-16130776
  hyper

SEQ ID NO: 57540 - DNA, 31 bp, Homo sapiens; identical to SEQ ID NO: 13179
  chr21:16436647-16436678
  hyper

SEQ ID NO: 57541 - DNA, 448 bp, Homo sapiens
  chr21:16438266-16438714
  hyper
atcacgaggccggggcggcagcgcggtggagcctctcggtttcctgcagcctaatctcactgaacccgcctctaaattgggggggccacagattggtgaaacgagaaagtggaaggaggagagagtcatacgaaaccataatttccccttatccttgtatttgctgtttgaaaaatcgtatcctcaacgctccccagacatctcactagaactattaacaccccctcaacacctccccagatgtcaggtttctttttgacttgagcatctagcatttagtaattcgccatgaaaaaaattaccaggggaagcgagtgttgttgctgaaattgtttttgcttgacacaaaaaagctaaagtacagcttagtctcacccgaaattctgaaacggcatgcccgtgttaaaacacttattacataagacaaatgagccgatgaggcactcca

SEQ ID NO: 57542 - DNA, 30 bp, Homo sapiens; identical to SEQ ID NO: 13180
  chr21:16488404-16488434
  hyper

SEQ ID NO: 57543 - DNA, 30 bp, Homo sapiens
  chr21:16520816-16520846
  hyper
agaatttgactggctgtgtctcctgaaccc

SEQ ID NO: 57544 - DNA, 118 bp, Homo sapiens
  chr21:17101956-17102074
  hyper
gggtaagctagggatccgacaagccctgggcgcagggaggaacgctgccctccggcctccagtcgcgctccccgaagcccagcgccagcgtcgcgcaacctgccgcaggggcggctcc

SEQ ID NO: 57545 - DNA, 84 bp, Homo sapiens
  chr21:17102747-17102831
  hyper
ggcgcagaaggtgaggcgagtccgccagccggcgggccccacttctccttccgacgggctgtcctctcccgctgcggccgggcg

SEQ ID NO: 57546 - DNA, 1362 bp, Homo sapiens
  chr21:18885046-18886408
  hyper
gccccacccccgcgcgcaaaaccctggtttagcttaagggatggaggcggggacccctgcgcaggcttgcggcgtgggaggcggccgcccgcgacctacgacgccgcgcgccgggaggctgagagttcggcgccgggagggtcccggggacagaagagcgcctcgcccggttgccaaggcaaccccacgcggctggagaagccggcgctcgcagcccggcccgggccgctgccggaagtgacgcgagttcacctgccgagcgggggctgggaggaggggcggagggtgcagaggtgccgccgccgccgcgagccagtcgggagcgcgcgaggcgcggggagcctgggaccaggagcgagagccgcctacctgcagccgccgcccacggcacggcagccaccatggcgctcctgctgtgcttcgtgctcctgtgcggagtagtgggtgagtaggggccatggggtcctcagcacccgcccagcccgggggcgctcgctgcccgcggccacccaggaacaatggggcgtgggggagggggcgggcgcgatttgggggcgctgctgcaggggcggcggggcgggcagaattgcacaggggcgcttttgctgggccgggcgctcctggagccgtcccgtagggagccgcgcagggcgcgcggagtgcccggggacggagccctcggcggggggtggaggcggaggggctcgggcgcggcgtgtcgggtgcgcctcgcagctctcccatagcattctctgccccggtgcgggcttgcctttctttgctctcgccgtctcccttgtcagccttcgtgtcggttctctccagcgttacccgatttcaaaaaccttgggcggcgagttttcaggtgtcgagtcgcccaggcggggaggctgaattgcaaacgccattattcaatggacatggagctgcccggtgcctcggatcggccaggctacctctaggaaagaggcgctgagcgaacgccagcctggacggtgttagtctcctggaagcagctcgcccaggcaggagctgctaaccagacgcgcattgtgaaggagaccgtggaaaatcaaaagtgggttcctgcaaaaatgtagcattggtttctgcagtccttgggcgaagtgcaaaggagaattcagtgacctcgtttttgagtttgtaatgagtcgttcattttggagataagacgggctgagttgtacagggtaattgctagaggatttgccaagtgcgtttgtcgactgctcctttctctgggaggggaaaaaaggcatgtgaaaaatgcgtggaccattaggaggcgtaatcattttgacactttaaaaaacggattttccatgtcggtgttttaaccaa

SEQ ID NO: 57547 - DNA, 296 bp, Homo sapiens; identical to SEQ ID NO: 13183
  chr21:18984015-18984311
  hyper

SEQ ID NO: 57548 - DNA, 31 bp, Homo sapiens; identical to SEQ ID NO: 13184
  chr21:18985139-18985170
  hyper

SEQ ID NO: 57549 - DNA, 168 bp, Homo sapiens
  chr21:22369893-22370061
  hyper
tccagtgtctctcccgtaaggtgccgctcccaacagcaatgggtcgagatgtagaggaaacactctgtacgttatttttccgcccaccctttagcgcctgaggagacagacagtgtagactttagggtacaattgcttcccctctgtcgcggcggggtggggagcgtg

SEQ ID NO: 57550 - DNA, 153 bp, Homo sapiens
  chr21:22370322-22370475
  hyper
gctcagctgtcctgaggcagccggcggctgtgaaggagctccaggctgcccccatccccacgcccttctcggctcagggcgtgcatgaacctgcggatggccggcgggcgagtggcgccttcgcgatcgcggccgcccctctaggcggaggca

SEQ ID NO: 57551 - DNA, 349 bp, Homo sapiens
  chr21:22370682-22371031
  hyper
cgccgctgcctggatatagtgcggcaagagcggagcttgcagtcactttgcgaggaggagcgcgcgggctgcgggcggctggggcaccgcgggagcggcggcggcggctctagcagaggcggccggggcagcgaaaggttctctctccagggctggacttaataactttgaaactgtccaccggtgtcacgtcctgaacatgagcctcctcctctccttctacctgctggggttgcttgtcagtagcgggcaaggtaggagtgtggcgctttattgcatttactttccctcccccttccacccggccaagagaggcaaagagggaggcgcaggaagaatgaaatgaaag

SEQ ID NO: 57552 - DNA, 630 bp, Homo sapiens
  chr21:26934225-26934855
  hyper
acacgcaatgacccacgagaaagggaaaggggaaaacaccaactacccgggcgctgggctttttcgacttttcctttaaaaagaaaaaagtttttcaagctgtaggttccaagaacaggcaggaggggggagaagggggggggggttgcagaaaaggcgcctggtcggttatgagtcacaagtgagttataaaagggtcgcacgttcgcaggcgcgggcttcctgtgcgcggccgagcccgggcccagcgccgcctgcagcctcgggaagggagcggatagcggagccccgagccgcccgcagagcaagcgcggggaaccaaggagacgctcctggcactgcaggtacgccgacttcagtctcgcgctcccgcccgcctttcctctcttgaacgtggcagggacgccgggggacttcggtgcgagggtcaccgccgggttaactggcgaggcaaggcgggggcagcgcgcacgtggccgtggagcccggcctggtcccgcgcgcgcctgcgggtgccccctggggactcagtggtgtcgcctcgcccgggaccagagattgcgctggatggattcccgcgggcagaggcagggggaaggaggggtgttcgaaacctaatacttgagcttc

SEQ ID NO: 57553 - DNA, 30 bp, Homo sapiens
  chr21:26979835-26979865
  hyper
ccggaaaccgaacgcgcactcggagttccg

SEQ ID NO: 57554 - DNA, 706 bp, Homo sapiens
  chr21:27011414-27012120
  hyper
tctgagacctgacttccagcacgagtcttgattgcttttttttttctcgagttcgaggcggagcccgcgaaccccatctcctcagagcgccaccccctcagcttcgcccgttgggcagaattttccaaatatctccacccctaggctgaaaagccagaaagaagttttgagccaacgaggggaagaaaggagttggggcaaaacaggaggcgtttccctacccgcatacatccccgtccccgagacacccaatccccccacccccagcctgcccgcgcctcccgcccccagctcctcgccctggggacagctggcagccccgcgcggaccagacacaaagccgatcaatcccggaggcgtgggggcggagggacgacccgccggggctttcccgggcgctgctctcctcctgctgccccctcgctaggacccggcggacgcctcgtctggttttcacgccctctagcccctacccccacacccccaaaacagaacagacccccatccctgggctggaggacccgcctcttggcagccagctgagaaggcgccccggggagggggaaactgacatcccatctagagccgtccctcctcttcctcccctcccgactctctgctcctttcccgccccagaagttcaagggcccccggcctcctgcgctcctgccgccgggaccctcgacctcctcagagcagccggctg

SEQ ID NO: 57555 - DNA, 696 bp, Homo sapiens; identical to SEQ ID NO: 13189
  chr21:27012148-27012844
  hyper

SEQ ID NO: 57556 - DNA, 30 bp, Homo sapiens
  chr21:27107963-27107993
  hyper
caagggcccccccgcggccgcctctgtgtt

SEQ ID NO: 57557 - DNA, 30 bp, Homo sapiens; identical to SEQ ID NO: 13190
  chr21:27403678-27403708
  hyper

SEQ ID NO: 57558 - DNA, 1962 bp, Homo sapiens
  chr21:27541597-27543559
  hyper
gaggcgccatcttctccgtcttaatcttcactcaattcgatccttttatctgcaccctaaaaaaaagacccttcggaccctccccagcatcctgtgcccccaggggaactaaaccagagtccccagagctgccagggaagaggccgcgccttaatcagacaaacgcctccttggatgcacaggacagagcccgtgcctccccaccatccgccactgccctttccagacgcacatcccactctccgccttatttcctccccgccaaggactttacagcccagcacagaattaagcctcggaggtgatccgagggtgggaagcagaggggccccgaggctccgccagaagccccggcagcgtctctgccccctcccaggcggacgcgcagccccgggaagggagccgggcgggagcctcggtggcgcactgagactaacgcggctcggcccacggcgagggcggggtgtcgcggcttttgttcccgcggaccttctgcctctcagacagagcttagggtgcgagcgaactcccgggacgtccagacttggggaaggcgcggggtggctatgggtctccgacccctcccatttctcgcaagttacacaaaagggagacgcggacatgcacaaagtttgcctgtggaaggcggtgcgcgaccccgacgccggctcgggctagggtcgcacccaggctgccgccgccagcagccgcgaaaagaggttggagcaaggaagggggatgggggtgagagaggaaggtgaaacgaggcggagaacgcagggaaaagcgaggggctcctagcttcctgggctgtcccgactcctcctcctcctccccagggcccaagagaaaggaaagggcaacgattcaagagcgaaggactggctttagggacgctgcgttttcggttttccccacgtgctccttcccccttcccccctgtctgaatgtctctcgcctcccccgacccccgcttccaaggcagggactaagtcggggtctgggctcagggtcgccccctacccttctcgccccgggctggcgcggaaccagggagaccagcgcctcgcccgctccctctcagcgggccggagcgcgactccctggggcagggctgggccgaaagcggggatgcgctggacgtccgcaagcgggggcggagaggagaggggtcccattgacggacccccggcttctctgcattaaagacttgggttaaggtcttggggggtatcgcgtccccaccgtgcagcctccccccgccttccgaggcgcggcacccacctccagcgcccgagccgtccaggcggccagcaggagcagtgccaaaccgggcagcatcgcgaccctgcgcggggcaccgagtgcgctgctgtgcgagtgggatccgccgcgtccttgctctgcccgcgccgccaccgccgccgtctcccggggcccccgcgcacgctcctccgcgtgctctcgcctaccgctgccgaggaaactgacggagcccgagcgcggcggcggggctcagagccaggcgagtcagctgatccggcccaccccgctcggcacccgagagagacccctagcggcgccgccggggaactgcgcccgctcgcgccgggaggggccctcgcgccccgcgcccacaggtgcacgcgcccttggcgccgcctgcaccccacgcgccccctccgctccccggccgacggcccacctgggcttcgtgaacagtgggagggagagtctggggccaggagagggacggtgcaggatcagggaaaggtgagtcctaggacgctgaggctctagaaaagtcgagagcgctcctgctcgtccccgtgagcttgaatcatccgaccccgcaggcctcccgggggtgtcgtataaaggactgctgctagggtgcgtttttatccgcatttcgttttttctctcggtttggagaggtggggcaggcgtttctggaagaga

SEQ ID NO: 57559 - DNA, 118 bp, Homo sapiens
  chr21:27945029-27945147
  hyper
gcgggtttctgccgtcgcctcgcggaaaaggcagaagcgtctgcaaaggtccttctgcaaaggtcccggtccgtccagctcaacccacgttagcccggaccgtgacccaagggcagcc

SEQ ID NO: 57560 - DNA, 30 bp, Homo sapiens
  chr21:27945693-27945723
  hyper
accccttgctttggcgattgctatggagtt

SEQ ID NO: 57561 - DNA, 625 bp, Homo sapiens
  chr21:28215957-28216582
  hyper
cgaaggggccccaccgccttcagcccgcctgggtcagccttataagggggaaaggggacagaagtctgcagaacagagatcctagcgtagccgctcagggtaccttcccaggtcaccattgctcctctgccctctccacatccgccctcccgtgagcgcaggatgcacgcacaggcagcggttacaaaactcagcgcaacgttgcaacccgcacaaaaggcgcacacaaaatcattaaaaagaaatacacagagtggaaagaactcgcacaagctccaactcgctaaaggtggaaggagtcaggttacaaactctccctccccggcctaaatgctttgctttagtttgcagaaaatcgtttgtcagtttttttcttggttattcattattcgggcaaatgcaagtatgttttctagctgagttcaccaatccaaacctcaaaccacattcctccactccaggcctccgttctgtccgcggacttatgatcctgcctgccagcaggagtctaccctgaagtcgcgtgggatagataaagtgaggagaggaggatgaatggacagacaaacgagagcaattcttctacctgtgggctgtcctacgccttgcagtgccgggtcctgcg

SEQ ID NO: 57562 - DNA, 1031 bp, Homo sapiens; identical to SEQ ID NO: 13195
  chr21:28216633-28217664
  hyper

SEQ ID NO: 57563 - DNA, 360 bp, Homo sapiens
  chr21:28217711-28218071
  hyper
cgctttccagcgagtgcaagaaccgggcagccgagcggtccttttatagtggaccagtgaaacccccacccccaccccactcctcccctttggcccttttccatcccaaagacgccgcccccggctccgttggtgctaaaccgcgctccgcgctgcgggctcgggagggggagggggcagcctccgcgctggctccacgccactgctcgtcaatctaggggcggaaggggcgctgtgaccagcactttgtactgctggggccgctccagggagaagactctcccttccaccgcttttctccctcgccggtttcctggaccacccttcctccccaccgcccggttgcggtaactcagttac

SEQ ID NO: 57564 - DNA, 293 bp, Homo sapiens
  chr21:28218368-28218661
  hyper
aggtgacacttcctacgatctggattttaaaatatgtttgcttatgccttcaccctccaccaacccccaccccgcacgccacctcttcaccagagacgactttgtgagggcccggtttcacatttctggaatgggtgatctgggacgcggctcaattccctagagcataaggagggaattgcgctttttcttcttcattcgagaaatgatcggctcccgccagtctgcgtgctttcactcaacagcagctgcaagccctaggccagcgtcgcagaaacggccaggaaccccac

SEQ ID NO: 57565 - DNA, 30 bp, Homo sapiens
  chr21:28218944-28218974
  hyper
gccccgggcggacccgcaaccctcacactc

SEQ ID NO: 57566 - DNA, 30 bp, Homo sapiens; identical to SEQ ID NO: 13199
  chr21:28338821-28338851
  hyper

SEQ ID NO: 57567 - DNA, 808 bp, Homo sapiens
  chr21:28339240-28340048
  hyper
aagaaagagaggggaaaaagccgtaaaaattaaaacaaaaatgcaggggggcagcctgaggcgagctggtgaagcggcgtgtctgtgtcccttcggctgcggtctcctcctgcccgccgtcatccccagtcggcagctgcgagcgccgagagcagcgcgagcgctgtgaagatgcgaggaggtggaacaatgaatttatagcggcatgccatcctgcaatggcaatttcaacagttcgtcactgcacgctgcctcttaaagggagagcttcccccaccactcccacccttcccagtccgcgcctaatcagatgggggagggcaaaagaggagggtgatcgaggaaagggagacgaagtaggaggaagggactgggacccggcgaggtggtaggaggggagaggggaaaataaaaagtaatggggcaagaaaaacagatttccttggccacttttaaagccacagcggctccgggtctgtctgatatttcacaaccaattggggttggctaaccttggcttacctcatctcctgaacgggtgttttggttaaagttattgagacgtttcaagtctctccctgcctccttcttgcctgcttttctcgccctcggtgggaagttcctgccgcaagtttttcccctttgcacacccgtgcgctctggcctcgcagaccgtgcaactccatccaccagccagagcttttcagcttcccgtgcgtcccctaaccaccgcgttcccttcgcttcctcccctccgtcccggcacccggtttcctccctccccattctccagcctcttgatgctttg

SEQ ID NO: 57568 - DNA, 98 bp, Homo sapiens; identical to SEQ ID NO: 13202
  chr21:28340062-28340160
  hyper

SEQ ID NO: 57569 - DNA, 30 bp, Homo sapiens; identical to SEQ ID NO: 13203
  chr21:30365297-30365327
  hyper

SEQ ID NO: 57570 - DNA, 30 bp, Homo sapiens
  chr21:30375071-30375101
  hyper
tgctcataagtccccgtgctcacagcatcc

SEQ ID NO: 57571 - DNA, 30 bp, Homo sapiens; identical to SEQ ID NO: 13204
  chr21:30396942-30396972
  hyper

SEQ ID NO: 57572 - DNA, 30 bp, Homo sapiens
  chr21:30446223-30446253
  hyper
gtagtcagtagtcacggcgttagatttttg

SEQ ID NO: 57573 - DNA, 30 bp, Homo sapiens
  chr21:30717721-30717751
  hyper
ttcacatgatcattgttcactattttatga

SEQ ID NO: 57574 - DNA, 247 bp, Homo sapiens; identical to SEQ ID NO: 13205
  chr21:31311386-31311633
  hyper

SEQ ID NO: 57575 - DNA, 219 bp, Homo sapiens; identical to SEQ ID NO: 13206
  chr21:31311700-31311919
  hyper

SEQ ID NO: 57576 - DNA, 358 bp, Homo sapiens
  chr21:31312079-31312437
  hyper
cggaggatcagcgctctctggctcccggagcccagagaccagctgaggaaagttgctgccccgatctgcaggaacgtctccctcattcgtcctttggtcagatgcaaaagtcgggggataggcacagacagaggagggaaaagggggaaagaagactaacgaagaaggagagagggtacagggtgagttggtgcaggggctctgagcaagcctgatgagctccagcaggttaactgggagcggagccacgttccggcttctctgaatctttgctttcctcctcccctcgctggccccaccctttatttactgcccgccccaaccccactgatcaagatactcgcgcgcgcgcgcgcac

SEQ ID NO: 57577 - DNA, 101 bp, Homo sapiens
  chr21:31312496-31312597
  hyper
tttctctccctcaactttgcgctctgctgctgggaagtcgatcgagtgttgcattctcaagacagatcaaatctaaactattggtccgagcagagaaagcc

SEQ ID NO: 57578 - DNA, 443 bp, Homo sapiens
  chr21:32716056-32716499
  hyper
cagccccgggcaggacgcatcctgggtgggtgacgtgatcccgcagtctcctccccgaccccatatcccatacaatgatcctcgcttacagaagtcaagggggaaagatgacgctttcaaagcccgaatctctttaccctggagccagaaccagcgtcgccgccgtcccctgcagctcagccggcaacgcgcgccgagcctcggggcgcagcttggagacgcgcttgctcgttctgggaaggggcacgggacgcacggttccccggccccagctgcacagctcagctcggggctctcacctatcctcgttcagagccacattcggctgcctcccctgaccacccgacacaaagagattcgccggtggaaagaatcgatttcaaaattcaagctcaccgctgctcaacaaggcgcgcacgtttctccccgtctggcttcacatg

SEQ ID NO: 57579 - DNA, 89 bp, Homo sapiens; identical to SEQ ID NO: 13211
  chr21:32931770-32931859
  hyper

SEQ ID NO: 57580 - DNA, 179 bp, Homo sapiens
  chr21:32932325-32932504
  hyper
caaggttgtggagaacgcggaaacggagacgctggcggtacagcctcgagcgaaacctttccctacacgaggccggagcttcctcctctcctgaagagctctagacttccccatttacaacaaaggctgggatgtatgttccttacaccttgattccatacacacgtgttcgccccggg

SEQ ID NO: 57581 - DNA, 30 bp, Homo sapiens
  chr21:33031825-33031855
  hyper
gggggagtctccggcgcacgcggccccttg

SEQ ID NO: 57582 - DNA, 46 bp, Homo sapiens; identical to SEQ ID NO: 13213
  chr21:33058220-33058266
  hyper

SEQ ID NO: 57583 - DNA, 1814 bp, Homo sapiens
  chr21:33244727-33246541
  hyper
cagaacaaaagcatcgaagagaggcgagcgccggtccacctcctgcaatcacaggcatcatttcaatggaaggcaaagaaggtgtaagctacaagcagaggcagcaaacgccctggttcctacattgctgctgctactattactgctgtggctgcgcctcctccaacacagccaaccaggctgcgtgcgagcccgggcagacgcctggccgcctccccaccctttcttccagccatccatctatccttccacccccggtccagggggccctactgtgtggcggactcagggccgggcacgcaacccgactcacagtccacggagttcgagagccttcccccttccccccgccccgggtgggtgcggccagtgggggatttcaccgccgaaaggtccagaaaacccaagcccagaatccgggcaagaggcgcagccggaggcggcccgacctgggcggcccgggagcgcgcgcctccgaggccgcgcaggttctccctgtctggcgctcaggtggcttctccgtccactccgccgctcccctccccgggccctcccctctccagcgagggtcgagtttgactgtggcgcgcggggaaggaggggctactagggatttgaaagtgcacgggctgcggagtggagctcgcatctgttcccgccgcccgcgagcggattaaatttctgcaaattcaaactgaatggggctttcttctgctgccttccagagggcgccggcagcccgccgcgcgcttctctccggcgggagcggccgcccagcgcacggctaggagcgatcgcgggagcccgacccaagcccgtgcgggccagacggcggcggcgaggcggaggctgcggaggcacccgggctcccggacccaggcacccggaccccgggacccaggcgccgccggaccgcgccccaccccgcgcgcccgagcagggcgactgtcattagcttcctggacgggacccggggcgggatcctggtgtcctgaaaggggcccgggcgaccctaagaggaagaacttttgggggcggggtccccggtcccgcgtcccctgggcagccgctattgtctacgcgcctcgctgggcggcgcggggggcgtgatcgcggcggccccgggctctgggtgcggagacccaggcggggctgggcccagggcggcggcgggagaagccggggaagccgaagagcctggggaggaggagctgcgagcgcgggagacgagcaggagccgcgcgggccgcggcgagcgcgatgccggcggcggcgggggacgggctcctgggggagccggcggcgcctgggggcggcggcggcgcggaggacgcggccaggcccgcggcggcctgcgagggaagtttcctgcctgcctgggtgagcggcgtgccccgcgagcggctccgcgacttccagcaccacaagcgcgtgggcaactacctcatcggcagcaggaagctgggcgagggctcctttgccaaggtgcgcgaggggctgcacgtgctgaccggggagaaggtgagtctcccgggcgccgtggggctggggcacaggggcgggagtcggcggccaggaccccgcggggagcactgcactgggagtcccagtgtgcagtcccgggccaagcgccttccccctccgcccggctttcctgttgggttaaaacgcgcgctcagcatctcgcagcctttcccgaaggcggcctgcggtccgctgcccgggggttgggggcttgggaggggacggccttgccccgggaagcgtcccgcgcggccgttctgctcgtggaagggcgccgcctggcgacacta

SEQ ID NO: 57584 - DNA, 1311 bp, Homo sapiens; identical to SEQ ID NO: 13215
  chr21:33784063-33785374
  hyper

SEQ ID NO: 57585 - DNA, 30 bp, Homo sapiens
  chr21:33984759-33984789
  hyper
cagagttaaagagccgccagctcaagctca

SEQ ID NO: 57586 - DNA, 52 bp, Homo sapiens; identical to SEQ ID NO: 13216
  chr21:34100891-34100943
  hyper

SEQ ID NO: 57587 - DNA, 30 bp, Homo sapiens; identical to SEQ ID NO: 13217
  chr21:34304880-34304910
  hyper

SEQ ID NO: 57588 - DNA, 14 bp, Homo sapiens
  chr21:34392153-34392167
  hyper
actcaaaaccgagt

SEQ ID NO: 57589 - DNA, 198 bp, Homo sapiens
  chr21:34392205-34392403
  hyper
cgttgcgggctgaacccatccggcacaaactgcgggccactggcccctcacacctgggagtttgcggcgctggcctgcagcccggggcccacgtggcggaagctttcccgggcgcgcgctgcgcagccccgcggggccggggagacaccgctcgggagtcctccgctcggctgcagaatctttatcagctgcacttta

SEQ ID NO: 57590 - DNA, 638 bp, Homo sapiens
  chr21:34392436-34393074
  hyper
cgccctatccaggtgcgccgccgcaccatggatcaccgcgcccggtcccgcagtcccgccatggcctggggaggcccgaagcccggggacagtggccggcccatctccggctccgcggacccccggctcaggcgggagggcaggcgggtccctgcaggcccccagggagcccgggagcctctctctggcgtcattcagtcccggggcaacctgaagcgcggtagatattggagagggggcgtctgttggggggacctggcgtcattactgatggctagcagggaggagggaacgggttgtcacctcggcctcataaggccgtgagtgagtagtccagggcctcttcaggcatttttgaaactggattaactaggggggaaattgtagcactgaagccaccgtgactgtcttttgcgctgtgtggaaactccggtaaaactctttgggcaacagtcttatcaccagctcttcaacgtgtgcagcccttctggtcctgtccctgttctgggccccaggaatgcaaagcaggtccaggcactgtgaagaccctggcggtggaggaagaggcttcccggctgtggaggaagccagacccttacaacacaagacgagaaccagacctgcgtgggggagctctg

SEQ ID NO: 57591 - DNA, 601 bp, Homo sapiens
  chr21:34395049-34395650
  hyper
agcacatgtttggtagccaaacgctgtcattcacgaccaggagcgatggctgcaatgcctttttctttgctttgctttccggtgccgggagccttgcctcccgccgccacccctggtcagctctgcgcaagaacgtcgttctgtttggcagccaggccgagacgcagcctgaatgtgagcaggaactcggagaagggaagggagagaatcagaaagaaggcccgggagggacccgggaagcagtgggaggtctgcgccctggagccccgcgagagcccgccggtttggcacgggctcctcccgggccgcccggcggtccaacaaaggccggccccgacacgcacccggtcttttgtgggagagaaacacaaagaagagggaaaaacacggaggaggccaacagcaccaggacgcgggggccaaccaggaactcccggagccggggcccattagcctctgcaaatgagcactccattccccaggaaggggccccagctgcgcgcgctggtgggaaccgcagtgcctgggacccgcccaggtcgcccaccccgggcgccgggcgcaggacccggacaagtcctggggacgcctccaggacgca

SEQ ID NO: 57592 - DNA, 116 bp, Homo sapiens
  chr21:34395952-34396068
  hyper
agccactggaccgagcgcgcaaagaacctgagaccgcttgctctcaccgccgcaagtcggtcgcaggacagacaccagtgggcagcaacaaaaaaagaaaccgggttccgggacac

SEQ ID NO: 57593 - DNA, 30 bp, Homo sapiens
  chr21:34397639-34397669
  hyper
gcgccaaatgcccacgtgttgatgaaacca

SEQ ID NO: 57594 - DNA, 210 bp, Homo sapiens; identical to SEQ ID NO: 13218
  chr21:34398070-34398280
  hyper

SEQ ID NO: 57595 - DNA, 30 bp, Homo sapiens; identical to SEQ ID NO: 13219
  chr21:34398517-34398547
  hyper

SEQ ID NO: 57596 - DNA, 30 bp, Homo sapiens; identical to SEQ ID NO: 13220
  chr21:34398834-34398864
  hyper

SEQ ID NO: 57597 - DNA, 30 bp, Homo sapiens; identical to SEQ ID NO: 13221
  chr21:34400057-34400087
  hyper

SEQ ID NO: 57598 - DNA, 30 bp, Homo sapiens
  chr21:34400644-34400674
  hyper
caacagcccgaccgcgccctccagggtcgt

SEQ ID NO: 57599 - DNA, 65 bp, Homo sapiens; identical to SEQ ID NO: 13222
  chr21:34442191-34442256
  hyper

SEQ ID NO: 57600 - DNA, 1768 bp, Homo sapiens; identical to SEQ ID NO: 13223
  chr21:34442594-34444362
  hyper

SEQ ID NO: 57601 - DNA, 42 bp, Homo sapiens
  chr21:34444444-34444486
  hyper
cgggccgggcccttgaccagcgcggcccgcaggtcttccttc

SEQ ID NO: 57602 - DNA, 151 bp, Homo sapiens
  chr21:34482071-34482222
  hyper
tgcgctccggcgcccgcaggtcctcgctcccggcttctgcacctcccgctccgggacatctggctgagccgcgcctccctctccccgcagcctccgccggccccgcctcccctcaccacccttcccttgtttggggcggtaaggtcagaag

SEQ ID NO: 57603 - DNA, 298 bp, Homo sapiens; identical to SEQ ID NO: 13226
  chr21:34602439-34602737
  hyper

SEQ ID NO: 57604 - DNA, 627 bp, Homo sapiens
  chr21:34602763-34603390
  hyper
cgtcgcccctgctgggagtccgctttcgttgcacccctccgcgtcccaccccaccccaccaaggatgcccaggataccgggcatttgccactgcaagatgtgagtcgttgctaagtttgagggtcacattcctccaggtccaccccgccttgcaaaaccggctcaccagctgggtgctcaggttcgggatctccagcccgcccccttgaggtcccctgggattagcccccctcgacctgcgtcagggtcacagactgcagccggggctggagcggcctacacccctccggatccgctgcgtggaggcaggagggggaaggggcgaggggacgtggccgcggagacagaagggtgcaccctcccagggtcggagaggggagatactgggaagatactccgcgaatatggagaggcgatcggcacttgcatttcaaccctgagcaaatcaatccgttacacgcagtagcgagttgactccatcagcccgtttatttggttagcgatggttatattgactctgagtattcccacctcctttcttttaacatttttttttttatttccttgttttgtttagcaagaagtcttagaaacgaatatagcatgcttgggcgttgattcagtggt

SEQ ID NO: 57605 - DNA, 30 bp, Homo sapiens; identical to SEQ ID NO: 13228
  chr21:34638520-34638550
  hyper

SEQ ID NO: 57606 - DNA, 30 bp, Homo sapiens
  chr21:34776085-34776115
  hyper
caggtgggaacctgcgggtgccccaggtgg

SEQ ID NO: 57607 - DNA, 31 bp, Homo sapiens; identical to SEQ ID NO: 13229
  chr21:34776440-34776471
  hyper

SEQ ID NO: 57608 - DNA, 30 bp, Homo sapiens
  chr21:34914231-34914261
  hyper
caacccccacccaccgcatttacaaacaac

SEQ ID NO: 57609 - DNA, 30 bp, Homo sapiens
  chr21:34914533-34914563
  hyper
gtctgattccctcccgccctgggcgctgcc

SEQ ID NO: 57610 - DNA, 30 bp, Homo sapiens; identical to SEQ ID NO: 13230
  chr21:34915083-34915113
  hyper

SEQ ID NO: 57611 - DNA, 30 bp, Homo sapiens
  chr21:34915371-34915401
  hyper
aggagttgagagaacggagcggacgccatg

SEQ ID NO: 57612 - DNA, 30 bp, Homo sapiens; identical to SEQ ID NO: 13231
  chr21:34915742-34915772
  hyper

SEQ ID NO: 57613 - DNA, 58 bp, Homo sapiens; identical to SEQ ID NO: 13232
  chr21:35013431-35013489
  hyper

SEQ ID NO: 57614 - DNA, 183 bp, Homo sapiens
  chr21:35014456-35014639
  hyper
atctccataaaccacgataggcaacctcagaccataaatctcctgttacgcctacatggggaggagggggagagtgctaatcctgcccccacacagcccctgctgattggctcattcggcttgtcactctgttgtcttacatttctttggctcaccctctttgggttcgcacggtgggcgggg

SEQ ID NO: 57615 - DNA, 30 bp, Homo sapiens
  chr21:35287858-35287888
  hyper
tcccgggggacaaacgctgggtcgtcctga

SEQ ID NO: 57616 - DNA, 30 bp, Homo sapiens
  chr21:35288171-35288201
  hyper
gtagggcgtcaggccgcaggcgcagagacc

SEQ ID NO: 57617 - DNA, 30 bp, Homo sapiens; identical to SEQ ID NO: 13233
  chr21:35747816-35747846
  hyper

SEQ ID NO: 57618 - DNA, 248 bp, Homo sapiens
  chr21:35986731-35986979
  hyper
gagagcgcagggggcggcggcgctgccccaccttggggagcgaattcacccccctagtcgcaccagcctgggcgcacacgggggccggggcgagcctgtgggactctgcagtgagctccgcgcgccccgggggtgctaggggaccgggaccctcggggcgccgtccccacgccccagccctgacgggtccgcggccgagcagcccgggggacgtcgctgcctccccgccccgcgcgcggccgggactg

SEQ ID NO: 57619 - DNA, 30 bp, Homo sapiens
  chr21:35987694-35987724
  hyper
ccgaagcctcagggcggccatgttggttag

SEQ ID NO: 57620 - DNA, 95 bp, Homo sapiens
  chr21:36041933-36042028
  hyper
actgaggccgaggagggagccccggagggtgccgaggtgccccaaggaggggaggagacaagcggcgcgcagcaggtggagggggcgagcccggg

SEQ ID NO: 57621 - DNA, 534 bp, Homo sapiens
  chr21:36042091-36042625
  hyper
cgagaggcaggaggaggcggagcagaggcctgaggtcccggaaggtagcgcgtccggggaggcgggggacagcgtagacgcggagggcccgctgggggacaacatagaagcggagggcccggcgggcgacagcgtagaggcggagggccgggtgggggacagcgtagacgcggaaggtccggcgggggacagcgtagacgcggagggcccgctgggggacaacatacaagccgagggcccggcgggggacagcgtagacgcggagggccgggtgggggacagcgtagacgcggaaggtccggcgggggacagcgtagacgcggagggccgggtgggggacagcgtagaggcgggggacccggcgggggacggcgtagaagcgggggtcccggcgggggacagcgtagaagccgaaggcccggcgggggacagcatggacgccgagggtccggcaggaagggcgcgccgggtctcgggtgagccgcagcaatcgggggacggcagcctctcgccccaggccgaggcaattgaggt

SEQ ID NO: 57622 - DNA, 81 bp, Homo sapiens
  chr21:36043125-36043206
  hyper
atcccagagggacgcgcagggaggaacccttggtggtatcctgattgtcatcaggcgcttccatgcgcgggcggtaggcgg

SEQ ID NO: 57623 - DNA, 1782 bp, Homo sapiens; identical to SEQ ID NO: 13236
  chr21:36160096-36161878
  hyper

SEQ ID NO: 57624 - DNA, 3167 bp, Homo sapiens
  chr21:36161931-36165098
  hyper
gtgagacctatcgccaaaacaactacagtttgattttttttgaaacaattaaatactatatatgctggtaagagtctgtgaaactctaaatgaccaatccagtgagcctacaatagtgacaagccccctccacacatggctttgagagtaaaggttcaatgtaaaagattatctaatcagagcatgaggctggttttgagttggaatatcttcagttaacagaattaaactgaaaaacataattttttccttcatttttctccagcatttttgcaggtcagacatggtaacatgtgctgaaaaaaaacatttacgtttaatttgggggaaatgggctaatggtgcttttcagaaattaaatttttacatttgctgacattttatggtaatttagctgcaaaaatgtaatacggaataatatatgaaactgagttgtggagggaatcctgtcaaaaatgaaagtgaatatattctgagtttgtccgagatctgctatagctcttctctagataagaacgacctgacaacataagctgctttactctttaactcttaccaaagtgctactgcatgtgtgtaaaacaaataatcaatatatatataagaaaactcaaaaacaagttgttttaaataagtccagctgtttttgctgcctgcagccaaagatttgcctaatttgaatgcttaaatttataaaataaaaatcaaacactgttctgaagtcctgctttcaaatactcttcagagttgacctgaaatcgtttcaacgaattttaagaggtacgttaaataaccaccagatcatttggagcacacatgtgtcaaaatcagcagttagtatttatgagttgtacaacaactgcattctgaccaaatcctccaataaaaatagtgccataaaatttacagcgacattggatacctttgaattgtagccacggacagtagtgacatgaatctttcctgtcacactggtgcacaggtaaaagcccatataccccatagggtagggtctcagcctggtgaaagcaacacaaagatgttgttgagtgagcagcacaggacagggggtctcgcacaggtgggaccatgttttcccacttgtctccactgaggcacacagaggcaaattgactcctcgaggcctgcttctggtgggcccttaaattgctataatcgtaacccctaaattcattgatttggttcctatgtaaatgtggctcccctacacagtttactttggctgtgttctgttacacagcatctgtgaaattatcagatgaccttggggtgagcaaatccctgggcagaaatcaaatcctctccaaagatgtaattattggcacctgcctcaaccctctggaactagattgaccttctctgttttaaggaggaagttagatatgagacccttgttgagcctggcagaaaattccatacttctgatccttggagtgaccctcagtgtctaaaaatcctattaaaaacgttgctgcgtgagctactcacttgtttgattaacatgaaagggagtttaatgtaaacaatacttctggataaccaagcgatcacattactcattctttttttctagccttcttcaatgtgatacatttaactttggctactatcaagaacaaaagaaaatgtagtacttgatatttttcttaatataagtacatttaaataattaaaaaattatcaacacataaatgtctgaacatcaagatacataaatatctggggattccttgtgggaatacagtagttaaaaatgacccaaagctgtagctgtttctcaaaaaaacaaaacaaaacaaaaaaaaacaactacccaaaagtccaaaagaaaagttaaataaaacttaaagaaaagggaatcatatttctttccatggtcaaagcaagaaagaagcaagctcaatttatatatatttatataaacgtatataaaaataaaaaccacccaaatgcaaatacgcattttgcaattgataaggtgcggaaaaattaaaaataagaattagatgccaaacagggcgagttgcatccctcctctccccccaccccaaccaaaattccacactctttggaataaacaacttggttaaaaagttaagtcaagggtataaaatctttctttttattcacagcattgctaaatcagaagcattcacagtttccctccgggaatcttcctgtttgctttccagcgcgtcccctgggtgctggggccggcggacaccctcgaggtgcgtcgcctcggacacctccgcgagggccggggcgccagcagacggcggcggcgtgggcttctgggcgcaggaggctgcgcgggcctgacctacagcgagatcctggccgtcgggcgccctcggccccaggacggtggccgggcccagggcccgggatcccggcgggcttgtcgcgaacaggaggcccgcgcgcccggaggcgaaggcggcggcccgcggggcccagccgggccaggcctggcgcctcagtagggcctccacacggcctcctccaggcgcgcggagggcgccatgttggtgggggagttgctgtggctgccctcggcctccaccacgtcgctctggttcgggaggctggggttgagcagcgcggagccggtggaggcgttggtgcagggcggcaggatgcgcggcggcgagcgctcgccgcccaccatggagaactggtaggagccggccgaggcgccgtagtacaggtggtaggagggcgagctggcttggaacgggcctccctgcgcttgcgacgagccggggtagggcggcggcaggtaggtgtggtagcgcgtggccgagcccatggccgacatgccgatgccgatgcccgaggtgaccggcgtcggggagtaggtgaaggcgcctggatagtgcatgcgggggtcggagatggagggcagcgcggggaactggcgcgggtcgctgaacgctgtcaggtcgggtgccgctgcagggcgggcaagagaacggagcggaagtgagtaggaggttgcggaggccacagctcttccctctgccccagggggctacccaggatgataccgcctaggaggatgggaagccacccaggatgctactgctggggaggacggggaccacccgggatgctactcccaagaggacgaggattacccagga

SEQ ID NO: 57625 - DNA, 163 bp, Homo sapiens; identical to SEQ ID NO: 13238
  chr21:36171596-36171759
  hyper

SEQ ID NO: 57626 - DNA, 204 bp, Homo sapiens; identical to SEQ ID NO: 13239
  chr21:36206694-36206898
  hyper

SEQ ID NO: 57627 - DNA, 106 bp, Homo sapiens; identical to SEQ ID NO: 13240
  chr21:36231769-36231875
  hyper

SEQ ID NO: 57628 - DNA, 180 bp, Homo sapiens; identical to SEQ ID NO: 13241
  chr21:36252844-36253024
  hyper

SEQ ID NO: 57629 - DNA, 267 bp, Homo sapiens; identical to SEQ ID NO: 13242
  chr21:36259126-36259393
  hyper

SEQ ID NO: 57630 - DNA, 170 bp, Homo sapiens; identical to SEQ ID NO: 13243
  chr21:36260354-36260524
  hyper

SEQ ID NO: 57631 - DNA, 396 bp, Homo sapiens
  chr21:36261484-36261880
  hyper
ggccgcccagggccaggcctccgcttccagggcgggggtgcgatttggccgcggggcccgggggagccactccgcgctcctgcaccgtccggctggcagctgcggcgaagcggcgctgattccttgcatgaggccggacggcgtccgcgcgtgccgtttgctctcagcgtcttcccttgggtcggtttctgtaatgggtgttttttaccgctgcgcccgggccgcggctcgatccctccgcgcgtctcacttgctgcgtgcgtcagcggccagcgaagagtttcctagtcaggaaagaccccaagaacgcgcggctggaaggaaagttgaaagcagccacgcggcttgctcccgggccttgtagcgccggcacccgcagcagccggacagcctgcc

SEQ ID NO: 57632 - DNA, 40 bp, Homo sapiens; identical to SEQ ID NO: 13244
  chr21:36265220-36265260
  hyper

SEQ ID NO: 57633 - DNA, 30 bp, Homo sapiens
  chr21:36357845-36357875
  hyper
aaacactctcagggcaaccacacaccaatc

SEQ ID NO: 57634 - DNA, 118 bp, Homo sapiens; identical to SEQ ID NO: 13245
  chr21:36421137-36421255
  hyper

SEQ ID NO: 57635 - DNA, 132 bp, Homo sapiens; identical to SEQ ID NO: 13246
  chr21:36421463-36421595
  hyper

SEQ ID NO: 57636 - DNA, 187 bp, Homo sapiens
  chr21:37432610-37432797
  hyper
ctggaggcccgacccggaagtcctactagctcacctaggcgccggcggccgcttccaagatggaggctgcagtgggcgggcccaaggcacgtggaaataccaaacagccccagatgaaggcaagttaaaggaaccggccaaaactgcagagggagaggctgaaggctgtcgcgcctgcctggtgtcc

SEQ ID NO: 57637 - DNA, 374 bp, Homo sapiens
  chr21:37528251-37528625
  hyper
gcaggggtcccaagcccgccgcgccccctgcgccccaaacgtgtgtggagggcttggacgtggtccagagggaaaagatggggtgaaccaggtgccgcgcacccttcgaggagcccccgcttctccgtttctgtgagtgactccaaagcacctccgagggccgacacacgcgcggacgaccttgggcgggcactgaccaatgtccccttccactcggttgtgtcgggggtccccaggtgaggcgcgaacgccgccccgctcacctgtacgaggcctttcccggagcagcccggctacgaagcgacacccatggcggagaagctaaggaagactcccgctccctcacaccgcggctgaggcgactgaaccgcccc

SEQ ID NO: 57638 - DNA, 140 bp, Homo sapiens
  chr21:37692216-37692356
  hyper
ggtataccgcatctcgcgccaggcttcaaactctagatccccgagtctcgagctccagctgggtgtcgagacgggtacgggccggccgcgcctcgcgcatgcgccctaggcccgcagggccccgcgctggaagctcagct

SEQ ID NO: 57639 - DNA, 242 bp, Homo sapiens
  chr21:37757665-37757907
  hyper
gcgggggcggggcctgcggcgcgcgggaagcggcgcgcgctgcgcgggaggtgacggtgcctctgactgtccgggtccctccaggtacggcttccctggcccgggcagctccgcggctcttttggtcgcgtcggtccgggccagaggccctcgccgagggcgggcccctgggccccgggatagctccggagcggcgcgcgttggggcggcggggccccgtccacccccggccccgcgcggcc

SEQ ID NO: 57640 - DNA, 30 bp, Homo sapiens
  chr21:38063857-38063887
  hyper
attcaagtacttttcgcaggtgtatctctc

SEQ ID NO: 57641 - DNA, 1233 bp, Homo sapiens
  chr21:38064289-38065522
  hyper
tgtgtcactgaacggcgctcctcccacggcgacacctccgtgctctttttgcttgtatttattcaaaaattagatttgtcaataacgcagggcctggcaaataggaggacctctccaaaattaaatgcaagattgaacataggtctctcacatcataataaagcggtttaatttggcttccaccgggggagcggaatagcacttgcccagcccctttgagccctgcgcacactcgcaccaccgccgcctctcccacaaagagaaaagccacgagaagggtcccgactgtgcaaatctgtgtgccctcccgaggaaggcgcccgagggctcactctgcctggttcaaaagcttgtgggagagaagcacccaaaagaattccgttgtcaggttaaagtctttgtctatactcgcaggatgggaaggacgatggtgcaatcaccgagattattttgttttcgtcctctaaaaaatgaagaggggactggagtcgggaccaaaattattggcagaccgcacggtttgcagtcaccctgaagttaccagcagccgatgctgtgtccagggaaaatattcttgagctggaaaacgtgctaatttaaagtctttcgtttcacacgaaaatgtgctgcactctttgactgctcaggaatttgctctagcacctagaaggaattctggcttagggcaggggcgagggacagtggagggcgttggaccttcttccgcaatcgggaccactccaggtctccccggagaaggctgagtctccagcgcgtggattcagatcaggactctgtctaagtaggcgagagctggggataccgctgggggctttggcgaagctaagaaagcactggcttcttattctcaccagacatctcaacacccacgtgcgctgggtcccgcagtctctcgcccgccccacgcgggtcccagccctggtccttactccccgcgcgggaagaatctggggagggtgggggcggagaggcggctgatcggagagtgggagggaggatgggagatgggcagaggctgcccgcatcagggccaggacagacgtccgcgcggccccaggcactcacttgagtgtcacgcaagtcaccccaacaccgcacaagacagtggcggggtgcgcaccgaggcccctacctggggggtgtgcgcgcactgaacgaccccttctccaggtgcgcgagccgctccggcggccgtgcacactgcgccccctt

SEQ ID NO: 57642 - DNA, 331 bp, Homo sapiens; identical to SEQ ID NO: 13251
  chr21:38065799-38066130
  hyper

SEQ ID NO: 57643 - DNA, 30 bp, Homo sapiens
  chr21:38067726-38067756
  hyper
gaataaattatttccgacttggtctggata

SEQ ID NO: 57644 - DNA, 30 bp, Homo sapiens
  chr21:38069401-38069431
  hyper
tagccatgtttctgcgatctgggtaatccc

SEQ ID NO: 57645 - DNA, 30 bp, Homo sapiens; identical to SEQ ID NO: 13252
  chr21:38069935-38069965
  hyper

SEQ ID NO: 57646 - DNA, 2017 bp, Homo sapiens
  chr21:38070509-38072526
  hyper
gaatgcccagtggccgcgtctgcaacggagtcttctttctccaattgccttctgccccatcaccatgggccccacctgcgccacctgcgcccaccctgtgaccctggctcagcgaccttggcccttaatcgcccaacgccgattcctcaaaattccggctgcgctgaatcgggctgcttttgccgccgccccggcagttgggccctgtttccgccggcgccctgggagaggcctcaccactcggctgggctccctggcccctcccttcccctggcctgagcgcccctgcggcctcccgctcctcctgagaaggcgacaatctctttgcaccttagtgtttcgaggacagaaagggcagaagggtcacttcggagccactcgcgccgttttcacgtgtgtgtgtaatggggggaggggggctcccggctttccccttttcagctcttggacctgcaacaccgggagggcgaggacgcgggaccagcgcaccctcggaaggctcgatcctccccggcagggcgcctggccaacgagtcgcgccgcctcctctcggccgcgcctgctggtgaccttcccgagagccacaggggcggcctcggcacccctccttccctcgccctccctgccgcccatcctagctccggggtccggcgaccggcgctcaggagcgggtccccgcggcgcgccgtgtgcactcaccgcgacttccccgaacccgggagcgcgcgggtctctcccgggagagtccctggaggcagcgacgcggaggcgcgcctgtgactccagggccgcggcggggtcggaggcaagattcgccgcccccgcccccgccgcggtccctcccccctcccgctcccccctccgggacccaggcggccagtgctccgcccgaaggcgggtctgccataaacaaacgcggctcggccgcacgtggacagcggaggtgctgcgcctagccacacatcgcgggctccggcgctgcgtctccaggcacagggagccgccaggaagggcaggagagcgcgcccgggccagggcccggccccagccgcctgcgactcgctcccctccgctgggctcccgctccatggctccgcggccaccgccgcccctgtcgccctccggtccggaggggccttgccgcagccggttcgagcactcgacgaaggagtaagcagcgcctccgcctccgcgccggccgcccccaccccccaggaaggccgaggcaggagaggcaggagggaggaaacaggagcgagcaggaacggggctccggttgctgcaggacggtccagcccggaggaggctgcgctccgggcagcggcgggcggcgccgccgggttgctcggagctcaggcccggcggctgcggggaggcgtctcggaaccccgggaggccccccgcacctgcccgcggcccactccgcggactcacctggctcccggctcccccttccccatccccgccgccgcagcccgagcggggctccgcgggcctggagcacggccgggtctaatatgcccggagccgaggcgcgatgaaggagaagtccaagaatgcggccaagaccaggagggagaaggaaaatggcgagttttacgagcttgccaagctgctcccgctgccgtcggccatcacttcgcagctggacaaagcgtccatcatccgcctcaccacgagctacctgaagatgcgcgccgtcttccccgaaggtgaggcctcaggtgggcggccggggacgctggggagcccggcggccccggcccaggcgggaagcgcaagccagcccgcccagaggggttgccgcggcctggcgtccagagctggggcgtctgagggaggttgcgtgagggtcttcggcttcggcgctggcttggggcgaggggccagggccttggcggcccaggcgaccaaaccctctcctggtccagggctgggtgagggcgaattacgaattgttccaggggcaggcagtcccccagcccgcacggccagcgagttctttctggttttgttc

SEQ ID NO: 57647 - DNA, 270 bp, Homo sapiens; identical to SEQ ID NO: 13254
  chr21:38072899-38073169
  hyper

SEQ ID NO: 57648 - DNA, 286 bp, Homo sapiens; identical to SEQ ID NO: 13255
  chr21:38073239-38073525
  hyper

SEQ ID NO: 57649 - DNA, 340 bp, Homo sapiens; identical to SEQ ID NO: 13256
  chr21:38073615-38073955
  hyper

SEQ ID NO: 57650 - DNA, 14 bp, Homo sapiens
  chr21:38076694-38076708
  hyper
tacaacgctttccc

SEQ ID NO: 57651 - DNA, 25 bp, Homo sapiens
  chr21:38077206-38077231
  hyper
ggggagaacacgagggctccgacgc

SEQ ID NO: 57652 - DNA, 71 bp, Homo sapiens; identical to SEQ ID NO: 13257
  chr21:38077617-38077688
  hyper

SEQ ID NO: 57653 - DNA, 30 bp, Homo sapiens
  chr21:38078416-38078446
  hyper
cccaggaccagcttcggaagaggagggatc

SEQ ID NO: 57654 - DNA, 30 bp, Homo sapiens
  chr21:38078752-38078782
  hyper
tgagtgctgggagccgctaaccccgaggcg

SEQ ID NO: 57655 - DNA, 54 bp, Homo sapiens
  chr21:38080008-38080062
  hyper
tgcccagggcgttcccggggaggctgagagacccagggtgctctgggtgactgc

SEQ ID NO: 57656 - DNA, 212 bp, Homo sapiens
  chr21:38080174-38080386
  hyper
cgcgctgcccgggggctcctgcctttggttcagtgctcgcggcaccaccgcactcaggacggcagtggggggctggggctggggctgggcctggcccagcgtgggttggggcgggggacgcgccagcagcgcccgcagctcgctccgcaggggtcgcagccaggggtcgggagctaggctcgtgggccgggagacgccgggcgcgttgtcct

SEQ ID NO: 57657 - DNA, 642 bp, Homo sapiens
  chr21:38080550-38081192
  hyper
ggctttcctgcttcctcggactgtgcaggggaagcctggggtctcgcggggcgcagcagtcaggtcgagggtgcagcaggaggggagtcctgacgggcaggtccctctttcccctggtgcgcaacactggttggtagcttttgcggaggtggtgaagaagggcaggaggcctgttgagcggaggagtccggggatccctaattatgtgacaggagaccctttccagttcggcctgtggcccatccctctctcaccgccggcagattggagtctgctctcggggagcccccaggtaaacccctcacagggagaaggtttcggattggaaggaggaccgcgctcgtggggcgcctgtgagagctgggaagcccaaggggtagcgtgtagggggttttttatgcgggaggagctgcctcctgggcggcggggactttctgtctcagcctgtctgcctttgggaaaacaaggagttgccggagaagcagggaaagaaaggagggagggaaggagggtccttgggggaatatttgcgggtcaaatcgatatccccgtttggccacgagaatggcgatttcaaagcagattagattactttgtggcatttcaaataaaacggcaatttcagggccatgagcacgtggg

SEQ ID NO: 57658 - DNA, 81 bp, Homo sapiens
  chr21:38081665-38081746
  hyper
gggggctggggatggggtggtccccactgcggagggatggacgcttagcatgtcggatgcggcctgcggccaaccctaccc

SEQ ID NO: 57659 - DNA, 30 bp, Homo sapiens; identical to SEQ ID NO: 13259
  chr21:38082598-38082628
  hyper

SEQ ID NO: 57660 - DNA, 828 bp, Homo sapiens
  chr21:38119709-38120537
  hyper
gatatgctgcattaacgtgtattacttaacaggcattccacctgtttccctgctttgtaacgcggctcctggaacatttcaggtcgcgtcctgagattggacagcacggcctagactaaggcgggggagggcgacagcgaccccgcgggtgcagcgcgtgggcggccgaggggtggtggctgcgcccggggcttgggggtggggtggctgcggccgcgccccttgctgccctctaacgtgtcgcctgtccccgcagcgcccgccgccgccgtgcgcaggttcggcgaggacaccgcgcccccgagcttcccgagctgcggccactaccgcgaggagcccgcgctgggcccggccaaagccgcccgccaggccgcccgggacggggcgcggctggcgctggcccgcgcggcacccgagtgctgcgcgcccccgacccccgaggccccgggcgcgccggcgcagctgcccttcgtgctgctcaactaccaccgcgtgctggcccggcgcggaccgctggggggcgccgcacccgccgcctccggcctggcctgcgctcccggcggccccgaggcggcgaccggcgcgctgcggctccggcacccgagccccgccgccacctccccgcccggcgcgcccctgccgcactacctgggcgcctcggtcatcatcaccaacgggaggtgacccgctggccgcccgcgccaggagcctggacccggcctcccggggctgcggcgccaccgagcccggcaaatgcgcacgacctacattaatttatgcagagacagctgtttgaattggaccccgccgccgacttgcggatttcca

SEQ ID NO: 57661 - DNA, 84 bp, Homo sapiens; identical to SEQ ID NO: 13261
  chr21:38120553-38120637
  hyper

SEQ ID NO: 57662 - DNA, 30 bp, Homo sapiens; identical to SEQ ID NO: 13262
  chr21:38338877-38338907
  hyper

SEQ ID NO: 57663 - DNA, 199 bp, Homo sapiens
  chr21:38362191-38362390
  hyper
gtcccgcagggaagaacgccagcggcgcgcggaggccgcgctgccctgggccgcgaggtccctatggctgctccaccggaagccccgcccccttctggcagctggaggcggctttccggccgtcccggctgcagccccgaggcctcgactcaggagacggctgttccctggcagaggctcgcggtggactgcctgaccc

SEQ ID NO: 57664 - DNA, 22 bp, Homo sapiens
  chr21:38362412-38362434
  hyper
cggcgaacgcccacccctgtcc

SEQ ID NO: 57665 - DNA, 1005 bp, Homo sapiens
  chr21:38378576-38379581
  hyper
gaaacgcccctagcccgcgggcctcgctttcctctcccgggttcctgggtcacttcccgctgtctccagcccgagctcgtggccccaatccctggtacctccatcctctggtcaccccttctctggtgccccctccccgacttttctttgtcccgtccccacccttgcccgggcctgccggacccccctccttgacacccggcgccacctccttgagcttttctcgtctcctccccatccccggctccctggtcccctcccggaacttctctggtcccctccgctcctccgacccgggcttttccttcgtaccctgcggccccctccgcacccctcacggagctcctcgggtcctgccccctcccagcgcttgcccgcgccgccccgcccccgtttttaaacctggcgcgcgggtaggtgagcgcgttagcccgagtggatctaggcgcgctcgtaggccggcgccgcagcaaggggcgcgggctccgccggcaccatggagcccgaagcggcggccggagcccggaaggcgcgggggcgcggctgtcactgccccggggacgctccctggaggcctccgccaccgcgcgggccggagaggtgagggtggccccgcgccccggtggacgcgctgagaggcgtgcgcggtggcggtgcggggagcgcagcgagcgggaggctggggcgctgctgaacccccgatccccagcggagctccggagctcgacggcgacgccaagcaagctcctgagccggcagccgggttcccgggaggggcgctcagttctccggttccaacgcacagctctgaagtgcggaggcccaggatgtagctggccaggaaaggggccgacgcttccgtgtagaggagatctcagttagccagccggggacactgcagtctcgggctcctaagccagccttgcaaaggcaatctctcaccttgctactttctcggtagccgtttctgttgtccctggattgggggctcggcgttcgctgtcc

SEQ ID NO: 57666 - DNA, 296 bp, Homo sapiens
  chr21:38382167-38382463
  hyper
gggggctgtagagcccgccaatcctcacccctagcccggagcccgctctttgcagagcccagctggttgcgcagagcgaccagcgccagtctgtgctctggtactgtgcaccgccctgggttccctgcagtccaccgacgagagctgcccagcgcagggaaggaacgcttcttgctcaacagcgccctcgcccgacaaagcaggacaattccccagctcccaagccctcttctgtatttctcaaaaatgccattggctggagtggcggtgaagaggactaacgcctggtgacctgt

SEQ ID NO: 57667 - DNA, 30 bp, Homo sapiens
  chr21:38445369-38445399
  hyper
aggcctaggcgcgacggcaacccccaccct

SEQ ID NO: 57668 - DNA, 30 bp, Homo sapiens
  chr21:38445776-38445806
  hyper
agtgtgggtgtgtgcgcgtctcctcgcgtc

SEQ ID NO: 57669 - DNA, 945 bp, Homo sapiens
  chr21:38592843-38593788
  hyper
acagttccctcctcacagggtcgctataacgaggtaacatacagcacttagaagacggcctgacccagaataacactaatgttcacatggctgcgagtctcagaccaaaatcaatagccggtatctactgaaactgcagcaaggcgaaaccacgggaatggcgctccgttgagtagagcaacgcacagcacatcacatcgcatcctccgtagcgggaggctctggcctcaccgcagcggcacttcccggaagagcccaggatattcggggacccgcaccggacaggcggcccaggccccctggcgcccagctggccgccctgttgcagctctcatgccaagacctgcgcctaacggcagggattccggcggtcatcatttattcttggcgctaagctgccgcttctcttttttatcaccacagagtaacgcagaccccaccgtttccttccattctgagccaaccactccagcagccaccggggcgccaggttatgctggggctgcaccacccggcccgaggcttttgaagccacgcctgagcgcggaggatgggcaggatttgccccgtgaactcccgcgcacgcaggctccgcgcgaggcccgggcgcccgagcggcgattccctcccctatcaccagctccagggtggtgccccccggctgtggagcccagaccccggccgtccagcagcgtatagacgagcccatgtctgcgatgtaactgcaccgcgctggggatccacctcccgccagggtgagggcgccgtcctccagcgtatgctaggcaggcgcgccccgccctcctggtcacgtgaccacgcctacagccgaagaggatgggaaaatgcggccctgttcctgaacaggaagcggaagcaggaaggaactgagaacaccagcatctgctgccgccctgaatcagcgttagcatgtggaggcaacct

SEQ ID NO: 57670 - DNA, 208 bp, Homo sapiens; identical to SEQ ID NO: 13265
  chr21:38608355-38608563
  hyper

SEQ ID NO: 57671 - DNA, 30 bp, Homo sapiens
  chr21:38639882-38639912
  hyper
tagggacagtcttacgccggaaatgctcct

SEQ ID NO: 57672 - DNA, 373 bp, Homo sapiens
  chr21:38936051-38936424
  hyper
ggggccgcgagccgccggcgtaggccgctccagctggaagaccccaccgctagggttccagggggctgcggacgcttccgaggggcccaaggcgaaagaacgcagcccgcttgtcggccacgtgaccgtccccgtccgcgtccgcagcgaccacgtgactgtgcgtccgcggcgtcgattgactgggagctccctggccacgccctaagcgccagccccgggcttcggggggcggtgctgctgcggttgccatggcgtcttccgagcgcgcaggcgtgggcccagagtagcttttcgggtatttgctaccggctctcggtagggctggtcacctttgcttgctgagcttcgcgccctgcgtcctttggtcccc

SEQ ID NO: 57673 - DNA, 240 bp, Homo sapiens
  chr21:39047605-39047845
  hyper
gagaggaaggaatcaagttggcggggatttttccgcgagtggctgcattggctttaagaaactgcgccgggctgggcagccgacgcaccgctaggtggcgcacgcgctcgctgcgtctttcagggctgcaggtacggtgcgggtttctggtgcgctgaccgcgctggggatgagcaccactgtcatcgcggggaccctcgggctgcgcctctgcccctcggtccccagcacccctgggag

SEQ ID NO: 57674 - DNA, 30 bp, Homo sapiens
  chr21:39286762-39286792
  hyper
gggcgccctctcgagcgtcgccgtcaggga

SEQ ID NO: 57675 - DNA, 452 bp, Homo sapiens
  chr21:39288251-39288703
  hyper
caattcactacacgacggatggcgagggaaggaaatgcaaaaaagaaaaggaaaagaaaaaaactggaatcagatggtcaaatttcacatcagcaccgagaggctgttaggagactccattctgctcgcggctgctccggctccaggtccggcttcccggcgtccgcgggtctccacccctccgcccgcccagcctctccagccaggtgcggccgtctccggactggctccctctggccgagcgcggagagcagggctgggcgctggggccaagggaggggcggaggggcgcgcgtttgggcagggacgggggagggagactgggtggaatgaagtggggaaagataagagtggcagaagaaaaaaaaaatccccggttaggagaaaagtggtggaccacgcagagagacgtcatgaaatccgcagattcaatgaatgctactcaattccag

SEQ ID NO: 57676 - DNA, 435 bp, Homo sapiens; identical to SEQ ID NO: 13268
  chr21:39288790-39289225
  hyper

SEQ ID NO: 57677 - DNA, 35 bp, Homo sapiens
  chr21:40032285-40032320
  hyper
agccgtccctcccggcgctggacgccccacctgtc

SEQ ID NO: 57678 - DNA, 157 bp, Homo sapiens; identical to SEQ ID NO: 13270
  chr21:40032367-40032524
  hyper

SEQ ID NO: 57679 - DNA, 235 bp, Homo sapiens; identical to SEQ ID NO: 13271
  chr21:40032679-40032914
  hyper

SEQ ID NO: 57680 - DNA, 459 bp, Homo sapiens; identical to SEQ ID NO: 13272
  chr21:40032973-40033432
  hyper

SEQ ID NO: 57681 - DNA, 25 bp, Homo sapiens
  chr21:40033449-40033474
  hyper
cggcgtctgcaaccagcagcctcca

SEQ ID NO: 57682 - DNA, 142 bp, Homo sapiens; identical to SEQ ID NO: 13274
  chr21:40105801-40105943
  hyper

SEQ ID NO: 57683 - DNA, 378 bp, Homo sapiens; identical to SEQ ID NO: 13275
  chr21:40105997-40106375
  hyper

SEQ ID NO: 57684 - DNA, 30 bp, Homo sapiens
  chr21:40139127-40139157
  hyper
gccacatagaagaaacggtggacgtgttta

SEQ ID NO: 57685 - DNA, 1064 bp, Homo sapiens
  chr21:40177484-40178548
  hyper
cctcagggccagccggcgagggacccagccgagtgacagcaggaggcggagggaaggttgggccggaaggtgtcagccccgccccgcgctccctcgccgcctccgccctcctcttctctcccctcgtgcgttccctctcctctccctccgctcccccaaccctcctgctgcccccttccctctcctcccgcttctccccatcctgcctacctcccttcccctcctcttctctctcctccccttccctcccctctctcttctctcctccctcgtttcctcccctcccctccactcggccgtccctccttcctcctccctcctccctcctcctcccgctcctgaagagcgcgccgcgtgggggacggcccggttacttcctccagagactgacgagtgcggtgtcgctccagctcagagctcccggagccgcccggccagcgtccggcctccctgatcgtctctggccggcgccctcgccctcgcccggcgcgcaccgagcagccgcgggcgccgagcagccaccgtcccgaccaagcgccggccctgcccgcagcggcagggtaagagctgggcccgcagagagcgcccggcgcgcggctccagtcccatggagggtcacccggggcctgggcgggggtcgcggggggcactgacacgcagatctcggggcgctgccgggggtgcaggtgggggtggcggctgctgcgaggactctaggggcgcgcgtctgagttccgcgccggctcgttttccggttatggagtggcctccggggctggcggggtcggccggggggttcctgcgtgctagggccgctgtcttcggggtcgcctagcggcgggcgcggccagggcgcgctggcttgtttcgctcgcttttgtttttaaaaggaaacgcaggcctggtagggggtcctgcccagtggatgtcccggcgaacatgatttcgcgaacgggagtgggggcacaggagagcgtgtccgaggtggcctggcgccccggctttgagggtgacttcctggagcggcgccgggcccggaggatctggggcgcccaagacacctg

SEQ ID NO: 57686 - DNA, 31 bp, Homo sapiens
  chr21:40275729-40275760
  hyper
ccaatgaagttggctgcgtttctgattcact

SEQ ID NO: 57687 - DNA, 30 bp, Homo sapiens; identical to SEQ ID NO: 13278
  chr21:40685664-40685694
  hyper

SEQ ID NO: 57688 - DNA, 30 bp, Homo sapiens; identical to SEQ ID NO: 13279
  chr21:40686606-40686636
  hyper

SEQ ID NO: 57689 - DNA, 30 bp, Homo sapiens
  chr21:40721341-40721371
  hyper
acgtcacgggaccgcgggtccccacccaca

SEQ ID NO: 57690 - DNA, 102 bp, Homo sapiens
  chr21:40751584-40751686
  hyper
cggcctctcaaagtgctgggattacaggcgtgagccacctcgccctgctcactttgcatacatttgagttgggattctttcgctgcaaaacctgatcttcac

SEQ ID NO: 57691 - DNA, 30 bp, Homo sapiens; identical to SEQ ID NO: 13280
  chr21:40752101-40752131
  hyper

SEQ ID NO: 57692 - DNA, 30 bp, Homo sapiens
  chr21:40817288-40817318
  hyper
ccccaaagttccctcggtggggcggcggtg

SEQ ID NO: 57693 - DNA, 30 bp, Homo sapiens; identical to SEQ ID NO: 13281
  chr21:40817881-40817911
  hyper

SEQ ID NO: 57694 - DNA, 71 bp, Homo sapiens; identical to SEQ ID NO: 13282
  chr21:40941232-40941303
  hyper

SEQ ID NO: 57695 - DNA, 177 bp, Homo sapiens
  chr21:40984538-40984715
  hyper
tgggacggttctcccggagggccagacagaaactcaaagaaccggcctcaggggatctgagcaaattccaccgtcgtcaattcctggtgctccgtgaaagatgctctttccctcggggcttcggagccggagcatttgtagacagttcctgcctcttcactcggctgccggcctggg

SEQ ID NO: 57696 - DNA, 103 bp, Homo sapiens
  chr21:42539439-42539542
  hyper
cgaaagcagccagacccggcgactgaaatgaggcggaggagcttggcgaggggaggcgcaggctcggaaaggcgcgcgaggctccaggctccttcccgatcca

SEQ ID NO: 57697 - DNA, 315 bp, Homo sapiens
  chr21:42539583-42539898
  hyper
cgccactgccgggcgaatagacccccgcggacccccaagcgcgcggggccggggccctagttcaggccctcgctgcccctttaagggttctcgaaactttccccccggtatcagatgagcctcgtcacatccgttggccgtggccgctggggcgctttccgaggaaattcgggactcgagtttcccggggaagaggcgcggcctgagcccggcgagggtggggagggcaggcgcaggtggaccccggcgccccccgagccccgctgtgaccttggccgcgggggaggggctgggccgctgcggggcagtcgcggc

SEQ ID NO: 57698 - DNA, 612 bp, Homo sapiens
  chr21:42540273-42540885
  hyper
cttcacgctgcccctccgggtggccgcggccacgaaccgcgtagttgcgcccaccccgggacccgggacccctgccgagcgccacgccgacggcttggcgctcgccctggagcctgccctggcgtcccccgcgggcgccgccaacttcttggccatggtagacaacctgcagggggactctggccgcggctactacctggagatgctgatcgggacccccccgcagaaggtagggacccccggctgctgccgcgggcttttcgggctcgttggagggagggggctgtccagagacgcctccacgcggcttagcgtcgcccccaaagcagcagctgtccccgcacagaagagcggggaacgcagaggggctcgggtgggccggggagcgggggcgctcgctcttgagtcgcggaggacggcagcccccgcccggggcgcactgaggggtgtgcgcgagtgtttcagaacttgtgagctccccctccgcggggctgggcgggagaggagacctggaacttgccgcctccaataacgtgatttccttcttgcgggcgacacctacttccagcgggagacggagcggtgggccttgggcgacgggctattatgggg

SEQ ID NO: 57699 - DNA, 333 bp, Homo sapiens; identical to SEQ ID NO: 13285
  chr21:42688772-42689105
  hyper

SEQ ID NO: 57700 - DNA, 30 bp, Homo sapiens; identical to SEQ ID NO: 13286
  chr21:42797938-42797968
  hyper

SEQ ID NO: 57701 - DNA, 30 bp, Homo sapiens
  chr21:42798579-42798609
  hyper
gcccacccgaacgccgaccactgctttccg

SEQ ID NO: 57702 - DNA, 1520 bp, Homo sapiens
  chr21:42878704-42880224
  hyper
aaatgccttgtaactgggctgcgtagcctttgtaattttccatgattcgggaggttctcgcggctgggagctccgtgaggtcaggcattgccttgggcgcgatgcgctcatctttcccgcgggaccactgcacaggttcgcacggagggaagggctgcgcagcctcgaaggcgagccctgggtgctccctgcccacagggctcacctcgggccgccgtgctatcctttccttcccaaacaagccaccaggattcctcgtgattagggctgccaccagggcgttctgaacaggattcagggccaccgcgctgtgctctacggcggagcgggcgaaggccctcctctgccacaagcgctcagggctctcggcgcacaaactttctggacatggggcagtttttcagctggacccgtgctcgagcagagcgcccactgccagactggagcacttgaccactcagggtgccactgtgccgagccgggcaggacaggatgaggtggaccgaagcgcccaggtgccccgccttccccccaacccggcacggagcgcaagcggaggagccagaccggctcctcccgggcgggttcctgccggtgccgggtgtccaggaggccccggccctgatcgccgccagcgggtcgccgcaacggggcctgagtcgcgagcagtccctccccgagactgactggccgttcgcacctcgcccgggggccctccagcagcctggcccagcggtccccgccgcgccggccgtatcgttcccggcatctcagcgagtttccagtttctccctacctcagtagggaaccaagaagcagaaggagttcaggtaacactgcgggactgcagagatttcccccaaacaaagaagccaaccgacagcactcccagtcctcctccccaaagagaaaaggcgcaccggtgctcccaggcgggggccgtggagggcaggcggactaggagccagctttggggaccccgggggactctcttccaccaactggctagggactcgcaggaccacctgccccaacctcgcgatgccaagccaacaggggcggcgagggctctcggccgtgcgcaaggggtcccaggcgcccagcactctcccagcaccccgggaggcgccctgcccggctggccccagcgctcgaccctcgggcgcactcacctgccgcgccgcgctcctcacacccgctttcacctccgggcggggcagggggcatcggcgggtcccaggcgcccaggttcccctccccagcccggaccccgagccgggaccctggtaccggcgccgctcacctgccgcgctccaggcggcgctccccgcccctcgccctccgcctccgcctccgcctcctgcttagctcgcgcctactcggcccggcccgccctggctctcgctttaatctcaggaggcggtgtcccagggtccagggcgacacccccaagcgggtcgcgggtcaccctgggcgggcgggggcgggggcggcgggaggaggcgtttcccaagggaagt

SEQ ID NO: 57703 - DNA, 224 bp, Homo sapiens
  chr21:42880260-42880484
  hyper
cggagggacccataagggactctggggcgcttcccgggcccggccacagcggccaacctgcccctctccggtccgcggcgcagcgctgcccgagggctcgagtttgggttaaggaaggggattctggggagcgctcctggagtcctgggtgagcccccggagctgctacctcacgagctcctgtaggcggccggccccgtcttggcctccggggaacccactgt

SEQ ID NO: 57704 - DNA, 88 bp, Homo sapiens
  chr21:43067057-43067145
  hyper
atgtcactgcatttaccgcaaatggtaaacgttcacaaacattttgcgtaagtagacatcataatcaactttccggagaaacagaaat

SEQ ID NO: 57705 - DNA, 196 bp, Homo sapiens
  chr21:43181626-43181822
  hyper
cgcccctcccctaccagtgtggcctccctcctccggacactctgccccggggcgctggcgaaagtccttccgtaggactcagacccacatccactgtgcaaccgtgtgaggcacaccctcctcgccggagggttttgaggaaatgacaattcgggtgtttagaggccagccattcgcaagggtcatttttccacat

SEQ ID NO: 57706 - DNA, 198 bp, Homo sapiens
  chr21:43182190-43182388
  hyper
ctgctagttggctcctgaaagcggatcccggctagaatttcctaacggagtccaccccagctttgcgcaactgcctgaagggagcccggcacgacttcccccttccatgggccacacatttgagggcactttctcgaggaaaatcagctgtcctggaaaaaaaaagtcattgtttccgtggacaaaagtgttgtgaca

SEQ ID NO: 57707 - DNA, 98 bp, Homo sapiens
  chr21:43186335-43186433
  hyper
tgggcggacggatcaacaccccgggccccgtgccggaccccactgccaggcccgagccccggagctccaccgcgcaagcgccgggcgcccgggaagcc

SEQ ID NO: 57708 - DNA, 804 bp, Homo sapiens; identical to SEQ ID NO: 13291
  chr21:43186592-43187396
  hyper

SEQ ID NO: 57709 - DNA, 30 bp, Homo sapiens
  chr21:43188352-43188382
  hyper
cccttccaaacgggcgcggaccttctttca

SEQ ID NO: 57710 - DNA, 613 bp, Homo sapiens
  chr21:43188775-43189388
  hyper
tccggcacacagctccgcagctgggggtgactaagagcccacaccacgcaagtaataaaacgctccaatttcatttatttaatcatctgtgtgcttcatttgacaaatatttatggagtgtctgctgctagctcagtgcctggtgcctgggactgaagaccagagccccctggagaccaaaagagccagctcccagctgtgagcagatcgggtccaaagatcacgggctcggcggcaggaacctggtttggtatccggctcctctgcggactttgaagtgctttaccgattcacatgacaactggtaaaacgaaaacaaacacctttccaggaattgtgaattcgagttccagaccctctgggattccgggagcgcagctgctatttatgttaacagtcattggtcccaggctggtgaggttagaatttccaagtataaaagtaatttagtttcgttttaaatacattttagggccaaagaaaagtggaacgatttaaagaaaaagatgaaatgaataatagggcaagttgggaggtggctgtcctgaggtttcatgggacaacattaattaacctcatgaagtgcctgcatggacaacgtgcccggtgtggt

SEQ ID NO: 57711 - DNA, 31 bp, Homo sapiens; identical to SEQ ID NO: 13292
  chr21:43221770-43221801
  hyper

SEQ ID NO: 57712 - DNA, 31 bp, Homo sapiens; identical to SEQ ID NO: 13293
  chr21:43373717-43373748
  hyper

SEQ ID NO: 57713 - DNA, 226 bp, Homo sapiens
  chr21:43373882-43374108
  hyper
agcccggcgaggagcgtggccgggggcctctgggcgggcaagcggggaggaaacgcgcggcggccgcggcccgggctgggcgcaagccccgcacacctgcggaacaggggcgcgagcggaccccgcggcccgcgctcccgactcggcgtctgggaagttcctgggccgctgcgggccgcgcttcctcctgcgcgcgccgccccgggcgtcccgcccgcggcccagc

SEQ ID NO: 57714 - DNA, 34 bp, Homo sapiens
  chr21:43374331-43374365
  hyper
ttcatcagcccaaccccggcggctgctgtgcggc

SEQ ID NO: 57715 - DNA, 47 bp, Homo sapiens
  chr21:43639847-43639894
  hyper
gaccggggacttctcgcgccatccccaggaacgccaggcaaggtctg

SEQ ID NO: 57716 - DNA, 30 bp, Homo sapiens
  chr21:43778879-43778909
  hyper
cagcagaattgccttatctcacacagtggt

SEQ ID NO: 57717 - DNA, 30 bp, Homo sapiens
  chr21:43933648-43933678
  hyper
aggggtgcagaggccgcctgggactgcccg

SEQ ID NO: 57718 - DNA, 31 bp, Homo sapiens; identical to SEQ ID NO: 13295
  chr21:44013673-44013704
  hyper

SEQ ID NO: 57719 - DNA, 30 bp, Homo sapiens
  chr21:44095150-44095180
  hyper
aaccgctgttaacaccgaagtgccacagtt

SEQ ID NO: 57720 - DNA, 30 bp, Homo sapiens; identical to SEQ ID NO: 13296
  chr21:44299585-44299615
  hyper

SEQ ID NO: 57721 - DNA, 138 bp, Homo sapiens; identical to SEQ ID NO: 13297
  chr21:44494639-44494777
  hyper

SEQ ID NO: 57722 - DNA, 1085 bp, Homo sapiens; identical to SEQ ID NO: 13298
  chr21:44494940-44496025
  hyper

SEQ ID NO: 57723 - DNA, 397 bp, Homo sapiens
  chr21:44496363-44496760
  hyper
aacttcttgcccttcgggaatttaaggaacctttactgatgagcttgaaacgtgcgtcctggtgggtggggggccctgcgcgtcctcgaggaccgaccccgagggcgtgtgtcgcgggcccgggagggggcgccgcgccggggcgggactcgatggccgcgctctgtggccgccggacgccgtgcgcagcgccccgcgtgaccgcgcccagagccgggtccgaaccccgagccgaggcgcagaacagtcgccttgcgcggctccggtgcggcccacggccaggggctgccgggcgctctcggggacggggccgactccgcgcagggtggtagcaggggcgccccgcggggctccttcgccaggtcccggaggccgcgggcggggccgtttcccaaac

SEQ ID NO: 57724 - DNA, 111 bp, Homo sapiens; identical to SEQ ID NO: 13299
  chr21:44513218-44513329
  hyper

SEQ ID NO: 57725 - DNA, 209 bp, Homo sapiens; identical to SEQ ID NO: 13300
  chr21:44514585-44514794
  hyper

SEQ ID NO: 57726 - DNA, 30 bp, Homo sapiens; identical to SEQ ID NO: 13301
  chr21:44515794-44515824
  hyper

SEQ ID NO: 57727 - DNA, 30 bp, Homo sapiens; identical to SEQ ID NO: 13302
  chr21:44524440-44524470
  hyper

SEQ ID NO: 57728 - DNA, 24 bp, Homo sapiens
  chr21:44527503-44527527
  hyper
cctcaaccaccctgcgccccgatc

SEQ ID NO: 57729 - DNA, 32 bp, Homo sapiens
  chr21:44845910-44845942
  hyper
tggtgactcgatgccgcgccagcttcaccacc

SEQ ID NO: 57730 - DNA, 374 bp, Homo sapiens
  chr21:44847537-44847911
  hyper
cgggctcgcgcgtggggctggcggcgcggatgccctggggcgctgcagaccccgagaggccgcttgcccgcggggacgtcagccgcttttgctgttaaaatctgaaatgttcagcaagttagaaacttgaaacctaaggaagcgtgaccggccgctctggaagcccccgccgcgcggccggtcccggccccggccctcagcggcgctggcgtctgcgcgtcccggggctgcccccgcagcatgtggggctgggaccctcttcccgcgcgggccccgggcggacgctgcgggcggtgacggagccaggccggccgcctgggtaggggacgggggcgcgggaccacttgcttgcccgtggccgatgcctcatccga

SEQ ID NO: 57731 - DNA, 30 bp, Homo sapiens
  chr21:44877374-44877404
  hyper
gtgcacatccaggcacgcccccacccccta

SEQ ID NO: 57732 - DNA, 30 bp, Homo sapiens
  chr21:45139364-45139394
  hyper
cgggcagagcctggcgcgggcgccctggag

SEQ ID NO: 57733 - DNA, 711 bp, Homo sapiens
  chr21:45148315-45149026
  hyper
ctgctctcccctggaacgcctggaactagggtggtcaggctggggtggaggagctcccctggaatgttccagagcttcccccactcctgccgttctgagtcaccctgcctccccggaggaggaggaggatcagctgagccgccgcgctcacgtagtgtctggctgtctgcctgtctgcctcgctgtgagcagagtgggatgctgccgataaggcgcgcacgtgggccctgggaggagcccgaggcagccactcccgcacgtgggcaggaggagggctgctcacaccaccggccgagggaggaggactgcgggctgcgcctgggcaggggatgagcttgtgtcgcgggcggcagggggaagggagtcggagagctcctgcggtccagccggatgactgatgaggttgaaagcacttccgctgcggcccccgcaggaagttcccaggaggaagttgcgaccctttctaagccatcccactggcctggactctgctgggattattttgaccccccagggcagagtgtagccatctgactggctttctctctcggcaggagacggggcgcacgcctgcaggtgggggagccccaatacgtcacacggatgagcggggcaaagcccagccccccaccccgcacccgcccgcccgcaatcctgccccctggctgcggcctccgcggctcttcccaccccggctccgctgggtgcttg

SEQ ID NO: 57734 - DNA, 30 bp, Homo sapiens
  chr21:45196569-45196599
  hyper
ggcggggtccgggccgcgcacgagggaggg

SEQ ID NO: 57735 - DNA, 160 bp, Homo sapiens
  chr21:45286200-45286360
  hyper
gagggtgatgagcatgcggctcttattaaaaatgaaagccaacgccgagagcctgctgggggctgggaggtggggcgggcggcgggcccaggctgctagagggacccaggatcctgcagcttttaaattgcaggcgcggctgctccgactcgactcgctt

SEQ ID NO: 57736 - DNA, 30 bp, Homo sapiens
  chr21:45381291-45381321
  hyper
tgggaaacggtgagcgcatagacactttgt

SEQ ID NO: 57737 - DNA, 39 bp, Homo sapiens; identical to SEQ ID NO: 13305
  chr21:45381602-45381641
  hyper

SEQ ID NO: 57738 - DNA, 72 bp, Homo sapiens
  chr21:45526942-45527014
  hyper
tgtgccaggctgggcgtccgtgcggagcgcgcccagcgctggagcgcgcctaagaggcgccctgcagtgtgg

SEQ ID NO: 57739 - DNA, 30 bp, Homo sapiens
  chr21:45527335-45527365
  hyper
gtctgttggatcggcgcggctcttccggtg

SEQ ID NO: 57740 - DNA, 64 bp, Homo sapiens; identical to SEQ ID NO: 13307
  chr21:45553435-45553499
  hyper

SEQ ID NO: 57741 - DNA, 165 bp, Homo sapiens; identical to SEQ ID NO: 13308
  chr21:45660234-45660399
  hyper

SEQ ID NO: 57742 - DNA, 30 bp, Homo sapiens
  chr21:45661307-45661337
  hyper
gcgagtgagctcagcgactgctgaggaatg

SEQ ID NO: 57743 - DNA, 209 bp, Homo sapiens
  chr21:45713495-45713704
  hyper
gatgggactggtcccgctgtcctgcagcctgcgtggcaccgtgaggctcctcacttgcgcctagacccgccgtccagccctgggtggtcccaggggagagcgcacagggctcgggttcgggttcagctacatttcccccggccccccgcgtcaccccgcgctgttgcctcccacagaacctggctcctggtgcgcgttgcggggtgtgc

SEQ ID NO: 57744 - DNA, 30 bp, Homo sapiens
  chr21:45719782-45719812
  hyper
cacaggtttagaaacgcacagcgggaaggt

SEQ ID NO: 57745 - DNA, 351 bp, Homo sapiens
  chr21:45875681-45876032
  hyper
cgagcctctcccggccggctccgcgcgcggccccgccgtccacgcccagcgcgggccgcgcgcacagggcttggcttctctgttttctcggtttccttcttcaggcagttgaaagaaaaggcgcggttctgtgcccggtgcgagccgcggctcctttagggctggcagggaagggcttgctgggttatgacagtttttaggggttgtcggagtcagccaggcgttggctgctggagtagcccctggcgcgcgagcgcccgctggtgcccggccacgtgcccagcttgacccgcgctccaggttcgggagaagctgcagccgtcaccgtcctcctggcgtccaccctgagga

SEQ ID NO: 57746 - DNA, 73 bp, Homo sapiens
  chr21:46126354-46126427
  hyper
cgcacccacatgtacacacccacgtgcacacacccacgcgtacacacccacgcgcacacaccgctgtccccag

SEQ ID NO: 57747 - DNA, 50 bp, Homo sapiens
  chr21:46126566-46126616
  hyper
cgagcagctccgggcctcaggggtcgccccgccaccgttttcctttccca

SEQ ID NO: 57748 - DNA, 92 bp, Homo sapiens
  chr21:46128893-46128985
  hyper
gggtcccgcgtgaccggtccccaccgctgacggttcctggggtaacactcaggacagggagaggcaatggaaagagacgtggccgccctcgc

SEQ ID NO: 57749 - DNA, 403 bp, Homo sapiens
  chr21:46129232-46129635
  hyper
ctgcaatcgcccttcgcactgaggcttcctactgtgtggtgtaaaaacacaggcttgtcctcccttgctgcccacggggctggagccgcctgaaaatcccagcccacaacttccccaaagcctggcagtcacttgaatagccaaatgagtcctagaaagcgagagacgagaggggaatgagcgccgaaaatcaaagcaggttcccctcctgacaactccagagaaggcgcatgggccccgtggcagacccgaacccccagcctcgcgaccgcctgtgacctgcgggtcaaccacccgccgcggctccacgccgtgggcacagactcagggagcaggatgagaaagctgagacggcgcagccacggcccggtgccttcacgcgcacagcgacacagccccagcc

SEQ ID NO: 57750 - DNA, 30 bp, Homo sapiens; identical to SEQ ID NO: 13312
  chr21:46131084-46131114
  hyper

SEQ ID NO: 57751 - DNA, 303 bp, Homo sapiens
  chr21:46131449-46131752
  hyper
tccatccagggctccgctcagcctgcagggaagtggctgctcctcagacgtctgcgtcagcctttccaggggcggccgcggggcccccgggggtcactgcgacggccacatgccagcggcctaaggcggggacagaggtggccctggcggtcgcagtggggaagcttctggttgctgcctgcgggaggcaggtggcccctggcaggttgggctgcagccgctggtttatctcttcatttccctgatgggcttgggccctgcgtgcaggtgacaggtgataacaatctcggcccggcctgggat

SEQ ID NO: 57752 - DNA, 277 bp, Homo sapiens
  chr21:46143314-46143591
  hyper
aattctttacagattaacccacgtgaatctaaacccggtagaggcaaacgctttcccttccactgtgagctgcgttgtaatttaccccaacgacctgttgaaaagaccaagggagcttagcaaccagccgtccccagggccccggggggaagctgcaattaccgggtgcgaggccggcggggccgcagcccccacttcaaaggcgcgggaggagccgagggaggcggagctgtaattagtgcgggccccgccgggcgaccacgggcctgctcacgcc

SEQ ID NO: 57753 - DNA, 30 bp, Homo sapiens
  chr21:46266015-46266045
  hyper
gcggcggtgatcaccggtctgttctggaga

SEQ ID NO: 57754 - DNA, 30 bp, Homo sapiens
  chr21:46293792-46293822
  hyper
gctcagtgcgcctgcgcggcgcggatgggc

SEQ ID NO: 57755 - DNA, 157 bp, Homo sapiens
  chr21:46294043-46294200
  hyper
ggcgtcccggacggcggtcccaagcgctgctcacgctgctcttaagtgagccctggacgaggcgcggtgggccctcatagtccgcgccggcgccctcgctccacaccgcggcgtccggccctgggctcccgccgatgtccgcgtgggacttttaggg

SEQ ID NO: 57756 - DNA, 34 bp, Homo sapiens
  chr21:46351694-46351728
  hyper
cggcgcaggcgacccccgacgggcagccgctcac

SEQ ID NO: 57757 - DNA, 30 bp, Homo sapiens
  chr21:46352430-46352460
  hyper
tccaggctgggggccgccagctccgggaag

SEQ ID NO: 57758 - DNA, 30 bp, Homo sapiens
  chr21:46352802-46352832
  hyper
gggacggcccaggccgccaggacccccaag

SEQ ID NO: 57759 - DNA, 31 bp, Homo sapiens
  chr21:46438820-46438851
  hyper
gccccggccccggccccggccccgcccttgg

SEQ ID NO: 57760 - DNA, 11 bp, Homo sapiens
  chr21:46707016-46707027
  hyper
cgcagtgacgc

SEQ ID NO: 57761 - DNA, 518 bp, Homo sapiens
  chr21:46800405-46800923
  hyper
tccgtccgtgcacacacgctcacctcgcacccagcgtccgtccgtgcacacgctcacctcgcacccagcgtccgtccgtgcacacgctcacctcgtacccagcgtccgtctgtgcacacatgctcccctcgcaccgagcgtctgtccgtgcacacgcttacctcacacccagcatccatctgtgcacacacgctcccctcgcacccagcatccgtgcacacgctcacctcgcacccagcatctgtccatgcacacactcccctcgcacctagcgtccgtccatgcacatactcaccttgcacccagcatccatctgtgcacacaccctcacctcgcacccagcatctgtccgtgcacacacgctcacctcacacacactcccctcgcacccagcgtccgtcggtgcacacacgctcacctcccgcacctcccgtggaggcggcatccaggcagggaagcaaggacactctgcgtccattcctctctctaaacaccaaggcccccgcaatccgaggaat

SEQ ID NO: 57762 - DNA, 214 bp, Homo sapiens
  chr21:46801352-46801566
  hyper
ccctcccaagcccagcgtctaggtctggttcaccctcgcgaggtcgcctggcccatgtctggctacctgagctggccactgctgaggcaaagcccacccggctgctgttctggaagtggctctggaaagcccagctcctgtgggtacaggatcgctgagcgccaggcatgggggccacagccaaggcaggatcgctgagcgccaggcatggagg

SEQ ID NO: 57763 - DNA, 61 bp, Homo sapiens
  chr21:46824686-46824747
  hyper
tcaggggctggggtcgtagcccggcgggcagcggtgttcaccttccgcataaacctgggct

SEQ ID NO: 57764 - DNA, 833 bp, Homo sapiens
  chr21:46825134-46825967
  hyper
ctggggagagcatggcgccgaggtgaggccggggctgcgggcaggggttgggggacgccaagatgcggctgcgggggtcgcgggggtcgcggggctcggccgggtcctgcgggggtcgcgggggtcctgcggggtctgacccgtgcctgtcccgcgcaggtgcccctggccatggccgcggcggcggcgcctcctggacgtgctcgcgcccctggtcctgctgctcggggtccgcgcggcctccgcggagccaggtaagacccgggcgggacgggaaggttcgcgccggtgcccgccggcctcgccgccctggctggggtccccgcccggctccctcacccccgccccggccgctctgggttcagccccggccctgcccacgcgcgcaggaggcgccggagccggacggagcggggcggggtggccggagtcccgcccattcattctccccgcggggtccgggccgggaggggtgcgcggtgcgagcggccggagtccccgcgcggggaccgaacctccgcggccggcggggtcgtcggtgccgggagggctcggggcggggccgcggggtctcgggagacgcggcctctgtcgccgtcacggcctcgtccccgcagcgccgggtcccgggactgaccgcgggcggaaggcggcggagcgcggggcgtcgtctccgcgtttccaacctgttgaggctcctcgccgcgggccgggccttgtgcgcctctgtccccgccgccctcaggcctctgtccccgcgcccgccgtggtgtcgggttgcgcggtcccctttgatgccaaccgagcgccgcgcggtccgagaacaatgccca

SEQ ID NO: 57765 - DNA, 105 bp, Homo sapiens
  chr21:46950777-46950882
  hyper
gaaggaagaccagccccgcctgcgtggccgtgacgcccgcgatgagcagcttggaccagcgcgcccagcggatcttcacgaagcccgcggcgaaggacgtgatgg

SEQ ID NO: 57766 - DNA, 30 bp, Homo sapiens
  chr21:46961654-46961684
  hyper
atgtgccaggggcccgccccacgcgtggct

SEQ ID NO: 57767 - DNA, 62 bp, Homo sapiens
  chr21:47010090-47010152
  hyper
aaaaagtcctccttccgtttcccgcactggtaggaaagctggggagagagaaggagtctcac

SEQ ID NO: 57768 - DNA, 68 bp, Homo sapiens
  chr21:47010408-47010476
  hyper
gccccgggagttcgaagggtgctggggccgaggggaaggctctggtcggcggcgtcagcggcagctcc

SEQ ID NO: 57769 - DNA, 200 bp, Homo sapiens
  chr21:47062752-47062952
  hyper
gggcgctgcggccccagcctccgggccggggccaggcccacagagaacgggaagcgggcgctgcagggggaccttcggggttgcggcacggctgggaattcaacggccattcccgtcccgtcgggcccacccgcccgcccgccaaatccccgcccaccgcggatccgccccgtccaccaaggtctcgctcaccaacggcc

SEQ ID NO: 57770 - DNA, 993 bp, Homo sapiens
  chr21:47063438-47064431
  hyper
agaactttccgggctcggattggccgcgccggttgatgttccgccctttcattggcccgcggcgcccgctttcgcgagcctgcccttgggcgggggcggggccggcggcggcgcgcggcgctagattggttagcggcgcagaggggcgggcccgcgccgcgcgcagcgctcgggctggagcgcctgaagccgcgaccgccgcctcagccgcctcagccgcggtcgccgccgcttcggctgacttaggctccgccgccgcctcctcacccgcctcgccccgaccccgcccgggcctcccggcctctccccgccggcccgcgggctcgccgtccggcgcagggcaggtgagtgagcggtggcgggcggggtcggggtcgggcgcccttgcgggttacggggacccagtccccgacggaggccgagtgacggggcgaccccgggccgcggcaaacttcgcccgagccggggcgggcgggggtcccgggctgggtcgcgccgtccccgaccgccgccggcgcctgcggcggcccggggcagcgaggggactcgcgctccctcaaggtgcggtcgccaggcctggcccgcccgcctccgccccctccccaaattcggaagttgcggcgggaagccgagaacgtctcggatgtgggtcagaaaacgtctggactacttgaggcttcagtttcaaaacggcacaaatttcatctcttgattgagaagagatctggggaacaccccggagcggccgcggcggctggagggcggcggggcggggcgcggggcctcctccccctggacggccgccgggagagcgcggcctcacccctcggtgaccctgcggagagccgcgcgcgggcggtggggcgcgcgcaggtctctcttgttgctcgctgtgttttattttaattttgggggtggttagaacgtgtttcttattgtccccacacgtgttctaattggaagtcttgtttcgtgaaagagtttttttctttt

SEQ ID NO: 57771 - DNA, 30 bp, Homo sapiens; identical to SEQ ID NO: 13318
  chr21:47392901-47392931
  hyper

SEQ ID NO: 57772 - DNA, 30 bp, Homo sapiens
  chr21:47393307-47393337
  hyper
cagcccctgatgggcgcccgggagccacgg

SEQ ID NO: 57773 - DNA, 30 bp, Homo sapiens
  chr21:47394065-47394095
  hyper
accgattcctggatcgccgaggtcgcccac

SEQ ID NO: 57774 - DNA, 107 bp, Homo sapiens; identical to SEQ ID NO: 13319
  chr21:47394339-47394446
  hyper

SEQ ID NO: 57775 - DNA, 30 bp, Homo sapiens
  chr21:47401896-47401926
  hyper
ccgctctttgctgccggccagggccagatg

SEQ ID NO: 57776 - DNA, 30 bp, Homo sapiens
  chr21:47518053-47518083
  hyper
cgggccgtcgggagcggagcctcctcggga

SEQ ID NO: 57777 - DNA, 30 bp, Homo sapiens; identical to SEQ ID NO: 13320
  chr21:47518732-47518762
  hyper

SEQ ID NO: 57778 - DNA, 108 bp, Homo sapiens
  chr21:47717278-47717386
  hyper
tcaggttctggtgaaggtgcccggagccgggtcccgccttcggcctgagctagagccgcgcgggcggccggcttcccccaaaccctgtgggaggggcatcccgaggag

SEQ ID NO: 57779 - DNA, 239 bp, Homo sapiens; identical to SEQ ID NO: 13322
  chr21:47717433-47717672
  hyper

SEQ ID NO: 57780 - DNA, 162 bp, Homo sapiens
  chr21:47717748-47717910
  hyper
cgtggcccccgcccgggagcaccgcgcagcgctcgcctctcgcccttcaagggggtccctgcccggagcctgcgcccccggagaggaaggggctcgaggggcttgggtgccgcagcgcgtccttccgtagaaaaggcttgcgtcagtatttcctgcttttac

SEQ ID NO: 57781 - DNA, 30 bp, Homo sapiens
  chr21:47743821-47743851
  hyper
ccaatcacagcgggcgccaggcctccgctt

SEQ ID NO: 57782 - DNA, 166 bp, Homo sapiens
  chr21:47744097-47744263
  hyper
gtcagccccgtcaccgccgggcggcccgcgcggagtctgagggagatggaagttgagcaagagcagcggcgcagaaaggtggaggccgggaggacgaaggtaaacattaggggcttcttctctagctgctctggcgtgaagtcctaagggcggctccggtgcccgc

SEQ ID NO: 57783 - DNA, 30 bp, Homo sapiens
  chr21:47745042-47745072
  hyper
cagagcccatgactcgggggcaggagaaag

SEQ ID NO: 57784 - DNA, 63 bp, Homo sapiens
  chr21:47799181-47799244
  hyper
ctgcgtgtcgtgagccgcgcccgtcttcccgggccgcgtgtcgtgagccgcacccatcttcct

SEQ ID NO: 57785 - DNA, 30 bp, Homo sapiens
  chr21:48055197-48055227
  hyper
ctcgtaggggttgtcgcttcccaagccgtg

SEQ ID NO: 57786 - DNA, 1115 bp, Homo sapiens
  chr21:48087088-48088203
  hyper
ttggcatctgggcctaaaagccgtgatgcaggtgagcaatgatgcagagggctctgtgcgcctggcgggctctgtttgcctgctgggctctgtgcgcctgctgggctctgtgcgcccgggaaggtgcggccaccctcacgcggaaggcggccagcggatcccggtgcgcgcagctcccagcgctggggttccagcgccccgcctcttcctatagcaaccagcgggacctgccgtcccccggggcaccccgaggggtctgcgcccgcttctttccgaaacgggaaggcgctgggggctcggcagccagagggacgggttcagggagcgtccggtgagcctaagacgcgcctttgccggggttgccgggtgtctgcctctcacttaggtattaggaaccgtggcacaaatctgtaggttttcctctgggggtgggcggaggctccaaaccggacggttttctcctggaggactgtgttcagacagatactggtttccttatccgcaggtgtgcgcggcgctcgcaagtggtcagcataacgccgggcgaattcggaaagcccgtgcgtccgtggacgacccacttggaaggagttgggagaagtccttgttcccacgcgcggacgcttccctccgtgtgtccttcgagccacaaaaagcccagaccctaacccgctcctttctcccgccgcgtccatgcagaactccgccgttcctgggaggggaagcccgcgaggcgtcgggagaggcacgtcctccgtgagcaaagagctcctccgagcgcgcggcggggacgctgggccgacaggggaccgcgggggcagggcggagaggacccgccctcgagtcggcccagccctaacactcaggaccgcctccagccggaggtctgcgcccttctgaggaccctgcctgggggagcttattgcggttcttttgcaaatacccgctgcgcttggacggaggaagcgcccacgcgtcgaccccggaaacgaaggcctccctgatgggaacgcatgcgtccaggagcctttatttactcttaattctgcccgatgcttgtacgtgtgtgaaatgcttcagatgcttttgggagcgaggtgttacataaatcatgg

SEQ ID NO: 57787 - DNA, 55 bp, Homo sapiens
  chr22:17081880-17081935
  hyper
ggaaactgtaactggcgttggattagaacgaagttgactccattccttttcctcc

SEQ ID NO: 57788 - DNA, 30 bp, Homo sapiens
  chr22:17565649-17565679
  hyper
agcagcgggaggagcgcacctggggcgcgc

SEQ ID NO: 57789 - DNA, 30 bp, Homo sapiens
  chr22:17566282-17566312
  hyper
ctggggaggaccctcggagcggtgggagtt

SEQ ID NO: 57790 - DNA, 49 bp, Homo sapiens
  chr22:17601084-17601133
  hyper
gaactcgcccgctgccgcggccgcccccaggccgccccccgcgccgccg

SEQ ID NO: 57791 - DNA, 137 bp, Homo sapiens
  chr22:17601259-17601396
  hyper
cgacggccccggctgttcttggcgaagaagatggcccagcccaccaccaccaccaggtcagtggcgatccaggagcaccagtacaggtcggtgacggcgatgaggtacaggtccagcaggccgccctgcgccagcag

SEQ ID NO: 57792 - DNA, 39 bp, Homo sapiens; identical to SEQ ID NO: 13327
  chr22:17602546-17602585
  hyper

SEQ ID NO: 57793 - DNA, 1482 bp, Homo sapiens
  chr22:17849501-17850983
  hyper
cggggcgtgggggtctcctcccctccgagcacagtccccggcttcccgatttcctctgccccatccccccgccttccaagcacattgtgctcactcttccaggcagctctttcagcggccgggcagtagcagggttccgagcccgtcttctccggggcggtcacacgtgtccattccctggggttggggatcgctcttcccgcttggctgctgattggtgcctccccctaccccacccttcccgccgctctccagcctccatcctacttcgttccagctcaatcagccccaccgccttcttccctcggagaaaaaagccacttcagagctccttgggcgccgttctcggctggaataaaagcgttaagaaacaggtggaaagcacttcacttctctaggcttcatatttctagggtggacagcccgctcctgctccggctctgccctcggcatcaataataactgaactcccacacgtgcacgtttctgtctctagcccgaccgaaaggaccaccccgcgggccctttaaaaggacgcgaccactcaggccaagtgggggtgggagagctcctggccgtcctcccttgggaaagtgcttcaactccccagtcccaaagtcctggagggcggagggcgcctcgtgagagttctcgggggtgcggcccgcgccccctgggtcctgcggatctgggcccgggggcgcgcgccccgcccctccccctccctggcggtgcagctgtccgggcgggggtggggcgggggccggggcccgcgtgggattaactaggaccggggcgggagtcgaccgcggccggcggggagggctagccccgctctggcgggcgggcgcgtggcaggggctcccggaggccccgagctcccgggaggcgctccggccaacttcgggccggtggggaccgggcctgggcgcggggctctgaaggtgtggaaggaaagtttgggactccgttattcttccacagcgtccttcctcccgtaatatccagcctctttatcgcggggctcgggagcccttggagttgatctcgccaccattatccccccgggcgagcgcggaggacgggctggccattctggccaggccggaggtgttttccagcccggggctttgtgataactgggccgaaacccgagggtcctggagcgcggcgggtggcgggagcttgcggagcgcggcgcactcggcggccaggcatcggccagcccagcggcagccccctttctcctatttttatttttatttttggaaggagctgagaattagtcgattggttggcaggttgaattgccttctcttctatggcaatatgtgtcgtgacttttcaccttttgcctttggacaaaggtgaatggcaactgcgttggtcagtttttgttttctgttctgcggatgggttcgccgacgcagtaatcaaaattagagccactcttttggaagagcaaatcgttgttgttgcctc

SEQ ID NO: 57794 - DNA, 195 bp, Homo sapiens; identical to SEQ ID NO: 13329
  chr22:18441047-18441242
  hyper

SEQ ID NO: 57795 - DNA, 30 bp, Homo sapiens
  chr22:18484406-18484436
  hyper
cattgctacttgcacgctcagtcttgccag

SEQ ID NO: 57796 - DNA, 187 bp, Homo sapiens
  chr22:18506999-18507186
  hyper
ttgtcatttagattcgctcgcccacagggggactggagggtactcaccgactagggcttcacagccgcatcaccgccggcggtgggcgcctgcctcggcaggggcagggtgggtgcccgcagggcacaggtgccgccgtggctgctcgcacaacccctgcagctgcgatcccgcccagttagcctcg

SEQ ID NO: 57797 - DNA, 30 bp, Homo sapiens
  chr22:18560626-18560656
  hyper
ggcggcttccggggcgcggcgtgctggggg

SEQ ID NO: 57798 - DNA, 32 bp, Homo sapiens
  chr22:18593347-18593379
  hyper
agggcagcctcccccgcgggcgcagtccccgc

SEQ ID NO: 57799 - DNA, 172 bp, Homo sapiens
  chr22:18923727-18923899
  hyper
ccggcgccgtggacagcgggacgaagcggggaatgcaggggcgcagcgcgggcagggcgcgcctcagagccatggcgggacggcggtacccgcccgggccgcttaagtgtgcgctgttggtcccgccccgccccgccccgccccgccccgccccgctcggtcccagaggcct

SEQ ID NO: 57800 - DNA, 30 bp, Homo sapiens
  chr22:18958120-18958150
  hyper
tccccgacccgctccgcctgacccctatga

SEQ ID NO: 57801 - DNA, 30 bp, Homo sapiens
  chr22:19418939-19418969
  hyper
ccgcgacccctgcgcgcactcaccattgtg

SEQ ID NO: 57802 - DNA, 30 bp, Homo sapiens
  chr22:19420052-19420082
  hyper
acgcccggaagcggcgagggtagccatgac

SEQ ID NO: 57803 - DNA, 30 bp, Homo sapiens
  chr22:19435130-19435160
  hyper
ccgttccctccctccggaagaccccggtgg

SEQ ID NO: 57804 - DNA, 182 bp, Homo sapiens
  chr22:19466767-19466949
  hyper
ccgggacaaagcgtcggctgcaaaagagaaaaggccaggcgaagacgctaggctctaaaacaccctcagtagaagcattaaaatgccctttcgtgatttatttccccttttataggtatttttaaacgttattttaaattacgtgttgacagtattcccctccagacgaatttagtagggcc

SEQ ID NO: 57805 - DNA, 30 bp, Homo sapiens
  chr22:19467795-19467825
  hyper
gtgggggcgcagggcgggcagagtgtcagg

SEQ ID NO: 57806 - DNA, 153 bp, Homo sapiens; identical to SEQ ID NO: 13332
  chr22:19510793-19510946
  hyper

SEQ ID NO: 57807 - DNA, 314 bp, Homo sapiens; identical to SEQ ID NO: 13333
  chr22:19511141-19511455
  hyper

SEQ ID NO: 57808 - DNA, 187 bp, Homo sapiens; identical to SEQ ID NO: 13334
  chr22:19511541-19511728
  hyper

SEQ ID NO: 57809 - DNA, 665 bp, Homo sapiens
  chr22:19706042-19706707
  hyper
cgcccagtcagggggatggctcggtcggcctcgggggtcgacgatcccccgggtaggcgacgtgccctgtccaggcctcacttcccgcgtccgcaaaacggggtggacaacgcagcctaaggcagagccgcgccaaggtccctcgctgtcgccgggctctggcggcctgaccgggcctggggtccgagcgtgcccccgggcctgggggggtcgccgcgatggactcgctggcagcgccccaggaccgcctggtggagcagctgctgtcgccgcggacccaggcccagaggcggctcaaggtgcgtgtgtggagagggcggaacgtgggtctgtgaccccgcgggctccgggactcggcatggggtccccgtccccgcgcgccacggcccgccagcgcctaggctcagcccttccctccgcagcggcctcgcaggtccgcggccccacggtggggcgacgtgccctgtccaggcctcacctcacgcgactccaaaacgcggcggagaatgcggccgtgggacccctccaggggccccaagggtctgcgggggctgggcgcctgggcgcgcgggcgggggaggctcggcgccgcggtctataaataggcgctgctccgccaccgccgctgccgccgcccccgcggctggatccgggccaggtggggc

SEQ ID NO: 57810 - DNA, 58 bp, Homo sapiens
  chr22:19711681-19711739
  hyper
ggccgccccgagcgtgcgccctaccgcgacctgcgttgcgtggcgcccccagcgctgc

SEQ ID NO: 57811 - DNA, 30 bp, Homo sapiens
  chr22:19718665-19718695
  hyper
gcgctgtccccctcccgctggtgtttgctc

SEQ ID NO: 57812 - DNA, 206 bp, Homo sapiens
  chr22:19718926-19719132
  hyper
tgacccccgactagccgaggcattaatggggccccgtggaggaggtcctgggaaggtctggggagctgaagtcctggccacgtgggggggactgcaccccctgcccagacggagcaacaacattggggtgggtggcggggccctgggggcccatagctcagcgcagcgtctgcgcccaccccctgtgtttccgatggaagacaggc

SEQ ID NO: 57813 - DNA, 30 bp, Homo sapiens
  chr22:19743014-19743044
  hyper
gctgtgttggcgcccgcccccgagggctgg

SEQ ID NO: 57814 - DNA, 41 bp, Homo sapiens
  chr22:19744052-19744093
  hyper
tcttgtcttcgctgcgcattgcatgcggaggagcagatgtc

SEQ ID NO: 57815 - DNA, 545 bp, Homo sapiens
  chr22:19748363-19748908
  hyper
gtcatgatctccgccgtgtccagcccgtggctcacgcagctctcgcatttctgcgacgttgcagccttcacggccagcagcctgagcagcctgggggccgcggggggcttcccgggcgccgcgtcgcccggcgccgacccgtacggcccgcgcgagcccccgccgccgccgccgcgctacgacccgtgcgccgccgccgcccccggcgccccgggcccgccgccgccgccgcacgcctacccgtttgcgccggccgccggggccgccaccagcgccgccgccgagcccgagggccccggggccagctgcgcggccgcagccaaggcgccggtgaagaagaacgcgaaggtggccggtgtgagcgtgcagctagagatgaaggcgctgtgggacgagttcaaccagctgggcaccgagatgatcgtcaccaaggccggcaggtcagggcgcccctccccacgccgcgaccctccccacgtgctgccgccagggctgcgggcctccgcctgatccgcgcgagcggggccgaaagccgggtcgggggc

SEQ ID NO: 57816 - DNA, 50 bp, Homo sapiens; identical to SEQ ID NO: 13337
  chr22:19748960-19749010
  hyper

SEQ ID NO: 57817 - DNA, 30 bp, Homo sapiens
  chr22:20004362-20004392
  hyper
gcgacgcgaatctccgccccgccccatctg

SEQ ID NO: 57818 - DNA, 30 bp, Homo sapiens
  chr22:20004866-20004896
  hyper
tgcttgaacacagtcgtctgaccctggggc

SEQ ID NO: 57819 - DNA, 30 bp, Homo sapiens
  chr22:20008352-20008382
  hyper
gcgacctcccatggcgtccctgcaggcagg

SEQ ID NO: 57820 - DNA, 30 bp, Homo sapiens
  chr22:20009260-20009290
  hyper
agtccttgccccaccgctgggctttgtagc

SEQ ID NO: 57821 - DNA, 30 bp, Homo sapiens
  chr22:20067458-20067488
  hyper
cccggcattccccgcgctccccgagcttcc

SEQ ID NO: 57822 - DNA, 30 bp, Homo sapiens
  chr22:20104981-20105011
  hyper
gttttgaatcgcggcgcgtttcccgccgct

SEQ ID NO: 57823 - DNA, 433 bp, Homo sapiens
  chr22:20255236-20255669
  hyper
ttaaccccttggtggccggggcgctccgaggccgggccccgcccttccagcccacggcccccgccctcgacttggcccagcatcggggaccctcggaccgccaccctcggccctgccgaagccgtcaactttcccgggaagcggcaacttttcctgccgcctccggctccgccctcccggggccggggcgccagcggccccagcctggcgcggcactgcggtggctttccctgccgcccggctacgcttccctcgcctcggcagcccgggacgggccctgcggctccggggagggggcgagccgcccccctccgcgccccgccgccggccgggctcgggtgcagcgcggacactcacctccagcggacgccctcttcatcgtaggggttgggcggggcgcgtcggggactgaaagtcgtttcggggcgggcgc

SEQ ID NO: 57824 - DNA, 354 bp, Homo sapiens
  chr22:20286610-20286964
  hyper
gcggggcggaacctcccgaggagagggcgcggctgggagcgcggggcggggccttccgaggagagggcgagactgggagtgtgaggcagggcttcccacggaatgggggcgcggagccggtcctcccgaggagcgggcgcggctgggaaggcgggtcgggtcctctcgaggagcgggcgcggctgggagcgcggggcgcggcctcaagaggagaaggggcggtgggtcctggggcgtgccagaacccttgaggaagaagcgctggtgttctggagtatgaccaccggagccggccgggcctcgggttggggcggggcctcaggggtggggttgggacttcgggatgggttctcc

SEQ ID NO: 57825 - DNA, 901 bp, Homo sapiens; identical to SEQ ID NO: 13339
  chr22:20790617-20791518
  hyper

SEQ ID NO: 57826 - DNA, 30 bp, Homo sapiens; identical to SEQ ID NO: 13340
  chr22:20791718-20791748
  hyper

SEQ ID NO: 57827 - DNA, 61 bp, Homo sapiens
  chr22:20792308-20792369
  hyper
acttggaggaggcccgccgagcgctggtggagggagggtccgcccgaggaatccccggttc

SEQ ID NO: 57828 - DNA, 10 bp, Homo sapiens
  chr22:20792481-20792491
  hyper
cgcaagccca

SEQ ID NO: 57829 - DNA, 30 bp, Homo sapiens; identical to SEQ ID NO: 13342
  chr22:21271377-21271407
  hyper

SEQ ID NO: 57830 - DNA, 704 bp, Homo sapiens; identical to SEQ ID NO: 13343
  chr22:21319204-21319908
  hyper

SEQ ID NO: 57831 - DNA, 30 bp, Homo sapiens
  chr22:21336322-21336352
  hyper
gtgggcctgggaggcgccgggaagagcagt

SEQ ID NO: 57832 - DNA, 30 bp, Homo sapiens
  chr22:21356761-21356791
  hyper
aacggggcctgggacgcttgcacgaaagaa

SEQ ID NO: 57833 - DNA, 157 bp, Homo sapiens; identical to SEQ ID NO: 13344
  chr22:21368224-21368381
  hyper

SEQ ID NO: 57834 - DNA, 377 bp, Homo sapiens; identical to SEQ ID NO: 13345
  chr22:21368435-21368812
  hyper

SEQ ID NO: 57835 - DNA, 376 bp, Homo sapiens
  chr22:21386500-21386876
  hyper
tccccagagtcgagccggacccggaacaggagccgcggctctgcgtcggggcgggtgtggcccaggcagccacctggccacagacagacagtggcggctacatacacccccgcccctgcacccgtggccaggctggggtatccgcgcgccaggcggaatgcaggggcgccctgggcccgcacacctccccatgtccgacacgccgctgctgctagagcctgctccgccgcgcccccgtccccggacacctgcgccttcgcctgttcttgggcctgagcccgtcccagtccccgtccccgcaggatctgctgcaacccacctgctgctgccgcagccgctgcctccgctctgagcactgagcccgcccagttcgccg

SEQ ID NO: 57836 - DNA, 110 bp, Homo sapiens
  chr22:21386893-21387003
  hyper
cgcccccatcccaggccccccgcgcggccccacccgctgccacacacccagatatttcaccctgcccactctgcccgacctcgcaaggtcgttaccggagctcaccgggg

SEQ ID NO: 57837 - DNA, 369 bp, Homo sapiens
  chr22:21399921-21400290
  hyper
tcccattccatgaaaggggggcgatgctggaaccgcctaggggaggcagggggataaacgcagcaaggcgcccaatccggtgcatggtctgtggcgcatgcagtgtatcagcccgggcgaggagcctcagcacaagccggccacagtttctacggcaaccgacaacaccgggttgccggggcgaccgccgcgggagagcgcgtcgctattggctgtggggggtgcctgttgctggacggcacattcggttggtcagcgcagccgcagactccgcccacaatcccgggccgcgctctgggcgcggggtcaagctgtctccgactcagtgtctgagactgcgagagggtcgtaaccatgaggggttcctgt

SEQ ID NO: 57838 - DNA, 30 bp, Homo sapiens
  chr22:21922623-21922653
  hyper
tcctagcaaactgtcgccttgtgactgcag

SEQ ID NO: 57839 - DNA, 30 bp, Homo sapiens
  chr22:21996411-21996441
  hyper
atcaaaaccctcctcgtgtctccagtcccc

SEQ ID NO: 57840 - DNA, 30 bp, Homo sapiens; identical to SEQ ID NO: 13347
  chr22:21996694-21996724
  hyper

SEQ ID NO: 57841 - DNA, 1131 bp, Homo sapiens; identical to SEQ ID NO: 13348
  chr22:22005793-22006924
  hyper

SEQ ID NO: 57842 - DNA, 224 bp, Homo sapiens; identical to SEQ ID NO: 13349
  chr22:22012118-22012342
  hyper

SEQ ID NO: 57843 - DNA, 71 bp, Homo sapiens
  chr22:22020154-22020225
  hyper
cgaaaagacgcctgcgggagatggcacacctagctaggaccccatactgggcaggcgatccttccgagcat

SEQ ID NO: 57844 - DNA, 30 bp, Homo sapiens
  chr22:22020542-22020572
  hyper
ctcccggaagctgccgccctgtctccagtc

SEQ ID NO: 57845 - DNA, 332 bp, Homo sapiens
  chr22:22220989-22221321
  hyper
agtaaaaacttcaagacggaaatatgccaccaacactggcgtcagtaatccattttagaaagcctgcgcggagaccaccattagcaccgctgaggatatttaatgaaagccgttggctgcaaacagaggcgaagagagaaaaacgattatttcggtgttctgcacacacgcggaggcaaaacgctttcaggacctcagcagccaccgccgccaacaccgacaagcatctgatggaattcacagttttacaatcgaaagtccaaaagaaggccatgatactagcaaattgaggggtggggacccttccgttgccttcccgagggtccagactt

SEQ ID NO: 57846 - DNA, 31 bp, Homo sapiens; identical to SEQ ID NO: 13350
  chr22:22280174-22280205
  hyper

SEQ ID NO: 57847 - DNA, 30 bp, Homo sapiens; identical to SEQ ID NO: 13351
  chr22:22292759-22292789
  hyper

SEQ ID NO: 57848 - DNA, 185 bp, Homo sapiens
  chr22:22307182-22307367
  hyper
cagctgtctcctcgcggctccgtgtcccgcaagctgctgccggccggccccgcccacttcccgtccctggccgccgcgggcgccgcgggcgccgcgcaggcgcagtcgggcctccaggctggcggggccggacctctgctgccccctggcggctacgtggacggtgactgcggccctttagtggt

SEQ ID NO: 57849 - DNA, 30 bp, Homo sapiens
  chr22:22337354-22337384
  hyper
cccagattcttccccgccacggagagacaa

SEQ ID NO: 57850 - DNA, 405 bp, Homo sapiens; identical to SEQ ID NO: 13352
  chr22:22862457-22862862
  hyper

SEQ ID NO: 57851 - DNA, 88 bp, Homo sapiens
  chr22:22863219-22863307
  hyper
ggggttaaattgagaaggaggagggcagcagcaatacccctgaggccttgaaaggatcttgggttccggatcacggttccaggcagtc

SEQ ID NO: 57852 - DNA, 31 bp, Homo sapiens; identical to SEQ ID NO: 13354
  chr22:23254251-23254282
  hyper

SEQ ID NO: 57853 - DNA, 30 bp, Homo sapiens; identical to SEQ ID NO: 13355
  chr22:23500537-23500567
  hyper

SEQ ID NO: 57854 - DNA, 442 bp, Homo sapiens
  chr22:23523109-23523551
  hyper
gcgcgcagcccggcggcgcaggtaaggccggccgcgccatggtggacccggtgggcttcgcggaggcgtggaaggcgcagttcccggactcagagcccccgcgcatggagctgcgctcagtgggcgacatcgagcaggagctggagcgctgcaaggcctccattcggcgcctggagcaggaggtgaaccaggagcgcttccgcatgatctacctgcagacgttgctggccaaggaaaagaagagctatgaccggcagcgatggggcttccggcgcgcggcgcaggcccccgacggcgcctccgagccccgagcgtccgcgtcgcgcccgcagccagcgcccgccgacggagccgacccgccgcccgccgaggagcccgaggcccggcccgacggcgagggttctccgggtaaggccaggcccgggaccgcccgcaggcccgg

SEQ ID NO: 57855 - DNA, 31 bp, Homo sapiens; identical to SEQ ID NO: 13357
  chr22:23546141-23546172
  hyper

SEQ ID NO: 57856 - DNA, 31 bp, Homo sapiens
  chr22:23864390-23864421
  hyper
ccttacccctcctccccggtgcccagggccc

SEQ ID NO: 57857 - DNA, 30 bp, Homo sapiens
  chr22:23908322-23908352
  hyper
cggcagctgggctccgaacccaggcctgcg

SEQ ID NO: 57858 - DNA, 30 bp, Homo sapiens
  chr22:24059627-24059657
  hyper
gaggggcggggcggcgcctgtggctggaac

SEQ ID NO: 57859 - DNA, 30 bp, Homo sapiens
  chr22:24110100-24110130
  hyper
gcagcggtgctgtcgcggggacaaatgccg

SEQ ID NO: 57860 - DNA, 280 bp, Homo sapiens
  chr22:24110500-24110780
  hyper
ctccaggctggactccgctctctgccccctcccggactcggctgtctgtcccctccctccagacagggtctgctgaccaccgcgtggcctgggagtctccggtggcctagggaagtgaagcgcggccctggggaaggcctggagcaacccatccccagaactcccacgagggggcgtcccaacccgtcttcgactgttggccaaaatgcgctgccaatgctggcagccttacgcagtgcccgcgggggatatgaggccccccgcgcggccctgaacccca

SEQ ID NO: 57861 - DNA, 30 bp, Homo sapiens
  chr22:24110790-24110820
  hyper
cgggccggcccgaccgcccccacctagtcc

SEQ ID NO: 57862 - DNA, 31 bp, Homo sapiens; identical to SEQ ID NO: 13358
  chr22:24113336-24113367
  hyper

SEQ ID NO: 57863 - DNA, 30 bp, Homo sapiens
  chr22:24129322-24129352
  hyper
agcccggctccggccgcccgcctctgccgc

SEQ ID NO: 57864 - DNA, 465 bp, Homo sapiens; identical to SEQ ID NO: 13359
  chr22:24180528-24180993
  hyper

SEQ ID NO: 57865 - DNA, 699 bp, Homo sapiens
  chr22:24181054-24181753
  hyper
cgacgtccggtccgcccggccgcttaccaccgcggcggtggtgaggacacaggctgcggtgtaagcccgcgtcaccgccggcacctgcaggaactcggccgctagtccctgccacgccattgaaccttctcaagcacgcgtggcccagccagcaacgcgctctttaacccgcctcccagccccgccttcggccaatccgcatccgaggcgctgcgcgccccaggctgaaaagagagcccctgagcccgacagccaatggaaggaagaagagggaaattaggggcggaaagggagagtgggcgggtagaggctggtggccaatgggcaggcgccaaggttgagcacgtggcggttgttgtggctgcggtggtggcgcgggagaacgtgtggccaatgaggaactggtcatttcgcggctttctaggagaggaccagtagcgtggacccacgacaccacgggggcggggctaagatcgtatgggttacaggagcgaagacccgagcaggcgaggcaaaactggaaagggcggggcgcgtgggcggggcgcggagtgtggcggctcagaccgtgctggctcactaactgacgacctagccacaacgttgtcctcgctgccagcccaagacaggcccacctaacccacagcagggaggcattcgggaatgtgtccaaacctccccaaacgtccagggccccac

SEQ ID NO: 57866 - DNA, 30 bp, Homo sapiens
  chr22:24236534-24236564
  hyper
ggcgccggcggtggcgtcacaaaaggcggg

SEQ ID NO: 57867 - DNA, 90 bp, Homo sapiens; identical to SEQ ID NO: 13361
  chr22:24236848-24236938
  hyper

SEQ ID NO: 57868 - DNA, 30 bp, Homo sapiens; identical to SEQ ID NO: 13362
  chr22:24407960-24407990
  hyper

SEQ ID NO: 57869 - DNA, 1327 bp, Homo sapiens
  chr22:24551714-24553041
  hyper
ggccaatgccatcccggcctgccgcactcctggccacccctacaccatgctctctggggccccacagcttcctgcagtgagagctgcacccactttgcccggcagcggtccacagcccgccaccagcggccagtccagggaaccggagaggattggccggcaaaagtcagttgcgctcctgggcccgcttccagtagagtgccggcgccccgtccggccgcgcctgccccgccccggcccgccgcgagcgagagagcgaacgagcctccgcggccatggcccggcgctcgccctagctccactgcacagatgccacggcggagccggcgggtaggaacttggcgggggcgggggccgggactggggccgggactggggccggggctggggctgcgcaaccgcttcgcctccgctgcccgtctgggtctccactttgctggcgcttttgctcaatcgtcccctggtgggctctggcggccgccccccgcctcggcgcaccaggcgcagcaggaagcccgtgggctgtggtttccccggcgcccccgcggaggaaatcggccggcggcggggtgctgcgcccccatgcccagggcgggctggcacccggttcagcgtcaggtgggcggccaagccggcttgggcggcggcgcgcgggggcggcaggcgctggtgaagcccgcacacgcgccagcgcatccagccctaccaagccccgggctgggagctggctcgtgggggcgtgcgctgcgcgaaagcgaaagccgcccgccagagcaactttgcggcggaaggcgccgacgaggagctgtgccgtgccgctcttggggatggtgagctggccgcccggccgggtgggcagcgcgtccgggcgcggtgcttcgctagctataaataggtgctgtgcggggacaggaagatggttccagccctttacaagcaccggcccgttatgtgcgctgggctaggaccttgccccgcagcggagtgggaggagtgaggttaggggtaacggttgcatgggatggggggtgggcacatagagcctacagcagagttggcggcggggctctcccatgcacttggttgtttgtcgtttctgcttttcccgggagggggaagggaggaacagcccggcagttctggggaccttagcgctccacgtcttatttggcaggagaggctggaaacgagcgggcgccagctgcaggcaaattgcaggctttcccagcccttgtctgcagagagaatcattacctgtggatggcgcggggaatcccttgccctcagtagccccgcctggagagacaggaccgcgttgtggggggtg

SEQ ID NO: 57870 - DNA, 31 bp, Homo sapiens; identical to SEQ ID NO: 13365
  chr22:24563089-24563120
  hyper

SEQ ID NO: 57871 - DNA, 37 bp, Homo sapiens; identical to SEQ ID NO: 13366
  chr22:24643677-24643714
  hyper

SEQ ID NO: 57872 - DNA, 31 bp, Homo sapiens
  chr22:24820223-24820254
  hyper
ctgtcccaaactgcaccggaaggcgcgcagg

SEQ ID NO: 57873 - DNA, 30 bp, Homo sapiens
  chr22:24951362-24951392
  hyper
cctgaatagaggctcgtcccttcggcaagc

SEQ ID NO: 57874 - DNA, 92 bp, Homo sapiens; identical to SEQ ID NO: 13367
  chr22:24989195-24989287
  hyper

SEQ ID NO: 57875 - DNA, 1570 bp, Homo sapiens
  chr22:25348187-25349757
  hyper
agtgcccttgcttggcgcgaggaggcgccagcaccgcgcacagaccttgcccgcccccgggccggcaccagcagcccaggcaagtcagtgggcccacatttatggagcgcctcctgaaatcctgggttgcattaggctctcggggtcgccggctgggcagcgggtcggtgccggtggcgggggatcctggctggtgactggggaacatccagggaacgcgggagggtacccggagcaaagttcccaattggacagagcggggtcgggcctcgaggggcgggagcgcttccggcaggggtgtccaagcgagtcgtgacctctgacccgccggagaggtcccaggcccaggcgccactgcggactcgggtcctgcctgctctgctcccctccgcgcaggcgcggccggcggcagttcccatggtgacgggggcgcgtccccgctcgaggccccgcccccagcaggctaggctgcgcggggctgcgggctcccagggcaggtgccgcgggctgcgggcaggtggcggcgcggcgcgggctggcggtggctccacggtaggttgcgcagcggctgcgggcagtgggggccggctggccgcctcctgtccccggccgacgaggtagctgggggtgacggcggctggcgagggccgccaagtttctgcccggccgaggccccgggagaaaagttggcaaagttggccggggaagaggcggggagccggaggatttccccagactccgggtctgcagggagggaggatcccggtttgggagccggggaatccgtctcccgagacttgagagtggatcccgcgggaagatcccgcacagggcaaccaatggatcacgtgccacctggttggcgacttgggagtcgatccctggaggggatcgggcgctggaggcctggggtcccactggatccccagtcaggggtgacggcgaagggtgattcgagactgggagcgagaggatcaatctcctcccatgccagcctgagccttgggaatggattcagagagatcccgtggctaggagctgagggatcgctggagatctgggttactcagcctggagctgctagggtctggacatttgtgcgggttggaggccccggaggtggaagtgggaagcaagggcggcgagcgagacggaaccctggtcgaggggagcccggaggacagcgcggtggttcggggggcgtgagaggggcggcgcgcggggcccctcggacgcggaggctccggacacgtcctctcggcctggcctgcgccccccctccgctcgtcttcccagggcggaggcgccctgatgggattaagcctcagtccccctgttaccaggcaggcccgcgtggtccccgccccgatggcggcgcggcccacccgggctcacgggtggggccctcgggatgggaagcggctcgttgacccccacccgagcctgaccttttcacaccctgctggcacaaactcgcctgggagtggggacgccgcgccttaaaaccctgctgtttgtccagtcccggagcaggcgtgtgacctccaccgcgcgacgcctaggtggctag

SEQ ID NO: 57876 - DNA, 114 bp, Homo sapiens; identical to SEQ ID NO: 13369
  chr22:25507703-25507817
  hyper

SEQ ID NO: 57877 - DNA, 671 bp, Homo sapiens
  chr22:25678197-25678868
  hyper
gcccggcccgctgggcgctgttcacaggtagcttggaccagagcaggggcttcatcattacctgcggggacaggtgggacacatgcatttccggggtcatcccagacctcctggaggatgctgattgatgctgtcccgtttgagaactactgtgtccaggtagcagaggcctccccgatgccccttgagtagtgggcacggggcccagggcttctctggatgagctgggcgggcatgagaacgcatggagctgggggcaggaggtcggagcagcgaacgaggaggagaaggagtaggcggaggccgaaggagaggtgggggaggaagaagaggaggaggaggagtcccttgtggccaccccgaagggagggagggctaccgtagagacttggtcgagaggcgcgggacaagcctggccgctgggactgtgcgctgaggtgcaccgaccgtcgggccgcgagctccccgcagaccctcgcggaatgagctggggggcggcgcgcgaggcggcggagcggaaggcgcactgcgaccccggcgggctacagcctgcggcgcttgcagggcgctggtggggcgcgccgagcaggggctgccctggggctgccccagtcccaccaggtcggggctcagctggcggcggcggcggcggtggcggcagcgcgtcccat

SEQ ID NO: 57878 - DNA, 207 bp, Homo sapiens
  chr22:25679042-25679249
  hyper
cgctggtccccacgccgccgtccccaagcggccgtcagcgacctcctgcgtccgggagggtcgggcattgagtcgtcgctgtcctgggtgcgggtgacaccgcggaactggcgatgcggggccggcctccccgttccagtctctgaaatggggcatcggatggccggtgggggggactccgggagagagcgctccaaagtgcccagc

SEQ ID NO: 57879 - DNA, 110 bp, Homo sapiens
  chr22:25679267-25679377
  hyper
cgagcgccccagggaggggctggttatgacttggctggaccagctccatccctgtcgccccctccccccggccctgtcctgtcctgtcccatccccgtggttcttcctgt

SEQ ID NO: 57880 - DNA, 30 bp, Homo sapiens; identical to SEQ ID NO: 13371
  chr22:25800648-25800678
  hyper

SEQ ID NO: 57881 - DNA, 662 bp, Homo sapiens; identical to SEQ ID NO: 13372
  chr22:25816891-25817553
  hyper

SEQ ID NO: 57882 - DNA, 382 bp, Homo sapiens
  chr22:25960698-25961080
  hyper
tgaccgttggacgcgcgctccccgcagaccctcgctgaaggagcagggggcggcgcgcgtgcgcggggcgccgggcggcgcgcgagggggcggagcggggaggcgtgctgcgaccccggccggctacagcctgcggcgcgcgcagagcgctagtggggcgcgcggcgcgcgcgcggggcgggggcgcgcggaggggggggctgccccggggcggcccccccaggtcggggcgcggcgggcggcggcggcgggcgcgcgtcccgtccaggtccggagtaaccgccgccgccgccgccaaagctcgccaacatggcggacctggaggctgtgctggccgatgtcagttacctgatggccatggagaagagcaaggcgaccccgg

SEQ ID NO: 57883 - DNA, 248 bp, Homo sapiens
  chr22:25961110-25961358
  hyper
cggagcccaggtaccagctgccccggccggcgccggccccaagccgccgccccctgcggccgccagctaccccctgcttcctggagggtcgggcgctgagcctccgctgccccggggcgggtgacacagcggagcgggcgatgcggggccggcctcgtcgttccagtctctgaaatggggcatcggagggccggtggggggcaccccgggagagagcgctccaaagtgcccggcgcggcgccctgcgc

SEQ ID NO: 57884 - DNA, 30 bp, Homo sapiens; identical to SEQ ID NO: 13373
  chr22:26564738-26564768
  hyper

SEQ ID NO: 57885 - DNA, 238 bp, Homo sapiens
  chr22:26565122-26565360
  hyper
tctggaaaatggtccgggtgctctccagcctggcctggccaggcagagctgctgggagcgtcagcagggagagaaaacgctcggctcccaggacgcaaggggaattggcgttaaactttgcagggccgacgggccggcggccagaggaggcggctggcacccccggcgccgccgcggcccctccagctcactgcccgctcgcccgccccctccctccctgcactcgctcggcacagac

SEQ ID NO: 57886 - DNA, 148 bp, Homo sapiens
  chr22:26565502-26565650
  hyper
ggaagctgccccggcccgcggcctcctccctcgctcccgcttcccctttctcgctcaccgccgccctccttccccagctccctcgccgtccgcccgccccacagccagcggctccgcgccccctgcagccacgatgcccgcggcccgg

SEQ ID NO: 57887 - DNA, 538 bp, Homo sapiens
  chr22:26565734-26566272
  hyper
cgccccgaggggcggggcgggcagggggcaaagttgccgggagagcggggcagccaggggtcggggctgaccagggcgactcaggcaccacccgccgggatgggaagcggtggtggctgtccaaaatcggggctaggaaccgcacgtccccttggcccgggctgatgggagtgtggaggcggggatgtgttgaaggactcgggcgcttccctgcttcggctgcgggctccctttcggtcttccccggctgcggggctgattctcctttgcagccaaagaggttctccttggagtggggtcgcctccaaaccccaaattcccggcgcttctctgcaaccgcacccggggctaggtgccagataattatcttcctctccgggagaggacaggaaggggggtgagaagctgacccaccctgcaactgaggactagactcaaacagtgcatttgccgctccccccgacaccacagaaacccttgactcctttggttcaggctaccccgagggtctgtgttcctggatcgatctcagccaagc

SEQ ID NO: 57888 - DNA, 386 bp, Homo sapiens; identical to SEQ ID NO: 13377
  chr22:26756624-26757010
  hyper

SEQ ID NO: 57889 - DNA, 145 bp, Homo sapiens; identical to SEQ ID NO: 13378
  chr22:26763713-26763858
  hyper

SEQ ID NO: 57890 - DNA, 216 bp, Homo sapiens
  chr22:26773509-26773725
  hyper
tgcacacatcctcgtcgtcattcacagaggtgccgctgctcaggaagtggcaccaactgttcccgttcaatattgtaatgtttctcctagctggggagaagtaacttctctctcctttctttcccccagatgtcgctactattccaacctccgcctgcctctgatgtactcccacccctacagccagatcaccgtggaaaccgagtttgacaaccc

SEQ ID NO: 57891 - DNA, 31 bp, Homo sapiens; identical to SEQ ID NO: 13379
  chr22:26825081-26825112
  hyper

SEQ ID NO: 57892 - DNA, 30 bp, Homo sapiens; identical to SEQ ID NO: 13380
  chr22:26879458-26879488
  hyper

SEQ ID NO: 57893 - DNA, 140 bp, Homo sapiens; identical to SEQ ID NO: 13381
  chr22:26880365-26880505
  hyper

SEQ ID NO: 57894 - DNA, 30 bp, Homo sapiens
  chr22:26908361-26908391
  hyper
gtccgagggtccagcgtaccaaattcagct

SEQ ID NO: 57895 - DNA, 417 bp, Homo sapiens
  chr22:27053232-27053649
  hyper
ctagcccctttgtgcggcgggggctgcggagtgctccctccaagaccggttgcaccccgctttcctggccaggactctgggcgcgggtaaggaggggttgggtgtgaggttgtaggggcgcaaggaggcgggaggagggtggaggtgagggccgggggtggggcgcctccgcccgccagccgctcccgcattaaaatttcatgggcgctgcagcagctacaaagacgacgccggctgcgctcgcgggaccagagggagggaggctgcggacgagtgcggggaggagtttgagatgggaggcgcttgcaggggctcccccagttctgcgctgtgagccggggcacaaagagccctctgcactagcgccgcaggaccgcggacccgaggtaagacgtcgccccatcctagaagccttcc

SEQ ID NO: 57896 - DNA, 166 bp, Homo sapiens
  chr22:27053912-27054078
  hyper
ggaacaaagaccctttccttccgacgacacaagacacaatttgggaggtggacccgcggaccttctcggtccaccaggttagcaattaactggccaagccacgggcagagccagagggtctcggaactggaggtgggggtggggcggtggggcagggtccttgagc

SEQ ID NO: 57897 - DNA, 367 bp, Homo sapiens
  chr22:27068886-27069253
  hyper
acaggaagtcagctagagagccgtctcccctctctggagccgagagaggccggtttcccccaccgtaagtagacgtggggccgtgaccggaagtccttgggaaagatccgtcccattcccggaagctagagggcgttagttgtcgggttgaaaaggggtgtggggaggggaagcagctttaccccgggctcggagtttgcaggagagagaagtggggagcaagaagtgaacctcaggggctcacagggttcccgcagatgctcaggccggccaggaatgcatctctggctctctgttcccacggacgtcactgcctcagccagcctcccccagagcccgccagccgctaagccggggccacacctgg

SEQ ID NO: 57898 - DNA, 643 bp, Homo sapiens
  chr22:27299013-27299656
  hyper
ccttagtccttcagcaagggccggcccttgctcctttcctgagcggctattttgagagcgatggaggggagagggtattagattcctgaccttgaggtcggggaggggagggtgatgctagtggtggacgaaagacttgaagataatgagaaattgcatcaactttacccaggctgtttctgggtctagaagcaagcaaaaataaggcgggagcgggtggggggaagaaaaagaggcatttattttggagccgtatcggaagcacaagtgtcatgggctgaaaggccgccttctcctgcgggctaagggtgtgggcgacagctcgcacattcaaataagggagcgattacacggcgcttgcttctgaagacggatttcctggtagggggagcgggcgggggggctgggccggtgtaaaggggacggcaacattaggctttggcaagttaattagggttcaggagtccagcgagcgagcagggggagaggctggatttgcataaatccatttacataatgttcttcacaaattgtgcagccagaaggcagggagggggtggggagggaaagggctggggagggggaggtggttagacgcccgaggcagccgccgccaaagggggaagggcgaggcccgagatgg

SEQ ID NO: 57899 - DNA, 164 bp, Homo sapiens
  chr22:27496884-27497048
  hyper
gccttgccgcgcctgtcaccccgcagggctgtgccttacagccggcgctcgaccctggaaaaaattgactgtctgtttctgcctgactgctcgagagttacaggctgcaggggcggggggaggaggcgcgagggcaggcgggcggctgcctcctcatcaggatg

SEQ ID NO: 57900 - DNA, 98 bp, Homo sapiens
  chr22:27695126-27695224
  hyper
tgagggtgcagggaagagagacgaagagaggaagggggccgagctggggagggggaggccgcgcagacgacgctgccgggagggctggtggaggagca

SEQ ID NO: 57901 - DNA, 30 bp, Homo sapiens; identical to SEQ ID NO: 13385
  chr22:28196819-28196849
  hyper

SEQ ID NO: 57902 - DNA, 905 bp, Homo sapiens
  chr22:28197080-28197985
  hyper
ggagtccccgcgccccgcagcccgagcctccaccgagcacgatccgctcgcacaatccccgtaggctccgggcgagcggctgctgcttcttcagcgggtcggaggactggaggctccgctcggcatcgccggtgccggcccccgagccgaggacgcagaggggctgcgaggcggcaggcgccgggggctggagccgagggtcggggaaaggcgcggctcctctgctcggcagcgggtgcgctgcgttcggcgcgcagcttcgcggccacgtccgccgcctgccgcttctgttctccgccgttgggtgtctgagttcgccggagtctccgcgcaccgttgcaggcgcgggagggcagcgagacgaggggttgggtcgctccaaggctccggttccctgcctccgcgctgaggtgcttcgcgagtccctctcggacctgagggaggggggcgtacgcgggtcggggggccacgccgggcgagcaggctaaggcgttcccgctgcgctctcagagcccggaatggggggaggggggcgcgggggcagctctggggggtctgcgcacccctctcccgactagcgggggggctctgcgtggggcgttccgagggtctcggctcccctctctgtgtctgcctctcgcccagcgccgggagaagcagcaacaagttttgcatttcagcaatcaatttcagccattacatttgcaccaatcagcgccgcccaagttccgggctcggggcggggctcgctcttaaggtggtccggggtcctggctgccgaagcccccgccacgaacccgcactaccccagctctggggtcccctgcgcccgcctctcctcggggtccggcgtcagtgcgctgggggcgcgccccggcctccgggcgcatcgagctggagagggt

SEQ ID NO: 57903 - DNA, 450 bp, Homo sapiens
  chr22:28198203-28198653
  hyper
cggggtgaacactccgttctccgctagcggcgcccaagttagccggccctgggattttcttggagggtaaagcagacggggaacctcgaagttagggttctcctcgagagacctgggcgcttgctcactcctccgtcactagggcgttcacaattgttccccttccccactgcctggggttcccggttctcaccggccggcgtgggctccaaggagtcacagtcactcagccactttatgggggagcacatcggttgagcccagtaaccggagcgacttgcgaggcggctgggaaccccgagaagacacgcacgaagagggcgcacccgccgggccgcacaccttgccctgggccacccggtccaagacccagaccctctgcgggtgcgaagttggcctccttaagagatcaattaaactgaagaggccgaggaatggaattgggctgtg

SEQ ID NO: 57904 - DNA, 30 bp, Homo sapiens
  chr22:28314622-28314652
  hyper
gctttccggaatcccggctccaccacgaac

SEQ ID NO: 57905 - DNA, 1323 bp, Homo sapiens
  chr22:28838041-28839364
  hyper
tcccacatttagaaacgttatttctgggaccaatagcaatttattttgatagaaccgctggatttttttttttcttgagttctcaacaaaggagccatattaggaaataatctcgcaaaaagcaaagtgccccctcccccttttccccatgatcgattcacacacgctggtgcacgctgacacgcacagacacacgcccgtgcacaatggccagcgcaggcaatcgcacgggcccacgaggcctcaggagccccgcaggctgaaggcccggctatggccagccccaggcgctcaggcaggaggcctctcggcccgccgccccggaaccagctgctgggctggtgtgctggggctgctcgccccccagcggggccctggggaaacggctgccagcggctcagagccttttaaccccttggggaaataggtgttataacaccacctgcggggcctgtgtcaggggtgcagcctcaaatccactcccgccccacgccccgccatggggcaacacctagtaggtcttggctggctcctgcaaagctaatcgtgtcgctgtctgcacaggacttctaaagcaaacgggtgcttccgagctgtcacccctggggctccaggcatatcatgaaggaaaaacttaaagggcagtggatgcagaccagatttggtaactcgtccctaagggactgatgcaagtcccaaaggaaccagggctgtttggaccagctggcccagcaaactacggaaggggtggagagacctgaaggtaaccgccccgtgttacccttccccgggttgggctttggggccccattcccctctccaggacacttaccttcttccggggctgccatttcatcatatttgtaaagccgatacgtggaacatcaagatgttggctgggggctgggggcagatgcagggcagcgacgactgcaagtcatgctgcctccctcccaccccctaattctttcccatattcactgcgaagggaaaagccccaggagagtccagtcttttcgccttcagttcaatgaaaagtatccccaaaccacgaacacacttcccaccaggctaggaagtcccagcagccaccggcgtactcctgccagagcggggcattttcccggccggcgcctgcaaaaggagcctgtagcagggggtctccaagctggctgcagagaccctccctcagagaagagactgagaacgcgggctgctacagaatcccagccgggcttctaccatccaaaccccttttggcgaattctcctcttctcaaaaaagattagacaagcaatcaaaccctcacgcgcagcctggagc

SEQ ID NO: 57906 - DNA, 30 bp, Homo sapiens
  chr22:28839652-28839682
  hyper
ccttcccttcagtgcgagcacagccagccc

SEQ ID NO: 57907 - DNA, 832 bp, Homo sapiens
  chr22:29075350-29076182
  hyper
ccccaccccggtgtgcgcaggccaacacccatacacaccctcacacacccacacacatccacacacactctcgcggaaactgagccaggcaggcggcggaccaggtcccgccgcctcacggctcgcggctgggatcgaacccggactgcgagacgccttccgcctcgcaggcgctcctctgccgctgaggcccggcccggctcccaccgccggagtttcacaaagaaagtctcccggcccgagcccctcacgcactcaccggcgccgacgccggcggcgactctggctcccgccgccttcggctccttgcgggggtcggcccttgggtcggctcgggcgccggcggcggcgactgctccatccccacggggcccgggccgcgtccgcctcgagctaacggtcccgccagctaggcgcgcgcgccggttccgcgcgccatgttcccgccgtgctgcgcgccgccgcggcgcccctcactgcccccaaaccgcgcgcgcgcccccgcgggcccacacatgcaccgcgcacgcgcgcgttcgccgcgccccctccccgcgcgccccgcctcgcgccctctggagctggccgctgttcccagtgtctcgcccacccccgccgggcccgtcggactcggcgggtgagcgcgcggttcccggctccgcaccgccgcctgcctctctgcagaccaccccggacccgacccctcggccatttccccacactgccgctttcgcttcccccacgacgcggggcctgggacgacggtctgggccaagaggaacttccccgcaagaagtgtcgagttaaggacgctactaagggggcgggatcg

SEQ ID NO: 57908 - DNA, 30 bp, Homo sapiens; identical to SEQ ID NO: 13389
  chr22:29091825-29091855
  hyper

SEQ ID NO: 57909 - DNA, 30 bp, Homo sapiens
  chr22:29137959-29137989
  hyper
acccgggttcccctcgggtgatcccgcccc

SEQ ID NO: 57910 - DNA, 30 bp, Homo sapiens
  chr22:29168596-29168626
  hyper
ttttgcttgtagtccggaaggactgcaaat

SEQ ID NO: 57911 - DNA, 30 bp, Homo sapiens
  chr22:29196692-29196722
  hyper
gtccggcgtggcagcggcaatccctggcca

SEQ ID NO: 57912 - DNA, 31 bp, Homo sapiens
  chr22:29279216-29279247
  hyper
aggggcggagcgaggacgaaggggcggagta

SEQ ID NO: 57913 - DNA, 74 bp, Homo sapiens
  chr22:29279555-29279629
  hyper
cggggataacccctcacgtggagcagatgaaagggccgcggcgcgacggccgggggagccgagctgagcctgcg

SEQ ID NO: 57914 - DNA, 74 bp, Homo sapiens
  chr22:29279910-29279984
  hyper
gcgcgggccaaggagacggcgttcgtggaggtggtgctgttcgagtcgagcccaagcggcgattacaccaccta

SEQ ID NO: 57915 - DNA, 30 bp, Homo sapiens
  chr22:29300290-29300320
  hyper
gcattcttaagagctcgaacaatcttgaaa

SEQ ID NO: 57916 - DNA, 565 bp, Homo sapiens
  chr22:29426291-29426856
  hyper
tgtgcaatggcgccgcgacccggccgcggactccagcctctaaagtcgggtacctttaattaggagaaattaagtggggctgctacatattttgagaataagtaacactatttaaacttaggcagccttaaccactaacttaaccgctgaattctcgctgctacatgtctcctaaatagatcagcataatcttaactaggacttaaaatgcatcatcttcgttccggaactcagaacctgcagccgacgggagcctttggaggcttaatgactttaattatggcgagaaatatcttctcccggtggggaggggcgcggccggtggcgaggagggcactttcccgggtcggagaaggccggatggcagcccgccccgaaagtcccggcccgctggattgggggttcgggggtggggggaacatagagaagcagggctggtggaggggaggagggaccctgcagggcggtacacgacgggtgggagtggggaggaggagggctcctggcgcggggaggagccgcgggaggggggatgttggccgcagggcctcggagttctgagctg

SEQ ID NO: 57917 - DNA, 425 bp, Homo sapiens
  chr22:29468747-29469172
  hyper
ccgggccgaggccccgcccctcacctgctgatcctacccttggatgggacaaacagagggccctgctgggccggcccaggtgaggcgagagatgggcggggcctgatgcgtgagtggcaggagcagcgcgcggccggggcggggcgtgcgtgcgcagtgggctccgccccccgggcctctccgcggatccgggcgggccccaggctgcaggggcggtggcggcgctgagctgggcgggccggggcggggcggccgggcggccggggcggggctacactcgggccccgcgtcctgctcccatggccgcccccggctccccgcgctgccccctttaccccgggccgcgccccggggccccgcactgacggcccatggcgccgccagccgcccgcctcgccctgctctccgccgcggcgctcacgctg

SEQ ID NO: 57918 - DNA, 201 bp, Homo sapiens
  chr22:29469213-29469414
  hyper
cggtgagtgtgagcgaccccccgccgcccgccctgagcggagcccactcgaggggcgacaagggccggccggcctgagagccccctccctcccgcttcaggaccttccgggccccttcccctcgcccctaggcgacgcccctcaggccgggatggtcccttcctgggacccgggctacccccaggcccgtcatcgacgccc

SEQ ID NO: 57919 - DNA, 45 bp, Homo sapiens; identical to SEQ ID NO: 13392
  chr22:29469460-29469505
  hyper

SEQ ID NO: 57920 - DNA, 30 bp, Homo sapiens
  chr22:29469704-29469734
  hyper
cccaaaatccccagcgactccccacgggcc

SEQ ID NO: 57921 - DNA, 30 bp, Homo sapiens
  chr22:29621461-29621491
  hyper
caatcccccatttcccctttttatttaatc

SEQ ID NO: 57922 - DNA, 214 bp, Homo sapiens
  chr22:29663972-29664186
  hyper
ggccgactcttcagcgaccgtccctagagccagcggacggaaccattccaaacagcctagtctcgtgctgagagcctctccggtttcacgctgagacccgctcacccccgctctggccccttagatgctattttggcccgagtgtcacgtcgggcgctctttagagaggactgggacaagagttgcggacgcgaagaacgagtaagcggtggtt

SEQ ID NO: 57923 - DNA, 969 bp, Homo sapiens
  chr22:29702351-29703320
  hyper
tttaaaaagagcccagcggggcttaaccctcccgcgtccggccggcctccgatgccccccgtcccctgttctgtgcggaactccggctttggccatctgcctacttctctgagcttcagtatcctcatctgtaaaaccggttcccctcatttcagggtcaaaaatgagcattcagtgagcacaaggagccctcagtcgccaggggcatcctccccctccccgcggcggtgccgtttatctggccaggggaggtccacccgggaggaggtgactttgcagcctccagccgctatcgcttcctgccttcatcttgggaacaggccgtgctgtgcgccagcccggggagcccaccgtctggggaggggggcgattaaaaggtcccaacctcctccccaggagaccaaagaggttggacggggccccgggtactaggctgggtgggggttgggcgcctgggccggtcgcagttgtctgggggccctggggctctctgcgtcgagagcgctcgaagacccgggattcctggcccgatcgcgggcggggggagaccccagctccaccccagctcccgccggctcggggaaggggcggcccctttaagagcgcgcggccccgcccgccccctccgggcaggatccgaattccagggaggcggggcggagacggcggcgaggaggaggccgcggcgcgggacgcatagagctgcggctcgggcggcgcctccctgcggcggcccggcccggctccggcccccgctggggcaatgctccccggggccgcgggatgagccaggtgagcgcggagacccccagcactccctgcctggtgcgcatggacgggggtggggaggcggggcgggaagcggcgtcctcggcctctgttccccggggctgtgtgaccttgggcggccccgcaccctctctgggcccagagccccagcaccggcagggcctgcggaggccgctctga

SEQ ID NO: 57924 - DNA, 30 bp, Homo sapiens
  chr22:29710261-29710291
  hyper
tccctagatgctctcggtgcttaccacggc

SEQ ID NO: 57925 - DNA, 797 bp, Homo sapiens
  chr22:29710516-29711313
  hyper
cactgctctagggtcggaggtctgtcctttactttgcacaaattactaaacgagtcttcgctccaggggacaaaaatgatagggcagagaatgaacccctccaccagcccccgtagaaagtacacccctgctcctgaccccagtctctcccattgtagctctgctcaaggccccaaacacaaaacgccacactctcgggaaggcaccgttatgcaccaccaagagctgctccacacccccagccgaggcaggcaaaggtggaggcgctcacaggagcaagggaacgcccctgggcaaaatcgcccggcctccagcctgggcttgggcgtctccaggtcggcgggaagggctgaaacgcaagtatcccaggacgcacacacatccctccatcccggagcacagccaggcgcccgaggcctccacgcggacacgcacgtgtgcaccgagcacgcacacccctcacactgtcacacgcccctgcccgctcctcgagccgctacctccggacccccggggctcgagccggggccagcgacgtcgccgtcgcggatgctcaagtcgtagacggcgccgtcgagcagcaccgcgggtcggtagaggcgcggcccgtccgtgggccggtggcgctcggggtagtcaccgaacaggaactggcggatgatggccgtcttgcccacgcccggggcgcctagaacggccacccgcaggctaccccccatggccggccggcgctgtcgctccccgcgctggaaagcctcatgggccggcgccgcaccgtgcgcccccaggccgtgcgc

SEQ ID NO: 57926 - DNA, 30 bp, Homo sapiens
  chr22:29784679-29784709
  hyper
cccctcggcagccgcggcgctgctatgctg

SEQ ID NO: 57927 - DNA, 30 bp, Homo sapiens; identical to SEQ ID NO: 13395
  chr22:29885579-29885609
  hyper

SEQ ID NO: 57928 - DNA, 30 bp, Homo sapiens
  chr22:29999392-29999422
  hyper
gaggcgggacggagcgggaaagtcctgcct

SEQ ID NO: 57929 - DNA, 30 bp, Homo sapiens
  chr22:30116424-30116454
  hyper
cccggtgacggcggcgttgatgtaccgggg

SEQ ID NO: 57930 - DNA, 170 bp, Homo sapiens
  chr22:30116799-30116969
  hyper
gcgcagtcggcggtgacggtgcggcaacgcggcggactggggcgggggtccgcgctgagcccccagcgccggcccggccggagcacccgcatcctgatcccctccgcggcgcccgcccgcggctctctgctcgcattgacattccgctcgtgtcgctttaaaaattcaat

SEQ ID NO: 57931 - DNA, 30 bp, Homo sapiens
  chr22:30234278-30234308
  hyper
cagacaggaagtctcggcctggccccgccc

SEQ ID NO: 57932 - DNA, 275 bp, Homo sapiens
  chr22:30642416-30642691
  hyper
aagaggaggaggaggaaggctcggcgccccctccctcgccgccaacctgccgcggggcgtgcggtgcttgggaccatgtgcccgcgctcgctccgggccgccacccagcgcctccggtggctgcgcgggcgccccaagtgttcgtgtgtctgcggcgggtgggcgtccggctcgcgctgccaagcgccccaagttgccgccgcgccccgcagcggggacgcgaagccggcgcggggcgggtgtatttacctgccgccaagaccttcattatgggc

SEQ ID NO: 57933 - DNA, 113 bp, Homo sapiens
  chr22:30642965-30643078
  hyper
tataatgaagccttcgacaaaacgccctgtggttttcctgcctggcttgtcccgggagttgtctgaagatgggcatcgccaggagggggcccctggccgagtcagcaggggtc

SEQ ID NO: 57934 - DNA, 264 bp, Homo sapiens
  chr22:30792873-30793137
  hyper
tgacttcaggagggcggagggggcccgtgtcagagccttccgcgccccagcgcatcgctccctactccgcctctcgggatcctttaagaggcggggcttggctgccagctccgcggcccgggcaaaaggctgggactttactccgggtggcggcgaggacgagtctgtgctccatcagctgccgcacccgccgcctcccgcccccaaaccccatccccgcggttgagccacgatgagcggcagagtcggcgatctgagccccag

SEQ ID NO: 57935 - DNA, 30 bp, Homo sapiens
  chr22:30793423-30793453
  hyper
gagtccccggaggccgctgagggcacaaag

SEQ ID NO: 57936 - DNA, 30 bp, Homo sapiens; identical to SEQ ID NO: 13398
  chr22:30820242-30820272
  hyper

SEQ ID NO: 57937 - DNA, 31 bp, Homo sapiens; identical to SEQ ID NO: 13399
  chr22:31002802-31002833
  hyper

SEQ ID NO: 57938 - DNA, 30 bp, Homo sapiens; identical to SEQ ID NO: 13400
  chr22:31003132-31003162
  hyper

SEQ ID NO: 57939 - DNA, 30 bp, Homo sapiens
  chr22:31063929-31063959
  hyper
ggggctccaggttccgcccagggactaact

SEQ ID NO: 57940 - DNA, 31 bp, Homo sapiens; identical to SEQ ID NO: 13401
  chr22:31090545-31090576
  hyper

SEQ ID NO: 57941 - DNA, 99 bp, Homo sapiens
  chr22:31090873-31090972
  hyper
ccgcgcgcgggtcggccggctctatggggaaagcggcggctccgagccgaggcggcggctgtggcggccgctcccgcgggctctcgtcgctgttcacgg

SEQ ID NO: 57942 - DNA, 711 bp, Homo sapiens
  chr22:31198440-31199151
  hyper
gagccgtggaccatccgagggcccctcccctgctgggtccaggcaaagggccggccctctccagcctcgattggggcgcgatagcgcccttagtgtcgtgtcgggttccaggccacgctcgggcattttaagaggctgaggtgcgccttccgctgcccgcctgcgtcccgccacggagagctcgcctttatctagccctctgggcgagagaagaaggctaatcccagcctgggacaaggctggctgaggcgtgccggatcctccggggaccgatcggtggcctcgcgcggctctcatcgctctccgagcagtgctccagggggcggagggagcctcctcgggcggtggggaggaggctggaggaatgaggacgcagcacggcgcgcccttgcagcgctcaggctgacgggcgggcgggcggagcgggcgcacggctcctctaggtccggctgctctctgagctcgcgggctggacgctgtccgcggtgctgaagcggcgcccgcggcagggaggcggacccggagccgccgggcagcacacacccaatcccgggaccgccctcctcccaggctcggagaggcggtggcagccggcactgcacccagatggactgagagcgcggcggcgggaaggcggcggcggcggcggcagcagcagcagctgcaagagccctcgcagcctcggggcaggacccacgtccacacccgaga

SEQ ID NO: 57943 - DNA, 30 bp, Homo sapiens
  chr22:31218614-31218644
  hyper
gaaatgaagggacgcggctgctgggacacg

SEQ ID NO: 57944 - DNA, 30 bp, Homo sapiens; identical to SEQ ID NO: 13403
  chr22:31477097-31477127
  hyper

SEQ ID NO: 57945 - DNA, 844 bp, Homo sapiens
  chr22:31480650-31481494
  hyper
ctcagggttcttcagccgccacctccctctcttaagcgaggctcgggcggcgctggaaaagagttttggagagaagctggagcagtggttgaatctctgggaaaggacagatgagaacctgccccggtctcgggatcggtgcctctcgaagtctttccgaccccgggagcggctcctccagcacccggcgcccgccattactgcgccccgcgcgccggcccggcccccgctggcctcgtggcaagaacgggggcgtcccgagccgggctcctccccgcggggccgggccatataaggaaaagctaggcccgctccgcccgccctgcgccccagcgtctggccgatttggggacgcgggcagtcgcttccggccccggctcccgcacattcttgaggattgggccggggatgggaggaatggggacgcctggggacttgcacgccgcgtgcccctccaccacccgccgggacgccctctgcctcggtcccgagttcgagttcgacctccgccactcagctgggtgtcctggggaccttggtttcttccctttagatccggacactgaagcaggcggtagcgggtgtcttcctacctggctaccccttcggcgcctagcgcgaggcagggtgggcgaggcgagggcggcgccctgcgagggagggcggtcgcagaacctgcgggccttcagcgccccctggcgaggcttccctccaccgccggcgggacccccatgggcaaccgggggagctgggactgaaagcctggagagccccctccgttgtgctgttggggagactgaggcccagtgagacctcagggcctgccaggcgttcccaacagcga

SEQ ID NO: 57946 - DNA, 30 bp, Homo sapiens
  chr22:31503484-31503514
  hyper
ggctcatcgggacccggccgcagatgatgc

SEQ ID NO: 57947 - DNA, 120 bp, Homo sapiens
  chr22:31556120-31556240
  hyper
cttccggttggggccggaagtccctccgagaggggcggctccgcgtcatgtgactggagtccgcgtaggaggggtcggaggtcttacccaacagattgacgcggcgttagtattggccgt

SEQ ID NO: 57948 - DNA, 30 bp, Homo sapiens
  chr22:31795653-31795683
  hyper
cagggtactcgccacgatgagcagcacctt

SEQ ID NO: 57949 - DNA, 30 bp, Homo sapiens
  chr22:31892030-31892060
  hyper
acctgccgggtccacgcatgggcgggtcat

SEQ ID NO: 57950 - DNA, 30 bp, Homo sapiens
  chr22:31893081-31893111
  hyper
ggaagccttccccgcgtgggaggtgggtac

SEQ ID NO: 57951 - DNA, 30 bp, Homo sapiens; identical to SEQ ID NO: 13406
  chr22:32145987-32146017
  hyper

SEQ ID NO: 57952 - DNA, 361 bp, Homo sapiens
  chr22:32149109-32149470
  hyper
atcagtggcagcaggcggagctggcaattgtcaggagtccttggccagagcctgacccagcccacccagctctctggttttctgcttggagagaaagatatcctgacagacgcgagtttaggcagtgccctgggtatgaccaaaggatgttggttaaaggccccgttctgggaacgggtcaggattcgtccttgcttccttctgaagggttttgtgtcctcaggctgtttcctggtttgtgaaataggatagtatctgcctcctgcatccatcaggtaatagggatgcaatgattacataaggactatgaagccacggcagccattcttattaataacctgaggggcgcagaacgtcgttt

SEQ ID NO: 57953 - DNA, 30 bp, Homo sapiens; identical to SEQ ID NO: 13407
  chr22:32149785-32149815
  hyper

SEQ ID NO: 57954 - DNA, 30 bp, Homo sapiens
  chr22:32150019-32150049
  hyper
ttcaggcttaggggcggaacagcgcgggcc

SEQ ID NO: 57955 - DNA, 30 bp, Homo sapiens; identical to SEQ ID NO: 13408
  chr22:32340182-32340212
  hyper

SEQ ID NO: 57956 - DNA, 30 bp, Homo sapiens
  chr22:32341369-32341399
  hyper
agtctaggcgtggacgggggcgggagagtg

SEQ ID NO: 57957 - DNA, 456 bp, Homo sapiens
  chr22:32571843-32572299
  hyper
ctgttccctggagcccgacttggggagggcggacggcaggaaacgcgggaggcgaaggcgaggctgctcagcggcggctcgggatgcctccagcaacggggactagccctgcgcgcccggggagggggaggcgctggcgctgtgacggccgcggggagggccaccttcccagcacacgcacacatacgcccccggccctcagccgctccggctgccgctgcccgccgacagctgacctccaggcaccgcagcgcccgggaacagccatctgggaaccgcgaccgcgcactgacacacgcagtggccgccgccgccgccgctccgccaagcgctgcctgtagcacctgcacggtggtttggaggggaaggtctgggcaggcgaacgttccacgagggcgtcccagaggcatctgcagcctccgctctcctgttctgctctggcgcccaccagcccct

SEQ ID NO: 57958 - DNA, 23 bp, Homo sapiens
  chr22:32687449-32687472
  hyper
cactgcgccggggtcaactgttc

SEQ ID NO: 57959 - DNA, 30 bp, Homo sapiens
  chr22:32871194-32871224
  hyper
gctgcaggcgcgggcgtggccgggcgatag

SEQ ID NO: 57960 - DNA, 31 bp, Homo sapiens; identical to SEQ ID NO: 13411
  chr22:33149562-33149593
  hyper

SEQ ID NO: 57961 - DNA, 231 bp, Homo sapiens
  chr22:33192953-33193184
  hyper
gagctccggcagccacgaacccagacgggatgttgactgagagctttgtggccatggcagatgggaggggtgagcttcacccactcaaaggcacccgcaccccaccgatgagtgtggaattgtgctctcccgccctcgcagtgagacgaccgaccaggactgcaggctgagcaaatgggtgttctctggcttatagcgccccctagcaccagccagcgggatagagctccg

SEQ ID NO: 57962 - DNA, 684 bp, Homo sapiens
  chr22:33197603-33198287
  hyper
ttggtctgagggggcgggccccaacagcccgaggcggggtccccgggggcccagcgctatatcactcggccgcccaggcagcggcgcagagcgggcagcaggcaggcggcgggcgctcagacggcttctcctcctcctcttgctcctccagctcctgctccttcgccgggaggccgcccgccgagtcctgcgccagcgccgaggcagcctcgctgcgccccatcccgtcccgccgggcactcggagggcagcgcgccggaggccaaggttgccccgcacggcccggcgggcgagcgagctcgggctgcagcagccccgccggcggcgcgcacggcaactttggagaggcgagcagcagccccggcagcggcggcagcagcggcaatgaccccttggctcgggctcatcgtgctcctgggcagctggagcctgggggactggggcgccgaggcgtgcacatgctcgcccagccacccccaggacgccttctgcaactccgacatcggtaagcgctcctggtgccccgcccgagccccacgctgcagccaggactgcagcgctgcttagggaggcagggcgagccccactcctttcctctgccccaggagaggggcagacggggttggggcggagtggagaaactcgatgtccttgggcgggggcgctggcatagctgagagggga

SEQ ID NO: 57963 - DNA, 203 bp, Homo sapiens; identical to SEQ ID NO: 13412
  chr22:33453871-33454074
  hyper

SEQ ID NO: 57964 - DNA, 65 bp, Homo sapiens; identical to SEQ ID NO: 13413
  chr22:33454193-33454258
  hyper

SEQ ID NO: 57965 - DNA, 16 bp, Homo sapiens
  chr22:33454345-33454361
  hyper
gggtcccgggagctca

SEQ ID NO: 57966 - DNA, 68 bp, Homo sapiens; identical to SEQ ID NO: 13415
  chr22:34316493-34316561
  hyper

SEQ ID NO: 57967 - DNA, 30 bp, Homo sapiens
  chr22:34318599-34318629
  hyper
ctgtcttacctctgcggcgatgagcctcac

SEQ ID NO: 57968 - DNA, 304 bp, Homo sapiens
  chr22:35420105-35420409
  hyper
agaaggcaaagtgggcgggaggggagaacttgcatgttttaacctttttcctgcacccaaccccgccatccggacgccaagcttccagtcaaacctgagaccacagctccccctggcggtcagcgcgagcccgcaccgcggctctcctgtgctcacgcagccctgcgcggcggaggtggctggaaatgaatttagcgtcagcacagttatttaaattgttttaattaatcacagattgagcagtaaatgaaccactaagtggagagagcgcgcgggagcaagcgagaaagaggtgaggggagga

SEQ ID NO: 57969 - DNA, 30 bp, Homo sapiens
  chr22:35654188-35654218
  hyper
ttgtgtgtttcttgcgtgcaacccggcttg

SEQ ID NO: 57970 - DNA, 13 bp, Homo sapiens
  chr22:35696528-35696541
  hyper
ctgggctcttttc

SEQ ID NO: 57971 - DNA, 17 bp, Homo sapiens
  chr22:35697198-35697215
  hyper
gacgcagggagagccca

SEQ ID NO: 57972 - DNA, 31 bp, Homo sapiens; identical to SEQ ID NO: 13417
  chr22:35746850-35746881
  hyper

SEQ ID NO: 57973 - DNA, 153 bp, Homo sapiens; identical to SEQ ID NO: 13418
  chr22:35768081-35768234
  hyper

SEQ ID NO: 57974 - DNA, 91 bp, Homo sapiens; identical to SEQ ID NO: 13419
  chr22:35777143-35777234
  hyper

SEQ ID NO: 57975 - DNA, 30 bp, Homo sapiens; identical to SEQ ID NO: 13420
  chr22:35796174-35796204
  hyper

SEQ ID NO: 57976 - DNA, 31 bp, Homo sapiens
  chr22:35827119-35827150
  hyper
gactcagcagcccagacgctgcctggaggat

SEQ ID NO: 57977 - DNA, 30 bp, Homo sapiens
  chr22:35936707-35936737
  hyper
ggggcatctgcctgcgagagggggaaggag

SEQ ID NO: 57978 - DNA, 99 bp, Homo sapiens
  chr22:36424034-36424133
  hyper
ccaaaacctatccactcgtcgtgcctcctggcccctcaggaatcaggaccctctcgggcacaccaggttcagtcctgcaaccttcgttcctagcccgag

SEQ ID NO: 57979 - DNA, 58 bp, Homo sapiens
  chr22:36424336-36424394
  hyper
ttgctcaggccgggatcggctccgtctcctcccgctccgggcaccggcagctccagct

SEQ ID NO: 57980 - DNA, 78 bp, Homo sapiens
  chr22:36424418-36424496
  hyper
cggcggcgccgggcccgagctgaggcggctgatgcggctgggcgccctccgccatccgcccgcgcccccctcgcctcc

SEQ ID NO: 57981 - DNA, 187 bp, Homo sapiens
  chr22:36425194-36425381
  hyper
gtcctggaggcacagcgcggctggagtgcggggcagcgcggggggggcggggtctgtctcctttctgggcggggccgtatcctggagcaggcggggcttgagagacccgaaggccagggagtggctcctgcttgcggtactagttgtacagagttaagtcctgagtttactcgcctgagcaccttgg

SEQ ID NO: 57982 - DNA, 154 bp, Homo sapiens
  chr22:36462013-36462167
  hyper
catggcaggaaatcagcgttttccaagaacgcccagtggcgcgggcacgggcctgagtcccgccgcccactgctctcgagaggccggagcagcagctccgtggcgccccctggaggccgcccctgctggcgccgtcccccgggtgtcaataggc

SEQ ID NO: 57983 - DNA, 166 bp, Homo sapiens
  chr22:36784476-36784642
  hyper
gacaccccgccccgcgagctgtgctctcagtctcatgtcatcccaccacaaggacagatattaagtaccatatatgggaaaaatgctattttacataattatgatccctgtgggggcgggcatggactcagccctggattccattgtgagcgtcttgagttcgatt

SEQ ID NO: 57984 - DNA, 876 bp, Homo sapiens; identical to SEQ ID NO: 13425
  chr22:36901806-36902682
  hyper

SEQ ID NO: 57985 - DNA, 30 bp, Homo sapiens
  chr22:36903367-36903397
  hyper
gagggaggggagcacgtgatttttggagct

SEQ ID NO: 57986 - DNA, 30 bp, Homo sapiens
  chr22:37099244-37099274
  hyper
aggtgcgggggtctcgctttccatggtttt

SEQ ID NO: 57987 - DNA, 260 bp, Homo sapiens
  chr22:37099534-37099794
  hyper
ggcgcccgcggaggcgctcccacctactgcattacgggtggtgctgaaccggacagctccctgcgccgcccgctccgcgcgctccccggctggctcccagggccgcccgccaggaggggggcgctggccagagtcctccctccccggggcagcaaggccagcgcagagcgggggccgcctttcctctttttacccctctcccaaatcctaaaatgagcgctctcctgggctcccggagcttagaggaaggcgtagctaga

SEQ ID NO: 57988 - DNA, 208 bp, Homo sapiens
  chr22:37172010-37172218
  hyper
tgaaaaggtgcaagcgagcggacacggcctgtgctccccgcccagcccctcagcacagccctacccagagggttcaaggaaggacgatccggctctcctccgatcacaagtaccgggccggatgcactctccaagcaaccatagcccacctgccccgcctcctcctcctcctcgctgaccctcgattggttgccgccaaaagctccca

SEQ ID NO: 57989 - DNA, 51 bp, Homo sapiens; identical to SEQ ID NO: 13428
  chr22:37172608-37172659
  hyper

SEQ ID NO: 57990 - DNA, 141 bp, Homo sapiens
  chr22:37212368-37212509
  hyper
tgccagttcccctcccctgcccgcctaaggaggctggaggtttgaggcactgaggatgccccgtgcgggcttaggcagagctgtgcgccggctccagaaggtcacctcgcccgcaggtccgttgctgaatctcagtaaagg

SEQ ID NO: 57991 - DNA, 1 bp, Homo sapiens
  chr22:37212772-37212773
  hyper
g

SEQ ID NO: 57992 - DNA, 79 bp, Homo sapiens
  chr22:37213066-37213145
  hyper
gggcagagcaagtgcgaaaagattaaaaagtgcttttctcatcatttctgctcatatgaccagcgctgcagtgctgcgc

SEQ ID NO: 57993 - DNA, 86 bp, Homo sapiens; identical to SEQ ID NO: 13429
  chr22:37252547-37252633
  hyper

SEQ ID NO: 57994 - DNA, 323 bp, Homo sapiens; identical to SEQ ID NO: 13430
  chr22:37414959-37415282
  hyper

SEQ ID NO: 57995 - DNA, 30 bp, Homo sapiens
  chr22:37415334-37415364
  hyper
ttcccggggcaccccgtcccactctcgcaa

SEQ ID NO: 57996 - DNA, 30 bp, Homo sapiens
  chr22:37416173-37416203
  hyper
ggaggacagggagacgagaccccgctgacc

SEQ ID NO: 57997 - DNA, 41 bp, Homo sapiens; identical to SEQ ID NO: 13431
  chr22:37595693-37595734
  hyper

SEQ ID NO: 57998 - DNA, 180 bp, Homo sapiens
  chr22:37640349-37640529
  hyper
tcgtttgcagggggcggagcatgcggtctggcagagcagctggtgggaggggcgctcaggtgctgggctgagccctggccatccccacaggccccctgcgtggaggctccagcaggagacctgggggccctctgtgctgggaggctcacttcctgtccacggggcgggcccagaggctgt

SEQ ID NO: 57999 - DNA, 31 bp, Homo sapiens; identical to SEQ ID NO: 13433
  chr22:37713069-37713100
  hyper

SEQ ID NO: 58000 - DNA, 465 bp, Homo sapiens
  chr22:37720791-37721256
  hyper
agcccatcggccctgcgcgggaacagtgtcacccgggcacccgggccagaacaggccacgcgtgtcccaggagcgcgggaagctcccacgccccctcccccgcaccgctcctttggctggcagagcgggtcctcagcgcgtctcagccgcaccaagcgcctcccgctcccgcgccacccgggcgcgctgctggggcctgatttccataataatcagccagagatctcccgaaaaggctgggagcggccgccgccgcccaccggggaagctcccgagggtgggcgccccccttcccaccctccctgccgccgccgggagggagcctcgtttttaaaagctttcgagaaaccgtccgtgcgcaggaggcagctgggagacacccaggatgtcgttctccgcattaaggagggggacggcggtgggggaggtgggagaggccgcggcgcaggtgtagaccaggctcag

SEQ ID NO: 58001 - DNA, 377 bp, Homo sapiens
  chr22:37730492-37730869
  hyper
cctgccggaatggagcagaaacgtctcggctgggaatcgaacccagggtcagtcagtagcggccgcgttttaggacccggcggtgcaccgaagacccggcggaacggcgcgcaccccgggcccagagctcattagccgggcgccgcgggggccttcattaaagctcagcgacgcggaggctgcccgcggcggccccgcctgggcgctccgggctggcccggacctgcggcgtcggcccaggagcatctggaaagggggcgcgggcggggatcggtaggaccgcctatgctcagggactgtcacccaccccctcccccaagccaaggagtagcggggaaggggggcgagtgcacccaggtattggggggagcatcaaa

SEQ ID NO: 58002 - DNA, 408 bp, Homo sapiens
  chr22:37730926-37731334
  hyper
cgagtcacccccgccccacccccacacactatgcacccatttcacagatggcaggtcctagctcagagggttagggcaggcccagaaccgcatcgccatcgcccgttcgcaggcctgattgagaggctggaaacgaggatgggcagggagtgaggacctgtaggctctgccggagaacttgggcgtgggcggagcggggcatccaggaagaagcccccaccccagccttggatagggtagtatacgatagggggcgtaaagaagggtcatgggctccggtggtcgcaggtcccaccggcaaccgccagggcgggggcagcaggagcaggaacctgctcgcctccgcatctcgtcggctcccctctcccgccagactcctgtctctgcgccaggctggccacccatccc

SEQ ID NO: 58003 - DNA, 140 bp, Homo sapiens
  chr22:37816322-37816462
  hyper
ccgccccgtgcgcccccaggacggacaatcccagccggcctccagacccaggtctgcctccgccaagtggatggaccatatcgagccaccgctacgcggctgtgcgtcggtcgcctcctccaggacgtcttctctgctct

SEQ ID NO: 58004 - DNA, 272 bp, Homo sapiens
  chr22:37816501-37816773
  hyper
cgcctctggcctctgctcacatgcacagccgcaaactcagctccaccagcgccctcgctccacaggaagggagagggagggcattcgccctgtgcaaggtgctggggcaggcccgctccaattccacttcatcccgaccacactttaggctgctaacgtgcctagctttagcagctgtgcagcctcgaacccgtgaccgcacacgctgcctccgattcctcatctgtgcaacaggaatgatgcagaggggcgttctgaggatttaatgaggg

SEQ ID NO: 58005 - DNA, 30 bp, Homo sapiens
  chr22:37823288-37823318
  hyper
tccccggtcggtcgcggcgctcggatccag

SEQ ID NO: 58006 - DNA, 291 bp, Homo sapiens
  chr22:37882382-37882673
  hyper
tggcagcacgatctcgaccgccgccagtcctccacctgctcccgctgtccggcctgccgcagcctccgggaccgcctggccccgccccgcttagcccgaggggcggggccagacgaagggaaccccagacagaggcggctgaaaggaggcaccagcagaaagggcagccccggctctgccagctgctgcggtgggaggaagtcacaacaaaccctccgtgcccggtggaagggagtgtcctccagcaccgtccactcccccagagagctgtcagctcggcccattcaacac

SEQ ID NO: 58007 - DNA, 397 bp, Homo sapiens
  chr22:37915036-37915433
  hyper
gatgacccggcactggcgcagatacggcgtgagcttggccgggttcagggcgcgagccagccgatgccggacgccctcgattcgctcccacagcgcgtcctcctccgcctcagaccccgagccggccccggcctcctcctcggcctcccccgcctccgcccggcccggcatggccgtgtcctcagggtctgcgggcaagaggcgcacgggggtcgaccagggctccctagggctagatgtgcggccaagcacccccggggcgtcgtccgcagacccgccgtcgggggcgcgccccgagctccccgcgactcaccccgcacgctacagtcgcctcgggctcccgggtccgcactcgggcggcggctccgccggcgcaggggggcggtgcccgtggcgc

SEQ ID NO: 58008 - DNA, 767 bp, Homo sapiens
  chr22:37956435-37957202
  hyper
accccgcccccgcccccggatccagcccgcggagcccgcggccagggcggcgcagaccggcccagcgactctcccgggctgccagccgggacgcgcggccgccgccgctgcagacgacgagtccgccctcgtcccgcgcccccggggctcgcggagccaggtaacagcccgggcgcgcgggtcctcggggcggaggccgtggaggccggcgggtcccggcgcccgcggggactctgcaccctactaggctcccggggccggaacggggacgggacccgcccgggagaggcgcccccgggtgcccacaggaaggccgggcgcggccgcggagccgcgcgaggaaactccgagctttcgggcttcgtgtcccgttccaggctggtggagggggcagaggatcggacacggctgagcggccaaaatgcgcgaggagggggcgagccgaggggcagagcgggggctgtctccgcgccttcctgcgcgggggaaggaagggccggggcgggcagcgggcgacgcggcggaatgtctcccctccgccgaggcccacgcggagagcgggaagtggggggtggggggcccggggagatggacaggcaccctgcccccctccccgaccgccgcattccaggctggagccgcggatgaggtcatcccgtccggttcccctccggccaagacagccggtcgtccccttcccccgcggagcgaccctccgcgtcctgagccccgtccccccagggaatgttggatggccgaagtctttc

SEQ ID NO: 58009 - DNA, 375 bp, Homo sapiens
  chr22:37957264-37957639
  hyper
cgcaacattcgaagcccttttcctagaccgggaaactgaggcttagagagtaggggggactggccgggaggccgcagcggcactaaacgtggcgcggggacccgagacgcggcccgcagccgctccgtctcgctcggtcccgggctggttcggctctaactcggggcggtgggcacgaagcgcgtctcctttccactttccccgtcgctccctaatggcccacggtgccccccttggaatacggaggaccgggtcccctagcgcgactgcgaacaactagctaccccgttctggcctcagtttccccgtctctccaccttgaagcgtctggactttgaggagcaggagaagtcagccgaccggtttaacccctta

SEQ ID NO: 58010 - DNA, 30 bp, Homo sapiens; identical to SEQ ID NO: 13437
  chr22:37963392-37963422
  hyper

SEQ ID NO: 58011 - DNA, 30 bp, Homo sapiens
  chr22:38004377-38004407
  hyper
cgtcattttcacagcggccaaggtacatga

SEQ ID NO: 58012 - DNA, 30 bp, Homo sapiens
  chr22:38035441-38035471
  hyper
ggggctgggcggggcgctgcggggaggagg

SEQ ID NO: 58013 - DNA, 35 bp, Homo sapiens; identical to SEQ ID NO: 13438
  chr22:38072874-38072909
  hyper

SEQ ID NO: 58014 - DNA, 30 bp, Homo sapiens
  chr22:38082320-38082350
  hyper
ctaaagtgtgcgcccgggaggatgagtacg

SEQ ID NO: 58015 - DNA, 30 bp, Homo sapiens
  chr22:38141819-38141849
  hyper
ccgccaaatcacggcgccgagccctagcgg

SEQ ID NO: 58016 - DNA, 30 bp, Homo sapiens
  chr22:38143153-38143183
  hyper
ctcacagctgggttcgctggactccccact

SEQ ID NO: 58017 - DNA, 30 bp, Homo sapiens
  chr22:38200964-38200994
  hyper
cgccgtttggggtgcgtggcgggcgcgggg

SEQ ID NO: 58018 - DNA, 205 bp, Homo sapiens
  chr22:38201306-38201511
  hyper
cggtgccgagaccaagcgacagaccggcggggctgggcctcgcaaagccggctcggcgagctctcccgacacccgagccggggaggaaaagcagcgactcctcgctcgcatccccgggagccgcactccagactggcccggtagtcaggggctcaggagcagatcccgaggcaggctttgctcagcctccgacgagggctggccc

SEQ ID NO: 58019 - DNA, 16 bp, Homo sapiens
  chr22:38203676-38203692
  hyper
cgtgggaatgcggtgg

SEQ ID NO: 58020 - DNA, 322 bp, Homo sapiens
  chr22:38214526-38214848
  hyper
tagccagcagctcatgttaagcgccacgggcagctgcggggtgacgtgtggcagtcggtgtgctgcacccggcggggccagaacagagggcccaggtccacccagaccgacgtgaggcggcacgaggcgagatccagacagcggcgcagaaagtgcgtcgccgcccctgtggctcccaggagccgccgctggcgttgccctgctgcgctggcagcgccgcgaccccctgggctagccgatcgcggtagggctccacgccgttggccaacccgcggctcagcgtgtcctgctgcaccagcccgggtccgccgccgcgcttctt

SEQ ID NO: 58021 - DNA, 744 bp, Homo sapiens; identical to SEQ ID NO: 13439
  chr22:38220617-38221361
  hyper

SEQ ID NO: 58022 - DNA, 30 bp, Homo sapiens; identical to SEQ ID NO: 13440
  chr22:38302075-38302105
  hyper

SEQ ID NO: 58023 - DNA, 30 bp, Homo sapiens; identical to SEQ ID NO: 13441
  chr22:38349051-38349081
  hyper

SEQ ID NO: 58024 - DNA, 68 bp, Homo sapiens; identical to SEQ ID NO: 13442
  chr22:38477063-38477131
  hyper

SEQ ID NO: 58025 - DNA, 521 bp, Homo sapiens
  chr22:38477296-38477817
  hyper
cggtgcacactgccaagtccagcaggcgccggcggggccggaccctgggggatgcctcgcgcagctgcagccccgcaccgtcagcctccgcctcgcccggagcgtccccggcgcggtcgccggcgctgtccctgcgcggtcgcgggcccggcccgggcggcggcctcatgacagccccgcaggcgcagcagtgcagcaggagcccgccgagcagcaggaagccgccgcgccagccgaagcgctccagcagctgctggccgagcggcgacagcgcggacaggaacacggggctgcccgccgccgccagcccgttggccagaggccgccgccgctcgaagtacagccccagcatgatgagcgacggctggaagttgagggccaggcccaggcctgcgggcgaggcggtgctgtgccggggtccccggagagcccctccctggcccccacaggagggaggggccaggcccgggaacccagcagatccgggaacccagccgagggacttcgaagactgtccctca

SEQ ID NO: 58026 - DNA, 130 bp, Homo sapiens; identical to SEQ ID NO: 13444
  chr22:38578022-38578152
  hyper

SEQ ID NO: 58027 - DNA, 30 bp, Homo sapiens
  chr22:38597887-38597917
  hyper
tacgggggcggggccgagggaccaagcggc

SEQ ID NO: 58028 - DNA, 30 bp, Homo sapiens
  chr22:38599151-38599181
  hyper
aagggactctcgttcgtccccagggttgcc

SEQ ID NO: 58029 - DNA, 30 bp, Homo sapiens; identical to SEQ ID NO: 13445
  chr22:38713593-38713623
  hyper

SEQ ID NO: 58030 - DNA, 30 bp, Homo sapiens; identical to SEQ ID NO: 13446
  chr22:38793918-38793948
  hyper

SEQ ID NO: 58031 - DNA, 303 bp, Homo sapiens
  chr22:38850745-38851048
  hyper
tttccaggccacaacccagaccgcgacgctcccagacggacagacggacagagcccgcccgtggagcccgcccgctcccggggagtcacgggaccgcgcgcgcggcgccgggcagccgggacccggctccggatcaggtgcggagcgggcggggccggagcggcgggcccgggacacacagacacgcacgcggcgggacaaactgacggacagcgcccggggtgggcgagcgcggcttaccgctgggcggagggtccgacgagagtccgggaggcggcgagcgggcgctacatcccaaggcgc

SEQ ID NO: 58032 - DNA, 30 bp, Homo sapiens
  chr22:38851869-38851899
  hyper
cgcccgcggcgcgccgagaactcccaactc

SEQ ID NO: 58033 - DNA, 96 bp, Homo sapiens
  chr22:38863832-38863928
  hyper
aggcctccagtttctgcggagggaaggcagagggcacttggggcatgggcgacatgggtcgtggcgggcacccggcgcacacggcagccgggcgca

SEQ ID NO: 58034 - DNA, 73 bp, Homo sapiens
  chr22:38864200-38864273
  hyper
gtttgctgggcgcgggcgcacgactgactggctggaccatgaacgtgttccgaatcctcggcgacctgagcca

SEQ ID NO: 58035 - DNA, 30 bp, Homo sapiens
  chr22:38902449-38902479
  hyper
atgggtgtattttgcggtctgtacaagaaa

SEQ ID NO: 58036 - DNA, 193 bp, Homo sapiens
  chr22:39052581-39052774
  hyper
gctgggaacccccgcgccggttacccctttcctcggtggtagaggccgggcggggcagcgcatgcgcgtggcgggcaggcggcaggaggcgggtgggtcaaggtaactctgggctacagagtccttgctgggggttcggggagcgcttggaccccggcttctgggacgcgtcaggtacgtctccgagtccggc

SEQ ID NO: 58037 - DNA, 30 bp, Homo sapiens; identical to SEQ ID NO: 13449
  chr22:39052973-39053003
  hyper

SEQ ID NO: 58038 - DNA, 30 bp, Homo sapiens
  chr22:39078159-39078189
  hyper
gcgtggtacgggatcggagcgaagcggctg

SEQ ID NO: 58039 - DNA, 30 bp, Homo sapiens
  chr22:39096498-39096528
  hyper
ggcaggcgtgggaccgcgagccgcgcgggg

SEQ ID NO: 58040 - DNA, 115 bp, Homo sapiens
  chr22:39189707-39189822
  hyper
gacctagttgatggcgaccccgcgggagagggaattactccgcgaaaggtcgagggatcaaggtgctgggggaagtcggctaaagggggacgcgggaccacgaagctgggcaggc

SEQ ID NO: 58041 - DNA, 30 bp, Homo sapiens; identical to SEQ ID NO: 13450
  chr22:39239320-39239350
  hyper

SEQ ID NO: 58042 - DNA, 30 bp, Homo sapiens; identical to SEQ ID NO: 13451
  chr22:39267525-39267555
  hyper

SEQ ID NO: 58043 - DNA, 32 bp, Homo sapiens; identical to SEQ ID NO: 13452
  chr22:39268734-39268766
  hyper

SEQ ID NO: 58044 - DNA, 30 bp, Homo sapiens
  chr22:39332607-39332637
  hyper
cactgctgcaggggtcgggagtacctgggt

SEQ ID NO: 58045 - DNA, 30 bp, Homo sapiens
  chr22:39541447-39541477
  hyper
ggaaagcgggctcccgcaagtcccaggaca

SEQ ID NO: 58046 - DNA, 48 bp, Homo sapiens
  chr22:39638592-39638640
  hyper
ccgggcgggcggcctgcggccctcgaggagccccgagaacaaaaggag

SEQ ID NO: 58047 - DNA, 30 bp, Homo sapiens; identical to SEQ ID NO: 13454
  chr22:39639503-39639533
  hyper

SEQ ID NO: 58048 - DNA, 30 bp, Homo sapiens
  chr22:39640426-39640456
  hyper
aaaatcggaaagcgcggagctgggcacctc

SEQ ID NO: 58049 - DNA, 30 bp, Homo sapiens
  chr22:39715081-39715111
  hyper
agtttctgtccgcccgtcaataagttcatc

SEQ ID NO: 58050 - DNA, 190 bp, Homo sapiens
  chr22:39715620-39715810
  hyper
cggtagaggccggtcggccttacgggtccgctatataaagccaaatctggccccgccccttccggcgtgcgagcgcgcccccgcggcagacgacaggtcgggggcacgtaccgagcgccatttccacgcacgctcttccgctcctagctttcgttcagaagttgacgtcagcttcggagacagaaattac

SEQ ID NO: 58051 - DNA, 30 bp, Homo sapiens
  chr22:39795871-39795901
  hyper
gttgggagcctgggcgggggtgctgtcggg

SEQ ID NO: 58052 - DNA, 30 bp, Homo sapiens; identical to SEQ ID NO: 13456
  chr22:39796155-39796185
  hyper

SEQ ID NO: 58053 - DNA, 713 bp, Homo sapiens
  chr22:39852943-39853656
  hyper
cgcccccgcgcaggccgccccgggccgtgggccggcgcacgcacggtcacaggaggggcgcgcgcacactcgcactcacacacactcgctcgcacacgcacacactcgatccagcacgcgcgggcggcgcggggcggcggcggccggagtctgcggtgcgaggcgcccccggcccggcgcggcggcggagcccggctggcgggggaggggagggggttgcggagggggcggggtgggggccggagccgcttgagccggcgggagcgggcacccctgcgcgccgcgctcggcctcgcctccgcgccccccgcgcgcccgccgcggtccctcccccgcgcccgtccgctcgccgggcccccgccgccgccccggggtgcagccgagcggccgcgccgggtccccgggacggggtggaagtgggggtggggggaggggatcggggccgggccggggccgcgctgcctgcgatgccgggcgcccgccgcagccgctgccgccggagcccgggatggggcgagaggctgcggcggacgccagcatctccccgccggggaccccgggggccgcggagccgccgccgccgctgctgccgccgttgctgagacccagcgggcgatgggtgagttgaccccggcgtcctggggggcgccgcggcccctctatccccgcgctgcccgccctcccgcgctgcgcttggcgccccccgcccggct

SEQ ID NO: 58054 - DNA, 375 bp, Homo sapiens
  chr22:39853690-39854065
  hyper
cgggcgcgggcgcactggggctgggggcccggaggccgcggtgggggcgggatgccggggaagccgctcggcgcgggccccctccccctacccgccgctcctccgagctccccggtccccggagggcagagcctcagcgcccgaccccctcccacggccgggcgggggacgtccccgaggcgcggggctcgagccgtgctttgtgcgcggcaccccccagcctccggcgcggctcccccacaacctccggcgcggcgcggggctggggtgggaggcctccgcgcccgccttccccacccccgaccccagactgcggcggcggcagccgaggcccaagcgcagtcgggggctgggcgggtgcgggggctgcggccg

SEQ ID NO: 58055 - DNA, 30 bp, Homo sapiens; identical to SEQ ID NO: 13457
  chr22:39898831-39898861
  hyper

SEQ ID NO: 58056 - DNA, 30 bp, Homo sapiens
  chr22:39916535-39916565
  hyper
ctataaagggccggcgggcggccacggcag

SEQ ID NO: 58057 - DNA, 30 bp, Homo sapiens
  chr22:39928293-39928323
  hyper
ctagcaataccgggcgaacgcttcaagccc

SEQ ID NO: 58058 - DNA, 30 bp, Homo sapiens
  chr22:39928923-39928953
  hyper
aggcgggtccaaggcgcagaaagacacatg

SEQ ID NO: 58059 - DNA, 30 bp, Homo sapiens; identical to SEQ ID NO: 13458
  chr22:39930974-39931004
  hyper

SEQ ID NO: 58060 - DNA, 243 bp, Homo sapiens
  chr22:39953429-39953672
  hyper
aaggggtgggagctcaccagccgccgccgtcagtctgtctgtcgcctccacgcctcccccctccagcgtcccgcgcctgcagctttccccgaagacatttggtgtcagtataaggacggcttttcctcgcacgcagcgcggctcggtctcgccgccgccgcacgtccccgcaccgccaggcgctcgggctcctccgcagcccccgccgcgcgcagaccccgcgcttcgagccctgagccggag

SEQ ID NO: 58061 - DNA, 30 bp, Homo sapiens
  chr22:39953970-39954000
  hyper
ctgggggtccctctcgatcgccggcttcgg

SEQ ID NO: 58062 - DNA, 30 bp, Homo sapiens
  chr22:39954224-39954254
  hyper
ccatcccgcgccttcggggccatgccttgg

SEQ ID NO: 58063 - DNA, 31 bp, Homo sapiens; identical to SEQ ID NO: 13460
  chr22:40280490-40280521
  hyper

SEQ ID NO: 58064 - DNA, 30 bp, Homo sapiens; identical to SEQ ID NO: 13461
  chr22:40742687-40742717
  hyper

SEQ ID NO: 58065 - DNA, 30 bp, Homo sapiens
  chr22:40766495-40766525
  hyper
ccttgggatgggggcgcaaagcccctggac

SEQ ID NO: 58066 - DNA, 30 bp, Homo sapiens
  chr22:40876218-40876248
  hyper
agcctgaatcttcaatcacctctcttttct

SEQ ID NO: 58067 - DNA, 30 bp, Homo sapiens
  chr22:41215479-41215509
  hyper
gacagcgaggtgttcgcggggctgggctcc

SEQ ID NO: 58068 - DNA, 30 bp, Homo sapiens
  chr22:41252895-41252925
  hyper
tcccctccagggggcgacgtccaagagcat

SEQ ID NO: 58069 - DNA, 30 bp, Homo sapiens
  chr22:41346933-41346963
  hyper
gtttcggggcaggccgcgggcgcccaccca

SEQ ID NO: 58070 - DNA, 30 bp, Homo sapiens; identical to SEQ ID NO: 13462
  chr22:41418871-41418901
  hyper

SEQ ID NO: 58071 - DNA, 192 bp, Homo sapiens
  chr22:41593088-41593280
  hyper
ctcctccgacttctcccgcaccgcggccgcaatccagcccggacactctgagggctctctctgagctgggcacggtcctcgctgctcggccgagtgcagccccctcacctcagtgcgactgagacaaagcaagggtcccaccggcccctgtcccctccctaaggcgcgccctcagggcgggagacccacctc

SEQ ID NO: 58072 - DNA, 30 bp, Homo sapiens
  chr22:41593897-41593927
  hyper
agagcacaggggcacgcggtacattatttg

SEQ ID NO: 58073 - DNA, 30 bp, Homo sapiens
  chr22:41601070-41601100
  hyper
gtaattggaacactcggcgtgaggcgcacc

SEQ ID NO: 58074 - DNA, 195 bp, Homo sapiens
  chr22:41682087-41682282
  hyper
acctccggatccagcggtccagatgtccagccggctagtctgttagctctctcgagctcccggcctcacgcgcttccagcaccacctgctctccgcaccgcggcggatgatggcggaggaggaggattttgaaagccggcagtttctttgcttcgatttgatttgttcgaggccccggccggcttgccctcgccc

SEQ ID NO: 58075 - DNA, 232 bp, Homo sapiens; identical to SEQ ID NO: 13464
  chr22:41682702-41682934
  hyper

SEQ ID NO: 58076 - DNA, 35 bp, Homo sapiens
  chr22:41697395-41697430
  hyper
gaatggggcttccccgactcgcccccacgcccccc

SEQ ID NO: 58077 - DNA, 30 bp, Homo sapiens; identical to SEQ ID NO: 13466
  chr22:41697686-41697716
  hyper

SEQ ID NO: 58078 - DNA, 30 bp, Homo sapiens
  chr22:41697986-41698016
  hyper
ctttttggggatcccggtccccgtgccctg

SEQ ID NO: 58079 - DNA, 213 bp, Homo sapiens
  chr22:41763238-41763451
  hyper
tgtcagaggattggcgcgacagctccacgtgctgcagctggcgcagggccaggcccgccctgccaagcagcgggaagggaaggcctggctgcagccggagctggcaggtggccgagccgggggtggacgggcgggctgggactggtgctggccattggctgcctcaaggctcccaccccgcctgcctccctagcctgcggctggcggcccctg

SEQ ID NO: 58080 - DNA, 30 bp, Homo sapiens
  chr22:41810214-41810244
  hyper
gggagccccagctccgcctgggggactcgg

SEQ ID NO: 58081 - DNA, 198 bp, Homo sapiens; identical to SEQ ID NO: 13468
  chr22:41864790-41864988
  hyper

SEQ ID NO: 58082 - DNA, 42 bp, Homo sapiens
  chr22:41985664-41985706
  hyper
gcctcgggggtgtccgcgtgacactcccggtgggagcttcca

SEQ ID NO: 58083 - DNA, 30 bp, Homo sapiens
  chr22:42016192-42016222
  hyper
gacctacctgggggcgatggctgggtccct

SEQ ID NO: 58084 - DNA, 182 bp, Homo sapiens
  chr22:42017064-42017246
  hyper
cacggaagagggggcgggggcagggatgcacttttgcgcatgtgcttacagtcctgacgtaggaaggggcggggctttgccgaagggggcggggctctcgctgatgggttggctttcgtcagggacataggtagaagctggttggggagtgtgcgtgccagcctgacgcgatatagtgcgca

SEQ ID NO: 58085 - DNA, 31 bp, Homo sapiens; identical to SEQ ID NO: 13470
  chr22:42062755-42062786
  hyper

SEQ ID NO: 58086 - DNA, 31 bp, Homo sapiens
  chr22:42084265-42084296
  hyper
cctctaggtccctggcgcgtgtgactcgcgg

SEQ ID NO: 58087 - DNA, 81 bp, Homo sapiens; identical to SEQ ID NO: 13471
  chr22:42228657-42228738
  hyper

SEQ ID NO: 58088 - DNA, 204 bp, Homo sapiens
  chr22:42229857-42230061
  hyper
ggtcgccgggtgctccgcgaaactttgggcagcgactgcagaagcaagttgctgatgaagagagcagtggcggcggagtgtggacacatctctccgggatggagacccgggcgctcctgctgtcacgctgcaaggggaattgagcagaagaaattttgagttgtggcccctcgggtacgggctggggagcgggtggcctttgtt

SEQ ID NO: 58089 - DNA, 30 bp, Homo sapiens
  chr22:42306936-42306966
  hyper
gaggctctggagcccgagcctcagatcaca

SEQ ID NO: 58090 - DNA, 966 bp, Homo sapiens
  chr22:42310098-42311064
  hyper
agtccgaggagcaggcgggggtccctgggcggcgcgtgctcacctggtcactgtgcgccgcgcgcgcgggctgtgcgccctctccagtcccaggcgcgccccgatgccggccagcaccagcagcgctgcgacgccgcacacagcgtagacggccgtatggctgcgctcgcggccggggtcccggggcgctgcggtgtcgcgggcgcgggcgggcggccggcctgtctggacccaggccggcgtgtcgtagttggaacagcggctctggtcgaggcgccgcggcccgtcgtggcagcagaagcggtagccgcacgtgccgcagcagaagctgtaggctccggagctgcagttgaagggcgggtcccactggcccatcacgtcgtagtagccgcggcagcggtcgcccccctccggggctgtcgtgccgggcgccgcgggaccctgcgcctcgggggctcccgcgcggcccgacggcggccgcgccagcagcaacgcgagccgaagcgcgagcgcgagccggaggccgggaggacggcggccgccgagcagtccccgcgccccggcccgcgccatcgggcccgcgcctcccgctactgcgcccggtgcatggccgggcgccgcggctccctccggctcggctcctccgctcccgcagggatcgcgctggctcccggcgcacgccgcctcggccgtcggcctcctctggggaccccagccccgagtgggctgggtctggagctccgaggccgcacctccggtgggcgcgtcctccgcccgggctcacctcggacccgagctgcccggtccgcgtcctgagatcttccccgggccgggcggcgggtcctcgcctgcgcgcggcccccggcttctccccggcccggcaggtgtgcgggtcttggccctagcggaggccgcgccggggccgcgggccgcccgactgcgctaccttcccgccgcgctctcagt

SEQ ID NO: 58091 - DNA, 195 bp, Homo sapiens
  chr22:42311268-42311463
  hyper
ccccgaaacattcatcggaactgggcgctcgaaggggatcagttctagggcccgcgactagagcgtccctgtcttacaggtgcggggacctgtaccttacaggcgcggaggtcaaagcagcccggaattgccccgggacgggcagggccaccctctcacctccttcccgtcccctctgtccgttctgatcataac

SEQ ID NO: 58092 - DNA, 581 bp, Homo sapiens
  chr22:42315448-42316029
  hyper
gctccctgctggtgcaaatgccgataccaggaggggttctggagggagggcccacggctgtctttgtctcccgcgaggcaactctgactcaggctccagctgcccgtgggagggagggggcgcccgggctcctgaggtcgccagggagcggcgggactgggaggctccaaagccctcagtgtacgtgcgaatccggagcggacaccgagaccttagcgcgggaaccaagagaggacagagctccacggaggccacagcgcgtgcacggggacaggtgcgccctccccggcagcccccctgctcctcggtcacagttctgtgcggaggcgtcttgcgccctcccccctgagcctcgcccttgagtcggggccgtgggccgcatccaggcccccagggctcgggatgcgcgtgaggacccggactcccgagggcgcagaggtcgggagcccgaagcaggcgcccttggccttggtcccgccccttatccggtcccaagctttttcctcgccccttggccttgactccaccccttaggcatgccgctggccccgcccctttccggccaccttgaggcttggggg

SEQ ID NO: 58093 - DNA, 175 bp, Homo sapiens
  chr22:42322724-42322899
  hyper
ggcgtgggggctggcgcgtccctgccccgcaggctccggggccctcgcctcatggtgccgacgccgccgcacaagctgcggggactgaggctgagctgggctccggggccctcggggaggaagcggggggcggggggagcactctgccctgccccgcccccgcctgctgggtggg

SEQ ID NO: 58094 - DNA, 30 bp, Homo sapiens
  chr22:42342923-42342953
  hyper
gcgcgctggcttggcgcctcagagagctca

SEQ ID NO: 58095 - DNA, 414 bp, Homo sapiens
  chr22:42353610-42354024
  hyper
tctccctctgggtgggcgggacagggagcacctctgctggccctcaccacgctgtgtctccgcagccaaggccgccgcgatgccgcacttcctggactggttcgtgccggtctacttggtcatctcggtcctcattctggtgggcttcggcgcctgcatctactacttcgagccgggcctgcaggaggcgcacaagtggcgcatgcagcgccccctggtggaccgcgacctccgcaagacgctaatggtgcgcgacaacctggccttcggcggcccggaggtctgagccgacttgcaaaggggataggcgggcggcaccgggcgccctcccccagcccgccccgcccgcccagcccggagacccccaaggcagagggaggccggcctgttggccctccacgctatccctctgca

SEQ ID NO: 58096 - DNA, 30 bp, Homo sapiens
  chr22:42373283-42373313
  hyper
gggacccacggacacgcaagcagggaccca

SEQ ID NO: 58097 - DNA, 16 bp, Homo sapiens
  chr22:42466344-42466360
  hyper
cgtgtatcagctgtat

SEQ ID NO: 58098 - DNA, 425 bp, Homo sapiens
  chr22:42470151-42470576
  hyper
gtttcccgccctggcagacctcgaggcggcctcggagatcccgggcctggcgaatactgggcggggaggggcgttaactccagcctcccgggcggggtctcccggctcccgcggccacgttgcagcccaggcggaggcgcgggatctcgagctgggatcgccctcttgggcttcggtgcgatcggcggcgggaggtgagagtgggcccggcgggctccgggaggaggtggccccagggaaggtgtggccgcggggaagtggcggcgaacagccccgacgcgaggacggggaaaccaaggcggcagccagggagaccctgaccgaggtgacctctgtttagggcgacaaccgggttggggctccccgcagtggccactggcccggcggtcccgcacccccagcccgcctctcctccaacaaaagaa

SEQ ID NO: 58099 - DNA, 401 bp, Homo sapiens; identical to SEQ ID NO: 13477
  chr22:42669779-42670180
  hyper

SEQ ID NO: 58100 - DNA, 14 bp, Homo sapiens
  chr22:42679465-42679479
  hyper
gggccctgcccttc

SEQ ID NO: 58101 - DNA, 222 bp, Homo sapiens
  chr22:42679916-42680138
  hyper
cgaggcgggggaggaggggaaagggaaaaaaggagaaggaaaaggaaaggggggcagtttctcggctctcagcctcctcgcggctcctcctgcccaagccggcaagtgaagtcacagggccggggcggtgacatcagctgagcctctgacatcacggcccctgccgatctcacctctgcagggtggagatggaggagcagcggggaggagggatggatggat

SEQ ID NO: 58102 - DNA, 328 bp, Homo sapiens
  chr22:42765053-42765381
  hyper
ggctgcttacctggcccgcaccctcacgctcccgtccgggctgcgcagccgcttctctcacacattttgcgataacatcgatggcgaaagaaaatgttgtaaatcctcctgcggccacgtggctgtccccccacccccttctccctttctctggccctcaggacaaaaaggccccgcggccggccgctggccacggggctctgggcgggcgaagctggctgcagcggggcgtggtctggggaggggccggaccggggcgggcggggcgtggtcggggcaggggcggggcgcgctggttccggccgccctccccgcggaaaccgggcct

SEQ ID NO: 58103 - DNA, 30 bp, Homo sapiens
  chr22:42896558-42896588
  hyper
ggggcggggcggggcggaacagcctagaag

SEQ ID NO: 58104 - DNA, 30 bp, Homo sapiens
  chr22:43011039-43011069
  hyper
tgctcatctgcatacggaagttcggcacat

SEQ ID NO: 58105 - DNA, 237 bp, Homo sapiens
  chr22:43115855-43116092
  hyper
ggaacaatcactcgacgttggcggaggggaggaagccgcagagagggtgtcgtgagggaaaggtgggtgcaggggaaatggcgctttaacccactcagggccagaggctcagccgagactatccaggtgggaacttgtccctccggatgacaggtgatgaaactgagggaaggggactcgccctggcagtgaaacgggatgggcgctgggaccaggtgccccggcagatcctctccc

SEQ ID NO: 58106 - DNA, 36 bp, Homo sapiens; identical to SEQ ID NO: 13480
  chr22:43116705-43116741
  hyper

SEQ ID NO: 58107 - DNA, 31 bp, Homo sapiens; identical to SEQ ID NO: 13481
  chr22:43177262-43177293
  hyper

SEQ ID NO: 58108 - DNA, 30 bp, Homo sapiens
  chr22:43411086-43411116
  hyper
cgggctcccgctaccgcttttgctccggca

SEQ ID NO: 58109 - DNA, 30 bp, Homo sapiens
  chr22:43411484-43411514
  hyper
cggcagggcagcaccgcacctgaccggaag

SEQ ID NO: 58110 - DNA, 219 bp, Homo sapiens
  chr22:43506301-43506520
  hyper
cacacgtctttgaacgctggcttcacgctgtcatttaagtcatttcgtcctcttggagcctcggtttccacgtgggtaaaatgatcgtgaaaaaaagcaccgaggagtactttgagctcgaacggaggccatccgtgtaaagggccagattctgtcaatggatcgatccccccgatattgatggaaacccctgagtgcacgcccgtgctgggcgcaggg

SEQ ID NO: 58111 - DNA, 67 bp, Homo sapiens
  chr22:43547343-43547410
  hyper
ggggaggaggaggagccgagagacttgctcgcggccggggggaggcagaagcgcgtcccgcgggaga

SEQ ID NO: 58112 - DNA, 30 bp, Homo sapiens
  chr22:43583782-43583812
  hyper
acccggtgaggcggcgcttctgtgcctgca

SEQ ID NO: 58113 - DNA, 25 bp, Homo sapiens
  chr22:43659490-43659515
  hyper
aagctcaggcaggagtgaagccggc

SEQ ID NO: 58114 - DNA, 491 bp, Homo sapiens; identical to SEQ ID NO: 13484
  chr22:43659642-43660133
  hyper

SEQ ID NO: 58115 - DNA, 30 bp, Homo sapiens
  chr22:44208520-44208550
  hyper
gctgcagtgaggtccgcaaagcccctaccg

SEQ ID NO: 58116 - DNA, 39 bp, Homo sapiens
  chr22:44258002-44258041
  hyper
agcagaagccccgggcgcgggcgcggcgtctacgcggcc

SEQ ID NO: 58117 - DNA, 510 bp, Homo sapiens
  chr22:44258078-44258588
  hyper
cggcgcggggctcaccggacttggggtaggtgacgatccacacgtcgctgggccgcaccgggaagttggcgatctcctccatcttcccgcggcagaagggcggcagccgcacgccatggaactcgaagtacttgctctcgaactcccccggggtgctgggggtctcggcctcgctctccgccatgccgccgccgtcgccgtcgccgccgccgcctcccggctcgcagcccgcacgcgcccgcgcccgcgcccgcgcccgcgccccgcacacgctcgcgccccaccggcgcgcggcggcagctccgcaggcgtgacgtcatggcgccgccgacgcgcggcggaggctccgcgggtatgacgtcatggcgccgcccggcacgcggccgcggcgctgcacgggcgtgacgtcatggcgccgcggagccgcgtcctccccgccccgcccccggccggggtcacccacccgctgccggggctgacagagaccctggcccgcggtctgcagcctcc

SEQ ID NO: 58118 - DNA, 30 bp, Homo sapiens; identical to SEQ ID NO: 13485
  chr22:44263900-44263930
  hyper

SEQ ID NO: 58119 - DNA, 585 bp, Homo sapiens
  chr22:44287469-44288054
  hyper
gggcgcagagcacagcgccaggcaccagcgtctctgggctcgatccgctttcattaagctgtccccgccccttttcgcccccgcggtccgggactcaccgaccgacttgccgcagacgatgctgactgcgttgagcgccccagacgaggaaccgtagatgcggcgggcgccctggaggaggcgcggggctcgctggcgcaggcattcggtggcgcccacgtggtgggcgcccaggtagccggcgccggagaaggacaggttccatctgccctcctcctctaagaagcccatggcgggtggaccgggcggggtgatcgggacgaggaagggtcactccgtgacccgggatagggccgggatgcagccttggacggggctgggcccaaatgtgggctctggagggagccgggctggggctggtgctggtgctccctgcgccgcccccgggctgcgtcacctgcgccccagccaatgaagtccccgggtcgcgatcagcccccactccagttgtgcgccaggtgtgccccagaagtgcccgcgcgctgtgtatacgctggcgccgcccccacgcgcccgccccggatc

SEQ ID NO: 58120 - DNA, 30 bp, Homo sapiens; identical to SEQ ID NO: 13487
  chr22:44320158-44320188
  hyper

SEQ ID NO: 58121 - DNA, 30 bp, Homo sapiens; identical to SEQ ID NO: 13488
  chr22:44351355-44351385
  hyper

SEQ ID NO: 58122 - DNA, 36 bp, Homo sapiens
  chr22:44419890-44419926
  hyper
aatggtgtctgtcgcgctgtcgcctggatccggcac

SEQ ID NO: 58123 - DNA, 142 bp, Homo sapiens
  chr22:44420301-44420443
  hyper
ccctggccaggaagcggagggcgcgcgagggtgagtgcgcgcccgcgcccgccgacccccggggacctgcccggcggtgcccgccctcggccctagagccccacgaggccgcccccgccctcccccacgcaccccgcccggc

SEQ ID NO: 58124 - DNA, 30 bp, Homo sapiens; identical to SEQ ID NO: 13489
  chr22:44420651-44420681
  hyper

SEQ ID NO: 58125 - DNA, 34 bp, Homo sapiens; identical to SEQ ID NO: 13490
  chr22:44893740-44893774
  hyper

SEQ ID NO: 58126 - DNA, 205 bp, Homo sapiens; identical to SEQ ID NO: 13491
  chr22:44894099-44894304
  hyper

SEQ ID NO: 58127 - DNA, 244 bp, Homo sapiens
  chr22:45016264-45016508
  hyper
taaagtgaaatacacaaggggcggacgggcggctcccgggctccgggtccttggcctggacctcggcctccccaaagtgaccccggatggcaccgcgagtccccgtttccgacaaccacacggcgccggctgcacacgtcctgtttgcgtggttgctaggaggttgccatggcgactaatcggggatgagggaagcctagcgcttaacacatccccctccgacggtcaaaattgggcctctctg

SEQ ID NO: 58128 - DNA, 40 bp, Homo sapiens
  chr22:45064196-45064236
  hyper
ggactgagtctgaccgtctgatttgtcctcccggcttcta

SEQ ID NO: 58129 - DNA, 30 bp, Homo sapiens
  chr22:45065037-45065067
  hyper
tgtgggtgggtctccgtccagccgccccgt

SEQ ID NO: 58130 - DNA, 1107 bp, Homo sapiens
  chr22:45097904-45099011
  hyper
cagagggcagacccagcgaggcgtcgtggcagctgcggccgcggagacgccggctccgcctcttgcacacgccccctcgcctgaggccccgccccgcccgcgatgcccccgcccccttccccgccccgccccccggggcgccgagacccgcccctgggcccgcccccgggtccgcccccggcctccgtttgcgccgggtctgtgctggccgcgcgcctggcgctccacgctgagcctctccgtgcaatgattaacccggcggggcggccggcgcgggacccgagacggaggcgcggggccggggcgggaccccgcaggaccgctcggcttcctgctctcgccggagtttccgcgtagagggcgcatcgccggcccggggcccttggtgcggcgtggcgcagggcgcggcgtggggcgcgcgtgggcgcggcgcaggcggcccgggtcaccatgaggactctccgcaggttgaagttcatgagttcgcccagcctcagtgacctgggcaagagagagccggccgccgccgcggacgagcggggcacgcagcagcgccgggcctgcgccaacgccacctggaacaggtaaggccgcgccctcccggccacccggaggccctggagccgggggaggggacccctgagccgtccgcgggctaggggccgccccgagccaggaacgctgccgaaggcggcgcggcgcttcacagtttgcaaagaacttgccccgccggagtggtgcgggcctggaggaaagttcagtgcagcgtggttccagaacccagggaagggagcgaggcccgccagcgcccggggctggcccagaagcgcccggcgggtgggcggcggggtgggccgggaagccgcgtgcccgcctcctacccggggtctttccacgtctccactgcggtgctcgtgacaacctgggaggctaacggagcaggaagtatttttcccattttgcggctgagcacgggagcctcggggctcagtgggtgggtcgcgcaggcttcctgtgtctctttaagctcccttcggctttcccttgagaggccccctgtcctccagctgtcagcagggggtgcggcagctgcgaggcattctttag

SEQ ID NO: 58131 - DNA, 633 bp, Homo sapiens
  chr22:45148270-45148903
  hyper
gaggggctcctgagcgcgtgtgctccgcccgaccccgccctgtccccccgacacacaggtggacccagggtcagctcgtgcacctgggaaatggctcccgccgggtagcaggggcggaggggcggggctgggcggaggggcgggggggcggggcctgcccgggagccacgtccggggaggggccaggtgagcggcagacccggcacgcaggtgggggccggcggggtccgtggccaggtaaggcgggcggcggcgggagggagcgcgcagggaggaggccgtgctcggggtgggggggtgcgccgcgggggctcccagggcgtgtacggggacaaggggccgctggccgggtagggacgcccaggcgggcgcgacgccacgtgcggccggggggagaccctccggccggcgcgcagcctccgggtcccctgtgggttctagactccctctcccttcacctcctttctttcccgcccccccacactcccctcctctgctttttcccctgtcctgttccttctcaccccgcaccgccttccccgccctcgcctctctcagcctgcgttttggtctggtctggccggacggtgtcagctcaaatgttccttttttgcttccgtcctggggtctcag

SEQ ID NO: 58132 - DNA, 233 bp, Homo sapiens
  chr22:45402267-45402500
  hyper
acaaaaagatggaggtcagttcgcaagcaagcctccttcccggagttcaaatttaaaggcaaaggcagcccggagtcggagagctccttcccgaagctgccgcaaccttcaaacaggattttcaaatgtttctttcggcttatctaaattccggcatgacagataataaatagcgactcatttactatcatcataaaaatttaaacagcctcgaaatagttgctacaatacag

SEQ ID NO: 58133 - DNA, 2110 bp, Homo sapiens
  chr22:45402900-45405010
  hyper
cgacttcgccggggccgcgcgccgggcccccctccggcgggaatggaagcttccactcccggacgggggcgcgcggccgggggcgggggggccgcggcaccaactgaaaagggttagcgcatttgtcccaagccttcggtccagcccggcggcccagaccaggcgcgggccgcggcactgccatcttcctttcagcaagcccggccccccccaaaacccgccactcgcgcacgccccctcccatcactttttaactttaaagactcgacacgaacgcccggcctccgaattctctctcgccagggtcaccggcagccgccccaacctcgtccacgtctctcccctacgccagaaaatcccccgggggagggggcgtccgatccggcggcccgggctggggtgggagcgcgggggcaggcccgggcgggggcgcgcgggggcgggcccggagctgtccaagtttggcgctggcggctgcggccggcattccgaaggaaacgcgatcgatggccgggggcgcggcgcgggcgggggcggggcgcgaaggagggagggagggggcagcggagggagggaggggcgccgccgcccccgtgcccgccacagcggtgcccccagcacgccattggctgcgccgctcaaagttctcggctcggggctgcgcggggaaggggcgggtgtgcgagcgcggggaaggggcgggtgtgcgagtgcggggagggggcgcggcgggggaggggcagcggaggaggggcgggagccagggggcgggggcgcgcggccggccgggctctggcggcggcatctgttcgtggtgctgaaaccccgagcgctgagctcagcgcaactaagtcacaatggacaacttttcctccccggagggggcccggaggggggggagcggtcgcgcctccgacgcgtgggagcttctcaggtgtccccaactacacctaacgcccggagcccaaagttggagcagaactggggagtcccgggggcgcgtttcttttgttccccgggagctggcgtcaggttccaagaataaaaagtgaagctagggaagtggaaggtggtgggggggagggagcctcgaggaacgatttcaaaacgaggtttgccacggaacccagaaatcgcttccaacgagtttggtgtccaggcccccacggccgcccccctccgcccccatggccgcctcagcgcaaagcgggggactccgagccgggagaaatcgccacgttccaaaaacatgtccaccacctcaaaatggacgccgggccgcgcgctgccttttaagtgagctcctctcttcggcccccgcagggcccggctctccctgccgcctccgagaacccggctctttctttccaggaaaggggaggggtggggaactttgagaactggagacagacccctctgggagtctgagcgtgcgtcgcccaggctggcactttttagggcgccgccaaagtgcccagccaccctcccgccccatcccagggggggccgcgatcccatcgcttacttgtttgtcgctgagcgcggcgatccgcggctgcctttcgtggagctgcttcttgaggtcgccgttctgcggaaacacggaggagcgggctcaggcaggccacccggggtcaggtgcaccccagcaccgcgggccgcggcaccccccgcccggagccccacgggcggggccggccgcagcgcaccccaagtttcccgggccgcgtcctgcacgcgcggcggccgggcagtgccgcgcggggccgcttacctgtggctgccgcctcatcggggcagctcgcggggcggggcgggggccgaggccacccggcggcgcgccccgagccgtgcaagtttgcaggccggggtgcgtgtgcgagtgagtgtgagtgtgagtgtgtgccgggggaggggggaggaacaaagagccaagtaaacacggcgagtccgtgtcgagcaaagctcataaatattcaagtcgcgtcctaatctccccaacacacacacgcgcacgccgagccccgctcaggctccggccgccacgccgccgctcgccagcagcgatcgccaaaactacttctgcacaccgggcaggttcgcccggggc

SEQ ID NO: 58134 - DNA, 385 bp, Homo sapiens
  chr22:45405046-45405431
  hyper
cgcactcccctccccgggaccggctcacgaaggggccccctccaggcaccctcccagtcatgcagaccctacatcgcttaagagaagactccaggctcgggtcccacgcgtcctcgatcccgcaaactgtgcaggacagcgccaggggcaggcggaggggagcccagaagggggtccgcgcgtgtgctcactccctcgccccccgcccccgggcaggctccagcctggaagacccagagacccggaagagaggatgctgggctcgggtcccccgaccccctcaccccgcaacacactccccggccccgggcccggcccccggccacctacctggtggcgcgcgagttccacggcgagcgcctcgggccggctctgcagctccatc

SEQ ID NO: 58135 - DNA, 482 bp, Homo sapiens
  chr22:45405476-45405958
  hyper
cgggaagttgcgcggctccgcgggggccagagcgggcgcgggcggacgcggcctccgggctgggttgggggggacacgagccccctcccccacggccgaaagggaagggggctggcgaaggggaagacaggcttccgggcgccgcggcgccgagccctcggctgccccaactcctcaggctgcccggcaagttgcgccgggtccccgggctgccggcgcggcccggagcatggcccccccggcgccgggagccccgcgcagccccgcgcgcgcccgcccagccgccgccgccgccgcctcctcccgcgcgagcctcccgcgggcagggactatatttcctccggcgcgcgcgcctggatctcgttgggcctcggcaaagttgtgcctcggcacgatgctaattcggcagtgcccggatggagcgggccggggcggcggggggcggtgccgggaccctcagcccgccgcgccccgcccccgcc

SEQ ID NO: 58136 - DNA, 521 bp, Homo sapiens
  chr22:45406039-45406560
  hyper
cggtcgccggctccggggactgctcgggccgggcgctcggagaggacgactgcggagtcatcctctccgtccccgggccaacccggggaacgcggcgcccccaccccctgcgccgtgtaacgccgggatcaggacactttccgctgggaggctgcgagtccgtgtttccatttctcctcaccctggtcctcggctccctcctttcccccctcctccgcctccctctgatattttatttaaattcttccgtcccctcctgtccataccagcgccgcgacttgggggattaaattagtcgcgtcgccacattcccccgccgcctgatggcctccgtgttgtttaaacagcaagaaaattgatctcttggctcttcctttaatgatttttttttacacgattaaactctcaacagatgtcactggacattttaagactcttgttaagagtcgtaaacaggcccggtcaatgcgacctaaaacaattataattacagctgcggaggtcgcgtttcagaaccccca

SEQ ID NO: 58137 - DNA, 30 bp, Homo sapiens
  chr22:45559224-45559254
  hyper
ctgagtgcccaggacggatctcactggctg

SEQ ID NO: 58138 - DNA, 30 bp, Homo sapiens
  chr22:45560663-45560693
  hyper
ggcgtggtcttctccgtttccttcctagcg

SEQ ID NO: 58139 - DNA, 37 bp, Homo sapiens
  chr22:45664600-45664637
  hyper
cgtccctgctgaaaggcgactccgggagcacaggctt

SEQ ID NO: 58140 - DNA, 30 bp, Homo sapiens
  chr22:45680829-45680859
  hyper
aggtctggtgcccgcgcctgctcgctggac

SEQ ID NO: 58141 - DNA, 30 bp, Homo sapiens
  chr22:45809587-45809617
  hyper
cgagagagcgggagcgtctgtacctctgcg

SEQ ID NO: 58142 - DNA, 475 bp, Homo sapiens
  chr22:45898682-45899157
  hyper
ggaccaggagacccgcggccccgcctccgccgcgccctcctcccgggcgggataattgaacggcgcggccctggcccagcgttggctgccgaggctcggccggagcgtggagcccgcgccgctgccccaggaccgcgcccgcgcctttgtccgccgccgcccaccgcccgtcgcccgccgcccatggagcgcgccgcgccgtcgcgccgggtcccgcttccgctgctgctgctcggcggccttgcgctgctggcggccggaggtaggggcgtcccgggtccgccgccccagcttagggtcccgaccccctcggcctcgcgctccctgcgagtttcggaaccacggggactcggagtccgtgcgttgccctgcgcggcgcccccggactgtcagcgccgaggcctcggcgacgcccccctcccccacggccagctccggtcctcatctcctccccggcctggggacttgtttcaaa

SEQ ID NO: 58143 - DNA, 150 bp, Homo sapiens
  chr22:45973978-45974128
  hyper
ttaggcgctggagtccgggaggtcctaaccagaacccacgagcgtgcagtgcgcacagagcagagcgttttggagcctggcctccaggtggcgctgttggaccttggacgctcagtctttgcgcctcaaacccgacggttgttaaaactg

SEQ ID NO: 58144 - DNA, 30 bp, Homo sapiens
  chr22:46041470-46041500
  hyper
ggaagcctctcagccggtgtctgagctggg

SEQ ID NO: 58145 - DNA, 108 bp, Homo sapiens
  chr22:46067493-46067601
  hyper
gaacctctggttcccgatacccgctcccaagaccgagaccctgttacggccacatcaacacaggtccccctccccccggcgtcccctcccctcggaggagccccgtct

SEQ ID NO: 58146 - DNA, 639 bp, Homo sapiens; identical to SEQ ID NO: 13501
  chr22:46262412-46263051
  hyper

SEQ ID NO: 58147 - DNA, 112 bp, Homo sapiens; identical to SEQ ID NO: 13502
  chr22:46263511-46263623
  hyper

SEQ ID NO: 58148 - DNA, 2 bp, Homo sapiens
  chr22:46263743-46263745
  hyper
cg

SEQ ID NO: 58149 - DNA, 20 bp, Homo sapiens
  chr22:46302162-46302182
  hyper
ttgctggctgttaacacgag

SEQ ID NO: 58150 - DNA, 51 bp, Homo sapiens; identical to SEQ ID NO: 13505
  chr22:46302264-46302315
  hyper

SEQ ID NO: 58151 - DNA, 176 bp, Homo sapiens; identical to SEQ ID NO: 13506
  chr22:46363414-46363590
  hyper

SEQ ID NO: 58152 - DNA, 767 bp, Homo sapiens
  chr22:46366592-46367359
  hyper
ggaggcttcctggcctccaaccgctagacgctgaaattccaaagtcccctggttgatccagttcctggaaaggacaccagaagcaggacccagggaccctggcactttatcagcctgggtccccactgctcaggcggtccccacccgcatgcgccctgctgccccgcccccctcaggcgatgcctccgcagccggggctgcccgccgggcctggagcgctctctgtgcccggaccttgtaattatgtcccacagcccgggaaaccgcgggcctcgcagcatctggctgcggttgcgaacttttgtttcaagatgcgcgactatttatagaaggaaaactggtaggatagtaatttcctaggagcaagaggagaaattggctgcgtctttattaaatgggggtgggggcgaggcgatgtattaggactgcaaccgcatggggggagggggtggcgcagggagcgggaaggcagcggctgccccctctggccgcgtcaggcgaccccggacgtggcccgcgtgtaaaggagggggagggggaagggaagagaaggggagggagagcaggctctgaggtttaatcagtagcatccagcttaaattcccccaaacggcggttccataaatgaaacttctttttaagtcagaggccagagcatatgcgtcccattaggaattcggcgaagccaccactgcgcgccccctgggctcactgggctggactcggccctgcccggagcttctcagagccccgtgggctctgccttg

SEQ ID NO: 58153 - DNA, 119 bp, Homo sapiens
  chr22:46367867-46367986
  hyper
agcttaggctggcgaggcgacctaaagtcccccggctcccgcgcgcgacggtcacccggtgccccgcccaggggcctcgctgccgcgttccctgcccgcccggttccagcgctggaggc

SEQ ID NO: 58154 - DNA, 21 bp, Homo sapiens
  chr22:46368102-46368123
  hyper
cgacagtagaagcatggtggg

SEQ ID NO: 58155 - DNA, 30 bp, Homo sapiens
  chr22:46371137-46371167
  hyper
tttgaggggcccagcgggagtcactgcagg

SEQ ID NO: 58156 - DNA, 30 bp, Homo sapiens
  chr22:46371771-46371801
  hyper
tctaaaggagatcgcggctcaacaggtaag

SEQ ID NO: 58157 - DNA, 31 bp, Homo sapiens
  chr22:46372393-46372424
  hyper
gctgcgtctctgctggcgtggggcgagggtc

SEQ ID NO: 58158 - DNA, 30 bp, Homo sapiens
  chr22:46372727-46372757
  hyper
gactgcgctcagcccgcgctgcggctcggg

SEQ ID NO: 58159 - DNA, 60 bp, Homo sapiens
  chr22:46373011-46373071
  hyper
gtccgcacttgtcggccgccccaggtgactcgcggccccggcaagcgagccgcgagcgag

SEQ ID NO: 58160 - DNA, 166 bp, Homo sapiens
  chr22:46373379-46373545
  hyper
actggtacaggtcgcggtgccacttggcttccagtttccggtgggggagggagagaccacccactcccattgcctctccgagtgcacttccctgacccccaaaaattatccgcatggggtactctggggccatccttttagtccaggcatcgctgccactccagca

SEQ ID NO: 58161 - DNA, 31 bp, Homo sapiens; identical to SEQ ID NO: 13508
  chr22:46466169-46466200
  hyper

SEQ ID NO: 58162 - DNA, 30 bp, Homo sapiens
  chr22:46466843-46466873
  hyper
aggggtcccagagccgggcccgagcgtgcg

SEQ ID NO: 58163 - DNA, 43 bp, Homo sapiens; identical to SEQ ID NO: 13509
  chr22:46512496-46512539
  hyper

SEQ ID NO: 58164 - DNA, 30 bp, Homo sapiens; identical to SEQ ID NO: 13510
  chr22:46545332-46545362
  hyper

SEQ ID NO: 58165 - DNA, 61 bp, Homo sapiens; identical to SEQ ID NO: 13511
  chr22:46634891-46634952
  hyper

SEQ ID NO: 58166 - DNA, 30 bp, Homo sapiens; identical to SEQ ID NO: 13512
  chr22:46645888-46645918
  hyper

SEQ ID NO: 58167 - DNA, 30 bp, Homo sapiens
  chr22:46646366-46646396
  hyper
gtgctgaggggcgtcgcgtctggccgtgcg

SEQ ID NO: 58168 - DNA, 112 bp, Homo sapiens
  chr22:46658171-46658283
  hyper
aattagctgttatgttggcatcgccaagcatcaccgcctgcagggaactcctgacgatccagacatagacggcgtccgagtctttcacctcgggcatcttggggttccctgt

SEQ ID NO: 58169 - DNA, 90 bp, Homo sapiens
  chr22:46663611-46663701
  hyper
gacgacccagtgaagccggccccgaacgccaagtgagtgtgtgccgtgcgcgcgcgggtagctgccgaccgcaacgacataaacttgaaa

SEQ ID NO: 58170 - DNA, 180 bp, Homo sapiens
  chr22:46663945-46664125
  hyper
gcctcgcctctgcgcgactgccaggtacacggaggctgcccccaaccaggtccccctcgggccccgggtcctgggggtggcccggtgctggcggaataacgggagacatggcccgggcgcggggcgtggggtgagccctgggcgcacgggcgcgtccgcggcaacgcctggaagggaccc

SEQ ID NO: 58171 - DNA, 31 bp, Homo sapiens; identical to SEQ ID NO: 13513
  chr22:46774456-46774487
  hyper

SEQ ID NO: 58172 - DNA, 200 bp, Homo sapiens
  chr22:46933075-46933275
  hyper
gcccgagcccgagccgggcgcccgaacacaatccatgcacccggcgcgcctccgcatccacccggcgaggccggggagcggctcccgggcgcccggccctcggggcggtccgcgtcccgcctccccgggggccctggcggggactgtggggaccacgcgcccggcctcccccgcagcttccacttcgagagcactttgcg

SEQ ID NO: 58173 - DNA, 99 bp, Homo sapiens
  chr22:46933585-46933684
  hyper
gcgtattgttcggccccggggggagccggctcggaggtgcgcgccgagaggatcgctatggagacgcgagggcgcggccgggacggggactggggccct

SEQ ID NO: 58174 - DNA, 773 bp, Homo sapiens
  chr22:46933977-46934750
  hyper
ccattttacagcaagacgcacggaggctaaaatgcttcaccccgactaaaactccctggactttgaagcccaataggcagctaccggatctgcgtcccacttggtttaaagcgcaacttttaaatgaaagaagaaaaccccggttgacataagggatttggagaggacggcggaggcgcgctcatctcccgcgtgcggcccgacccgagcgttcgcggacgcatcgcggaatccccgagcgtccggctcctcccgaagcgggttgcggggaaggcggggggctgcgggtcctggaagctgcctggggcaagcaagcacccgcagggatttagagctgtgccacagcccctgcccagcctcctacggaggacagcggggggcggggggcagagaccttagagctttcagaaaagtgacacacacccccgcctcctgcggggaaccacggggggccgggggcagctttaggtttgcgtgacgggtacacctgcctccggatggggcacagggataaagggggtggaggcttaggacttggcgaccccccgcatgggcggggctttgggactgtgccaccagcggctgggaagggcgcgcactcccttggtggcgctcggggcgccggagtccagtgcagcccttaggcctcccagtggtcggggacggtaggtgggggtcgcctcttctctcctagaagggcttctcctggggccggtcggagcggtgggggtgggagtaatgcgcagtcacccctagaacgggtctttttggca

SEQ ID NO: 58175 - DNA, 30 bp, Homo sapiens
  chr22:47158506-47158536
  hyper
gacttccgggcgcgcgtaggcacaacttcc

SEQ ID NO: 58176 - DNA, 30 bp, Homo sapiens; identical to SEQ ID NO: 13516
  chr22:48137393-48137423
  hyper

SEQ ID NO: 58177 - DNA, 308 bp, Homo sapiens; identical to SEQ ID NO: 13517
  chr22:48885529-48885837
  hyper

SEQ ID NO: 58178 - DNA, 114 bp, Homo sapiens; identical to SEQ ID NO: 13518
  chr22:48885907-48886021
  hyper

SEQ ID NO: 58179 - DNA, 266 bp, Homo sapiens
  chr22:48886204-48886470
  hyper
gggcgtgagctgagggctggggtagggggtgaccgccgcgggctccctgttgcctggagtgaagggtggggggtggcctgtgcccctgccgaggctccaggcgggtggaatgaggggtggttggagtcccgggtgcagactccagcctcggcgctggggagggtgctcagcatcccggggcacgttcgcggctggtggggtaagtgggggccgctcagcgtcccgggcacaggctctggccccagatggcgcgggctggtcggctt

SEQ ID NO: 58180 - DNA, 126 bp, Homo sapiens
  chr22:48886673-48886799
  hyper
ccgatctgatccttccgctgtcgccaaaatgagagcacagtggcccagggagacccgggcagccgcgggatcggcctccggagtcctgggacagcccagctcgccaggatcgcaagggaaacccgg

SEQ ID NO: 58181 - DNA, 30 bp, Homo sapiens
  chr22:48929553-48929583
  hyper
gagaaggacattttcacatttccccaaacc

SEQ ID NO: 58182 - DNA, 23 bp, Homo sapiens
  chr22:48970900-48970923
  hyper
gccgctggtcgggcccggctggg

SEQ ID NO: 58183 - DNA, 147 bp, Homo sapiens
  chr22:48971532-48971679
  hyper
ggcaccgtccggtggggaccggcccgccagccccgggccgcgcaagttcgatcgccgcgggctcggccgggccgcgcggaccccggcggcggcgatggtgcggcagccccgcgcccggcgcgcagccccggccccgagcctggcccg

SEQ ID NO: 58184 - DNA, 184 bp, Homo sapiens
  chr22:48971758-48971942
  hyper
cggcggcggaggaagaggaggaggaggaaggcgacgccgagcagcgggcggtgggggccgacaggcggaggagggggccggggccgcgccggaccccccccccccccgcgccgcccggccgttgcgcaatccgcggcccgccgtccgggccctgctggcggtgcggctccgggggcggcggcgg

SEQ ID NO: 58185 - DNA, 30 bp, Homo sapiens
  chr22:49338722-49338752
  hyper
gcagttgcttgcccacgtttatggtcacag

SEQ ID NO: 58186 - DNA, 31 bp, Homo sapiens; identical to SEQ ID NO: 13520
  chr22:50170509-50170540
  hyper

SEQ ID NO: 58187 - DNA, 394 bp, Homo sapiens; identical to SEQ ID NO: 13521
  chr22:50170577-50170971
  hyper

SEQ ID NO: 58188 - DNA, 30 bp, Homo sapiens; identical to SEQ ID NO: 13522
  chr22:50242068-50242098
  hyper

SEQ ID NO: 58189 - DNA, 30 bp, Homo sapiens; identical to SEQ ID NO: 13523
  chr22:50242477-50242507
  hyper

SEQ ID NO: 58190 - DNA, 30 bp, Homo sapiens
  chr22:50242886-50242916
  hyper
gggccaccaaggttcgtgcggaccgtgggg

SEQ ID NO: 58191 - DNA, 99 bp, Homo sapiens; identical to SEQ ID NO: 13524
  chr22:50246600-50246699
  hyper

SEQ ID NO: 58192 - DNA, 30 bp, Homo sapiens
  chr22:50354801-50354831
  hyper
gcgtaccaggtgggcgccgtgctgggtagc

SEQ ID NO: 58193 - DNA, 30 bp, Homo sapiens; identical to SEQ ID NO: 13525
  chr22:50356064-50356094
  hyper

SEQ ID NO: 58194 - DNA, 68 bp, Homo sapiens
  chr22:50422157-50422225
  hyper
gggcggacaccagaccgagaaatccgggcgggaggtcggggcggcgtctgctccgccgggggcaggta

SEQ ID NO: 58195 - DNA, 30 bp, Homo sapiens
  chr22:50453422-50453452
  hyper
caagaaaaccacggcgaggacgcgggttca

SEQ ID NO: 58196 - DNA, 211 bp, Homo sapiens
  chr22:50496971-50497182
  hyper
cgcccccctgtggaggtcacactccatcccccaccaggtcacaaagacccgcgggtcacatcctgcccctccccctcgggccccccaggcccgccaggccttctcgccctccccggggccctcatgccgccctctgtccctgggcccttccccgacgcgaggctggagcggcggggtgaggaggccgcgggcgctgggctcctcccgggct

SEQ ID NO: 58197 - DNA, 170 bp, Homo sapiens
  chr22:50497213-50497383
  hyper
cggggtgaccgtatcagcgccccccgtcctgcggcggaacttgggagggccttggtatccgcagaaccactcgtggggtcccacgccgctgccccccggggggttctgagcccacccaggtccacacggcccctgtcgtttccccccgcaccccgcggatcaccccgcca

SEQ ID NO: 58198 - DNA, 30 bp, Homo sapiens
  chr22:50608494-50608524
  hyper
ccggggcagccccccgccagccaccccgcg

SEQ ID NO: 58199 - DNA, 102 bp, Homo sapiens
  chr22:50623612-50623714
  hyper
ggccagccgggtccccctggaggcctccggacgatcggaagtgactgagcgtccgggtccgtgaggccgggggtcggcccgccctaagactcccacctggtc

SEQ ID NO: 58200 - DNA, 281 bp, Homo sapiens
  chr22:50623741-50624022
  hyper
cggggcccctggggcccgaccttcccggggtgccccaacctgcggcaaggccgaggtcccgctgaggcatgagtcccgggtcggggaccgctctgggccgacccccggaggacggactaggccgatccccagagggaagggggccaggccgaggccatggcagcgcgttccctgatcccgtgttctcggctcctcgcgtcccactatcggctgtccctttcgtgcgggactgacggctcacagaacagttacatttcaatatcattcgactgaaaaccatc

SEQ ID NO: 58201 - DNA, 30 bp, Homo sapiens
  chr22:50689146-50689176
  hyper
ctagctgggctgcccgccccgccccccatc

SEQ ID NO: 58202 - DNA, 30 bp, Homo sapiens; identical to SEQ ID NO: 13526
  chr22:50700548-50700578
  hyper

SEQ ID NO: 58203 - DNA, 30 bp, Homo sapiens
  chr22:50708624-50708654
  hyper
cggagcccaccgggcgcagcccctgcagcc

SEQ ID NO: 58204 - DNA, 85 bp, Homo sapiens; identical to SEQ ID NO: 13527
  chr22:50745644-50745729
  hyper

SEQ ID NO: 58205 - DNA, 31 bp, Homo sapiens; identical to SEQ ID NO: 13528
  chr22:50765138-50765169
  hyper

SEQ ID NO: 58206 - DNA, 30 bp, Homo sapiens
  chr22:50766092-50766122
  hyper
cgagtttggggctgtcggtaacttaatgag

SEQ ID NO: 58207 - DNA, 30 bp, Homo sapiens
  chr22:50781972-50782002
  hyper
agggcaggtgagtgcggccgcccgccgctc

SEQ ID NO: 58208 - DNA, 30 bp, Homo sapiens; identical to SEQ ID NO: 13529
  chr22:50874139-50874169
  hyper

SEQ ID NO: 58209 - DNA, 6 bp, Homo sapiens
  chr22:50912805-50912811
  hyper
gccact

SEQ ID NO: 58210 - DNA, 30 bp, Homo sapiens; identical to SEQ ID NO: 13530
  chr22:50913816-50913846
  hyper

SEQ ID NO: 58211 - DNA, 81 bp, Homo sapiens
  chr22:50920027-50920108
  hyper
ggcaggacccccaacccgcccagcccgctccgccttgcgccccggacccgcggccgaccccagacccgctgcccgcttcgc

SEQ ID NO: 58212 - DNA, 25 bp, Homo sapiens
  chr22:50946694-50946719
  hyper
tggcgggctgaggacgccgtacccc

SEQ ID NO: 58213 - DNA, 163 bp, Homo sapiens
  chr22:50964978-50965141
  hyper
gctcccctacaccccgtccccctcaccgagcgtggtgaccaggtcccttaagtctggcgggcctgcgccgtccatgcagagcagcgcctcctccacctccagggcgtggcccacgcagcgacccaggggcttgtccatggcggtcagcgctgccgcgacccga

SEQ ID NO: 58214 - DNA, 46 bp, Homo sapiens
  chr22:50968297-50968343
  hyper
gcttccccgcctcgcgacttgagccccgcccgtacctgcttagggc

SEQ ID NO: 58215 - DNA, 30 bp, Homo sapiens
  chr22:50969663-50969693
  hyper
atggtgtgccgaggcgcactggggtacgtc

SEQ ID NO: 58216 - DNA, 640 bp, Homo sapiens; identical to SEQ ID NO: 13532
  chr22:50970391-50971031
  hyper

SEQ ID NO: 58217 - DNA, 167 bp, Homo sapiens
  chr22:50982555-50982722
  hyper
ctcggcctcccacctcgaggcgatccgacacctcggcccaggtcgcacttttttgcccgttttgatcccatcctccaactgcggccacagccggaaatgtagagaaattcgcgctcctggggccggcggggctggcgctggctcacccgctccccgggccctcccag

SEQ ID NO: 58218 - DNA, 17 bp, Homo sapiens
  chr22:50982902-50982919
  hyper
cgcggaaataaatttta

SEQ ID NO: 58219 - DNA, 30 bp, Homo sapiens; identical to SEQ ID NO: 13533
  chr22:51021476-51021506
  hyper

SEQ ID NO: 58220 - DNA, 231 bp, Homo sapiens
  chr22:51066541-51066772
  hyper
caggaggagccggtaccgggctgcgggcgcttccgcctcggccccgccccgtgacctgtgacccttgcggggcggggccgggggcggggccgggggcggggccgggggcgggccggggcgaggggcgttgctgcgcgtgctcgctccgaggccgccgtgtgcgcctgaggctgttggctgcggtcttgaaacgggctctgggagcttcctctgcgcggtcggccctggctg

SEQ ID NO: 58221 - DNA, 83 bp, Homo sapiens; identical to SEQ ID NO: 13535
  chr22:51112150-51112233
  hyper

SEQ ID NO: 58222 - DNA, 30 bp, Homo sapiens
  chr22:51112521-51112551
  hyper
cgccgcacccgccccggtggtccgcggatg

SEQ ID NO: 58223 - DNA, 30 bp, Homo sapiens; identical to SEQ ID NO: 13536
  chrX:2647654-2647684
  hyper

SEQ ID NO: 58224 - DNA, 102 bp, Homo sapiens
  chrX:2747434-2747536
  hyper
gcttggggaggggggcgcgggcccaaggcagaggctgcgggagcgcggggcaagggagaggtgcagagcgtggagggggctcgggggcgcttggggaggatg

SEQ ID NO: 58225 - DNA, 482 bp, Homo sapiens; identical to SEQ ID NO: 13537
  chrX:2815891-2816373
  hyper

SEQ ID NO: 58226 - DNA, 761 bp, Homo sapiens
  chrX:2846756-2847517
  hyper
gggcaaggctacgcttcgggggatggagccttggggcgggacggggcgcgtcttagtggggcagagcggggggcgcggttcggggcgggtcttagggagcctttgaaggccgaatccgggcagcggtgtagctgggcgtggaaggcggaggacccagcagggcgtgaccggcccagtttccgctccctccgggtcccggccagccttcctccgccctcccttcccttcctcctttgttctctttccctgcccttccgccttcccttcagttcggtctcctccacccgcccttcgtcccctcagtcgccccccatccctgggctctgctgtctggcgtctttcccgggcacagaacgcgcctccagctacattttggagactacaaggcgccggacacaaccacgccctttacaggggcccaggctcgcccggggcgcccctcgccgtgctcgcgaccccctccccaggcccccaccctaggccttagtatgggccgcgtcccggggtcccaggcacctggcggcgggcgcggcgcgtcccctccgcgcggcggatcgcatggccgagcgctggcccagagcgcaggaccttgccctgcgcactccgcgcccgggcgccgctagtgccaaggcttccgccctctcagctgcgggatctgggccgggcgcccgcccctccttcatccgcgtcatctcctggctctcgggacctccgggacctgcgcgtggaaacaggttttcccaggtcgtcacacgggaagg

SEQ ID NO: 58227 - DNA, 283 bp, Homo sapiens
  chrX:3630854-3631137
  hyper
ctgggggtggagggtggtctccgagaggagccgtcggcatttcaggttaggcacccggccggtcgggggtacttgcctgggctggggggctggggagtgcgctccacccgggaagacccggggcgcaggtgcagccccgcacggggactccgagccgaagtagcgggtcagggccctccccaggaggtcggcacccagggccctttgtcctactacaacgtcccggccacgccgcgcgcccctgtgggccgagtccccgcccgcactcactcacccacggtgg

SEQ ID NO: 58228 - DNA, 30 bp, Homo sapiens
  chrX:4636843-4636873
  hyper
gcagactgacctctgcgagatgaaaacagc

SEQ ID NO: 58229 - DNA, 1614 bp, Homo sapiens
  chrX:6144105-6145719
  hyper
tctgtcctcactccccgcagactcgcccaagccctaggctgaattcgtgacgcgcgcgcccagcacccgggcgagttgcaagccccggcgcaccgcaggggccaaaaccccgccggaacctcctaggaccccttcacgctgcctcctgcaccccctcccccgccatccccgagatagcagcagcacatacacaaaaagaggctgacacctgccgtaggttcagaggaagaaggcagagaaaaagaaacccgcagtccggaaaaaaaaaaagccttctggggaaggggaggggtatgatgcggaggacgtcctccggctgcccctcgctctccatgcagaacatccgttcccagggtggcccgggccaggcctcgggggtgcaagggttggcctgacccccctgctcccgcccccgccgctccgggaagaaagggcgctgtgtctggcggcgagcaggcgccggaatcgtgcgctcgggcccagggttgcacggagcactgggcccggataccgggggcgcaaagcttcgggtgcggcccaggagaaccccgccgagggaccccagcctaccggttctcggaggggcgaaagagccaggtcaggttgagggacaggaggaggaaggggtgtccaggagactgactgaaggatgagagtgtcctccggggtagcgaccggcctcttggaaaaccagaggcggagggagcagccgcggagtggagggcgcaggccgggacctgggcctctcctcccacagcaagccccccacccacgcatcatctgcagccgagcggcacctacctccctctccctacctcatccccgctcgcgcttccgcaggtcaggccacgcgggtgccagcgcgggctgtgggcgccccagccgcggccttggggaggggtcaggactgaagttcactctctctctgcgtggtctcgaagcccctcgcccaccccgcactgtctcctccgccgccggctgcgcgcttggcggatcttctccatcagttctgcccactggagtgggaaggggctgagccgagccgcgcgggaattgggaggcggggaagcggggaggcgggggaagagacgagatgaaatcggcccgggacagcagagaggcttgggatgggatggaagggaagagggggtggcggttgcgttttccagggctgtagaggtggtgcgcctattggaaccgactcctcagcctcctcccccgtccccacctcggggactggcggaccgtgcgccccgcaggcttaacactccccccgacaccctcgctccgagaaggggtgttctcagtgggcaccgactagggctccagatcccccgagacccagaccagggctccggtagtctgtcctcgcagcttccaacttttccgctccttcggaaaagcgggcagttcagagatggttcccagggcggcagctgcaagcccccccgcgcccccctcaaaggttcagactacactcaaaggctccgaaagaagcaaaaccaccagctctaccctccttctgcggcttgcctcacccttcccacccgcctcgaaacccacacacacgggaaaggggtgcatggagcccgctccccggtttacagaagcagc

SEQ ID NO: 58230 - DNA, 91 bp, Homo sapiens; identical to SEQ ID NO: 13540
  chrX:6145835-6145926
  hyper

SEQ ID NO: 58231 - DNA, 328 bp, Homo sapiens
  chrX:7065513-7065841
  hyper
agccaaaatgtctcctgacatcgccattgccagatgccctcagggctgcaaaaccgccaggtagagaaccgctaccatgcaggatgctaccatcaaagtgcgcccacagcagcaaccttggagcaggcaggcaagtatcctccaggctactttgcagacggggaagctgaggctgggcaccgctcaaggtcgcacgcatgcgtaaccgaaaagagagcgcggaggtcccgccgcgcctcgctctgaggagaggacgcggagccgcgcgcccgcccggtggaccccagggactgctcccacgtgctccggccccacgcgcgggccgccg

SEQ ID NO: 58232 - DNA, 30 bp, Homo sapiens; identical to SEQ ID NO: 13542
  chrX:7066061-7066091
  hyper

SEQ ID NO: 58233 - DNA, 206 bp, Homo sapiens; identical to SEQ ID NO: 13543
  chrX:7066302-7066508
  hyper

SEQ ID NO: 58234 - DNA, 106 bp, Homo sapiens
  chrX:7895516-7895622
  hyper
cgcccgctaggccccgcctgctctatttaaacttctggactcaacctggccgctagaccggagcgtcctccagcgcaggcaaggattcctcgtttagagtcatgtt

SEQ ID NO: 58235 - DNA, 30 bp, Homo sapiens
  chrX:7895846-7895876
  hyper
ggggccaactccagcggctattttggggct

SEQ ID NO: 58236 - DNA, 30 bp, Homo sapiens
  chrX:8698486-8698516
  hyper
ctgcacactcgcgaacgcgccagcttcacc

SEQ ID NO: 58237 - DNA, 221 bp, Homo sapiens
  chrX:8698836-8699057
  hyper
atgagagaagagaaaaataagcggaggatttcagagctcgcacgctcgacagggctggtacaggcagcagctgcactcgctcgcgctgagtccggaacctgctctcgtgcgcccacccgcacccggagcctcgcgcaagtcccgcgggggtccgcgccacagggcagagtcccggcaacccgctggagccaagcgcgcggctcccggagcctcccacacaa

SEQ ID NO: 58238 - DNA, 651 bp, Homo sapiens; identical to SEQ ID NO: 13546
  chrX:8699110-8699761
  hyper

SEQ ID NO: 58239 - DNA, 704 bp, Homo sapiens; identical to SEQ ID NO: 13547
  chrX:8699940-8700644
  hyper

SEQ ID NO: 58240 - DNA, 31 bp, Homo sapiens; identical to SEQ ID NO: 13548
  chrX:9240652-9240683
  hyper

SEQ ID NO: 58241 - DNA, 52 bp, Homo sapiens
  chrX:9310728-9310780
  hyper
ctgtgccagcgccctacgtggactgggaaagaattaccgaggaccttagaag

SEQ ID NO: 58242 - DNA, 30 bp, Homo sapiens
  chrX:9432825-9432855
  hyper
ctaggcgtgggggagcggggcgggcttggt

SEQ ID NO: 58243 - DNA, 30 bp, Homo sapiens
  chrX:9433100-9433130
  hyper
ctcgcggcagctccccgtggaggtcactgt

SEQ ID NO: 58244 - DNA, 1064 bp, Homo sapiens
  chrX:9433357-9434421
  hyper
gcggctgctccggggcgccgggccctcttcggccgccgcacggccgggactcggaggctgccggctggagggaggttcggagcgcggccgggcgcgcggcgccgccacaagttgcgctgctcgcgacgaggtgagtgcgcagggctcggcgggccgggcgcggggtccgcaaacttctgcggggaggcgggtcccgcgctgaccctccagggtccggccggcggctcggggcgcccgaacgctccacccgcccctggaactcctgtaggtgcaggtcgccaactgtccccgcggcgctcggactggggtgcggcgcgctcccaggagcctgaacaataccccgaggtggccgctccccgaagtgccggcgcgccttgcggggagagacggaggtcggcggggggctcctttgttttggggagggggaagtggccggtaagtttagggaagcgctcggcttttcctccggtgcccctttgtctgccgattcaggggcttgctgggcaaacctgcgccaccgcgggctccggggaccggggtggagggcggtggcgggatttccccgctgttggggagaagagccccattcatacccgggacgcgggccggccctcccggacccgggtggaagcgcagcctcgcggagtggggcaagcggcgggcgaggtggcgcgggccccgtgtctgctcagtttctgacgcgcagaaactgtcaaggaagtcgggagccccagtcctccgcccatctccccggcctgagcgcacggctgggctgggggcacccttggcccgtcgagggtctgcagagcgccgcccggggagagcgcagacctgttgctgctcctgggctctgacggggcgggtggggtgggtctcgcagatcctgggccccggccttgctatccagggggaccttccctaacgatgggaccggtgctcggagtggagtatggggagtgcgccttcgggagtcggcgctggccggatatgtgacaactgtgggtcgctggaggcccgcctgcgctgggatagggcctggacttcacgtgcgtcgcctgtgttcc

SEQ ID NO: 58245 - DNA, 30 bp, Homo sapiens
  chrX:9751458-9751488
  hyper
aaaattccacctgagttgtgagttctcaga

SEQ ID NO: 58246 - DNA, 45 bp, Homo sapiens; identical to SEQ ID NO: 13550
  chrX:10023768-10023813
  hyper

SEQ ID NO: 58247 - DNA, 30 bp, Homo sapiens; identical to SEQ ID NO: 13551
  chrX:11948897-11948927
  hyper

SEQ ID NO: 58248 - DNA, 1070 bp, Homo sapiens
  chrX:13706947-13708017
  hyper
tccgtttgactagtcgtttttatcattgtaatcacgacatcctgtgactgtgctcatgaggtctgtttatttccactttacgtaaacttttcaaaatgacagttatttcgtactcgctgtcgcccgaacgcagacgggaggacacttcaggagcaatcgacccgaaggaaaagcacgatccaggccccgcctgcctcggctccaccttccccgcgcccgtcccccagggtctcggccgcgggaccccgccttccaggccccgccccgctttttccctggccccgccccggcccgtcgccatgttgttccctccgcgctggacgggagcagctggagcgggagcctggctgcgctaccgcggctgcctcctgctgtgcaggtccccgaccctctctctgtcctcattgcgcccagacgggccggcccagagctcccgggtcgtctttcgtgtggccgcgaggtgagcgggactcgggactccttcgggaccgggcggagtgcgcgggtgtcggggtctgagggggcggctcgggcctcgggcagctggggcggggtgcggtgcgcgcggggctagcgcgggtcacaaggccgccccgggagagaggacggctggttgtctccctgcctcctctctgacgcaggaggaaagacggtccccacacccttggggagagggactcacagaaacacacacaaacactggagaaagggagatacaaaagcccggacacccgtgcacatacacacggagaaatacacccggtcacctgggaacacacgtacacgccagcctttcccccaaccactccgggacacacatccacagaccccaaaccaaatcctacacccgaatgattaatgtagggaaaacaaaggcgctcccatgacttgattttggcgacctctgaagttccacctagcagaacgtgtttgctcgatgtcttacgaccactcgggtgaggaattcggaaagtaaagccaatcttagaggctgcaggcgttttgggggcattatctgattcagacgctggctaacgtttcacaatcgcgttcccttttttcttccaact

SEQ ID NO: 58249 - DNA, 1000 bp, Homo sapiens; identical to SEQ ID NO: 13553
  chrX:13752356-13753356
  hyper

SEQ ID NO: 58250 - DNA, 1085 bp, Homo sapiens
  chrX:13955971-13957056
  hyper
acccgctcagcacaccgcctccacctgcacccgggccgcattttaatagttggaacaagggacaaagaggagagactcagcctccgtcccatgctgtccagagtctctcctgtcactttcctggtttcaagggtcatggtttcgaaatgagctcccggaagaccccaggcttggggaaccgggtgtttgtttcgcgcgggcttaaggagaacagaagcacggcggggcggggcggggcaggactggactgggagctcgggcgacagggagagcgtcccgggaaacaggcaagaagcgactctctactggccccttaaaataaagcactagcccgggacgcgccgtctgttctctctgcaacccctcccgggtacccagctcttaggctcccgcgagccgcacgtgcgggggtgcagcctggccgcagccggagcggggaccaccccccccacaggatacaacagggaagcgcacctgggcgttccggacacctgcgccgcgcccctcccacctccagcgtcccggcttcgtcgcagaggtggccgaggaggcgccacctgagcgggggaggggcgggaccctcggaagggcgcgccctcccggggcgggggcgcgagaccgtggccgtggcgcgcagccagcgcgctcgcttacccatggctggagactggcgggaggggtgagggctgcggggcgttcgggctccccggggacgggcagagccggtggcacaagtttgcaggtctcgcgggcacgtgcgctgaccgggcttctgcgggctgcgctgcgctgcgcggggctggccgctggctcctagctcccggccggggtgggagcgcggcgcggctccgcctgcactgggggccggccgcgcggagaggggccctgacgtcagcgccgggggctttgtgcgcccggagctagggcccgattgggggcagcgggcgcgcggagtctgcaggcaaagctcgcggcttcctctgggacccccccgggcgagcgccgagggtcgcgggaaccggaaaagccagcgagggggatgggtagagaggggagtgggcttctaggatcgcggaggcggcgat

SEQ ID NO: 58251 - DNA, 167 bp, Homo sapiens
  chrX:14048162-14048329
  hyper
gcggcaggcgtgggatggctgcgggtggcggggccggcggagagggagctgcaccgggcggggcactgggactgtggcgggcacccgcgccgggggtcggacggtgcttctgcaccggcgagataagggtcgcttctgcaccgcccgggtttccagcctttaacttt

SEQ ID NO: 58252 - DNA, 415 bp, Homo sapiens
  chrX:15511290-15511705
  hyper
tgcaggagccccaggtactcacgctgcggtagcggcacctggagccttagcggcgggggtgacgcgaagagccgccgggagcgagtgcagggagggcaggttaagagagtgtgggtccagtagcctcaccgtgactcagcgcttcgcggccggcggcctagaggaggcgggaggcgggagtctacgggtctcggaggccctggggctccgccctcgggaatgtcactccactctcgctccgccctacgcctctcccaggccagcttggcggccctttggcctccctgcctctcgtgccgggaagagatgctcactcgggtaatttaggcggcacttgctgtgctccaggaggaaatgtgtggcccgggcaggtgctctgatcggcgctccggtcggtcttgtgggaaatctgttt

SEQ ID NO: 58253 - DNA, 431 bp, Homo sapiens; identical to SEQ ID NO: 13555
  chrX:15756256-15756687
  hyper

SEQ ID NO: 58254 - DNA, 87 bp, Homo sapiens; identical to SEQ ID NO: 13556
  chrX:15808572-15808659
  hyper

SEQ ID NO: 58255 - DNA, 100 bp, Homo sapiens; identical to SEQ ID NO: 13557
  chrX:15809045-15809145
  hyper

SEQ ID NO: 58256 - DNA, 83 bp, Homo sapiens; identical to SEQ ID NO: 13558
  chrX:15817993-15818076
  hyper

SEQ ID NO: 58257 - DNA, 123 bp, Homo sapiens; identical to SEQ ID NO: 13559
  chrX:15821796-15821919
  hyper

SEQ ID NO: 58258 - DNA, 88 bp, Homo sapiens; identical to SEQ ID NO: 13560
  chrX:15822232-15822320
  hyper

SEQ ID NO: 58259 - DNA, 40 bp, Homo sapiens; identical to SEQ ID NO: 13561
  chrX:15826354-15826394
  hyper

SEQ ID NO: 58260 - DNA, 123 bp, Homo sapiens; identical to SEQ ID NO: 13562
  chrX:15827321-15827444
  hyper

SEQ ID NO: 58261 - DNA, 215 bp, Homo sapiens; identical to SEQ ID NO: 13563
  chrX:15833798-15834013
  hyper

SEQ ID NO: 58262 - DNA, 57 bp, Homo sapiens; identical to SEQ ID NO: 13564
  chrX:15836708-15836765
  hyper

SEQ ID NO: 58263 - DNA, 111 bp, Homo sapiens; identical to SEQ ID NO: 13565
  chrX:15838328-15838439
  hyper

SEQ ID NO: 58264 - DNA, 536 bp, Homo sapiens; identical to SEQ ID NO: 13566
  chrX:15840847-15841383
  hyper

SEQ ID NO: 58265 - DNA, 30 bp, Homo sapiens; identical to SEQ ID NO: 13567
  chrX:15872201-15872231
  hyper

SEQ ID NO: 58266 - DNA, 183 bp, Homo sapiens
  chrX:16729956-16730139
  hyper
agtacggggaaaacgcgggggtcgttgtttaaggggtgcactgggaccggggagaggacagaaaggccatgttaccggcgctgatcaccagcctcgcagacccccgctcggggcttcacttccgccaacgccatctcagggctctcctggctcccgagggccgggagaagtggggatccgggt

SEQ ID NO: 58267 - DNA, 806 bp, Homo sapiens
  chrX:16730152-16730958
  hyper
cgggcggaggcgggaagaagcgcgtcccggggacgcgcgggacaggctccaaccgcactgggcacgggccagcgttccccagtccccgcgccacacccggcagccgaggtctgcgagcgcggggctggcggccggacccgactcagcgctgggcagggagccggcgccatcagagagcggacaaaggagcccggccccacaagtgcaccggggctgggggtgcagggcggagaggccctggggacgagggatggcccgggcgccgaggccctgggggtctgggacaggcccagaagggaagttacctgcgcggtggtggtagcaccggggagggtggccggtgggcacggcgggctccaccccgcggctggcctggcgctcacctgtcgggctggggaaggggtcgctgccggggctgtccaaagccgcccccgggatcttcccaccgcccacacgggcctcggggtgcgcggcgccctcctcgcccaccttcccctctcctccctgctgctggcccagctcactcacgctggtgagcttggggtttgcacccgggtttgtgcaatggtccaaaacaagcgcctaaaaagtgattcctccagcacaggcagctcccgtcaccctccgctctggacgcactgggccccaggcctcgcccagcccggggaccgctcctccctcccgtggctcactttgcaaaggcacttcgagtgcgcgggtgaactccacgcttcccggggaaccccggcttcctggcaagccgagaccctcgctcgggtcctcccgtgcagatctcacccttgtaa

SEQ ID NO: 58268 - DNA, 30 bp, Homo sapiens
  chrX:16805413-16805443
  hyper
atgctggaggacctcggtcctgcagagttg

SEQ ID NO: 58269 - DNA, 303 bp, Homo sapiens; identical to SEQ ID NO: 13570
  chrX:16888149-16888452
  hyper

SEQ ID NO: 58270 - DNA, 46 bp, Homo sapiens; identical to SEQ ID NO: 13571
  chrX:16965289-16965335
  hyper

SEQ ID NO: 58271 - DNA, 190 bp, Homo sapiens
  chrX:23801092-23801282
  hyper
tagcgaatcccacagcgcgccccgctgcccccacttttgtcctccgggttcacacgggcgcccggaagagagggtggtgcctgggagaggaaacgatgcgccccggggccgcggcctcattggatgagaggtcccacctcacggcccgaggcggggcttctttgcgcttaaaagccgagccgggccaatg

SEQ ID NO: 58272 - DNA, 71 bp, Homo sapiens; identical to SEQ ID NO: 13572
  chrX:27999797-27999868
  hyper

SEQ ID NO: 58273 - DNA, 30 bp, Homo sapiens; identical to SEQ ID NO: 13573
  chrX:36854169-36854199
  hyper

SEQ ID NO: 58274 - DNA, 31 bp, Homo sapiens; identical to SEQ ID NO: 13574
  chrX:37765683-37765714
  hyper

SEQ ID NO: 58275 - DNA, 345 bp, Homo sapiens; identical to SEQ ID NO: 13575
  chrX:39680218-39680563
  hyper

SEQ ID NO: 58276 - DNA, 193 bp, Homo sapiens
  chrX:39680630-39680823
  hyper
cgcttttgtgctcgccgggcggtgggtgcggggaggcagttctaatagttgtcattagggccgggggaggcggggcgccgggggctgagggtgggagcgcgggggtgggggaggcccgccattccctcgctggctcgcttgttcgctggcggtcccaggcggcgcgcaggccgctgctggctgctgagtaatg

SEQ ID NO: 58277 - DNA, 30 bp, Homo sapiens; identical to SEQ ID NO: 13577
  chrX:39729507-39729537
  hyper

SEQ ID NO: 58278 - DNA, 111 bp, Homo sapiens
  chrX:39871648-39871759
  hyper
gccccaggattagcgcggccaggaatccctctgcccgcagctgccgcggaggggttgagggttaaacagacaccgggcagaggagcgagcctgccggctgcggccggcgcg

SEQ ID NO: 58279 - DNA, 201 bp, Homo sapiens
  chrX:39871778-39871979
  hyper
cgggagggaagagggcgcacgctacctagcctcccgacgagaagacgtctcctccccacgtcaggccgggctctcgcccactcggctggccgcctctgctccctggcctctcaagtctcagcggaaagaaacgtagcggctgccaaaagcaccccactccttttattgtccccataagcctatacacgtacactagccacc

SEQ ID NO: 58280 - DNA, 196 bp, Homo sapiens
  chrX:39873111-39873307
  hyper
gccgagctggcccacttggcacggaagggcaggcaggccaggcgacgcggcgcgagattccacagctcccgctccggaccgggggaaatcctggagtgccagagagcccggggagggggcgctccgggagcctctccttgaaaggcgggatgctttccccgttcctcccgcgcacgtgtcctcagcagagcaggca

SEQ ID NO: 58281 - DNA, 1156 bp, Homo sapiens; identical to SEQ ID NO: 13578
  chrX:39910497-39911653
  hyper

SEQ ID NO: 58282 - DNA, 158 bp, Homo sapiens; identical to SEQ ID NO: 13579
  chrX:39913137-39913295
  hyper

SEQ ID NO: 58283 - DNA, 79 bp, Homo sapiens; identical to SEQ ID NO: 13580
  chrX:39913507-39913586
  hyper

SEQ ID NO: 58284 - DNA, 147 bp, Homo sapiens; identical to SEQ ID NO: 13581
  chrX:39914619-39914766
  hyper

SEQ ID NO: 58285 - DNA, 168 bp, Homo sapiens; identical to SEQ ID NO: 13582
  chrX:39916406-39916574
  hyper

SEQ ID NO: 58286 - DNA, 274 bp, Homo sapiens; identical to SEQ ID NO: 13583
  chrX:39921381-39921655
  hyper

SEQ ID NO: 58287 - DNA, 327 bp, Homo sapiens; identical to SEQ ID NO: 13584
  chrX:39921997-39922324
  hyper

SEQ ID NO: 58288 - DNA, 346 bp, Homo sapiens; identical to SEQ ID NO: 13585
  chrX:39922859-39923205
  hyper

SEQ ID NO: 58289 - DNA, 265 bp, Homo sapiens; identical to SEQ ID NO: 13586
  chrX:39923587-39923852
  hyper

SEQ ID NO: 58290 - DNA, 188 bp, Homo sapiens; identical to SEQ ID NO: 13587
  chrX:39930224-39930412
  hyper

SEQ ID NO: 58291 - DNA, 55 bp, Homo sapiens; identical to SEQ ID NO: 13588
  chrX:39930888-39930943
  hyper

SEQ ID NO: 58292 - DNA, 2833 bp, Homo sapiens; identical to SEQ ID NO: 13589
  chrX:39931600-39934433
  hyper

SEQ ID NO: 58293 - DNA, 80 bp, Homo sapiens; identical to SEQ ID NO: 13590
  chrX:39935705-39935785
  hyper

SEQ ID NO: 58294 - DNA, 127 bp, Homo sapiens; identical to SEQ ID NO: 13591
  chrX:39937095-39937222
  hyper

SEQ ID NO: 58295 - DNA, 927 bp, Homo sapiens
  chrX:39953710-39954637
  hyper
cgggtcctctccagctccggccccccgcgctcccaccagcccggctgccggggcacagtcacagctccgcgcgctgggcagtcctatttttatcttgtctaatcctaaactgggcggggagcacaggcgtcgtgcttagagaacaagagataggcgcgggaggcggggaggagcagccaggcagcgacgcgagcgggagcgagttaaagacacagtggaggcgaccgcgggcaggaagaaagagcgggctgcgcgggcctcgaggcgccgcacgcaacgcgccgccccgcgaagttacactcgcttccccgccgtccctcgctaccggcccctccccacttcccagcggcgctccccgcagcctggacagcgaggccccggcctgtgtgggaggcggaggccaggacggccctgcaaagggctggagagaatcgctaatgagctgtgcagcccattgatccggagaacacttcctaattaactctcagtcacctactggtgacagcgcctcaaaggacagcgctggggccagccgagccccagccgcgacttgccggccgggcgcctgctgcccaaaacccgcgcgctcccctaaacaccccaaggcaattggtgtgcgtggcggtgtatacccgcacactgaaggccagcctcggattaaacctggatggcatattaatcatcgccttccccccccactccgctctacgcgctgaaaccctgcccaaaataaacacgaaaaccaacactgcaaaacccacaccagataacaggtcgagagaggagtgggcagggtcaaggaacgagcgtattccctaagtgtccacgtacaggaatctttgaggctgacaattaaaatgccttccacgcaagcaattctgttggcaaaaccgaacccaacacttcgtaaggattgatttcggcccg

SEQ ID NO: 58296 - DNA, 1950 bp, Homo sapiens
  chrX:39954905-39956855
  hyper
tacctatttgaagcgcgttggtttctttttaaggtttgtttctaaatacacataaccctcctccttccttcttcgctcttccattccccccacccccaccctccagacgccggcggcgcgcgccctggcgcgcgggcactcacagcctctagctggagatcgcggactttctggaaaagattcattaacagcaaattacgcctcgcccggccacggcctacacgctgccagactcgtccgtctccgggaccccgggaagggcccactcgagcgtgcgagcggcgggaagcccgccgggaccacgcgtgacttcggccgccctactccacacacggtgccccaaggctctctccgtaaacagcaggcgctcgtcaccgccgccgcgagcccccgagttggcggaggctctgcggcgcagccgcccgccggctccgagcgcgggccccgcggcgcctcgccctccccgccttggccgaggatcttgccccggtgcgcaagttcctcttcgcctacagcctccttgccacacgccctccgagtgggaccaacttcctccggccgcagactttcacacgcccatcagggctacccaccagactccccattgcccagcggagggcccaggtctcgcccgcccccgccctccctccacgacgctgcccccgcacaagcacattctacacccacccctgggggctcataacttaaaacctacgctgaacatcggggagggagaggagggggaaagcgggagggggatcgcagattataatcttaaaagaacatttacaaaacaaagcgtctgacctggctggcgggcgggccaagtcggaaccccttgctctgctcgatttcttagtagtttttttttttaatccacgtgattcgtgctttggggcaagccaagaaaaaacgggactcccctcccgagttgcgcggcagcggcggcaggtcgagctcggctcggcccgaggcactcgccacacaccctcgcgcacgcacacgccgacgttccacttggaggaacgaccggcccccggagaggcgagacgaggcggcggtggcggcggctgggggtttttacagttctttcccgagtcgaaaaagaaagcagacggcaacccgctgccctccccttcctgctcgcgagctaacgccgaacccagcttcccagcttccagcccacctcccccccctccgcccgactcgcggcgctcagcggcgaccgcgctcccgcgcacagacacacacaggctgcaaacttccactctgcgaactccctgctctcctcctggcccaccgggaggcgccaggcccccagccgcgccccctccctccctggtgcccacgcggggccgcttaggttggctgcattttaaataacatagctatgaaataaaaacgaaagcgagccaagcagccaaagggaagcgcgaggcaaaagcttcgcggggtacgctgcgggagggggccccgggagagggggccgactgcagccctcagcgcgcccgcccgcccacccgtccgcggtctcccgggggaaaggtgttccgggcactgacctgaaatccccggtgggggagtaggcagggagcctgcgatccggctctttgaagttttcccccaagcggactcgaggcggcgagaaggagcggggggcggttgggtgggtggagagagatatgaggggtggggggggttggcgacgttaacgagcggagaaggagccgggccggagaagcgcggcgagcagcaaagtttgcggtccccggctgcccgcagcccgctcgcggcgccgcgctcactcgactccctcgccgtctgctggcagccggctgccctcggggtcggccccgccgaggggtgggctctgggccgggtgggggcggggcggggcgggctcggggcctccgggcaggtggcgacagccccgtgcgatcctccgggctc

SEQ ID NO: 58297 - DNA, 366 bp, Homo sapiens
  chrX:39957026-39957392
  hyper
cgcggcttgggctctccgcccggcggctcgcgggctccccctccgccgccgccgcccgcctagctcccgctctcggtcgcggtctgggctcctgcgcgtctcccccgcagccgccgagctcggcccgcgttcagcgaggagcgcagctctgcctcaccttgccgctgggagcccaggctccgtctgccgccgcacgccgcgatcccaacgcgtcccccctccctggttccctcctcttcctcctccccctccctccgcccgtcctccctcccgcccgccctacctccctccctcccaacagccgcctcccctccccccgcaggcgcagcgctcgggcgacagccgcccgcccgccgccgcctccag

SEQ ID NO: 58298 - DNA, 279 bp, Homo sapiens
  chrX:39957624-39957903
  hyper
tgcgcacgcccgacccgggcgcacgtcctgggcgagccggagaccgacttgggcggcggcggcggcgagggctgccggcagagccagagccgaagggatgggggcggcgggggcggctctcccagccgcgcgccgagactcccctcgctacccagaaggccagtggaggaccgcaattaccataaagcgcctcgcactccgctcagccaaagctgtcaaaccccagcggcagcagccgctgccgccgcctcttgccaccagcgctgcgctctcccggcc

SEQ ID NO: 58299 - DNA, 528 bp, Homo sapiens
  chrX:39958064-39958592
  hyper
cgcccgagttccccggacgtttcaattgtgtgggaattgtttggaggtgggggaaggggggagcagcccgtggaggcaccgggaggcgtgtggggggcggtcggcgagcggagatccgcctgtatttctcccggttctcgagcattttcacggtctgtacctctgatggttggaggggctgcccaggcccctcgccccggcgttgggagattatctcccgcgttttattttccttgacagggagcaacttttggcttacaccgttcgccccataaatttccactcggtaacgtcgtgctgatcggtgcttggcggcggcgtacagcctgcgcccgcagcagttcaattcaattgacacgtattgagcttctccagcgcacccggcgcggctctgggcgcggggggagggcgggggcaggcgggagggagggggaagcggagaagcgaggttccggcctccccggagcgcaaagcctcaagggcgagccgagaagccctagttggtgaagctggcgggaaggggtagga

SEQ ID NO: 58300 - DNA, 31 bp, Homo sapiens; identical to SEQ ID NO: 13596
  chrX:39959180-39959211
  hyper

SEQ ID NO: 58301 - DNA, 891 bp, Homo sapiens
  chrX:39963954-39964845
  hyper
ggttggggcctgccgcggacggattgtccctggggagctgaaaccgcccagcggggaaacccctcctctcgcccttccccgaaaagcttggccgcggtctaagctccgagcaagcgggtatccgctgacagccgggcctcacgtaaggcccacacgcgtcccattagtcagcccgagttcccctcgggcgagccgcctggcgcggccccaaggccgggctcaggcggggagagggtgcggggccgcagcgagctgcgggcggaggtgcgggctccgcggagcccggccaggctcggttccgcgttcctgggcccgcgggtaagctgagtcggcggggcaggccgctccctggctggcgccggggcgccaagctgcgcttcacgtgcccgccatatcagcagcagcggcggcggcggcgaggagggggtgctgggaggcgcgcggccgttcccgcggggtctccggaccccgcctccccgcccctccccgtgggggctgggccgagaccaccctgcggcccccatcccagcgcaagccgaaagcggcgctgccagacgcagagaggctcctggggcgccgttccgagagccgcgcggcggcagcagccaggggagggtgctcctcgcggccgccccgccgccgccgccgcagtcacggggaccggaagccctcgcgccgccccgagcggcctccgctggccccagggctgttccagacgagggctggccgcgcgtcacccctgatccctcctcgccccaggcgaccacccgggccctgcggtatcccggtgtaagccgagaggacccttcctgcggtccgatgagatgtccctgtccctctgctaccaccataagcacgcccccccgcaccgctcgcagctccgcagctggg

SEQ ID NO: 58302 - DNA, 933 bp, Homo sapiens
  chrX:39965256-39966189
  hyper
gggagtaggtcatggcggcaccggtactccacccgcccccctccacgtagggacgtagggtcggctgcggggctcggactttgccactccacctagggaagggccaatggacgctccccgtctcctccgtgtccggaggagatccggcggcggagctgacctgcaaggcttgccctgcctcacccaccccccacctccgtcccaccctccccgactctcctggcccagggcccggcccgggaaggcgttgttttgccagcgggagccgagcgagtgcacagagaaaagcctccctactctaatgagagtgcacacagcgctgcagcgaggaggatgattacccggcgggcggggggcgcgggctcgggccgcgggcggcgtgtgcggcggccccgcgggcccggagtccccgcctgtctggctgctaatcgcacgctttctgctgttacggaggcaggcgggagccggcggccgagcccagcgccgacgactcggcgggtgacacggaaacatggcgcagcgcccctcccccgcccgcgctcccgcctcccgccctccccgcgctcccgcctcccgcctcgcacttcctcccgcccgcgcggcttttgcagttttaatgctctgctttcggcctggcaccattacgctagcagccgcttctccgcggccccgcgcgtctctttcccctttgttttcggggtctatagaaaacgtttgcttttgtcccgagctctcgttaaaccaaacttgtggtggcaacggaaggcggtgcaggcggggaggggtccggggattttggcagtagccggccagagcgtggtggaaacttctctcgctgggttctccgctccctcccactccccctccccaacacagagccgccggcctcccgacgcttctcccttcgcccccgagaggccccagtgctccagg

SEQ ID NO: 58303 - DNA, 906 bp, Homo sapiens
  chrX:39968297-39969203
  hyper
cccgcacgattcgctcggcggagcgctgcgctgctgggctgggagggcggcggggaggaggagagacgagggggcgggaggcgaacccgggctgcgcgccaagaggcccggagccgcagattagtcaccgctcggctctgcgctcccgggtgcgcccgggaaccgggagggcaggcgtcggccccgctcagccgggctccccggtcctcggcgcgggtgcccccacccccacccccgcgcgctcctggcgcggctggctcgactctcggggacccgcgcagccgagatccacttgtcaggtcaagggcaggacagaaactctgcaagcggagtcttgcttgcgaacaggaaatttctccttgatgaggtgctgcccctcccccacgccgggcttcaaaacaaaactccagagcgggcggccaggtacccagcctcgctcgccatggccggcgacctccgctcctcggccccggccccgggcggcggagccaagccaacagagccggcggacggactcggcgccggccccgcggagggcgccaggctgccaccctccggggcccggacggggtcggcgggggtgcggagccccggagcccccgcgcctccccaggttctacagccaccgagcggttttgcggagctgcccgaggccgccgggtcagcggctccccggagggcgtggggggcggggaggccgcgcggcgccgccgactcggcgaatcccgctgcgggagcccgggagggctgcgagctcggcctggcaaagttcctgtggaaactccatgttttgaaactcctgcggcgtcgcagaaggagggggagaggggagcgcgggaagcgcgcgggggcggtctgcacccgcctctccccgccggggagtgggttccgcggccccccgggcct

SEQ ID NO: 58304 - DNA, 662 bp, Homo sapiens
  chrX:40005424-40006086
  hyper
cgctctccgcacggtagcctgatccatctcgtgggcgcggaggcggggcgcggggctccgctcccgcggaggcgcggagccggggctggggagcccggtgcctccccccacggccctgaggtcctccctgcgcccccactctgtttaacccccaggtggggagaggaccccgagactgcacacagcgcgcccggggccctgccggggcctgagcgggcgggggacagtgtccgggaggagggagggccgagaggctgatttaaaggttctcaccgggaagcgagcgaggcacagacctgagagccgccgcgcggtgaaatccgaggagctctcttggcgaggaggggctgtcagaggccatttatctctcgccagagtggaggctcagctcccacaccgcccgcgagtaacaatggcagcgatcagcagctctgcacgcgcttcagtgcatgaatggattgcggaagatgcctgcgtccgctccgctcaggaggctctaggagcgccccctccccgcccgccgcgcccgcccccgtggcctccctaggccctgcgggcgcctcggggttcgcaagctgggccctgcggcgcgatcactctcacccagaacccccgccgccgttcccagggccttggcacctcgccaccgagtgtcattgggg

SEQ ID NO: 58305 - DNA, 1459 bp, Homo sapiens
  chrX:40013600-40015059
  hyper
cgcttgatgtgcccgcggagcggcggatcctccctgctcgctcgctctcgcccaggctccgctcgccgtccccctcctccccctttgttctcctcccctttccctctctttaaatagatttcagggcgctgcctgttggagagcagctggcgatctctcccgagagagggagcgagcgaagcccgaggtgccctgtcaccagcctcccctcccccacctcggcttttctctacgtcccccccaccccacctttctccagtttccaaaatagaaaacaccgggaacacccacgtccactgcaccgcgagcccctgggagcctttggacccctcgtgctgttccttgtgtctgtgtctgtgcagaggaagggcagtgcagggaggggacccagggccgcggcagaagagccaagggtccggatctttccctggcagcagcagggacgcagcgtgggtcacgctaacagggtacagtttacccattagggaaagtcggcggagacggccctgttattcctcttttgcagatggcagattaatccggcagcacccggcctcaaagggaccggctgctcggcaaagggttaacccgtcggccggtaatcgtggacacgcgcgcacacacacacacgcacgcgcgcgcgcgtcctctccgcctgcccgagcgcccgccgcggcccgcagtgcgcccggggctgggggagtagctgcgggaggggagggggtcgggggaggggcggggcgggcttaaccaggccgctcgactgagccggggccacctcgccgtctgtcacttaaatgattgtcctccgctccgctcagtgcggtcagtacgggctgttaacaggcagttgcaatcagtttccgaaaggtcagccaaggtcctccggctctcgcagacggaaggcattacgaaaccgcttttgtatctgcaggcactttagaaaaagaggcgagaaggggcgcaccgcagtgccgcggctgctgcgaccgggggagagggtcgggggctgcggagcagaggagtccgcacccccgcggccagggtcaggcggcgtggatatcacccgcggagtgacccagggcctccgggtttcggtggggaagcaggaagggggtggggagcaggcggcaagggaaggaggagtgggaggaagtgggagaggcgtcctggctcctctcctcacccagccaacagcccacacccggacccagacgggagcgggcggccttggacgcgaggagaccccactcggactctcaggccctcctggcgcctggaagtagggagggggtgtgggggggggaaagaccctcgccgagcgagcgagtcccagcgcggtgtctgaagacgctgctgccgccgccgctagaagtcgtccatcagcaaccagtccaacctgccagtgataatgtgcgatcaacaccaaatcacccccgccaggcgcgatccatcatcg

SEQ ID NO: 58306 - DNA, 542 bp, Homo sapiens
  chrX:40017479-40018021
  hyper
tgggtaaaggaggagcggcttcgcgccctgggacagcgcgcgccccggctgacacggggctgtcgccgcttctcccccggacgcgggcggctgcgcaccggccgccatcttggcccggctgcgcaggcggcgctgcccccggcggtaggaccgcggagccgcaggctgggccggggctgccgcgcgggcgttcccgggctgccggggggcgctccctcccgaggcccccctccccgctgcgggccacgctgacccaggtcggggacgatggggcggccgtccctggtgaaagcgtggcctgtagtgtcgcccctcctcgaaacgctggagcggattttaatcctgagaaacgacctctggttcccggactcccgcgatggtcaacgtgttatcgcttctcccgcgcaccccagaactctgtccccagaggcaacctgccgaggcagctgggggtggggggcgaggcctacccaccgttcacagggcgctgttgaggccagagaggatttgagagttaccacggtttagggctcctgattgga

SEQ ID NO: 58307 - DNA, 229 bp, Homo sapiens; identical to SEQ ID NO: 13602
  chrX:40030831-40031060
  hyper

SEQ ID NO: 58308 - DNA, 928 bp, Homo sapiens
  chrX:40031175-40032103
  hyper
cggcggccggctccggctcacagagcctctctcaacgccggcaagtgcagccgggccgcccagcccccaggccagcctggccccctctgggcctggggttggcgagggcagctgggcgtctgcgctgcccagcccagccgcggatccatggggtttcgcgagctgaaagtaaaggcttgagggagtggggacacccacaccgacccgcggcacgcaggggagtcaagctgcggccaatgcaagacgagcagggtagactactactagcggtggccggaggctcagccaccttcgcgggagaggggatttaccgccaccctcatccacgcgcaggccccaccgcccggtcctctcctctgatccccgggccattgcgaaacacggagcgaacaggtcctcgccagcagccgtcatttcccgggaagatgggaacccacaagcctgactgtgcttcctaaggatactagcgtgcgcgcagaccttggggggaaagagggcagcgcggtctccccgacccggactcttccctggcgcagcacacaaccgccacgggcttccgaagcgcccgagcggggaggaggaaggaaaagcggaggcccgggaggcgggctgcgcgcttggaagccgtgtgtgtttatgtgtctgcgcgcgcgccctggccggacgggtgttgaggggagagtgatcgtgagcaacccggaaccagcagtcccaacctggactgacgaactgggctctccagtcctgggccgtggggctccatgcctcgggctggcgggacaagcggcggggagcccggagcttcggagccgccgccgggcatctagccagctccgcgggagaagcccgggggcgcgtcgggagccaggggactggtgtgaactagccgcccccgcaggcggacgtttagctccggcacccgggagca

SEQ ID NO: 58309 - DNA, 323 bp, Homo sapiens
  chrX:40033572-40033895
  hyper
gggcttccccttcacagcctccggcccctacaagacgctcccagccagcctccggaacaaacccgcagccctaaatcagaattccagttctcgagcgccacccggagagttcacatttcccctcctccgaggccgcgtggtgcgcaagaaagagcccgagggcggcggcagcacacgtctgggcagccccctccccgtacccagcagcgtgtacgcaggaaaagaaaaagccaagagaaaaacgtggactgtaaaagccaaaacgcagaaccatctactactaactaccgacaaccccaggcgggagtttgcaaggagtaagc

SEQ ID NO: 58310 - DNA, 1127 bp, Homo sapiens; identical to SEQ ID NO: 13604
  chrX:40034218-40035345
  hyper

SEQ ID NO: 58311 - DNA, 176 bp, Homo sapiens
  chrX:40035562-40035738
  hyper
cggcttgcacccccgcgagccacctcgcagccctccccggcctcggcctcacggatcccctcccggagtagccccgcgggcccccccgccatgcgtaatggggcgcccctgggacgcaggcggggatggcggttccggtcgttccgggatttgcgtgcaagaagaaaacaaggccg

SEQ ID NO: 58312 - DNA, 162 bp, Homo sapiens
  chrX:40035852-40036014
  hyper
cgattcctcgtccggcccgtgccgcaccacgcggagctccgcgcgccctggctcccacaccggtccctccataactcgcgctcctccctcgctccgggctcggggagccgctcgctcccagcgcccagagtcagccggttccaccttcggctgcgagagccg

SEQ ID NO: 58313 - DNA, 324 bp, Homo sapiens; identical to SEQ ID NO: 13605
  chrX:40036258-40036582
  hyper

SEQ ID NO: 58314 - DNA, 30 bp, Homo sapiens; identical to SEQ ID NO: 13606
  chrX:40126558-40126588
  hyper

SEQ ID NO: 58315 - DNA, 230 bp, Homo sapiens
  chrX:40595082-40595312
  hyper
ggggggcgcgtgggagtgaggcggtacctgtgagcgcgcgggagagcggaaaagggagccgcgcgccgccggaaaccagggtgagggctgagccggagtcgtcaccgggaacgtcagcagttgccccgcccttaccctcgccgctctccctcccgcctccgccccctggcgttgtaaaggcgacaatttgcccagagaaatccaccatcgcttcctaagtggggcacaaa

SEQ ID NO: 58316 - DNA, 30 bp, Homo sapiens
  chrX:40944757-40944787
  hyper
gccgccgccggagccgcaacctctccgcac

SEQ ID NO: 58317 - DNA, 428 bp, Homo sapiens; identical to SEQ ID NO: 13607
  chrX:41135194-41135622
  hyper

SEQ ID NO: 58318 - DNA, 30 bp, Homo sapiens
  chrX:41192523-41192553
  hyper
ctaggcggcgcccccgctgcctaggcaacc

SEQ ID NO: 58319 - DNA, 30 bp, Homo sapiens
  chrX:41194199-41194229
  hyper
tccgctggctttttcgcttcagcccaggtt

SEQ ID NO: 58320 - DNA, 30 bp, Homo sapiens; identical to SEQ ID NO: 13608
  chrX:43379710-43379740
  hyper

SEQ ID NO: 58321 - DNA, 50 bp, Homo sapiens
  chrX:44202869-44202919
  hyper
agagggcccggcaggcagcggcgcctcccggccgtgttgtttggccccca

SEQ ID NO: 58322 - DNA, 81 bp, Homo sapiens
  chrX:44402317-44402398
  hyper
ggggacttgtagtccgttgccttccgcaactaggaagggggagggaccgcccctcctagaatttccgtaacttgaatttga

SEQ ID NO: 58323 - DNA, 30 bp, Homo sapiens; identical to SEQ ID NO: 13609
  chrX:44733191-44733221
  hyper

SEQ ID NO: 58324 - DNA, 38 bp, Homo sapiens; identical to SEQ ID NO: 13610
  chrX:54834567-54834605
  hyper

SEQ ID NO: 58325 - DNA, 95 bp, Homo sapiens
  chrX:68758219-68758314
  hyper
agagccctgactgctgttccccgacaccggccgctgggtggcgctgtggctcctcctacccaggctggaggcaccagggaggcggaggcgcagcc

SEQ ID NO: 58326 - DNA, 866 bp, Homo sapiens
  chrX:71525284-71526150
  hyper
tgtttgcggacagctcggctgccctcctcgccgcatcccagatggagccgcggaaccgggggcggccgggagcatcccttgcacggcgggcgcgtgcacccaggccaccggggccctgagcgtccgttcccgcaagtgctgtatcaggaactgatcttagagacaggatggacaggcaggaaggggcacggggtgtcggcctccgcggcgagtccgcactccggcgccggctgctgccactctcgcgcctgatcaacacttactgagcgcccgctgagcatccgacgcggcagcaggctgagcctaccccctagccaagccgcctgcggtcagtgctaaaaccccgctaggagaagagtgagagaggctcggagaggtgcggtaacttgcccaaggtcacagcgctagaaagtggcggagccgggattcgcagccaggtctctctgactccaagtccggtgctctgcgaagcagggactcggcgcgcggctcgccagcccgcgtttatagggagaggggtgtgcgcgtgggtgtgtgtgtgtgggcgtgtgtcgggggaggggagggctgaggtcgactgggcagtagaggcaagttgcccaaattcgctaacttccatcccgcaattccgctgaactcggcccgaaaagccccctcttgcctcaattccccgaagtaaatctgagctttgtgcagctccggagccagagcgtccagatgcggtccgggagattagcaaagtcggtggaagccaagctggagaaagcgcgggcgcagggagaaaaggtgctgccgtctccccgggagaagcgggcacccggccccgctggccggcaggggggcgcgctggcaagcgaacccgagcg

SEQ ID NO: 58327 - DNA, 30 bp, Homo sapiens; identical to SEQ ID NO: 13613
  chrX:71526775-71526805
  hyper

SEQ ID NO: 58328 - DNA, 563 bp, Homo sapiens
  chrX:73163982-73164545
  hyper
aggaaactgggggagggtccacggcaacggctgcggcacggcaacggctgcggcacggcaacggctggggcacggcaacggctggtgcatgttgccggcggaggcatttaggtagtgcacgacggctgggcgccgggcctgtttggctgtgacgcccacccccggctttcatccgcctatgccctagggctagtggaagacttaagatggcggcgtttgcacggagtgcaatcactgcgtccttacgggggttgcaaggcgtccgaagtatgagtccactaacaaaagtccagaaactcgccagttaatagtattgtggtgagtgatgagcctcacgttggctagagaagtggccgttagcgaggctacacactttgggatcgcgtggcctgagtcgggggagtaaccggcctgtattccatttttctctctccagtctcttcaaaatatcggagaataatttctttctcgctgatcgcctaacttctactgacgaagcttggaagttgcagaaggtagctcctaggagggatatatgggtcgttctttcctttttccttatt

SEQ ID NO: 58329 - DNA, 30 bp, Homo sapiens; identical to SEQ ID NO: 13615
  chrX:80722921-80722951
  hyper

SEQ ID NO: 58330 - DNA, 30 bp, Homo sapiens; identical to SEQ ID NO: 13616
  chrX:87762080-87762110
  hyper

SEQ ID NO: 58331 - DNA, 180 bp, Homo sapiens; identical to SEQ ID NO: 13617
  chrX:92928214-92928394
  hyper

SEQ ID NO: 58332 - DNA, 299 bp, Homo sapiens; identical to SEQ ID NO: 13618
  chrX:92928507-92928806
  hyper

SEQ ID NO: 58333 - DNA, 30 bp, Homo sapiens; identical to SEQ ID NO: 13619
  chrX:93928298-93928328
  hyper

SEQ ID NO: 58334 - DNA, 264 bp, Homo sapiens
  chrX:95940027-95940291
  hyper
acagggcacaggtgacagggccggagaaagatggagcagcccggggcggcggcgtcgggagcgggaggcggcagcgaggaacccggtgggggccggagcaacaagcggagcgcggggaaccgggccgccaatgaagaggaaacgaaaaacaaacccaaattggtgagtgctcccgcagcccccgccggccttagggacagggagagccccgggatcctcctgccattgaacacgggggcacccggggccccctcccaaggatga

SEQ ID NO: 58335 - DNA, 31 bp, Homo sapiens; identical to SEQ ID NO: 13620
  chrX:96606843-96606874
  hyper

SEQ ID NO: 58336 - DNA, 73 bp, Homo sapiens; identical to SEQ ID NO: 13621
  chrX:100475065-100475138
  hyper

SEQ ID NO: 58337 - DNA, 435 bp, Homo sapiens
  chrX:102862893-102863328
  hyper
gaaccagctgtctgagctgcccgggcagcgggggagcagcgagcgggcttccgcgagccggagaaggcacaggcctgtcccgggtcccggcaggtcagtgtgaaggtgggcgctgccggcggaaccacggaaggggtggaggtggctggcagtaggagtagggaggggcggagaaaggatccgggagactggtgaggagggggaagcggagcggtcggaggcaagggcgggggagcctggcccgccttctcgacgaccccctgcactgagccgtccatccattttagtactggaaatggagtacgggggggcaaccccgcagtgcaacagtgaaacgtagacatattctggaaataaccgcctctcacaatctgctcccatggaaacatctgacctccgcaaaaacggggtggcgctgggacaggttgcctccag

SEQ ID NO: 58338 - DNA, 34 bp, Homo sapiens; identical to SEQ ID NO: 13622
  chrX:102941573-102941607
  hyper

SEQ ID NO: 58339 - DNA, 30 bp, Homo sapiens; identical to SEQ ID NO: 13623
  chrX:103731902-103731932
  hyper

SEQ ID NO: 58340 - DNA, 173 bp, Homo sapiens; identical to SEQ ID NO: 13624
  chrX:107003133-107003306
  hyper

SEQ ID NO: 58341 - DNA, 31 bp, Homo sapiens; identical to SEQ ID NO: 13625
  chrX:118101022-118101053
  hyper

SEQ ID NO: 58342 - DNA, 21 bp, Homo sapiens
  chrX:118451726-118451747
  hyper
caaaataattttcactcgtgt

SEQ ID NO: 58343 - DNA, 30 bp, Homo sapiens; identical to SEQ ID NO: 13627
  chrX:120184126-120184156
  hyper

SEQ ID NO: 58344 - DNA, 25 bp, Homo sapiens
  chrX:123094408-123094433
  hyper
agtcgccgaagagcgaacaccccaa

SEQ ID NO: 58345 - DNA, 224 bp, Homo sapiens; identical to SEQ ID NO: 13629
  chrX:123094492-123094716
  hyper

SEQ ID NO: 58346 - DNA, 125 bp, Homo sapiens; identical to SEQ ID NO: 13630
  chrX:123095160-123095285
  hyper

SEQ ID NO: 58347 - DNA, 152 bp, Homo sapiens; identical to SEQ ID NO: 13631
  chrX:123095554-123095706
  hyper

SEQ ID NO: 58348 - DNA, 66 bp, Homo sapiens; identical to SEQ ID NO: 13632
  chrX:123155215-123155281
  hyper

SEQ ID NO: 58349 - DNA, 142 bp, Homo sapiens; identical to SEQ ID NO: 13633
  chrX:123156379-123156521
  hyper

SEQ ID NO: 58350 - DNA, 80 bp, Homo sapiens; identical to SEQ ID NO: 13634
  chrX:123159688-123159768
  hyper

SEQ ID NO: 58351 - DNA, 166 bp, Homo sapiens; identical to SEQ ID NO: 13635
  chrX:123164809-123164975
  hyper

SEQ ID NO: 58352 - DNA, 98 bp, Homo sapiens; identical to SEQ ID NO: 13636
  chrX:123171375-123171473
  hyper

SEQ ID NO: 58353 - DNA, 78 bp, Homo sapiens; identical to SEQ ID NO: 13637
  chrX:123176417-123176495
  hyper

SEQ ID NO: 58354 - DNA, 206 bp, Homo sapiens; identical to SEQ ID NO: 13638
  chrX:123179012-123179218
  hyper

SEQ ID NO: 58355 - DNA, 153 bp, Homo sapiens; identical to SEQ ID NO: 13639
  chrX:123181202-123181355
  hyper

SEQ ID NO: 58356 - DNA, 75 bp, Homo sapiens; identical to SEQ ID NO: 13640
  chrX:123182853-123182928
  hyper

SEQ ID NO: 58357 - DNA, 136 bp, Homo sapiens; identical to SEQ ID NO: 13641
  chrX:123184023-123184159
  hyper

SEQ ID NO: 58358 - DNA, 279 bp, Homo sapiens; identical to SEQ ID NO: 13642
  chrX:123184965-123185244
  hyper

SEQ ID NO: 58359 - DNA, 109 bp, Homo sapiens; identical to SEQ ID NO: 13643
  chrX:123189976-123190085
  hyper

SEQ ID NO: 58360 - DNA, 113 bp, Homo sapiens; identical to SEQ ID NO: 13644
  chrX:123191714-123191827
  hyper

SEQ ID NO: 58361 - DNA, 132 bp, Homo sapiens; identical to SEQ ID NO: 13645
  chrX:123195072-123195204
  hyper

SEQ ID NO: 58362 - DNA, 105 bp, Homo sapiens; identical to SEQ ID NO: 13646
  chrX:123195619-123195724
  hyper

SEQ ID NO: 58363 - DNA, 307 bp, Homo sapiens; identical to SEQ ID NO: 13647
  chrX:123196748-123197055
  hyper

SEQ ID NO: 58364 - DNA, 214 bp, Homo sapiens; identical to SEQ ID NO: 13648
  chrX:123197687-123197901
  hyper

SEQ ID NO: 58365 - DNA, 72 bp, Homo sapiens; identical to SEQ ID NO: 13649
  chrX:123199724-123199796
  hyper

SEQ ID NO: 58366 - DNA, 263 bp, Homo sapiens; identical to SEQ ID NO: 13650
  chrX:123200023-123200286
  hyper

SEQ ID NO: 58367 - DNA, 94 bp, Homo sapiens; identical to SEQ ID NO: 13651
  chrX:123202412-123202506
  hyper

SEQ ID NO: 58368 - DNA, 176 bp, Homo sapiens; identical to SEQ ID NO: 13652
  chrX:123204997-123205173
  hyper

SEQ ID NO: 58369 - DNA, 141 bp, Homo sapiens; identical to SEQ ID NO: 13653
  chrX:123210180-123210321
  hyper

SEQ ID NO: 58370 - DNA, 103 bp, Homo sapiens; identical to SEQ ID NO: 13654
  chrX:123211805-123211908
  hyper

SEQ ID NO: 58371 - DNA, 151 bp, Homo sapiens; identical to SEQ ID NO: 13655
  chrX:123215227-123215378
  hyper

SEQ ID NO: 58372 - DNA, 134 bp, Homo sapiens; identical to SEQ ID NO: 13656
  chrX:123217269-123217403
  hyper

SEQ ID NO: 58373 - DNA, 225 bp, Homo sapiens; identical to SEQ ID NO: 13657
  chrX:123220395-123220620
  hyper

SEQ ID NO: 58374 - DNA, 391 bp, Homo sapiens; identical to SEQ ID NO: 13658
  chrX:123224423-123224814
  hyper

SEQ ID NO: 58375 - DNA, 128 bp, Homo sapiens; identical to SEQ ID NO: 13659
  chrX:123227866-123227994
  hyper

SEQ ID NO: 58376 - DNA, 79 bp, Homo sapiens; identical to SEQ ID NO: 13660
  chrX:123229220-123229299
  hyper

SEQ ID NO: 58377 - DNA, 2084 bp, Homo sapiens; identical to SEQ ID NO: 13661
  chrX:123234422-123236506
  hyper

SEQ ID NO: 58378 - DNA, 31 bp, Homo sapiens; identical to SEQ ID NO: 13662
  chrX:124338609-124338640
  hyper

SEQ ID NO: 58379 - DNA, 21 bp, Homo sapiens
  chrX:127856750-127856771
  hyper
tttaaagctcatcatccggct

SEQ ID NO: 58380 - DNA, 137 bp, Homo sapiens; identical to SEQ ID NO: 13664
  chrX:129139162-129139299
  hyper

SEQ ID NO: 58381 - DNA, 92 bp, Homo sapiens; identical to SEQ ID NO: 13665
  chrX:129146552-129146644
  hyper

SEQ ID NO: 58382 - DNA, 3265 bp, Homo sapiens; identical to SEQ ID NO: 13666
  chrX:129146924-129150189
  hyper

SEQ ID NO: 58383 - DNA, 178 bp, Homo sapiens; identical to SEQ ID NO: 13667
  chrX:129154947-129155125
  hyper

SEQ ID NO: 58384 - DNA, 82 bp, Homo sapiens; identical to SEQ ID NO: 13668
  chrX:129156870-129156952
  hyper

SEQ ID NO: 58385 - DNA, 393 bp, Homo sapiens; identical to SEQ ID NO: 13669
  chrX:129158961-129159354
  hyper

SEQ ID NO: 58386 - DNA, 228 bp, Homo sapiens; identical to SEQ ID NO: 13670
  chrX:129162608-129162836
  hyper

SEQ ID NO: 58387 - DNA, 223 bp, Homo sapiens; identical to SEQ ID NO: 13671
  chrX:129168428-129168651
  hyper

SEQ ID NO: 58388 - DNA, 168 bp, Homo sapiens; identical to SEQ ID NO: 13672
  chrX:129171340-129171508
  hyper

SEQ ID NO: 58389 - DNA, 149 bp, Homo sapiens; identical to SEQ ID NO: 13673
  chrX:129173110-129173259
  hyper

SEQ ID NO: 58390 - DNA, 79 bp, Homo sapiens; identical to SEQ ID NO: 13674
  chrX:129184690-129184769
  hyper

SEQ ID NO: 58391 - DNA, 158 bp, Homo sapiens; identical to SEQ ID NO: 13675
  chrX:129185833-129185991
  hyper

SEQ ID NO: 58392 - DNA, 2231 bp, Homo sapiens; identical to SEQ ID NO: 13676
  chrX:129189827-129192058
  hyper

SEQ ID NO: 58393 - DNA, 52 bp, Homo sapiens; identical to SEQ ID NO: 13677
  chrX:130110129-130110181
  hyper

SEQ ID NO: 58394 - DNA, 157 bp, Homo sapiens; identical to SEQ ID NO: 13678
  chrX:133507340-133507497
  hyper

SEQ ID NO: 58395 - DNA, 185 bp, Homo sapiens; identical to SEQ ID NO: 13679
  chrX:133511600-133511785
  hyper

SEQ ID NO: 58396 - DNA, 103 bp, Homo sapiens; identical to SEQ ID NO: 13680
  chrX:133512033-133512136
  hyper

SEQ ID NO: 58397 - DNA, 135 bp, Homo sapiens; identical to SEQ ID NO: 13681
  chrX:133527529-133527664
  hyper

SEQ ID NO: 58398 - DNA, 45 bp, Homo sapiens; identical to SEQ ID NO: 13682
  chrX:133527937-133527982
  hyper

SEQ ID NO: 58399 - DNA, 480 bp, Homo sapiens; identical to SEQ ID NO: 13683
  chrX:133547516-133547996
  hyper

SEQ ID NO: 58400 - DNA, 278 bp, Homo sapiens; identical to SEQ ID NO: 13684
  chrX:133549044-133549322
  hyper

SEQ ID NO: 58401 - DNA, 135 bp, Homo sapiens; identical to SEQ ID NO: 13685
  chrX:133551197-133551332
  hyper

SEQ ID NO: 58402 - DNA, 131 bp, Homo sapiens; identical to SEQ ID NO: 13686
  chrX:133559229-133559360
  hyper

SEQ ID NO: 58403 - DNA, 3133 bp, Homo sapiens; identical to SEQ ID NO: 13687
  chrX:133559689-133562822
  hyper

SEQ ID NO: 58404 - DNA, 31 bp, Homo sapiens; identical to SEQ ID NO: 13688
  chrX:133913512-133913543
  hyper

SEQ ID NO: 58405 - DNA, 30 bp, Homo sapiens; identical to SEQ ID NO: 13689
  chrX:144475782-144475812
  hyper

SEQ ID NO: 58406 - DNA, 404 bp, Homo sapiens
  chrY:2655224-2655628
  hyper
cttcggcagcatcttcgccttccgacgaggtcgatacttataattcgggtatttctctctgtgcatggcctgtaatttctgtgcctcctggaagaatggccatttttcggcttcagtaagcattttccactggtatcccagctgcttgctgatctctgagtttcgcattctgggattctctagagccatcttgcgcctctgatcgcgagaccacacgatgaatgcgttcatgggtcgcttcactctatcctggacgttgcctttactgttttctcccgtttcacactgatacttagagttacagctttcagtgcaaaggaaggaagagcttctccggagagcgggaatattctcttgcacagctggactgtaatcatcgctgttgaatacgcttaacatagcag

SEQ ID NO: 58407 - DNA, 30 bp, Homo sapiens
  chrY:2655911-2655941
  hyper
ctgtcctgaaaaatgcgaatttgacttaat

SEQ ID NO: 58408 - DNA, 192 bp, Homo sapiens; identical to SEQ ID NO: 13690
  chrY:2802950-2803142
  hyper

SEQ ID NO: 58409 - DNA, 68 bp, Homo sapiens; identical to SEQ ID NO: 13691
  chrY:2804267-2804335
  hyper

SEQ ID NO: 58410 - DNA, 30 bp, Homo sapiens
  chrY:4869218-4869248
  hyper
agcgcacagggttcccggtgctgtttctct

SEQ ID NO: 58411 - DNA, 30 bp, Homo sapiens
  chrY:4869596-4869626
  hyper
cgcgtagcgataaaacggctcttttttttt

SEQ ID NO: 58412 - DNA, 30 bp, Homo sapiens; identical to SEQ ID NO: 13692
  chrY:6777840-6777870
  hyper

SEQ ID NO: 58413 - DNA, 84 bp, Homo sapiens; identical to SEQ ID NO: 13693
  chrY:6778626-6778710
  hyper

SEQ ID NO: 58414 - DNA, 30 bp, Homo sapiens; identical to SEQ ID NO: 13694
  chrY:6778924-6778954
  hyper

SEQ ID NO: 58415 - DNA, 377 bp, Homo sapiens
  chrY:7140717-7141094
  hyper
cgcatagagagcgggcgtcaccactagggggatatgctacccacaaaatgcaggtggaggctgggcgaggctagcagccaggggccagaaatccaaagcctgagccaggttcagacttcctgactcccactcccggttagctgtgcaaggatggctcggcctggtccccctaaaaatgtgtccgttctaacttagaggccgctttggctctcagaaagcccccctgacctgaggactgagggactggagaccgctttcagtcgcagaatcgctgagatccctcaaaacaaaggcgtttccagtttgaccccttgctgctcaatgtgtggttggccaaccgacagcctggggcgccctggttgcgggtcaggggagca

SEQ ID NO: 58416 - DNA, 30 bp, Homo sapiens
  chrY:7141301-7141331
  hyper
tctttatcaggttgtcgccggggtgtttaa

SEQ ID NO: 58417 - DNA, 31 bp, Homo sapiens; identical to SEQ ID NO: 13695
  chrY:7180425-7180456
  hyper

SEQ ID NO: 58418 - DNA, 347 bp, Homo sapiens; identical to SEQ ID NO: 13696
  chrY:14532862-14533209
  hyper

SEQ ID NO: 58419 - DNA, 447 bp, Homo sapiens; identical to SEQ ID NO: 13697
  chrY:14533221-14533668
  hyper

SEQ ID NO: 58420 - DNA, 35 bp, Homo sapiens; identical to SEQ ID NO: 13698
  chrY:14774178-14774213
  hyper

SEQ ID NO: 58421 - DNA, 30 bp, Homo sapiens; identical to SEQ ID NO: 13699
  chrY:14774511-14774541
  hyper

SEQ ID NO: 58422 - DNA, 30 bp, Homo sapiens; identical to SEQ ID NO: 13700
  chrY:15017282-15017312
  hyper

SEQ ID NO: 58423 - DNA, 30 bp, Homo sapiens; identical to SEQ ID NO: 13701
  chrY:15591245-15591275
  hyper

SEQ ID NO: 58424 - DNA, 114 bp, Homo sapiens; identical to SEQ ID NO: 13702
  chrY:15591518-15591632
  hyper

SEQ ID NO: 58425 - DNA, 30 bp, Homo sapiens; identical to SEQ ID NO: 13703
  chrY:15816346-15816376
  hyper

SEQ ID NO: 58426 - DNA, 52 bp, Homo sapiens; identical to SEQ ID NO: 13704
  chrY:15863329-15863381
  hyper

SEQ ID NO: 58427 - DNA, 232 bp, Homo sapiens; identical to SEQ ID NO: 13705
  chrY:15863884-15864116
  hyper

SEQ ID NO: 58428 - DNA, 1362 bp, Homo sapiens
  chrY:16635795-16637157
  hyper
ctccaaactcgggagcggtatccatgcacccctttcccgtgtgtgtgggttacgacgtgggtgggagtggtgaggcaagccgcaaaagtggggtagagctggtggttttgcttcttcggaagcctttgagtgtggcctggaccttagatgggggtgcagggcggtttgccgctgccaccctcggcaccatctctgaactgcccgcttttccggaggagcggaaaagttggaagccgaaaagacaggcgcccggagccctggtctaggtatcaggtgatccggagccctagtcggtgcccactaagaacaccccttctcccatcgggggttcggaggagtgttaagcctgcgggtctgccagtccctaaggtagggatgggggaggggtctgaggaatccgttccaataggcacaccatccccacagccctagaaaaggcaaccaccacccgctccttcctcccgcaccatcccatctcaaggctctctgctgacccgggccgatttcatctggtctcttctcccccgcttcccacctcccaattcccgcgcagctcggctccgttccctcccactcccctaggcggaactgaaagcgaagatcagccaagagcacagtcggaggcggcagagacggtggcgggtgagctaggggctgtgagacgaagcagggagagagtgaacttcagccccgtcccctccccactgccacggctggggcaacccaacccgcgcctgaagcggcttggcttgacctgcggaagcgcgggccgggatggcgtggggagagggaggtaggtgccactgggctgcagatgacgagtgggttgggggcttgctgtgggacaagaggttcaggttccggcctgcgccttccactccgcggtggcgctctctgcctgcggttttccaggaggccgatctaccccagggacactctcatccttcaggcggtctcctggacgccctttcctccccttgcctcccagcctgacctggctctttcgcccctcggagaaccggtaggttggggtccctcggcgggggtctagtgagccgagtcgcgagctttgcgcccccggtatctaggccccgtgccgcgcgcaaatccgggcccaggcgtacagttctggagcctagtcgccgccagacacagggccctttgtacccggaggagcgggagcgggagcgggggcgtcagggcaacccttgcaccccagaggcctgcctaggaccaccctgggaacaaatgtctcgctcggaaaacgaggtgaacccggaggatgtcctacgcatcatacccctccccttcttgagaaggctttttctttttttctttttttttcccggtttccttttctct

SEQ ID NO: 58429 - DNA, 31 bp, Homo sapiens
  chrY:17245169-17245200
  hyper
gttcttatggcagaaacgctacaaaccagaa

SEQ ID NO: 58430 - DNA, 62 bp, Homo sapiens; identical to SEQ ID NO: 13709
  chrY:21729022-21729084
  hyper

SEQ ID NO: 58431 - DNA, 30 bp, Homo sapiens; identical to SEQ ID NO: 13710
  chrY:21729299-21729329
  hyper

SEQ ID NO: 58432 - DNA, 30 bp, Homo sapiens; identical to SEQ ID NO: 13711
  chrY:21729540-21729570
  hyper

SEQ ID NO: 58433 - DNA, 30 bp, Homo sapiens; identical to SEQ ID NO: 13712
  chrY:21906959-21906989
  hyper

SEQ ID NO: 58434 - DNA, 31 bp, Homo sapiens; identical to SEQ ID NO: 13713
  AC010098.8_29020-31687:1032-1063
  hyper

SEQ ID NO: 58435 - DNA, 31 bp, Homo sapiens; identical to SEQ ID NO: 13714
  AC153808.1_1-20788:7948-7979
  hyper

SEQ ID NO: 58436 - DNA, 105 bp, Homo sapiens; identical to SEQ ID NO: 13715
  AC209420.3_23583-33864:1608-1713
  hyper

SEQ ID NO: 58437 - DNA, 626 bp, Homo sapiens
  AC211344.3_7702-13588:3922-4548
  hyper
acagaactgggacagtaaaggcgtcactgctgcaaccacagggcgccagcctcccgcatccctgagtgctggtgctggagatgccgcctccgccggccaagcgctgctgctgctgctgctgctgctgctcgcatgggccgtgcatgccgctttccgttccaagttgggcaggtgctgctgacagggaagctgagggcgtctgcctgcaccgccgttggcagcttctccaatgcaaggcagacccggcctcctaaggaggggtttctccaggaagttaaggtgcttagacggtgaagaacgaaacggcccacaacagtccttctatttcgctgctttgtacaaacaccgttctgcccacacctcaccttactgccctcatagtgcagctgagccttgtagaggtgaatccccactccctccagggcccagcccgcagcttatcagcaaccgccaggaggcggggaggcgtccactcttgctgcgtcgctttcctggttgtaaagctcgtgggtgaacattgcaaacttaaccagcaaaaaccaccggagataaaataggaaagacaaaggaaagaggaggaacacgcatttaacacacagcatctcgggaaggaagaaaagacagac

SEQ ID NO: 58438 - DNA, 541 bp, Homo sapiens; identical to SEQ ID NO: 13717
  AC241851.2_88-34049:15062-15603
  hyper

SEQ ID NO: 58439 - DNA, 99 bp, Homo sapiens; identical to SEQ ID NO: 13718
  AC241851.2_88-34049:15842-15941
  hyper

SEQ ID NO: 58440 - DNA, 200 bp, Homo sapiens; identical to SEQ ID NO: 13719
  AEKP01168736.1_1-4752:1588-1788
  hyper

SEQ ID NO: 58441 - DNA, 739 bp, Homo sapiens
  AEKP01168736.1_1-4752:1847-2586
  hyper
acctgggcgggctggccggcgcggctgcgctgaccggggcgctcagctttgtgctcctggcggccgccatcggcacggacttctggtatatcattgacaccgagcggctggagaggactggcccgggggcgcaggacctgctggggtccatcaatcgcagccagcccgagcctctgagctcccactccggcctctggcggacctgccggggtaagggtgcaccccgtggctgggagctgtggctgcgaacgccccctgcgcggtgccctgctcccttgggacctgttgcttggcgcgcactcctcccccaagtccctaaaatacaatgtctagggactcggggggaaggtgagcagaaggccgggactgcgaaaacccttccgagaggcacccggctgcgatcccaactgctctagctctccccgcgccctccccgggtggggcacttagggtgagcatgggggcaaagccgcagacgagggtgctgcacagaactccggggtcctgcacccatggattcctccgtcctatccagtgcagagcccgtgcacaccgctgatgaaccccttcaggctggagaacgtgacagtcagcgaatcgagccggcaacttctcagtgagtccggggagggtgaggatggagggagcgccccggtcctagccgtgagttctggagcctttcccaaaacagccgggcttcggggcctgcggagagggcggctggggtggcctctgacag

SEQ ID NO: 58442 - DNA, 31 bp, Homo sapiens; identical to SEQ ID NO: 13721
  AEKP01218621.1_1-6359:538-569
  hyper

SEQ ID NO: 58443 - DNA, 46 bp, Homo sapiens; identical to SEQ ID NO: 13722
  FP325318.4_87426-89530:1057-1103
  hyper

SEQ ID NO: 58444 - DNA, 7860 bp, Homo sapiens
  HPV16:0-7860
  hyper
actacaataattcatgtataaaactaagggcgtaaccgaaatcggttgaaccgaaaccggttagtataaaagcagacattttatgcaccaaaagagaactgcaatgtttcaggacccacaggagcgacccagaaagttaccacagttatgcacagagctgcaaacaactatacatgatataatattagaatgtgtgtactgcaagcaacagttactgcgacgtgaggtatatgactttgcttttcgggatttatgcatagtatatagagatgggaatccatatgctgtatgtgataaatgtttaaagttttattctaaaattagtgagtatagacattattgttatagtttgtatggaacaacattagaacagcaatacaacaaaccgttgtgtgatttgttaattaggtgtattaactgtcaaaagccactgtgtcctgaagaaaagcaaagacatctggacaaaaagcaaagattccataatataaggggtcggtggaccggtcgatgtatgtcttgttgcagatcatcaagaacacgtagagaaacccagctgtaatcatgcatggagatacacctacattgcatgaatatatgttagatttgcaaccagagacaactgatctctactgttatgagcaattaaatgacagctcagaggaggaggatgaaatagatggtccagctggacaagcagaaccggacagagcccattacaatattgtaaccttttgttgcaagtgtgactctacgcttcggttgtgcgtacaaagcacacacgtagacattcgtactttggaagacctgttaatgggcacactaggaattgtgtgccccatctgttctcagaaaccataatctaccatggctgatcctgcaggtaccaatggggaagagggtacgggatgtaatggatggttttatgtagaggctgtagtggaaaaaaaaacaggggatgctatatcagatgacgagaacgaaaatgacagtgatacaggtgaagatttggtagattttatagtaaatgataatgattatttaacacaggcagaaacagagacagcacatgcgttgtttactgcacaggaagcaaaacaacatagagatgcagtacaggttctaaaacgaaagtatttggtagtccacttagtgatattagtggatgtgtagacaataatattagtcctagattaaaagctatatgtatagaaaaacaaagtagagctgcaaaaaggagattatttgaaagcgaagacagcgggtatggcaatactgaagtggaaactcagcagatgttacaggtagaagggcgccatgagactgaaacaccatgtagtcagtatagtggtggaagtgggggtggttgcagtcagtacagtagtggaagtgggggagagggtgttagtgaaagacacactatatgccaaacaccacttacaaatattttaaatgtactaaaaactagtaatgcaaaggcagcaatgttagcaaaatttaaagagttatacggggtgagtttttcagaattagtaagaccatttaaaagtaataaatcaacgtgttgcgattggtgtattgctgcatttggacttacacccagtatagctgacagtataaaaacactattacaacaatattgtttatatttacacattcaaagtttagcatgttcatggggaatggttgtgttactattagtaagatataaatgtggaaaaaatagagaaacaattgaaaaattgctgtctaaactattatgtgtgtctccaatgtgtatgatgatagagcctccaaaattgcgtagtacagcagcagcattatattggtataaaacaggtatatcaaatattagtgaagtgtatggagacacgccagaatggatacaaagacaaacagtattacaacatagttttaatgattgtacatttgaattatcacagatggtacaatgggcctacgataatgacatagtagacgatagtgaaattgcatataaatatgcacaattggcagacactaatagtaatgcaagtgcctttctaaaaagtaattcacaggcaaaaattgtaaaggattgtgcaacaatgtgtagacattataaacgagcagaaaaaaaacaaatgagtatgagtcaatggataaaatatagatgtgatagggtagatgatggaggtgattggaagcaaattgttatgtttttaaggtatcaaggtgtagagtttatgtcatttttaactgcattaaaaagatttttgcaaggcatacctaaaaaaaattgcatattactatatggtgcagctaacacaggtaaatcattatttggtatgagtttaatgaaatttctgcaagggtctgtaatatgttttgtaaattctaaaagccatttttggttacaaccattagcagatgccaaaataggtatgttagatgatgctacagtgccctgttggaactacatagatgacaatttaagaaatgcattggatggaaatttagtttctatggatgtaaagcatagaccattggtacaactaaaatgccctccattattaattacatctaacattaatgctggtacagattctaggtggccttatttacataatagattggtggtgtttacatttcctaatgagtttccatttgacgaaaacggaaatccagtgtatgagcttaatgataagaactggaaatcctttttctcaaggacgtggtccagattaagtttgcacgaggacgaggacaaggaaaacgatggagactctttgccaacgtttaaatgtgtgtcaggacaaaatactaacacattatgaaaatgatagtacagacctacgtgaccatatagactattggaaacacatgcgcctagaatgtgctatttattacaaggccagagaaatgggatttaaacatattaaccaccaagtggtgccaacactggctgtatcaaagaataaagcattacaagcaattgaactgcaactaacgttagaaacaatatataactcacaatatagtaatgaaaagtggacattacaagacgttagccttgaagtgtatttaactgcaccaacaggatgtataaaaaaacatggatatacagtggaagtgcagtttgatggagacatatgcaatacaatgcattatacaaactggacacatatatatatttgtgaagaagcatcagtaactgtggtagagggtcaagttgactattatggtttatattatgttcatgaaggaatacgaacatattttgtgcagtttaaagatgatgcagaaaaatatagtaaaaataaagtatgggaagttcatgcgggtggtcaggtaatattatgtcctacatctgtgtttagcagcaacgaagtatcctctcctgaaattattaggcagcacttggccaaccaccccgccgcgacccataccaaagccgtcgccttgggcaccgaagaaacacagacgactatccagcgaccaagatcagagccagacaccggaaacccctgccacaccactaagttgttgcacagagactcagtggacagtgctccaatcctcactgcatttaacagctcacacaaaggacggattaactgtaatagtaacactacacccatagtacatttaaaaggtgatgctaatactttaaaatgtttaagatatagatttaaaaagcattgtacattgtatactgcagtgtcgtctacatggcattggacaggacataatgtaaaacataaaagtgcaattgttacacttacatatgatagtgaatggcaacgtgaccaatttttgtctcaagttaaaataccaaaaactattacagtgtctactggatttatgtctatatgacaaatcttgatactgcatccacaacattactggcgtgctttttgctttgcttttgtgtgcttttgtgtgtctgcctattaatacgtccgctgcttttgtctgtgtctacatacacatcattaataatattggtattactattgtggataacagcagcctctgcgtttaggtgttttattgtatatattatatttgtttatataccattatttttaatacatacacatgcacgctttttaattacataatgtatatgtacataatgtaattgttacatataattgttgtataccataacttactattttttcttttttattttcatatataatttttttttttgtttgtttgtttgttttttaataaactgttattacttaacaatgcgacacaaacgttctgcaaaacgcacaaaacgtgcatcggctacccaactttataaaacatgcaaacaggcaggtacatgtccacctgacattatacctaaggttgaaggcaaaactattgctgaacaaatattacaatatggaagtatgggtgtattttttggtgggttaggaattggaacagggtcgggtacaggcggacgcactgggtatattccattgggaacaaggcctcccacagctacagatacacttgctcctgtaagaccccctttaacagtagatcctgtgggcccttctgatccttctatagtttctttagtggaagaaactagttttattgatgctggtgcaccaacatctgtaccttccattcccccagatgtatcaggatttagtattactacttcaactgataccacacctgctatattagatattaataatactgttactactgttactacacataataatcccactttcactgacccatctgtattgcagcctccaacacctgcagaaactggagggcattttacactttcatcatccactattagtacacataattatgaagaaattcctatggatacatttattgttagcacaaaccctaacacagtaactagtagcacacccataccagggtctcgcccagtggcacgcctaggattatatagtcgcacaacacaacaggttaaagttgtagaccctgcttttgtaaccactcccactaaacttattacatatgataatcctgcatatgaaggtatagatgtggataatacattatatttttctagtaatgataatagtattaatatagctccagatcctgactttttggatatagttgctttacataggccagcattaacctctaggcgtactggcattaggtacagtagaattggtaataaacaaacactacgtactcgtagtggaaaatctataggtgctaaggtacattattattatgatttaagtactattgatcctgcagaagaaatagaattacaaactataacaccttctacatatactaccacttcacatgcagcctcacctacttctattaataatggattatatgatatttatgcagatgactttattacagatacttctacaaccccggtaccatctgtaccctctacatctttatcaggttatattcctgcaaatacaacaattccttttggtggtgcatacaatattcctttagtatcaggtcctgatatacccattaatataactgaccaagctccttcattaattcctatagttccagggtctccacaatatacaattattgctgatgcaggtgacttttatttacatcctagttattacatgttacgaaaacgacgtaaacgtttaccatattttttttcagatgtctctttggctgcctagtgaggccactgtctacttgcctcctgtcccagtatctaaggttgtaagcacggatgaatatgttgcacgcacaaacatatattatcatgcaggaacatccagactacttgcagttggacatccctattttcctattaaaaaacctaacaataacaaaatattagttcctaaagtatcaggattacaatacagggtatttagaatacatttacctgaccccaataagtttggttttcctgacacctcattttataatccagatacacagcggctggtttgggcctgtgtaggtgttgaggtaggtcgtggtcagccattaggtgtgggcattagtggccatcctttattaaataaattggatgacacagaaaatgctagtgcttatgcagcaaatgcaggtgtggataatagagaatgtatatctatggattacaaacaaacacaattgtgtttaattggttgcaaaccacctataggggaacactggggcaaaggatccccatgtaccaatgttgcagtaaatccaggtgattgtccaccattagagttaataaacacagttattcaggatggtgatatggttcatactggctttggtgctatggactttactacattacaggctaacaaaagtgaagttccactggatatttgtacatctatttgcaaatatccagattatattaaaatggtgtcagaaccatatggcgacagcttatttttttatttacgaagggaacaaatgtttgttagacatttatttaatagggctggtactgttggtgaaaatgtaccagacgatttatacattaaaggctctgggtctactgcaaatttagccagttcaaattattttcctacacctagtggttctatggttacctctgatgcccaaatattcaataaaccttattggttacaacgagcacagggccacaataatggcatttgttggggtaaccaactatttgttactgttgttgatactacacgcagtacaaatatgtcattatgtgctgccatatctacttcagaaactacatataaaaatactaactttaaggagtacctacgacatggggaggaatatgatttacagtttatttttcaactgtgcaaaataaccttaactgcagacgttatgacatacatacattctatgaattccactattttggaggactggaattttggtctacaacctcccccaggaggcacactagaagatacttataggtttgtaacccaggcaattgcttgtcaaaaacatacacctccagcacctaaagaagatgatccccttaaaaaatacactttttgggaagtaaatttaaaggaaaagttttctgcagacctagatcagtttcctttaggacgcaaatttttactacaagcaggattgaaggccaaaccaaaatttacattaggaaaacgaaaagctacacccaccacctcatctacctctacaactgctaaacgcaaaaaacgtaagctgtaagtattgtatgtatgttgaattagtgttgtttgttgtgtatatgtttgtatgtgcttgtatgtgcttgtaaatattaagttgtatgtgtgtttgtatgtatggtataataaacacgtgtgtatgtgtttttaaatgcttgtgtaactattgtgtcatgcaacataaataaacttattgtttcaacacctactaattgtgttgtggttattcattgtatataaactatatttgctacatcctgtttttgttttatatatactatattttgtagcgccaggcccattttgtagcttcaaccgaattcggttgcatgctttttggcacaaaatgtgtttttttaaatagttctatgtcagcaactatggtttaaacttgtacgtttcctgcttgccatgcgtgccaaatccctgttttcctgacctgcactgcttgccaaccattccattgttttttacactgcactatgtgcaactactgaatcactatgtacattgtgtcatataaaataaatcactatgcgccaacgccttacataccgctgttaggcacatatttttggcttgttttaactaacctaattgcatatttggcataaggtttaaacttctaaggccaactaaatgtcaccctagttcatacatgaactgtgtaaaggttagtcatacattgttcatttgtaaaactgcacatgggtgtgtgcaaacc

SEQ ID NO: 58445 - DNA, 7800 bp, Homo sapiens
  HPV18:0-7800
  hyper
attaatacttttaacaattgtagtatataaaaaagggagtaaccgaaaacggtcgggaccgaaaacggtgtatataaaagatgtgagaaacacaccacaatactatggcgcgctttgaggatccaacacggcgaccctacaagctacctgatctgtgcacggaactgaacacttcactgcaagacatagaaataacctgtgtatattgcaagacagtattggaacttacagaggtatttgaatttgcatttaaagatttatttgtggtgtatagagacagtataccccatgctgcatgccataaatgtatagatttttattctagaattagagaattaagacattattcagactctgtgtatggagacacattggaaaaactaactaacactgggttatacaatttattaataaggtgcctgcggtgccagaaaccgttgaatccagcagaaaaacttagacaccttaatgaaaaacgacgatttcacaacatagctgggcactatagaggccagtgccattcgtgctgcaaccgagcacgacaggaacgactccaacgacgcagagaaacacaagtataatattaagtatgcatggacctaaggcaacattgcaagacattgtattgcatttagagccccaaaatgaaattccggttgaccttctatgtcacgagcaattaagcgactcagaggaagaaaacgatgaaatagatggagttaatcatcaacatttaccagcccgacgagccgaaccacaacgtcacacaatgttgtgtatgtgttgtaagtgtgaagccagaattgagctagtagtagaaagctcagcagacgaccttcgagcattccagcagctgtttctgaacaccctgtcctttgtgtgtccgtggtgtgcatcccagcagtaagcaacaatggctgatccagaaggtacagacggggagggcacgggttgtaacggctggttttatgtacaagctattgtagacaaaaaaacaggagatgtaatatcagatgacgaggacgaaaatgcaacagacacagggtcggatatggtagattttattgatacacaaggaacattttgtgaacaggcagagctagagacagcacaggcattgttccatgcgcaggaggtccacaatgatgcacaagtgttgcatgttttaaaacgaaagtttgcaggaggcagcacagaaaacagtccattaggggagcggctggaggtggatacagagttaagtccacggttacaagaaatatctttaaatagtgggcagaaaaaggcaaaaaggcggctgtttacaatatcagatagtggctatggctgttctgaagtggaagcaacacagattcaggtaactacaaatggcgaacatggcggcaatgtatgtagtggcggcagtacggaggctatagacaacgggggcacagagggcaacaacagcagtgtagacggtacaagtgacaatagcaatatagaaaatgtaaatccacaatgtaccatagcacaattaaaagacttgttaaaagtaaacaataaacaaggagctatgttagcagtatttaaagacacatatgggctatcatttacagatttagttagaaattttaaaagtgataaaaccacgtgtacagattgggttacagctatatttggagtaaacccaacaatagcagaaggatttaaaacactaatacagccatttatattatatgcccatattcaatgtctagactgtaaatggggagtattaatattagccctgttgcgttacaaatgtggtaagagtagactaacagttgctaaaggtttaagtacgttgttacacgtacctgaaacttgtatgttaattcaaccaccaaaattgcgaagtagtgttgcagcactatattggtatagaacaggaatatcaaatattagtgaagtaatgggagacacacctgagtggatacaaagacttactattatacaacatggaatagatgatagcaattttgatttgtcagaaatggtacaatgggcatttgataatgagctgacagatgaaagcgatatggcatttgaatatgccttattagcagacagcaacagcaatgcagctgcctttttaaaaagcaattgccaagctaaatatttaaaagattgtgccacaatgtgcaaacattataggcgagcccaaaaacgacaaatgaatatgtcacagtggatacgatttagatgttcaaaaatagatgaagggggagattggagaccaatagtgcaattcctgcgataccaacaaatagagtttataacatttttaggagccttaaaatcatttttaaaaggaacccccaaaaaaaattgtttagtattttgtggaccagcaaatacaggaaaatcatattttggaatgagttttatacactttatacaaggagcagtaatatcatttgtgaattccactagtcatttttggttggaaccgttaacagatactaaggtggccatgttagatgatgcaacgaccacgtgttggacatactttgatacctatatgagaaatgcgttagatggcaatccaataagtattgatagaaagcacaaaccattaatacaactaaaatgtcctccaatactactaaccacaaatatacatccagcaaaggataatagatggccatatttagaaagtagaataacagtatttgaatttccaaatgcatttccatttgataaaaatggcaatccagtatatgaaataaatgacaaaaattggaaatgtttttttgaaaggacatggtccagattagatttgcacgaggaagaggaagatgcagacaccgaaggaaaccctttcggaacgtttaagttgcgtgcaggacaaaatcatagaccactatgaaaatgacagtaaagacatagacagccaaatacagtattggcaactaatacgttgggaaaatgcaatattctttgcagcaagggaacatggcatacagacattaaaccaccaggtggtgccagcctataacatttcaaaaagtaaagcacataaagctattgaactgcaaatggccctacaaggccttgcacaaagtcgatacaaaaccgaggattggacactgcaagacacatgcgaggaactatggaatacagaacctactcactgctttaaaaaaggtggccaaacagtacaagtatattttgatggcaacaaagacaattgtatgacctatgtagcatgggacagtgtgtattatatgactgatgcaggaacatgggacaaaaccgctacctgtgtaagtcacaggggattgtattatgtaaaggaagggtacaacacgttttatatagaatttaaaagtgaatgtgaaaaatatgggaacacaggtacgtgggaagtacattttgggaataatgtaattgattgtaatgactctatgtgcagtaccagtgacgacacggtatccgctactcagcttgttaaacagctacagcacaccccctcaccgtattccagcaccgtgtccgtgggcaccgcaaagacctacggccagacgtcggctgctacacgacctggacactgtggactcgcggagaagcagcattgtggacctgtcaacccacttctcggtgcagctacacctacaggcaacaacaaaagacggaaactctgtagtggtaacactacgcctataatacatttaaaaggtgacagaaacagtttaaaatgtttacggtacagattgcgaaaacatagcgaccactatagagatatatcatccacctggcattggacaggtgcaggcaatgaaaaaacaggaatactgactgtaacataccatagtgaaacacaaagaacaaaatttttaaatactgttgcaattccagatagtgtacaaatattggtgggatacatgacaatgtaatacatatgctgtagtaccaatatgttatcacttatttttttattttgcttttgtgtatgcatgtatgtgtgctgccatgtcccgcttttgccatctgtctgtatgtgtgcgtatgcatgggtattggtatttgtgtatattgtggtaataacgtcccctgccacagcattcacagtatatgtattttgttttttattgcccatgttactattgcatatacatgctatattgtctttacagtaattgtataggttgttttatacagtgtattgtacattgtatattttgttttataccttttatgctttttgtatttttgtaataaaagtatggtatcccaccgtgccgcacgacgcaaacgggcttcggtaactgacttatataaaacatgtaaacaatctggtacatgtccacctgatgttgttcctaaggtggagggcaccacgttagcagataaaatattgcaatggtcaagccttggtatatttttgggtggacttggcataggtactggcagtggtacagggggtcgtacagggtacattccattgggtgggcgttccaatacagtggtggatgttggtcctacacgtcccccagtggttattgaacctgtgggccccacagacccatctattgttacattaatagaggactccagtgtggttacatcaggtgcacctaggcctacgtttactggcacgtctgggtttgatataacatctgcgggtacaactacacctgcggttttggatatcacaccttcgtctacctctgtgtctatttccacaaccaattttaccaatcctgcattttctgatccgtccattattgaagttccacaaactggggaggtggcaggtaatgtatttgttggtacccctacatctggaacacatgggtatgaggaaatacctttacaaacatttgcttcttctggtacgggggaggaacccattagtagtaccccattgcctactgtgcggcgtgtagcaggtccccgcctttacagtagggcctaccaacaagtgtcagtggctaaccctgagtttcttacacgtccatcctctttaattacatatgacaacccggcctttgagcctgtggacactacattaacatttgatcctcgtagtgatgttcctgattcagattttatggatattatccgtctacataggcctgctttaacatccaggcgtgggactgttcgctttagtagattaggtcaacgggcaactatgtttacccgcagcggtacacaaataggtgctagggttcacttttatcatgatataagtcctattgcaccttccccagaatatattgaactgcagcctttagtatctgccacggaggacaatgacttgtttgatatatatgcagatgacatggaccctgcagtgcctgtaccatcgcgttctactacctcctttgcattttttaaatattcgcccactatatcttctgcctcttcctatagtaatgtaacggtccctttaacctcctcttgggatgtgcctgtatacacgggtcctgatattacattaccatctactacctctgtatggcccattgtatcacccacggcccctgcctctacacagtatattggtatacatggtacacattattatttgtggccattatattattttattcctaagaaacgtaaacgtgttccctatttttttgcagatggctttgtggcggcctagtgacaataccgtatatcttccacctccttctgtggcaagagttgtaaataccgatgattatgtgactcccacaagcatattttatcatgctggcagctctagattattaactgttggtaatccatattttagggttcctgcaggtggtggcaataagcaggatattcctaaggtttctgcataccaatatagagtatttagggtgcagttacctgacccaaataaatttggtttacctgatactagtatttataatcctgaaacacaacgtttagtgtgggcctgtgctggagtggaaattggccgtggtcagcctttaggtgttggccttagtgggcatccattttataataaattagatgacactgaaagttcccatgccgccacgtctaatgtttctgaggacgttagggacaatgtgtctgtagattataagcagacacagttatgtattttgggctgtgcccctgctattggggaacactgggctaaaggcactgcttgtaaatcgcgtcctttatcacagggcgattgcccccctttagaacttaaaaacacagttttggaagatggtgatatggtagatactggatatggtgccatggactttagtacattgcaagatactaaatgtgaggtaccattggatatttgtcagtctatttgtaaatatcctgattatttacaaatgtctgcagatccttatggggattccatgtttttttgcttacggcgtgagcagctttttgctaggcatttttggaatagagcaggtactatgggtgacactgtgcctcaatccttatatattaaaggcacaggtatgcctgcttcacctggcagctgtgtgtattctccctctccaagtggctctattgttacctctgactcccagttgtttaataaaccatattggttacataaggcacagggtcataacaatggtgtttgctggcataatcaattatttgttactgtggtagataccactcccagtaccaatttaacaatatgtgcttctacacagtctcctgtacctgggcaatatgatgctaccaaatttaagcagtatagcagacatgttgaggaatatgatttgcagtttatttttcagttgtgtactattactttaactgcagatgttatgtcctatattcatagtatgaatagcagtattttagaggattggaactttggtgttcccccccccccaactactagtttggtggatacatatcgttttgtacaatctgttgctattacctgtcaaaaggatgctgcaccggctgaaaataaggatccctatgataagttaaagttttggaatgtggatttaaaggaaaagttttctttagacttagatcaatatccccttggacgtaaatttttggttcaggctggattgcgtcgcaagcccaccataggccctcgcaaacgttctgctccatctgccactacgtcttctaaacctgccaagcgtgtgcgtgtacgtgccaggaagtaatatgtgtgtgtgtatatatatatacatctattgttgtgtttgtatgtcctgtgtttgtgtttgttgtatgattgcattgtatggtatgtatggttgttgttgtatgttgtatgttactatatttgttggtatgtggcattaaataaaatatgttttgtggttctgtgtgttatgtggttgcgccctagtgagtaacaactgtatttgtgtttgtggtatgggtgttgcttgttgggctatatattgtcctgtatttcaagttataaaactgcacaccttacagcatccattttatcctacaatcctccattttgctgtgcaaccgatttcggttgcctttggcttatgtctgtggttttctgcacaatacagtacgctggcactattgcaaactttaatcttttgggcactgctcctacatattttgaacaattggcgcgcctctttggcgcatataaggcgcacctggtattagtcattttcctgtccaggtgcgctacaacaattgcttgcataactatatccactccctaagtaataaaactgcttttaggcacatattttagtttgtttttacttaagctaattgcatacttggcttgtacaactactttcatgtccaacattctgtctacccttaacatgaactataatatgactaagc

SEQ ID NO: 58446 - DNA, 127 bp, Homo sapiens; identical to SEQ ID NO: 13723
  JH636052.4:789298-789425
  hyper

SEQ ID NO: 58447 - DNA, 31 bp, Homo sapiens; identical to SEQ ID NO: 13724
  JH636052.4:790113-790144
  hyper

SEQ ID NO: 58448 - DNA, 31 bp, Homo sapiens
  JH636052.4:1361786-1361817
  hyper
ggaaaacttgtcttttcgttgtaacttccgc

SEQ ID NO: 58449 - DNA, 193 bp, Homo sapiens
  JH636052.4:1362030-1362223
  hyper
ccagccaatccccaaccaccccgagccctcctagccctaacacacagctgggactctcatgtccagccagtggtcctggacttgctcctacagcgcgggaaatccttcgtggcgaagcagcagcccctgcgctgcctcatctacatagaaacgccctatcggtgatgtcaccgacagtgcctttcccagtctc

SEQ ID NO: 58450 - DNA, 97 bp, Homo sapiens
  JH636052.4:1376241-1376338
  hyper
tgagctcttgcacctccgccccgccacagcctcacacgcttcaccctttacacgcacggtcacttgccccgcgcagccccaccccccccagccctcc

SEQ ID NO: 58451 - DNA, 31 bp, Homo sapiens; identical to SEQ ID NO: 13725
  JH636052.4:3185459-3185490
  hyper

SEQ ID NO: 58452 - DNA, 113 bp, Homo sapiens
  NW_001838402.2_289580-297926:6068-6181
  hyper
ggtgtcagtaaccaggcgctgcctccagcgccgccccgcccgccgccccgcccgccgcctgcgccaatccccgacgggcccgtcttccagccccgaagcggtcacctcctgac

SEQ ID NO: 58453 - DNA, 30 bp, Homo sapiens; identical to SEQ ID NO: 1
  chr1:569477-569507
  hypo

SEQ ID NO: 58454 - DNA, 31 bp, Homo sapiens; identical to SEQ ID NO: 13728
  chr1:714260-714291
  hypo

SEQ ID NO: 58455 - DNA, 34 bp, Homo sapiens
  chr1:809312-809346
  hypo
cacggccgctacctaacggcggctgccattttcc

SEQ ID NO: 58456 - DNA, 36 bp, Homo sapiens
  chr1:834688-834724
  hypo
tgagccaccgcgcccggctgggggcaccttctggcc

SEQ ID NO: 58457 - DNA, 43 bp, Homo sapiens
  chr1:851056-851099
  hypo
ctgtctctgccccaccccacacgctcaatgcatgttaatttca

SEQ ID NO: 58458 - DNA, 65 bp, Homo sapiens; identical to SEQ ID NO: 34846
  chr1:859735-859800
  hypo

SEQ ID NO: 58459 - DNA, 150 bp, Homo sapiens; identical to SEQ ID NO: 13730
  chr1:872319-872469
  hypo

SEQ ID NO: 58460 - DNA, 38 bp, Homo sapiens; identical to SEQ ID NO: 13731
  chr1:879360-879398
  hypo

SEQ ID NO: 58461 - DNA, 30 bp, Homo sapiens; identical to SEQ ID NO: 13732
  chr1:892842-892872
  hypo

SEQ ID NO: 58462 - DNA, 599 bp, Homo sapiens
  chr1:896819-897418
  hypo
gcgccagcgcggcctcctgtgcgacatcgtcctgcacgtggctgccaaggagatccgtgcgcacaaagtggtgctggcctcctgcagcccctacttccacgccatgttcacaagcaagtacccgcctgggcggcgctgggggctccgtgggtccctcgggtcagctcgtgtaacccgctgtccccgcagatgagatgagcgagagccgccagacccacgtgacgctgcacgacatcgaccctcaggccttggaccagctggtgcagtttgcctacacggctgagattgtggtgggcgagggcaatgtgcaggtgagggctccctcacccggatcccggtgtcccccgaccctgtgcctccctcacctgcctctcggtgccccgtagactctgctcccagccgccagtctcctgcagctgaatggcgtccgagacgcttgctgcaagtttctactgagtcagctcgacccctccaactgcctgggtatccggggctttgccgatgcgcactcctgcagcgacctgctcaaggccgcccacaggtacgtgctgcagcacttcgtggacgtggccaagaccgaggagtttatgctgctgccc

SEQ ID NO: 58463 - DNA, 237 bp, Homo sapiens
  chr1:897733-897970
  hypo
ggttctggaactggtctctagcgacagcctgaacgtgccttcagaggaggaggtctaccgagccgtcctgagctgggtgaaacacgacgtggacgcccgcaggcagcatgtcccacgggtgaggcgcggccgcggggggctcccacagcatccaggagggcatgcaggtggctgagggcctggtgcaccctgaccttccccgagttcagggactccgtgggggtggtgcccccacct

SEQ ID NO: 58464 - DNA, 447 bp, Homo sapiens
  chr1:898438-898885
  hypo
cccagcagtgggatccactcacgagtcccgtctccacctgccctccccaggcggcgggagcctgtttgccatccacggagactgtgaggcctacgacacgcgcaccgaccgctggcacgtggtggcctccatgtccacgcgccgggcccgggtgggagtggctgcggtggggaaccggctctatgctgtgggcgggtaagcctggaggctggacttgggtcgggtctggcacgtgcccgccaggccagtcttgacctgcagtggcttaattccgctagctatgatgggacctcagacctggctaccgtggagtcctacgaccccgtgactaacacgtggcagccggaggtgtccatgggcacaaggcgaagctgcctgggtgtggccgccttgcatggactcctgtactcggccggcggctatgacggggcctcctgcctgaacagg

SEQ ID NO: 58465 - DNA, 832 bp, Homo sapiens
  chr1:899136-899968
  hypo
ccagggtcctgtgcccaccagcgggccctgcctggtaggactttgcggtctgagtttgactcctagggtaagatttcagccattccgctggggagggcaggtcctggggccgggacgcctttctgtctctgctgagctgtggctgcggtcctggtgcccacagtgctgaacgctacgaccccctgaccggaacgtggacgtccgtcgctgccatgagcacccggaggcgctatgtgcgagtggccacgcttggtgggtgatggggcctgcctggggggcatccccaccttcccccaccgtggagaccccactcccagcaggagtgccacgggtgtgttgacttccggcagatgggaacctgtatgctgtgggcggctacgacagctcctcacacctggccactgtggagaagtatgagccccaggtgcatagtgcacccctcctggccaccccctcccgtgcgccgcggggccctcctccctctgtttacccacatcccccccattcctgacaccccaccctggagtcggggctgcggcagaggagggatgccagtggcgggtctgcgtccagcccacgccctcgcccccaggtgaacgtgtggtcgcccgtggcgtccatgctgagccgacgcagctcagcgggcgtggccgtgctggagggtgccctgtacgtggcagggggcaacgacggcaccagctgcctcaactcggtagagagatacagtccaaaggctggagcctgggaaagcgtggcgcccatgaatatccgcaggtccgcagtggggctgcggggaggggggcgcgggtccgcagtggggctgtgggagggg

SEQ ID NO: 58466 - DNA, 568 bp, Homo sapiens
  chr1:900229-900797
  hypo
agggagttctcccaacctcagcgagcatgtcccgccaccacccctttttgtggtgcagcccctccccccgcatcccttcctgcagccaggggctcaccccgccttccccccaggagcacgcatgacctggtggccatggacggatggttgtacgccgtggggggtaacgacggtagctccagcctcaactccatcgagaagtacaacccgaggaccaacaagtgggtggccgcatcctgcatgttcacccggcgcagcagtgtgggtgtggcggtgctggagctgctcaatttcccgccgccatcctccccgacgctgtccgtgtcctccaccagcctctgacccacctaccaccagaggcctgcagcctcccacatgccttaaggggaccgtggcccccaccagggacgtcctgcgccatccgttcacgtctctgcatccattccttcatgtctttatttagttgtttatttatttagttatttatcttatttattgaggggtgaggagtgccacggctgcccgtttacacctttagcgtctggtcctcctgcgtgtcctcccctcc

SEQ ID NO: 58467 - DNA, 643 bp, Homo sapiens
  chr1:913605-914248
  hypo
gcccgccccgggaaccgcctgccccagatacatccatcatgggacatgtctgtcctaagatacatttgtgctggacacgtctaccctggacacgtcttcccgaaacccctctgtcatggacacgtcttcctgagaactggttgccccgggaaccgcctgccccgggaaccgcccgccctggacgcgtctgtcggagtcacatcgcccccgtgcttcttctgcctgagatttgggtgacctggttgagttgggccagtttgggggaactgccagtggaggccccgtgttctggtctgtaaagcatctcccagaggacatcagtgtgagatgggcctcgtagagtgcctgaccctgaaggtagccaggcctgggcgggaaccctgccagaggctgggggagggacgccgccgtcacatgggcccgaacacagggcaacggcggcgcagagccaaccccctgaacaacccgggtgcttggactgggccgccccatctggactgtgtgctgggatgactgggggctggtccccaggctcccctgctaggggatgacccaagcccggcctgcccggcccctgcggccccctgcttggccaagatccctggacagtgtgtgcctgggatctggacgggctgtgggatcc

SEQ ID NO: 58468 - DNA, 84 bp, Homo sapiens
  chr1:915022-915106
  hypo
gggtgggaggccaggcgaggccagcggcgtcggctctgggaacaggtgtagacacaagcccgctggactcggtcatcctcggca

SEQ ID NO: 58469 - DNA, 70 bp, Homo sapiens
  chr1:915433-915503
  hypo
tgtcagattgcggctcggaggcaggtgtagacacagccatgtccctgtcaggttgcggctcggaggcagg

SEQ ID NO: 58470 - DNA, 473 bp, Homo sapiens
  chr1:918152-918625
  hypo
tgagagttcagggcacgatactaggagactggggtgtgcgccgtgaggggtggcagtgagagctgggcgtgcagaaagtgcatgcctggtgccatacgatgcttttccagaaagtagctgccacgagaccacaggacaaggcgtcccgccacgcagggccggcctgacttgagctttcacaagtggaatcgcaccctgcatccctttctgcatctgtgtcctcgggcccacgccgtgctctggagacagctgccatgagggccgcgggcgactgcccgggcgggtgaggctgtcctgtgtgaacgtgccacgcggctgtgccgtttcccgtgggtggcgatgtgggtcgtttccagtttgcagctaccacacacggtgcggctgtgaatatctgggaacattcctttcggcgaacctctcacatttccaggacgcttggggtcagcgtcagaaggtgccgccccgttccccag

SEQ ID NO: 58471 - DNA, 96 bp, Homo sapiens; identical to SEQ ID NO: 6
  chr1:935361-935457
  hypo

SEQ ID NO: 58472 - DNA, 31 bp, Homo sapiens; identical to SEQ ID NO: 7
  chr1:935826-935857
  hypo

SEQ ID NO: 58473 - DNA, 67 bp, Homo sapiens; identical to SEQ ID NO: 34855
  chr1:936193-936260
  hypo

SEQ ID NO: 58474 - DNA, 403 bp, Homo sapiens
  chr1:942307-942710
  hypo
agcctccctgagagtccagggcgccaagtcagccctgcacctggcccgggcctcggaccccgacggggctcacccacctgagatcaccctggctctgcgggaaggcaggaagctttggcatgatcctccacgggcgaggatcacgtagagacgtgtagagacgcgacgaagcacgaagacccgtgtttgacgggttgccaggtgcctacatcagagctcattaaattacacattaaatagatgcacgtgtgtgtgtcaagctcccctaattcaagttgtagaaaatcagactcagagttcttacactcgggggtgttttagcagctgcgcctcaagattctaaattcaaacgcacacggaataaaacatttcggtttatcgccaggcgcggcggctcacacct

SEQ ID NO: 58475 - DNA, 393 bp, Homo sapiens; identical to SEQ ID NO: 34857
  chr1:955507-955900
  hypo

SEQ ID NO: 58476 - DNA, 145 bp, Homo sapiens
  chr1:959106-959251
  hypo
cacatggcaggagagtcaccccggctgaacgaggctctgcatcttaccgaagccgctctacgggtgccaggcactggctctggagcgagtgcccaggcggagcagagcgctgggaggagggtccgtggggagcccctgccaggtg

SEQ ID NO: 58477 - DNA, 31 bp, Homo sapiens
  chr1:973222-973253
  hypo
cgtggctgctgcaatgcgctgtgcctggcgg

SEQ ID NO: 58478 - DNA, 30 bp, Homo sapiens
  chr1:978649-978679
  hypo
gtgtgcatttggggcgacgtgtgctgtgaa

SEQ ID NO: 58479 - DNA, 30 bp, Homo sapiens; identical to SEQ ID NO: 13744
  chr1:980097-980127
  hypo

SEQ ID NO: 58480 - DNA, 30 bp, Homo sapiens
  chr1:981207-981237
  hypo
gggcagtgtccagacggccgtgccctgggc

SEQ ID NO: 58481 - DNA, 115 bp, Homo sapiens
  chr1:982370-982485
  hypo
atagcctgggctcggccgaggtgctgccccctcgcctgggcagcaggtcagtgccgggggttatggtcttgggactcggccccctcaaacatgtgcgtgccggggaccccacgcc

SEQ ID NO: 58482 - DNA, 994 bp, Homo sapiens
  chr1:984138-985132
  hypo
ctccgtctcaaaaaaaaaaaaaaaaaaaaaagcagggggcggtttcagggataaaagtggggaatcctcggagcttttccagccggccctcccggtcgccctttgcagtgcttggcgcccctgtgccggccttcgagggccgctccttcctggccttccccactctccgcgcctaccacacgctgcgcctggcactggaattccgggcgctggagcctcaggggctgctgctgtacaatggcaacgcccggggcaaggacttcctggcattggcgctgctagatggccgcgtgcagctcaggtgggcggggaggggacggggccggggcagctcaggtgggcggggaggggacgggcgggggagggggggccggggcagctcaggtgggtggggtggggacgggggcggggcagctcaggtaggcggggtggggacggggccgggcgatggtcctgagcacctgctcctgccctcaggtttgacacaggttcggggccggcggtgctgaccagtgccgtgccggtagagccgggccagtggcaccgcctggagctgtcccggcactggcgccggggcaccctctcggtggatggtgagacccctgttctgggcgagagtcccagtggcaccgacggcctcaacctggacacagacctctttgtgggcggcgtacccgaggaccaggctgccgtgtgagtcccttggagggtggtgtggccccgaccccggccctttggggtcccggtgtacgaggtggctttgcctgtggcccctgagccctgacccggtgtccctcctggtggcagggcgctggagcggaccttcgtgggcgccggcctgagggggtgcatccgtttgctggacgtcaacaaccagcgcctggagcttggcattgggccgggggctgccacccgaggctctggcgtgggcgagtgcggggaccacccctgcctgcccaacccctgccatggcggggccccatgccagaacctg

SEQ ID NO: 58483 - DNA, 428 bp, Homo sapiens
  chr1:987798-988226
  hypo
gggacatgtagatatgcgtgtgtgactatgcggccgtgtgtgtgcatggctccatgtatgtgtgtgtatatgagggagacatgcaggtatgtgtccgtgtgtgtgtgtgtgcatatgggtccatgtatgtgtgtgtatatgagggagacacgcaggtgtgtgtctgagtgtgtgcgcacatgggtccatgtatgtgtgtgtataggtgagggagacatgcatgtgtgtgtccgtgtgtgtgcatgggtccatgtgtgtatagtgtgtacacatgggtccatgtatgtgtgtgtatatgagggagacacgcaggtgtgtgtccgagtgtgtgtgcatgggtccatgtgtgtatagtgtgtgcacatgggtccatgtatgtgtgtgtatatgagggagacacgcaggtgtgtgtccgagtgtgtgtccat

SEQ ID NO: 58484 - DNA, 198 bp, Homo sapiens
  chr1:989209-989407
  hypo
gcaaggccacggagcgggcagactatgtggcactggccattgtggacgggcacctgcaactgagctacaacctgggctcccagcccgtggtgctgcgttccaccgtgcccgtcaacaccaaccgctggttgcgggtcgtggcacataggtgagtagggaacccagcgtgccgagaatagtggcgagggctgcccagac

SEQ ID NO: 58485 - DNA, 785 bp, Homo sapiens
  chr1:990258-991043
  hypo
ctttgtgggctgcttgcgggacgtggtggtgggccggcacccgctgcacctgctggaggacgccgtcaccaagccagagctgcggccctgccccaccccatgagctggcaccagagccccgcgcccgctgtaattattttctatttttgtaaacttgttgctttttgatatgattttcttgcctgagtgttggccggagggactgctggcccggcctcccttccgtccaggcagccgtgctgcagacagacctagtgccgagggatggacaggcgaggtggcagcgtggagggctcggcgtggatggcagcctcaggacacacacccctgcctcaaggtgctgagcccccgccttgcactgcgcctgccccacggtgtccccgccgggaagcagccccggctcctgaatcaccctcgctccgtcaggcgggactcgtgtcccagagaggaaggggctgctgaggtctgatggggcccttcctccgggtgaccccacagggcctttccaagcccccatttgagctgctccttcctgtgtgtgctctgggccctgcctcggcctcctgcgccaatactgtgacttccaaacaatgttactgctgggcacagctctgcgttgctcccgtgctgcctgcgccagccccaggctgctgaggagcagaggccagaccagggccgatctgggtgtcctgaccctcagctggccctgcccagccaccctggacgtgaccgtatccctctgccacaccccaggccctgcgaggggctatcgagaggagctcact

SEQ ID NO: 58486 - DNA, 30 bp, Homo sapiens; identical to SEQ ID NO: 13750
  chr1:991552-991582
  hypo

SEQ ID NO: 58487 - DNA, 31 bp, Homo sapiens; identical to SEQ ID NO: 34858
  chr1:995029-995060
  hypo

SEQ ID NO: 58488 - DNA, 30 bp, Homo sapiens
  chr1:1017100-1017130
  hypo
acggtggcggagtgcgtggggccagcctgg

SEQ ID NO: 58489 - DNA, 255 bp, Homo sapiens
  chr1:1018239-1018494
  hypo
cgccaagtgcgtggcgtggtctcggcctccaggtcagacattgctgatacgggcctcccccgggaaggcagcgggatccgtggccctgtccaggggccgctcccgcctgacgtagcgcggcttccgtactgaaacgggtcagagacaggcgaggtcagagtgggacctggacagcagggacagtgcaggcctcagccctcaccggaggctctcgggagtgggcatatggcacaggcgcccggggctgtttactct

SEQ ID NO: 58490 - DNA, 128 bp, Homo sapiens
  chr1:1019319-1019447
  hypo
cccagcaccactgaagcgatggctgctcaggagggcctggcggaggccggctgcgtctgtcctcgggtggagctggacttcaaggaggagcaggtattgggggtctgccctgtcgtggtgggtcctcc

SEQ ID NO: 58491 - DNA, 30 bp, Homo sapiens
  chr1:1019987-1020017
  hypo
tcagcccagtgcggcgtcctcggagcagca

SEQ ID NO: 58492 - DNA, 30 bp, Homo sapiens; identical to SEQ ID NO: 13753
  chr1:1022515-1022545
  hypo

SEQ ID NO: 58493 - DNA, 93 bp, Homo sapiens
  chr1:1022917-1023010
  hypo
ttccgttcccacagcggacgcagctggcgctcccgtccgcgttccagcgcctgtaacagcctgcgtggggcagaggacgggcatgtcagccaa

SEQ ID NO: 58494 - DNA, 414 bp, Homo sapiens
  chr1:1024246-1024660
  hypo
ttggaagaatggaagtccacccgctcagtcctaccagggtggagctgcgctctcccagcactgggggcagcctctgtctcccggcatctcctggcacagggctcgggcgacttcagcgaggctctgtctgagagtctctgccccggaggccgaagaacggagtccacggcagggagccaaacaccagcgcagcactgtccccagaagtgcccgctgcctccccgagcggagacgtgacctggcttggggccgcacgcagggggaagcgtatccaacaccgcaggcccggcccctccccacgcgcgccagacggtccccaccctgcgcctgtgcatggggccacctcggcccttggacttcacgacccgctggcctggcccctccatgggcaccgtgactgctgcacagctgcct

SEQ ID NO: 58495 - DNA, 198 bp, Homo sapiens
  chr1:1046201-1046399
  hypo
aagctcaacaacagttctctgcgtgagccgtggcagacgcaaaaccgcccgcacgtgtgactcctaacactcagagtgtcggtaaaatcacagcagcgctcctgtctggcgcggcaggcgggcgctggagcagcctgcgaggcaatctccatggatcacaggcagattctacatcacgacaggagtctggtgaatcct

SEQ ID NO: 58496 - DNA, 1291 bp, Homo sapiens
  chr1:1046996-1048287
  hypo
caaccctgtaaaagcaaccaccggctggggcagtgggtagaccacacccacgctcaccgtaactccagccgcccaggcagcagtaactgaaaaggggaggcgggagggtccactggcgggtttctcacgctgctgaacctcggtaaacacagccccgagggctggctggagcttccactgcatccgtgtagctaatgctggtcatcttcgtagcaagcaaaggaagccaacgtgaaacgtagctttaagggcccaataagaactgtctggggcctctctacctaaagatccctctcgtgctttgatagaaaacaaataccgcaaaccccttgatggggtgtaaaggagacatccccctttgttgacatgcatggtagtcgctgcccacctacccgtgggctcagcacaccggagtcgggcggttgccgtaggtggctcagcagacgtgagcagggcaggatcgggcccatccccccaccgggaatgtcaggccaccatcaggtgatggtcaggtggctgttaactgtctaaaagaactggttgcacccagcgccagggaaagacaggctcccaatagctagaaaacacatgaaatccggtgatgggcagcttcccgatacgatctcaggaactgggcgagttggctcaagcgtgtgcactgagaggcaaaatggcggcgtgtaaccgttctatgaccttctagggacgtttgacaggtaacggaagaacgcctcaggtgagcatgggcactactccagtgaacacacggcgcacggtccctccctccagtgaacacaacgcacacgctccctccctccagtgaacacacagcgcatgctccctccttccagtgaacacacggcacatgctacctccctccagtgaacacacggcacatgctccctccctccagtgaacacaacgcgcacgctccctccctccagtgaacacacagcgcatgctccctccccccagtgaatacacggggcatgctccctccctccagtgaacacaccgggcatgctccctccctccagggaacacatggcgcatgctcccgcccaagtactagcaagatgctgcatgggtggacagcccaccctgaagaaggatcaggggagaaggggtgcaagaccccagaagcctgccaggctataaaaccccaagtcaaaaggtgaaaccgcacacctgatctctcacatcgcccgtctggccctcctccaagggtacttcctttccttcctgctctaaagcttcttcaacaactttcactcctgctctaaaacttgcc

SEQ ID NO: 58497 - DNA, 350 bp, Homo sapiens
  chr1:1049842-1050192
  hypo
aaagctcaggtggagagcagccgcaaggcagggagcagctgggaggtatctcaggggttcccgggatgctgcctgtgcaccccagggctgaggtgactgcgtgtggaaacacctgcctgactggcttttaggaggagtactgggggcgggatgtgtgtcaggaaaacaacgtttctgtataattcataaacatgtatgttaaaaacaacgtggccatgacggatcctggctgaatgcaaacggggaacataaacctgagtaatcaggcgcatcactgaacatcccaggcggccgcccctaccctggggctcaaaaccggctccctctgcgagggtttcccaggttaagcc

SEQ ID NO: 58498 - DNA, 57 bp, Homo sapiens; identical to SEQ ID NO: 34864
  chr1:1052181-1052238
  hypo

SEQ ID NO: 58499 - DNA, 30 bp, Homo sapiens
  chr1:1053885-1053915
  hypo
gagacgaggccatgcgagatgtccctggag

SEQ ID NO: 58500 - DNA, 30 bp, Homo sapiens
  chr1:1061506-1061536
  hypo
cgcggggtgggggccgagggcctccccgtc

SEQ ID NO: 58501 - DNA, 666 bp, Homo sapiens
  chr1:1062953-1063619
  hypo
ggacagagtggggctgagcagcggccacgggaagccaccggccacccagacccccgtcctccccgggtgctgccctgggcctaggtggccaggtctggggggccgataccacgggctacgcccagccccacccggctcctgtgtggtgtcaggggctctggcatgccggcaggccagtgctctcgtgagaggtgggtccccaagccggccccagcgaaactcagttaaaggacgagtctgcttttgggccttatgtttcccaactccatgggcagagccacagggccgctgcctcctccaccgtggctggagacaaggcggccccgggtctctgtgaagccctggccacgttcagccgcagggccctgggtgtcatcgccaccgccccactgtggcccaggactggggctttggtggcccgtgctgtgggagtgggggcagccagcagccagggtcacaggcctgagcctcggacaagcacagaaggacccccaggtctggtgctcgtgctgactgccaagggcagcgactgcaagacgggggtgcaggtttcgggcgtggcgcgggctgcgtcgggttctggcattcaaacatatcatgcgggaccaggcctggggttacaggtggggcgggcgcgcaggagaggggagccgtcccggagccgct

SEQ ID NO: 58502 - DNA, 267 bp, Homo sapiens
  chr1:1064885-1065152
  hypo
ggccgcctgtgaggcacagagcgaatggggcaccagcctgccctcggcctcagacacggagaggctcccacggcactgagccacgcatggccacgcgacagagggacagaatgccgtggccgtgtaggggagctgcactctgcgtggccctgggatgggaaaatccagggaaacagacactgttatggatgtgagcatcggctgccagaacgagaggaagcagaagaggggaaaaggccgattatcgtagaagagttaggaaaatca

SEQ ID NO: 58503 - DNA, 250 bp, Homo sapiens
  chr1:1066216-1066466
  hypo
gttttggtggaacaagcccctcgcagctccccgtgaggtgcagggggtgggcccccaccacgcccacagctgcagctgcctgtgaagggcacagggcgggcccccaccaaggccttcgcttccctgcgagttgagaaaacctcgccgcagggtccccggctcccgaggctgctgtgggtccggcaatggcatcccaaccccggggccttggtatggaacctgtttctgcgggttttttcctgaaagtttt

SEQ ID NO: 58504 - DNA, 100 bp, Homo sapiens
  chr1:1066720-1066820
  hypo
cccattttctttgccttttcacgtcacgttcggggaacgtcctggctccgtcccttccagcgcttttcgtttctgtcctcggagtcattctttttaagac

SEQ ID NO: 58505 - DNA, 129 bp, Homo sapiens
  chr1:1067696-1067825
  hypo
acctgccaggagggcctcttccgaggtggggtgtcacctgggatgtgtccgctggcaaatgggagaaacaccagggcggctgccggggaggtcgatgtcagggagcccgtagccctgagcccatgtgtg

SEQ ID NO: 58506 - DNA, 317 bp, Homo sapiens
  chr1:1069738-1070055
  hypo
gtaacatccagttccccgagggaccagggggctgcctcaggggggaggggtctcctgcaggcctggcatagtgtggctgtccctacacccagaccctgcacacggccccgcgacacggggaggctgaggcctcgcagggccctgggtgtctccaccagctcctcggggtccgctgtcctgctgaggtgcccgcaggaccctcagtgggatgggcaccagcccttttcagcgttccgccgaacaggggcccagagtgcctgagaggcgcctgtgtttgcacatttggaggccggtgggggtccgtgcaggcgcagagc

SEQ ID NO: 58507 - DNA, 31 bp, Homo sapiens
  chr1:1074034-1074065
  hypo
tggtcccacctggcagcgaaggtggctggag

SEQ ID NO: 58508 - DNA, 30 bp, Homo sapiens; identical to SEQ ID NO: 13759
  chr1:1079156-1079186
  hypo

SEQ ID NO: 58509 - DNA, 138 bp, Homo sapiens
  chr1:1080475-1080613
  hypo
tcaccccacagccccccgctcctcccctccacacccaaccacagtccctcctggctgacaccgtggcccctcctggcctgtgctccccgggaacctcagtcagtgtcacttgaactccagcaccggacctggccccgt

SEQ ID NO: 58510 - DNA, 154 bp, Homo sapiens
  chr1:1094262-1094416
  hypo
ggcctcagaactggccatccacggagctcagaggcacccgagggccctggggcctgggtagggactggccagctcggggtcctccagcagccatacccaggttcatccaggatgaaagcagggcagtgggaaccacgtgattggtttaaaagca

SEQ ID NO: 58511 - DNA, 386 bp, Homo sapiens
  chr1:1094866-1095252
  hypo
gcctgagtgtcaccatgaagccgggaagcaggtgttcagccagacgcaaatattcctcctcaaagccaggggagcggccacagtggattttattatggggcgacgggggcacgcccagtgccccgccactctccatgtccacagcagcgagggtggagggccctgtgctgtgcagggcagagctcggctgcacctgggccaggacacagctgcccaggtgggaggaaccgtggacggggctggggccttcctcgtcccagggctggtgagctgctcgctcactgtttctcagttccaggtagacacagtttataattctgcagaaaactctggggccttttgcctttgtgttttcttttttgagacagggtctgactctgtggccc

SEQ ID NO: 58512 - DNA, 269 bp, Homo sapiens
  chr1:1095491-1095760
  hypo
atggtgttttaccactgaggtcagagggcagacgttgctccaagcgtttcgtctgcgggtggagctttggaactgatggagaaggcagagtcctgaccaggggccgccatcagagcgcagggacggtcgggggggatgcgcagggaggagggaagggaaggaaggaggtgccaagccctccgctcagtggaggtcagtggaggtttgcttcctgctcacactgggcctgattgggtcggagggcacgcgggggccgctgtctgtcctcc

SEQ ID NO: 58513 - DNA, 87 bp, Homo sapiens; identical to SEQ ID NO: 13761
  chr1:1102374-1102461
  hypo

SEQ ID NO: 58514 - DNA, 30 bp, Homo sapiens
  chr1:1114157-1114187
  hypo
ccacagctgggctccggggtcagcagcgga

SEQ ID NO: 58515 - DNA, 30 bp, Homo sapiens
  chr1:1114564-1114594
  hypo
tcagggccctcgcccgggcaccccccggcc

SEQ ID NO: 58516 - DNA, 30 bp, Homo sapiens; identical to SEQ ID NO: 13762
  chr1:1115714-1115744
  hypo

SEQ ID NO: 58517 - DNA, 39 bp, Homo sapiens
  chr1:1140774-1140813
  hypo
gggacaagggtggtgccggcaggtcgtgcagcaagggtc

SEQ ID NO: 58518 - DNA, 30 bp, Homo sapiens; identical to SEQ ID NO: 13763
  chr1:1145603-1145633
  hypo

SEQ ID NO: 58519 - DNA, 30 bp, Homo sapiens; identical to SEQ ID NO: 13764
  chr1:1145833-1145863
  hypo

SEQ ID NO: 58520 - DNA, 156 bp, Homo sapiens
  chr1:1146762-1146918
  hypo
gtatgcatggcatacgtaagcagagagccggaggcagccatcggcacctagaacggtgcagagttggcccaggagcgtggcggggcaggcggcctgcacctgccctgctcgcccagcagaccctccgggctccagcctggcggggcccagcgtcca

SEQ ID NO: 58521 - DNA, 262 bp, Homo sapiens; identical to SEQ ID NO: 13766
  chr1:1151686-1151948
  hypo

SEQ ID NO: 58522 - DNA, 30 bp, Homo sapiens
  chr1:1153909-1153939
  hypo
tttcacccagttgtcgtcaatgtcctggcc

SEQ ID NO: 58523 - DNA, 30 bp, Homo sapiens
  chr1:1155457-1155487
  hypo
ccagacaggccggccgagagacgctttctc

SEQ ID NO: 58524 - DNA, 30 bp, Homo sapiens
  chr1:1155716-1155746
  hypo
ccacgccttcaccgcggtccccagaatcag

SEQ ID NO: 58525 - DNA, 513 bp, Homo sapiens
  chr1:1160698-1161211
  hypo
ttgcctctatgctccgctcaggggcagccgcggccacgttatgaggtggcaagcaggccctcgtcaggcaggtgtggcctctgggacctgggccaggcaagcttcgagggtgcacacaccgcaggcacggctcagaagcactgggcagagatcctcatggaagaaggccaggctgccgctcacacgcgcccctccctcagcagccgcagcagcccagaggtggacgggcctgggaggcaccctcagctccacagtccccaaaacacaccggctggggacggggccacccgggtggccatgtggcaggtggggcacctggtgggtctcacgtggacacgtgcatcctcgaatgctccggtcacgctccacacgcgccacagacacaggccacacgctccacacgccacagacacgggccacacactccacatgccacagacacgggccacacactccacacgctctacacactccacagacacagacacacacgaggcagagcaaaaagcaaaa

SEQ ID NO: 58526 - DNA, 899 bp, Homo sapiens
  chr1:1168239-1169138
  hypo
gggggggcgctggcgcgaggccgcctggcaactctgcgactactacctgccctacgcgctgggcggcggctacgtgctctcggccgacctggtgcactacctgcgcctcagccgcgactacctgcgcgcctggcacagcgaggacgtgtctctgggcgcctggctggcgccggtggacgtccagcgggagcacgacccgcgcttcgacaccgaataccggtcccgcggctgcagcaaccagtacctggtgacgcacaagcagagcctggaggacatgctggagaagcacgcgacgctggcgcgcgagggccgcctgtgcaagcgcgaggtgcagctgcgcctgtcctacgtgtacgactggtccgcgccgccctcgcagtgctgccagagaagggagggcatcccctgagccgccgcggcccggccctccgggacacctgcttcacccggcggcgccttggggcaggtgccgagcgggcgcactacgcccgggccccaaggcccccgtcccgcagccacgcttgtggtcgctgcgtcccggtctgcgtttgggagacccctgggggttgccggggcagcgcgccgtgtccaggtggaggtgcccgttcctggacctcagcgagcctgagccgggcccggccgcacgctgacccccgtgctgtccccgaccggctcacggggctgggctccgatcttccgtgtctcttatcagtggcgtttctcacgtctgcgtctcagatctaacgtggtttcacatcaatccgctttcatgggattttggtctctgtccagtgacttcgtggtaaatgtaactcagtgtttgcttgcgacttatttataaatattgtaagtttgtgtcgatgagtgtaagttggcagtgcgcacgtctcggttttttt

SEQ ID NO: 58527 - DNA, 46 bp, Homo sapiens
  chr1:1169379-1169425
  hypo
ccccggagtgctgacgcggttccccaacttccgccttaagaaaaca

SEQ ID NO: 58528 - DNA, 30 bp, Homo sapiens; identical to SEQ ID NO: 13769
  chr1:1170054-1170084
  hypo

SEQ ID NO: 58529 - DNA, 30 bp, Homo sapiens
  chr1:1178030-1178060
  hypo
aagaagcacggggacgtcacaaccgcagcc

SEQ ID NO: 58530 - DNA, 172 bp, Homo sapiens
  chr1:1190081-1190253
  hypo
gccgtcactggccccgctaagcctcatcaccacacggccaggccagaccagcacccgcggacgccagctccacccctgggccccgaggttcccacccgctgaggagccgggagctccgagaaacgcgccaggagctccaagaacgcaggagcagcccgcggtcggcagcaag

SEQ ID NO: 58531 - DNA, 421 bp, Homo sapiens
  chr1:1190526-1190947
  hypo
gtcacgctctggtgcgcggtgccctcagtggcgccttgggtctcggcgcctgggcctcactcctgcgcgatgctcctcagcacgtacttgaccgtgtaagcaaaggctgcaaacccaactatcacaaacaagttcgccagggcgccacccaggagtccgtggtgccggttggcctgctggagccctgcgaggtttgggacggcccccggcgcatgcccgttgagcagctgaatcccgttctggacgaggtgcgtctccccgtctggaaccacgtctggcaaggggagagtctggggtctgctactgagttcgtcttgtgctttctgtttttgtttaatctcctaagagaaaaacagcgagaaaagcagctggtctccaaccagcgcctttcaggaccagcactcccgttctcaggagtcca

SEQ ID NO: 58532 - DNA, 401 bp, Homo sapiens
  chr1:1194377-1194778
  hypo
catgccatcaggacgcgtgtgtgcgtgtctgagtgtgtgcatgccatcaggacgcacgtgtgtgcatgtgtgtgtgcatgccatcaggacgcacgtgtgtgcatgtgtgtgcatgccatcaggacgcacgtgtgtgcatgccatcaggacgcgtgtgtgcgtgtctgagtgtgtgcatgccatcaggacgcacttgtgtgcatgtgtgtgtgtatgccatcaggacgcatgtatgtgcgtgtctgcatgccatcaggacacgtgtgtgtgcatgtgtatgtgcatgccatcaggacgcgtgtgcacgtgcgtgccatcaggacgcatgggcgtgggcatgtgtgtgcgtgccatcaggacacgtgcatgcgtgtgtatgcgtgtgcatgccatcaggtttg

SEQ ID NO: 58533 - DNA, 210 bp, Homo sapiens
  chr1:1200458-1200668
  hypo
actgtgcccaacctgcgaaaactgggaagaaatgaagaagtcatcctcttcctgagacagagcccagcagccttggggcggctgagagaagatgggatccacgtggcccatagcgcaccccacaggccttttctgggaaagcagtcttctctcggggaagggagagacacctgccgaggacctgccaggggctctcgcactgacgctgct

SEQ ID NO: 58534 - DNA, 30 bp, Homo sapiens
  chr1:1203152-1203182
  hypo
tggggcaccaggctcgcccagcaggggccg

SEQ ID NO: 58535 - DNA, 31 bp, Homo sapiens; identical to SEQ ID NO: 13772
  chr1:1218648-1218679
  hypo

SEQ ID NO: 58536 - DNA, 191 bp, Homo sapiens; identical to SEQ ID NO: 13773
  chr1:1221480-1221671
  hypo

SEQ ID NO: 58537 - DNA, 707 bp, Homo sapiens
  chr1:1228253-1228960
  hypo
aagtggcaaagtggctttatgcgcaggctctgggccgagtaccaggagaaggtgcctccggaggaggccgggatgcggctggggctgtctggcacggggaccttcgtggccagccacgtggccttgggacgcccgcgtccagccagggctgaggacccaggccagagcccctcccgcccagcacccgcgacgccagcctggatgctggggtcactaagtgaggtactcgttggttccctggatgggccaccctttctgccctgggaggaggctctggggtgtgcaggagggagccagctaacaggtcagtgttctgggcagaagtggggcacgaagtaacacaggccctgaggacacagggacacaggtgacacgggccttaaaagtggcttgtgacatgagcaacccaggcccctgaaaaggggtgacctgaagacagaggttccccaggtggggtgagggacacccgacgatgcagcacccccccagggaaacgtgaggcttcaagagactcagtgtggggccctcgctctcctcctgggcgagcagggccgcggcgccccagcactggggctgccaggtatcgacccgcgggtcacacgcagggccgcggccgggtgggcgccagggacttcggggcatgcggggcgtcgggccgggcggggtggcagctgcccggcctgcccggccctagctctcttccaggt

SEQ ID NO: 58538 - DNA, 30 bp, Homo sapiens
  chr1:1229775-1229805
  hypo
gctcacccctagcacggcctgcaccagcgg

SEQ ID NO: 58539 - DNA, 30 bp, Homo sapiens
  chr1:1230058-1230088
  hypo
ctgggcaggggcctcgggcgagggcaagac

SEQ ID NO: 58540 - DNA, 30 bp, Homo sapiens
  chr1:1231863-1231893
  hypo
ggggtccggctggccgcagtcgccgcactg

SEQ ID NO: 58541 - DNA, 30 bp, Homo sapiens; identical to SEQ ID NO: 13774
  chr1:1234829-1234859
  hypo

SEQ ID NO: 58542 - DNA, 326 bp, Homo sapiens
  chr1:1235845-1236171
  hypo
gctacagctggtccccgccccccagcccatttctggggctgacctggagcacatagtccagtgccaggtggcggaagcacttcctggtgagggtgagggccccggtggcttcctccacctcgtggggccggtgcctcggggcctgggcgttcctcaccagggacagctccaggtcctcccgcaccttgtcaaactgcttctttgtctccttgaacttccgcacatccctggaggccaagtgccaggtggggtgagagatcagggagggcacctgctggatcctggagtctcccacatcgttgtttgtgtgttttttgttttttgag

SEQ ID NO: 58543 - DNA, 486 bp, Homo sapiens
  chr1:1238230-1238716
  hypo
cttcaggtgagccagcgcagctcggttccaggccaggcacagcccacaggtggcagggaggccgcgctcaccatgtggtagttcaccacctcctgtaggctgtcagcgaacctctgcagacattcctggaggagcagatgggaacccgtgctgagatggcaaatccgggcccaggtcacccagccacgccctctgagcccctgggcggtgcagacaccggcctgcttctggcctggacgccctcaaggggctgcctccctcggcctctcccccaaccccaccttgaggtcagaggtcagtcggcccctcaccgagatgacggtgtcgccctggcactgctgggacaggtcgcggacgccgctcacgaaaagcctgctggtgctgacgtaggccttaccggcttccaccatgccactgcacagcttcaccagctgtgggccagcggggcgtggtgagcacagtgggcactggcgcctgcactcgcca

SEQ ID NO: 58544 - DNA, 233 bp, Homo sapiens
  chr1:1239379-1239612
  hypo
ggcttagtaaggcctggagggcgagtctggccatgtggccatcccaagcttggccgggcacagggcgctccaggcccgcccttcaccttgtccagtttggcctcaatctccaccacgtccgtctccacctcgtcaatggtcgccctaaagcaagaacggggctggctggggtcacctgcagcctcagccccctcggggcttcacctccccccgcacctccctgaggggctcca

SEQ ID NO: 58545 - DNA, 30 bp, Homo sapiens; identical to SEQ ID NO: 13776
  chr1:1246399-1246429
  hypo

SEQ ID NO: 58546 - DNA, 592 bp, Homo sapiens
  chr1:1247719-1248311
  hypo
gcttgctctgaggacaccagccggaagttctgtggggcagggacaggtcagtgagcgcagcagcggccctcccccctccagagaccgtcctggcactcacgctgtccttcatgatcagggtgccgtgcaggagccgaggcttcttggcctcagggagcagccctgcggaggaggtggcaggagccatcaatgtgagggccgctcccagccgcctgccccgagcaccctgccctgccctgcccagcccgcataccctgcgccatctcccgcttcagcagccccagcgagatgcctacggggatgctggggcttgtgggcagcgtcaccgtctcgccattggccggcatgtagcagttgacccctggaccccgggggaagagagagcctcagcccaggctgcccgtgctgacccgaggtgggccccacgccgcccgcccggctgcctacggagctcctgctcgatcttctgcttcaggaactccatcttcttggcctcgccatgcaccagcagcacgctctccggctctgcctggcccaccagctgcatgatgcccttggcgtccgcgtgtgcgctgaatgacatgtactccac

SEQ ID NO: 58547 - DNA, 137 bp, Homo sapiens
  chr1:1253109-1253246
  hypo
tgcccatgcccagagacagaacgttgtttgcaaagtgcagagacaaaatactgtcaacctaaaatcttacacacctaagggaaaaaaagtcctttaagaacgaggataaagtaaatccatttgcaggcaaataaatt

SEQ ID NO: 58548 - DNA, 17 bp, Homo sapiens
  chr1:1253545-1253562
  hypo
ggccaaggcaaataaaa

SEQ ID NO: 58549 - DNA, 30 bp, Homo sapiens; identical to SEQ ID NO: 13779
  chr1:1254213-1254243
  hypo

SEQ ID NO: 58550 - DNA, 30 bp, Homo sapiens
  chr1:1257566-1257596
  hypo
gcacttgtggcacacggccccgaggcatgg

SEQ ID NO: 58551 - DNA, 30 bp, Homo sapiens
  chr1:1262803-1262833
  hypo
gtctggctgccggacggtgctgcgcctgca

SEQ ID NO: 58552 - DNA, 30 bp, Homo sapiens
  chr1:1263080-1263110
  hypo
cagcgtgtctacaacgtctcccagaagctc

SEQ ID NO: 58553 - DNA, 44 bp, Homo sapiens
  chr1:1264862-1264906
  hypo
atgcttgtgccgtttgcgtgtcccaagtgcgagtgtgctatttg

SEQ ID NO: 58554 - DNA, 30 bp, Homo sapiens
  chr1:1265339-1265369
  hypo
gtgtgtgccatgcgcgtgtgccatgcactt

SEQ ID NO: 58555 - DNA, 1171 bp, Homo sapiens
  chr1:1267014-1268185
  hypo
caggttctcctcaaacggcctgctctgggcactggccatgaaaatggccgtggaggagatcaacaacaagtcggatctgctgcccgggctgcgcctgggctacgacctctttgatacgtgctcggagcctgtggtggccatgaagcccagcctcatgttcctggccaaggcaggcagccgcgacatcgccgcctactgcaactacacgcagtaccagccccgtgtgctggctgtcatcgggccccactcgtcagagctcgccatggtcaccggcaagttcttcagcttcttcctcatgccccaggtgggcgccccccaccatcacccacccccacccagccctgcccgtgggagcccctgtgtcaggagatgcctcttggcccttgcaggtcagctacggtgctagcatggagctgctgagcgcccgggagaccttcccctccttcttccgcaccgtgcccagcgaccgtgtgcagctgacggccgccgcggagctgctgcaggagttcggctggaactgggtggccgccctgggcagcgacgacgagtacggccggcagggcctgagcatcttctcggccctggccgcggcacgcggcatctgcatcgcgcacgagggcctggtgccgctgccccgtgccgatgactcgcggctggggaaggtgcaggacgtcctgcaccaggtgaaccagagcagcgtgcaggtggtgctgctgttcgcctccgtgcacgccgcccacgccctcttcaactacagcatcagcagcaggctctcgcccaaggtgtgggtggccagcgaggcctggctgacctctgacctggtcatggggctgcccggcatggcccagatgggcacggtgcttggcttcctccagaggggtgcccagctgcacgagttcccccagtacgtgaagacgcacctggccctggccaccgacccggccttctgctctgccctgggcgagagggagcagggtctggaggaggacgtggtgggccagcgctgcccgcagtgtgactgcatcacgctgcagaacgtgagcgcagggctaaatcaccaccagacgttctctgtctacgcagctgtgtatagcgtggcccaggccctgcacaacactcttcagtgcaacgcctcaggctgccccgcgcaggaccccgtgaagccctggca

SEQ ID NO: 58556 - DNA, 30 bp, Homo sapiens
  chr1:1271745-1271775
  hypo
cggccggacgctctcgccagctgctcccca

SEQ ID NO: 58557 - DNA, 109 bp, Homo sapiens
  chr1:1272383-1272492
  hypo
ggaccctggcttaccggcccaaggtccgctccgctagtccttcagtctaaggcttgtttagcacaagacaagggatagcacgagttacacgcccggctgcctggcacct

SEQ ID NO: 58558 - DNA, 97 bp, Homo sapiens; identical to SEQ ID NO: 13783
  chr1:1273360-1273457
  hypo

SEQ ID NO: 58559 - DNA, 30 bp, Homo sapiens
  chr1:1274405-1274435
  hypo
gcccctgcctctgacgccgtgggtgctccc

SEQ ID NO: 58560 - DNA, 113 bp, Homo sapiens
  chr1:1277897-1278010
  hypo
acccgccttcaggacgcctcctcagggcacccagggaacagggggccagcaagctgccctatccgcacccagcctgccagggcctccccacacccaccgcctcccccaggaag

SEQ ID NO: 58561 - DNA, 375 bp, Homo sapiens
  chr1:1280836-1281211
  hypo
aggctggccaggcattgggggcgtacccacaacccggggtccccgcgcctctgtagcagcctccgctgaaactcacggcagctgccaggggcgcccctgccggcactgtgcccccaccttgggattccctgtgaggcctggctaacctgtgtgctgcccccacagacccgccccggggaggaatccactcagaggcagcgccctgggagccagcatggccacacaggatgcagagaaccctccagactcccagaggccacagccagctgccctagacgtggcgtggtcccgaatgcaccccattctcccaaggcggagcaggaagctggcaggggtagctggcccaggacaggcggtgcagagccatcctgtgcc

SEQ ID NO: 58562 - DNA, 30 bp, Homo sapiens
  chr1:1329029-1329059
  hypo
gcaggacgcatgcccgtgagcccagccaca

SEQ ID NO: 58563 - DNA, 413 bp, Homo sapiens
  chr1:1377719-1378132
  hypo
tgcagttgcttctagttgagacgagaagagcgacaaggttgtgatccacgtggcaggtgttcagaaggctgggggcgggcagcgctggggagagccctgggtacttcgaggagaccccgaagggaggctgctcccacacctgcgccagtttccaccctctctgtgagcagggctgcggtcacctcccacatctgaagagaaccaacctgaggatttcacgctggctgcgtgccagaccagtccctgacaggttgtgcgaggcccttcgctggacagcccattgctggccactggacggagaggcagagggggctgaaattcgggcccatgcctctgtgagcgatgacggagcaacagctctccagcacgtgaagctctccagacagctgttcgtgagaagccagacagaggcc

SEQ ID NO: 58564 - DNA, 31 bp, Homo sapiens
  chr1:1380694-1380725
  hypo
ggctgtctacctctgcgcgctctctccattt

SEQ ID NO: 58565 - DNA, 31 bp, Homo sapiens; identical to SEQ ID NO: 13786
  chr1:1385741-1385772
  hypo

SEQ ID NO: 58566 - DNA, 34 bp, Homo sapiens
  chr1:1388340-1388374
  hypo
ctgtggtggcgccccacgtcgcacatggctgtgt

SEQ ID NO: 58567 - DNA, 48 bp, Homo sapiens
  chr1:1389832-1389880
  hypo
gagacgtcccgcatcacggtgcttgaggcgctgcggcaccccatccag

SEQ ID NO: 58568 - DNA, 57 bp, Homo sapiens
  chr1:1390128-1390185
  hypo
gggtccttgcaagacccgggatttgggtgtgcggccgtctgtcggggaagctgctac

SEQ ID NO: 58569 - DNA, 159 bp, Homo sapiens
  chr1:1400494-1400653
  hypo
acatgaggtgatctgcccgcctcagcctcccaaagtgctgggattcattcaggtgtgggccacggagcccggtcagttttcactgtgcaagtctttcaccttctcggtcaagtgaatttcaaagtattttattctttcggatgctattgtaaatggaaa

SEQ ID NO: 58570 - DNA, 30 bp, Homo sapiens
  chr1:1410834-1410864
  hypo
gggtcgccgagattcgcccgttgctttgtc

SEQ ID NO: 58571 - DNA, 88 bp, Homo sapiens; identical to SEQ ID NO: 13789
  chr1:1421577-1421665
  hypo

SEQ ID NO: 58572 - DNA, 31 bp, Homo sapiens; identical to SEQ ID NO: 17
  chr1:1434134-1434165
  hypo

SEQ ID NO: 58573 - DNA, 30 bp, Homo sapiens
  chr1:1451119-1451149
  hypo
cctcctcccgtccacgtgggatggccttcc

SEQ ID NO: 58574 - DNA, 30 bp, Homo sapiens
  chr1:1462958-1462988
  hypo
gtcctcgtgtttcccgccactttaggttct

SEQ ID NO: 58575 - DNA, 30 bp, Homo sapiens
  chr1:1471923-1471953
  hypo
cggcctcccctccccgggctcttgggggaa

SEQ ID NO: 58576 - DNA, 308 bp, Homo sapiens
  chr1:1476830-1477138
  hypo
tggagaggggacgccgctccaccacaggcagcagttgtggcaggagcaggcggcttccgcttcaggcagcacaggcacgggtaggcccagaccctgtcagcaccaccaggtctgagctactcctcccaagcagtggtcggaggtcactgagggcggcagggctaggcctctgccacctcctcaggggcgagggtcgggccaggaattcaggaccaggcacaatgacagcagcatctgtttattgacaattccaggtcattcctaacacgccgcagcagggctctgtacagtccggcccggtggggagg

SEQ ID NO: 58577 - DNA, 228 bp, Homo sapiens
  chr1:1487053-1487281
  hypo
ttcgcggacgccaacggcccaacctatctctgccccaaatccacgtgggacacagcacccatgtccagggacatcctgaacgttttgcccatccttacgccaacgtcacatcgccccgaaggcctgagggagggtggtggggcccgaggcctgtgctcaccccatgcaggcagggccacgccgggccaccactacctttcccaacaatggcccggtgtgggcagccca

SEQ ID NO: 58578 - DNA, 210 bp, Homo sapiens; identical to SEQ ID NO: 13792
  chr1:1491936-1492146
  hypo

SEQ ID NO: 58579 - DNA, 152 bp, Homo sapiens; identical to SEQ ID NO: 13793
  chr1:1492358-1492510
  hypo

SEQ ID NO: 58580 - DNA, 483 bp, Homo sapiens
  chr1:1494400-1494883
  hypo
aaaaatagagaagcctctgcacgtgaccctgggagccaggctcaagcccctcggcaggacacccagcgcaaagctgctctactccacgtgccactgaggctgagcgaggaaaagtcatggcaaagaaacctgggacttagaaatagttccacgcatgctcagcgaaagaacaaaaggctgcatatgaactggacagtgtggaatgagcagacctgtagcacgggaagcagctaaactggacggtgtggaacgggcggacctgtagcacgggaagctgctacaggcactgggaggagaatgggcagcagcaaacggccttgggagacgaaaagcgtctcaaaaccaattgtggtgacggctgcaactccatgaatgtcctgaaacccacagaactggacacgcgactcagggaagtgcatgatttgtacattttatctcaataaaaacaattcttgataaaacggtcagtccacccaaggaaag

SEQ ID NO: 58581 - DNA, 30 bp, Homo sapiens
  chr1:1496841-1496871
  hypo
tccactgcagtttacggcgatgacttctgc

SEQ ID NO: 58582 - DNA, 30 bp, Homo sapiens
  chr1:1500078-1500108
  hypo
gtgcccgagccacacgtaacaccttccagg

SEQ ID NO: 58583 - DNA, 96 bp, Homo sapiens
  chr1:1525407-1525503
  hypo
ggctttgtggggcgcgtggccatctaggcgataaatgagggcatcgcccactcctgccctacgtgtacctgagtatttcacgtgcggagcacagag

SEQ ID NO: 58584 - DNA, 30 bp, Homo sapiens
  chr1:1556692-1556722
  hypo
ggaagccgctcatgcggaggcccagccggg

SEQ ID NO: 58585 - DNA, 30 bp, Homo sapiens
  chr1:1559140-1559170
  hypo
accccacccccaggcgtccggcaccccaac

SEQ ID NO: 58586 - DNA, 30 bp, Homo sapiens; identical to SEQ ID NO: 13795
  chr1:1562382-1562412
  hypo

SEQ ID NO: 58587 - DNA, 627 bp, Homo sapiens
  chr1:1563372-1563999
  hypo
ggtgaccactgactccgccccagcaggacgcccactcggacacgcccctgcactccgccatctcggcgggcactggagccagcggcattgtcgaggtcctcacggaggtgccaaacatcgatgttaccgccaccaacagccagggtttcaccctgctgcaccatgcctccctcaagggtcacgcgctgtgagtgtggggtgggcacacagctgcagccggcctcttgctgtgctgcctgggggcagtcccaggtcccagaccaacctccctgctccacagagctgtgagaaagattctggctcgggcgcggcagctggtggacgccaagaaggaggacggcttcacggcgctgcatctggctgccctcaacaaccaccgcgaggtggcccagatcctcatccgggaggtgcggacgcggcccagtcctgcccaaggaccggggagcgggaggcccactggggtccctgggctgagcccgtccccacccctccccagggccgctgtgacgtgaacgtgcgcaaccggaagctgcagtccccgctgcatctcgccgtgcaacaggcccacgtggggctggtgccgctactggtggacgctgggtgcagtgtcaacgccgaggacgagga

SEQ ID NO: 58588 - DNA, 30 bp, Homo sapiens
  chr1:1597705-1597735
  hypo
cttgcctgctccctcgtcccttcttttttg

SEQ ID NO: 58589 - DNA, 49 bp, Homo sapiens
  chr1:1610924-1610973
  hypo
acagaaatcacacttcactgacgctgccgttctctgtacatcaagaact

SEQ ID NO: 58590 - DNA, 343 bp, Homo sapiens
  chr1:1611922-1612265
  hypo
ctcgtctgtgtctacgtgcaggagtggaactgcccagccctgggacacgcatgctgagccccagccaacgtcacaccgacctgtgctcccacagccctgccccggctctgtgtgggtgactgtcccgtccctgcagttgagcccacgtggtcccggggtctccattcccctcccaatctgcaggacttcactaccatgaaccgtcctcacccccagcatccctgtccccacagctccaaggccgcaggaggaggcgatatctaatcttccccccacgtaaacacctgtccctgcgtaaatgcctgaggctggctgcttattcttttttttttttttttagatg

SEQ ID NO: 58591 - DNA, 30 bp, Homo sapiens
  chr1:1613896-1613926
  hypo
cagtgtcaaagggacggaccccaagcccaa

SEQ ID NO: 58592 - DNA, 273 bp, Homo sapiens
  chr1:1625719-1625992
  hypo
gagacttcatctcataaataaataaataaataaatattacttttacgttttgttaaacttccacttgtttttgtttccgttgcatgaaccttcgtaaagcttcaggaggctgatggcagcctccttccccaggcttccccgtggcgcccgcagccgggttgggccagaggctgggactgtttcctcccgtggggtctttggtggggatgtccccagaggagtggggcaggaggaggggcacggagcgcccccgggagccggtcagagcgcagc

SEQ ID NO: 58593 - DNA, 194 bp, Homo sapiens; identical to SEQ ID NO: 13797
  chr1:1647564-1647758
  hypo

SEQ ID NO: 58594 - DNA, 31 bp, Homo sapiens
  chr1:1652614-1652645
  hypo
aagactcttgagacaccgtctcaaaaaaaaa

SEQ ID NO: 58595 - DNA, 30 bp, Homo sapiens
  chr1:1683723-1683753
  hypo
gccagcccccttcccgctgagtgtcccaga

SEQ ID NO: 58596 - DNA, 30 bp, Homo sapiens
  chr1:1691802-1691832
  hypo
ctgcctgggacgcacgctgccgcggggccc

SEQ ID NO: 58597 - DNA, 30 bp, Homo sapiens; identical to SEQ ID NO: 13798
  chr1:1693353-1693383
  hypo

SEQ ID NO: 58598 - DNA, 54 bp, Homo sapiens
  chr1:1694218-1694272
  hypo
aatgaatgaatgaataaaagacgccagatgaacggctcaacaactttcctagtg

SEQ ID NO: 58599 - DNA, 45 bp, Homo sapiens
  chr1:1694623-1694668
  hypo
taaaaattggtaagtacaggccgggtgcagtgactcacgcctgta

SEQ ID NO: 58600 - DNA, 61 bp, Homo sapiens
  chr1:1706068-1706129
  hypo
ctcccacagtgctgggattgcaggcgtggccaccgtgcgcggtcaccactgtattttttga

SEQ ID NO: 58601 - DNA, 23 bp, Homo sapiens
  chr1:1713192-1713215
  hypo
accaagcagcctagtataagacg

SEQ ID NO: 58602 - DNA, 36 bp, Homo sapiens
  chr1:1713454-1713490
  hypo
gctgggattacaggcgtgagccacagcgcccggcca

SEQ ID NO: 58603 - DNA, 99 bp, Homo sapiens; identical to SEQ ID NO: 13799
  chr1:1729267-1729366
  hypo

SEQ ID NO: 58604 - DNA, 239 bp, Homo sapiens; identical to SEQ ID NO: 34886
  chr1:1737717-1737956
  hypo

SEQ ID NO: 58605 - DNA, 45 bp, Homo sapiens; identical to SEQ ID NO: 34887
  chr1:1747213-1747258
  hypo

SEQ ID NO: 58606 - DNA, 37 bp, Homo sapiens
  chr1:1781839-1781876
  hypo
gggattacaagggtgagccaccgcgcccagcctaaat

SEQ ID NO: 58607 - DNA, 31 bp, Homo sapiens; identical to SEQ ID NO: 13802
  chr1:1795941-1795972
  hypo

SEQ ID NO: 58608 - DNA, 30 bp, Homo sapiens; identical to SEQ ID NO: 13803
  chr1:1848634-1848664
  hypo

SEQ ID NO: 58609 - DNA, 30 bp, Homo sapiens
  chr1:1849058-1849088
  hypo
caagaagatgcagacgtcacaggtggccct

SEQ ID NO: 58610 - DNA, 30 bp, Homo sapiens
  chr1:1849290-1849320
  hypo
tccaagctctggtccgttctcctacctcct

SEQ ID NO: 58611 - DNA, 30 bp, Homo sapiens
  chr1:1857499-1857529
  hypo
ctccgctcacttggcggctggtgtgagggc

SEQ ID NO: 58612 - DNA, 30 bp, Homo sapiens
  chr1:1861791-1861821
  hypo
gggaggccctcagccgtgcagggcgtccgt

SEQ ID NO: 58613 - DNA, 31 bp, Homo sapiens
  chr1:1869915-1869946
  hypo
ggctcacactgacaaacgcactcacacaccc

SEQ ID NO: 58614 - DNA, 186 bp, Homo sapiens; identical to SEQ ID NO: 13804
  chr1:1874727-1874913
  hypo

SEQ ID NO: 58615 - DNA, 121 bp, Homo sapiens
  chr1:1888176-1888297
  hypo
cctaccacgtagctgccgaagtcaatgagctccttgtcgagggacagctgccagaggacatggagtgaactcagggccaccgtgccaggcccacagggtgcccagcgtgaggcctgcacgt

SEQ ID NO: 58616 - DNA, 279 bp, Homo sapiens
  chr1:1888802-1889081
  hypo
aggggcaggaccaggggccaccgacgcaaatggacgtggttcgcagagggcggtcggggtccagccaagggaggccgcctccttcccgcctgcaccgcctgggtcctgttctccccttgttcagatggggttttactgtttttacagtccccagcctggacgctcccctgggagaagcaagcccctgctcaggggagccgagggtctcggtgctcctgtcacagaggagcacttgacactgcaaagaccaaatgcgggagaggccggggcagctctggc

SEQ ID NO: 58617 - DNA, 30 bp, Homo sapiens
  chr1:1902055-1902085
  hypo
tgggcgggtgcctcccggtggcacctctgc

SEQ ID NO: 58618 - DNA, 30 bp, Homo sapiens
  chr1:1903410-1903440
  hypo
gggcctacccggttcgcggagatgctgccc

SEQ ID NO: 58619 - DNA, 289 bp, Homo sapiens
  chr1:1910163-1910452
  hypo
agaactgcaagctcataaatccgcgtcctgctgagctgttaggtttgtggatttgtcactgcagcgatgggatacgggtgcagtcagggaagcctcagagcaggccgggacacagcaccagcgccctgccgtgggtcccatgtggccaagcggggtgcacacaaagcctcttcttcgtgctgagctgggcgtgggaaggcatcatgtgacgaggctgcacagaacacgtgtgtcgtgctgagctgggcgtgggaaggcgtcacgtgacgaggctgcacagaacacgtgt

SEQ ID NO: 58620 - DNA, 96 bp, Homo sapiens
  chr1:1923484-1923580
  hypo
aaaaaaatgcctgagatcaaaacgctgccaacagtgagcactggcaaggctatggaagggctggcatcgtcacgcgttgctggtgggagtgtaaag

SEQ ID NO: 58621 - DNA, 30 bp, Homo sapiens; identical to SEQ ID NO: 13806
  chr1:1953094-1953124
  hypo

SEQ ID NO: 58622 - DNA, 30 bp, Homo sapiens
  chr1:1965779-1965809
  hypo
gcaagcgccctgtagcgctatggagggcac

SEQ ID NO: 58623 - DNA, 31 bp, Homo sapiens
  chr1:1967235-1967266
  hypo
actggggggaccccatcggtcacttggcatc

SEQ ID NO: 58624 - DNA, 238 bp, Homo sapiens
  chr1:1974756-1974994
  hypo
ccagcagcaactgttggaccccgcagcgcaggagtggcagggcccgtctgcagtgcaggagtggcagggcgtgtccgcggtgctgaccggttggtcttgggccctggcgctgtgtccccgcacaggtctcgggagaggttctccactctgagggcgtgtccagtccagagaaggggacgcgcggcgtgttccccagtggtctggaccctggggtcccgccccatccctgccctgccca

SEQ ID NO: 58625 - DNA, 31 bp, Homo sapiens; identical to SEQ ID NO: 13807
  chr1:1979189-1979220
  hypo

SEQ ID NO: 58626 - DNA, 729 bp, Homo sapiens; identical to SEQ ID NO: 34894
  chr1:1981252-1981981
  hypo

SEQ ID NO: 58627 - DNA, 281 bp, Homo sapiens; identical to SEQ ID NO: 34895
  chr1:1982244-1982525
  hypo

SEQ ID NO: 58628 - DNA, 202 bp, Homo sapiens
  chr1:1986094-1986296
  hypo
attatggaattatttaatccccgccacttcaccgctggcaccgtcgaggtctgggggcaggtctgactggtttcctttaccttagtgaagccggcggcctgcaccgacccggctcgcgcccatcccggggtcacccacatttgggtgaacttgaacgagtgcccgaccaggtaacgttgccggacctcccacaagagggcac

SEQ ID NO: 58629 - DNA, 30 bp, Homo sapiens
  chr1:1987114-1987144
  hypo
attaaacttgttggcgccaacttttcccca

SEQ ID NO: 58630 - DNA, 148 bp, Homo sapiens
  chr1:1990853-1991001
  hypo
ggcagtgccacgtgcgccttgcgtgaagtccacgtgctcagcctgactgaggcgggacttcctccgtgagactgttgagtggcagccgcagggtcttgacgctgtctctttctctctcttgtccagttttcccgagcacccctgagca

SEQ ID NO: 58631 - DNA, 30 bp, Homo sapiens; identical to SEQ ID NO: 13809
  chr1:1992217-1992247
  hypo

SEQ ID NO: 58632 - DNA, 30 bp, Homo sapiens
  chr1:1999168-1999198
  hypo
ggccagtgtgtggccggtagattcccgggt

SEQ ID NO: 58633 - DNA, 30 bp, Homo sapiens
  chr1:2011898-2011928
  hypo
ttgatgctgccccccgtgcgacctgggggc

SEQ ID NO: 58634 - DNA, 693 bp, Homo sapiens
  chr1:2013459-2014152
  hypo
catattaaagcaggcttgatccgggctgccgtggttccgatcgactccgaataggacaccacacagtcgtgccaagaaggcgcctaagtgtctttccacacggccatccgagggcggacgtggtcaggggtgctggacgcgtcagacgggttctttgcagcccttggcagcgtcgcccgctctgtcccgcctgttgtgtgcgccttttccctgctccagggctgtgtatttggcaagagggaggctccgtggcacgatcacacgtgcaggagctgggggctgccagagcggctgttcaagatggacttggcaaatcacctctttcaagttgccggctacccggctgccgtagacagagtgaagtctggtagtttgtgtttatttatttatcttggccagcagagagaattgagtttgcatggagactgtaatttcattctgtgagtgtaagatcacgtccgcgttcctagcgaccggttttgtgatgtgggcagtgccgtgctggtaaatgctctgtgaggaaggaacgatggtgggatttgtcactcagtcgatttccctggtgtaaatgctcccaccacggccgatttcaggctgccgaagtggaggggttcagtgaaggtggagttgggcaagggcgtacacggtcggcttctgagagttggtccccccgcccaaccctcccctggagat

SEQ ID NO: 58635 - DNA, 409 bp, Homo sapiens; identical to SEQ ID NO: 13812
  chr1:2016616-2017025
  hypo

SEQ ID NO: 58636 - DNA, 30 bp, Homo sapiens; identical to SEQ ID NO: 13813
  chr1:2024578-2024608
  hypo

SEQ ID NO: 58637 - DNA, 404 bp, Homo sapiens; identical to SEQ ID NO: 13814
  chr1:2025754-2026158
  hypo

SEQ ID NO: 58638 - DNA, 202 bp, Homo sapiens; identical to SEQ ID NO: 13815
  chr1:2039529-2039731
  hypo

SEQ ID NO: 58639 - DNA, 157 bp, Homo sapiens
  chr1:2041086-2041243
  hypo
gggttgcggcagctcacgcccactgcagtgtccggaaggcggtgctaggtccacctcatttacggggtcgggctctcattctccccattgtacagcccagcctgtagaggcaggtgaggtccaggccatgggcctgtgggccgtgccacgtcgctca

SEQ ID NO: 58640 - DNA, 52 bp, Homo sapiens
  chr1:2058199-2058251
  hypo
cctcacccggggttgccttcccgagggccgcggacacctgagcagtccccat

SEQ ID NO: 58641 - DNA, 47 bp, Homo sapiens; identical to SEQ ID NO: 13817
  chr1:2065456-2065503
  hypo

SEQ ID NO: 58642 - DNA, 769 bp, Homo sapiens
  chr1:2065917-2066686
  hypo
gagcaaagtgggacacggtgttgaggaaggacaagaccagccgtctggttacaggcttggtgccgcctttctcataagaggcacagtccgcatgggctggactgtcaaatgcatgttataaagatgatgtttttggtaacttgcgaatggaaacgggtgcacggtcggtttggctctcctgccctgagatttattaggttaaaggaaactcgactggagagcccggggcctcgcgccgcttgcgtctggcgagttgttgaagtgaagtcagtggcgctctgcaccttagcctggcccaggctccactgtggcgtccactcttcctcctctgacagtcatgtgtaaatattgaggcccgtttgaactatccctgtgcggaaaaaaaggcctgtttttcacagggctgcctggggaggaggggggtggaaaggaaaacaggcaggggacagacggacccggcctgcgttggcctggggtgacttcacggctccactgtcagcaagcggccgtcccgtggtggatcctgtccgccctgcgaggacacctggctccatccacacctgggcctctgtctccagccgccgaggccgtgacaccatgaggatcatgtgaggaggggcagagagaggcctccgggaggccgtcattccagccctgccttccctgcctgggaggacgctgcggccgccaccacctggacgggagtggcctgtcgcagctgcaccctgcgtgggctcgtggctgccacgctgtttctttacacctttct

SEQ ID NO: 58643 - DNA, 155 bp, Homo sapiens
  chr1:2068691-2068846
  hypo
actgcttctcccacctgcttccgcctgctttgccccagccgcactggcagctgattggacgccaccgcccacccacattgagggtgggtcttgccctcccagtccactgactcaaataccagtctcagggcagcgccctcatagacacacccaga

SEQ ID NO: 58644 - DNA, 142 bp, Homo sapiens
  chr1:2069385-2069527
  hypo
aacctgactgctcagggagggcggctgccctgcagttcagcctgtccgattcccgcctaattgtgcccgggctctgatctcgccacctgctcgtaacgttctctgtccggacctcagagccgctccatgtagtgctcacttc

SEQ ID NO: 58645 - DNA, 30 bp, Homo sapiens
  chr1:2085702-2085732
  hypo
acatgttgagcagccgtcggggggcaggtc

SEQ ID NO: 58646 - DNA, 31 bp, Homo sapiens
  chr1:2096693-2096724
  hypo
gcgtgccctgtaatgacggtgctgtcaccgc

SEQ ID NO: 58647 - DNA, 30 bp, Homo sapiens
  chr1:2100350-2100380
  hypo
cccagtccctgagacgggaagggcctgcgt

SEQ ID NO: 58648 - DNA, 76 bp, Homo sapiens
  chr1:2103117-2103193
  hypo
tttcgaggacctgccggactgtcttccgcagcagcggcgctgttctgcactcctaccacaacgtgccatggctccg

SEQ ID NO: 58649 - DNA, 246 bp, Homo sapiens
  chr1:2103459-2103705
  hypo
ggcactgcccccatgacggcatccccacccccaggttctacgcggccgagatctgcatcgccctcaacttcctgcacgagagggggatcatctacagggacctgaagctggacaacgtcctcctggatgcggacgggcacatcaagctcacagactacggcatgtgcaaggtgcgtgccttggaccgcctcccctgaccatcccgcatgtgcgtctcggggcgcctgtcccgcggggtagtgtcta

SEQ ID NO: 58650 - DNA, 30 bp, Homo sapiens
  chr1:2104626-2104656
  hypo
tggggcaggcagggcgggcaggtcactcgc

SEQ ID NO: 58651 - DNA, 30 bp, Homo sapiens
  chr1:2105377-2105407
  hypo
agatgatggccgggcgctccccgttcgaca

SEQ ID NO: 58652 - DNA, 31 bp, Homo sapiens
  chr1:2107101-2107132
  hypo
gacatggccccacttgcgtggagccaaggct

SEQ ID NO: 58653 - DNA, 522 bp, Homo sapiens
  chr1:2107352-2107874
  hypo
cagggatctgatagtgggggccggcctagagaagggcgtttgctttggtttcatggccggttttatcagcagttactggacaggaccagcagtcgcagcgttcacggcttgagctttagcgtcgggtattgaaggagagtgagtctgtggacagggtgcgacgtacactggctcgatttaggaatctgatttcggtggtgtgtgagcagggtgcattcggtagaaactactttgagttttgaccgttccccagctggccgtatgaggtcagtactctcctgtgatgaggggcggtgactgcagccccagcgggccacgtgatcaggagggggccgaatgtcccgaggggctctgcgtgcagggggttttgccggactgtaggctggcgtgtgtctgtcaggttaaggcaggtaaggctgcgccgcttggtcgtgggttctgtgtggaagtgcagtctccacccaggatgtttccagcgccgctcggtcgtgggttctgtgtgggaagcgcagtctccaccta

SEQ ID NO: 58654 - DNA, 31 bp, Homo sapiens; identical to SEQ ID NO: 13820
  chr1:2111393-2111424
  hypo

SEQ ID NO: 58655 - DNA, 624 bp, Homo sapiens
  chr1:2116357-2116981
  hypo
cagggatgccataaagaggatcgaccagtcagagttcgaaggctttgagtatatcaacccattattgctgtccaccgaggagtcggtgtgaggccgcgtgcgtctctgtcgtggacacgcgtgattgaccctttaactgtatccttaaccaccgcatatgcatgccaggctgggcacggctccgagggcggccagggacagacgcttgcgccgagaccgcagagggaagcgtcagcgggcgctgctgggagcagaacagtccctcacacctgggcccgggcaggccagcttcgtgctggaggaacttgctgctgtgcctgcgtcgcggcggatccgcggggaccctgccgagggggctgtcatgcggtttccaaggtgcacattttccacggaaacagaactcgatgcactgacctgctccgccaggaaagtgagcgtgtagcgtcctgaggaataaaatgttccgatgatgtggaagctcctctgatgccttttttccgtgagtggcgcctgccccacatctcagacgcaacccacacgtaggggggcagcttaggagccagcgggacacaggtgggggcgggagttgaagtacctgtggggacacaccgcaatcaagaattg

SEQ ID NO: 58656 - DNA, 34 bp, Homo sapiens; identical to SEQ ID NO: 13823
  chr1:2121713-2121747
  hypo

SEQ ID NO: 58657 - DNA, 30 bp, Homo sapiens
  chr1:2122586-2122616
  hypo
gctaagatctgaaccgaggtcatcttgtcc

SEQ ID NO: 58658 - DNA, 65 bp, Homo sapiens
  chr1:2123196-2123261
  hypo
ccagtgaccaacccagggcctcgccacatcaacagagacaaaacgcagctctggctctcaacatc

SEQ ID NO: 58659 - DNA, 355 bp, Homo sapiens
  chr1:2125160-2125515
  hypo
ggccctgcagggatcaggtgccgggcgctggggcagggacctggcgggggattccaggtgccctcctgccccgtgaagcagccggtaggaacggcccgggccccacaggtccggcggaaagggtgtccaggaaaaggtcttgggtccgacagtgaagacttcagtgggctccgggccgcacctgggctcctgcaacacagagttgttgggccttgcccagcgatggctcccgccctggaaaccccttcatcgctaagatgggcccagtgggcacacctgtcctgggaaggcgggcagtgaaggcacctcgtgatccaggatcagctccgggctcaccgtgcgcagtagctcggcc

SEQ ID NO: 58660 - DNA, 286 bp, Homo sapiens
  chr1:2129649-2129935
  hypo
aaattcatgtttacaaaagaacgtttcagctgtgggagtttgcatcccaggcagagcagaaggtgatcgagtgggtgggggcatcagagccacccatctcctactcccgcacctgcagaccggtgggctaggaggccccttaccctctgtggcaaaaaaggacacatttatggatgatgaatcaggccccagcccactgagctggtttcagaagccaggctggccgtaggtcagggagccaggcctctccaactccttccaccgcggaagaacaagtgtcccagcc

SEQ ID NO: 58661 - DNA, 381 bp, Homo sapiens; identical to SEQ ID NO: 13825
  chr1:2132533-2132914
  hypo

SEQ ID NO: 58662 - DNA, 30 bp, Homo sapiens; identical to SEQ ID NO: 34897
  chr1:2135699-2135729
  hypo

SEQ ID NO: 58663 - DNA, 410 bp, Homo sapiens; identical to SEQ ID NO: 34898
  chr1:2135929-2136339
  hypo

SEQ ID NO: 58664 - DNA, 249 bp, Homo sapiens; identical to SEQ ID NO: 13826
  chr1:2141558-2141807
  hypo

SEQ ID NO: 58665 - DNA, 30 bp, Homo sapiens; identical to SEQ ID NO: 13827
  chr1:2142519-2142549
  hypo

SEQ ID NO: 58666 - DNA, 30 bp, Homo sapiens
  chr1:2147498-2147528
  hypo
tggcctgggggtcccgggctcagtgaagtg

SEQ ID NO: 58667 - DNA, 101 bp, Homo sapiens
  chr1:2154149-2154250
  hypo
gagactccatctcaaaaacacaaacaaaaacactttggttcccttcagtgaatgaaaattgggagccaagactgggcttcctggtgcgctcactactgctg

SEQ ID NO: 58668 - DNA, 128 bp, Homo sapiens; identical to SEQ ID NO: 13828
  chr1:2167222-2167350
  hypo

SEQ ID NO: 58669 - DNA, 50 bp, Homo sapiens
  chr1:2170933-2170983
  hypo
cccatgtgggtgtagccgttggcggcacctttgtacggggacacaccctg

SEQ ID NO: 58670 - DNA, 30 bp, Homo sapiens
  chr1:2188357-2188387
  hypo
cttcgggatggtgcccgtggcatcttctgc

SEQ ID NO: 58671 - DNA, 4 bp, Homo sapiens
  chr1:2188825-2188829
  hypo
cgtg

SEQ ID NO: 58672 - DNA, 91 bp, Homo sapiens
  chr1:2188947-2189038
  hypo
cctcctcccagctgcctcctgccctatgtgtgcttgagctcgagacaatgcttccttcatccaagagccgggctctcggcgatttttgaga

SEQ ID NO: 58673 - DNA, 497 bp, Homo sapiens; identical to SEQ ID NO: 13830
  chr1:2190966-2191463
  hypo

SEQ ID NO: 58674 - DNA, 30 bp, Homo sapiens; identical to SEQ ID NO: 13831
  chr1:2193726-2193756
  hypo

SEQ ID NO: 58675 - DNA, 132 bp, Homo sapiens
  chr1:2205381-2205513
  hypo
tccctgaccggcagcgccaggatggcagccccacaacagtgtcctggtcgccccagaggcatgctgagcgcccatgcgtgtgcgcaggtcctacgggccgtgtccagacccagccccggggtcaggtgacac

SEQ ID NO: 58676 - DNA, 30 bp, Homo sapiens
  chr1:2209125-2209155
  hypo
gacccatgggcacacgtgcacacacacgtc

SEQ ID NO: 58677 - DNA, 126 bp, Homo sapiens
  chr1:2218534-2218660
  hypo
cagccagctctgggcgaaaatctagagggcccctgcgcaccctcccgcccggggtgccctggcccagggtgcacctgtgctctggaccctgggccgtgcggggctccagggcgcctggagactgcc

SEQ ID NO: 58678 - DNA, 30 bp, Homo sapiens
  chr1:2219321-2219351
  hypo
cgagccctgagccccgccttgagccctggg

SEQ ID NO: 58679 - DNA, 30 bp, Homo sapiens
  chr1:2225092-2225122
  hypo
aagctgcgtgtcctcgtgtttccgctgccc

SEQ ID NO: 58680 - DNA, 30 bp, Homo sapiens; identical to SEQ ID NO: 13833
  chr1:2228304-2228334
  hypo

SEQ ID NO: 58681 - DNA, 30 bp, Homo sapiens
  chr1:2234736-2234766
  hypo
ttcaccctcgccagcgcctctctgctttcc

SEQ ID NO: 58682 - DNA, 30 bp, Homo sapiens
  chr1:2237170-2237200
  hypo
gtggccctagataccgggggaggccccgcc

SEQ ID NO: 58683 - DNA, 565 bp, Homo sapiens
  chr1:2237784-2238349
  hypo
gcagaagccaggcccgggaccacgttccgtgcgtgcccccccgacgggcacagggtgggtggttgctgggccctgcgtctcgtgagcctgtgtcctagcaggtggaggaggggccggcacgcggcactggggagggacagggagcggcgcaggagcctcgggtgggggaagcagcgtcgggccggggcagggcagcgagcaggcgccgctgaccactcggctccctttcagatcgaagacctgcaggtgaagctgcagcacgcggaggcggaccgggagcagctgcgggccgacctgctgcgggagcgcgaggcccgggagcacctggagaaggtggtgaaggagctgcaggaacagctgtggccgcgggcccgccccgaggctgcgggcagcgagggcgctgcggagctggagccgtagattccgtgcctgccgccgcagcgccgccgacaacgcgggtgcaggggggcgcggctgggcggtgcagctccgcccggctccgcccctgcagcccacacagcacaacgtcttaccgtgcctattaccaagcgagtgtttgtaacca

SEQ ID NO: 58684 - DNA, 163 bp, Homo sapiens
  chr1:2238917-2239080
  hypo
gctcctctgcaccccgtgattctgcccacgctcctccaccacgaggcactgacctgcgtcgggtggtgaccgtggctggcggtcacgccctcagcccctccgggcacacgtgccgcctgaccgggcgacccttttcagttcggcaaacgtcgctcccttcatt

SEQ ID NO: 58685 - DNA, 596 bp, Homo sapiens
  chr1:2239610-2240206
  hypo
caggagttctttgcttgaatccgttctaacacccgcggcagctgcacgcgctcacagaaggtggaggttacttgcccaggtacagacgacctcggggcagtgacgagcaaagaccagagactgctgagccctcgcatctgggtggcggaattgcctgcggggttttgcccttggtttactgaggggggtcttggttgctgctgaagccccccaccccttctaaagtgcaatgcaaaagggacatcatgtatatgcagcgtttgtttggaattttctttgcttttgttttctttgcggttgttctgtgtgcatggattccacacctctgccgtaggtagatccgtcagcgggcattattaccgtgtcttgtaaagggtcggttttgttatgcaacatgcagaatgctgtttttagccttgttttaccagagttgttttttttttcagttatttcttcaagggaaactaaatgatttagttggagcaaagctttaagtgtgttggcgtgcttctgtgtggctgtcctgtgtcgccaggtcgaagatcacagtgaggtagaggccctgccccatccccagggccgccaggcttgctccg

SEQ ID NO: 58686 - DNA, 31 bp, Homo sapiens; identical to SEQ ID NO: 13839
  chr1:2241012-2241043
  hypo

SEQ ID NO: 58687 - DNA, 30 bp, Homo sapiens
  chr1:2241639-2241669
  hypo
gactttgagaggaccgcgggacagctgtgc

SEQ ID NO: 58688 - DNA, 30 bp, Homo sapiens
  chr1:2249602-2249632
  hypo
gctggtgggagacgcgtgtcgggggctctg

SEQ ID NO: 58689 - DNA, 30 bp, Homo sapiens; identical to SEQ ID NO: 13840
  chr1:2251555-2251585
  hypo

SEQ ID NO: 58690 - DNA, 30 bp, Homo sapiens; identical to SEQ ID NO: 13841
  chr1:2252980-2253010
  hypo

SEQ ID NO: 58691 - DNA, 205 bp, Homo sapiens; identical to SEQ ID NO: 13842
  chr1:2254567-2254772
  hypo

SEQ ID NO: 58692 - DNA, 30 bp, Homo sapiens; identical to SEQ ID NO: 13843
  chr1:2258138-2258168
  hypo

SEQ ID NO: 58693 - DNA, 283 bp, Homo sapiens
  chr1:2259050-2259333
  hypo
ccagaggctgtggacggctgcgagtggcccgtgcggcttttagaagcacagacaggagatggggtggacgaggcggcacagggggagggccacgaggaggggcaggcgcggcgggcaggcggcaccacctctgcaaggctaacaaggtgctgcgcccggctccctcctcttgcctgtgcctctggcggtgaccagaatggcccattggccgaattggccgccctgacgggtgagggccgctttcccaaggccccgcatcgcgcctcggcgtccccgcatgagc

SEQ ID NO: 58694 - DNA, 97 bp, Homo sapiens
  chr1:2263430-2263527
  hypo
ctcccgccgctgcgcctctcccgccgctgcgcctctcccgaaattacaggctggtgtgtcacttttcatctttgtcgatttttttttcagtcatttc

SEQ ID NO: 58695 - DNA, 30 bp, Homo sapiens
  chr1:2264591-2264621
  hypo
agtgcagtgagcatcgggctcccgcctgga

SEQ ID NO: 58696 - DNA, 251 bp, Homo sapiens
  chr1:2265992-2266243
  hypo
ctgcctgtcccaacacgacgagagggccctggctgtgtggccgtggagccggcaggaggcaggggaagtggccgctggtcacagatgtgtgccccgaagagacgacatcatttgaacactgaacactccgactccgcggccaggtcgtcctgggattgaaacaatcctagtccaacgacacttaactcgaggacagtgcgagccctttggctgggaggcccaggctgggagcagacgccgacccctccgtt

SEQ ID NO: 58697 - DNA, 30 bp, Homo sapiens
  chr1:2266834-2266864
  hypo
aggcagaggaggtctcgagggcccaagacc

SEQ ID NO: 58698 - DNA, 782 bp, Homo sapiens
  chr1:2267195-2267977
  hypo
gtgtgcggggccaggcgagggctggtgggacgggtccccagggcacatcagcgggggcctcctcgcctccatagcccagcccagcccagcgcgcagctgcccccaatttgtagacagagtcccgatttgaggtggcagctgttgctggactccgagccccgagccccagcttcctcctggtagaaccggccggttacggccctgcatgtgctgtgcccgtagcactgccaggcccaggatggtgagatgtgacggccacaaaccccccacggtgtccccgcctgcacgtgccgcggtgtgcacctggtcccactcctgtcctccagctcacagagtcccctcaagccactgccctgaaccctggccaccagccgtcttcctctgagaggccccgcacccctcctgcctctctgcttctgcatgcccacagcctggtccgcccggcgggtctgggagttgtggtgatcgaagcagatggaccggctccagctccacccacttcatgccagcccaggcaagtcgcagggcagctgttagccccgcgagaccctggctggcgggggggctctctggagcgaggcccgtgtaggctcactgtcttcccagaccaggcccttggctcccctgggccttccccgtcctcctggcccagctgatgaggaggccacagctgaccctccgaacacctgcaggtggggtgggctcatcctacctgctgcctccaggaggctcctgtgccgtgggtggtgtccccctggggtgcaggccgcctctggatctgc

SEQ ID NO: 58699 - DNA, 444 bp, Homo sapiens
  chr1:2268383-2268827
  hypo
ggcagcgggcacagacgccagtcgcgatgccatcttggtgggggcaggtcagggggcagggactgtccatcctgggtgctccctccggccgccgacaggggaggtgggggtcctccgtgtccacggcctctgacgcccccgcccccttctgagtccaccccagcgccagggagcccagcgctttgcagtgggaagggtctcccatcagcagcccccgtcagccgaggcactcgcttccagggtagggccgggaccggggccctggccggagaggctggcgctcaacagtacagctgtgtgccctcctcggagcgcagcatgaggaggaagatggttctgccccagcggcccatcaagatggacctggcgtcaggacccgttctccacaggcgtggagggagacaccgagggtggctgcgagtccctccacgtggcggcagaccc

SEQ ID NO: 58700 - DNA, 146 bp, Homo sapiens
  chr1:2269855-2270001
  hypo
caccgatggtttccacgtggactgcactggagctaacttggactgcgtcttttatcgacaccccctggacaataaagacaccagctctgtatcctaatcatgcggacaccctcaccctcggcaaggtgaccgctccagagtgggcc

SEQ ID NO: 58701 - DNA, 427 bp, Homo sapiens
  chr1:2270533-2270960
  hypo
gaagaggaggccctccgggttggccaagacgctttttgttgcaagcgagagaaacgagaaatggtgaaaagcggaaggggagggtcgtccccagccttggcctcagaggagccttctagatcccagcgcatctggaccaggagcccacaccgtgtgtctttcttctggatgtcacctccccctccctcaggctcttaccgccgcatggcacgggtccacggagggggcgtttctgctgccacacggtggggactgcctgaccatgagagacagcggtccacctctgccatgcactccctgagtcggggctgcaggctgaccgcagcggcccctgggtcctggctgtgaccgcctttcccgaggccggcaccgcacccgccaggtgctcaagctgaaagttgggggtcagcctcgttgcccctgcacc

SEQ ID NO: 58702 - DNA, 31 bp, Homo sapiens; identical to SEQ ID NO: 13851
  chr1:2273548-2273579
  hypo

SEQ ID NO: 58703 - DNA, 30 bp, Homo sapiens
  chr1:2273943-2273973
  hypo
tcagccgagaagcgcggctcattagagacg

SEQ ID NO: 58704 - DNA, 30 bp, Homo sapiens; identical to SEQ ID NO: 13852
  chr1:2275957-2275987
  hypo

SEQ ID NO: 58705 - DNA, 450 bp, Homo sapiens; identical to SEQ ID NO: 13853
  chr1:2276266-2276716
  hypo

SEQ ID NO: 58706 - DNA, 30 bp, Homo sapiens
  chr1:2276954-2276984
  hypo
ccggaccctcaggccgctcagagggccagt

SEQ ID NO: 58707 - DNA, 485 bp, Homo sapiens
  chr1:2279302-2279787
  hypo
gtagagtacaaagaatgttttcgctgggccatctgaaagtccgctgctgaatttgctcctcactccacatcctcgagtgcattttacaaaccgggaagtttttcgcctcacgtaacccagcacagccgtcccggggcagggcacgcctcggggtcagaccccagcctgggcttccccgtggcccagtgatgtccctcgcaggaaggagatcagcctgggaccacacattgcagcgagctctcattgtgtcttcagtctccgtcggtctggaacattcccgggcctttccctgactgccatggtcctggcgtcttcgaagcttccaggccaggcctttcagggaaggttcccccgtgtggccgtgtctgaggtctcatcacagagagacccgggttacgcatctttggcaggagaggcatggatgcgacgctcatgcctttcatggatggctctgctcagcccacgctgccaggtggggcaggatt

SEQ ID NO: 58708 - DNA, 38 bp, Homo sapiens; identical to SEQ ID NO: 13854
  chr1:2283081-2283119
  hypo

SEQ ID NO: 58709 - DNA, 30 bp, Homo sapiens; identical to SEQ ID NO: 13855
  chr1:2284164-2284194
  hypo

SEQ ID NO: 58710 - DNA, 325 bp, Homo sapiens
  chr1:2288152-2288477
  hypo
cacactgtgctgcgcgggagggtttgaatcgcacacactgctcactgcacaggagggtttgatgtgcactgctcgctgcaccggagggattaagctttgattcaactccatgagtaactctggaatgatccctgtgaagtctaggccgcacattctatggaagtgcagttctcactggccccagccttggggggcagagttgggggctggggggttctgccggagcacctgggcctcatctccacgaagaaacgtgaggcaacccgtgcagaagcggagcagcgggaaaccctgacctcgagagagcagtcggcgccgcggcccc

SEQ ID NO: 58711 - DNA, 595 bp, Homo sapiens
  chr1:2303948-2304543
  hypo
agctgaacgttcaccgagaagggagacccttgggccacttccatcacctccggacccaagatcacgatcctcgtagcttgttctgggagaggacagagtgtggctttagcggtgactggcatggtcccccacccaccccatggctgagtcagcagtgggcaccccaggaaccgaccagagcccagtgtggcagctggaacacaagcacatgcgggggccgaccctccgcaaaccaccttgcagagcagcgacctgggcagtcgtccacactcagaccgtgaggctcggctctgctggcctggagcactgtggaatcgaaccaagtggaccaccggggccacggagcatgcaagagacacaagtgggcggtgtggggctgttgggttttcctgcccgtggaatgttcccgcacgtcttcccgctggtcgggatttaggccctgcattccctgcatctgagtcagcaccctgaggtgctggacctgggactagggcaaggcctggcaagggtgggtccaccggctggccagtgcctcctggcagccagggccgcccctgctccaccggggcctgcagggcatcgctgtgggtggtgt

SEQ ID NO: 58712 - DNA, 433 bp, Homo sapiens
  chr1:2307752-2308185
  hypo
agaggcgcgagtcagcgcacagctgagggctcttcagggcgtccggggcccccgtcaccgtcagtgatgagaatggcgatgtctggtctctgcccccttccacctgctcggcctctggaaggtgccccgggctttcaggaggagggaggtggagctgcggggcagggctgacaccagctgcaatatggcgtccagggtgagtacccagtgaggctgtggctgggcaggggaagccagacacactcgagtcatgagaaatgcagaggtgcagagcccgcctttggggtgagtggctcctcccatggttggtctggggctgcggctcacgtatgtggcacgagcctgcctggcatccccctccctgggtgcgcagcaatcaggtcagggcttggcatcctcggtacccaccgctggtgtccgggtgggagggctg

SEQ ID NO: 58713 - DNA, 30 bp, Homo sapiens
  chr1:2308483-2308513
  hypo
gtggagagttacgtgcggggcctcagccac

SEQ ID NO: 58714 - DNA, 75 bp, Homo sapiens
  chr1:2309923-2309998
  hypo
tgaggagaggaggctcggggactgcggcaggcaaagccgcccagaaggagccacctgctccgtgcagtgagcagg

SEQ ID NO: 58715 - DNA, 158 bp, Homo sapiens
  chr1:2310199-2310357
  hypo
gcctgcccaagccctcgggtcctgggaggtcgagcagtaagctgtaaactaggagtgtgggggacggagatggctgaggcgtcacaggctggtgggggtgctcgtggcccaggacctctgtggcttccgggaccggcctgagccgcgtggctcctgtc

SEQ ID NO: 58716 - DNA, 72 bp, Homo sapiens
  chr1:2316414-2316486
  hypo
accttgtaggtggagccgtcggcgcagcgcagcaccccgtgtccctgacgccggtcccggacccagtcgccg

SEQ ID NO: 58717 - DNA, 30 bp, Homo sapiens
  chr1:2318780-2318810
  hypo
tgaacccaagtggacgtaggattccatgtc

SEQ ID NO: 58718 - DNA, 30 bp, Homo sapiens
  chr1:2327632-2327662
  hypo
ctcccagccacccacgtccccggtgctggt

SEQ ID NO: 58719 - DNA, 595 bp, Homo sapiens
  chr1:2328570-2329165
  hypo
tagacaagtccacaccctacacggctgtgcgatgggtcgtgacactgggcctgagctttgtctacatgattcgagtttacctgctgcaggtaggtgtgggctgaagtgacgagacttggctctgtccacgttacctgggcgtgatgtttgtggggatgttgttgatccagtctgtcttgcaggaagtggtctctagtaatcaattttcagctaaacgccaaatgtcagaaagatctcagtgactgtctttaacgaacagggttgtttatgattcacccggagtcgcctcgccaggcttctcagtatacccaggccgtcctgagcccagcctggccctgccctgggcacgtccaggcctggacagtggagccgctggtgtccctccgaccctgctgcatgatgctcaggacaaggttgcgctctgtggctgcctcattccttgggtgaagagtccatgccttgggtgtcatgaatgactcggcgtccaaagggtttatgtagcttttcctgagctctcccttgtgtgaggccaaagcacagtgcaggttgagacgccgagtcaagtaagagagacagtgaccgaagggggtcttga

SEQ ID NO: 58720 - DNA, 39 bp, Homo sapiens; identical to SEQ ID NO: 13858
  chr1:2329737-2329776
  hypo

SEQ ID NO: 58721 - DNA, 317 bp, Homo sapiens
  chr1:2331317-2331634
  hypo
gaggttaccttttcccgtagccagagggttccacaggcagctcactgtggtgcacagagaccgccgggactctaatgccagcatcgggtcgggtcaggctttgggcggccttctctggtttctgaggagctgtgagctgaagtgttcctggtgcttcgtgctccactattggaagacttacgcagctcctgggcctgcctgggccaggtaggggccctgagttcatgcctgactggccagccccaggcgaggaacaaacaactgcattccaggacgtggtggccattgagggaaaacccacacgcagctccctgcca

SEQ ID NO: 58722 - DNA, 38 bp, Homo sapiens; identical to SEQ ID NO: 13860
  chr1:2331921-2331959
  hypo

SEQ ID NO: 58723 - DNA, 219 bp, Homo sapiens; identical to SEQ ID NO: 13861
  chr1:2334770-2334989
  hypo

SEQ ID NO: 58724 - DNA, 409 bp, Homo sapiens
  chr1:2336018-2336427
  hypo
ccccccgccctcctccgtctctggcaagctgaccttgactaacccaggaatacagggtcatcctcattcctaagtaagtcaaacagcaagacatggtttgcgcgggtctttgccggaagccggtcctgctggccaggtgttttacgtcagcagggaaatgtggcacacgccctcgaggcattttaacactgcgcttcaggaaatctcaagttccatcttgtgttagtaacgtacccacattttgctggagttagtttattaaagatgcctacggtgaactctctggcgcaggttaaatgcagttttgaaaacctggaaacatcaaatggaggcgggaaataggctggggccgagctgaggggctgaacacagcagtgaccgtgggtcagcaggtcgcctgcccagcagg

SEQ ID NO: 58725 - DNA, 30 bp, Homo sapiens; identical to SEQ ID NO: 13863
  chr1:2337319-2337349
  hypo

SEQ ID NO: 58726 - DNA, 391 bp, Homo sapiens
  chr1:2337853-2338244
  hypo
ctgcagccaggtgcatcttgccggcacagccgctgaccaccccaggacggcagcaggctcccacctcaccttgctgctgcaccacgcggtgatgcactcccagcagaacaggtggccgcagggcgtggctgttgggtgcctgcgctcctccaggcacagggtgcacagggggtttctggaaacggctctctcctccaaggaggccctggggaaggtggggcagagcgtcaaggtgggtgcaccttacaggtccttgtgaagtgcccaggacacccccagcccccatgtgtggcccccgcacgcacctgcggtgagacaggccgcggtgcagcctccactccttcctggctcgctgccgctgcctgaaaccgtacagctgcagccccatgga

SEQ ID NO: 58727 - DNA, 193 bp, Homo sapiens
  chr1:2341159-2341352
  hypo
ttctcagggcctttcccggctgcttgctctgccggtctggaaaatgctcttccctaagacgtggtctttatctctgagagcccctcacttcccaagatgctctgtgacgcagccacatctgtctcccgcccaccgagcacactctccatggcggcaggatgcccggggcgagcccctcgtagggaaccaggct

SEQ ID NO: 58728 - DNA, 31 bp, Homo sapiens
  chr1:2359187-2359218
  hypo
ttgaaacagaagcagccggcgagccctccag

SEQ ID NO: 58729 - DNA, 365 bp, Homo sapiens
  chr1:2359879-2360244
  hypo
gactgggtgggcaagcgtggactgcatctgtcctgcatggggtcctgcgtctggctcgcccggtgccgtgctgtggggcccacgccaacggctgacctcatggtcctccgtggcctcgcctaggcttgcggcagccgacgtggcgttgttgcctaattaggttggactgtgccagccccagcggagcccacgcccggcccttgcgccggcagacgtgtcggggcacggctcctgcactcccactgccgcaggaactgctcaggaacctgccggtctccggctgggacggtggctggatcagctcaagcctccagggccctgaggctgaggggctgagtgctcattccagccgcctcggggaaccc

SEQ ID NO: 58730 - DNA, 765 bp, Homo sapiens; identical to SEQ ID NO: 32
  chr1:2374845-2375610
  hypo

SEQ ID NO: 58731 - DNA, 149 bp, Homo sapiens
  chr1:2377287-2377436
  hypo
tccacaacacatgaagagcttcggaccaatttgtgtatcttctgttactctgcgcctaataggaccgcttcattagctgctgtcgcacccacagtgccgtctgtccgggaacggagggagcctggcccgagccccatgccagagcccca

SEQ ID NO: 58732 - DNA, 269 bp, Homo sapiens
  chr1:2384534-2384803
  hypo
cacctccacccaggcctgggccgcccatcccccaccgtgctacaagcctcctgcctgtcccccgatcttccagtggggcagccgggacaatttgccaaaacgcaagtctgccccccgacagcgccagtgcccccactgtgctcgagatgtggtctgtgggcgccgtgctccctggggcccttccccgtgtggtgctgcttgggaggtgaagacccctgaggcatatgtttccagtccgccctgttatcgcccattgcaaagatgaggac

SEQ ID NO: 58733 - DNA, 162 bp, Homo sapiens
  chr1:2403082-2403244
  hypo
gtcctccccctgctctggggccggtggaaggtggagggcaggtcaggtggcgcggccgatggagtatggctggccatcgagaacctgtccccacgctctaggacactggccgttccagctcccccagggctctgtgcacacggaccaggagccacccaaggg

SEQ ID NO: 58734 - DNA, 55 bp, Homo sapiens
  chr1:2411363-2411418
  hypo
gccggcatcagcgacgaggacagcctggctcgccgccagcgcaccagggaccaat

SEQ ID NO: 58735 - DNA, 23 bp, Homo sapiens
  chr1:2412420-2412443
  hypo
caggccctggggtctctgacacg

SEQ ID NO: 58736 - DNA, 36 bp, Homo sapiens; identical to SEQ ID NO: 13869
  chr1:2412562-2412598
  hypo

SEQ ID NO: 58737 - DNA, 93 bp, Homo sapiens
  chr1:2428255-2428348
  hypo
cggcgccacagcggcgtccagctggcaggtgtcgtccttcagcgagaccaaggcccaccagattctgcagcagaagccggcgcagtacctacg

SEQ ID NO: 58738 - DNA, 30 bp, Homo sapiens; identical to SEQ ID NO: 13870
  chr1:2430042-2430072
  hypo

SEQ ID NO: 58739 - DNA, 115 bp, Homo sapiens
  chr1:2430549-2430664
  hypo
tggttttcatggtgcacatgccggagatcgcgctggtccgcttcctcgtctgggaccacgatcccatcgggcgtgacttcattggccagaggacgctggccttcagcagcatgat

SEQ ID NO: 58740 - DNA, 30 bp, Homo sapiens
  chr1:2434472-2434502
  hypo
cgtggcactgtctccgtggcactctgctcc

SEQ ID NO: 58741 - DNA, 150 bp, Homo sapiens
  chr1:2439886-2440036
  hypo
cagggaagggctcccgctctgggctccccccatgggaggagtcgggaggggcccctgctccgaaataaaacatcgcagatggctccggcctcttttaaaaactctatttggtgcgtgcccacggtgctgcgtcccgtcagacatacctgt

SEQ ID NO: 58742 - DNA, 30 bp, Homo sapiens
  chr1:2440276-2440306
  hypo
tgcagcgcctcactcggctgggacctcgta

SEQ ID NO: 58743 - DNA, 30 bp, Homo sapiens
  chr1:2445759-2445789
  hypo
aggtggccacacaccggggtgctgggcact

SEQ ID NO: 58744 - DNA, 30 bp, Homo sapiens
  chr1:2448924-2448954
  hypo
cccgcgggggggcacggtcgaggaccctga

SEQ ID NO: 58745 - DNA, 362 bp, Homo sapiens; identical to SEQ ID NO: 13872
  chr1:2450393-2450755
  hypo

SEQ ID NO: 58746 - DNA, 30 bp, Homo sapiens
  chr1:2451496-2451526
  hypo
aaatgggccctcatcgcgtgggaccaaagg

SEQ ID NO: 58747 - DNA, 931 bp, Homo sapiens; identical to SEQ ID NO: 34907
  chr1:2460597-2461528
  hypo

SEQ ID NO: 58748 - DNA, 144 bp, Homo sapiens; identical to SEQ ID NO: 36
  chr1:2461950-2462094
  hypo

SEQ ID NO: 58749 - DNA, 178 bp, Homo sapiens; identical to SEQ ID NO: 13875
  chr1:2463121-2463299
  hypo

SEQ ID NO: 58750 - DNA, 30 bp, Homo sapiens; identical to SEQ ID NO: 13876
  chr1:2471717-2471747
  hypo

SEQ ID NO: 58751 - DNA, 31 bp, Homo sapiens; identical to SEQ ID NO: 39
  chr1:2477831-2477862
  hypo

SEQ ID NO: 58752 - DNA, 177 bp, Homo sapiens; identical to SEQ ID NO: 13878
  chr1:2483771-2483948
  hypo

SEQ ID NO: 58753 - DNA, 215 bp, Homo sapiens
  chr1:2507039-2507254
  hypo
tcaaggctcacaggctcacagcgggtgtactttattggacgtcatacggaccctgaagcaggtgatgtttccaagtgggaattggtaccaggctgtcctatgtctgtccatcccttgggtccgtctgcacggaacagacccgtggcccacaaccccagtgtggctgcagcctgatgaatccaggagtcttggcccagccccgaagcccctgggag

SEQ ID NO: 58754 - DNA, 30 bp, Homo sapiens
  chr1:2519905-2519935
  hypo
aagggtgtacaggccggggggtggtgggag

SEQ ID NO: 58755 - DNA, 297 bp, Homo sapiens
  chr1:2520299-2520596
  hypo
tatgtggctgtgaggtgcaggcggcctccggggtgccgtgactgcctgcccgctgctacaggtggtgataaagtgctcctgcatttcgtccagaagtccccaggcgactacgtccccaaggagcacatcctgcaggtcctgggcatctctgcggaggtctgtgccagcgacccgcctcaggtgagctgggccttgggggcgctgcctgccagcccacgccctgcccctaggtcccctgggaggagcactcggcttggctgggagctgagccacagcgctgtgggcatcatgccaatt

SEQ ID NO: 58756 - DNA, 194 bp, Homo sapiens
  chr1:2520929-2521123
  hypo
gtccacttggaagaactgttccggaggcgctgggtcgggatgccgaacctctcctgatccgccggcagcaacgagccattaaaactgcagttcctgaccacgcactgcttcgcaggctccgagccctgcatcctccacagcccccgccttgctcactgttgggccctcagggcgggcagggtggctgtgagtcc

SEQ ID NO: 58757 - DNA, 30 bp, Homo sapiens; identical to SEQ ID NO: 13879
  chr1:2522315-2522345
  hypo

SEQ ID NO: 58758 - DNA, 215 bp, Homo sapiens
  chr1:2527320-2527535
  hypo
gtggggtcctgtctgcgcctcccggggctgccttctccccgtggggaccgtcaggaggctttgtcggggcggtgctgcccgtgcccagatccagtcggggctgccctgacctctgcgagccacataccttctcctgcgccttcttcttggactcctcgtccatccagcccagctcgtccagcgtctccacaaacactgtccgcaccttgtcaatg

SEQ ID NO: 58759 - DNA, 30 bp, Homo sapiens
  chr1:2527957-2527987
  hypo
ggaaggctggccccgcgtgggccatggatg

SEQ ID NO: 58760 - DNA, 31 bp, Homo sapiens
  chr1:2529454-2529485
  hypo
ggttttggcagagctacgttctgccttgttg

SEQ ID NO: 58761 - DNA, 85 bp, Homo sapiens; identical to SEQ ID NO: 13880
  chr1:2537704-2537789
  hypo

SEQ ID NO: 58762 - DNA, 30 bp, Homo sapiens
  chr1:2541058-2541088
  hypo
gctgtcctgttcggcgtcaccccactgcac

SEQ ID NO: 58763 - DNA, 30 bp, Homo sapiens; identical to SEQ ID NO: 34917
  chr1:2559941-2559971
  hypo

SEQ ID NO: 58764 - DNA, 660 bp, Homo sapiens; identical to SEQ ID NO: 34918
  chr1:2560231-2560891
  hypo

SEQ ID NO: 58765 - DNA, 30 bp, Homo sapiens
  chr1:2572894-2572924
  hypo
ccgctctctaccgccgtccaggcctctgcg

SEQ ID NO: 58766 - DNA, 761 bp, Homo sapiens; identical to SEQ ID NO: 13881
  chr1:2716538-2717299
  hypo

SEQ ID NO: 58767 - DNA, 281 bp, Homo sapiens
  chr1:2719756-2720037
  hypo
agtctcggagggtcccgagctatgatcacagcccctgcctgagagcagcacacctggatgcaggtaatcccagggccgcctccacgccacctcccaatccgcactctcgtctctgattctgccacagacaaaagtgggcggctgagccggacagggaggccgaggccggtgcctggtagtctcagggtctcgtgttcgggtttgtgctgctttagtttatgagtcaaaaggatttccaacatttccaacttgaggctagcggggggcgggggatactgctc

SEQ ID NO: 58768 - DNA, 30 bp, Homo sapiens
  chr1:2724399-2724429
  hypo
tgcccctggacacgccgggcaggtcctgct

SEQ ID NO: 58769 - DNA, 31 bp, Homo sapiens
  chr1:2726568-2726599
  hypo
ccagcaggccacagcacggcattacgggacg

SEQ ID NO: 58770 - DNA, 92 bp, Homo sapiens
  chr1:2752976-2753068
  hypo
tgggcattcacgctgcgtggctactgagaaggtcctagaacagaccacaaaggtaacagccgaggacagcgcagaggcgcccagcaccgagt

SEQ ID NO: 58771 - DNA, 30 bp, Homo sapiens; identical to SEQ ID NO: 13882
  chr1:2789881-2789911
  hypo

SEQ ID NO: 58772 - DNA, 248 bp, Homo sapiens
  chr1:2823835-2824083
  hypo
cctgtgctccccaggtcaccccgagcgcctctgcactctgcgccagggtgagagccggcagagagacgtccctgggggctggtggcgcttggcggttctgggaagcaaaagttggtttggaatctttgttaacagctgggcatacatcttttaaattataaatcgataaatagttaattcaataatagaactcttttgaatatttcatgctgcccatgcgctgcgacgctctgcatagatgatgaagt

SEQ ID NO: 58773 - DNA, 51 bp, Homo sapiens; identical to SEQ ID NO: 13883
  chr1:2833935-2833986
  hypo

SEQ ID NO: 58774 - DNA, 30 bp, Homo sapiens; identical to SEQ ID NO: 13884
  chr1:2846821-2846851
  hypo

SEQ ID NO: 58775 - DNA, 31 bp, Homo sapiens; identical to SEQ ID NO: 13885
  chr1:2847353-2847384
  hypo

SEQ ID NO: 58776 - DNA, 547 bp, Homo sapiens; identical to SEQ ID NO: 13886
  chr1:2850531-2851078
  hypo

SEQ ID NO: 58777 - DNA, 30 bp, Homo sapiens
  chr1:2897045-2897075
  hypo
gtctgccatgtcagccgtgctgtgactgcc

SEQ ID NO: 58778 - DNA, 216 bp, Homo sapiens; identical to SEQ ID NO: 13887
  chr1:2918442-2918658
  hypo

SEQ ID NO: 58779 - DNA, 30 bp, Homo sapiens; identical to SEQ ID NO: 13888
  chr1:2925725-2925755
  hypo

SEQ ID NO: 58780 - DNA, 717 bp, Homo sapiens
  chr1:2938630-2939347
  hypo
gttcgagaacttcggcgtgcccgctttctacctgtcggaccaggcggtgctggctctctacgcctctgcctgtgtcacgggcctggtggtggacagcggggatgcggtcacctgcactgtccccatctttgagggttactccctgccccacgcagtcaccaagctccacgtggcgggcagggacatcacggagctcctcatgcagctgctcctggccagcggccacaccttcccctgccagctggacaagggtctcgtggacgacatcaaaaagaagctgtgctacgtggccttggagcccgagaaggagctttcccggaggccggaggaggtcctgagggagtacaagctgcccgacgggaacatcatcagcctcggggacccgctgcaccaggcgcccgaggccctgttcgtgccccagcagctgggcagccagagccccgggctctcgaatatggtctccagcagcatcaccaagtgtgataccgacatccagaagatcctctttggggagattgtgctgtcggggggcactaccctgttccacgggctggatgaccggcttctcaaggagctggagcagctggcctccaaggacacccccatcaagatcacggctccccccgaccggtggttctccacctggattggagcctccatcgtcacctctctgagtagcttcaagcagatgtgggtcaccgccgcagacttcaagga

SEQ ID NO: 58781 - DNA, 616 bp, Homo sapiens; identical to SEQ ID NO: 44
  chr1:2984306-2984922
  hypo

SEQ ID NO: 58782 - DNA, 532 bp, Homo sapiens; identical to SEQ ID NO: 34921
  chr1:2985203-2985735
  hypo

SEQ ID NO: 58783 - DNA, 30 bp, Homo sapiens; identical to SEQ ID NO: 13891
  chr1:2999261-2999291
  hypo

SEQ ID NO: 58784 - DNA, 585 bp, Homo sapiens
  chr1:3000564-3001149
  hypo
aacaggacccttgttcggagagatgtccctgggtcttggcagacccacacgcttgtggagggagcgagaggagaggtggctggggacgaccgaatcccagcgctgctgtgggctccctggaggagaaagggccttggtgtctgctgggccagaatgcaggcctttcactcctctccttgcctgggactgcggtcctggcgggccctggggcgtctgggggcctgtacccctcgggtggggcaggttgggctggagccccctggatctggtgtcaggcagacccagaggcagggcacaggggccgcctctggccctttcaaagggacattcgatctgaagcatggggcccagtaagaagattccagggaacacagtgctgatggggccgaaagcgctcggcggccggagagagcctctccacagtctgtgctctggcacgaggccctttgtgggattatctgcccccctgggaggcacggaatgctgggggcgaggggccacagcaatattgagcttgcatgggcccccgataaagcggctgcttgctgcagttgctctgtcgccgaaattcgaggtgcagcccca

SEQ ID NO: 58785 - DNA, 30 bp, Homo sapiens
  chr1:3032784-3032814
  hypo
gaccccatggcacccgtgtctctgcagtgt

SEQ ID NO: 58786 - DNA, 261 bp, Homo sapiens
  chr1:3034297-3034558
  hypo
ccacaggcccgggcccgccttgtccttgtgctccagcgatcaggtgctggctctccatgggaccacagaccccagggctcgctggtcttggggagaggcctccgcacattcatgtttccacttggaatgcaggacaaaggctccaggtggtgccacagattcaccggctacaagaggcagggcttcctggtgccggaaatccatgcaagttgtgcacgtgtgtgtgcatgcatgctcatgctgtgtgtgtgtacatgcacg

SEQ ID NO: 58787 - DNA, 220 bp, Homo sapiens
  chr1:3035225-3035445
  hypo
catgtctccaggactggcagtcggggggtgtcagggacccccagagcggacttgatctcagcctgggggccacgtggatggagtccagggagaccccagctgctggcgtgctagggcgtgcgtgtacacgtttgtgtgcaagtgtgtgtgcacgtgcatgcgctgtgtgtgcacttgcaggtgtttggacacagggcccgaggcacctctgtgcccaagt

SEQ ID NO: 58788 - DNA, 187 bp, Homo sapiens
  chr1:3050792-3050979
  hypo
aggggattgtgtggagctgtccggagcgccattcagctgggggacggagcttccctggaacatagtgccccgcttgattcttgaagagaggacgtggacagcagaggagacgcaggcctggggacggacagttgggcagcaggcatggcacgggcatgggctgggcgggggccaatgcccccaaagt

SEQ ID NO: 58789 - DNA, 30 bp, Homo sapiens; identical to SEQ ID NO: 13892
  chr1:3052851-3052881
  hypo

SEQ ID NO: 58790 - DNA, 30 bp, Homo sapiens
  chr1:3064620-3064650
  hypo
aagttcggcctttggcgtcttctctcgggg

SEQ ID NO: 58791 - DNA, 30 bp, Homo sapiens
  chr1:3086480-3086510
  hypo
tgaccgcggcccgcgcgctccgagtaatcg

SEQ ID NO: 58792 - DNA, 30 bp, Homo sapiens; identical to SEQ ID NO: 13893
  chr1:3101761-3101791
  hypo

SEQ ID NO: 58793 - DNA, 30 bp, Homo sapiens; identical to SEQ ID NO: 13894
  chr1:3107275-3107305
  hypo

SEQ ID NO: 58794 - DNA, 146 bp, Homo sapiens
  chr1:3109585-3109731
  hypo
gtcacagcggccagacggcgagtacccagcagacacagcggccagatggtgagtactgagcagacgcagcggccagacggcgagtacccagcagacacagcggccagacgacgagtacccagcagacgcagcggcttaccaggggg

SEQ ID NO: 58795 - DNA, 168 bp, Homo sapiens
  chr1:3110662-3110830
  hypo
gcacctgcaccagaccgccgggcaagggacaggtgggagggctgaggaacaagggctcccaaagcactcgtctggccttctgcaacgctcagtgcacactggggggctatttaggatggttgttgagggcatttagtcactcagcagacaaccggctcatctcaggtc

SEQ ID NO: 58796 - DNA, 588 bp, Homo sapiens; identical to SEQ ID NO: 13896
  chr1:3111097-3111685
  hypo

SEQ ID NO: 58797 - DNA, 415 bp, Homo sapiens
  chr1:3122847-3123262
  hypo
ccaccagtgggcctggacccacgcccttggggatgagcaagctctcgtgtatttgctgtgtgtgcaacacggggttcctctcggggcactggggatcccgaaagcgtgtctggtgcagaaggcgtgacctccaggcagctccgagacgggaagtgattggagtgtaggcgtgaggtcccggtgctggatagacgcacacgccttcacgcatcctcagaaagtgatgttgctgagtgaatagaaggtgcacgtggcccttcctgagtctgctcaccctccggacacacacgcatgccttcccacgctcctgtgcacacacccctcccggcccttccatggaggacctgtaggaacccgtggcctagggtgagctgggtctgaggctttgggacccgtgcctggaccagtagcttcc

SEQ ID NO: 58798 - DNA, 165 bp, Homo sapiens; identical to SEQ ID NO: 13898
  chr1:3124781-3124946
  hypo

SEQ ID NO: 58799 - DNA, 758 bp, Homo sapiens
  chr1:3127974-3128732
  hypo
agcagtgtgaaaagccgtgggcttgatctagctggagatgcggccgtgggtggactcctaagaaaagactcaaggcagagtctcttggggcccgtcgggggctgcagcagattcgtgtcttgaaaacaggttgggtccagctccctctgctgtgaggtccctgcctcattgctgggacttttgtctcaaggccccggcctcgtccttggtcgtccagcccactggccgcagcagtgggggccggcgctggtggtcagtgctcgctcaccctgccctgcacagcccctaatgttggcacttcacggacaagccggcctgggtcctcagaggagaataaatgtgcacggaacagcacacggtggcccatggccttgcagcacgagcgtgtccatgcgtgtgcacgtgtgcatgcgtgtgcgtgcgcgtgcatccacgcctggcggcctgggcccggcgtgagtgtgtgggtgggagcgggtgtgtatccgcggctgctccattctgctgtaaaggctcgctgcagtgggcaacatggaggagacatgaaagaggggacaataaatagcttcctaccttgcctggataatgggcgagttctccgggtggattaatcctcgcgtcgtctttgggccgtcagtttgggagtgacagtaacaaggctcccggggaccctgctaatttgcactccattcaccggctcgtgaaaccgtcagggctgcggaaggactgcgcggcgcgggcctccattcactgggagc

SEQ ID NO: 58800 - DNA, 30 bp, Homo sapiens; identical to SEQ ID NO: 13900
  chr1:3129201-3129231
  hypo

SEQ ID NO: 58801 - DNA, 30 bp, Homo sapiens
  chr1:3147343-3147373
  hypo
cacacctgcccggtgcgaccgcactgcagc

SEQ ID NO: 58802 - DNA, 31 bp, Homo sapiens
  chr1:3154696-3154727
  hypo
ctgcggggttctcatgcggaaccccaggcca

SEQ ID NO: 58803 - DNA, 31 bp, Homo sapiens
  chr1:3162049-3162080
  hypo
cccgctgaagggcctccggaaactgggtgaa

SEQ ID NO: 58804 - DNA, 30 bp, Homo sapiens
  chr1:3163032-3163062
  hypo
gccagcatcgggggcgttggtgggcggtcc

SEQ ID NO: 58805 - DNA, 190 bp, Homo sapiens; identical to SEQ ID NO: 13901
  chr1:3179304-3179494
  hypo

SEQ ID NO: 58806 - DNA, 243 bp, Homo sapiens
  chr1:3182763-3183006
  hypo
taaaagtgggattttgtgcaacgctggccctctgacatcttaatctttattaaagagacgtaaacttccacggatcgggcgggcctgcctggcacagccggacgccaggagagccgggcaggggtggcccaaggccggccgagcacccgtaatccaccagagaacaatgcgcgccggagccttttcgccccgagagcccctcgcacttacctcagtagacgcgaattaattctctccccctga

SEQ ID NO: 58807 - DNA, 22 bp, Homo sapiens
  chr1:3183542-3183564
  hypo
cgtgcattttagagccatctcc

SEQ ID NO: 58808 - DNA, 30 bp, Homo sapiens
  chr1:3183975-3184005
  hypo
tccctgaccggaggacgtgaggcttgtttg

SEQ ID NO: 58809 - DNA, 297 bp, Homo sapiens; identical to SEQ ID NO: 13903
  chr1:3184583-3184880
  hypo

SEQ ID NO: 58810 - DNA, 192 bp, Homo sapiens
  chr1:3193759-3193951
  hypo
gggctgagtgagactagtggacgtggccggccccatgcctctctgtgcacggctggatcttgcaaacagtcgagtcctggctgctgcgccacccggggatggcatcgtctgtcacacgcttcactctccctgtggcgcactggcatccaccatgcccacctcagaggccaggaggcacgtcagccgggaagg

SEQ ID NO: 58811 - DNA, 134 bp, Homo sapiens
  chr1:3194280-3194414
  hypo
gcacacacacacgcgcgcacacacgcacacgcacacacatgcacacacgcgcacacacacgcacacatatgcacacacaaacgcacagttgtgaacacgagcatatgcacatgcacacacgtgcacaggcacat

SEQ ID NO: 58812 - DNA, 236 bp, Homo sapiens; identical to SEQ ID NO: 13904
  chr1:3195355-3195591
  hypo

SEQ ID NO: 58813 - DNA, 30 bp, Homo sapiens
  chr1:3203753-3203783
  hypo
ggatgccctgagcgccgtaggagagctcca

SEQ ID NO: 58814 - DNA, 191 bp, Homo sapiens
  chr1:3204233-3204424
  hypo
caggattgcatttaccggggctggaaccgccccgccacgcggacatccaggattgcatttaccggggctggagctgcccctgccatgcgggcatcgaggattgcatttaccggggctggagccgccccctgccacgtgggcatccaggattgcatttaccgggactgcagccgccccgccacgcgggcatc

SEQ ID NO: 58815 - DNA, 565 bp, Homo sapiens
  chr1:3228680-3229245
  hypo
tcccccaccttcccacgtgtgaaatgggatgtgctgctgggtttaaatgagatctgactccaaagcacagagctcggcctggcccatctcgggccctcagtggacatccatggcgccgtcagcatcctcgccccactgggttattcccacgctcatcctctgaggaggagcagcccagcactcagcggcctgcaggctggcggggttggtagcagcagcctctcactgggccggtgacatgaggatcactgggacaggcacgggtgtggtgggaccacagggccccgagggcagcaggcagcccccagcctcctccgaggtctgtcctggaggctggccgcccacccgccggctgcacctcacagccgctcctccccagcctgctggtgtctgacgttggcatcccctctgtgggatacatcaggagcccatccggatccggggccggcaggtggggttcccgggatgggttgggagttcccagaagtccggtgaggggctttcggaaagggaccgtgcaccctcctgtgcagaacccggcctcggccaagctgcaggctctgac

SEQ ID NO: 58816 - DNA, 31 bp, Homo sapiens; identical to SEQ ID NO: 13906
  chr1:3233990-3234021
  hypo

SEQ ID NO: 58817 - DNA, 30 bp, Homo sapiens
  chr1:3275037-3275067
  hypo
cccagactcccagccgcggcttcggatgca

SEQ ID NO: 58818 - DNA, 30 bp, Homo sapiens
  chr1:3307162-3307192
  hypo
cgtggacaagagcccgcgcgggttgttcat

SEQ ID NO: 58819 - DNA, 30 bp, Homo sapiens; identical to SEQ ID NO: 13907
  chr1:3320797-3320827
  hypo

SEQ ID NO: 58820 - DNA, 1207 bp, Homo sapiens; identical to SEQ ID NO: 13908
  chr1:3321123-3322330
  hypo

SEQ ID NO: 58821 - DNA, 525 bp, Homo sapiens; identical to SEQ ID NO: 48
  chr1:3325225-3325750
  hypo

SEQ ID NO: 58822 - DNA, 308 bp, Homo sapiens; identical to SEQ ID NO: 13910
  chr1:3327629-3327937
  hypo

SEQ ID NO: 58823 - DNA, 739 bp, Homo sapiens
  chr1:3328527-3329266
  hypo
gaagctgaagaccaggagcagcgacatgtcggacggcagtgactttgaggacgtcaacaccaccacggggaccgacctggacacgaccacggggacgggctcggacctggacagcgacgtggacagcgaccctgacaaggacaagggcaagggcaagtccgccgagggccagcccaagtttgggggcggcttggcgcccccgggggccccgaacagcgtggccgaggtgcctgtcttctattcccagcactcattcttcccgccacccgacgagcagctgctgactgcaacgggcgccgccggggactccatcaaggccatcgcatccattgccgagaagtactttggccccggcttcatggggatgcaggagaagaagctgggctcgctcccctaccactcggcgttccccttccagttcctgcccaacttcccccactccctttaccccttcacggaccgagccctcgcccacaacttgctggtcaaggccgagccaaagtcaccccgggacgccctcaaggtgggcggccccagtgccgagtgcccctttgatctcaccaccaagcccaaagacgtgaagcccatcctgcccatgcccaagggcccctcggcccccgcatccggcgaggagcagccgctggacctgagcatcggcagccgggcccgtgccagccaaaacggcggcgggcgggagccccgcaagaaccacgtctatggggaacgcaagctgggcgcc

SEQ ID NO: 58824 - DNA, 30 bp, Homo sapiens
  chr1:3331065-3331095
  hypo
gtggctcggcggggcgggcggctcggtggg

SEQ ID NO: 58825 - DNA, 30 bp, Homo sapiens; identical to SEQ ID NO: 13912
  chr1:3342292-3342322
  hypo

SEQ ID NO: 58826 - DNA, 30 bp, Homo sapiens; identical to SEQ ID NO: 13913
  chr1:3342563-3342593
  hypo

SEQ ID NO: 58827 - DNA, 30 bp, Homo sapiens
  chr1:3343679-3343709
  hypo
acacagcagcagaacgatggtggaattcgg

SEQ ID NO: 58828 - DNA, 545 bp, Homo sapiens
  chr1:3351181-3351726
  hypo
aagtgtgcctgccctcgtgtgacatggaattggtgtcaggaccgccacgtggccttcagaggaatccacaggtccccacccaagatccctcaattatatggggaagtcgagggcctgtggcttggatccgccatgcagagatgtggccgggcacccatcttccttccctcctctgtccctgcctcggccaccccacgcgggaacccagcgccgtcctctgaaggcagggccttggccacgtcctgggtctcccacctcccacctgaccccagcggctccggtgtcctccacgtggctgccctggggagcaatcccagcggatcgctccgggccaccaagccgcacctgtgcctgagactccggatggacgacacagtcgtcacgtcgctcttcctgcgggttcttggcgagacacagcttgagaacagaagggcgtcgggggaacctgccgcaaggagcagagacagcacagccccccgggcccagccgcctccctctcttgggacgcaacttcttccccactcggatgggctttaaattattcc

SEQ ID NO: 58829 - DNA, 30 bp, Homo sapiens; identical to SEQ ID NO: 13915
  chr1:3352327-3352357
  hypo

SEQ ID NO: 58830 - DNA, 342 bp, Homo sapiens; identical to SEQ ID NO: 34930
  chr1:3370920-3371262
  hypo

SEQ ID NO: 58831 - DNA, 78 bp, Homo sapiens
  chr1:3373240-3373318
  hypo
gtctgtgtgtctgtcctacagcgggtgaacgggtggcaggagacctgtcacccacacgggcacctgtcagaggcaggc

SEQ ID NO: 58832 - DNA, 43 bp, Homo sapiens
  chr1:3373605-3373648
  hypo
actaccagcagtgtccccagacgttggcaaatgtgccctgggg

SEQ ID NO: 58833 - DNA, 64 bp, Homo sapiens
  chr1:3377101-3377165
  hypo
tcacatttagaataaaaggaccgcagggccgtagaccgcctacgctggccacccactggagtgt

SEQ ID NO: 58834 - DNA, 111 bp, Homo sapiens
  chr1:3378248-3378359
  hypo
gtagccacaacagccccgcaaagtgcctggaaacagacctctgggcccggctcctggaggccgtgtcggctgggggctctgcacatctcggtcacacggggtccaggccat

SEQ ID NO: 58835 - DNA, 366 bp, Homo sapiens
  chr1:3379760-3380126
  hypo
tccgtggctccccgcgtgttagagacgatgccgccttccagccccaggtcccggcacccccacagcctcggcccccggggcacgaggagccatggcccatcgtcctgagcacagagagcccggcggccctcaagctgggcacccaacagctgatccctaagagcctggctgtggccagcaaggcaaagaccccagcccgccaccagagcttcggggcggctgtacttagcagggaggccgcccggcgggaccctaagctcctcccagcccccagcttctccctggatgacatggacgtggacaaggaccccgggggcatgctgaggcggaacctgcggaaccaatcctaccgggcggccatgaagg

SEQ ID NO: 58836 - DNA, 31 bp, Homo sapiens
  chr1:3383744-3383775
  hypo
ccaggagatccaggagcggggcctgaacacc

SEQ ID NO: 58837 - DNA, 153 bp, Homo sapiens
  chr1:3384391-3384544
  hypo
ctgctcctaccccaggtggaccggcatgtgacccgcaccctgaggcccaagggaggggaccatgtggccgtgggcgtggcgggcagcggggagggcgggcccccacctgtggtacaatggggctccttgttcgccattcagaggggctggcac

SEQ ID NO: 58838 - DNA, 379 bp, Homo sapiens
  chr1:3385464-3385843
  hypo
gaccagctctccactgaggagcggaaaaggcaggaggtaaaagggccctgggcgggagggctgtcccccatggcctgggccatgcaacacccggggaggggcagcagccacggtggcaccacccagccatccctctgcggccacctccagtgccaggccctgtcacgctgaccagcgcctcacacagccccgggctgtgcttccacctgcgccaggccctgacggagccccttcacgtcaccgggtgaatcctcggagtccaggggctgccatcacccccttctctgacaaggacgggggtcgttgcccagcttcagccggctcataaggcacccagccaggggcatccagggacgtcgggctggcatctccaagctgg

SEQ ID NO: 58839 - DNA, 81 bp, Homo sapiens
  chr1:3387387-3387468
  hypo
gtgtgggcaggggtgtgtgtgcgtggacaggtgtgtgtgcgtgggcaggggtgtatgtgcgtgggtgtgtgtgcctggcca

SEQ ID NO: 58840 - DNA, 273 bp, Homo sapiens; identical to SEQ ID NO: 13920
  chr1:3389565-3389838
  hypo

SEQ ID NO: 58841 - DNA, 30 bp, Homo sapiens
  chr1:3393009-3393039
  hypo
gcctgaggacagagcggaggggacagggtg

SEQ ID NO: 58842 - DNA, 74 bp, Homo sapiens
  chr1:3393356-3393430
  hypo
caaccaagtaagggtgcggggtcccagctgggggagggggctcccggggtgggtcagggcgggctgcctggggc

SEQ ID NO: 58843 - DNA, 31 bp, Homo sapiens; identical to SEQ ID NO: 13922
  chr1:3393765-3393796
  hypo

SEQ ID NO: 58844 - DNA, 146 bp, Homo sapiens; identical to SEQ ID NO: 13923
  chr1:3408565-3408711
  hypo

SEQ ID NO: 58845 - DNA, 178 bp, Homo sapiens
  chr1:3411032-3411210
  hypo
caggcggctccgtagcgcccagggggacaggctggggacagggcagggtgggcagtccttcggcaccagccttgcccagccctatggcagcccagggcacctccctgaggggatgctggggtcccgctggccccgcacactcacccagctcgcagtgccgccccgtccagcccaggcc

SEQ ID NO: 58846 - DNA, 30 bp, Homo sapiens
  chr1:3411663-3411693
  hypo
aggcctgagaagtagcgtggctgggctgcc

SEQ ID NO: 58847 - DNA, 30 bp, Homo sapiens
  chr1:3413258-3413288
  hypo
gcaggcccccgtggccgcatcacaggagcc

SEQ ID NO: 58848 - DNA, 330 bp, Homo sapiens
  chr1:3413535-3413865
  hypo
cacgggcagcactcacgttgctggcagctggggccgtggtagccagcagcacatgagcaggtcccggtggcagggtggcaggccgggttctcaccgggacactggcacatctgcgcacagtcctccccaaagctgccgggtgggcaggctgggtggagacaggcagggtcggtcctggcccagccccgccaaggaacaggcagcctctctggattccccctgcccagccgctcctcggggtgggggcttgggagcacctaccctgctcgcagccggagccagtgaagccagggggacagcggcaggccccagtgacgtggtggcaggcag

SEQ ID NO: 58849 - DNA, 30 bp, Homo sapiens; identical to SEQ ID NO: 13924
  chr1:3416399-3416429
  hypo

SEQ ID NO: 58850 - DNA, 30 bp, Homo sapiens
  chr1:3421816-3421846
  hypo
cacactcgccgctcacggagtcacaggcca

SEQ ID NO: 58851 - DNA, 30 bp, Homo sapiens
  chr1:3422094-3422124
  hypo
cggcccaaaggcccacggcgggcaggctgc

SEQ ID NO: 58852 - DNA, 647 bp, Homo sapiens
  chr1:3435616-3436263
  hypo
cagcatggccaccaggcgtccagaaatggagcagggagggaaacgcccgccaccccccttccatggaccaggctaagctgaccccacaacccacaccccagcaaggcccccacccctggccagggccagatcatcctgcccagcgcccgcctttctgggtggtcagctcggcccatgcttggctgcagtggtccagacccactggccaaggtgacaggtgggtccctatagacaagtgctagcagtgccctattggcctaccaggggcaccgtgtgctttagggagtggcaggcagcagctggaccacacacatggaatgaaggaggccagacggcgggggccaacaggggcactcccaggtgggagctgcacggcgcaccatgggcacccaatgcccgcagtgcttgcaccgccacacgcgcctactcgctgctgagcgtcagctccgacctgccctcctgggggaggccccgacccagggctgcgtgagcatcacacgggttcagcttctccagagcgtttaggaaggcgccttacttgtcaccagagtcccgggagggcaggcctggtctatatcgacagggcagcaacccactgcctacgcagtgcccggctccagcacaccaggcggcggtcagagggcagc

SEQ ID NO: 58853 - DNA, 30 bp, Homo sapiens
  chr1:3436852-3436882
  hypo
ccaggtacacagaggcggaggcctccagcg

SEQ ID NO: 58854 - DNA, 524 bp, Homo sapiens; identical to SEQ ID NO: 34932
  chr1:3447460-3447984
  hypo

SEQ ID NO: 58855 - DNA, 161 bp, Homo sapiens
  chr1:3448900-3449061
  hypo
cgcacctatccttggtcgggggtcactgggctcccactcctagcctccatggagatggaagagctgtgaccagcaagctgtggtgctcaatgaccctcagcagtgatccctgcctgggaccagcccagcaccacctccagcactggcggtgagggtccaca

SEQ ID NO: 58856 - DNA, 31 bp, Homo sapiens
  chr1:3458047-3458078
  hypo
gctcatggagtgcaggcggacatgcgggcac

SEQ ID NO: 58857 - DNA, 30 bp, Homo sapiens
  chr1:3465366-3465396
  hypo
acagccacccaccccgaccctgctaggctc

SEQ ID NO: 58858 - DNA, 538 bp, Homo sapiens
  chr1:3467203-3467741
  hypo
cggggtgctccgtgccggatctggccccatgccaggggcctaactcagcagcagtgactgcaatgtcacaagtgcccagcagccacccaaccggggcagggctccgaagacccagcccttgcagccgatccagcaagcacaggctgcagagtgagaacccgaggggagcaagagggggcccacacccccaccgcccgtgcactcaccctgggggagccagtgtcccccgtgtgctagtccattggcaggagaccctaacgggtgtgacagtggggctctcagatcagccgccaggtgtggacagggccaggatccgaggctccagccggccagggctgggcagctgcctgtgtgccttggggcctcggagtgtgaggcaggtgaggaagaagatgtggatcccagctctgagagccgggcccgcgtggccatgtggccaggcagctccccgctagcgatgccagcctcctggcctataccaggccagatgccccacagatgtgaggctgccagacccagcccccgtggtggtgagaca

SEQ ID NO: 58859 - DNA, 196 bp, Homo sapiens
  chr1:3470762-3470958
  hypo
gcaggggcactaagacgacacctcaggaggagacggtgaggactctgggttccaacactgggctgggagcatcaaccagcgccccgaccaggcggctccgagagagtgtcgctgggggatggcaggaacactggaaaagccagcggggtctaacaaggggtggggacccagccgggccaggcgggagggggacggc

SEQ ID NO: 58860 - DNA, 24 bp, Homo sapiens
  chr1:3500460-3500484
  hypo
agacaacgcgcagccaccagacaa

SEQ ID NO: 58861 - DNA, 30 bp, Homo sapiens
  chr1:3503465-3503495
  hypo
ataggtgccaaggccgcaggtgcaccagag

SEQ ID NO: 58862 - DNA, 695 bp, Homo sapiens
  chr1:3548479-3549174
  hypo
ggagaaacccttaacaaaaggcgggctgcagtgtgcccagccctgctttctactcagcagagtggagcaagtgagcagggtggaggcctcctgactcatgcgcggacctgcggctgctgcaggacaaaggcccagcgcctccaaggagcttctgtgagcacctcggctactgcagaaacgtgaaaggaggtgacgtgtcggaaacccccaacttcattttcttttccagtcgcttctacacctggggccacaggacacagtaaagggtgagacagcacctgcgtcagcacaactgaccgttccttgtcgccaggaagtagctgtcaggactaaatgccagcattcctatgccgattttcgggtttgctctgtcggtaacaggtttcagtgtctgtaaggagactgggacagaggcgatctcatctagaacaccaacaggaagaacacgccattgtcaccctttcgggaagtacgcacgcggctgagaggctgctgtgcctgcatcgggcatcgcgaacccagctcctctgttcaaaggggaggaaagtgcggcccaagggcaggaagagctaagcaaagcctggcagccgcagcgaggggcctgcccgcaagtgccccggatgagagtggcaccatcacctgccaggcccgactaggtggggggtggaccccacgtgccaggggctgactggaga

SEQ ID NO: 58863 - DNA, 445 bp, Homo sapiens; identical to SEQ ID NO: 13929
  chr1:3552660-3553105
  hypo

SEQ ID NO: 58864 - DNA, 30 bp, Homo sapiens
  chr1:3553613-3553643
  hypo
cgccgttctgccagcgccatgtagcggccg

SEQ ID NO: 58865 - DNA, 31 bp, Homo sapiens; identical to SEQ ID NO: 13930
  chr1:3555533-3555564
  hypo

SEQ ID NO: 58866 - DNA, 252 bp, Homo sapiens
  chr1:3556468-3556720
  hypo
aagtggggccgcagcgtgtggggcacagcatgtccacagtgtcactcctgcaaacgctgccaggttgtcagtataggatattaacaaatgatttaatttaaatgtctacgcatcatctcttcttacaacagaaaagaaaatctgatgtctgtaattgtttctccaaacaacatatacagcgttcaggagagaagtcctgaacacacaggtagtggatcaacgagctccaggggtcacgtggcagcacggaag

SEQ ID NO: 58867 - DNA, 30 bp, Homo sapiens; identical to SEQ ID NO: 13931
  chr1:3557185-3557215
  hypo

SEQ ID NO: 58868 - DNA, 366 bp, Homo sapiens
  chr1:3559615-3559981
  hypo
agacggggacaacacgttcacagccacaccgtccgtggtgacgcacacgtccagcaggcgaggactgaatggcgttcctcacgaggaagggaaggcccagcgatgcctgtcaacacggaggagtctaaaagcagtgacggggaacagcaacagcagagactgcaaagtacaagcccctataaatcaactttacactgcacagcaagcaatgtggtgtttagacacatctgtacagtgagactcaagaacagtgaggatgtgattcacgcaagacgtggggcaaaggtgccctcaggtggggagggcattgctacgaggaagagaagggctctgaaagcgcggcagtgttccgctgcaggcctaggg

SEQ ID NO: 58869 - DNA, 30 bp, Homo sapiens
  chr1:3561809-3561839
  hypo
catctgcagccacacgctgggagaaatcct

SEQ ID NO: 58870 - DNA, 30 bp, Homo sapiens
  chr1:3562107-3562137
  hypo
gatgggcgggttaccgaggtgcagccagca

SEQ ID NO: 58871 - DNA, 89 bp, Homo sapiens; identical to SEQ ID NO: 13932
  chr1:3562355-3562444
  hypo

SEQ ID NO: 58872 - DNA, 97 bp, Homo sapiens; identical to SEQ ID NO: 55
  chr1:3567247-3567344
  hypo

SEQ ID NO: 58873 - DNA, 152 bp, Homo sapiens; identical to SEQ ID NO: 13934
  chr1:3576145-3576297
  hypo

SEQ ID NO: 58874 - DNA, 36 bp, Homo sapiens
  chr1:3607472-3607508
  hypo
ctgtacgtcggtgaccccgcacggcacctcgccacg

SEQ ID NO: 58875 - DNA, 31 bp, Homo sapiens
  chr1:3608741-3608772
  hypo
ggtgctcacgtgtgtccgtatgtgtgttgcg

SEQ ID NO: 58876 - DNA, 520 bp, Homo sapiens; identical to SEQ ID NO: 13935
  chr1:3615330-3615850
  hypo

SEQ ID NO: 58877 - DNA, 31 bp, Homo sapiens
  chr1:3617449-3617480
  hypo
aacagaacccatgcggcgggagggtgatgat

SEQ ID NO: 58878 - DNA, 31 bp, Homo sapiens
  chr1:3622263-3622294
  hypo
tgcccctccggcatcccgggctgagctgcct

SEQ ID NO: 58879 - DNA, 38 bp, Homo sapiens; identical to SEQ ID NO: 13936
  chr1:3622992-3623030
  hypo

SEQ ID NO: 58880 - DNA, 248 bp, Homo sapiens
  chr1:3623372-3623620
  hypo
tggtgtgtggtcctggcgggggagctgcgggtaggggcctaacgagagaaccccgggccagggggcagcaggggtgaggctttgccggcccctgagcgtggagcggcctttccagtcggggtgaggccgttcaccgagagatgaggccgcccaactgggaaaattgggctcagccattgaacagcagttccaccttatcccaccacctagagggccagacctagtgagagcccggatctggtctccag

SEQ ID NO: 58881 - DNA, 31 bp, Homo sapiens
  chr1:3638487-3638518
  hypo
gcacccatggggaggacgtggctcccaatgg

SEQ ID NO: 58882 - DNA, 298 bp, Homo sapiens
  chr1:3644518-3644816
  hypo
cctcagaggcctgggtggcaccgcaggtttgcccgtccctgtgggttgctcaccaccggacccacctggagaatcgattggccccaagggtggggcaggtctccctcctcccggaaggaggcctcaccctctggtcctgcctgctcaccccgcctgccctgcctggccttccagccttcaagcagagcccccctgccgtccccgcccttggtgccggtgtgaagaagcggcggcatggagacgaggacacgtactaccttcaggtgagtgtgtgctcctgcacggcagccgggagacc

SEQ ID NO: 58883 - DNA, 31 bp, Homo sapiens
  chr1:3650895-3650926
  hypo
cctgagccttggtggccgaaccttgaccgtc

SEQ ID NO: 58884 - DNA, 150 bp, Homo sapiens
  chr1:3651333-3651483
  hypo
ccacctccccgggggccgctgacagcacagtcgcctgggtgcacgcttgtgggggcagcaggaacggggctgtcggctctcaggggatctggctgcagccagggcgagggcctggcccttccttccagctccttccggctccttccagct

SEQ ID NO: 58885 - DNA, 212 bp, Homo sapiens
  chr1:3655596-3655808
  hypo
aggttcctcctgaaaacgtcacccacctttaagggttctgacaaagtgtctgaagagctctcgataggagtcctggtagcggctagcctgggtctgggagcgaagggacagggacatgccccgcccggtgatgcccaaggaattctgattctccatctgcagcacgccttgggacccacacacccagctaacgacctctatctaacctgcgg

SEQ ID NO: 58886 - DNA, 13 bp, Homo sapiens
  chr1:3659629-3659642
  hypo
ctctttagggaag

SEQ ID NO: 58887 - DNA, 46 bp, Homo sapiens; identical to SEQ ID NO: 13941
  chr1:3659671-3659717
  hypo

SEQ ID NO: 58888 - DNA, 481 bp, Homo sapiens; identical to SEQ ID NO: 56
  chr1:3663486-3663967
  hypo

SEQ ID NO: 58889 - DNA, 378 bp, Homo sapiens; identical to SEQ ID NO: 13943
  chr1:3680131-3680509
  hypo

SEQ ID NO: 58890 - DNA, 125 bp, Homo sapiens; identical to SEQ ID NO: 13944
  chr1:3684031-3684156
  hypo

SEQ ID NO: 58891 - DNA, 30 bp, Homo sapiens; identical to SEQ ID NO: 13945
  chr1:3686334-3686364
  hypo

SEQ ID NO: 58892 - DNA, 30 bp, Homo sapiens; identical to SEQ ID NO: 13946
  chr1:3687093-3687123
  hypo

SEQ ID NO: 58893 - DNA, 30 bp, Homo sapiens
  chr1:3695183-3695213
  hypo
agacacctgtgctgcgagttaaatacattt

SEQ ID NO: 58894 - DNA, 187 bp, Homo sapiens; identical to SEQ ID NO: 13947
  chr1:3695642-3695829
  hypo

SEQ ID NO: 58895 - DNA, 172 bp, Homo sapiens
  chr1:3696128-3696300
  hypo
attcacaacggaaacgtctacaacagaaggcgcccaggacccacctttctggcgcataaatgaagatttttggctcaaaaacctaagcatcctccagcttttgctaccatctgtccctcggctggctgaggactgccgatgcttcccaagcagaggcgtctggtccactcct

SEQ ID NO: 58896 - DNA, 153 bp, Homo sapiens; identical to SEQ ID NO: 13948
  chr1:3697564-3697717
  hypo

SEQ ID NO: 58897 - DNA, 737 bp, Homo sapiens
  chr1:3700348-3701085
  hypo
cttccacttccctcacgtcagggccatctagatgacagactggttccacaacgtctcctttggaaagagaatgctttctttgtaccctgttaagaagcttctgggttctggtagcattaggcggttcctgaggagcacagactaactcagctgaggccagcatgcggcactcccccgggcccggccccaccccaccaggcacgctgcccacctgtgcaggcccgacacactctgccgcttcttctgcttcctctgctcctcggcctccagctgcagctgccgcaccagctccttggccttggcttctttccgccccaaggggacaatctatcgggcagaaacccacaaactccactagggtcacagccacagaactcgcccatcgtgtcgattacggccttaagcctcaatgagccctcccgactcccgccctcattcatctctacagcaggcagggagcatcccacgggaccacgcagcaagaagctgcatgtgggctgccactgcagcgtcccggggagacctgacgcccaaacacaccgatcctactgaggcagggcttaaccttaaagccagctcatgcacaactgtttccagaggtctgccatcctcagaaggccaaaagaggagagaaaggctgagcagccgggacctcgtgcactccacagattcaacagcccaggacagcacgacacagcaactcaccctactgccaaccccacgcaaacggttttact

SEQ ID NO: 58898 - DNA, 358 bp, Homo sapiens
  chr1:3731492-3731850
  hypo
gaaccgctgctggccgagccacagccctgcggaaattctactgcgtgtggcagagaccgatgtgcaaaaggtttctggtgaatgttttatggaaattgctccaagcactaaggaaagcgggaccgtgcctgtgctgaccgtggccttgcgcgagcgcctcccggcggtgctctctggctctctccaaacaggacgcttccttctctgattctaaggaaggcctgagacagccctgaaggcttaatgtacagtgcggccaggtcctggcactgcacgcaggatctttggttagctgcatccatatcgtttgcacgagagctgacggcacagacgcgtaagaggcgtgcacggcggggag

SEQ ID NO: 58899 - DNA, 30 bp, Homo sapiens
  chr1:3732889-3732919
  hypo
gttcatcgtgcagccggctgggcccatcag

SEQ ID NO: 58900 - DNA, 30 bp, Homo sapiens
  chr1:3733299-3733329
  hypo
cgcgccaggcaccgcgggctccccgccagc

SEQ ID NO: 58901 - DNA, 46 bp, Homo sapiens; identical to SEQ ID NO: 13950
  chr1:3746111-3746157
  hypo

SEQ ID NO: 58902 - DNA, 30 bp, Homo sapiens
  chr1:3746496-3746526
  hypo
aaaataattcgaaccgccgtctcgcggacc

SEQ ID NO: 58903 - DNA, 30 bp, Homo sapiens
  chr1:3772519-3772549
  hypo
cgatgactccatggcggtctcatccctcac

SEQ ID NO: 58904 - DNA, 30 bp, Homo sapiens
  chr1:3781805-3781835
  hypo
tctcatatggtggatcgcactgatcgattt

SEQ ID NO: 58905 - DNA, 131 bp, Homo sapiens
  chr1:3786684-3786815
  hypo
gctggaagctgagatcaggtccgcactcccccgctgccttcccaggtgtccctgctgcaccgtgctaggcgtggtctggcctttagtggtgatgcatctgtgtctctggcgagtcctgggcacacccctcc

SEQ ID NO: 58906 - DNA, 30 bp, Homo sapiens
  chr1:3805943-3805973
  hypo
tcatcatgtatgtacgtgtataagaaagga

SEQ ID NO: 58907 - DNA, 126 bp, Homo sapiens; identical to SEQ ID NO: 59
  chr1:3817968-3818094
  hypo

SEQ ID NO: 58908 - DNA, 197 bp, Homo sapiens
  chr1:3818732-3818929
  hypo
agccaccgcgctcggcacactgttctgttcttaagaatttcaacatagaaatgaaatccagccttgccttaaaccctccagccctcaagttctctgggctctaggatgtgtgtcttcagaaaagggcgcagggtggaagccacatcagaggccgaggacacctggcccctcccctctccgcccgcaggtggctgcgc

SEQ ID NO: 58909 - DNA, 30 bp, Homo sapiens; identical to SEQ ID NO: 13953
  chr1:4004031-4004061
  hypo

SEQ ID NO: 58910 - DNA, 30 bp, Homo sapiens; identical to SEQ ID NO: 13954
  chr1:4004393-4004423
  hypo

SEQ ID NO: 58911 - DNA, 256 bp, Homo sapiens
  chr1:4037032-4037288
  hypo
tggcaaagcagaaaggtgtgacgtcttggaggacgcgggaggaaagcacgcccagcggacaggagccatcacgcggctgcgggctgctgctgagaacctggcgtgggccaccgtcgtcagcagcgtggaggtaactgacgaccttggccaagaagttgggtggcagcgtggaggtcatgctcagagtgagtgggcgcaagagacggtggcgggagagggagtggagatcataggcgtggatggctcttatgagcct

SEQ ID NO: 58912 - DNA, 284 bp, Homo sapiens
  chr1:4057084-4057368
  hypo
agggcccttgactgtcatgcacgttcctgggccccaccctagatttgggacacagcgatggtgtaggatggagtgatggcacggcatggagccatggtgtgggacaaagcaatggagcgggactgagcgatggtttgggatggagcaatggtgtgggagggagcgatgttgtggcatggagcgatgttgctgcaggtagtgatggtgcgggatggagtgatgatgtgggatggagtgatggtgcgggatggagtgattctatcgatggagtgatggtgtggggt

SEQ ID NO: 58913 - DNA, 37 bp, Homo sapiens
  chr1:4212156-4212193
  hypo
cggccccccagccttcgattttcttctgagtctggct

SEQ ID NO: 58914 - DNA, 203 bp, Homo sapiens
  chr1:4359784-4359987
  hypo
gtttctgtctacacatcgggtggagggggaaaggctgatggatggagttgggggagagtggggcgaggccaggtcagggagtccaagtgggccctgcctggggtgaaacttgcacccttctcctggaagagtcagcgcggctcatcctgtcccttcctccttccctcttccagaaatatggctttgcccgaggttcatggcgg

SEQ ID NO: 58915 - DNA, 125 bp, Homo sapiens
  chr1:4460853-4460978
  hypo
gtattcttctcccaccgccctcggctgaactctccttggcgtctggacgtccttccccatccctctttctctgccatgttgttccgttgtcactcgcctgctggttctgacgttcagccgtttgt

SEQ ID NO: 58916 - DNA, 31 bp, Homo sapiens
  chr1:4531276-4531307
  hypo
acacagtacacacagacgcacatgcaaatgc

SEQ ID NO: 58917 - DNA, 85 bp, Homo sapiens
  chr1:4659112-4659197
  hypo
cataaacctcactcaaaggaacggcagtcccacgggaacgcaaggccctccgggtggctgagtcagtatgctctgtgagaattgc

SEQ ID NO: 58918 - DNA, 24 bp, Homo sapiens
  chr1:4659496-4659520
  hypo
tccgtctcaaaaaaaaaagaaaaa

SEQ ID NO: 58919 - DNA, 168 bp, Homo sapiens
  chr1:4673891-4674059
  hypo
ctgcctcactccataagctcacgggcaagcctccccatgaagagacgatccaggtgcgacacaggaggtgcaaacacagcgacatgcattcccgcgtttaaaacacatgctccgccgggcatgcggacgagagcatctgcctggctcgggtgtggcagaggggcagga

SEQ ID NO: 58920 - DNA, 284 bp, Homo sapiens
  chr1:4675280-4675564
  hypo
tcccagaaatcgtaccgagagcagaccaggcggccctgccagccggcacctgccccgcctccacaccccacacctggctgcgcgggagccactcagaggctgttttgattggctcatttcagcggagctcattatttttacagggaacaatttctaaccattttccttgtctctcagggcggttgctactagctgagttactcgggccgttataaatacattatcagacacattcaacaagcgatcgcaggtaaaaataatccctgcagcgctggcagtgtgga

SEQ ID NO: 58921 - DNA, 54 bp, Homo sapiens
  chr1:4696906-4696960
  hypo
tggagagcctctggtgctgtgcggaggatctgcgtcctatcagagcaacaggga

SEQ ID NO: 58922 - DNA, 112 bp, Homo sapiens; identical to SEQ ID NO: 61
  chr1:4715427-4715539
  hypo

SEQ ID NO: 58923 - DNA, 1090 bp, Homo sapiens; identical to SEQ ID NO: 34957
  chr1:4715574-4716664
  hypo

SEQ ID NO: 58924 - DNA, 32 bp, Homo sapiens
  chr1:4726742-4726774
  hypo
agaggcccaagaatcgcgggaggggtgcggag

SEQ ID NO: 58925 - DNA, 27 bp, Homo sapiens
  chr1:5162486-5162513
  hypo
aaggattaatataccacctcccgggtt

SEQ ID NO: 58926 - DNA, 358 bp, Homo sapiens; identical to SEQ ID NO: 34960
  chr1:5772042-5772400
  hypo

SEQ ID NO: 58927 - DNA, 30 bp, Homo sapiens
  chr1:5919066-5919096
  hypo
tggggtggtggccacgttaccaaagcacct

SEQ ID NO: 58928 - DNA, 145 bp, Homo sapiens
  chr1:5922671-5922816
  hypo
tacccgactgctgccgtctcagagccggggtctcagcccccacccagggcaggcttgagcggcctctccatgaggacacatggcatgggctgcctgaccggcccccaccatgtctcctcaaggagaaaccgggcttgtgctgtag

SEQ ID NO: 58929 - DNA, 31 bp, Homo sapiens; identical to SEQ ID NO: 13959
  chr1:5923674-5923705
  hypo

SEQ ID NO: 58930 - DNA, 30 bp, Homo sapiens
  chr1:5927541-5927571
  hypo
ctggacctgggccgcgggagctgggatttt

SEQ ID NO: 58931 - DNA, 52 bp, Homo sapiens
  chr1:5927905-5927957
  hypo
agtcaggcagagcacggcgatgggcttgccaccactcgctcggaacaagacc

SEQ ID NO: 58932 - DNA, 31 bp, Homo sapiens; identical to SEQ ID NO: 13961
  chr1:5928199-5928230
  hypo

SEQ ID NO: 58933 - DNA, 31 bp, Homo sapiens; identical to SEQ ID NO: 13962
  chr1:5933171-5933202
  hypo

SEQ ID NO: 58934 - DNA, 70 bp, Homo sapiens; identical to SEQ ID NO: 13963
  chr1:5935553-5935623
  hypo

SEQ ID NO: 58935 - DNA, 530 bp, Homo sapiens
  chr1:5940498-5941028
  hypo
gtcttcattctcctgccgtgtcagtggcagcctccgtttcctggtgacgaatgaaagcgtgtggcactcacagttcgctgcacatggattcttacttctggatctctgggtcgcaaggcgggctgcctcacaaactctaacctcggcctctcgatggccacattgatcaaggataggcctgtgtgcatttacacgtgcaaatgtctggctccacacacacccagggtgaaagagcccccataaactggagccttcaccagagttgtgttcataacagaaggctttggcaagcaagtggtgtggcctcgggacaagcgtgtctcacggccggtgggtgtggcaccctacaaacttgcaacttgcaaacctgagtgtcctgggggaagccgtgcttgcccacggcacactctcctgcaaggatgggacccacaacctcggtgtggcctttacttccccaaggggcgaggcagagcaccgccaacgaagctgtgtcccaaaatgaaccacccagggtacgcacaaaatgcttg

SEQ ID NO: 58936 - DNA, 200 bp, Homo sapiens
  chr1:5941340-5941540
  hypo
gtgagccatatcctccgtccaacccaggttctcctggtgacaaaaccagagctggctgacggaggtgtctctctagaatgggtctgagctgaggctggaaagggagtgcccgtcctaccaagggagccaggcaggtctccgagctgctctacctgagttcagcccctctacatcccagggaacagcgcctggattttgga

SEQ ID NO: 58937 - DNA, 467 bp, Homo sapiens; identical to SEQ ID NO: 13966
  chr1:5942315-5942782
  hypo

SEQ ID NO: 58938 - DNA, 245 bp, Homo sapiens
  chr1:5943158-5943403
  hypo
cactacaaagaagccacgatcagggtcctcaaagacttcccagattcatgtgggaaaatggcagacaaacaagcaggctggggcgaggaagggacggcagcctgaaccagcccagcctgcctgtgccagggccagagctgcgggcaccagcactgatgttcacactccgggccacgctgccctccacatgacgaggagaaaatgccaccgatgttcacgctccgggccacgctgccctccacatg

SEQ ID NO: 58939 - DNA, 44 bp, Homo sapiens; identical to SEQ ID NO: 13968
  chr1:5944298-5944342
  hypo

SEQ ID NO: 58940 - DNA, 128 bp, Homo sapiens
  chr1:5947371-5947499
  hypo
cggcccttcaccaccgagtggacgccgatgggcttgacgcggccaaaccccagcatgtctccactcaccaccatgttgtcctgctcgtattcagttgccacgacctcaagctcgtgggaggcctgcac

SEQ ID NO: 58941 - DNA, 78 bp, Homo sapiens; identical to SEQ ID NO: 13969
  chr1:5950964-5951042
  hypo

SEQ ID NO: 58942 - DNA, 30 bp, Homo sapiens
  chr1:5958128-5958158
  hypo
atggagatgcctctcggctgggacagccca

SEQ ID NO: 58943 - DNA, 146 bp, Homo sapiens; identical to SEQ ID NO: 13970
  chr1:5958566-5958712
  hypo

SEQ ID NO: 58944 - DNA, 30 bp, Homo sapiens
  chr1:5966288-5966318
  hypo
gagcccctggctggcgtgtttggacagtct

SEQ ID NO: 58945 - DNA, 30 bp, Homo sapiens; identical to SEQ ID NO: 13971
  chr1:5994331-5994361
  hypo

SEQ ID NO: 58946 - DNA, 31 bp, Homo sapiens; identical to SEQ ID NO: 13972
  chr1:6005139-6005170
  hypo

SEQ ID NO: 58947 - DNA, 31 bp, Homo sapiens; identical to SEQ ID NO: 13973
  chr1:6013728-6013759
  hypo

SEQ ID NO: 58948 - DNA, 254 bp, Homo sapiens; identical to SEQ ID NO: 13974
  chr1:6046165-6046419
  hypo

SEQ ID NO: 58949 - DNA, 549 bp, Homo sapiens; identical to SEQ ID NO: 34964
  chr1:6052411-6052960
  hypo

SEQ ID NO: 58950 - DNA, 30 bp, Homo sapiens; identical to SEQ ID NO: 34965
  chr1:6053300-6053330
  hypo

SEQ ID NO: 58951 - DNA, 68 bp, Homo sapiens; identical to SEQ ID NO: 34966
  chr1:6053624-6053692
  hypo

SEQ ID NO: 58952 - DNA, 30 bp, Homo sapiens
  chr1:6056507-6056537
  hypo
cccctgctggccagcgtctcaggaggctac

SEQ ID NO: 58953 - DNA, 300 bp, Homo sapiens
  chr1:6076557-6076857
  hypo
caagtactgaatttgatgaggcgttttcacgaggcctgtgtgaaacacttaaaaattgtgcataacatgtgactggacaggcgtctaccagaaaacagtgcaaggagcttttaagccatgaggtttgcatctgtaggaaggctttggggtgctgctcacacgcggtgtgactcgggcggggcaggcagtagacggcagcggtgacactgcagtgacgctatggagcatggacactaatacgtcccactggacttctgcgtgggccccagacaggagcttgaccagcgtcaactggacctg

SEQ ID NO: 58954 - DNA, 69 bp, Homo sapiens
  chr1:6111617-6111686
  hypo
gagagtctgcggagcgtgagcagcaggtgccactctgaatgggccctgcaccccgtccgccagacggac

SEQ ID NO: 58955 - DNA, 149 bp, Homo sapiens; identical to SEQ ID NO: 13975
  chr1:6129707-6129856
  hypo

SEQ ID NO: 58956 - DNA, 188 bp, Homo sapiens
  chr1:6131661-6131849
  hypo
gggaatcgatgtcacgacaagcaaggcgcctgctgcgtagggcacctgccgcttaggactcctgccaccgcgtagggctctgctgcgtaggactcctgccgccgcatagggctctgctgcgtaggactcctgcggcgagggctccctcctgccgcgtgggctcctcctgccgcgtgggctcctcctgc

SEQ ID NO: 58957 - DNA, 30 bp, Homo sapiens
  chr1:6132170-6132200
  hypo
tgcctcagtggccccgggaaggagcccggg

SEQ ID NO: 58958 - DNA, 84 bp, Homo sapiens; identical to SEQ ID NO: 34968
  chr1:6137222-6137306
  hypo

SEQ ID NO: 58959 - DNA, 188 bp, Homo sapiens
  chr1:6149054-6149242
  hypo
gcctgttttccagggcggagacggagcggggcctgtccaggaagcacataatcgaaggtgaggacgcgctcgggcacctcagggcccccatacctgtgggatcatcctcggaggccaaagtgatggcagcacagggcccgacccccccagttaacccactgagggcccaatcccggggcacccggtgc

SEQ ID NO: 58960 - DNA, 30 bp, Homo sapiens
  chr1:6149501-6149531
  hypo
ccggggctcagcactcgcaggcaccggagc

SEQ ID NO: 58961 - DNA, 30 bp, Homo sapiens
  chr1:6153058-6153088
  hypo
gggcactcagggagcgacccccaaaacaga

SEQ ID NO: 58962 - DNA, 395 bp, Homo sapiens
  chr1:6171633-6172028
  hypo
agagacacataaggaagaagccgggatgacagcggcggggagcgggcgacacagcaatgccgaggatttctagccaccgccagaagtgaggaagattgaggaagaacgaggaaggcttcccccggagctctcagagggctctccccgaggtccacggaggaacgggcaagtccctgcccagcccggcctggccaaggatacgtcacgatgcccgccagcagccagtagtcatggcgccggtgccagatgtcgtagattttcccagaggatacagcagcccgctcctcgttctgccacagcgtgtgcaactctgggaaacaagccaaggtgagcagggtgagaagtgccccagctctcacgcacaggcaggcttggagagccgctccctccctact

SEQ ID NO: 58963 - DNA, 30 bp, Homo sapiens
  chr1:6188711-6188741
  hypo
ggctgcagggttggcgggcagtgcccagag

SEQ ID NO: 58964 - DNA, 109 bp, Homo sapiens
  chr1:6189025-6189134
  hypo
cgcttggccacctgcgtgatgcgctcctccaccgaggcccgagtcacgaagcggtagatcatcaccttcttgttctggccgatgcggtgggcgcggctgaaggcctggg

SEQ ID NO: 58965 - DNA, 31 bp, Homo sapiens
  chr1:6195513-6195544
  hypo
gaggcagggtgcagagcgcctagcccatgta

SEQ ID NO: 58966 - DNA, 65 bp, Homo sapiens
  chr1:6243322-6243387
  hypo
cacctgctgcaccaagactttcgttgcacttgaaggctttttccgaaagtgtggaccctgcacca

SEQ ID NO: 58967 - DNA, 30 bp, Homo sapiens
  chr1:6260601-6260631
  hypo
ctcaggcctcaagccggttgaccaagctcc

SEQ ID NO: 58968 - DNA, 30 bp, Homo sapiens
  chr1:6262605-6262635
  hypo
tgtggtcctcagctcgagcccctcccaact

SEQ ID NO: 58969 - DNA, 30 bp, Homo sapiens
  chr1:6270948-6270978
  hypo
agggcatcgtcacgcggccgcaccacctaa

SEQ ID NO: 58970 - DNA, 30 bp, Homo sapiens
  chr1:6272040-6272070
  hypo
caaggtgctgctggcggagggcgagaacac

SEQ ID NO: 58971 - DNA, 330 bp, Homo sapiens
  chr1:6278214-6278544
  hypo
ttgaggagcaaaagaatgaaacgctaggtgggtgcatgagtggtggcagagtctggttctgaggtttctgagcttaaggccgtgcagcagctggctctgctcccttgagattctggtgcccactcccttgccaggtttcaggcacccgtggatgagcagtcagagagtctacagaacacgcacgacgacagcaggaacaacgcggcctcagccaggtaaagcaagtctctccactggagagtgtgcacgcgatgtggcttctgaggccaacaggacgacaaaggaaactccaggcttttcccctttggcgccagctctggggccctggct

SEQ ID NO: 58972 - DNA, 572 bp, Homo sapiens
  chr1:6280173-6280745
  hypo
ggtaatcatttgtcaagagtaaaacccagaagctctgacaggccataatttcagatcctttggcttgggcagttttgattttccccgtgtttgcatggcatgaagtcttcgtccttgtcacagtagcttgggatgactcccagtccacatggaaaacatcagggagtgacaatccagcaagaaatccctcgctagttccacacctacgcaccgagcgtcggtgtgccaggccctgtgctgggcagagtgtggtatgtcagggtgtgccggttttaggtaacaagactccaccactgagtggcacctgccctattgcaaaggaatccagttcctccggaataacagtcccactgttaacctggtgctactgggaagttccacacagtaatctgagcagtgactcatggaaggatgaggaacgtttgctccagcttctctccctttccagcaagggcagagctcctaaagccaggggttagcacctggccagcttatgtggcagatggtctcagttacaacttcgctgctttcccaaactcctgcagccctcctgagtccgacttccgttgata

SEQ ID NO: 58973 - DNA, 260 bp, Homo sapiens
  chr1:6281661-6281921
  hypo
cttacaaagcctgatcggctaacgcagcttcctggtttaggaacattttccccggtcgtatcaatcccccaggttggtaaatgaacagaagggatgaataaagcctactttttaggctcaaggagcagctcgtgaaggggtggcaggtgcgctgctgccttgttttctgtcctgctaagaggctcaccccgcgacctcttctgtaaactgccactcagcagcggcctgcaagccctcacgaaaggcttcactctatgctg

SEQ ID NO: 58974 - DNA, 30 bp, Homo sapiens
  chr1:6284371-6284401
  hypo
aggagctgagacccccgggaaagccagcca

SEQ ID NO: 58975 - DNA, 189 bp, Homo sapiens
  chr1:6284775-6284964
  hypo
gacagagtccatctctcccagcgagtcctggttatcctttacttacactctggcctcgggggcagtggcgtgtggcctcggtcctccccaggtaactctggagggcgctgtggaatattgctgtgatttgccccttactcgtctttcacccatgttccgccttgattcggcataaggacagactgctcc

SEQ ID NO: 58976 - DNA, 38 bp, Homo sapiens; identical to SEQ ID NO: 69
  chr1:6296162-6296200
  hypo

SEQ ID NO: 58977 - DNA, 23 bp, Homo sapiens
  chr1:6296850-6296873
  hypo
tttttttttgagacggagtctcg

SEQ ID NO: 58978 - DNA, 37 bp, Homo sapiens
  chr1:6297112-6297149
  hypo
agacgtgagccaccgcgccctgcctatattaggtttt

SEQ ID NO: 58979 - DNA, 203 bp, Homo sapiens
  chr1:6313882-6314085
  hypo
gcgccgcttgccctgcgcgtcctccaccacgatggtgggcacggtgaaggcgcggcggtcggcctggcgccccacctgcacggccagcgtctggaagagggcgatggctgtgcagatcacgcccatggccacgctgccgcccaccagcagcaggaagcagacgccaaagcccaggccgatctcagccacgatgaagcggcagc

SEQ ID NO: 58980 - DNA, 216 bp, Homo sapiens; identical to SEQ ID NO: 71
  chr1:6321177-6321393
  hypo

SEQ ID NO: 58981 - DNA, 30 bp, Homo sapiens; identical to SEQ ID NO: 13984
  chr1:6328812-6328842
  hypo

SEQ ID NO: 58982 - DNA, 156 bp, Homo sapiens
  chr1:6332029-6332185
  hypo
ggagtgccgtggtcccgggacgctcggctcacagctcttgtgccggagtgtggacatggcggtccccaccctacaacaccaataatgatcatagctgtcacctgctgagtgcccactgtgggctaggcctgggccagaagccgcgtgctcatggca

SEQ ID NO: 58983 - DNA, 256 bp, Homo sapiens
  chr1:6333298-6333554
  hypo
tgggctcaggcagagggaaggcgagagccaggctggaggggagggctacatgctctcatctgcgccaacctccttctcagcacccatgctcgggttctaggcacatgggactcactggccaccggatgttcctaagcgctaaccaatgaggcgacaggggcagcttcaggatgcaggtattttcccatcacaagactgactcccgctaaatgcaggcaaaaggaacagagagcacgacactggattctgagcctca

SEQ ID NO: 58984 - DNA, 404 bp, Homo sapiens; identical to SEQ ID NO: 13986
  chr1:6333774-6334178
  hypo

SEQ ID NO: 58985 - DNA, 179 bp, Homo sapiens
  chr1:6334535-6334714
  hypo
tgccacgctgtcctctcggctggcgcggggcttacccggcccctgcactcatgcaggtgaaccagctgaggccaggagaaggaggtcatagggcagcagcagaagcgaggtgggcaccatgttccagagccttctgaaagttgtgtgggtctgtgctgaggccacgcctcacataaggc

SEQ ID NO: 58986 - DNA, 248 bp, Homo sapiens
  chr1:6338579-6338827
  hypo
gagcagcacagaggcggagagggatttttttgcgggtgtgataatgagttccattcaggacaaactgtatttgtgatgcttttgggaaccctgttgaggggcagcactggccaagtcaatttgggagtcaatacaacacacaggcgatgctcgaggcacagaccatggatctgaccaccccaggagagaagggccacaggttaggacatgtcaaagccaagggttcggggaccgtgtggtggccgggg

SEQ ID NO: 58987 - DNA, 86 bp, Homo sapiens
  chr1:6340039-6340125
  hypo
gagatttcagtgcacgctcctctccgggaggctgagcagcaaatgcttgcggatctgcgtggggagcagacgccgcgggggcaggg

SEQ ID NO: 58988 - DNA, 31 bp, Homo sapiens; identical to SEQ ID NO: 13989
  chr1:6342819-6342850
  hypo

SEQ ID NO: 58989 - DNA, 331 bp, Homo sapiens
  chr1:6345507-6345838
  hypo
cagtcacgtgctggccgtcacctgcccacggggcagcacagactgattccgcccttcctgctaattcctccatggcgcagccatgtgctgtcattcctcccactgggtcagagcctggaccatccaggctgccggccaaatcatgaccatgcccacaggtccctccaccaaatgtggaggcgggtgaggctggtcatgcatcagagagctgaagacagcgtgtccaggtggctctcgggagccctgaacctgacaggaaaggcagaggcagggcccgacaagcactgcctgcagacctggcgtgtcacacggaggtcaggatgcttcaggg

SEQ ID NO: 58990 - DNA, 44 bp, Homo sapiens; identical to SEQ ID NO: 13991
  chr1:6347168-6347212
  hypo

SEQ ID NO: 58991 - DNA, 84 bp, Homo sapiens
  chr1:6360870-6360954
  hypo
gcgcggccggtccctctccacaaacacagaatgaccaacaccgggtctcactggacaacacccgatgaggcagcagcctccctg

SEQ ID NO: 58992 - DNA, 255 bp, Homo sapiens
  chr1:6361804-6362059
  hypo
tgagggcaggaaaagctcatccggtcccagaaaccccaaagccaggtgagcttgatgaccggccaaaaaaccaagcccacactcaaaatgatcttgctgtgtgagctggacggtgacatttacagggacagcctcctccagccccagcagccagcacacacgcaccggcctgggaaaccacgcagagtttagatcagcggcagacctgctatgaaacaacaactttatactaacgatggaaaaggccaagactgg

SEQ ID NO: 58993 - DNA, 36 bp, Homo sapiens
  chr1:6363865-6363901
  hypo
ttcactaagtggttcccggacgtctgggagcatcat

SEQ ID NO: 58994 - DNA, 30 bp, Homo sapiens
  chr1:6366575-6366605
  hypo
agcatcaggatggacgtgaagctgttcttc

SEQ ID NO: 58995 - DNA, 31 bp, Homo sapiens
  chr1:6379971-6380002
  hypo
ggccctgggtctgaaacgcctcccacttgat

SEQ ID NO: 58996 - DNA, 139 bp, Homo sapiens; identical to SEQ ID NO: 13993
  chr1:6382125-6382264
  hypo

SEQ ID NO: 58997 - DNA, 25 bp, Homo sapiens
  chr1:6385168-6385193
  hypo
gatatctcagccgggcgcagtggct

SEQ ID NO: 58998 - DNA, 30 bp, Homo sapiens
  chr1:6385896-6385926
  hypo
gccataacaatgccccgagtccaggttagc

SEQ ID NO: 58999 - DNA, 66 bp, Homo sapiens
  chr1:6397254-6397320
  hypo
aggaggaggagaaggccgagggctgtggtggccaggacacagctgggaggccgagaagctcccagc

SEQ ID NO: 59000 - DNA, 122 bp, Homo sapiens; identical to SEQ ID NO: 13994
  chr1:6405657-6405779
  hypo

SEQ ID NO: 59001 - DNA, 180 bp, Homo sapiens
  chr1:6409752-6409932
  hypo
tgaactcacactggtgcggcctccagggcccagaggtatggggcccagacccttaccccgttctggctgttgcaatgccgggtgctgatgatggcgcctgcctcctcgatcatcttcaggatggtccccccgtggacattgccggccacgttggcatcatctggccgcatgatcctaggg

SEQ ID NO: 59002 - DNA, 142 bp, Homo sapiens
  chr1:6434928-6435070
  hypo
aagtttggcatctgctgaaaacgatggcttcccctgttcatcctgatcagttacatggctgaagttcccactttattgatttaaagatttcagctctgagaaagacactgttaagataatggagacaggccgggcgcggtgg

SEQ ID NO: 59003 - DNA, 53 bp, Homo sapiens
  chr1:6445424-6445477
  hypo
agctcatccaacacccgaccctactaccctccccaaaactcctccaagttatg

SEQ ID NO: 59004 - DNA, 205 bp, Homo sapiens
  chr1:6445510-6445715
  hypo
caagtgagacaccatgggcacaaaatattcccagtcatcctaccttccagtaatgcaggctccacagggtgggagatcagccctgggcccaaccacctggacgggagcgcagcaccctcgccggggccccacacatccctggccagccaccagcctcctggaagatgcctgcctcccaaactcacagagccggagagccctggca

SEQ ID NO: 59005 - DNA, 230 bp, Homo sapiens
  chr1:6446078-6446308
  hypo
ccaggaccttaaacctcgcaccactcaggctggccctcaggcaagtagaagaatgagttccacctgggcggagttccacctgggcagagaggtcttggctcacaggcaccgggagagctggaaggctgcggggaagccgaggaaggccaacacaccgcacaacacggcaggtgcctggccctcctctgacagtggccctcaagctccaggagggccgaggaaaatgcaga

SEQ ID NO: 59006 - DNA, 407 bp, Homo sapiens; identical to SEQ ID NO: 34989
  chr1:6484869-6485276
  hypo

SEQ ID NO: 59007 - DNA, 329 bp, Homo sapiens
  chr1:6486767-6487096
  hypo
gccaataggaagggagcgcctttctcaggagctggggcttaggtcacatttcaccatggttctgcctgggtgcccgctagccagccccgacctttgggctcggaggggacagactgaaccagtctctggcccccccactcccagctttctagcacacaggaggggcctcggtgttgtcctcagcttcctatgggccatcacattctctgccccatcttcctccctgcctccttagcaggacagccagacaattgcccccaccccgcaggctgcctgaagaccctactagtggccccggcgcccccagctccctccgtgccctcttttcc

SEQ ID NO: 59008 - DNA, 56 bp, Homo sapiens
  chr1:6504648-6504704
  hypo
aactttgacctcagctcgcctaccagcaccctctccaactacgactcctgctcctc

SEQ ID NO: 59009 - DNA, 1589 bp, Homo sapiens; identical to SEQ ID NO: 34991
  chr1:6507490-6509079
  hypo

SEQ ID NO: 59010 - DNA, 116 bp, Homo sapiens
  chr1:6527794-6527910
  hypo
accctccccaaatgcgatgctcccaggcatgagtgggcccccatgccagtgccctgagccacctgccctaccccagtccaggccactcacgaggcagtgagcgtggagttaagcag

SEQ ID NO: 59011 - DNA, 243 bp, Homo sapiens; identical to SEQ ID NO: 14001
  chr1:6528246-6528489
  hypo

SEQ ID NO: 59012 - DNA, 31 bp, Homo sapiens; identical to SEQ ID NO: 14002
  chr1:6528938-6528969
  hypo

SEQ ID NO: 59013 - DNA, 369 bp, Homo sapiens
  chr1:6530600-6530969
  hypo
cgtaggcgtcgatgcggctcaccacggccgccagccgctgccgctcctgccgctgccgcatgcacgcgttcacgtggtggatgaagcgctccacggagccgatctaggggcaggtgagggagcttcaggtccagggtcatgacggagcagagagccgcgcaggggggacggctcccgctggccatcagggttaccatggcgacgacggcctccttggcgcgcggctcctcggtcttcctcagcaccgacttgagcagcagcgggtacttggtgagccgctggtggggtttggccagcatgtcgctcagcttcagcctctggcactgtgggtgcttctccgcccactgcggtgggggagtgggggcgggc

SEQ ID NO: 59014 - DNA, 30 bp, Homo sapiens
  chr1:6534130-6534160
  hypo
ccggtcccagctggccgcagaatcggcaaa

SEQ ID NO: 59015 - DNA, 103 bp, Homo sapiens
  chr1:6534778-6534881
  hypo
ccgcatgggatcacacgcaggtccacagacacctgcccgcagaggtgctcacacaggcgcatctgcataccacggcagacctgtcacacgcctgcccacacgc

SEQ ID NO: 59016 - DNA, 289 bp, Homo sapiens
  chr1:6537438-6537727
  hypo
aacatttggaacaaaaggaaccgtaacatactcgggtttcattatttacagtcgacttgtccttatgacgccctagcacgtttccgacagttactgaaacactgacacaggagctctgggggccgagctgcggctcccgcctgtgctcaccttgtgggggaaggtcgaagcggacatgcccatcataatgcatggtgctgtggaacttgctgtcacaggcctcgcagaggttgaggggcccccggcggtgcagctgctggcagtcggcgtggtgacatacctggggtgg

SEQ ID NO: 59017 - DNA, 31 bp, Homo sapiens
  chr1:6540612-6540643
  hypo
tggtgatgtgagcttgcggtcctaagagctt

SEQ ID NO: 59018 - DNA, 31 bp, Homo sapiens; identical to SEQ ID NO: 14004
  chr1:6547667-6547698
  hypo

SEQ ID NO: 59019 - DNA, 161 bp, Homo sapiens
  chr1:6562948-6563109
  hypo
gctgtgtgcagccccccggcgcctctctgccggccccggggagagctggggcaggcacacacgggtgaacaggtctcagttctggtgctcaggctgagggtgtgcatggtgcatctgggtgccaccacttgggatctcaaaggcctcgccacacctcacca

SEQ ID NO: 59020 - DNA, 74 bp, Homo sapiens
  chr1:6565118-6565192
  hypo
ggccagctcctgggcccgaggatgaggctaatggagaagagaacccaggcccaggccccggccccagacagttc

SEQ ID NO: 59021 - DNA, 30 bp, Homo sapiens
  chr1:6566322-6566352
  hypo
actggggctggcctcggctggcaggcgctc

SEQ ID NO: 59022 - DNA, 31 bp, Homo sapiens
  chr1:6569032-6569063
  hypo
cctcacccacctgtagcgcctctcgaagtca

SEQ ID NO: 59023 - DNA, 31 bp, Homo sapiens
  chr1:6572210-6572241
  hypo
ggagacctgcccatgtcgctcggaaggggtt

SEQ ID NO: 59024 - DNA, 83 bp, Homo sapiens
  chr1:6623409-6623492
  hypo
cggcggccacagggccgtgaatgggcttgtcattacttgtatattgggtaaggctggagatataggagcgtaaaagttgtact

SEQ ID NO: 59025 - DNA, 33 bp, Homo sapiens
  chr1:6639451-6639484
  hypo
cacggccagcgtctacgacggcaagtacctgcc

SEQ ID NO: 59026 - DNA, 30 bp, Homo sapiens; identical to SEQ ID NO: 14006
  chr1:6648994-6649024
  hypo

SEQ ID NO: 59027 - DNA, 90 bp, Homo sapiens
  chr1:6653432-6653522
  hypo
gctcatcggggtcccgcggcggccggggtcggcctgggtccatgtcatcgctgccactgtccaactcgaagccacgcccacccgagaagg

SEQ ID NO: 59028 - DNA, 30 bp, Homo sapiens
  chr1:6657044-6657074
  hypo
agacaaagtgacaccgggacaaatagccca

SEQ ID NO: 59029 - DNA, 26 bp, Homo sapiens
  chr1:6669384-6669410
  hypo
actccgtctcagaaaaacaaaaacaa

SEQ ID NO: 59030 - DNA, 41 bp, Homo sapiens
  chr1:6672154-6672195
  hypo
atttagccaggcactacgctaaaatttaacagcttaggaaa

SEQ ID NO: 59031 - DNA, 142 bp, Homo sapiens
  chr1:6675988-6676130
  hypo
gagagaggggtcctcaggtggcgctagcttggcagggtcagccaggagtgaactccagggtccaggtctccgagagctctggagaatgagtggttgatttttttttttttttttttttgagttggaatcttagctctgtcta

SEQ ID NO: 59032 - DNA, 21 bp, Homo sapiens
  chr1:6676369-6676390
  hypo
agccaccgcgcccggcgagtg

SEQ ID NO: 59033 - DNA, 353 bp, Homo sapiens
  chr1:6711962-6712315
  hypo
gctggctccccctacccctcccggcgcagccccccgccacctgcagagcaccgactgcggtccggtgtgccccccacccccgcatgcactgccgactccttttcattttcatcctgcgccaaatgtctcccaggtcactggggcggtcctcaggagcctgatgttaaagcccagccgcggttccacacccgcacagccttggaagtcacagctgagcctggctgccgtgtttactagtctgggtgactttcaagcaactcttcaatgttaatttgatgcagctcaatttgctcggcagaactggctgttaaatggccaccaatcagtgaaccatcacgcggaagagagcacct

SEQ ID NO: 59034 - DNA, 577 bp, Homo sapiens; identical to SEQ ID NO: 14011
  chr1:6713808-6714385
  hypo

SEQ ID NO: 59035 - DNA, 156 bp, Homo sapiens
  chr1:6720535-6720691
  hypo
tgcatttactgcagcttctctgtccctcaactagattattcagcttcatggcaggattaggttgtctgttttattctctgcggaatgttcacattcctaaagtgtctggcacattacaggcacccaaattaaattactttgcgaataaatcaacca

SEQ ID NO: 59036 - DNA, 135 bp, Homo sapiens; identical to SEQ ID NO: 14012
  chr1:6738111-6738246
  hypo

SEQ ID NO: 59037 - DNA, 31 bp, Homo sapiens; identical to SEQ ID NO: 14013
  chr1:6845865-6845896
  hypo

SEQ ID NO: 59038 - DNA, 84 bp, Homo sapiens; identical to SEQ ID NO: 14014
  chr1:6871009-6871093
  hypo

SEQ ID NO: 59039 - DNA, 23 bp, Homo sapiens
  chr1:6964966-6964989
  hypo
gtattgcacgctgaacactccga

SEQ ID NO: 59040 - DNA, 30 bp, Homo sapiens
  chr1:7121431-7121461
  hypo
tctgtggctgctggcgagcgggtgtcaccc

SEQ ID NO: 59041 - DNA, 31 bp, Homo sapiens; identical to SEQ ID NO: 14015
  chr1:7182591-7182622
  hypo

SEQ ID NO: 59042 - DNA, 136 bp, Homo sapiens
  chr1:7279267-7279403
  hypo
ccgtttctgtgtttacggttggactcaacgagccttttactattgtggcatatgggagggagcgttgccattctgctgccaggggtgagtgtgatctggtggctgttacattgtgtatatgcgagtaggtctctat

SEQ ID NO: 59043 - DNA, 46 bp, Homo sapiens
  chr1:7407199-7407245
  hypo
tctgagtaacattcctcggtggggagagcggcggatggttctcaga

SEQ ID NO: 59044 - DNA, 31 bp, Homo sapiens
  chr1:7434891-7434922
  hypo
gctcagagatgagacacgtggcttctggtcg

SEQ ID NO: 59045 - DNA, 85 bp, Homo sapiens; identical to SEQ ID NO: 14017
  chr1:7550322-7550407
  hypo

SEQ ID NO: 59046 - DNA, 145 bp, Homo sapiens
  chr1:7550706-7550851
  hypo
catctcaaaaaaaaaaagtgacaaagcagcccctctgccagggagtggccagtgtgacctgaggccttggcacccagccaccgtgcgttaccttttgaggtctgtgctagaaggtgctgctgccgcaggagtcctctgactgggt

SEQ ID NO: 59047 - DNA, 30 bp, Homo sapiens; identical to SEQ ID NO: 14019
  chr1:7700563-7700593
  hypo

SEQ ID NO: 59048 - DNA, 1154 bp, Homo sapiens; identical to SEQ ID NO: 14020
  chr1:7723193-7724347
  hypo

SEQ ID NO: 59049 - DNA, 30 bp, Homo sapiens
  chr1:7724754-7724784
  hypo
gcactacctgcagccggagaccaacggggt

SEQ ID NO: 59050 - DNA, 31 bp, Homo sapiens
  chr1:7742817-7742848
  hypo
gtgggcctgggccggccgctcctaggctggc

SEQ ID NO: 59051 - DNA, 30 bp, Homo sapiens; identical to SEQ ID NO: 34999
  chr1:7764722-7764752
  hypo

SEQ ID NO: 59052 - DNA, 268 bp, Homo sapiens
  chr1:7777933-7778201
  hypo
ccttgttcttcttgaagttcacgttgtgtatttccgatagttgaaattaaatcatttcgtcaataaatatttacagagggcctactgtgcaccaggaatttctgctaggcctcaggaatgtagcggtgactgggatgaacgtagtcactggcctcactgagccaacacaatttctctttacgttcatgtatatgagaccgagtttctggtgacaaaggctcatatcgtgttgggtttttgtagtcccggtggctaacaacttgagttg

SEQ ID NO: 59053 - DNA, 153 bp, Homo sapiens
  chr1:7842625-7842778
  hypo
actttgggccactgttctatccgctgggattccaagcgtccctacccagatctgcacgcaataaatgcttgctgaacgaatgcagtttgacaaaacccagcttcggaggagagcaagccaacctagagtatcgcttggaagatataaggtggt

SEQ ID NO: 59054 - DNA, 124 bp, Homo sapiens; identical to SEQ ID NO: 84
  chr1:7843508-7843632
  hypo

SEQ ID NO: 59055 - DNA, 41 bp, Homo sapiens; identical to SEQ ID NO: 85
  chr1:7843652-7843693
  hypo

SEQ ID NO: 59056 - DNA, 189 bp, Homo sapiens; identical to SEQ ID NO: 35003
  chr1:7844212-7844401
  hypo

SEQ ID NO: 59057 - DNA, 31 bp, Homo sapiens
  chr1:7926860-7926891
  hypo
gggctgaccatggtaccgggcctggaaaggg

SEQ ID NO: 59058 - DNA, 31 bp, Homo sapiens; identical to SEQ ID NO: 14024
  chr1:8005573-8005604
  hypo

SEQ ID NO: 59059 - DNA, 30 bp, Homo sapiens; identical to SEQ ID NO: 14025
  chr1:8035290-8035320
  hypo

SEQ ID NO: 59060 - DNA, 58 bp, Homo sapiens
  chr1:8044538-8044596
  hypo
gagggtgtgcgtgccgccacatgttgattggggtggcttctgcgttcagcgctgccgc

SEQ ID NO: 59061 - DNA, 116 bp, Homo sapiens; identical to SEQ ID NO: 14027
  chr1:8044976-8045092
  hypo

SEQ ID NO: 59062 - DNA, 1211 bp, Homo sapiens; identical to SEQ ID NO: 35006
  chr1:8085589-8086800
  hypo

SEQ ID NO: 59063 - DNA, 31 bp, Homo sapiens; identical to SEQ ID NO: 14029
  chr1:8135328-8135359
  hypo

SEQ ID NO: 59064 - DNA, 28 bp, Homo sapiens
  chr1:8141952-8141980
  hypo
aggcgtgagccaccgtgcccagctacaa

SEQ ID NO: 59065 - DNA, 19 bp, Homo sapiens
  chr1:8147825-8147844
  hypo
tccacgagcatttttatgg

SEQ ID NO: 59066 - DNA, 148 bp, Homo sapiens
  chr1:8148902-8149050
  hypo
gctgtgcaccaatagtccatcccctgcattgctgtatggcgtttcagtgcatgaatatagtacagtttattgttaatccatttttgaaatgcaggcttgaaaagcgaagcatttccatttatgtgcagttagtcgttttttcacctga

SEQ ID NO: 59067 - DNA, 117 bp, Homo sapiens
  chr1:8152857-8152974
  hypo
tctggtgtgaccgcacgtgccgtctttccaccccgttcatactcagctgctgcagctgactcaaagactttatatttttgagcagcctgttcaagaggctagcgaggttgacctctg

SEQ ID NO: 59068 - DNA, 31 bp, Homo sapiens; identical to SEQ ID NO: 14031
  chr1:8204554-8204585
  hypo

SEQ ID NO: 59069 - DNA, 171 bp, Homo sapiens
  chr1:8212951-8213122
  hypo
gctggctctaggactcgcattgatgtcggttaattgatatacctgaccccgctactagtgcacaattactgccctgcgtcaggccaaatcaggggcatggatcatcatgttggggacactaccccaaaggaggagatgacatggctgtccacaaaccgggagcccagttgt

SEQ ID NO: 59070 - DNA, 30 bp, Homo sapiens; identical to SEQ ID NO: 14032
  chr1:8213963-8213993
  hypo

SEQ ID NO: 59071 - DNA, 43 bp, Homo sapiens
  chr1:8385722-8385765
  hypo
atggtgagtttgcaggcggcttttccaccgggctgtgcttgag

SEQ ID NO: 59072 - DNA, 30 bp, Homo sapiens
  chr1:8386074-8386104
  hypo
ggcctgaacatccacgccctcctggcaggt

SEQ ID NO: 59073 - DNA, 31 bp, Homo sapiens
  chr1:8389321-8389352
  hypo
cctaaaccaaaaatcccgtgctggtagcagg

SEQ ID NO: 59074 - DNA, 31 bp, Homo sapiens
  chr1:8390773-8390804
  hypo
ccccgacggcttctaccgccaggaccgtgga

SEQ ID NO: 59075 - DNA, 31 bp, Homo sapiens; identical to SEQ ID NO: 14034
  chr1:8394042-8394073
  hypo

SEQ ID NO: 59076 - DNA, 70 bp, Homo sapiens
  chr1:8395502-8395572
  hypo
aatatcctgctcaacggcgtgaagtatgagagcgagctgacgggctccagcgagcgcgcggagcagcctc

SEQ ID NO: 59077 - DNA, 30 bp, Homo sapiens
  chr1:8419781-8419811
  hypo
ggaccagcgccccccgtcacacctcgccaa

SEQ ID NO: 59078 - DNA, 207 bp, Homo sapiens
  chr1:8427364-8427571
  hypo
ggtggggtggcttccgcaaggcaggggatgccgtgccttgagtacttgactgcccacagctgcatcttatgcctgggcatttttgtaagaagtgggaccacggctgcggtccctaaaggagggctggaatgccttgaaggagggctgactggcctataaagcccatcacatgtatctcctggagcactggacgtgtctcaacctccc

SEQ ID NO: 59079 - DNA, 30 bp, Homo sapiens; identical to SEQ ID NO: 14035
  chr1:8442492-8442522
  hypo

SEQ ID NO: 59080 - DNA, 25 bp, Homo sapiens
  chr1:8474606-8474631
  hypo
ttccgtctctaaataaataaataac

SEQ ID NO: 59081 - DNA, 21 bp, Homo sapiens
  chr1:8476357-8476378
  hypo
gctcacggtcaggcgcggtgg

SEQ ID NO: 59082 - DNA, 30 bp, Homo sapiens; identical to SEQ ID NO: 14037
  chr1:8524995-8525025
  hypo

SEQ ID NO: 59083 - DNA, 42 bp, Homo sapiens
  chr1:8540770-8540812
  hypo
caggcacgagccaccgcatccggcctaagcctgtttttaaat

SEQ ID NO: 59084 - DNA, 30 bp, Homo sapiens; identical to SEQ ID NO: 14039
  chr1:8541178-8541208
  hypo

SEQ ID NO: 59085 - DNA, 30 bp, Homo sapiens; identical to SEQ ID NO: 14040
  chr1:8541447-8541477
  hypo

SEQ ID NO: 59086 - DNA, 18 bp, Homo sapiens
  chr1:8549810-8549828
  hypo
ccactttagaaacctgta

SEQ ID NO: 59087 - DNA, 30 bp, Homo sapiens
  chr1:8550757-8550787
  hypo
tcctgtaacattccgcgaaatgcaaactac

SEQ ID NO: 59088 - DNA, 30 bp, Homo sapiens
  chr1:8613249-8613279
  hypo
tgcgtccacacacacgtgcaaaattgcacc

SEQ ID NO: 59089 - DNA, 30 bp, Homo sapiens
  chr1:8716333-8716363
  hypo
tctttgtctttgtccgctgtcatgattcgc

SEQ ID NO: 59090 - DNA, 147 bp, Homo sapiens; identical to SEQ ID NO: 14041
  chr1:8746805-8746952
  hypo

SEQ ID NO: 59091 - DNA, 43 bp, Homo sapiens
  chr1:8748133-8748176
  hypo
aacaacagtccaaaagtgatacgcattcagtggaaaacatact

SEQ ID NO: 59092 - DNA, 30 bp, Homo sapiens; identical to SEQ ID NO: 35012
  chr1:8762991-8763021
  hypo

SEQ ID NO: 59093 - DNA, 241 bp, Homo sapiens; identical to SEQ ID NO: 14042
  chr1:8781129-8781370
  hypo

SEQ ID NO: 59094 - DNA, 36 bp, Homo sapiens
  chr1:8941148-8941184
  hypo
gaaatggaacaccatgctgggcgcggtggctcacgc

SEQ ID NO: 59095 - DNA, 33 bp, Homo sapiens
  chr1:8997091-8997124
  hypo
ggcctgagccactgcgcccggccacaagactgt

SEQ ID NO: 59096 - DNA, 124 bp, Homo sapiens
  chr1:9004946-9005070
  hypo
tgaaggcctgctgacgtttgccattccaggaccaagtggacaatgagttaagctaggccaggagggggttcagctccccataacaaggcaggggtggccctttgtgtccggcagcatggtagcc

SEQ ID NO: 59097 - DNA, 10 bp, Homo sapiens
  chr1:9028040-9028050
  hypo
ttgtgagaca

SEQ ID NO: 59098 - DNA, 31 bp, Homo sapiens
  chr1:9049402-9049433
  hypo
gaggggccctgagagacgcctgcttgtgtac

SEQ ID NO: 59099 - DNA, 31 bp, Homo sapiens
  chr1:9064759-9064790
  hypo
ttactccctggaggcccggtggagcgggttg

SEQ ID NO: 59100 - DNA, 30 bp, Homo sapiens
  chr1:9066000-9066030
  hypo
gaccccaaagtggacgccggcagggatgtc

SEQ ID NO: 59101 - DNA, 31 bp, Homo sapiens
  chr1:9073881-9073912
  hypo
ccctggaatccagggtcgcagctcctccctc

SEQ ID NO: 59102 - DNA, 151 bp, Homo sapiens; identical to SEQ ID NO: 14046
  chr1:9074711-9074862
  hypo

SEQ ID NO: 59103 - DNA, 31 bp, Homo sapiens
  chr1:9075351-9075382
  hypo
cacctaccactgtgctcggaaggtcacgctc

SEQ ID NO: 59104 - DNA, 82 bp, Homo sapiens
  chr1:9084937-9085019
  hypo
aagatggcagcctccacggaggaagatggcggctaccttccacccacgaccccggtcagctgctgcccggcccaccttgtgc

SEQ ID NO: 59105 - DNA, 31 bp, Homo sapiens
  chr1:9097916-9097947
  hypo
gggatctggtggtgagcgtgggccccgggcc

SEQ ID NO: 59106 - DNA, 30 bp, Homo sapiens
  chr1:9109241-9109271
  hypo
ggacgaagctgtcagcgagtggagctccag

SEQ ID NO: 59107 - DNA, 224 bp, Homo sapiens
  chr1:9165434-9165658
  hypo
gcagctgtgccttggccgacactggggtgcagccactgtgctgcgggaaggaatcaggctgtgcctcctctgggggcagggacgacaagggccagggagggcagacctacatgcagaaccaccagcaccggcgtctgcacggccggggagccacagagggtcagcacgaaccgcacggtgctccagaccctgaggccgatgaagatgagcgggatgagcaccag

SEQ ID NO: 59108 - DNA, 20 bp, Homo sapiens
  chr1:9172517-9172537
  hypo
ttttctttttttgagacgga

SEQ ID NO: 59109 - DNA, 279 bp, Homo sapiens; identical to SEQ ID NO: 35016
  chr1:9188943-9189222
  hypo

SEQ ID NO: 59110 - DNA, 53 bp, Homo sapiens; identical to SEQ ID NO: 14051
  chr1:9205247-9205300
  hypo

SEQ ID NO: 59111 - DNA, 31 bp, Homo sapiens
  chr1:9265243-9265274
  hypo
acaggcatgagccaccgcgcctggcccccac

SEQ ID NO: 59112 - DNA, 30 bp, Homo sapiens
  chr1:9307363-9307393
  hypo
gcctggcacagaggcgggaaaccactggca

SEQ ID NO: 59113 - DNA, 78 bp, Homo sapiens
  chr1:9324849-9324927
  hypo
gaagtggcccatctcgggtgtcctgccgcactccggccagctggtgtggtacatggactacgacgccttcctgggatg

SEQ ID NO: 59114 - DNA, 49 bp, Homo sapiens
  chr1:9332432-9332481
  hypo
caaatcagagtgaccccgaggactcaggctgaagcggcaccatttctct

SEQ ID NO: 59115 - DNA, 31 bp, Homo sapiens; identical to SEQ ID NO: 94
  chr1:9352659-9352690
  hypo

SEQ ID NO: 59116 - DNA, 190 bp, Homo sapiens; identical to SEQ ID NO: 35019
  chr1:9352964-9353154
  hypo

SEQ ID NO: 59117 - DNA, 48 bp, Homo sapiens; identical to SEQ ID NO: 35020
  chr1:9353808-9353856
  hypo

SEQ ID NO: 59118 - DNA, 195 bp, Homo sapiens
  chr1:9361975-9362170
  hypo
attctggatacagattcgtcttccctgcacacagtgcttctgccaaagtcaccatccattgattgacagaacacctttcccactgtcacgctgtccgtgtagcactgcttccagggagctcacttcacaaccaaggaagtgtggcactgggatcatgtgcagggaattggccggtgagcacgagcccactggttt

SEQ ID NO: 59119 - DNA, 31 bp, Homo sapiens
  chr1:9365883-9365914
  hypo
gtgggtgagacaggcccgtctctgctgatga

SEQ ID NO: 59120 - DNA, 321 bp, Homo sapiens
  chr1:9384862-9385183
  hypo
gccaacactgggccagacagtcgtgtttgcgacaagtctgttcgcctggccgtggagccagcacggtcttgtcggatccagaccagacaaatgctttcttggaaaagcgagtggggtgggggagcagggacacccggcctggcgggctggtggatcggaggcgcctgtgagcgggtcagtactgggtaggcagccccattgggagccacagccactcactggctgctgcctcctgaatgggcagccggtgtggatgcagtggctgcactcgctggaagctgggactccagagctcagcacgtggagttggatgaagcttcc

SEQ ID NO: 59121 - DNA, 147 bp, Homo sapiens
  chr1:9396631-9396778
  hypo
aggagtgggggatcctctgcccgcgtgcgttcaaggaagagtctggggcagaggcaggggcaggaggccgctgcctgagttcacccgtggcgctgggctagtgaggacgcaactcctggccggctcgggcaggtccctcactctgag

SEQ ID NO: 59122 - DNA, 191 bp, Homo sapiens
  chr1:9402459-9402650
  hypo
atagtggcagtcaggccccagcgtcaaccgtgggagagcacggaggatcccagtggcttgtcaattcgctgatagcagaaggtagggcctttgccagtttggagctgcctcagggtgttgacctgctcagtgagaaagtaggcgcctaggaatccaaacgtccctctcccgcctcatcctgccttgttccc

SEQ ID NO: 59123 - DNA, 31 bp, Homo sapiens
  chr1:9420031-9420062
  hypo
gcgggggctgctgacccgagatgggaaagcc

SEQ ID NO: 59124 - DNA, 253 bp, Homo sapiens
  chr1:9420429-9420682
  hypo
cttgggtcagggggcacgggaggagcctgatggagtggctggaggaagacagacagggtattcgtctcctggagctgctgaacacattaccacaagcaggacagctgaaaacagcagaagcgctcaggaggccaggtgtctgcgatcaggatggtagcgggctcgactgcctccgagctctgagggggagcccgccccatgcctcccctcgcccctgggggctgccgggaatccttggcgtcccttggtctgt

SEQ ID NO: 59125 - DNA, 31 bp, Homo sapiens
  chr1:9426088-9426119
  hypo
tgagatctgaagctgacggctcatctgagat

SEQ ID NO: 59126 - DNA, 30 bp, Homo sapiens
  chr1:9427635-9427665
  hypo
gttcgccatcataccgccagcgcgacagcc

SEQ ID NO: 59127 - DNA, 31 bp, Homo sapiens
  chr1:9447365-9447396
  hypo
gatgttagaagaggagcgagtgaaagcctcc

SEQ ID NO: 59128 - DNA, 28 bp, Homo sapiens
  chr1:9488136-9488164
  hypo
ccggagtctcaccgtcggtcaggctgaa

SEQ ID NO: 59129 - DNA, 166 bp, Homo sapiens; identical to SEQ ID NO: 97
  chr1:9489049-9489215
  hypo

SEQ ID NO: 59130 - DNA, 93 bp, Homo sapiens
  chr1:9539438-9539531
  hypo
aaaaaaagaggttattttccaagttttctccaaagatacagagtttaaatttatgccagcagcctttatccgagcaagcggccagttcccatt

SEQ ID NO: 59131 - DNA, 38 bp, Homo sapiens
  chr1:9549416-9549454
  hypo
accatattctaaagtgcgtaattcgctggtttttagca

SEQ ID NO: 59132 - DNA, 1 bp, Homo sapiens
  chr1:9579462-9579463
  hypo
c

SEQ ID NO: 59133 - DNA, 81 bp, Homo sapiens
  chr1:9654068-9654149
  hypo
ttccctggctgttcatgtagtcggcgcccggtggcgctgtcctaatgccgagcactgagcgcctccctgcattctcctgta

SEQ ID NO: 59134 - DNA, 219 bp, Homo sapiens; identical to SEQ ID NO: 14061
  chr1:9655905-9656124
  hypo

SEQ ID NO: 59135 - DNA, 30 bp, Homo sapiens; identical to SEQ ID NO: 14062
  chr1:9656969-9656999
  hypo

SEQ ID NO: 59136 - DNA, 31 bp, Homo sapiens; identical to SEQ ID NO: 14063
  chr1:9658419-9658450
  hypo

SEQ ID NO: 59137 - DNA, 220 bp, Homo sapiens
  chr1:9664190-9664410
  hypo
gcgtctcgaatcttcggttctcgaggaagtgttgacagtgtgatgctaatgtctgcttttcttggcgttgggtagaagcaggacatctgtgtgtatgtgcgtatttaaattagattatttataataaccagagccagccctcgcgctggccaggatcctcctgccgagctgatgtcgctcctgccctctgccggggtccggaagcgacatctcaggaggt

SEQ ID NO: 59138 - DNA, 112 bp, Homo sapiens
  chr1:9664793-9664905
  hypo
cgcagcctccacgccgcacctgccacattcagccctgcccaggaaggaacacatgacccttctgtctgtgactgttgctgagtctctgtctcatgtcgtagaattgtggata

SEQ ID NO: 59139 - DNA, 30 bp, Homo sapiens; identical to SEQ ID NO: 14066
  chr1:9666887-9666917
  hypo

SEQ ID NO: 59140 - DNA, 133 bp, Homo sapiens; identical to SEQ ID NO: 14067
  chr1:9670773-9670906
  hypo

SEQ ID NO: 59141 - DNA, 30 bp, Homo sapiens
  chr1:9683325-9683355
  hypo
aaacattcccaggccgggcgcggtggctca

SEQ ID NO: 59142 - DNA, 1376 bp, Homo sapiens; identical to SEQ ID NO: 35026
  chr1:9711638-9713014
  hypo

SEQ ID NO: 59143 - DNA, 30 bp, Homo sapiens; identical to SEQ ID NO: 14069
  chr1:9751338-9751368
  hypo

SEQ ID NO: 59144 - DNA, 30 bp, Homo sapiens
  chr1:9776669-9776699
  hypo
agttccaggtgaggccgctgaggccctctg

SEQ ID NO: 59145 - DNA, 30 bp, Homo sapiens
  chr1:9777076-9777106
  hypo
tccatcctcgccatgcgggatgagcagagc

SEQ ID NO: 59146 - DNA, 30 bp, Homo sapiens
  chr1:9780382-9780412
  hypo
ctccctggccacgtcggggctgggctacca

SEQ ID NO: 59147 - DNA, 178 bp, Homo sapiens
  chr1:9780743-9780921
  hypo
ggggggcatggagccggcgtggaaccagagccctcactcctgcccacacccctcagcagctgcagctgcgggaaatcctggagcggcgggggtctggggagctgtatgagcacgagaaggacctggtgtggaagctgcggcatgaagtccaggagcacttcccggaggcgctagcccg

SEQ ID NO: 59148 - DNA, 30 bp, Homo sapiens; identical to SEQ ID NO: 14071
  chr1:9781253-9781283
  hypo

SEQ ID NO: 59149 - DNA, 31 bp, Homo sapiens; identical to SEQ ID NO: 14072
  chr1:9785103-9785134
  hypo

SEQ ID NO: 59150 - DNA, 144 bp, Homo sapiens
  chr1:9787396-9787540
  hypo
cagcaaagactgttctcctcccgagggaaccttcttcccaggcctcccgccagactgcctgggtcctggcgcctggcggtcacctggtgcctactgtccgacaggatgccttgatcctcgtgcgacccaccctgtgtatcctcc

SEQ ID NO: 59151 - DNA, 30 bp, Homo sapiens
  chr1:9790310-9790340
  hypo
gggaggcccctgtgcgagccggatggcggc

SEQ ID NO: 59152 - DNA, 30 bp, Homo sapiens
  chr1:9795547-9795577
  hypo
tctgcgaattccgggcgtggggaactgccg

SEQ ID NO: 59153 - DNA, 253 bp, Homo sapiens
  chr1:9795909-9796162
  hypo
atgagtggtgtgcagtcgagcgctcggtgttacctgcacgcctctgccactgtcttcgaggacctgcaggtccagcccctccttgcaggtatacagacagtcgatcaccttcttatccgcgagtttcccggaacggagagttaagccagccagattgcctcggaaaaactgggtcatgtgcaggtcgccacctttgggtcaggggagaaaaggcgaagtcaggcgtgcaacccagcatcgcccaactcacttc

SEQ ID NO: 59154 - DNA, 30 bp, Homo sapiens
  chr1:9804612-9804642
  hypo
gtcgtggccattgtcggtgggcaggcccat

SEQ ID NO: 59155 - DNA, 25 bp, Homo sapiens
  chr1:9818657-9818682
  hypo
caccgcacctggccatgacttgctt

SEQ ID NO: 59156 - DNA, 166 bp, Homo sapiens
  chr1:9867157-9867323
  hypo
agttggttttacccccggctcagcaattcctccaagtgcactcaagcctgtgagaagccctgcagtaacgaaacctgtttaacgttaacagcgcttcccaagcttacatgaccgagacctcattgacctaacagcacctgtccacgtcacacacctagggagaccc

SEQ ID NO: 59157 - DNA, 31 bp, Homo sapiens; identical to SEQ ID NO: 14075
  chr1:9892079-9892110
  hypo

SEQ ID NO: 59158 - DNA, 17 bp, Homo sapiens
  chr1:9900902-9900919
  hypo
gaaagcaaggctgggcg

SEQ ID NO: 59159 - DNA, 107 bp, Homo sapiens; identical to SEQ ID NO: 14076
  chr1:9930201-9930308
  hypo

SEQ ID NO: 59160 - DNA, 31 bp, Homo sapiens
  chr1:10068866-10068897
  hypo
tattaaatgaaacagccgaatattccgacag

SEQ ID NO: 59161 - DNA, 24 bp, Homo sapiens
  chr1:10091404-10091428
  hypo
gattacaggcgtgagccactgcgc

SEQ ID NO: 59162 - DNA, 146 bp, Homo sapiens
  chr1:10091838-10091984
  hypo
atccaatccacttatagtcttcgtcagcggcaaaatctggaatttcatggtactgttactttgatcgctcaacttagatttatattttataaatatatatatacatacatatatatatattttttgagatggagtcgcgctctgtc

SEQ ID NO: 59163 - DNA, 26 bp, Homo sapiens
  chr1:10092223-10092249
  hypo
gcgtgagccaccgcgcccggccaaat

SEQ ID NO: 59164 - DNA, 17 bp, Homo sapiens
  chr1:10095062-10095079
  hypo
gtttgtttttttgagac

SEQ ID NO: 59165 - DNA, 17 bp, Homo sapiens
  chr1:10096098-10096115
  hypo
gccgaggtagtttttta

SEQ ID NO: 59166 - DNA, 87 bp, Homo sapiens
  chr1:10103746-10103833
  hypo
aagtgctgggattacaggcgtgatccaacgcgctgggccgggatgcttcttataaatagatggtgtaatcaccgttggccaggtggc

SEQ ID NO: 59167 - DNA, 30 bp, Homo sapiens; identical to SEQ ID NO: 14079
  chr1:10112529-10112559
  hypo

SEQ ID NO: 59168 - DNA, 83 bp, Homo sapiens; identical to SEQ ID NO: 14080
  chr1:10150448-10150531
  hypo

SEQ ID NO: 59169 - DNA, 333 bp, Homo sapiens
  chr1:10166301-10166634
  hypo
ttcccgtgatgggcccgtctcttgcctcaccttcccgtgcagccagccagttggctgtgccttccactcccctcagtcctcacagtgcagcctctggaactgctgcgggaagccagccttcatccccgcggtatcgcccctacactgtcactcacccatgggcgtcctcaggcgtctccattctgtcgagctccccaagtccccctgccctcgccagtagcccccaagcagtgcccgccagcagttccagacagaggcccagcagcacgggtccacccctaccacccgcctcacccagtgccacgagcagacgcccctcctccctgaggatct

SEQ ID NO: 59170 - DNA, 361 bp, Homo sapiens
  chr1:10174922-10175283
  hypo
aaaaaaaagacacaataattaattgcctttgtttgttaagggatcccacacggacctgcccagccttgtcatgactctggcgagggctttgtaggtggcttagttacctactcagtcggcagggagttggctgccttgttcctttgactgcttctcagcctcattgtctccctttgctttcacctgtcaggcctatgttataggttgttggagttcaaatttactagactctgggctgaacgccttgaatttcaaagtagcattgtttctccttcttactgaaatactttaataccatactttttttttttttttttttaatagcaggccaggctggtctcgaactcctgacctcaagtga

SEQ ID NO: 59171 - DNA, 17 bp, Homo sapiens
  chr1:10247333-10247350
  hypo
tatatacatatgttgca

SEQ ID NO: 59172 - DNA, 193 bp, Homo sapiens; identical to SEQ ID NO: 35034
  chr1:10271248-10271441
  hypo

SEQ ID NO: 59173 - DNA, 44 bp, Homo sapiens
  chr1:10310920-10310964
  hypo
attctaaaagcagcttgggggcgggtgcagtggctcacacgtgt

SEQ ID NO: 59174 - DNA, 31 bp, Homo sapiens; identical to SEQ ID NO: 14085
  chr1:10470524-10470555
  hypo

SEQ ID NO: 59175 - DNA, 386 bp, Homo sapiens; identical to SEQ ID NO: 14086
  chr1:10495104-10495490
  hypo

SEQ ID NO: 59176 - DNA, 30 bp, Homo sapiens; identical to SEQ ID NO: 14087
  chr1:10508583-10508613
  hypo

SEQ ID NO: 59177 - DNA, 30 bp, Homo sapiens; identical to SEQ ID NO: 35038
  chr1:10566199-10566229
  hypo

SEQ ID NO: 59178 - DNA, 30 bp, Homo sapiens
  chr1:10569378-10569408
  hypo
aacagaagaaataacgagaaatagtggcac

SEQ ID NO: 59179 - DNA, 110 bp, Homo sapiens
  chr1:10591534-10591644
  hypo
actttagtgtatgaacgtaggaacctttcacaggcaatttaatcttctgagcagcgcacgtggagcagtgcggcgctggaatggggtttcgggcccgtagattatattgg

SEQ ID NO: 59180 - DNA, 30 bp, Homo sapiens
  chr1:10601818-10601848
  hypo
ctcggcatccaggacgagacctacggcagc

SEQ ID NO: 59181 - DNA, 25 bp, Homo sapiens
  chr1:10645680-10645705
  hypo
aagtagaatcagaaggccaggcgtg

SEQ ID NO: 59182 - DNA, 24 bp, Homo sapiens
  chr1:10645944-10645968
  hypo
tccgtctcaaaacaaataaaaaaa

SEQ ID NO: 59183 - DNA, 138 bp, Homo sapiens; identical to SEQ ID NO: 14089
  chr1:10653907-10654045
  hypo

SEQ ID NO: 59184 - DNA, 91 bp, Homo sapiens
  chr1:10659097-10659188
  hypo
gtgttgaggctaatattctgtcgcttaaggttaaattgcaactgagagaggttccggagaatctgaaatcggggaggcaacttactaggat

SEQ ID NO: 59185 - DNA, 288 bp, Homo sapiens
  chr1:10676561-10676849
  hypo
gcacactgtgggggcgccttccggatagctctccactggtgctgtgatcgccttccccgctggtctgtgtcccacccacgcccctcctgatgacagatccttcggggggaggcagagcacccgccacgtggcctggagatggccgctccagaaaggtgttcgcagtggagacggggctctcccgcgtgccttggaggatcagatgaggttgtggacgtgggagcactttgtgaactgggcatgggaaagagtgaaggtggaaactctccccacgtcaagtagaattgc

SEQ ID NO: 59186 - DNA, 407 bp, Homo sapiens; identical to SEQ ID NO: 14092
  chr1:10680889-10681296
  hypo

SEQ ID NO: 59187 - DNA, 30 bp, Homo sapiens
  chr1:10684324-10684354
  hypo
gtgtgcggaccgagcgaggggaacgtctgt

SEQ ID NO: 59188 - DNA, 30 bp, Homo sapiens; identical to SEQ ID NO: 14093
  chr1:10692420-10692450
  hypo

SEQ ID NO: 59189 - DNA, 30 bp, Homo sapiens; identical to SEQ ID NO: 14094
  chr1:10692784-10692814
  hypo

SEQ ID NO: 59190 - DNA, 30 bp, Homo sapiens
  chr1:10694297-10694327
  hypo
tccagctgctccagcgctggctgtgggccc

SEQ ID NO: 59191 - DNA, 174 bp, Homo sapiens
  chr1:10699816-10699990
  hypo
ccaggttgtccacgcggtcgtggtgctgcgcgtgcttgtacatgtgcgtgcgcccgcagaacttgtagccgcagttctcgcgcgtgcagtggtagtgggtgaccttgagcgagaactgacaagctgcgtccttgcagtcctcgtaaaggtcgaagcgccggaagccctccagca

SEQ ID NO: 59192 - DNA, 30 bp, Homo sapiens
  chr1:10701885-10701915
  hypo
ctgagcaggagccacgaggagttgtccctg

SEQ ID NO: 59193 - DNA, 30 bp, Homo sapiens; identical to SEQ ID NO: 14096
  chr1:10703216-10703246
  hypo

SEQ ID NO: 59194 - DNA, 242 bp, Homo sapiens
  chr1:10703782-10704024
  hypo
ggcctcgctctgggccgagaacaaacagagcaggcgggactgaaacagcatcatggggcaggtgagggcctgtccgctgccatggcgcccaggccggccaggtgtcttctgtcatcccccagctttgtttggccccaactatcgccaaaaacaccacaagttgagtaaataatagcaactgcagaataccctgacatctgtaaactgagcccagggacagcacaggccgcaagtgttgacgc

SEQ ID NO: 59195 - DNA, 34 bp, Homo sapiens
  chr1:10706943-10706977
  hypo
ctcagacctcacttgccggcggagtgggagagct

SEQ ID NO: 59196 - DNA, 424 bp, Homo sapiens
  chr1:10707635-10708059
  hypo
gccaccatcggcccacgcgggctggcctgctctgggacaggcagtgaggtaggagcagcagcatctttggctagaaggacatcacccgatggccatgccccagagaggctggggacagcagcaccatccgcagtgaggaacagggcctcctagcgcccttgctagcacctactcccgagacgcgaggggaacgcgggactcccggctcatcgagggactcacttctcctggaactggaggaatccgggtttgacctggggcttggcgttctctagagaagtcgttgccaagggcgaggcgggcaggtgaggcactgacgctgggatctgaggcatctggggtatggtggaagccagctgcttccaggcgagcagggtgggggtggagggcacggaggccgggctgggagcgggcccctccagag

SEQ ID NO: 59197 - DNA, 99 bp, Homo sapiens
  chr1:10708358-10708457
  hypo
ggagggcaaactgcagcgtcccctggttccgaacttggtctcctggcttgggcctaaccatgccttcctacttgtgcccttcctcggtccccagctcct

SEQ ID NO: 59198 - DNA, 87 bp, Homo sapiens
  chr1:10713571-10713658
  hypo
ctgagtctccagctcccgaggcgaccagcgtgggtgtgtcaggggtggctgaggctgctgacccagacgacacggcacccaggaggc

SEQ ID NO: 59199 - DNA, 126 bp, Homo sapiens
  chr1:10714452-10714578
  hypo
gcccccaccaggctcccgcttacctgcagtggaagtgcgtggtcttctgtccgtagaactggcagtcggctgtgccacagtcttcggtggctcggaagcgctggaagccgtcgttaatgagctggg

SEQ ID NO: 59200 - DNA, 30 bp, Homo sapiens; identical to SEQ ID NO: 14101
  chr1:10715870-10715900
  hypo

SEQ ID NO: 59201 - DNA, 150 bp, Homo sapiens
  chr1:10716606-10716756
  hypo
taaccccccccactgccgtccccgcctgccgacttctaagcgcctccatgctgtgctggtggcggagaggcggagcccatctggctgtggccgtacctggtagttacactcagggtcaaggcagtggtagtgctcgcggtactggtaggc

SEQ ID NO: 59202 - DNA, 30 bp, Homo sapiens
  chr1:10718206-10718236
  hypo
ccctgacagtttcacggtggcctgcaccct

SEQ ID NO: 59203 - DNA, 31 bp, Homo sapiens; identical to SEQ ID NO: 14103
  chr1:10718958-10718989
  hypo

SEQ ID NO: 59204 - DNA, 129 bp, Homo sapiens; identical to SEQ ID NO: 14104
  chr1:10719284-10719413
  hypo

SEQ ID NO: 59205 - DNA, 788 bp, Homo sapiens; identical to SEQ ID NO: 14105
  chr1:10719846-10720634
  hypo

SEQ ID NO: 59206 - DNA, 30 bp, Homo sapiens
  chr1:10720978-10721008
  hypo
ggagcggcaagaaccggggacaggtaggga

SEQ ID NO: 59207 - DNA, 47 bp, Homo sapiens
  chr1:10725221-10725268
  hypo
cttggagggctcctccgcgtggtcttcctcatcgctgcacccctggg

SEQ ID NO: 59208 - DNA, 108 bp, Homo sapiens
  chr1:10725477-10725585
  hypo
ccctccgtgtgggagccggcgtcagctcgcttctccaccaccacctggcggctcagcttggcgcagatggcgttcagcttcaggccacccttgcgtttgggcgccatg

SEQ ID NO: 59209 - DNA, 184 bp, Homo sapiens
  chr1:10729046-10729230
  hypo
ctcggattcctaggttcgggaccttccctctcagggcgccacgagcagcaggtctccccgcaggtctctgagctgaggagaccctgcacagggttggggaaaacgggcatggactggaccgtccacctttccgggcactaaggcatgacttgtaacggcccagcggagccggcactgtcattgt

SEQ ID NO: 59210 - DNA, 30 bp, Homo sapiens; identical to SEQ ID NO: 14108
  chr1:10758980-10759010
  hypo

SEQ ID NO: 59211 - DNA, 217 bp, Homo sapiens
  chr1:10765348-10765565
  hypo
gaggggatcctactggcgggagggcatcttttcccatcagggcggaatgggtggggtggctgcagttccccatctccaccttctcatctccccctgggtgctcagcaggactgaagccagcccagggtgacacgtgcattaggtgagtggtcaccagtcggggagaggacgcgaggctcagggaggggctcaggccttacctcgtagcaggtcctag

SEQ ID NO: 59212 - DNA, 317 bp, Homo sapiens
  chr1:10765942-10766259
  hypo
gtgaagtggcctgcacgctcccgtggagctgcagcggcctagcagggatgcctggggacaatgacagaatacagcagcaactgctcctttactctcttccccggggcccctgaacataaaaatgacaaatgccaaactgttcgctctagcaagttggtgacagaggggcaagggcgggccaggggccaaggcatcaggaagcctccatgccccaggatcaggctgccgacagcaccttccaccccggggtcctacccatgagtcatcacagcccatgtccagagaccgtgcagggagagggacgatggtcagacaac

SEQ ID NO: 59213 - DNA, 30 bp, Homo sapiens
  chr1:10770896-10770926
  hypo
gaagcttacaaaaggccgggggcagtagct

SEQ ID NO: 59214 - DNA, 51 bp, Homo sapiens
  chr1:10775891-10775942
  hypo
cacccaatccactccccgcagcacccaatcctctcccggcagcacccaatc

SEQ ID NO: 59215 - DNA, 27 bp, Homo sapiens
  chr1:10779263-10779290
  hypo
cgcacccggccccgtgcccctttcttg

SEQ ID NO: 59216 - DNA, 103 bp, Homo sapiens
  chr1:10779503-10779606
  hypo
gtcctaaggctgcacacgccatgcatttagaatctgagtgcttgggagaagggatccctaagaagcagcgctgtggggaaggtggcaccgaacaagtttctaa

SEQ ID NO: 59217 - DNA, 77 bp, Homo sapiens
  chr1:10780356-10780433
  hypo
tcattgtcatcatcatcgccatcgctaaacacttctctaaccaggatatggtaactaggaatcgtgcctttggggct

SEQ ID NO: 59218 - DNA, 241 bp, Homo sapiens
  chr1:10782909-10783150
  hypo
ccccccaaaaaggcctgcccccgcaccccagaaacaggcccaacaggatgccatccgggggagcttggaagccttccgggaagagcactgccctggcaccagtcctgcgggaaggaggtgagccgggtctgccactgtctgcgctcacctgatgtgcgcccacggcagctgagcaccaatggggtgtgcgtgggtgcagacgggaggtgcgcatcatggcgccaggagccagaggaggaag

SEQ ID NO: 59219 - DNA, 30 bp, Homo sapiens
  chr1:10799723-10799753
  hypo
tggcccaaatgtcccggccagggtggctct

SEQ ID NO: 59220 - DNA, 31 bp, Homo sapiens
  chr1:10807496-10807527
  hypo
agcggcagatgaaaggcgttccacccagatg

SEQ ID NO: 59221 - DNA, 42 bp, Homo sapiens
  chr1:10810300-10810342
  hypo
tgacgctgctttgcttcgattttcttttcttttcttcttcta

SEQ ID NO: 59222 - DNA, 115 bp, Homo sapiens
  chr1:10815560-10815675
  hypo
gatcaactgcgtcacccgccgagaagtcccccgagtagctccagacagggcaggtgcccccagcccttcccaatccctcttccctggggcccgtgcatggcgagatgcggggttt

SEQ ID NO: 59223 - DNA, 52 bp, Homo sapiens
  chr1:10819915-10819967
  hypo
cttccacccctagaccttgcccgtgaacttcgcaaacacccaatccctctgg

SEQ ID NO: 59224 - DNA, 205 bp, Homo sapiens
  chr1:10823335-10823540
  hypo
cttacagaaatcacaacgggctgagaaccaggagacgtgggtccgagtcccacttctgtccccgaaacctccatgggcccttagacaagcctgctaatctccctaggttccgtcccctcaccagccagacggagacgatgcctaagacttccctcctaccttgcaggctgcgcggaggatggacaagaggcgtgaaagggtgtta

SEQ ID NO: 59225 - DNA, 30 bp, Homo sapiens
  chr1:10826491-10826521
  hypo
ttaaatggcttcttacgtgtaacatgctga

SEQ ID NO: 59226 - DNA, 30 bp, Homo sapiens; identical to SEQ ID NO: 14114
  chr1:10833594-10833624
  hypo

SEQ ID NO: 59227 - DNA, 169 bp, Homo sapiens; identical to SEQ ID NO: 14115
  chr1:10838656-10838825
  hypo

SEQ ID NO: 59228 - DNA, 31 bp, Homo sapiens
  chr1:10839639-10839670
  hypo
ataaaaaacaaatcaccgtagtcccaccacc

SEQ ID NO: 59229 - DNA, 1643 bp, Homo sapiens; identical to SEQ ID NO: 35040
  chr1:10854234-10855877
  hypo

SEQ ID NO: 59230 - DNA, 578 bp, Homo sapiens; identical to SEQ ID NO: 35041
  chr1:10856314-10856892
  hypo

SEQ ID NO: 59231 - DNA, 30 bp, Homo sapiens; identical to SEQ ID NO: 110
  chr1:10890877-10890907
  hypo

SEQ ID NO: 59232 - DNA, 212 bp, Homo sapiens; identical to SEQ ID NO: 14119
  chr1:10997238-10997450
  hypo

SEQ ID NO: 59233 - DNA, 146 bp, Homo sapiens
  chr1:11020655-11020801
  hypo
cagggcaatgaatagttattgcgcggcctcccgctcggggcctgtgggcacacttaagcgagctcgcagatcgctgcgagcagggcacggctcgggtacacccttgggcaccctgcgccatcagcggggagaggcagagtattaaa

SEQ ID NO: 59234 - DNA, 31 bp, Homo sapiens; identical to SEQ ID NO: 14120
  chr1:11046049-11046080
  hypo

SEQ ID NO: 59235 - DNA, 39 bp, Homo sapiens
  chr1:11070723-11070762
  hypo
tcagcaatgtgaaacattggccggtcgcggtggctcacg

SEQ ID NO: 59236 - DNA, 30 bp, Homo sapiens
  chr1:11086862-11086892
  hypo
tgcttctcgagccacgtcgctgccaaggtc

SEQ ID NO: 59237 - DNA, 144 bp, Homo sapiens
  chr1:11091174-11091318
  hypo
atggctgaactgagggggagtcgtccatgtggaggaagaggtgtgctgcctttcctagagaaagggaatttgaaaccacccagagctccttagcaccctcatgtcaaatataagaaagatctgcggccgggcgcgatggctcat

SEQ ID NO: 59238 - DNA, 70 bp, Homo sapiens
  chr1:11115036-11115106
  hypo
cagcacaaaggcggcgcggtgcacgtcggagttgtagtacttcagctgcatctgcgccacctgctgctgt

SEQ ID NO: 59239 - DNA, 20 bp, Homo sapiens
  chr1:11124906-11124926
  hypo
aactccgtctcaggaaaaaa

SEQ ID NO: 59240 - DNA, 31 bp, Homo sapiens; identical to SEQ ID NO: 14122
  chr1:11129009-11129040
  hypo

SEQ ID NO: 59241 - DNA, 364 bp, Homo sapiens; identical to SEQ ID NO: 14123
  chr1:11130958-11131322
  hypo

SEQ ID NO: 59242 - DNA, 240 bp, Homo sapiens
  chr1:11140984-11141224
  hypo
gaacattcaaaatcaacgggaatcaaaattgtgccctgggctctggaaaatgtttggctcttttcatgaatgtaaggagcaaacctaagaactagaacctggccagacacagagcccaagtgtcgcggtctgtgtgactgcggctgaggtgtaccttgaggcagatgtccctgctccgttgccacaccacctgcagctgcaccggctgcccgttgccgcgctcccacatctccagcctca

SEQ ID NO: 59243 - DNA, 30 bp, Homo sapiens; identical to SEQ ID NO: 14125
  chr1:11166874-11166904
  hypo

SEQ ID NO: 59244 - DNA, 24 bp, Homo sapiens
  chr1:11178561-11178585
  hypo
gattacaggcgtgaaccaccgtgc

SEQ ID NO: 59245 - DNA, 30 bp, Homo sapiens
  chr1:11182138-11182168
  hypo
aggcccgagttggtcgataaagggatgaca

SEQ ID NO: 59246 - DNA, 91 bp, Homo sapiens
  chr1:11236359-11236450
  hypo
tcagtcttggtgccgcgtgacctctggggttcagagcaaagtgatgcaagcctcttccacacaaggcggcgcctgtcggaaagtcctcagg

SEQ ID NO: 59247 - DNA, 30 bp, Homo sapiens
  chr1:11242947-11242977
  hypo
agtgtttggctattacgaggggtagtacgc

SEQ ID NO: 59248 - DNA, 77 bp, Homo sapiens; identical to SEQ ID NO: 14126
  chr1:11264688-11264765
  hypo

SEQ ID NO: 59249 - DNA, 205 bp, Homo sapiens; identical to SEQ ID NO: 14127
  chr1:11308056-11308261
  hypo

SEQ ID NO: 59250 - DNA, 55 bp, Homo sapiens; identical to SEQ ID NO: 14128
  chr1:11313591-11313646
  hypo

SEQ ID NO: 59251 - DNA, 263 bp, Homo sapiens; identical to SEQ ID NO: 14129
  chr1:11315987-11316250
  hypo

SEQ ID NO: 59252 - DNA, 45 bp, Homo sapiens; identical to SEQ ID NO: 14130
  chr1:11323831-11323876
  hypo

SEQ ID NO: 59253 - DNA, 30 bp, Homo sapiens
  chr1:11396952-11396982
  hypo
gcatatgtagtgtacgtgtagtgaatatac

SEQ ID NO: 59254 - DNA, 30 bp, Homo sapiens
  chr1:11412550-11412580
  hypo
cagcttctattctcacggtgcttgcatggc

SEQ ID NO: 59255 - DNA, 1290 bp, Homo sapiens; identical to SEQ ID NO: 35051
  chr1:11538705-11539995
  hypo

SEQ ID NO: 59256 - DNA, 139 bp, Homo sapiens; identical to SEQ ID NO: 114
  chr1:11540039-11540178
  hypo

SEQ ID NO: 59257 - DNA, 604 bp, Homo sapiens
  chr1:11596361-11596965
  hypo
gctctcctcttgcccccaggacgcccgaacgcagcgccagtggcgtacgctggaggccgtgcggcacgtgggcgtggccatcgtctccagtgccctcaccacggtcatcgccacagtgcccctcttcttctgcatcatcgccccatttgccaagttcggcaagattgtggcactcaacacgggcgtgtccatcctctacacgctgaccgtcagcaccgccctgctgggcatcatggcgcccagctctttcactcggacccggacttccttcctcaaggccctgggtgccgtgctgctggcaggggccctggggctgggtgcctgcctcgtgctcctgcagagcggctataagattcccctgcccgcaggggcctccctatagcccgggacgggctctggacacttgcacctttggtcccatgggtgggggacaggagctgcttcccagctcgacttcagctagctgtgtccccaggcctgggcccagggcgccctgcgggccagcgtggaggctgacacccacacagatggtgtggaccatgctgccttgtggagctgggagttggagacagccgccaccccacaggccgggctactggcagcc

SEQ ID NO: 59258 - DNA, 30 bp, Homo sapiens; identical to SEQ ID NO: 14134
  chr1:11721234-11721264
  hypo

SEQ ID NO: 59259 - DNA, 30 bp, Homo sapiens
  chr1:11732190-11732220
  hypo
gagccaggtagccccggcctccgcccctgc

SEQ ID NO: 59260 - DNA, 30 bp, Homo sapiens; identical to SEQ ID NO: 35062
  chr1:11761922-11761952
  hypo

SEQ ID NO: 59261 - DNA, 30 bp, Homo sapiens
  chr1:11776469-11776499
  hypo
atgccaaacatgaacgataattaatcagtt

SEQ ID NO: 59262 - DNA, 30 bp, Homo sapiens
  chr1:11808215-11808245
  hypo
ggccttggagatgacgggaaatgggtgggg

SEQ ID NO: 59263 - DNA, 74 bp, Homo sapiens
  chr1:11809702-11809776
  hypo
gagctggagaggagtgcgtgggcccggggctgatgtccctctgcccaggttcctaagcacgtgctgcctgggga

SEQ ID NO: 59264 - DNA, 31 bp, Homo sapiens; identical to SEQ ID NO: 14136
  chr1:11810251-11810282
  hypo

SEQ ID NO: 59265 - DNA, 149 bp, Homo sapiens
  chr1:11825793-11825942
  hypo
gtcttagctccctcccgctgctggggccctgtcccctccctggctccgaggcctggagagcttcgcctgtcccacctgagtgccagccacccaagtcatgactgtctctcctctctttagagcaacgaagattccggaggagcctgggc

SEQ ID NO: 59266 - DNA, 30 bp, Homo sapiens
  chr1:11840016-11840046
  hypo
gctggcggctggcacgagatgccctatgcc

SEQ ID NO: 59267 - DNA, 31 bp, Homo sapiens
  chr1:11848613-11848644
  hypo
tctggtgcagcagtgtcgggggagaaaggca

SEQ ID NO: 59268 - DNA, 101 bp, Homo sapiens
  chr1:11852510-11852611
  hypo
gactactggcagccatgtgggcggaataatgaactgtggcgttggcacgtccataagcaaagggtgaggggagtggggacgtgagtttctcagtctggaca

SEQ ID NO: 59269 - DNA, 90 bp, Homo sapiens; identical to SEQ ID NO: 14137
  chr1:11856145-11856235
  hypo

SEQ ID NO: 59270 - DNA, 284 bp, Homo sapiens
  chr1:11861093-11861377
  hypo
cctgcggatcctcagcgtggggcccaggaagaagtaaaggaccatttcaggaaccaagttcaggctaccaagtggcctccgggaaagccagaacccagagtgtaggggagtgctggctccacacctccccgcagcgccatgatgttcttcaggcccagctgcttagctttgtgcagatggcccgtgatctcctccaggcgctgacggcagcaggtcatgtgcaggatggtctccaggccacagtagttcacggcggtgctggcgatcatcatggaggaggtctc

SEQ ID NO: 59271 - DNA, 30 bp, Homo sapiens
  chr1:11897616-11897646
  hypo
cgctgccggcgggccgtgaacagtgccata

SEQ ID NO: 59272 - DNA, 30 bp, Homo sapiens
  chr1:11907309-11907339
  hypo
agtcccaggggccccgcccgagggcacctc

SEQ ID NO: 59273 - DNA, 32 bp, Homo sapiens
  chr1:11936742-11936774
  hypo
gaaaataccatttgggctgggcgcagtggctc

SEQ ID NO: 59274 - DNA, 30 bp, Homo sapiens
  chr1:11940320-11940350
  hypo
gctgtggcaggggcacgccctaagaccatg

SEQ ID NO: 59275 - DNA, 21 bp, Homo sapiens
  chr1:11945505-11945526
  hypo
gtctgagtgtttaacaagcct

SEQ ID NO: 59276 - DNA, 144 bp, Homo sapiens; identical to SEQ ID NO: 14140
  chr1:12041764-12041908
  hypo

SEQ ID NO: 59277 - DNA, 24 bp, Homo sapiens
  chr1:12069286-12069310
  hypo
agcgggagagggagagggccatct

SEQ ID NO: 59278 - DNA, 43 bp, Homo sapiens
  chr1:12075717-12075760
  hypo
ttgttggctggagtgcagtggcgcaatcacggctcactgcaga

SEQ ID NO: 59279 - DNA, 181 bp, Homo sapiens
  chr1:12078705-12078886
  hypo
ggcgccggccacctcgcccggctaatttttgtatttttaggtttactggcgtgagcaaccgcggccggccccaatactacactttcttgtttactgtgtagtccttatcttctggcgcaaagcgggcactcgctaaaaacctgaatgaaagtataaagcaggccgggcgcagtggctcatg

SEQ ID NO: 59280 - DNA, 30 bp, Homo sapiens
  chr1:12082076-12082106
  hypo
gccttggtgcctggcgtaggcccggtgggt

SEQ ID NO: 59281 - DNA, 31 bp, Homo sapiens; identical to SEQ ID NO: 14142
  chr1:12089141-12089172
  hypo

SEQ ID NO: 59282 - DNA, 30 bp, Homo sapiens
  chr1:12089859-12089889
  hypo
gtgcctgtggatcccggtaccccctgccgc

SEQ ID NO: 59283 - DNA, 336 bp, Homo sapiens; identical to SEQ ID NO: 122
  chr1:12123217-12123553
  hypo

SEQ ID NO: 59284 - DNA, 220 bp, Homo sapiens; identical to SEQ ID NO: 35074
  chr1:12123787-12124007
  hypo

SEQ ID NO: 59285 - DNA, 34 bp, Homo sapiens
  chr1:12183827-12183861
  hypo
tcccaaccagcgctcccgtcgctctctcctccac

SEQ ID NO: 59286 - DNA, 43 bp, Homo sapiens
  chr1:12188608-12188651
  hypo
ggatggtgaagtaattcgtttaaggccacgtgctgggtgagcc

SEQ ID NO: 59287 - DNA, 175 bp, Homo sapiens
  chr1:12194138-12194313
  hypo
cctagtgtccacacagcgtgttcaaatggtcagtcttgcgtatactttatcctacttgttgactgagcactggtgagcatatctgtgaggactcagggctggtggctctccagagctgctgaagtcagagatgtgtgcaggaggcggcgtggctgacatacgggcatcttggtgg

SEQ ID NO: 59288 - DNA, 31 bp, Homo sapiens
  chr1:12202224-12202255
  hypo
tcagcctgaagccacccggcaggtgtaccag

SEQ ID NO: 59289 - DNA, 19 bp, Homo sapiens
  chr1:12204581-12204600
  hypo
aatcccagcacactgggag

SEQ ID NO: 59290 - DNA, 18 bp, Homo sapiens
  chr1:12204839-12204857
  hypo
tcaaaaaaaaaaaaaaaa

SEQ ID NO: 59291 - DNA, 76 bp, Homo sapiens
  chr1:12205427-12205503
  hypo
gtagcaattctcaggctgtgacgacacccccacacacctcttcctaaacatttgcgatcagagagggacagcaagt

SEQ ID NO: 59292 - DNA, 31 bp, Homo sapiens; identical to SEQ ID NO: 14146
  chr1:12215980-12216011
  hypo

SEQ ID NO: 59293 - DNA, 29 bp, Homo sapiens
  chr1:12219287-12219316
  hypo
aatatctaattgaaggccgggcgaggtgg

SEQ ID NO: 59294 - DNA, 30 bp, Homo sapiens
  chr1:12226338-12226368
  hypo
gagtctaaacaggccgagtgcagtggctca

SEQ ID NO: 59295 - DNA, 31 bp, Homo sapiens; identical to SEQ ID NO: 35075
  chr1:12226897-12226928
  hypo

SEQ ID NO: 59296 - DNA, 694 bp, Homo sapiens; identical to SEQ ID NO: 125
  chr1:12227254-12227948
  hypo

SEQ ID NO: 59297 - DNA, 39 bp, Homo sapiens
  chr1:12241726-12241765
  hypo
ctttcctctcagaagtcgcctgctcgagctgccctccct

SEQ ID NO: 59298 - DNA, 759 bp, Homo sapiens; identical to SEQ ID NO: 14150
  chr1:12251313-12252072
  hypo

SEQ ID NO: 59299 - DNA, 31 bp, Homo sapiens
  chr1:12259772-12259803
  hypo
tggcacctgcgctgctcgctccacccctgct

SEQ ID NO: 59300 - DNA, 30 bp, Homo sapiens
  chr1:12260052-12260082
  hypo
ctctcttcagtgtgcgtgtctggaaatggg

SEQ ID NO: 59301 - DNA, 374 bp, Homo sapiens
  chr1:12260316-12260690
  hypo
aataatattattattattctacgggaagaagacatcaggggaagttgcagagcagcctgtgggcggactctggaacaagaggctgaggcagtgcagcagagggtctcagacgtgagcgctctctgccccggaatgattgactgagcgcaaaggtctgcacgctttctctgtaaagggccagatggtaggaatttcaggctttgtggactgtatggtctcagtgacagctactcaaacctgcctctgtagcaagaaagcagctacatgcatagacagcacacacccaactgagagtggtgtgttcctatctaattgtgctactggacacccaaacttgagcttcccaccattccatgtgccgcaaattattcttt

SEQ ID NO: 59302 - DNA, 38 bp, Homo sapiens
  chr1:12267962-12268000
  hypo
tctcaaaagaaaaaaaaaagcaccgcctccaaatgcca

SEQ ID NO: 59303 - DNA, 31 bp, Homo sapiens
  chr1:12285909-12285940
  hypo
tcgtctcaggaacctacgaaaagacactctt

SEQ ID NO: 59304 - DNA, 340 bp, Homo sapiens
  chr1:12304437-12304777
  hypo
tgttggaaagggaacgtaagaaagcactacttcaagccctggaggagaaatggaaggcaaggcagagatcttctgggccataagagcagttgtggtgacacgtgtaagatgagcaagaacactagattgagctaatgctgactcttgtctttgtagaatgaccgccagcagaaaggggagtcctattggtattcagttaccgcctccgtagttacaaggattgtggagaatattgaagtaagtcctgctgacttttataaaagtatcaacgtgaaagggatttctcaggtttaaacgtgtttctcctcttagtttctcatttctcgtgggctcagctgat

SEQ ID NO: 59305 - DNA, 28 bp, Homo sapiens
  chr1:12338616-12338644
  hypo
cagccgcgcccaggcaggaatttatttt

SEQ ID NO: 59306 - DNA, 30 bp, Homo sapiens
  chr1:12368221-12368251
  hypo
accgtagaactgtgacgcggtctgtgcttg

SEQ ID NO: 59307 - DNA, 213 bp, Homo sapiens
  chr1:12368503-12368716
  hypo
gctggattgcgttgtcgtggatctccaggacatggacatctttgctgcagagagacatccgagagaatactcgaaggcaccagaggatagtagtggagatctgatcttcccttcctattttgtgcgacagacaggaggaagcctcttaaccgagccttgtaggctgaaattgcaggtggaaaggaatttggacaagtgagtgttttttttttt

SEQ ID NO: 59308 - DNA, 32 bp, Homo sapiens
  chr1:12440113-12440145
  hypo
cgcccagccccgcatttgtgtatgtttacatg

SEQ ID NO: 59309 - DNA, 203 bp, Homo sapiens; identical to SEQ ID NO: 14153
  chr1:12460132-12460335
  hypo

SEQ ID NO: 59310 - DNA, 47 bp, Homo sapiens
  chr1:12510815-12510862
  hypo
caacttaaaaatgggcttacccggacgtaatcccatcataagtcaag

SEQ ID NO: 59311 - DNA, 107 bp, Homo sapiens
  chr1:12565968-12566075
  hypo
ggacctgggaacaacgccgttctggacccaggtttcagaacacttccaggtggagcctggctctgagcaattcagtttgccagcaggagctcgactgccactccgtc

SEQ ID NO: 59312 - DNA, 30 bp, Homo sapiens
  chr1:12566550-12566580
  hypo
ccctcagctttcagcgcccccagctgcgtc

SEQ ID NO: 59313 - DNA, 52 bp, Homo sapiens
  chr1:12567181-12567233
  hypo
cggggccagggcctcgatgcctctgccctgcttccccgtcctcagcaggaac

SEQ ID NO: 59314 - DNA, 216 bp, Homo sapiens
  chr1:12573214-12573430
  hypo
caggcaagaatgaatacagggcgggaagtgatgctgatttggagagagagaaggtgcacgtagtcatgtagggtaacgggaaagggaataggccacagaagcatggtatgtttgccgggcgacattaaggacccatttgacgttgatgaccgtgaatgtacagtggaatcgggcagcctggctgtattcttgtccggccacatgtagctgcacagc

SEQ ID NO: 59315 - DNA, 30 bp, Homo sapiens
  chr1:12573660-12573690
  hypo
ttaacaacccccacacgcgcacacaattag

SEQ ID NO: 59316 - DNA, 166 bp, Homo sapiens
  chr1:12607961-12608127
  hypo
ctctcccctctgtggacgcaggcaccagcccagtgctcagcatgccacagccacccagtgccgtggagtgaagggacatcaggccactcgcagggccccagggcatcctcttgtgcccgcctgggtcacccttcaccccggccgagctccacgtggatttgggccc

SEQ ID NO: 59317 - DNA, 84 bp, Homo sapiens
  chr1:12628465-12628549
  hypo
gaagaaaagaagatagcgatggttagtggggcaggatccaggggctgggtcgctggtggccatgtgagacggggcagcagaggg

SEQ ID NO: 59318 - DNA, 36 bp, Homo sapiens; identical to SEQ ID NO: 14156
  chr1:12629953-12629989
  hypo

SEQ ID NO: 59319 - DNA, 215 bp, Homo sapiens
  chr1:12630199-12630414
  hypo
ctgaggaatcaggttcgatttgggtgtcacatcctctggggaagcgtcctgggctcaccttcaggcttctcctcgtacaaccggagttccgacgcttccccagcaagccctggtgtagtccccacccgtttacttgtcaagcctgtgggggccttcatggcgggtatttcatctctgatccccaggccctcacatgggcccggcacagagagggc

SEQ ID NO: 59320 - DNA, 30 bp, Homo sapiens
  chr1:12630917-12630947
  hypo
gaagagagggctgatcgggcttgcgcctca

SEQ ID NO: 59321 - DNA, 31 bp, Homo sapiens; identical to SEQ ID NO: 14158
  chr1:12632581-12632612
  hypo

SEQ ID NO: 59322 - DNA, 31 bp, Homo sapiens; identical to SEQ ID NO: 14159
  chr1:12635041-12635072
  hypo

SEQ ID NO: 59323 - DNA, 344 bp, Homo sapiens
  chr1:12638788-12639132
  hypo
gcagcactgtggtggcgctgactcccggacagtccagcagccccagggtcaggctctccatgaaggcgaaggctgacgctttggatgtgcagtagtcgatggcaccggggatggcagacagtgccagcacggagttgaggcacacgatgtggccattctgcagctccagcatacgtggcaggaaggccttggtggtctgagggcagatggggtgtcagggtggagcagccgcagctctgacaacccctccacctttctttcggggagaacagcccaccccggacacacatgatgctctagggcccgagccttcctgcgagggagagggccgagggctccctgcc

SEQ ID NO: 59324 - DNA, 30 bp, Homo sapiens
  chr1:12639391-12639421
  hypo
tcccatggaccacggcggcattgttcacca

SEQ ID NO: 59325 - DNA, 36 bp, Homo sapiens
  chr1:12639821-12639857
  hypo
tatggcttactcctaagtgaacgagtaatttctgag

SEQ ID NO: 59326 - DNA, 174 bp, Homo sapiens; identical to SEQ ID NO: 14160
  chr1:12663578-12663752
  hypo

SEQ ID NO: 59327 - DNA, 192 bp, Homo sapiens; identical to SEQ ID NO: 14161
  chr1:12711250-12711442
  hypo

SEQ ID NO: 59328 - DNA, 30 bp, Homo sapiens
  chr1:13785629-13785659
  hypo
gagcttgcagtgagccgagatcgcgccact

SEQ ID NO: 59329 - DNA, 226 bp, Homo sapiens; identical to SEQ ID NO: 35083
  chr1:13839542-13839768
  hypo

SEQ ID NO: 59330 - DNA, 20 bp, Homo sapiens
  chr1:13852299-13852319
  hypo
tttgttttttttttttggag

SEQ ID NO: 59331 - DNA, 79 bp, Homo sapiens
  chr1:13852558-13852637
  hypo
acaggcgtgagccaccgcgcctggcccgggtgtgcattttagggagctgacactggacgcagtataggggttgaactgg

SEQ ID NO: 59332 - DNA, 225 bp, Homo sapiens
  chr1:13881446-13881671
  hypo
cggtcaggcctcggcggggcctacacgcttcgctggatcactggctcccgcctcccgccccgtgcccggccgtggcagagcccttgtccgcccagcgcctatcgcggagtcaaagctgtacttcctcatcgcccggtacctatcggcgggcccgtgtcagagagcggcccaggtactggtgcaggagctggagcagtggcagttgttgccgaaggggttggactg

SEQ ID NO: 59333 - DNA, 39 bp, Homo sapiens
  chr1:13937413-13937452
  hypo
atggtgcaagaatctgttctccgcctggcgcggtggctc

SEQ ID NO: 59334 - DNA, 33 bp, Homo sapiens
  chr1:13952168-13952201
  hypo
ttatttattgagatggagtctcgctctgtcgcc

SEQ ID NO: 59335 - DNA, 32 bp, Homo sapiens
  chr1:13952440-13952472
  hypo
tgagccactgcgcctggccagggaagttattt

SEQ ID NO: 59336 - DNA, 28 bp, Homo sapiens
  chr1:13983870-13983898
  hypo
ctctccctctccctctccccacggtctc

SEQ ID NO: 59337 - DNA, 715 bp, Homo sapiens; identical to SEQ ID NO: 136
  chr1:14026481-14027196
  hypo

SEQ ID NO: 59338 - DNA, 31 bp, Homo sapiens; identical to SEQ ID NO: 14165
  chr1:14057683-14057714
  hypo

SEQ ID NO: 59339 - DNA, 30 bp, Homo sapiens
  chr1:14078729-14078759
  hypo
gttcatattgtctgcgaccttggagcgtgc

SEQ ID NO: 59340 - DNA, 1 bp, Homo sapiens
  chr1:14084650-14084651
  hypo
a

SEQ ID NO: 59341 - DNA, 30 bp, Homo sapiens
  chr1:14113188-14113218
  hypo
ggcatctgctgcttcggtgggggcccaacg

SEQ ID NO: 59342 - DNA, 30 bp, Homo sapiens
  chr1:14114200-14114230
  hypo
cactttttttgttggcgttgttaacccgga

SEQ ID NO: 59343 - DNA, 150 bp, Homo sapiens
  chr1:14114661-14114811
  hypo
tctaatttaaaagtgcggcgtctactcagcccacctggcgtctgttcacttgtttctatttgacagtaactgaatatgtgctcattccagttggatttctatgtagagggtggacgtgtagtcagacaacggtgccgagaagtaccttgt

SEQ ID NO: 59344 - DNA, 195 bp, Homo sapiens; identical to SEQ ID NO: 14167
  chr1:14121944-14122139
  hypo

SEQ ID NO: 59345 - DNA, 111 bp, Homo sapiens
  chr1:14125567-14125678
  hypo
caaacacagaggtctccgccacttacttcgtcactaagtccggcatgttcaccattgcctaaggaagaacagagaattaagaattgtgaggccgggcgcggtggctcacgc

SEQ ID NO: 59346 - DNA, 30 bp, Homo sapiens
  chr1:14138851-14138881
  hypo
cacagcacactgctcgatggtgtgcctgct

SEQ ID NO: 59347 - DNA, 26 bp, Homo sapiens
  chr1:14144189-14144215
  hypo
ccccattaaaaaatcccgagttcagc

SEQ ID NO: 59348 - DNA, 47 bp, Homo sapiens
  chr1:14149800-14149847
  hypo
ttctcgtgcgggcgcgtgagtggtcttcaaacgagggtcccgatccc

SEQ ID NO: 59349 - DNA, 121 bp, Homo sapiens; identical to SEQ ID NO: 14170
  chr1:14746303-14746424
  hypo

SEQ ID NO: 59350 - DNA, 1868 bp, Homo sapiens; identical to SEQ ID NO: 35093
  chr1:14924520-14926388
  hypo

SEQ ID NO: 59351 - DNA, 97 bp, Homo sapiens
  chr1:15042215-15042312
  hypo
ttctgattgaactaaaagtatcgcagcttcattttcttttccctttgggttaagtcggtatttaaaaggcctctccgaagagtgaaactatctctaa

SEQ ID NO: 59352 - DNA, 32 bp, Homo sapiens
  chr1:15095850-15095882
  hypo
gtcttttttcttttcttgagacggagtcgtgc

SEQ ID NO: 59353 - DNA, 91 bp, Homo sapiens; identical to SEQ ID NO: 14172
  chr1:15107454-15107545
  hypo

SEQ ID NO: 59354 - DNA, 109 bp, Homo sapiens
  chr1:15110197-15110306
  hypo
ggcggtggccttgagcggggtcctggctgaggagtaggtgttttctggtaggcaggcacggcagaggggctcctggaagacagaagggcatgggcgcacaagagacctg

SEQ ID NO: 59355 - DNA, 30 bp, Homo sapiens
  chr1:15127835-15127865
  hypo
gctcactgtcggtttcgtgacgaggggtgg

SEQ ID NO: 59356 - DNA, 211 bp, Homo sapiens
  chr1:15129597-15129808
  hypo
actacatcatggctaccgtttactgagggctccttataagacaaacgctgtgctaaagcctcccttcatctgcgcagtgtctgctgaggaaagtattggtgtccccattttacagaggaggaaactgaggcttagagaagtgaagcaagtcatcctcaggtacccaggtggggattagcggagggggattcagccccggatgtagctgacc

SEQ ID NO: 59357 - DNA, 188 bp, Homo sapiens; identical to SEQ ID NO: 14175
  chr1:15151514-15151702
  hypo

SEQ ID NO: 59358 - DNA, 209 bp, Homo sapiens
  chr1:15178285-15178494
  hypo
tcagctcttcctgacattggacgccttctcatagcagtcatcacactgtgtagcgatcgctccactaaccacccctgcaactgcaggtcactgggggagggacctagtccagctcacccggaatcctcagggcctagacatggagacccaggtcctccggaagagtttgtgagaggaatgagaaatgcgcctggactttggaacaagcc

SEQ ID NO: 59359 - DNA, 338 bp, Homo sapiens; identical to SEQ ID NO: 14176
  chr1:15194447-15194785
  hypo

SEQ ID NO: 59360 - DNA, 262 bp, Homo sapiens; identical to SEQ ID NO: 14177
  chr1:15283869-15284131
  hypo

SEQ ID NO: 59361 - DNA, 31 bp, Homo sapiens; identical to SEQ ID NO: 14178
  chr1:15304580-15304611
  hypo

SEQ ID NO: 59362 - DNA, 30 bp, Homo sapiens
  chr1:15349086-15349116
  hypo
agtcagcacccagccgagcccacagacatg

SEQ ID NO: 59363 - DNA, 18 bp, Homo sapiens
  chr1:15357051-15357069
  hypo
tggtcatacatctttaga

SEQ ID NO: 59364 - DNA, 31 bp, Homo sapiens
  chr1:15372344-15372375
  hypo
gcataggggaaaccagcgccattatccactt

SEQ ID NO: 59365 - DNA, 404 bp, Homo sapiens
  chr1:15374954-15375358
  hypo
tcaacttagaatgtcaaggcccgagcccacatgagcctaccgttgcccccgcaggagcctcccctccatggccagagccagcgttgatccttggttgttggtcctgggtcgttgatccttggtcgttggtcctgggtcgtcggtcctgggtcgctggtcctgggtcgtcggtcctgggtcgtcggtcctgggtcgtcggtcctgggtcgctggtcctgggtcgttggtcctgggtcgttgatccttggtcgttggtcctgggtcgttggtcatgggtcgtcgatcctgggtcgtcgatcctgggtcgtcgatcctgggtcgttgatccttggtcattggtcctgagtcgttggtcctgggttgttggtgctgggtcgttggtcctgggtcgttggtccttggtc

SEQ ID NO: 59366 - DNA, 30 bp, Homo sapiens; identical to SEQ ID NO: 14181
  chr1:15375572-15375602
  hypo

SEQ ID NO: 59367 - DNA, 31 bp, Homo sapiens
  chr1:15395208-15395239
  hypo
actccactgtatgtcccgagaagagggtacc

SEQ ID NO: 59368 - DNA, 31 bp, Homo sapiens; identical to SEQ ID NO: 14182
  chr1:15403423-15403454
  hypo

SEQ ID NO: 59369 - DNA, 31 bp, Homo sapiens; identical to SEQ ID NO: 14183
  chr1:15421285-15421316
  hypo

SEQ ID NO: 59370 - DNA, 31 bp, Homo sapiens
  chr1:15488500-15488531
  hypo
gcagaaggacagcaggcgtcatgtggtgaga

SEQ ID NO: 59371 - DNA, 31 bp, Homo sapiens
  chr1:15493529-15493560
  hypo
tacatttgaaatggctgggtgcggtggctca

SEQ ID NO: 59372 - DNA, 43 bp, Homo sapiens
  chr1:15524064-15524107
  hypo
tgaggctctctccaaaagccccgtactgaatcactcacctcat

SEQ ID NO: 59373 - DNA, 358 bp, Homo sapiens
  chr1:15541160-15541518
  hypo
cttttccttttcagggagtagcgggctgggcagaccggcctcccttctcgcagcctcgcacaaggagcctgagcacgtaagacatctggaatgcatcaaaggcgaggcccagccagagccggcgtgctcggtgctgctgcctaactccttcaagagcagagccgccacattcacaaagcgtctggaatcggaactgatcgtcctctctgctctttctgctttccttccaggcccttccaccgcagccatccgcacgggaggcctcgcgattgctcggaaccatcccgcaggagttcagctgatattttctagtgtggggcgagagattttgtggagcgcatttaaggggtttttgttg

SEQ ID NO: 59374 - DNA, 237 bp, Homo sapiens
  chr1:15556610-15556847
  hypo
gtgtggcaatcaaaaatgtcccgaagcattgtcaaaagtctcctgggggcctgggtcagggcgcaaaatgcccgtggttaaaaactgtacaaactgaagctttaggtctactggctacggggggttgcggggagaatgtagtatggagaagtggaaaaaaagattgtcatctgagcggcaatttccatgtttgaaaaacgaaatattgattattgcgttgggccacaagactgggag

SEQ ID NO: 59375 - DNA, 31 bp, Homo sapiens
  chr1:15721403-15721434
  hypo
tgtccagaattgtttgcgagagagatcttgg

SEQ ID NO: 59376 - DNA, 36 bp, Homo sapiens
  chr1:15751732-15751768
  hypo
cttctcggccaggcacggtggctcatgcctgtaatc

SEQ ID NO: 59377 - DNA, 30 bp, Homo sapiens
  chr1:15755171-15755201
  hypo
gaagcagcggaaagcggccttcaaggagct

SEQ ID NO: 59378 - DNA, 31 bp, Homo sapiens
  chr1:15771334-15771365
  hypo
ctgggaggagactgagcgagccctggctggg

SEQ ID NO: 59379 - DNA, 80 bp, Homo sapiens; identical to SEQ ID NO: 14184
  chr1:15836359-15836439
  hypo

SEQ ID NO: 59380 - DNA, 26 bp, Homo sapiens
  chr1:15839672-15839698
  hypo
cgaacggctcattctctttcttgtct

SEQ ID NO: 59381 - DNA, 243 bp, Homo sapiens
  chr1:15844704-15844947
  hypo
aaggttttctagggttggcttcgacaactttgctgcttgcctgttagttcgcagaaacgaagccagcatgtcctggcctgtgtcctctaagcaggagatgaacaaaggaagagcctgactccctcgagtctccagatctatgatcagctgcctggcctgatcccgccgagatccagagcctgcccgctgtttggaaagaaaggcaggatactaattatccacgtacttttatatggctctcac

SEQ ID NO: 59382 - DNA, 42 bp, Homo sapiens
  chr1:15885384-15885426
  hypo
aattcaaaatgattgacttttcgttttgggtttttgttttgt

SEQ ID NO: 59383 - DNA, 156 bp, Homo sapiens; identical to SEQ ID NO: 14185
  chr1:15892451-15892607
  hypo

SEQ ID NO: 59384 - DNA, 89 bp, Homo sapiens
  chr1:15904688-15904777
  hypo
gggtcttgtcatacacgtctatctgagagccattctgcctagagggtacgaggaccagaactaagaaggtggcaactcatcttgggtcc

SEQ ID NO: 59385 - DNA, 152 bp, Homo sapiens; identical to SEQ ID NO: 35101
  chr1:15905372-15905524
  hypo

SEQ ID NO: 59386 - DNA, 105 bp, Homo sapiens; identical to SEQ ID NO: 14186
  chr1:15930725-15930830
  hypo

SEQ ID NO: 59387 - DNA, 30 bp, Homo sapiens
  chr1:15931040-15931070
  hypo
cgctggttgtcacacgtccggaggccgagc

SEQ ID NO: 59388 - DNA, 30 bp, Homo sapiens; identical to SEQ ID NO: 14187
  chr1:16042821-16042851
  hypo

SEQ ID NO: 59389 - DNA, 157 bp, Homo sapiens
  chr1:16053710-16053867
  hypo
accacggagagcagcgagcgctccgagccgggcctgctgatccctgagatgaaggacacctccatggagcgcttggggcagcccctgagcaaggttatcgaccagctcaacgggcagctggaccccagcacctggtgctcccgtgctgagcccccag

SEQ ID NO: 59390 - DNA, 30 bp, Homo sapiens
  chr1:16054831-16054861
  hypo
atgtctacctgctccggaaaggtgcccgcc

SEQ ID NO: 59391 - DNA, 30 bp, Homo sapiens; identical to SEQ ID NO: 14189
  chr1:16057148-16057178
  hypo

SEQ ID NO: 59392 - DNA, 30 bp, Homo sapiens
  chr1:16058474-16058504
  hypo
ctaagtgccgagagcgaggccgagatggcc

SEQ ID NO: 59393 - DNA, 30 bp, Homo sapiens
  chr1:16060465-16060495
  hypo
gaaggcacgccagccggcaggcacactgtc

SEQ ID NO: 59394 - DNA, 30 bp, Homo sapiens
  chr1:16073400-16073430
  hypo
agacggtgctggtgcgcatgggcggcctct

SEQ ID NO: 59395 - DNA, 31 bp, Homo sapiens; identical to SEQ ID NO: 14190
  chr1:16077928-16077959
  hypo

SEQ ID NO: 59396 - DNA, 125 bp, Homo sapiens
  chr1:16092325-16092450
  hypo
ctcttgaattcctgcccgcccatcatagcctatgggccctgcaccgggaggcaggcactgggagaggccacagcactcttactgcctctccaagacctggttcctgactccgtgagctcatcgga

SEQ ID NO: 59397 - DNA, 31 bp, Homo sapiens
  chr1:16098311-16098342
  hypo
accacacgaggtcacacgagatggccaagga

SEQ ID NO: 59398 - DNA, 121 bp, Homo sapiens
  chr1:16101035-16101156
  hypo
gcctctcagaagaagacgaccctcgtgggttggggtgggtgtgtcgtggatggttctggcagtggcctctgtcctaggacacactggagaggtgcggcaagtgtggcgaggtggtccggga

SEQ ID NO: 59399 - DNA, 31 bp, Homo sapiens
  chr1:16109724-16109755
  hypo
ggtagaatttgggccccgagtccctgtgttc

SEQ ID NO: 59400 - DNA, 31 bp, Homo sapiens
  chr1:16124725-16124756
  hypo
ttcctgaggaatccataaacacgcaaggatt

SEQ ID NO: 59401 - DNA, 35 bp, Homo sapiens
  chr1:16138130-16138165
  hypo
agataaagtcctgaggcgagcgtaagcattgtgta

SEQ ID NO: 59402 - DNA, 27 bp, Homo sapiens
  chr1:16158191-16158218
  hypo
acaggcgttgagccactgcacccagcc

SEQ ID NO: 59403 - DNA, 27 bp, Homo sapiens
  chr1:16164912-16164939
  hypo
aatcagaagtcttggccggttttggtg

SEQ ID NO: 59404 - DNA, 86 bp, Homo sapiens
  chr1:16165178-16165264
  hypo
acagggcgacgggggggagactccgtcaaaaaaagaaaaaagaagttttgatttgcgttatttacgttctgcttgtgtcttgatgt

SEQ ID NO: 59405 - DNA, 30 bp, Homo sapiens
  chr1:16199477-16199507
  hypo
tcccgagtgctgctcggggattggatgata

SEQ ID NO: 59406 - DNA, 30 bp, Homo sapiens; identical to SEQ ID NO: 14195
  chr1:16258265-16258295
  hypo

SEQ ID NO: 59407 - DNA, 30 bp, Homo sapiens
  chr1:16259176-16259206
  hypo
ccagagaaagaagacgtgtctgcctctggg

SEQ ID NO: 59408 - DNA, 30 bp, Homo sapiens; identical to SEQ ID NO: 14196
  chr1:16260996-16261026
  hypo

SEQ ID NO: 59409 - DNA, 43 bp, Homo sapiens
  chr1:16264531-16264574
  hypo
ccccacctacagggaggaagacgtaggtagtccctgccagccc

SEQ ID NO: 59410 - DNA, 132 bp, Homo sapiens
  chr1:16270112-16270244
  hypo
ccgctgcagagcgccggggtctgcaaactgtcgctggcagtggatgcacacgtagggcttctccccgctgtggatccgaaggtgccgcttcaggttccctgtggcgagaccgagggcgaacctggcgtgggg

SEQ ID NO: 59411 - DNA, 30 bp, Homo sapiens; identical to SEQ ID NO: 14197
  chr1:16271161-16271191
  hypo

SEQ ID NO: 59412 - DNA, 30 bp, Homo sapiens; identical to SEQ ID NO: 14198
  chr1:16271747-16271777
  hypo

SEQ ID NO: 59413 - DNA, 30 bp, Homo sapiens
  chr1:16272641-16272671
  hypo
gactcaccgctggccgcactctgggcctga

SEQ ID NO: 59414 - DNA, 692 bp, Homo sapiens; identical to SEQ ID NO: 14199
  chr1:16273063-16273755
  hypo

SEQ ID NO: 59415 - DNA, 379 bp, Homo sapiens
  chr1:16274646-16275025
  hypo
gctcatggcctgaagcctgtgcgggaggcctgttgcatcccacagcctgcaggtgctgcccctggagggcctagcatggcacagggccggccatagcttctggctatcagcaagctcagccccagccctgacggggtacctgccgcgttactgatgtccaggtgcaccacgtccttctggtccacgaagagcatcttgaagtactcgctgcaggccgccagcactgctttatgagccttaaagtgaacaccgtccaccacaaaggtgcagtcacagagaagccccagctgccgctgctggttcagctgttccaagacatgctggctgtgctggggaaagtccatggctgaagaaagccaaagggcgttggggttagcac

SEQ ID NO: 59416 - DNA, 64 bp, Homo sapiens
  chr1:16276736-16276800
  hypo
cctatctgtgacctgaaggaacgcaagggagaatcgtggctgcgctgctcctatgcactggaca

SEQ ID NO: 59417 - DNA, 220 bp, Homo sapiens; identical to SEQ ID NO: 14202
  chr1:16283815-16284035
  hypo

SEQ ID NO: 59418 - DNA, 49 bp, Homo sapiens
  chr1:16314690-16314739
  hypo
tgagaatgtgactatcaagagcgaaggcgctattcagttcaacttcacg

SEQ ID NO: 59419 - DNA, 31 bp, Homo sapiens
  chr1:16320505-16320536
  hypo
agtcccatcaaggccacgagagagaaaggtg

SEQ ID NO: 59420 - DNA, 31 bp, Homo sapiens; identical to SEQ ID NO: 14203
  chr1:16363231-16363262
  hypo

SEQ ID NO: 59421 - DNA, 30 bp, Homo sapiens
  chr1:16391208-16391238
  hypo
tcccttctcgctggacgtgcagagagctgt

SEQ ID NO: 59422 - DNA, 30 bp, Homo sapiens
  chr1:16391886-16391916
  hypo
agacaatggtccctgcgctcactctctgcc

SEQ ID NO: 59423 - DNA, 149 bp, Homo sapiens; identical to SEQ ID NO: 14204
  chr1:16457639-16457788
  hypo

SEQ ID NO: 59424 - DNA, 31 bp, Homo sapiens
  chr1:16458420-16458451
  hypo
ttgcagccaagccccacgacccctccctgga

SEQ ID NO: 59425 - DNA, 57 bp, Homo sapiens; identical to SEQ ID NO: 14205
  chr1:16458831-16458888
  hypo

SEQ ID NO: 59426 - DNA, 31 bp, Homo sapiens
  chr1:16461544-16461575
  hypo
tcgtgcaccttgctgccggccccctggccct

SEQ ID NO: 59427 - DNA, 422 bp, Homo sapiens
  chr1:16464268-16464690
  hypo
ccgagccccagatggccgtcctccttaagccccacctgggcaggccccatagggcacagctgccacccctggacctcacctgtctggttgatgctgacactggcagtacggaagctgcggctggttaccaggcctgagacgccattgcgggcctccacggtgaaggtgtagttcatgtggggctccaggtcgctcactgtcacactggtgcgggtcagtccgtgaggaggctccgagtagcgcacactggcctcacacggcccgcattccccagactcgggccagcactgttcgcaggtgacgctgtagacaatgtcctcgcggcccccgctgtcctgagggggcgtccagcgcagctccaccttggcacccatgcccacggctgtgaggtagtgtggggcggaggggggtcctgcacagac

SEQ ID NO: 59428 - DNA, 103 bp, Homo sapiens
  chr1:16466890-16466993
  hypo
acagtacctactatgcgcagggctcgggctaagcactgtaccctcatttagtcctcgcaatagacctgctatatacaggcactattagcgctggttccacttt

SEQ ID NO: 59429 - DNA, 687 bp, Homo sapiens
  chr1:16474841-16475528
  hypo
cccttccctgcaacccagaaccgtcactcaccctggcaggcatcctccaccttctcgtagcctgcctggcacaggcactgcccaatgggcaccagccactcgccatccactgcacagtgcatacggggctcttcaccccccggtggcaccacggcatggtccacacaggtgccggccacagtggccagggaaggtgcatcagagccggcgatggtctcagggaagtgggccaggccctgcagcagctcggggcacttcttgtagtagacacggacggagagcagcgccacacaggcaccgatatcctggaaggccaggtagaagcctttgcgggtgagcggccccacggagcgctcctccacgttcagcttcacgtggcgtgcctcgaagtcgctgctgacggtgatctcatcgggcgcaatggtgtcaatcttggtgaacaggcgcttctggaagttggtgccgtagtccaggtccgactcggcatagtagaggttgaaagtctccttgcaggagctggcgccaccagggaagctgttgcagtcacgtacagtaaacttgagctcaatgaagatacgctcagcctctcctcggtacacccagttggtgcggagccagttgtcctggtcgccagacatcacgttgcacacggagtacatgtagatcggcatgtcattcatgatgttc

SEQ ID NO: 59430 - DNA, 900 bp, Homo sapiens; identical to SEQ ID NO: 35113
  chr1:16481895-16482795
  hypo

SEQ ID NO: 59431 - DNA, 40 bp, Homo sapiens
  chr1:16485263-16485303
  hypo
ccagcctgggtgacagagcgagagccaaaaacaaaaaaag

SEQ ID NO: 59432 - DNA, 30 bp, Homo sapiens; identical to SEQ ID NO: 14211
  chr1:16498071-16498101
  hypo

SEQ ID NO: 59433 - DNA, 80 bp, Homo sapiens
  chr1:16509213-16509293
  hypo
gtgcttggtacctggagactacggagccagcctgccggggttctagtctgaactcagtcacttcccagctgtgtaacttt

SEQ ID NO: 59434 - DNA, 454 bp, Homo sapiens
  chr1:16534316-16534770
  hypo
ctggggcctgggccccggcccaggcaccctgacggcctcaggcggccggtgagtgggcatcgcccacccccacccccacccggcatctggctgccctcagggcccatgggaggagctggtaccttcccgggctgctccggtgcctgacccagagatgagtgcccgggctgctgaattccgccccaggcgcagagaagagtgcagccgggtcatcagctccgatgccgagaagcgcctccgctcaggaccttcgaggctcactcgggtggacccagacaactccaccctgggctcctctgtgctcagggcctgctcttgcactacctggccaggctctaggaagacagcgtgggcctcggggcagccggggacctcttcacgctggtacacccgcatcttgcgccctagggttgggggcaaggagtgagagcacgggctggggtctcccccaacc

SEQ ID NO: 59435 - DNA, 53 bp, Homo sapiens
  chr1:16535244-16535297
  hypo
cagctgccagccctgctgggccgcatccccccgctggtgatctctgtatctga

SEQ ID NO: 59436 - DNA, 24 bp, Homo sapiens
  chr1:16557529-16557553
  hypo
gaaaggcattgcaggccgggcgca

SEQ ID NO: 59437 - DNA, 30 bp, Homo sapiens
  chr1:16557847-16557877
  hypo
ggccctgcagcgcgacgggcttaactcctg

SEQ ID NO: 59438 - DNA, 30 bp, Homo sapiens; identical to SEQ ID NO: 35116
  chr1:16558675-16558705
  hypo

SEQ ID NO: 59439 - DNA, 55 bp, Homo sapiens; identical to SEQ ID NO: 14212
  chr1:16567829-16567884
  hypo

SEQ ID NO: 59440 - DNA, 30 bp, Homo sapiens; identical to SEQ ID NO: 14213
  chr1:16574656-16574686
  hypo

SEQ ID NO: 59441 - DNA, 275 bp, Homo sapiens
  chr1:16577953-16578228
  hypo
agaagagccacccacagctgccgttcctggagacaaactcccaccattgaggataggagagccgtctcctctggctggggaaaggctcccttcccgggaacctgaaggagtctgcctttgagccctgggtctcagtgttccccagcggccgttaacacaaggagcttcatccatgcttcttactggagactgagagcggtactctcgggtttcaggaacgagagctggaggagtggcactgataggtgatgggcgagagttcaaactggggctga

SEQ ID NO: 59442 - DNA, 31 bp, Homo sapiens; identical to SEQ ID NO: 14214
  chr1:16598342-16598373
  hypo

SEQ ID NO: 59443 - DNA, 31 bp, Homo sapiens; identical to SEQ ID NO: 14215
  chr1:16598718-16598749
  hypo

SEQ ID NO: 59444 - DNA, 33 bp, Homo sapiens; identical to SEQ ID NO: 14216
  chr1:16624056-16624089
  hypo

SEQ ID NO: 59445 - DNA, 34 bp, Homo sapiens
  chr1:16689683-16689717
  hypo
acggtgccaggccgccactgcctcaactttttgg

SEQ ID NO: 59446 - DNA, 21 bp, Homo sapiens
  chr1:16705889-16705910
  hypo
gccctgccttagggttcagtt

SEQ ID NO: 59447 - DNA, 31 bp, Homo sapiens; identical to SEQ ID NO: 14218
  chr1:16724423-16724454
  hypo

SEQ ID NO: 59448 - DNA, 129 bp, Homo sapiens
  chr1:16810662-16810791
  hypo
cggagggcgccagacgctccctccaggcctctggctgagcccagaacgctcaagccccttcctacctggacctgcagctcgtgcttgtgtaaggtggagtggatcagggcgagcgtggaggagtctgag

SEQ ID NO: 59449 - DNA, 31 bp, Homo sapiens
  chr1:16817289-16817320
  hypo
aaaggggatcagtaggcgcttgcccaggggg

SEQ ID NO: 59450 - DNA, 31 bp, Homo sapiens; identical to SEQ ID NO: 14220
  chr1:16828209-16828240
  hypo

SEQ ID NO: 59451 - DNA, 31 bp, Homo sapiens
  chr1:16929974-16930005
  hypo
cacttccaggatccatcgggggccctccatt

SEQ ID NO: 59452 - DNA, 330 bp, Homo sapiens
  chr1:16943748-16944078
  hypo
gtggggaggaatcggcgtagagatgagaggagcagcagagacagagtctcacgcagaggtgtgcccagacaccctgaaccaagttacttaacctcgtccaccaccgtggcacccgtggggtccgtgggcccgtcggtcttccaggagggattctgtgtccctgttattgtgtgtcaacatgtgttagcctgatatttatatttttaatgagagaaaacgaactctggaatttgcgaactgttttttcgttttgctttatacctcttggacactccttccgaaggattgggtctcaagggcagtggggtgtgactacggtagacagggctg

SEQ ID NO: 59453 - DNA, 30 bp, Homo sapiens
  chr1:16955148-16955178
  hypo
caggacaaggggagcgggagcagaggggat

SEQ ID NO: 59454 - DNA, 36 bp, Homo sapiens; identical to SEQ ID NO: 14221
  chr1:16957468-16957504
  hypo

SEQ ID NO: 59455 - DNA, 45 bp, Homo sapiens
  chr1:17270868-17270913
  hypo
gtcctgggcctcctaccgtctggacccctccgatgtcgggttttc

SEQ ID NO: 59456 - DNA, 139 bp, Homo sapiens
  chr1:17280803-17280942
  hypo
gatggagcggcagaaacgagatgcccagagccggcaggagcaggaccgggtagggcaggctgggcagctgggcctctgtctcatagagaggcacatccctggctgaggagcccccaccacggggcggcatggccctgtc

SEQ ID NO: 59457 - DNA, 31 bp, Homo sapiens; identical to SEQ ID NO: 14223
  chr1:17292159-17292190
  hypo

SEQ ID NO: 59458 - DNA, 30 bp, Homo sapiens
  chr1:17293079-17293109
  hypo
gagggccagcggggcgacggggaatctgtg

SEQ ID NO: 59459 - DNA, 30 bp, Homo sapiens; identical to SEQ ID NO: 14224
  chr1:17312786-17312816
  hypo

SEQ ID NO: 59460 - DNA, 30 bp, Homo sapiens; identical to SEQ ID NO: 14225
  chr1:17313569-17313599
  hypo

SEQ ID NO: 59461 - DNA, 31 bp, Homo sapiens
  chr1:17316303-17316334
  hypo
accagggagagcgagccgtgaggaaggagac

SEQ ID NO: 59462 - DNA, 30 bp, Homo sapiens; identical to SEQ ID NO: 14226
  chr1:17330878-17330908
  hypo

SEQ ID NO: 59463 - DNA, 30 bp, Homo sapiens
  chr1:17331988-17332018
  hypo
catccagaccacgacgtgatagccgatgac

SEQ ID NO: 59464 - DNA, 30 bp, Homo sapiens; identical to SEQ ID NO: 14227
  chr1:17381965-17381995
  hypo

SEQ ID NO: 59465 - DNA, 30 bp, Homo sapiens
  chr1:17420806-17420836
  hypo
ccccacccatcccggcgcctttctgctccc

SEQ ID NO: 59466 - DNA, 20 bp, Homo sapiens
  chr1:17427170-17427190
  hypo
ttttgagacaaagtctcgct

SEQ ID NO: 59467 - DNA, 31 bp, Homo sapiens; identical to SEQ ID NO: 14228
  chr1:17546141-17546172
  hypo

SEQ ID NO: 59468 - DNA, 146 bp, Homo sapiens
  chr1:17575585-17575731
  hypo
caggggcagtgttggggttggcggccacagctaagtccaacaccagcatgtcgctgcagagaatcgtgcgtgtgtccctggagcatcccaccagcgcggtgtgtgtggctggcgtggagaccctcgtggacatttatgggtaagag

SEQ ID NO: 59469 - DNA, 209 bp, Homo sapiens; identical to SEQ ID NO: 158
  chr1:17591035-17591244
  hypo

SEQ ID NO: 59470 - DNA, 201 bp, Homo sapiens
  chr1:17702233-17702434
  hypo
aaacagccagaacttccgtgtcgctgccatctacccacctacgcctgtctagtgcctaccttcttcctttgttactaattgacgcatctggtccaaagttagtctttcttgtctcactagatcctttcttattcaagaacattcctttgtcaattcttaccaatgtaagaagccgccacccttccccgccctctagatcac

SEQ ID NO: 59471 - DNA, 60 bp, Homo sapiens
  chr1:17733649-17733709
  hypo
tctagaagaggctggctgccacgtttacatgaggccaccgaagatctaagtccagctaag

SEQ ID NO: 59472 - DNA, 45 bp, Homo sapiens; identical to SEQ ID NO: 14230
  chr1:17734377-17734422
  hypo

SEQ ID NO: 59473 - DNA, 506 bp, Homo sapiens; identical to SEQ ID NO: 14231
  chr1:17736188-17736694
  hypo

SEQ ID NO: 59474 - DNA, 455 bp, Homo sapiens
  chr1:17813198-17813653
  hypo
ccgccgctatatgtttcgtccctgcaaaattcgtatgttgaaacgtaccccacaatgtgacggtattagaaggtgtggctttgggagatgattatgtcacagccctcatgaatgagatcagtgcccttataagagaactttgctgctcccaagagcttgctcacccttctgccatgtgaggacacacagaggaagcgccatctatcaaccagaagaggggcccttggcagacaccgaacctaccaatgccttgatcttggacttttcagctgccggaacagtgagaaataaatttctgttgtctatggtattttgttatagcagagtcgattataactgagctgattaagatgctggtcccaggtcacgtatctgggtgatgacaaagttaggaataagacgttgttggcaagaccagcacccattcccacacccagtttgttattgcttttctt

SEQ ID NO: 59475 - DNA, 788 bp, Homo sapiens; identical to SEQ ID NO: 35131
  chr1:17865913-17866701
  hypo

SEQ ID NO: 59476 - DNA, 31 bp, Homo sapiens; identical to SEQ ID NO: 14233
  chr1:17897918-17897949
  hypo

SEQ ID NO: 59477 - DNA, 31 bp, Homo sapiens; identical to SEQ ID NO: 160
  chr1:17908286-17908317
  hypo

SEQ ID NO: 59478 - DNA, 214 bp, Homo sapiens
  chr1:17919149-17919363
  hypo
ggcaggtcagcaaggccggagtgggtccgcagcgtctggaggaaatcttcaagatttcccagattgccgcagacctagtctggagttgtttggaatcctgggcttctccttacatgtgctgtttcccaaatccggaacatttgagcctcctgcgtcctgtcccgcagggtccatgcgggacgtgaggcatggcagataccggctctccgcccat

SEQ ID NO: 59479 - DNA, 42 bp, Homo sapiens
  chr1:17933051-17933093
  hypo
gtggtgggattacaggtgtgagccaccgcgaccagtcagatt

SEQ ID NO: 59480 - DNA, 52 bp, Homo sapiens
  chr1:17934560-17934612
  hypo
ccaggcctaggactcacgtctgggtcccagggattcccgggtatgtgtggtg

SEQ ID NO: 59481 - DNA, 31 bp, Homo sapiens
  chr1:17939405-17939436
  hypo
ctggggtgccgcatcccgcctgcccgagctg

SEQ ID NO: 59482 - DNA, 112 bp, Homo sapiens
  chr1:17949468-17949580
  hypo
ctcaccccgccctccccggcaggactaccgcaaccccctgatggagatggagcccaaggcgctgagcgcccgcaagtgccaggtggtgttcttccgcgtgaaggagatcctg

SEQ ID NO: 59483 - DNA, 31 bp, Homo sapiens
  chr1:17973810-17973841
  hypo
ttctggctgtgctcagcgattgtgaagacta

SEQ ID NO: 59484 - DNA, 31 bp, Homo sapiens
  chr1:17992215-17992246
  hypo
aacagaaccaatggaacgtatgtgagtgtgt

SEQ ID NO: 59485 - DNA, 68 bp, Homo sapiens
  chr1:17996866-17996934
  hypo
cgctcaccggggcccgtgtcaacaccgcgtcctccgcgttcatgatctagatcgcaccgccttcaaag

SEQ ID NO: 59486 - DNA, 36 bp, Homo sapiens
  chr1:17997212-17997248
  hypo
tatgctattggatctccgcaacgctgaggagtgacc

SEQ ID NO: 59487 - DNA, 263 bp, Homo sapiens
  chr1:18006380-18006643
  hypo
gtgatctctgggcccacgactgtgtctcccagggccagctcggtggtgactgggccgggaatgggtggcacagccccttcatgctcacattcagctctggtgctcagcgttgagagtcccccatgagaccctcggaggacagcatgtgagcttggagcgaggtgcacgcttctgccccgccttgccccaccctgcccctgcccctgccctgccctgcccctgcccatctgggccacccggggttggttcgctctcttttcata

SEQ ID NO: 59488 - DNA, 57 bp, Homo sapiens; identical to SEQ ID NO: 14240
  chr1:18021387-18021444
  hypo

SEQ ID NO: 59489 - DNA, 381 bp, Homo sapiens
  chr1:18023465-18023846
  hypo
aggaggacaagccagacgggcaggcacacgagcccatgcccgatagccacgtgggccgagagctgacccgcaagaagggcatcctcttgcagtaccgcctgcgctccaccgcacacctcccgggcccgctgctctccatgcgggagccggcgcctgctgatggcgcagctttggagcacagcgaggaggacggctccatttacgagatggccgacgaccccgacatctgggtgcgcagccggccctgcgcccgcgacgcccaccgcaaggagatttgctctgtggccatcatctccggcgggcagggctaccgcaactttggcagcgctctgggcagcagtgggaggcaggccccgtgtggggagacggacagcaccctcc

SEQ ID NO: 59490 - DNA, 141 bp, Homo sapiens
  chr1:18026279-18026420
  hypo
cctccgacaacagagcgagggagggtcgggggcgccgcgaatggctcctgagacccactgaggacgtgcatcacatgtgagtggaggcctggccttagatattgataagagtaataatacccagagcgctccgggtgcctg

SEQ ID NO: 59491 - DNA, 30 bp, Homo sapiens
  chr1:18044925-18044955
  hypo
cacacacaccgctcacgcctgtgagtgttc

SEQ ID NO: 59492 - DNA, 219 bp, Homo sapiens; identical to SEQ ID NO: 35135
  chr1:18434091-18434310
  hypo

SEQ ID NO: 59493 - DNA, 38 bp, Homo sapiens; identical to SEQ ID NO: 35136
  chr1:18434751-18434789
  hypo

SEQ ID NO: 59494 - DNA, 462 bp, Homo sapiens; identical to SEQ ID NO: 35138
  chr1:18436536-18436998
  hypo

SEQ ID NO: 59495 - DNA, 708 bp, Homo sapiens; identical to SEQ ID NO: 35139
  chr1:18437043-18437751
  hypo

SEQ ID NO: 59496 - DNA, 30 bp, Homo sapiens; identical to SEQ ID NO: 14244
  chr1:18703389-18703419
  hypo

SEQ ID NO: 59497 - DNA, 341 bp, Homo sapiens; identical to SEQ ID NO: 35152
  chr1:18967249-18967590
  hypo

SEQ ID NO: 59498 - DNA, 347 bp, Homo sapiens; identical to SEQ ID NO: 35153
  chr1:18967792-18968139
  hypo

SEQ ID NO: 59499 - DNA, 232 bp, Homo sapiens; identical to SEQ ID NO: 35161
  chr1:19043510-19043742
  hypo

SEQ ID NO: 59500 - DNA, 92 bp, Homo sapiens; identical to SEQ ID NO: 35162
  chr1:19043756-19043848
  hypo

SEQ ID NO: 59501 - DNA, 30 bp, Homo sapiens
  chr1:19166653-19166683
  hypo
gaaagaacgcacggcgatacaggagatgca

SEQ ID NO: 59502 - DNA, 31 bp, Homo sapiens
  chr1:19202745-19202776
  hypo
tgtgtgtgctgtgctccggtgggattgtcct

SEQ ID NO: 59503 - DNA, 132 bp, Homo sapiens
  chr1:19203882-19204014
  hypo
cgcggcgggggtgacggtgccactcacgtcgcccactttgatccgactgtgctcctccagcagccgccctttgatctgcggccacagcgagtgcggcacgtagagacgcgagcacgcggaacacttctggcc

SEQ ID NO: 59504 - DNA, 30 bp, Homo sapiens; identical to SEQ ID NO: 14247
  chr1:19204218-19204248
  hypo

SEQ ID NO: 59505 - DNA, 30 bp, Homo sapiens; identical to SEQ ID NO: 14248
  chr1:19205975-19206005
  hypo

SEQ ID NO: 59506 - DNA, 184 bp, Homo sapiens; identical to SEQ ID NO: 14249
  chr1:19208682-19208866
  hypo

SEQ ID NO: 59507 - DNA, 30 bp, Homo sapiens
  chr1:19211972-19212002
  hypo
caccatggtcttggcgaggatctcagccct

SEQ ID NO: 59508 - DNA, 144 bp, Homo sapiens; identical to SEQ ID NO: 14250
  chr1:19245954-19246098
  hypo

SEQ ID NO: 59509 - DNA, 108 bp, Homo sapiens
  chr1:19246818-19246926
  hypo
atattcaaccttttccttctacgcattgacaattatcttaatctgtctctaactgtcttagacgacaaatgctttcagtatcagaacgcaatttctagacatttttgg

SEQ ID NO: 59510 - DNA, 175 bp, Homo sapiens
  chr1:19258709-19258884
  hypo
aaggagggtatacacaggctccgaataaacggaggctctcgtcccttctccgccttccctgtcactggctccagggtctgagagagcagcaaccttgtttctctggtctgtaaaatggtctgtttctttctggctccactgcgctatggaaatcgtggggttgcggggaggctgc

SEQ ID NO: 59511 - DNA, 58 bp, Homo sapiens
  chr1:19403631-19403689
  hypo
caagtggctgcattccctccccgtacacttcccattcgcattccccagagcaaaggga

SEQ ID NO: 59512 - DNA, 30 bp, Homo sapiens; identical to SEQ ID NO: 14251
  chr1:19419512-19419542
  hypo

SEQ ID NO: 59513 - DNA, 153 bp, Homo sapiens
  chr1:19436863-19437016
  hypo
cctaactcaccacagcgtaaccggagctcccagcagctgtcctccttggagatagaatccgtcagcagcagcatttcatactgcaggctacttgcctagaaggcaatgggaagagacatgagtcaagagggtcagctccggtccagcgactct

SEQ ID NO: 59514 - DNA, 55 bp, Homo sapiens
  chr1:19449489-19449544
  hypo
cagatgaagagcagaagtttgcggacttgacggcgcacaaatggagtctgctgga

SEQ ID NO: 59515 - DNA, 233 bp, Homo sapiens
  chr1:19491253-19491486
  hypo
ggttgctagggaaacacgacagaaatgtagttgttctacctgttttcccgaacaatgtatgtggtcagtaactgcagcagctgccggttctcctgaattacatccagctgatcagaatcttttgggggcgatgtagtcatgcgggtgagccaggcctgcaggcgcacaggttccacacaggccagttgtgccagggagccacagagatgcaacaggctcgggttagggctctt

SEQ ID NO: 59516 - DNA, 30 bp, Homo sapiens; identical to SEQ ID NO: 14252
  chr1:19526914-19526944
  hypo

SEQ ID NO: 59517 - DNA, 305 bp, Homo sapiens; identical to SEQ ID NO: 178
  chr1:19639207-19639512
  hypo

SEQ ID NO: 59518 - DNA, 31 bp, Homo sapiens; identical to SEQ ID NO: 14254
  chr1:19664319-19664350
  hypo

SEQ ID NO: 59519 - DNA, 518 bp, Homo sapiens
  chr1:19676376-19676894
  hypo
tggtcagggtcggctcggtggcaataccaacccaccaaaaacagaaccatttgtgcactgcatatattattacatccttataaaagtggctgccggaaggaaaacattttcatgtgttgtggctgcagatgttccacgaggtggttccaatggcgtctgaagccggagcctggcccgtgtgtccccagcaggcgcctctcctcctccccatggccctaacacaggcaagtgtttggaagctggcagcctttcccccagaggggatgtattacacctcccactgccacgtggcatcttctagcgcgacccgcagggcgtggccctaaggcatgggccccactcaccggcgctgaggccccgcagctcctgtgctgcagcccgagaggaaagggcctgggcttgtctaggcctccatgtctttgccttcacctcgcactaaataaacaaatgtacacaaaaggcctagagcgggacttgccagaatggcagctctcaccgattgtcaaagcacagctcca

SEQ ID NO: 59520 - DNA, 30 bp, Homo sapiens; identical to SEQ ID NO: 14256
  chr1:19680338-19680368
  hypo

SEQ ID NO: 59521 - DNA, 246 bp, Homo sapiens
  chr1:19687680-19687926
  hypo
ttaataaagaaacaacggcgacagagttagaggcggcgtggtcaatctctcacttcgaatctgttccctctctgaatcggggtgttccaactgaggtgagtcagacgtgctgagacctggcctctgcaggtacagctcaaacactacaataattcaagaatggacttgcattccattcaccaaaagggatctccagggactggagcagccacaagtctcaacctgacattccgagacaaagggagc

SEQ ID NO: 59522 - DNA, 99 bp, Homo sapiens
  chr1:19705018-19705117
  hypo
gagaaaatgactcacaggtctcgatactggtcaaaggcattgttggcttccacctccagctttctcagccgagctgacggcatggccccatcctccaag

SEQ ID NO: 59523 - DNA, 31 bp, Homo sapiens; identical to SEQ ID NO: 14257
  chr1:19708690-19708721
  hypo

SEQ ID NO: 59524 - DNA, 305 bp, Homo sapiens
  chr1:19711505-19711810
  hypo
ttagttatttacagccttgggcgaggtgacggaaagagagaggagagttgtgtatctgacagagctgcgttcgtagatcccttaccacagagaccctcccagccctcaggatccccatcatatgcgcaccctgtacactgccctccgcaggactgaatgcaattataatagaacagttgtttttgaacaacatccctctcccgttagactggaagatccatgaaggcagggggcctttggtccgctgctctatctctcatgcttgtgggtggcactcttcaaacgtctgctgcatgattggaata

SEQ ID NO: 59525 - DNA, 73 bp, Homo sapiens; identical to SEQ ID NO: 14258
  chr1:19721242-19721315
  hypo

SEQ ID NO: 59526 - DNA, 30 bp, Homo sapiens
  chr1:19722984-19723014
  hypo
tgctgtggagctgccgctgcccctcgtacc

SEQ ID NO: 59527 - DNA, 30 bp, Homo sapiens; identical to SEQ ID NO: 14259
  chr1:19746549-19746579
  hypo

SEQ ID NO: 59528 - DNA, 30 bp, Homo sapiens
  chr1:19768081-19768111
  hypo
tatactcagaactacggaactgaagaagca

SEQ ID NO: 59529 - DNA, 107 bp, Homo sapiens
  chr1:19774208-19774315
  hypo
gggagctggtggaggagggcacggctcactgacgccatccgacccagccccagcagctcgcaggccacactgctcctctccgcctcggtggccttgccagaatgctg

SEQ ID NO: 59530 - DNA, 30 bp, Homo sapiens; identical to SEQ ID NO: 14260
  chr1:19794320-19794350
  hypo

SEQ ID NO: 59531 - DNA, 19 bp, Homo sapiens
  chr1:19949422-19949441
  hypo
ttttttttttttgaaacgg

SEQ ID NO: 59532 - DNA, 31 bp, Homo sapiens; identical to SEQ ID NO: 14262
  chr1:19950670-19950701
  hypo

SEQ ID NO: 59533 - DNA, 25 bp, Homo sapiens
  chr1:19980864-19980889
  hypo
cagcgtgggtgaccgagtgagatct

SEQ ID NO: 59534 - DNA, 88 bp, Homo sapiens
  chr1:19981387-19981475
  hypo
taagtgggagagctggggttgcgccaaggagtcggatgccagagtccatgctgtaacaccactacccggccccctgcaccttgctgtg

SEQ ID NO: 59535 - DNA, 30 bp, Homo sapiens; identical to SEQ ID NO: 14263
  chr1:19983460-19983490
  hypo

SEQ ID NO: 59536 - DNA, 31 bp, Homo sapiens
  chr1:19984081-19984112
  hypo
cagaaacaggaggctccggcccacaggtttc

SEQ ID NO: 59537 - DNA, 31 bp, Homo sapiens; identical to SEQ ID NO: 14264
  chr1:19984406-19984437
  hypo

SEQ ID NO: 59538 - DNA, 32 bp, Homo sapiens
  chr1:19984767-19984799
  hypo
tgcccagcactgtctgcgtctgctcttctgtg

SEQ ID NO: 59539 - DNA, 30 bp, Homo sapiens
  chr1:20005496-20005526
  hypo
acccactcttcatgcgggacttcaagcggg

SEQ ID NO: 59540 - DNA, 30 bp, Homo sapiens
  chr1:20005729-20005759
  hypo
ctgctgcttcctggcgaggccacccaggac

SEQ ID NO: 59541 - DNA, 208 bp, Homo sapiens; identical to SEQ ID NO: 14266
  chr1:20060817-20061025
  hypo

SEQ ID NO: 59542 - DNA, 40 bp, Homo sapiens
  chr1:20110730-20110770
  hypo
aaaggctaagctcaggctgggcgcggtagctcacgcctgt

SEQ ID NO: 59543 - DNA, 84 bp, Homo sapiens; identical to SEQ ID NO: 14267
  chr1:20127455-20127539
  hypo

SEQ ID NO: 59544 - DNA, 30 bp, Homo sapiens
  chr1:20141054-20141084
  hypo
ccatcgtaagacacccgggtagatgaaggg

SEQ ID NO: 59545 - DNA, 280 bp, Homo sapiens
  chr1:20205265-20205545
  hypo
actcactctcaaattcttttacgtggctaagtcaagaacctgaacgggccaactgccaacacttggacataccttctagtgcacgtgcatgtaatttgctttaggactatctgcgtctgagagtgtacttttgaaggagctacattgtccggagtatataccctggggttcatcgtcttgcacgaggaaaatttagaatacggatacacacgaggagtttaggaggagatgtaatatttctatttttaggatagatcacgagatgtagacactagacatt

SEQ ID NO: 59546 - DNA, 30 bp, Homo sapiens
  chr1:20210254-20210284
  hypo
tgagctaccacccccggccaggaattgcct

SEQ ID NO: 59547 - DNA, 153 bp, Homo sapiens
  chr1:20214380-20214533
  hypo
attactgcagtctagagagcacgttaggttttttggtgcgtgtgttgcaatattgtctaatagtaaattattgcgcactcaaaacatttgcgtgctctttatgtaattggttgtttttgtgaactcaaatgcgagacctgccatatatcccta

SEQ ID NO: 59548 - DNA, 200 bp, Homo sapiens
  chr1:20230246-20230446
  hypo
atgagtcatgctcatccgtgactgtccagctgggacgggagcttcagtacctctaagcgtgctgatgatcaaataaggcttgggaaccagagggaagttgtatgtaggtttcttcaagaccagcaccgtttttgtgcaaaagttcaccaggtgcgagtatagaggatcgttttctgttaagctcacggctctgaaaatca

SEQ ID NO: 59549 - DNA, 119 bp, Homo sapiens
  chr1:20247672-20247791
  hypo
cccctcttgaagttgagccttcgtctcccgtcagggctctgcccacgcccgctatgtcagcaacacccagggttggaagggactcttaacgccgagccggtcagcctcttttggggggc

SEQ ID NO: 59550 - DNA, 30 bp, Homo sapiens; identical to SEQ ID NO: 14269
  chr1:20397059-20397089
  hypo

SEQ ID NO: 59551 - DNA, 29 bp, Homo sapiens
  chr1:20498543-20498572
  hypo
ccgcgcccggccaagaagccacttcttta

SEQ ID NO: 59552 - DNA, 30 bp, Homo sapiens
  chr1:20517545-20517575
  hypo
agctcgagcttgtgccgtggagaggaaatt

SEQ ID NO: 59553 - DNA, 200 bp, Homo sapiens; identical to SEQ ID NO: 14271
  chr1:20554749-20554949
  hypo

SEQ ID NO: 59554 - DNA, 35 bp, Homo sapiens
  chr1:20680359-20680394
  hypo
agtgtccctcaccacccgcccgtctgagtccaaga

SEQ ID NO: 59555 - DNA, 31 bp, Homo sapiens; identical to SEQ ID NO: 14273
  chr1:20802147-20802178
  hypo

SEQ ID NO: 59556 - DNA, 141 bp, Homo sapiens; identical to SEQ ID NO: 35187
  chr1:20812695-20812836
  hypo

SEQ ID NO: 59557 - DNA, 483 bp, Homo sapiens; identical to SEQ ID NO: 195
  chr1:20878745-20879228
  hypo

SEQ ID NO: 59558 - DNA, 181 bp, Homo sapiens; identical to SEQ ID NO: 196
  chr1:20879255-20879436
  hypo

SEQ ID NO: 59559 - DNA, 1252 bp, Homo sapiens; identical to SEQ ID NO: 197
  chr1:20879462-20880714
  hypo

SEQ ID NO: 59560 - DNA, 35 bp, Homo sapiens; identical to SEQ ID NO: 14278
  chr1:20920112-20920147
  hypo

SEQ ID NO: 59561 - DNA, 87 bp, Homo sapiens; identical to SEQ ID NO: 35195
  chr1:20959848-20959935
  hypo

SEQ ID NO: 59562 - DNA, 157 bp, Homo sapiens
  chr1:20977498-20977655
  hypo
acctttgcccctaacacgaggaactcgtttgaagggggcagcgtagcatgtctgatttgccacctggatgaaggcagacatcaacatgggtcagcacgttcagttacgggagtgggaaattacatgaggcctgggcctctgcgttcccaagctgtgc

SEQ ID NO: 59563 - DNA, 30 bp, Homo sapiens
  chr1:20978823-20978853
  hypo
ccccctccttgccccgtctccacgctgtgc

SEQ ID NO: 59564 - DNA, 137 bp, Homo sapiens; identical to SEQ ID NO: 14281
  chr1:20983633-20983770
  hypo

SEQ ID NO: 59565 - DNA, 21 bp, Homo sapiens
  chr1:21020041-21020062
  hypo
agccaccgcacccagcctcca

SEQ ID NO: 59566 - DNA, 31 bp, Homo sapiens; identical to SEQ ID NO: 14282
  chr1:21027557-21027588
  hypo

SEQ ID NO: 59567 - DNA, 30 bp, Homo sapiens
  chr1:21030994-21031024
  hypo
ctcctcctggtactcgcgaagcagcgcatc

SEQ ID NO: 59568 - DNA, 30 bp, Homo sapiens; identical to SEQ ID NO: 14283
  chr1:21031297-21031327
  hypo

SEQ ID NO: 59569 - DNA, 31 bp, Homo sapiens; identical to SEQ ID NO: 14284
  chr1:21048390-21048421
  hypo

SEQ ID NO: 59570 - DNA, 30 bp, Homo sapiens; identical to SEQ ID NO: 14285
  chr1:21050511-21050541
  hypo

SEQ ID NO: 59571 - DNA, 65 bp, Homo sapiens; identical to SEQ ID NO: 35199
  chr1:21058220-21058285
  hypo

SEQ ID NO: 59572 - DNA, 30 bp, Homo sapiens; identical to SEQ ID NO: 14286
  chr1:21062074-21062104
  hypo

SEQ ID NO: 59573 - DNA, 158 bp, Homo sapiens; identical to SEQ ID NO: 14287
  chr1:21062547-21062705
  hypo

SEQ ID NO: 59574 - DNA, 42 bp, Homo sapiens
  chr1:21122638-21122680
  hypo
gggattacaggcgtgagccatcgcgcccggcctagaatttat

SEQ ID NO: 59575 - DNA, 80 bp, Homo sapiens
  chr1:21339356-21339436
  hypo
taaattccacaagacaggtgagaaaccgtgagttccccaagtgtaaaagcaggaaaacccgcctccgaacacacattccc

SEQ ID NO: 59576 - DNA, 30 bp, Homo sapiens
  chr1:21546262-21546292
  hypo
aggggatcagactgcgggtcacgttgagag

SEQ ID NO: 59577 - DNA, 333 bp, Homo sapiens; identical to SEQ ID NO: 201
  chr1:21563184-21563517
  hypo

SEQ ID NO: 59578 - DNA, 160 bp, Homo sapiens
  chr1:21568225-21568385
  hypo
aatttgaactcagaaagtccggctccaatgtcttccttcaaagaggccacgctctctgcctacaggtcacgaagtcctggaagtactacaggatggtgagaaaatctccaaaaggagcgagggtctgatcgatctgaccggtcaggaagcctgcatcttg

SEQ ID NO: 59579 - DNA, 823 bp, Homo sapiens
  chr1:21573387-21574210
  hypo
gggatcctcctgcctctgtctcccaaaagtcccgcaattacgggcgttcatgcccggccacaggtgatatttgtatcaccattttatgaaggaggagaatgaacttaagaaaggttacgaaatttgcccaaggctacaaagctggtagtttgaaagaggctgggatttaaacctgtgcctgtaaccaggatgtcctgctgcctctcgtaaaagcccgcccaggtcccactctcctgagtcagactgtcatccccacccctgcccacctgcccaagaagagggctgtctgtgagaggcgtgccccaggccactgggggtcctcttaccatctgtcggtggtgttgatgagagtggagatctgctcaaggtattccttgtcatagaccacaataggctcggattcattgatctccacggggtagaagatggtgttgagaaaaggcaaccagttgatggcgggtgccaaggtctgcaagggaaaaggacagtgtgaccctgtggggctgctcctcctcacagcccagggctctaggacgggcttctacaggaagcaaaggaaagagcttgggcttggcgccatctgacagcgcaccgggcagagagtcaagcggagcctggcgggcttttgtcagagatgctgtaggtagaattctaaggagtccaacaccaaaatttaacctgaaatggaatgaggatgcaatgagaagatgcagcagctgccgctaccattcagcaagcgtctcctgtgtgccaggagccgtggcaaatgattgatgcatatgattccacctggtcctcacgcgagtccaagcagtaggtacta

SEQ ID NO: 59580 - DNA, 30 bp, Homo sapiens; identical to SEQ ID NO: 14291
  chr1:21586816-21586846
  hypo

SEQ ID NO: 59581 - DNA, 221 bp, Homo sapiens
  chr1:21610540-21610761
  hypo
gtgcaatggaaagggctgggccgtgagtcagggcaccgatctgcttccaatggccgctggcctcggctgagtctcttctttgcatccctgtcgcacctgcccagcctccttcatgggactgtggaggggatccgtgagatgaggtcacagcatggggagatgtgactggtttcttacgtttcttttggaaatgaggtcccgtcaagcatgggagactggcc

SEQ ID NO: 59582 - DNA, 31 bp, Homo sapiens
  chr1:21635872-21635903
  hypo
ggtgaatcacagtacccgtcccaccaagttg

SEQ ID NO: 59583 - DNA, 21 bp, Homo sapiens
  chr1:21636560-21636581
  hypo
tacaggcgtgagccactgtgc

SEQ ID NO: 59584 - DNA, 43 bp, Homo sapiens
  chr1:21786547-21786590
  hypo
aggctgtagatagaggcgtccacctggccgttgcgcggctgcg

SEQ ID NO: 59585 - DNA, 115 bp, Homo sapiens
  chr1:21848419-21848534
  hypo
tgaatgaatgaatactcgcagcgagttaacatttcttagagactgagagtccctaagtgaaaggtcacttgcatgacctctgtgcctcagtttcatgtgtcgactccgtgagagg

SEQ ID NO: 59586 - DNA, 31 bp, Homo sapiens
  chr1:21882578-21882609
  hypo
ttctgttggagattcacgcggaagtgtttcc

SEQ ID NO: 59587 - DNA, 125 bp, Homo sapiens
  chr1:21889587-21889712
  hypo
ctctcccacctgcagacgtacaacaccaatgcccaggtccctgacagtgccggcaccgccaccgcctacctgtgtggggtgaaggccaatgagggcaccgtgggggtaagcgcagccactgagcg

SEQ ID NO: 59588 - DNA, 31 bp, Homo sapiens
  chr1:21897870-21897901
  hypo
taggccaggtgcaggccgggtgcagtggctc

SEQ ID NO: 59589 - DNA, 30 bp, Homo sapiens
  chr1:21904469-21904499
  hypo
ggccctgaagcctccgtggaacattctgga

SEQ ID NO: 59590 - DNA, 31 bp, Homo sapiens; identical to SEQ ID NO: 14294
  chr1:21924747-21924778
  hypo

SEQ ID NO: 59591 - DNA, 167 bp, Homo sapiens; identical to SEQ ID NO: 14295
  chr1:21944016-21944183
  hypo

SEQ ID NO: 59592 - DNA, 113 bp, Homo sapiens
  chr1:21953295-21953408
  hypo
gggctaccgctattacgaatgacagtgaccgtgaccataactgacgctcattgggcctaccacatgccaggccctgtgctgagccctcgttctaggcccgagggcatggcctc

SEQ ID NO: 59593 - DNA, 30 bp, Homo sapiens; identical to SEQ ID NO: 14296
  chr1:22001552-22001582
  hypo

SEQ ID NO: 59594 - DNA, 212 bp, Homo sapiens; identical to SEQ ID NO: 14297
  chr1:22003570-22003782
  hypo

SEQ ID NO: 59595 - DNA, 30 bp, Homo sapiens; identical to SEQ ID NO: 14298
  chr1:22023401-22023431
  hypo

SEQ ID NO: 59596 - DNA, 224 bp, Homo sapiens; identical to SEQ ID NO: 14299
  chr1:22023678-22023902
  hypo

SEQ ID NO: 59597 - DNA, 194 bp, Homo sapiens; identical to SEQ ID NO: 14300
  chr1:22032530-22032724
  hypo

SEQ ID NO: 59598 - DNA, 121 bp, Homo sapiens
  chr1:22092120-22092241
  hypo
gggggacagcccgaagctgaacaaggcatgagacgttccgaagctaaacaaggtgtgagacataactaacaatttttctagtggaagatgaggtcttaaaaagccaatttaggccgggtgt

SEQ ID NO: 59599 - DNA, 30 bp, Homo sapiens
  chr1:22157784-22157814
  hypo
cctcgccctggatgcgcagctcccggacac

SEQ ID NO: 59600 - DNA, 50 bp, Homo sapiens
  chr1:22166017-22166067
  hypo
ccagtggatggtgggcgcggggctgcctgtggagtcgagtggaagatgac

SEQ ID NO: 59601 - DNA, 85 bp, Homo sapiens; identical to SEQ ID NO: 14301
  chr1:22179017-22179102
  hypo

SEQ ID NO: 59602 - DNA, 30 bp, Homo sapiens
  chr1:22182128-22182158
  hypo
tggatttgtgccttcgcagggagctggccg

SEQ ID NO: 59603 - DNA, 30 bp, Homo sapiens
  chr1:22188516-22188546
  hypo
tggcagtcctcaggcgtcccggctgtggca

SEQ ID NO: 59604 - DNA, 258 bp, Homo sapiens
  chr1:22191348-22191606
  hypo
ccgatgtagcctggcgggcagcggcactcctccacctcgagggcgcggggtctgtttgagggccccggctgggcgacctccaggctgactgcgctgatgctggccgccagcggcacggaggagaacgtggcccggatcaggagctcatccaggtcggccagtgccatcaggaggtgctcgcgtgtggccggctgcccatcgggccggcgccagaattcctgggttgggggtggcaacgtgggcgggggcagtgggctt

SEQ ID NO: 59605 - DNA, 43 bp, Homo sapiens
  chr1:22192125-22192168
  hypo
gaaaggacaaaggacaaatgccgagggtgcccctggcttccat

SEQ ID NO: 59606 - DNA, 30 bp, Homo sapiens
  chr1:22195618-22195648
  hypo
gccttgctctttggacgactttcttcccaa

SEQ ID NO: 59607 - DNA, 353 bp, Homo sapiens; identical to SEQ ID NO: 14302
  chr1:22198887-22199240
  hypo

SEQ ID NO: 59608 - DNA, 30 bp, Homo sapiens
  chr1:22201424-22201454
  hypo
gttccacttccagcgcggggtcctggccgg

SEQ ID NO: 59609 - DNA, 195 bp, Homo sapiens; identical to SEQ ID NO: 14303
  chr1:22202046-22202241
  hypo

SEQ ID NO: 59610 - DNA, 56 bp, Homo sapiens
  chr1:22213893-22213949
  hypo
cacccctgccggtgcgcaccacagtctagctcatcgctgccgtcctcgcagtcctc

SEQ ID NO: 59611 - DNA, 30 bp, Homo sapiens; identical to SEQ ID NO: 14304
  chr1:22247934-22247964
  hypo

SEQ ID NO: 59612 - DNA, 30 bp, Homo sapiens; identical to SEQ ID NO: 14305
  chr1:22282669-22282699
  hypo

SEQ ID NO: 59613 - DNA, 42 bp, Homo sapiens
  chr1:22422719-22422761
  hypo
gggattataggcatgagtcactgcgcccggcctattcattca

SEQ ID NO: 59614 - DNA, 30 bp, Homo sapiens
  chr1:22446839-22446869
  hypo
cctggaggagcccacgcggcgtggctccac

SEQ ID NO: 59615 - DNA, 158 bp, Homo sapiens; identical to SEQ ID NO: 14306
  chr1:22465798-22465956
  hypo

SEQ ID NO: 59616 - DNA, 31 bp, Homo sapiens
  chr1:22498767-22498798
  hypo
ggagctatggacagaacggagagagtggggg

SEQ ID NO: 59617 - DNA, 219 bp, Homo sapiens
  chr1:22584477-22584696
  hypo
aaagcagagagtgtgcggccgggctgaggtaaggcgcccgcgactttccaatttcctggtctggcctggctctgctccgcaccgtgaatttttcattaatgtgcacaggtgacgccacggggcagccgcaggccaggtaggctcccacggcggcaaggcctgggctggaccttgctgggctgggctgggctggggatggcacagcgggttttgtaccaa

SEQ ID NO: 59618 - DNA, 30 bp, Homo sapiens; identical to SEQ ID NO: 35216
  chr1:22587712-22587742
  hypo

SEQ ID NO: 59619 - DNA, 30 bp, Homo sapiens
  chr1:22777189-22777219
  hypo
gtaaatatgatcgaccgggagacagcaaca

SEQ ID NO: 59620 - DNA, 410 bp, Homo sapiens
  chr1:22777444-22777854
  hypo
ttcagtgggccagcgcggaggtgactcagtttgttactgctggatctgatttaaatgtttgtgtaaggaagggtggcaaggggacgcttcaacagggaacgcatagtgtgtgagaaggaaaatgagcaaaagaaaagctaggactaaatcccaaagcccctaaatcccaaaattgggaggtgcgagaggcaggatcaggatgcctccaggatgccttcagcccactgcgccccaccagcgccaagcctgtcccacaaagagtgcgggctggggacgcggctcaggtcgcctctccgcctcgcacgtgaatgtgttgttttggaaaaacgaagccttttgtgttcacttccttgccctcctttgaaacaaaatcctaatcctagagctgccggagcgagactgcggagctc

SEQ ID NO: 59621 - DNA, 28 bp, Homo sapiens
  chr1:22796318-22796346
  hypo
tgtgcccggccccaccttatagttctag

SEQ ID NO: 59622 - DNA, 39 bp, Homo sapiens
  chr1:22823350-22823389
  hypo
agtcccacgataggccgtctgtaccttgaggagcaagga

SEQ ID NO: 59623 - DNA, 30 bp, Homo sapiens; identical to SEQ ID NO: 14309
  chr1:22838399-22838429
  hypo

SEQ ID NO: 59624 - DNA, 30 bp, Homo sapiens
  chr1:22854393-22854423
  hypo
gcgagcgccagctccggccagcctgggaca

SEQ ID NO: 59625 - DNA, 176 bp, Homo sapiens
  chr1:22902926-22903102
  hypo
acctggagtcggaccgcgacctgggggccagcacacaagaaagccagttcctcaaaatcgacaccattgcggccgacgagagcttcacaggtgccgaccttggtgtgcggcgtctcaagctcaacacggaggtgcgcagtgtgggtcccctcagcaagcgcggcttctacctggcc

SEQ ID NO: 59626 - DNA, 30 bp, Homo sapiens; identical to SEQ ID NO: 14310
  chr1:22903391-22903421
  hypo

SEQ ID NO: 59627 - DNA, 198 bp, Homo sapiens
  chr1:22927345-22927543
  hypo
agggtgcagggagggacggctgagcccagcgctgatcccctgcaggtcatcagctctgtggaggaggggtaccgcctgcccgcacccatgggctgcccccacgccctgcaccagctcatgctcgactgttggcacaaggaccgggcgcagcggcctcgcttctcccagattgtcagtgtcctcgatgcgctcatccgc

SEQ ID NO: 59628 - DNA, 57 bp, Homo sapiens
  chr1:22927883-22927940
  hypo
tccatccgcatgggccggtaccgagaccacttcgctgcgggcggatactcctctctg

SEQ ID NO: 59629 - DNA, 30 bp, Homo sapiens; identical to SEQ ID NO: 35220
  chr1:22953268-22953298
  hypo

SEQ ID NO: 59630 - DNA, 30 bp, Homo sapiens; identical to SEQ ID NO: 35221
  chr1:22999431-22999461
  hypo

SEQ ID NO: 59631 - DNA, 107 bp, Homo sapiens
  chr1:23021934-23022041
  hypo
tacaatacagtagccacgaggcacgtgtggtcatttaaagtccaatttaaattaattacaatgaattagaattaaaactgcacttgctcagtcgccctagtcatagt

SEQ ID NO: 59632 - DNA, 418 bp, Homo sapiens; identical to SEQ ID NO: 35223
  chr1:23036965-23037383
  hypo

SEQ ID NO: 59633 - DNA, 562 bp, Homo sapiens; identical to SEQ ID NO: 35224
  chr1:23037774-23038336
  hypo

SEQ ID NO: 59634 - DNA, 99 bp, Homo sapiens
  chr1:23058328-23058427
  hypo
tctcaaacaaaacaaaacaacaacaacaaaatcatcactgtgtagaagccagggcacagaagccagggccggaatgcttttgtgcggcctgtgccccag

SEQ ID NO: 59635 - DNA, 134 bp, Homo sapiens
  chr1:23063030-23063164
  hypo
aggagcctgggagcctcggtggggcctgcaggccgcggtctggttcccagaggccctggagggggccccttcacagcttcagcacgaggccctttgagggtgggggcagcctccgcagcgcggcatgtttgcgc

SEQ ID NO: 59636 - DNA, 34 bp, Homo sapiens
  chr1:23063498-23063532
  hypo
ctgcgaatccagccatcggcgtgacgaggaatct

SEQ ID NO: 59637 - DNA, 86 bp, Homo sapiens; identical to SEQ ID NO: 14316
  chr1:23091395-23091481
  hypo

SEQ ID NO: 59638 - DNA, 320 bp, Homo sapiens
  chr1:23111047-23111367
  hypo
gcagcagcatccccagcgtgcctggctcctgcaaggagaccttcaacctctattactatgaggctgactttgactcggccaccaagaccttccccaactggatggagaatccatgggtgaaggtggataccattgcagccgacgagagcttctcccaggtggacctgggtggccgcgtcatgaaaatcaacaccgaggtgcggagcttcggacctgtgtcccgcagcggcttctacctggccttccaggactatggcggctgcatgtccctcatcgccgtgcgtgtcttctaccgcaagtgcccccgcatcatccagaat

SEQ ID NO: 59639 - DNA, 215 bp, Homo sapiens
  chr1:23162008-23162223
  hypo
aagcacattttatgcacgagtagacatgcatgcatgtgggcatgctttcatacatgtaggcaaatcatctagaaaatgggataagaacatggacctcatggggttgtgagtgaacgagtccatggtgctccgtgcaatgcctagcccattgtaagtactcggaagtcagctttattccatatgggaatgggtctggagcacggtaaggggtacct

SEQ ID NO: 59640 - DNA, 31 bp, Homo sapiens; identical to SEQ ID NO: 14318
  chr1:23189581-23189612
  hypo

SEQ ID NO: 59641 - DNA, 344 bp, Homo sapiens
  chr1:23191505-23191849
  hypo
ccggggtgcctgcacccgctgcggggacaatgtacagtacgcaccacgccagctaggcctgaccgagccacgcatttacatcagtgacctgctggcccacacccagtacaccttcgagatccaggctgtgaacggcgttactgaccagagccccttctcgcctcagttcgcctctgtgaacatcaccaccaaccaggcaggtaagtgcttccgacgtgggccaggggagtgccccatcgcgctgtgccagggagggtcctgcagtcctcacaaaagactccttcacatctatggagtgatttcttcttttcaaaggcttttcatgtgatcggtccacctgggag

SEQ ID NO: 59642 - DNA, 212 bp, Homo sapiens; identical to SEQ ID NO: 14320
  chr1:23201491-23201703
  hypo

SEQ ID NO: 59643 - DNA, 180 bp, Homo sapiens
  chr1:23208895-23209075
  hypo
gacagcattaccctgtcgtggtcccagccggaccagcccaatggcgtgatcctggactatgagctgcagtactatgagaaggtacctattggctgggtgctgtccccatcacccacctccctgagggcccctctcccaggctgaggcctgggagttctgccccaccgcaagatgagacgc

SEQ ID NO: 59644 - DNA, 80 bp, Homo sapiens
  chr1:23270401-23270481
  hypo
tatacagatgtagatccgacagtcctaagaattccatgttaattaatgtgaactattttgtaatacgcagatgatatctt

SEQ ID NO: 59645 - DNA, 173 bp, Homo sapiens; identical to SEQ ID NO: 35226
  chr1:23346197-23346370
  hypo

SEQ ID NO: 59646 - DNA, 30 bp, Homo sapiens; identical to SEQ ID NO: 35227
  chr1:23347437-23347467
  hypo

SEQ ID NO: 59647 - DNA, 189 bp, Homo sapiens; identical to SEQ ID NO: 14322
  chr1:23411431-23411620
  hypo

SEQ ID NO: 59648 - DNA, 30 bp, Homo sapiens; identical to SEQ ID NO: 14323
  chr1:23418390-23418420
  hypo

SEQ ID NO: 59649 - DNA, 37 bp, Homo sapiens; identical to SEQ ID NO: 14324
  chr1:23440074-23440111
  hypo

SEQ ID NO: 59650 - DNA, 31 bp, Homo sapiens
  chr1:23449686-23449717
  hypo
tataagaatcattaggctggccgggcgcggt

SEQ ID NO: 59651 - DNA, 31 bp, Homo sapiens
  chr1:23479365-23479396
  hypo
ttttcttctttctctacgttattaagtccca

SEQ ID NO: 59652 - DNA, 30 bp, Homo sapiens
  chr1:23501978-23502008
  hypo
tcatcccccattagcgcaattaggacagtc

SEQ ID NO: 59653 - DNA, 30 bp, Homo sapiens
  chr1:23520068-23520098
  hypo
atgatgagcaacaccgagggaatgtagaag

SEQ ID NO: 59654 - DNA, 149 bp, Homo sapiens; identical to SEQ ID NO: 35230
  chr1:23543644-23543793
  hypo

SEQ ID NO: 59655 - DNA, 43 bp, Homo sapiens
  chr1:23566832-23566875
  hypo
ataaatttttctttatggcaacgacactgttaacaaagccaaa

SEQ ID NO: 59656 - DNA, 121 bp, Homo sapiens
  chr1:23567754-23567875
  hypo
aaaaaaaaaaaacagttcataggaagaagacaaagaacccactagaaaaatgggcaaatgcccgggtgcggtggctcacggatcacgaggtcaggagatcgagaccacggtgaaaccccgt

SEQ ID NO: 59657 - DNA, 21 bp, Homo sapiens
  chr1:23596387-23596408
  hypo
ttttttttttaagcaaagtct

SEQ ID NO: 59658 - DNA, 215 bp, Homo sapiens
  chr1:23693472-23693687
  hypo
ctaagtcattttgacacgatctcaaaaacgtggaggcaaagaaaggtagaatccttacttacctagtgagacaacatttccataattctcctgcataacatcccggtaaaggtccctctgtgcagcgtccagaggtctccattcttcccgggtgagatacatggccatatcttcaaacgtcacaggtgcctgaaatcacacgatacttccctact

SEQ ID NO: 59659 - DNA, 31 bp, Homo sapiens; identical to SEQ ID NO: 14326
  chr1:23705731-23705762
  hypo

SEQ ID NO: 59660 - DNA, 20 bp, Homo sapiens
  chr1:23714649-23714669
  hypo
aaggagggtggctgacgcga

SEQ ID NO: 59661 - DNA, 30 bp, Homo sapiens; identical to SEQ ID NO: 14328
  chr1:23762543-23762573
  hypo

SEQ ID NO: 59662 - DNA, 204 bp, Homo sapiens
  chr1:23768672-23768876
  hypo
acctacttgtgctgggcgtggaagaacttgatgaggctctgaaggaagtcaggaccttgcttcatctggctctccccggctttgagcagatactaggaggagggcagggcaagatacgtgatgtgagctgaagcagaatcctgggaacgaggggctgcagtccccatcccaggctaatcctcctggctgcgactgggccttggt

SEQ ID NO: 59663 - DNA, 47 bp, Homo sapiens; identical to SEQ ID NO: 35237
  chr1:23857852-23857899
  hypo

SEQ ID NO: 59664 - DNA, 30 bp, Homo sapiens; identical to SEQ ID NO: 217
  chr1:23865146-23865176
  hypo

SEQ ID NO: 59665 - DNA, 26 bp, Homo sapiens
  chr1:23927427-23927453
  hypo
caagccaggcacagtggctcacgcct

SEQ ID NO: 59666 - DNA, 102 bp, Homo sapiens; identical to SEQ ID NO: 14331
  chr1:23954417-23954519
  hypo

SEQ ID NO: 59667 - DNA, 144 bp, Homo sapiens; identical to SEQ ID NO: 14332
  chr1:23963132-23963276
  hypo

SEQ ID NO: 59668 - DNA, 29 bp, Homo sapiens
  chr1:24017887-24017916
  hypo
acacagcgaggctccgtctcaaaaaataa

SEQ ID NO: 59669 - DNA, 30 bp, Homo sapiens; identical to SEQ ID NO: 14333
  chr1:24086205-24086235
  hypo

SEQ ID NO: 59670 - DNA, 106 bp, Homo sapiens
  chr1:24110631-24110737
  hypo
tgcttctcattatgccgctcataaatgtttactattattattattctgtggtgcatcattcttagaaacactttgaagtaaacatttgctttcttttttttttttt

SEQ ID NO: 59671 - DNA, 46 bp, Homo sapiens; identical to SEQ ID NO: 14335
  chr1:24111036-24111082
  hypo

SEQ ID NO: 59672 - DNA, 138 bp, Homo sapiens
  chr1:24119186-24119324
  hypo
catgtctgtgcccctgctcaccgatgctgccaccgtgtctggagctgagcgggaaacggccgcggtaagggtcccctttcacccacggccagacactgtgggagcagctggaggaccggctggagggggtgtgggaaa

SEQ ID NO: 59673 - DNA, 381 bp, Homo sapiens; identical to SEQ ID NO: 219
  chr1:24126328-24126709
  hypo

SEQ ID NO: 59674 - DNA, 30 bp, Homo sapiens
  chr1:24201756-24201786
  hypo
gaaggtcatagtcacgctgccaatcttcag

SEQ ID NO: 59675 - DNA, 31 bp, Homo sapiens
  chr1:24228243-24228274
  hypo
ttgagctcaatcttcacgctgtactcagcct

SEQ ID NO: 59676 - DNA, 30 bp, Homo sapiens; identical to SEQ ID NO: 220
  chr1:24377790-24377820
  hypo

SEQ ID NO: 59677 - DNA, 269 bp, Homo sapiens
  chr1:24424242-24424511
  hypo
aaggcccccagggaagcgggagtctccagggctgccctggtcacccaatgccaggctgaacagccttgtgcctatggcccttcctcaggtctcacgcagacccatgtccttgtctgcccagcttgggtttgctgtggcccggagtgcctgttggggttgggaggacttactgcggacgaggactttggcgaaggaggaggcctggccgtgggcgttcttcactcgcacagtgtaagttgctgagtcctcaatggcgcatctgaaaagga

SEQ ID NO: 59678 - DNA, 206 bp, Homo sapiens
  chr1:24426173-24426379
  hypo
taatctccagggacagcagcccgtagttgttggtgattcggtattttccggcacgaaagaggcggggatcaatccgtgtgtcatttttgtacctgtggggacatagcggtctgtggcaggcagggtggttctaagcgggaggggtctggagcctctcggatggggattccagctgcaggtttttgttttgttttgtttttttgaga

SEQ ID NO: 59679 - DNA, 262 bp, Homo sapiens
  chr1:24434923-24435185
  hypo
gggaacagggcagtggctgggcggggaccctgtggctcccacctgctgcggaaggtccgcctccgcacagaggagcccatgcgcaggctgtgctgccgctcctccttctgctcctcctcctgccggtgctccagcctgtgaacctccatggcctgggggggccgggggtcccccgcacctcccaagctgtgcggcagagtcatggttacgagagcaacaacctgtgaaggccaaggtccacggtcattccaccaggtgcccg

SEQ ID NO: 59680 - DNA, 155 bp, Homo sapiens
  chr1:24611918-24612073
  hypo
atgtggcagctgctccccaaacgcagctacaccccgacctccatcttgagagagaggagagcctgtggtgtacagcgtggccccagcaggcacctgtgctgatgggaaaacacacagacaggccaacgaatacacgtacgcgcacgcacgtacag

SEQ ID NO: 59681 - DNA, 30 bp, Homo sapiens
  chr1:24612362-24612392
  hypo
ctgtgctccaggcaccgtgtaaggcttttg

SEQ ID NO: 59682 - DNA, 30 bp, Homo sapiens; identical to SEQ ID NO: 14340
  chr1:24627473-24627503
  hypo

SEQ ID NO: 59683 - DNA, 30 bp, Homo sapiens
  chr1:24681517-24681547
  hypo
gtaaatagcactaacgatcgactggaacaa

SEQ ID NO: 59684 - DNA, 33 bp, Homo sapiens; identical to SEQ ID NO: 14341
  chr1:24683005-24683038
  hypo

SEQ ID NO: 59685 - DNA, 32 bp, Homo sapiens
  chr1:24701634-24701666
  hypo
atacatttgagagtgcgcgatgtgttcagaac

SEQ ID NO: 59686 - DNA, 30 bp, Homo sapiens
  chr1:24702010-24702040
  hypo
gttaattactggacacggagagttggggag

SEQ ID NO: 59687 - DNA, 30 bp, Homo sapiens
  chr1:24705672-24705702
  hypo
atccatgccattctgcgtcagtgaatacaa

SEQ ID NO: 59688 - DNA, 89 bp, Homo sapiens
  chr1:24706235-24706324
  hypo
cttggaaataaaatccgatgggatagtgtatgcattcgctgcagggtatttagaaatgatggtgtccaatcgggcgcactgtaaggaga

SEQ ID NO: 59689 - DNA, 175 bp, Homo sapiens
  chr1:24713103-24713278
  hypo
ctctgggagggaaatgtcaagcgttctcctgtgacttctagaggtgggcggatgccaccctcagagaggcctttcgcctgtgcaaaaacagttcctgcgactgacattctgtgacttggatgaatttagcctctcagagcaaatcccagagaacgagaatccaagttgtgactgg

SEQ ID NO: 59690 - DNA, 31 bp, Homo sapiens
  chr1:24877032-24877063
  hypo
gtaattactctttgtgcgtgtgcatgtgcgt

SEQ ID NO: 59691 - DNA, 30 bp, Homo sapiens
  chr1:24975449-24975479
  hypo
cacaagaaaacatcgcgggaatcccttctg

SEQ ID NO: 59692 - DNA, 36 bp, Homo sapiens
  chr1:24976034-24976070
  hypo
cctgacctcaagtgatctgcccgcccttggcgggat

SEQ ID NO: 59693 - DNA, 288 bp, Homo sapiens
  chr1:24976290-24976578
  hypo
ataccagtcttaatgcgtatctgtagtgtaggtgaagaaagaacaggtctggttcaaaagaagaggccgatgaaatgataatagcattggtgtttaacacacgtagaaagtagtcttcagtttgttctcaaatgttcaactatgtgtattttgaaaacctggtctttgcagattgaacaagaaaaactggcatctatgaaaaagcaagatgaagacaaagataaaagagataaggaagaaaaagaaagcagcagagaaaaaagggagcggtctcgtagcccaagaagg

SEQ ID NO: 59694 - DNA, 258 bp, Homo sapiens; identical to SEQ ID NO: 14344
  chr1:25070656-25070914
  hypo

SEQ ID NO: 59695 - DNA, 40 bp, Homo sapiens; identical to SEQ ID NO: 14345
  chr1:25115717-25115757
  hypo

SEQ ID NO: 59696 - DNA, 30 bp, Homo sapiens
  chr1:25152959-25152989
  hypo
tgtttgagaaggcgcgtgagctgtgctgtc

SEQ ID NO: 59697 - DNA, 43 bp, Homo sapiens
  chr1:25200670-25200713
  hypo
aaatatgttagagaggaaaagcgtgtttacatataacaaagta

SEQ ID NO: 59698 - DNA, 249 bp, Homo sapiens
  chr1:25228567-25228816
  hypo
gttgttagggtccccgcctccagcgggaggagtccaccagggcggtcagtagggccgccacacggcctcatccatgcggcctggcgtgctcagggccgtgggtgagttgctgtggctgccgtcggcctccacgccatcactctggccgcccaggctggggttcatgaggttgccggcggcgacagaggcagcgctgctggtgcaagaggccagcatgcgggtaggtgagcggtcgcccccactgctgct

SEQ ID NO: 59699 - DNA, 123 bp, Homo sapiens
  chr1:25229084-25229207
  hypo
gtgagggttggcagcgtggggaaggagcggtcaaactggcgggggtcggagaatgggttcagttccgaggtgcctggaggacagcagggaagaggtcagttccagctcgagacaaccccagga

SEQ ID NO: 59700 - DNA, 32 bp, Homo sapiens; identical to SEQ ID NO: 14347
  chr1:25230201-25230233
  hypo

SEQ ID NO: 59701 - DNA, 43 bp, Homo sapiens
  chr1:25247523-25247566
  hypo
gtgggtaggggccaatggtctcgcactctcacctgtaccccag

SEQ ID NO: 59702 - DNA, 334 bp, Homo sapiens; identical to SEQ ID NO: 35258
  chr1:25255276-25255610
  hypo

SEQ ID NO: 59703 - DNA, 903 bp, Homo sapiens; identical to SEQ ID NO: 226
  chr1:25255920-25256823
  hypo

SEQ ID NO: 59704 - DNA, 86 bp, Homo sapiens; identical to SEQ ID NO: 35260
  chr1:25257156-25257242
  hypo

SEQ ID NO: 59705 - DNA, 134 bp, Homo sapiens; identical to SEQ ID NO: 14352
  chr1:25396319-25396453
  hypo

SEQ ID NO: 59706 - DNA, 192 bp, Homo sapiens
  chr1:25397930-25398122
  hypo
ttctccctctgctccacggatacatgctctcacttgcgctcccaaaccatctcttgtgtgtcttcatgaaaaatgagtcttcccatgagtctgatggagaaactgaggcccggaacagtcatcagaccaaagtcacatggccagtgaggagctgctgggaccggaatccaaggttcccgctgctcccaaatt

SEQ ID NO: 59707 - DNA, 193 bp, Homo sapiens
  chr1:25510192-25510385
  hypo
ctccaccctttcttgccgcagagtcagcttgctctcctgagaccgggttccagttatcttaacacaaaagcagccctattggaggcagcttctgggccagggctctccacgaggggtcttcacgtggtcagggctgccctcacccaaggtgcagcctcctcacaggcagtccagccccgcggacctgcccatg

SEQ ID NO: 59708 - DNA, 44 bp, Homo sapiens
  chr1:25565899-25565943
  hypo
acctgggcgatagagcgagatccgttcaaaatttggggttcaaa

SEQ ID NO: 59709 - DNA, 186 bp, Homo sapiens
  chr1:25718493-25718679
  hypo
cagacaaactgggtatcgttgctctctgatcattatcctccgttcccttgggtagaggctttggcaggcaccaggccacagtcagcccaaaataggctgcgaacacgtagaagtgcctcaggttcatgtggtagtctgtctgcaataaaacccagtaagagcagtgagtgtcggcatcctctgccc

SEQ ID NO: 59710 - DNA, 30 bp, Homo sapiens
  chr1:25825906-25825936
  hypo
ggctaataaaagctgcgggtctaggttttt

SEQ ID NO: 59711 - DNA, 30 bp, Homo sapiens; identical to SEQ ID NO: 14353
  chr1:25828413-25828443
  hypo

SEQ ID NO: 59712 - DNA, 30 bp, Homo sapiens; identical to SEQ ID NO: 14354
  chr1:25857404-25857434
  hypo

SEQ ID NO: 59713 - DNA, 111 bp, Homo sapiens
  chr1:25862318-25862429
  hypo
cacccagagacccacactcaacgcatggctctgtgcgagccctgggctgggcacaggaaacatctaggcaaatcagacactctcaagtacgcctcctctcaagtagcaacc

SEQ ID NO: 59714 - DNA, 30 bp, Homo sapiens
  chr1:25869053-25869083
  hypo
cagcctgggagctacgaggatgagtaaagt

SEQ ID NO: 59715 - DNA, 169 bp, Homo sapiens; identical to SEQ ID NO: 35271
  chr1:25870617-25870786
  hypo

SEQ ID NO: 59716 - DNA, 30 bp, Homo sapiens
  chr1:25889640-25889670
  hypo
agctgtgagtcctgacggggaagggggatt

SEQ ID NO: 59717 - DNA, 159 bp, Homo sapiens; identical to SEQ ID NO: 14356
  chr1:25890393-25890552
  hypo

SEQ ID NO: 59718 - DNA, 30 bp, Homo sapiens
  chr1:25895750-25895780
  hypo
atcactttttggatccgcaacactttatca

SEQ ID NO: 59719 - DNA, 30 bp, Homo sapiens
  chr1:25896321-25896351
  hypo
gcttcaagtgctgggcggggccacagctga

SEQ ID NO: 59720 - DNA, 30 bp, Homo sapiens; identical to SEQ ID NO: 14357
  chr1:25912955-25912985
  hypo

SEQ ID NO: 59721 - DNA, 30 bp, Homo sapiens; identical to SEQ ID NO: 14358
  chr1:25919275-25919305
  hypo

SEQ ID NO: 59722 - DNA, 203 bp, Homo sapiens
  chr1:25942578-25942781
  hypo
caggagccctggccccgtttagggttgtgggaaaaggaaggcacgccagtggtctgcgagggggccagtggaaacatcacctccgccgacccggccgcggtcacagctctctggcttggctccagccaccagcagcacccctgcagcccggcgttagcgctgagaagcccggggcagccgccagggcgcgggctgccagctcc

SEQ ID NO: 59723 - DNA, 47 bp, Homo sapiens
  chr1:26086990-26087037
  hypo
aattggcccaaattctagaagcgcccgcaccctccaggggagctaat

SEQ ID NO: 59724 - DNA, 31 bp, Homo sapiens
  chr1:26104541-26104572
  hypo
tctctgtgccctcccacgccccttctccctg

SEQ ID NO: 59725 - DNA, 30 bp, Homo sapiens; identical to SEQ ID NO: 14359
  chr1:26107502-26107532
  hypo

SEQ ID NO: 59726 - DNA, 215 bp, Homo sapiens; identical to SEQ ID NO: 14360
  chr1:26121477-26121692
  hypo

SEQ ID NO: 59727 - DNA, 30 bp, Homo sapiens; identical to SEQ ID NO: 35273
  chr1:26125946-26125976
  hypo

SEQ ID NO: 59728 - DNA, 31 bp, Homo sapiens; identical to SEQ ID NO: 14361
  chr1:26141989-26142020
  hypo

SEQ ID NO: 59729 - DNA, 22 bp, Homo sapiens
  chr1:26214470-26214492
  hypo
cggcccttgttgttgttgttgt

SEQ ID NO: 59730 - DNA, 30 bp, Homo sapiens
  chr1:26218488-26218518
  hypo
cttagagccagaaccggaatactattctgt

SEQ ID NO: 59731 - DNA, 30 bp, Homo sapiens; identical to SEQ ID NO: 14362
  chr1:26226634-26226664
  hypo

SEQ ID NO: 59732 - DNA, 25 bp, Homo sapiens
  chr1:26336898-26336923
  hypo
ttttgagtcggagtctcgttctgtt

SEQ ID NO: 59733 - DNA, 30 bp, Homo sapiens; identical to SEQ ID NO: 14363
  chr1:26376142-26376172
  hypo

SEQ ID NO: 59734 - DNA, 30 bp, Homo sapiens; identical to SEQ ID NO: 14364
  chr1:26467517-26467547
  hypo

SEQ ID NO: 59735 - DNA, 30 bp, Homo sapiens
  chr1:26467786-26467816
  hypo
cgagactccgtctcaaaaaaaaaaaaaaaa

SEQ ID NO: 59736 - DNA, 31 bp, Homo sapiens; identical to SEQ ID NO: 14366
  chr1:26502463-26502494
  hypo

SEQ ID NO: 59737 - DNA, 8 bp, Homo sapiens
  chr1:26634462-26634470
  hypo
atttacag

SEQ ID NO: 59738 - DNA, 30 bp, Homo sapiens; identical to SEQ ID NO: 14368
  chr1:26661671-26661701
  hypo

SEQ ID NO: 59739 - DNA, 842 bp, Homo sapiens; identical to SEQ ID NO: 35292
  chr1:26662517-26663359
  hypo

SEQ ID NO: 59740 - DNA, 195 bp, Homo sapiens
  chr1:26670608-26670803
  hypo
cgctggagcttctcatcgtcactcagataggggttctctggttcctcctcctcctcctcctctttctcttccagtgaaggcacctcctggggtccggggcccagcacccatggccccagctggtcctcctcaatggcaggcagcgtggcgtacatggacaggtaggaggagcgaggggctcgtggcagccggtga

SEQ ID NO: 59741 - DNA, 143 bp, Homo sapiens
  chr1:26678028-26678171
  hypo
aaaacagggacatttggaaagcgccataggcatcaggaaagcgacaggagagcaatgttaaaggaggcggccgatcatgagatcagatattgtcgatgacctcctaccaatcagaatttaacgtctttctcaaccagcccaac

SEQ ID NO: 59742 - DNA, 234 bp, Homo sapiens; identical to SEQ ID NO: 238
  chr1:26735162-26735396
  hypo

SEQ ID NO: 59743 - DNA, 384 bp, Homo sapiens; identical to SEQ ID NO: 35297
  chr1:26737101-26737485
  hypo

SEQ ID NO: 59744 - DNA, 30 bp, Homo sapiens; identical to SEQ ID NO: 241
  chr1:26737696-26737726
  hypo

SEQ ID NO: 59745 - DNA, 45 bp, Homo sapiens
  chr1:26796228-26796273
  hypo
acccccaatggtgcgcggaagccaggcgggcgattacaatccaat

SEQ ID NO: 59746 - DNA, 98 bp, Homo sapiens
  chr1:26807957-26808055
  hypo
ccttgtagccaggactacaggcgcacacagcaccatgtccagctagttttttgtttgggcggggtttttgaggcagaatctcaactccgtcccccagg

SEQ ID NO: 59747 - DNA, 31 bp, Homo sapiens; identical to SEQ ID NO: 14374
  chr1:26828980-26829011
  hypo

SEQ ID NO: 59748 - DNA, 107 bp, Homo sapiens; identical to SEQ ID NO: 244
  chr1:26855979-26856086
  hypo

SEQ ID NO: 59749 - DNA, 69 bp, Homo sapiens
  chr1:26885363-26885432
  hypo
ccggcctgatggaagacgacggcaagcctcgtgccccgcaggcacccctgcactcggtggtacaggtga

SEQ ID NO: 59750 - DNA, 40 bp, Homo sapiens
  chr1:26969658-26969698
  hypo
aaaatttattacaggccgggtgtggtggctcatgcctgta

SEQ ID NO: 59751 - DNA, 22 bp, Homo sapiens
  chr1:27016539-27016561
  hypo
ggcctcccgtattgtttttaaa

SEQ ID NO: 59752 - DNA, 51 bp, Homo sapiens; identical to SEQ ID NO: 14377
  chr1:27056296-27056347
  hypo

SEQ ID NO: 59753 - DNA, 118 bp, Homo sapiens; identical to SEQ ID NO: 14378
  chr1:27057987-27058105
  hypo

SEQ ID NO: 59754 - DNA, 24 bp, Homo sapiens
  chr1:27062068-27062092
  hypo
cacctcacccggcctgaaatccag

SEQ ID NO: 59755 - DNA, 19 bp, Homo sapiens
  chr1:27171709-27171728
  hypo
ccagccctttacatattct

SEQ ID NO: 59756 - DNA, 30 bp, Homo sapiens
  chr1:27180474-27180504
  hypo
tccctgaactgttccgtggctgtgccctct

SEQ ID NO: 59757 - DNA, 95 bp, Homo sapiens
  chr1:27183536-27183631
  hypo
ctctttgccccattcccgctccatgccggccagagtgtagaaagccataacgcagccatcagcacaataatgtgactctacgctgatatgctccc

SEQ ID NO: 59758 - DNA, 611 bp, Homo sapiens
  chr1:27189667-27190278
  hypo
agttagcccgccgcccgcctgtgtgtccccagagccatggagagagccagtctgatccagaaggccaagctggcagagcaggccgaacgctatgaggacatggcagccttcatgaaaggcgccgtggagaagggcgaggagctctcctgcgaagagcgaaacctgctctcagtagcctataagaacgtggtgggcggccagagggctgcctggagggtgctgtccagtattgagcagaaaagcaacgaggagggctcggaggagaaggggcccgaggtgcgtgagtaccgggagaaggtggagactgagctccagggcgtgtgcgacaccgtgctgggcctgctggacagccacctcatcaaggaggccggggacgccgagagccgggtcttctacctgaagatgaagggtgactactaccgctacctggccgaggtggccaccggtgacgacaagaagcgcatcattgactcagcccggtcagcctaccaggaggccatggacatcagcaagaaggagatgccgcccaccaaccccatccgcctgggcctggccctgaacttttccgtcttccactacgagatcgccaacagccccgaggaggccatctc

SEQ ID NO: 59759 - DNA, 26 bp, Homo sapiens
  chr1:27205371-27205397
  hypo
ccaccgcacccagccttgaagtaaac

SEQ ID NO: 59760 - DNA, 30 bp, Homo sapiens
  chr1:27217550-27217580
  hypo
aggccatgtctgtccgaaacttcatgctgg

SEQ ID NO: 59761 - DNA, 30 bp, Homo sapiens; identical to SEQ ID NO: 14382
  chr1:27220876-27220906
  hypo

SEQ ID NO: 59762 - DNA, 30 bp, Homo sapiens
  chr1:27278277-27278307
  hypo
catgggtgggggatcggccagtggctcctt

SEQ ID NO: 59763 - DNA, 30 bp, Homo sapiens
  chr1:27278555-27278585
  hypo
cacaggctccacagcgctggaggcaatccc

SEQ ID NO: 59764 - DNA, 118 bp, Homo sapiens; identical to SEQ ID NO: 35312
  chr1:27286496-27286614
  hypo

SEQ ID NO: 59765 - DNA, 250 bp, Homo sapiens; identical to SEQ ID NO: 35317
  chr1:27332736-27332986
  hypo

SEQ ID NO: 59766 - DNA, 18 bp, Homo sapiens
  chr1:27357747-27357765
  hypo
caccgcgtctttttaaac

SEQ ID NO: 59767 - DNA, 142 bp, Homo sapiens
  chr1:27426937-27427079
  hypo
aagtctccttgctccgcatcatgatgcccccatcgtcgtcctcgtcctcctcagccacctttgcaggatcccggctcaaccctaagactttgcccttcagctcttcattcaccaggtccacagactcgggtgactgcgggga

SEQ ID NO: 59768 - DNA, 80 bp, Homo sapiens
  chr1:27427839-27427919
  hypo
tgcacaccccacctttcgtatatgcagggcgcttgctccccctcccttgtgcctgtgtgggcacccgtactggcccctca

SEQ ID NO: 59769 - DNA, 31 bp, Homo sapiens
  chr1:27428622-27428653
  hypo
tggggcaatagggcatcggttaggtccccaa

SEQ ID NO: 59770 - DNA, 97 bp, Homo sapiens
  chr1:27480388-27480485
  hypo
cctggacagcctcaaatggtgcgagatgaggcaagaagctcaccagtctggtggcggccgcagcatcggagcaaacgggacttacctatcttcatga

SEQ ID NO: 59771 - DNA, 21 bp, Homo sapiens
  chr1:27494045-27494066
  hypo
agccaccgtgcccggctgtac

SEQ ID NO: 59772 - DNA, 45 bp, Homo sapiens
  chr1:27621917-27621962
  hypo
ttcatctttttaaacatgtgacgtgttttttgttttttttttttg

SEQ ID NO: 59773 - DNA, 220 bp, Homo sapiens; identical to SEQ ID NO: 14386
  chr1:27628357-27628577
  hypo

SEQ ID NO: 59774 - DNA, 31 bp, Homo sapiens
  chr1:27632598-27632629
  hypo
ctccccctcccctatacgtgtaccctggtgc

SEQ ID NO: 59775 - DNA, 30 bp, Homo sapiens
  chr1:27647872-27647902
  hypo
tgctaccactacctcgtgagagggccacag

SEQ ID NO: 59776 - DNA, 28 bp, Homo sapiens
  chr1:27648199-27648227
  hypo
agagaaaaaattccgcctcagaaaaaaa

SEQ ID NO: 59777 - DNA, 30 bp, Homo sapiens
  chr1:27679946-27679976
  hypo
agctggggggcacacgcctcagcctgggca

SEQ ID NO: 59778 - DNA, 31 bp, Homo sapiens
  chr1:27684980-27685011
  hypo
cccagcagtgtctgggcgctggctcggaggc

SEQ ID NO: 59779 - DNA, 103 bp, Homo sapiens
  chr1:27694478-27694581
  hypo
caaaggacaggcatgggcaaccgacaggctgagaaagctgtgcaattcccagccagggcggtggctcatgcctgtaatcccactttgggaggccaagatgagt

SEQ ID NO: 59780 - DNA, 80 bp, Homo sapiens; identical to SEQ ID NO: 251
  chr1:27719136-27719216
  hypo

SEQ ID NO: 59781 - DNA, 19 bp, Homo sapiens
  chr1:27782814-27782833
  hypo
agagcgagactctaaaaaa

SEQ ID NO: 59782 - DNA, 45 bp, Homo sapiens; identical to SEQ ID NO: 14389
  chr1:27798547-27798592
  hypo

SEQ ID NO: 59783 - DNA, 17 bp, Homo sapiens
  chr1:27819646-27819663
  hypo
ttttttttttggagaca

SEQ ID NO: 59784 - DNA, 77 bp, Homo sapiens
  chr1:27862695-27862772
  hypo
catttaaattctgctcagcctcggctgctgtctgctgggcagtcagccccggggacgacttttgtcctgaggctgga

SEQ ID NO: 59785 - DNA, 35 bp, Homo sapiens
  chr1:27868418-27868453
  hypo
gcgtgagccaccgcgcctggcaaggaggttttaaa

SEQ ID NO: 59786 - DNA, 915 bp, Homo sapiens
  chr1:27875529-27876444
  hypo
ttggtggcaggcaggggcccccggtaggcggtggggcatagccggcgctgtgggcgctgctgggtgaggcagggaggctgttgccactgccataggcgaagctgcagtccttgctgttagcgcagtcctggcctgtaaagggcttagttggggcgaatacgctttgtccggccccatagccgccgtactggggcaggtaggtgttggcaggcgggtgggtggtaggtgagcgggccatggctgagggcgggggcaccagcttggggaaggtctcggctgcccggcagtctgaagcggctggagttagcccatagcttgctgctcgtcctggtgggaaggtctggcgcgcggacaggacaggctgaaaggaggggtccgccccagccccgctgctacccactgccactgggctggccttggctccccggctagggaaggtggccaggccccgctgggcaggcagggcactggtgggtggccctgcataggtgcccgatgccttccgggactctgggcgagaggctgagagggcaaagtccaagagatcggaggagtcatccgaatcgagcagcgagcgaaagtagccggtgaagaggttttggcgctcctggctgagctcggtctggcctgagggtgcacccgtgctgtagtagctgccacggcctgaggctccactctccagcccagtggaggcaaaggcccgggcctcggtcccctgaaacccacagtttcggccagcttgtccgcctgggtgcccatggtgaggggcccagccaccacccttatccccggcccactcagcacctgcctccccaaagcctgggccactgggcacctgctctgggaacagagtcccattcttccgggaccgtctcttgcgctttggcttcccagtcacagcgtctacctcccccc

SEQ ID NO: 59787 - DNA, 30 bp, Homo sapiens
  chr1:27878394-27878424
  hypo
caaggactggtgggcgccgggtgctggggt

SEQ ID NO: 59788 - DNA, 706 bp, Homo sapiens; identical to SEQ ID NO: 35331
  chr1:27901985-27902691
  hypo

SEQ ID NO: 59789 - DNA, 96 bp, Homo sapiens; identical to SEQ ID NO: 35333
  chr1:27928760-27928856
  hypo

SEQ ID NO: 59790 - DNA, 183 bp, Homo sapiens; identical to SEQ ID NO: 35335
  chr1:27929255-27929438
  hypo

SEQ ID NO: 59791 - DNA, 129 bp, Homo sapiens; identical to SEQ ID NO: 14394
  chr1:27942072-27942201
  hypo

SEQ ID NO: 59792 - DNA, 229 bp, Homo sapiens
  chr1:27994764-27994993
  hypo
cccggcgggcacgccgcccccattcaggatcgcagaccagctcatcagcgaggcagccaccgagttggccgcgatgccggcgccggtgaagcccagcgcgggcagcccggcgactgcgagtcctggaggaacaggagcaggtgagggagcgtccgcggcagaggcccgccccgcctgcccgagatcctcgccctccagacccacctcctccgacggccatgaaggtcag

SEQ ID NO: 59793 - DNA, 24 bp, Homo sapiens
  chr1:28109852-28109876
  hypo
tttgtttttttgagatggagtcgc

SEQ ID NO: 59794 - DNA, 18 bp, Homo sapiens
  chr1:28148223-28148241
  hypo
aactttgaaacctatact

SEQ ID NO: 59795 - DNA, 34 bp, Homo sapiens
  chr1:28148832-28148866
  hypo
cgaagtgattgcctccgatcgttctcccgctgag

SEQ ID NO: 59796 - DNA, 30 bp, Homo sapiens
  chr1:28198436-28198466
  hypo
gaaaaggcttatcccgagcctgtggggtca

SEQ ID NO: 59797 - DNA, 350 bp, Homo sapiens
  chr1:28293259-28293609
  hypo
ttcagggcacagacttcatgccggaccccagctccgagtggctgtaccgggtgacggtggccaccatcctctatttctcctggttcaacgtggctgagggccgcacccgaggccgggccatcatccacttcgccttcctcctgagtgacagcattctcctggtggccacctgggtgactcatagctcctggctgcccagcgggattccactgcagctgtggctgcctgtgggatgcggctgcttctttctgggcctggctctgcggcttgtgtactaccactggctgcaccctagctgctgctggaagcccgaccctgaccaggtagacggggcccggagtctgctttct

SEQ ID NO: 59798 - DNA, 31 bp, Homo sapiens; identical to SEQ ID NO: 14398
  chr1:28364960-28364991
  hypo

SEQ ID NO: 59799 - DNA, 18 bp, Homo sapiens
  chr1:28417246-28417264
  hypo
gcccggcccccacaatct

SEQ ID NO: 59800 - DNA, 186 bp, Homo sapiens
  chr1:28447725-28447911
  hypo
aaggtggtcttgcccgagtactgcagccccacgagcatcagctccatctcctccttccagaagagcgaacggaaccagtccagcaggcgggagatgagtgccagcatgatggcggccggcagcgaggacggacgggaggacggagagtggaggcgaccacgacttccacacgagcaggcctccgcc

SEQ ID NO: 59801 - DNA, 30 bp, Homo sapiens
  chr1:28560528-28560558
  hypo
acaatatgtgaatacgtatttcacataaat

SEQ ID NO: 59802 - DNA, 6 bp, Homo sapiens
  chr1:28586928-28586934
  hypo
ccccca

SEQ ID NO: 59803 - DNA, 246 bp, Homo sapiens; identical to SEQ ID NO: 35347
  chr1:28586972-28587218
  hypo

SEQ ID NO: 59804 - DNA, 30 bp, Homo sapiens; identical to SEQ ID NO: 14399
  chr1:28599959-28599989
  hypo

SEQ ID NO: 59805 - DNA, 92 bp, Homo sapiens; identical to SEQ ID NO: 14400
  chr1:28663348-28663440
  hypo

SEQ ID NO: 59806 - DNA, 28 bp, Homo sapiens
  chr1:28678501-28678529
  hypo
ttttttttttgagtctcgcactctagcc

SEQ ID NO: 59807 - DNA, 22 bp, Homo sapiens
  chr1:28678768-28678790
  hypo
gagccaccgtgcccggctgatg

SEQ ID NO: 59808 - DNA, 79 bp, Homo sapiens; identical to SEQ ID NO: 14402
  chr1:28727741-28727820
  hypo

SEQ ID NO: 59809 - DNA, 31 bp, Homo sapiens; identical to SEQ ID NO: 14403
  chr1:28852334-28852365
  hypo

SEQ ID NO: 59810 - DNA, 34 bp, Homo sapiens
  chr1:28853111-28853145
  hypo
aatccaaaggatagggctgggcgcggtggctcac

SEQ ID NO: 59811 - DNA, 147 bp, Homo sapiens
  chr1:28853675-28853822
  hypo
caaggaatggcactcacatgccgggcaactgatgctcagagtaaccttcccacagcagccgcgatcttcagtgcatgtgtgtttttgtttttttgagacagtgtctgtctctttcgcccaggctaaagtacagtggcacaatctcag

SEQ ID NO: 59812 - DNA, 26 bp, Homo sapiens
  chr1:28854001-28854027
  hypo
gcctcgacttcccaaagtgctaggat

SEQ ID NO: 59813 - DNA, 44 bp, Homo sapiens; identical to SEQ ID NO: 14406
  chr1:28854228-28854272
  hypo

SEQ ID NO: 59814 - DNA, 180 bp, Homo sapiens; identical to SEQ ID NO: 14407
  chr1:28857206-28857386
  hypo

SEQ ID NO: 59815 - DNA, 39 bp, Homo sapiens
  chr1:28867210-28867249
  hypo
aaaaaggcttactgagccgcttgtgtattgttttcagca

SEQ ID NO: 59816 - DNA, 89 bp, Homo sapiens; identical to SEQ ID NO: 268
  chr1:28879901-28879990
  hypo

SEQ ID NO: 59817 - DNA, 7 bp, Homo sapiens
  chr1:28881075-28881082
  hypo
gggcgca

SEQ ID NO: 59818 - DNA, 121 bp, Homo sapiens
  chr1:28881381-28881502
  hypo
ataacaagtcaggacttgaattcgagtctatcctgaaagctcatgagggcccttaactcttatgccattcatttaaaaaattgtggaggatgggtgcggtgcctcatgcctgtaatcccag

SEQ ID NO: 59819 - DNA, 35 bp, Homo sapiens; identical to SEQ ID NO: 14409
  chr1:28891700-28891735
  hypo

SEQ ID NO: 59820 - DNA, 35 bp, Homo sapiens
  chr1:28986971-28987006
  hypo
gacacagggcagggtgcggtggctcacacctgtaa

SEQ ID NO: 59821 - DNA, 35 bp, Homo sapiens
  chr1:29007852-29007887
  hypo
ctgggcaacggagcgagaccgcgtctcaaaaaaaa

SEQ ID NO: 59822 - DNA, 36 bp, Homo sapiens; identical to SEQ ID NO: 14410
  chr1:29047653-29047689
  hypo

SEQ ID NO: 59823 - DNA, 30 bp, Homo sapiens
  chr1:29061398-29061428
  hypo
taaagtttatcttcacgacaaacctgttgg

SEQ ID NO: 59824 - DNA, 202 bp, Homo sapiens; identical to SEQ ID NO: 35360
  chr1:29062881-29063083
  hypo

SEQ ID NO: 59825 - DNA, 36 bp, Homo sapiens
  chr1:29074337-29074373
  hypo
gtaagaactgctggcactggccgggcgcggtggctc

SEQ ID NO: 59826 - DNA, 25 bp, Homo sapiens
  chr1:29101056-29101081
  hypo
tgctcttgtaataaaagttttcggc

SEQ ID NO: 59827 - DNA, 18 bp, Homo sapiens
  chr1:29115684-29115702
  hypo
aaataaaatccaagcccg

SEQ ID NO: 59828 - DNA, 47 bp, Homo sapiens; identical to SEQ ID NO: 14411
  chr1:29116012-29116059
  hypo

SEQ ID NO: 59829 - DNA, 30 bp, Homo sapiens; identical to SEQ ID NO: 35361
  chr1:29138921-29138951
  hypo

SEQ ID NO: 59830 - DNA, 31 bp, Homo sapiens
  chr1:29152170-29152201
  hypo
caggcgtgagccacagcgcccagcccaagaa

SEQ ID NO: 59831 - DNA, 30 bp, Homo sapiens
  chr1:29242847-29242877
  hypo
actattaaaagtgaactatgtcgggcacgg

SEQ ID NO: 59832 - DNA, 30 bp, Homo sapiens
  chr1:29376656-29376686
  hypo
tgtgggcctaagactcgtgatttggctttt

SEQ ID NO: 59833 - DNA, 30 bp, Homo sapiens; identical to SEQ ID NO: 14413
  chr1:29422779-29422809
  hypo

SEQ ID NO: 59834 - DNA, 30 bp, Homo sapiens; identical to SEQ ID NO: 14414
  chr1:29446070-29446100
  hypo

SEQ ID NO: 59835 - DNA, 1107 bp, Homo sapiens; identical to SEQ ID NO: 35362
  chr1:29448270-29449377
  hypo

SEQ ID NO: 59836 - DNA, 30 bp, Homo sapiens; identical to SEQ ID NO: 14415
  chr1:29462384-29462414
  hypo

SEQ ID NO: 59837 - DNA, 19 bp, Homo sapiens
  chr1:29465623-29465642
  hypo
gaggcactgcacccagccc

SEQ ID NO: 59838 - DNA, 80 bp, Homo sapiens
  chr1:29473802-29473882
  hypo
aaaatcctttaggaacgtgttggttccctaagatgggtgatcccaaggaacaaaacagtcattacacatgaacttttttt

SEQ ID NO: 59839 - DNA, 30 bp, Homo sapiens
  chr1:29505368-29505398
  hypo
ttcttcccagaagtcgttttcctctgtaat

SEQ ID NO: 59840 - DNA, 32 bp, Homo sapiens; identical to SEQ ID NO: 14417
  chr1:29513700-29513732
  hypo

SEQ ID NO: 59841 - DNA, 55 bp, Homo sapiens
  chr1:29605968-29606023
  hypo
tcagctaccagagcatcgagtcatcagacccggcagtgaacgtgccaggcccacg

SEQ ID NO: 59842 - DNA, 31 bp, Homo sapiens; identical to SEQ ID NO: 14419
  chr1:29644272-29644303
  hypo

SEQ ID NO: 59843 - DNA, 31 bp, Homo sapiens
  chr1:29645535-29645566
  hypo
ccacccagggggcttccgggtgtcagctgaa

SEQ ID NO: 59844 - DNA, 31 bp, Homo sapiens; identical to SEQ ID NO: 14420
  chr1:29851221-29851252
  hypo

SEQ ID NO: 59845 - DNA, 30 bp, Homo sapiens
  chr1:30092556-30092586
  hypo
tattatattattgagtcgtaagtattcttt

SEQ ID NO: 59846 - DNA, 87 bp, Homo sapiens
  chr1:30180748-30180835
  hypo
caccctgctctggctacgcagagctgcctaccatttccaagggtgccaggctccccctttctctgccagtgccgtgcctgtgcctgg

SEQ ID NO: 59847 - DNA, 31 bp, Homo sapiens; identical to SEQ ID NO: 14421
  chr1:30338581-30338612
  hypo

SEQ ID NO: 59848 - DNA, 30 bp, Homo sapiens
  chr1:30351569-30351599
  hypo
cgagagtaacgcggacggagatcacatgca

SEQ ID NO: 59849 - DNA, 31 bp, Homo sapiens; identical to SEQ ID NO: 14422
  chr1:31189130-31189161
  hypo

SEQ ID NO: 59850 - DNA, 31 bp, Homo sapiens; identical to SEQ ID NO: 274
  chr1:31192286-31192317
  hypo

SEQ ID NO: 59851 - DNA, 30 bp, Homo sapiens
  chr1:31193975-31194005
  hypo
gggctcagactggtcgggaaccaaggtcaa

SEQ ID NO: 59852 - DNA, 158 bp, Homo sapiens; identical to SEQ ID NO: 14424
  chr1:31194411-31194569
  hypo

SEQ ID NO: 59853 - DNA, 30 bp, Homo sapiens
  chr1:31215272-31215302
  hypo
cgccactccaccggcgtcccctggacctac

SEQ ID NO: 59854 - DNA, 31 bp, Homo sapiens
  chr1:31237673-31237704
  hypo
aaaaccttttgacaaacgaggagatcaacta

SEQ ID NO: 59855 - DNA, 35 bp, Homo sapiens
  chr1:31239978-31240013
  hypo
ggattacaggcatgagccaccgggcctagccttct

SEQ ID NO: 59856 - DNA, 88 bp, Homo sapiens
  chr1:31240594-31240682
  hypo
tgcctgtaaagtaagtcgcaataatccctggatttgcttatgggatttttcacctttttttttttttctccttttttgaaacagagtc

SEQ ID NO: 59857 - DNA, 89 bp, Homo sapiens; identical to SEQ ID NO: 14425
  chr1:31260792-31260881
  hypo

SEQ ID NO: 59858 - DNA, 285 bp, Homo sapiens
  chr1:31347130-31347415
  hypo
ccccaagcctcacctacgagcacctccttccgctccaggatactcttctgaggcagctgagcagctgagctgcccgagtcgatggcattgtccaggaggccagggcccgggcgggcacccttgggcagtgtcccaggtggagatgatgccttggccgcagcccctcccacagctaccacctcattggctgtgtctggttgtgtggtctcttcttctggcagctcgaagtctccactgggccccccactcaccggaacctctggctcatcccggattgtggtcagg

SEQ ID NO: 59859 - DNA, 179 bp, Homo sapiens
  chr1:31407297-31407476
  hypo
caaggaagggttgatccggtctagaaatcacctgcgcatgcttcccaggacacagagctgcatcgggtgtcacattcccactttggagcctacaggggaaactggctggtggcaaacagtccttggttccagtttcacctcccttaaactcacctgtaaaacggcgtatgcaataatgc

SEQ ID NO: 59860 - DNA, 31 bp, Homo sapiens; identical to SEQ ID NO: 14427
  chr1:31439890-31439921
  hypo

SEQ ID NO: 59861 - DNA, 65 bp, Homo sapiens; identical to SEQ ID NO: 14428
  chr1:31478715-31478780
  hypo

SEQ ID NO: 59862 - DNA, 31 bp, Homo sapiens; identical to SEQ ID NO: 14429
  chr1:31539597-31539628
  hypo

SEQ ID NO: 59863 - DNA, 17 bp, Homo sapiens
  chr1:31563198-31563215
  hypo
agcgagactttgtctca

SEQ ID NO: 59864 - DNA, 30 bp, Homo sapiens; identical to SEQ ID NO: 14431
  chr1:31567947-31567977
  hypo

SEQ ID NO: 59865 - DNA, 31 bp, Homo sapiens
  chr1:31568455-31568486
  hypo
agacctcctgcctggacgcatgaggtctgca

SEQ ID NO: 59866 - DNA, 28 bp, Homo sapiens
  chr1:31606305-31606333
  hypo
cactgcaccccagcgtgggtgactgagc

SEQ ID NO: 59867 - DNA, 31 bp, Homo sapiens
  chr1:31623745-31623776
  hypo
agttcaattcccactgcgtacctttgaattt

SEQ ID NO: 59868 - DNA, 20 bp, Homo sapiens
  chr1:31627059-31627079
  hypo
ccaccgcgccctgccaagtt

SEQ ID NO: 59869 - DNA, 28 bp, Homo sapiens
  chr1:31631012-31631040
  hypo
aattaacaatatgaatcgttattcaatt

SEQ ID NO: 59870 - DNA, 31 bp, Homo sapiens; identical to SEQ ID NO: 14433
  chr1:31632165-31632196
  hypo

SEQ ID NO: 59871 - DNA, 31 bp, Homo sapiens
  chr1:31633839-31633870
  hypo
acactctggctctgggcgggaaaaaaggaca

SEQ ID NO: 59872 - DNA, 63 bp, Homo sapiens; identical to SEQ ID NO: 14434
  chr1:31639517-31639580
  hypo

SEQ ID NO: 59873 - DNA, 37 bp, Homo sapiens; identical to SEQ ID NO: 14435
  chr1:31732223-31732260
  hypo

SEQ ID NO: 59874 - DNA, 38 bp, Homo sapiens
  chr1:31871813-31871851
  hypo
gtacacatgtgagccgctgcgcccggccagattttttt

SEQ ID NO: 59875 - DNA, 56 bp, Homo sapiens
  chr1:32050769-32050825
  hypo
ctaccccttctcgggccgtgaacgagacgaggctggccctgcgcccccctgtatga

SEQ ID NO: 59876 - DNA, 538 bp, Homo sapiens
  chr1:32091928-32092466
  hypo
cagggtgctgggatgctctggcggacagaggctgaggcgcccagcacagcgtgactgccaaatgcaaaagggctgctgctgccgtcattttcatcatcaaagggcagagaggacacaagcctcgcaacagatagtgacccccacgtacacaccaaggagagcagaggtgacctgaggcccccgagccagacaccacgttttgagtcagcctccgagccagagcacagtcaaggaatcagatggcaattgcgtctctccttgggaacccgctccagggcttctgtcctctctctctggcggtgccgaggttgcctcagggctctccctcccagctctatccctccctccctccccgccccctcataggcagcttggctggagctgcgtgggtgtccctgggctcaaggccccttcctgctgcatctgtctccttatggctgtgtcttttgtctcccaaccaaggcaaattccgggagcagtttaaggctgccttctcctgctgcctgcctggcctgggtccctgcggctctctgaaggc

SEQ ID NO: 59877 - DNA, 197 bp, Homo sapiens; identical to SEQ ID NO: 14437
  chr1:32139296-32139493
  hypo

SEQ ID NO: 59878 - DNA, 177 bp, Homo sapiens
  chr1:32156855-32157032
  hypo
gtttccagggaccactcgctacagcgagatcttctaccctcaccctctcctccagccaggatccctgggacagagccttatcttccccccgttcattccctggccagggtgggagagcggtctctgagaaaagcacagcaggagaagcaagggggtactcaccggggtcccaggcag

SEQ ID NO: 59879 - DNA, 30 bp, Homo sapiens
  chr1:32208522-32208552
  hypo
tccgcatccggctccgggacccccgcccgc

SEQ ID NO: 59880 - DNA, 120 bp, Homo sapiens
  chr1:32221873-32221993
  hypo
gatgagcaagacctcgacaaagcggaaggctagggcagcgggcgccagcaggcgcggggcctcggagggctcagccgacaggcacagctgcacgaagttcttgtcgaagtgcaggaaggt

SEQ ID NO: 59881 - DNA, 30 bp, Homo sapiens; identical to SEQ ID NO: 14439
  chr1:32224968-32224998
  hypo

SEQ ID NO: 59882 - DNA, 31 bp, Homo sapiens
  chr1:32306490-32306521
  hypo
agtgggcatggaggcacggagcagatattct

SEQ ID NO: 59883 - DNA, 18 bp, Homo sapiens
  chr1:32307624-32307642
  hypo
ttttttttttttgagacg

SEQ ID NO: 59884 - DNA, 78 bp, Homo sapiens
  chr1:32407224-32407302
  hypo
gctacctcatgggctctttcacgtatcgataataacgtatgaaaacacttgagaaaggccaggcgcggtggctcacgc

SEQ ID NO: 59885 - DNA, 30 bp, Homo sapiens
  chr1:32478209-32478239
  hypo
ataagccaccgcaccggtccccaaagactt

SEQ ID NO: 59886 - DNA, 30 bp, Homo sapiens; identical to SEQ ID NO: 14442
  chr1:32527909-32527939
  hypo

SEQ ID NO: 59887 - DNA, 47 bp, Homo sapiens; identical to SEQ ID NO: 35395
  chr1:32666346-32666393
  hypo

SEQ ID NO: 59888 - DNA, 287 bp, Homo sapiens
  chr1:32705374-32705661
  hypo
aggaccccccgcctcccgccaacacatactcacacacatgtacattcacagagccctgcaggagagggcctgggagagggtgggaggccccttacctctccagggaccagtgcaaccagccaggttaagcggccttggtctctgtgcctccgccagtcacgcgggcttgtttcgcggcctgggccgagagcgtgtccatgatgaagccccgcgcccaaggacgagcccccgccagcgcagttcgcagcagctcctggtccctgtagcagcgccgcttctggggacca

SEQ ID NO: 59889 - DNA, 30 bp, Homo sapiens
  chr1:32740387-32740417
  hypo
aggctccaatccgccggcttccccactgca

SEQ ID NO: 59890 - DNA, 30 bp, Homo sapiens; identical to SEQ ID NO: 14443
  chr1:32740743-32740773
  hypo

SEQ ID NO: 59891 - DNA, 74 bp, Homo sapiens
  chr1:32741470-32741544
  hypo
cactgcgttctttcgtcgctttgtccatccattcattcattcaggatcgttttcactgtcggtccgggacttcg

SEQ ID NO: 59892 - DNA, 48 bp, Homo sapiens; identical to SEQ ID NO: 14444
  chr1:32751093-32751141
  hypo

SEQ ID NO: 59893 - DNA, 26 bp, Homo sapiens
  chr1:32756492-32756518
  hypo
gagaaacctgccctcctaggccgggc

SEQ ID NO: 59894 - DNA, 36 bp, Homo sapiens; identical to SEQ ID NO: 287
  chr1:32757651-32757687
  hypo

SEQ ID NO: 59895 - DNA, 51 bp, Homo sapiens
  chr1:32788562-32788613
  hypo
tgaaaggacttggaaaagggccgggatatattttcacaggcttttaagaca

SEQ ID NO: 59896 - DNA, 30 bp, Homo sapiens; identical to SEQ ID NO: 14446
  chr1:32797638-32797668
  hypo

SEQ ID NO: 59897 - DNA, 77 bp, Homo sapiens
  chr1:32804500-32804577
  hypo
ctgaatgtgtggagcaaagagcggctcctttatgtctgggtgagtgttcctgtggcggtggggagctgtgtgtgcct

SEQ ID NO: 59898 - DNA, 393 bp, Homo sapiens
  chr1:32826699-32827092
  hypo
ggggtcaggaccagcaagatacgagaggagtgaagtggcgtaggttgaaaggcggaagggcgggcccctaaggctgggtccaaacgaggaggctgcggaagggaaagtgttattggactgggcagagcagctggtgggcccgacggatagacatacactgccagcccggagtggaaagaacagtttgtgctgtgctttattaaaatgtgcatcattcttttattttaaaatgtgcatcattgtctcgtgctcggcgcatgcgacctcagcgtggtggcccgctgggggcctcgttcccgcccagctcccgcggagccgcagggagcaggcgcactcacgtggcgcgggcccgggggctcccgcccatggcgaggtagacgtcgatgggcacgt

SEQ ID NO: 59899 - DNA, 102 bp, Homo sapiens; identical to SEQ ID NO: 288
  chr1:32852879-32852981
  hypo

SEQ ID NO: 59900 - DNA, 141 bp, Homo sapiens
  chr1:32950769-32950910
  hypo
ggggctgcggcgcttcgggctgtgtgacagctgcacctgcgttacagacacacccgatgatgatgatgatttgatgcccatcaaccttagcttggtggaggcttcatctgaaagccaagaaaagagcgacacagacaatga

SEQ ID NO: 59901 - DNA, 30 bp, Homo sapiens; identical to SEQ ID NO: 14448
  chr1:32964475-32964505
  hypo

SEQ ID NO: 59902 - DNA, 37 bp, Homo sapiens; identical to SEQ ID NO: 291
  chr1:33005605-33005642
  hypo

SEQ ID NO: 59903 - DNA, 33 bp, Homo sapiens
  chr1:33016263-33016296
  hypo
aaagccacaaattaggccaggcgtgttgggtca

SEQ ID NO: 59904 - DNA, 92 bp, Homo sapiens
  chr1:33016535-33016627
  hypo
caacaggagcgagactccgtctcaaaaaaaaaaaaaaaaagccacaaattaccaccgtacacacccagtacgctggacagtagttaatatgc

SEQ ID NO: 59905 - DNA, 34 bp, Homo sapiens
  chr1:33154202-33154236
  hypo
gagtacaaactttttttaaggcggagtctttgtc

SEQ ID NO: 59906 - DNA, 30 bp, Homo sapiens; identical to SEQ ID NO: 14450
  chr1:33169835-33169865
  hypo

SEQ ID NO: 59907 - DNA, 327 bp, Homo sapiens; identical to SEQ ID NO: 35411
  chr1:33207543-33207870
  hypo

SEQ ID NO: 59908 - DNA, 30 bp, Homo sapiens; identical to SEQ ID NO: 14451
  chr1:33210815-33210845
  hypo

SEQ ID NO: 59909 - DNA, 30 bp, Homo sapiens; identical to SEQ ID NO: 14452
  chr1:33216935-33216965
  hypo

SEQ ID NO: 59910 - DNA, 26 bp, Homo sapiens
  chr1:33222554-33222580
  hypo
aactcgactccatttcaaaaacaaaa

SEQ ID NO: 59911 - DNA, 216 bp, Homo sapiens
  chr1:33235516-33235732
  hypo
gggctcctggtgcacgggatgccgtacgcatccccacagtggacggccgcccccgaggcacctcagggatgggggcccgggtgtccctgcaggcgctggaggcggaggcggaggctggcgctgagacagaggccatgctgcagcgccacattgaccgtgtctaccgggatgacacctttgttggccggtccacgggtacccgggccccaccattga

SEQ ID NO: 59912 - DNA, 30 bp, Homo sapiens
  chr1:33236090-33236120
  hypo
ctctgagggccagccggagagctctacggc

SEQ ID NO: 59913 - DNA, 65 bp, Homo sapiens; identical to SEQ ID NO: 14454
  chr1:33237402-33237467
  hypo

SEQ ID NO: 59914 - DNA, 41 bp, Homo sapiens
  chr1:33271258-33271299
  hypo
agatttaaagtgacagatgtgcggccgggcacggtagctca

SEQ ID NO: 59915 - DNA, 30 bp, Homo sapiens
  chr1:33354770-33354800
  hypo
tgacctcgcgcggccgcctggagcagaagc

SEQ ID NO: 59916 - DNA, 165 bp, Homo sapiens; identical to SEQ ID NO: 14455
  chr1:33415195-33415360
  hypo

SEQ ID NO: 59917 - DNA, 79 bp, Homo sapiens; identical to SEQ ID NO: 14456
  chr1:33431247-33431326
  hypo

SEQ ID NO: 59918 - DNA, 38 bp, Homo sapiens; identical to SEQ ID NO: 14457
  chr1:33432069-33432107
  hypo

SEQ ID NO: 59919 - DNA, 481 bp, Homo sapiens
  chr1:33441466-33441947
  hypo
ggagagggagaggggtttttgttttatttttaaagaggtttttttttttgagcgggagggtttcaatagattctgccccgcaagcttcccagccacctttctcatacctacagctcatggtgtgtcgccctgccttaaaccccacactggctccccgtgcccgatgagagagcatttagatccttcataactaagactcaccttcaccctcaccagtcccaccgcctccttgcacgggagaccccatccctctggacccggggcccttccagggatagccatcacttgcatacttgcgactgctcttgctgtagggtcccctttccccctttgtgaacctagcgaattcctagaccctacttaattataataaagcaacagagggtagaaactggcactaaaatgccgcttagcaaaggtcacaaaggtgaaagcctgcagaagtcaagcaggagagagaaatacggctggtgtatcaggg

SEQ ID NO: 59920 - DNA, 30 bp, Homo sapiens
  chr1:33612976-33613006
  hypo
cggacgttaagccgcgtccagggctccgtg

SEQ ID NO: 59921 - DNA, 30 bp, Homo sapiens
  chr1:33631037-33631067
  hypo
gccggccccacctccgcgccccggccaggc

SEQ ID NO: 59922 - DNA, 30 bp, Homo sapiens
  chr1:33720515-33720545
  hypo
ggtcctctgattatcgtcatttctggaaac

SEQ ID NO: 59923 - DNA, 30 bp, Homo sapiens; identical to SEQ ID NO: 300
  chr1:33721354-33721384
  hypo

SEQ ID NO: 59924 - DNA, 114 bp, Homo sapiens; identical to SEQ ID NO: 35424
  chr1:33721592-33721706
  hypo

SEQ ID NO: 59925 - DNA, 175 bp, Homo sapiens
  chr1:33741929-33742104
  hypo
cgtcctcttcttcccgcagctggacaacctggttctgattaacaagatcaaggagcagctgatggccgagaagatcaggccgcctcacctgccgcccacgtcggcctcgtcgcagcagccgttgctagtgccgccggcacccgccgagagcagccaggccgtcatgtcgctgccc

SEQ ID NO: 59926 - DNA, 43 bp, Homo sapiens
  chr1:33763430-33763473
  hypo
gatcaagatccaaataagattcctgcatcgtagtagctcagta

SEQ ID NO: 59927 - DNA, 30 bp, Homo sapiens
  chr1:33768588-33768618
  hypo
cagaagaacaaagccggcagagaaagagca

SEQ ID NO: 59928 - DNA, 30 bp, Homo sapiens; identical to SEQ ID NO: 303
  chr1:33788139-33788169
  hypo

SEQ ID NO: 59929 - DNA, 30 bp, Homo sapiens; identical to SEQ ID NO: 14462
  chr1:33790359-33790389
  hypo

SEQ ID NO: 59930 - DNA, 31 bp, Homo sapiens; identical to SEQ ID NO: 14463
  chr1:33790728-33790759
  hypo

SEQ ID NO: 59931 - DNA, 98 bp, Homo sapiens
  chr1:33841564-33841662
  hypo
agtggataccaggtgacgactatgcagtatatacatcagctttccagtctgtggtggggccacttgggaactgaggtctctgttttttgagactggag

SEQ ID NO: 59932 - DNA, 262 bp, Homo sapiens; identical to SEQ ID NO: 35427
  chr1:33896550-33896812
  hypo

SEQ ID NO: 59933 - DNA, 30 bp, Homo sapiens
  chr1:33938889-33938919
  hypo
gtccaaggatcttccgatctttaatttctt

SEQ ID NO: 59934 - DNA, 30 bp, Homo sapiens; identical to SEQ ID NO: 14465
  chr1:33985096-33985126
  hypo

SEQ ID NO: 59935 - DNA, 30 bp, Homo sapiens
  chr1:34090838-34090868
  hypo
ctggttcgaggaaccgctgtgggggacaag

SEQ ID NO: 59936 - DNA, 21 bp, Homo sapiens
  chr1:34520320-34520341
  hypo
acagagcgagactctgtctct

SEQ ID NO: 59937 - DNA, 1270 bp, Homo sapiens; identical to SEQ ID NO: 35429
  chr1:34628643-34629913
  hypo

SEQ ID NO: 59938 - DNA, 141 bp, Homo sapiens; identical to SEQ ID NO: 307
  chr1:34630138-34630279
  hypo

SEQ ID NO: 59939 - DNA, 562 bp, Homo sapiens; identical to SEQ ID NO: 35431
  chr1:34630502-34631064
  hypo

SEQ ID NO: 59940 - DNA, 251 bp, Homo sapiens
  chr1:35116223-35116474
  hypo
cacagttccctcactcctggtcggaagacacttgaatacagattctgcgctggcagaggagtgccggcgcctccagctccctcagctcaggacctctcccctggcaggagcagggggtggaaagcgtgcgagcacgctggagctgaggaagcagcaggaaggaggggtgtgtgccagtgccatagactcgaccagggccttccacgtgccttcgctcctgtcacggtcacgtaaccttctgaggtgagcac

SEQ ID NO: 59941 - DNA, 31 bp, Homo sapiens; identical to SEQ ID NO: 310
  chr1:35208445-35208476
  hypo

SEQ ID NO: 59942 - DNA, 549 bp, Homo sapiens; identical to SEQ ID NO: 14471
  chr1:35226869-35227418
  hypo

SEQ ID NO: 59943 - DNA, 30 bp, Homo sapiens; identical to SEQ ID NO: 14472
  chr1:35245757-35245787
  hypo

SEQ ID NO: 59944 - DNA, 30 bp, Homo sapiens
  chr1:35252809-35252839
  hypo
gccagtgagccaagcgccacagccagcaaa

SEQ ID NO: 59945 - DNA, 30 bp, Homo sapiens
  chr1:35321535-35321565
  hypo
aaggagcataggtacgaaccacggtccaaa

SEQ ID NO: 59946 - DNA, 30 bp, Homo sapiens; identical to SEQ ID NO: 14473
  chr1:35326103-35326133
  hypo

SEQ ID NO: 59947 - DNA, 30 bp, Homo sapiens
  chr1:35334514-35334544
  hypo
agtaggtgggggcccggggcccaggctggg

SEQ ID NO: 59948 - DNA, 30 bp, Homo sapiens
  chr1:35394309-35394339
  hypo
gccaacgcacgcgcgcgcacacgcacacac

SEQ ID NO: 59949 - DNA, 1462 bp, Homo sapiens; identical to SEQ ID NO: 35442
  chr1:35394586-35396048
  hypo

SEQ ID NO: 59950 - DNA, 42 bp, Homo sapiens
  chr1:35442223-35442265
  hypo
ggtgtgcaggatgtcgagcgtggaggcggcgcgacaccggtc

SEQ ID NO: 59951 - DNA, 31 bp, Homo sapiens; identical to SEQ ID NO: 14476
  chr1:35479658-35479689
  hypo

SEQ ID NO: 59952 - DNA, 30 bp, Homo sapiens
  chr1:35543509-35543539
  hypo
gcaaggtgaacccacggggcatttacaatg

SEQ ID NO: 59953 - DNA, 9 bp, Homo sapiens
  chr1:35544171-35544180
  hypo
cgcagtctc

SEQ ID NO: 59954 - DNA, 23 bp, Homo sapiens
  chr1:35661112-35661135
  hypo
ttttttttttttgagacggagtc

SEQ ID NO: 59955 - DNA, 116 bp, Homo sapiens
  chr1:35664740-35664856
  hypo
ttcttaagatttatcaagttactttacctgtatgttttgcctcagggcatttgcacttgctctttactcagcctgcagtgttctccccactcgccccgccccggctctttgcacag

SEQ ID NO: 59956 - DNA, 30 bp, Homo sapiens
  chr1:35738687-35738717
  hypo
tatttgtgggcagtcggaacacttgtattc

SEQ ID NO: 59957 - DNA, 271 bp, Homo sapiens
  chr1:36025947-36026218
  hypo
ggtgacatagatgccaaaactcggcggcggatcttcgatgctgtcggcttcaccttccccaatcgtctcctgaccaccaaggaggcgccggatggctgccctgaccatgttctgcgggctttgggtgtggccctgctggcctgcttctgcagtgaccctgaactggccgcccatccccaagtcctgaacaagattcccattcttagcaccttcctcacagcccggggggacccggacgatgctgcccgccgctccatgattgatgacacct

SEQ ID NO: 59958 - DNA, 31 bp, Homo sapiens; identical to SEQ ID NO: 14478
  chr1:36056174-36056205
  hypo

SEQ ID NO: 59959 - DNA, 40 bp, Homo sapiens
  chr1:36056552-36056592
  hypo
gcagtgagcacacacgtatgtgtgcgccactgtgtacgtg

SEQ ID NO: 59960 - DNA, 30 bp, Homo sapiens
  chr1:36172264-36172294
  hypo
ctttcttgtgtgtgcgtgcgcgtgccagag

SEQ ID NO: 59961 - DNA, 79 bp, Homo sapiens; identical to SEQ ID NO: 319
  chr1:36173594-36173673
  hypo

SEQ ID NO: 59962 - DNA, 54 bp, Homo sapiens
  chr1:36271531-36271585
  hypo
ctagattaaaagtcccagttccggccgggcgcggtggctcaagctcgtaatccc

SEQ ID NO: 59963 - DNA, 31 bp, Homo sapiens
  chr1:36334780-36334811
  hypo
ggggaatgaatagggtcgttatattgattgt

SEQ ID NO: 59964 - DNA, 202 bp, Homo sapiens
  chr1:36549010-36549212
  hypo
ttctatgtactgttcgtttgctggcaactactatgtttctgaggctgacctcgaaatcctagcctcaagcgctcctcccgcctgggtctctggagtagctgggattacaagcgtgagccactgcacttggtttcgtattttctatcatgtctatgcatacctttatcaaaataaaattgtttaggccggggcagtgacacat

SEQ ID NO: 59965 - DNA, 189 bp, Homo sapiens
  chr1:36563383-36563572
  hypo
acgttggtgcccttgacgtgcacatggtaagcaaagtagtagacgccgcccacagggcaggtgaagatgccagtggctgggttgtagccgctgtggccattgtagagagtccggtcaaatttcacgggcatgcccgaggcggggaagggcgaggtgagcaccgcagtgaaggccggtgtggcatgggca

SEQ ID NO: 59966 - DNA, 31 bp, Homo sapiens; identical to SEQ ID NO: 14482
  chr1:36581068-36581099
  hypo

SEQ ID NO: 59967 - DNA, 13 bp, Homo sapiens
  chr1:36610623-36610636
  hypo
ttttttctttttt

SEQ ID NO: 59968 - DNA, 30 bp, Homo sapiens
  chr1:36625153-36625183
  hypo
gaaacaggtgcaaccggctatccagcacac

SEQ ID NO: 59969 - DNA, 60 bp, Homo sapiens
  chr1:36633227-36633287
  hypo
tacacaggctcagggcttgcccgaggttcgccgggagccgaggtcctcagtcaggcctgt

SEQ ID NO: 59970 - DNA, 63 bp, Homo sapiens
  chr1:36638184-36638247
  hypo
cagccctggaggaacggcagcggcagaagctcgagaaaaacaaggtgcgggatgggtctccgt

SEQ ID NO: 59971 - DNA, 30 bp, Homo sapiens
  chr1:36639879-36639909
  hypo
tgatgaggttgcttcgatctgtttgtggct

SEQ ID NO: 59972 - DNA, 30 bp, Homo sapiens
  chr1:36640463-36640493
  hypo
gcccggccctaatgccgtgtcttttccccc

SEQ ID NO: 59973 - DNA, 94 bp, Homo sapiens; identical to SEQ ID NO: 14483
  chr1:36641758-36641852
  hypo

SEQ ID NO: 59974 - DNA, 30 bp, Homo sapiens
  chr1:36642381-36642411
  hypo
cgccagtcgctgcccgcctccccacgtgcc

SEQ ID NO: 59975 - DNA, 30 bp, Homo sapiens; identical to SEQ ID NO: 14484
  chr1:36643728-36643758
  hypo

SEQ ID NO: 59976 - DNA, 30 bp, Homo sapiens; identical to SEQ ID NO: 14485
  chr1:36769743-36769773
  hypo

SEQ ID NO: 59977 - DNA, 43 bp, Homo sapiens
  chr1:36774201-36774244
  hypo
gctccttttggattctaataccggttgagtatcgcttatccaa

SEQ ID NO: 59978 - DNA, 18 bp, Homo sapiens
  chr1:36774733-36774751
  hypo
aattttccacttaaggcg

SEQ ID NO: 59979 - DNA, 117 bp, Homo sapiens
  chr1:36807403-36807520
  hypo
catgggctgtgcgtcgtggcccagccgtcgcaccggtggtgcgctgccgaactgccgcttgggtacccagctccgggcgtcatggatggagctcttctcctcggccagcagcagctg

SEQ ID NO: 59980 - DNA, 67 bp, Homo sapiens
  chr1:36814515-36814582
  hypo
aacagtaggaggtaggcttctcgtcagagggtgaagcagctgccccgaccccctctccagggagcag

SEQ ID NO: 59981 - DNA, 77 bp, Homo sapiens
  chr1:36845271-36845348
  hypo
cgcccggcctgggttgtagcctctttagggagtgggaacacctgtgttcccctcaggacgtacgacctcaacccaaa

SEQ ID NO: 59982 - DNA, 187 bp, Homo sapiens; identical to SEQ ID NO: 14488
  chr1:36857025-36857212
  hypo

SEQ ID NO: 59983 - DNA, 30 bp, Homo sapiens
  chr1:36859402-36859432
  hypo
tgccaccaaagtttcgcacccgatggataa

SEQ ID NO: 59984 - DNA, 224 bp, Homo sapiens; identical to SEQ ID NO: 14489
  chr1:36881338-36881562
  hypo

SEQ ID NO: 59985 - DNA, 31 bp, Homo sapiens; identical to SEQ ID NO: 326
  chr1:36883607-36883638
  hypo

SEQ ID NO: 59986 - DNA, 867 bp, Homo sapiens; identical to SEQ ID NO: 327
  chr1:36931642-36932509
  hypo

SEQ ID NO: 59987 - DNA, 219 bp, Homo sapiens; identical to SEQ ID NO: 328
  chr1:36933229-36933448
  hypo

SEQ ID NO: 59988 - DNA, 322 bp, Homo sapiens; identical to SEQ ID NO: 35464
  chr1:36936919-36937241
  hypo

SEQ ID NO: 59989 - DNA, 78 bp, Homo sapiens; identical to SEQ ID NO: 330
  chr1:36937668-36937746
  hypo

SEQ ID NO: 59990 - DNA, 30 bp, Homo sapiens; identical to SEQ ID NO: 331
  chr1:36938251-36938281
  hypo

SEQ ID NO: 59991 - DNA, 30 bp, Homo sapiens; identical to SEQ ID NO: 332
  chr1:36939051-36939081
  hypo

SEQ ID NO: 59992 - DNA, 30 bp, Homo sapiens; identical to SEQ ID NO: 333
  chr1:36939438-36939468
  hypo

SEQ ID NO: 59993 - DNA, 30 bp, Homo sapiens; identical to SEQ ID NO: 334
  chr1:36945020-36945050
  hypo

SEQ ID NO: 59994 - DNA, 151 bp, Homo sapiens; identical to SEQ ID NO: 14499
  chr1:36979462-36979613
  hypo

SEQ ID NO: 59995 - DNA, 31 bp, Homo sapiens; identical to SEQ ID NO: 14500
  chr1:36984328-36984359
  hypo

SEQ ID NO: 59996 - DNA, 30 bp, Homo sapiens
  chr1:37308831-37308861
  hypo
caacacgcaagtccacgcttttgccggcac

SEQ ID NO: 59997 - DNA, 143 bp, Homo sapiens
  chr1:37324709-37324852
  hypo
tccttgatgaagttcatgaagcggccgccaaagcgccaggccttgtgccgatggcactgcagggagttcacggtcatctgtggtgcccgctggtagcacacggacacgatatggacggcgtcgtacagtaaggctgcatcagt

SEQ ID NO: 59998 - DNA, 794 bp, Homo sapiens; identical to SEQ ID NO: 337
  chr1:37498888-37499682
  hypo

SEQ ID NO: 59999 - DNA, 561 bp, Homo sapiens; identical to SEQ ID NO: 35473
  chr1:37500013-37500574
  hypo

SEQ ID NO: 60000 - DNA, 46 bp, Homo sapiens
  chr1:37863806-37863852
  hypo
catattaaatttccagttattcggttaggtgttagaaaaccaccat

SEQ ID NO: 60001 - DNA, 24 bp, Homo sapiens
  chr1:37936870-37936894
  hypo
ctcgaaaataaaaaataaaaagaa

SEQ ID NO: 60002 - DNA, 396 bp, Homo sapiens; identical to SEQ ID NO: 35478
  chr1:37940473-37940869
  hypo

SEQ ID NO: 60003 - DNA, 93 bp, Homo sapiens
  chr1:38149927-38150020
  hypo
caagtgcttagtaatgtcagccgcagctcttgctccttctgcccatgctcctgttgctgttactactactgctaccaatgcatttaaaaggga

SEQ ID NO: 60004 - DNA, 182 bp, Homo sapiens
  chr1:38171208-38171390
  hypo
cttcctcactgtgccagtgggcggcggagaggtgaagtatttccaagggaagccaggccacagtgtgctgcttagtcaagcatttcttttccctgggccctcacccacgcttcaccctcagagtcctttcagtgcgtgggtcctgatctccacacttctgcgggactcagaacccagttttc

SEQ ID NO: 60005 - DNA, 30 bp, Homo sapiens
  chr1:38206996-38207026
  hypo
taaagtggacgttcccggtgccttcagggg

SEQ ID NO: 60006 - DNA, 38 bp, Homo sapiens; identical to SEQ ID NO: 14504
  chr1:38294271-38294309
  hypo

SEQ ID NO: 60007 - DNA, 20 bp, Homo sapiens
  chr1:38431138-38431158
  hypo
atgttgcatgttgggcgggg

SEQ ID NO: 60008 - DNA, 31 bp, Homo sapiens; identical to SEQ ID NO: 14505
  chr1:38459550-38459581
  hypo

SEQ ID NO: 60009 - DNA, 165 bp, Homo sapiens
  chr1:38492992-38493157
  hypo
ggtgtgtggtgctgggctccccgctcaagttctcccagcgtgccagttcccggagccttatgtgcagggtgttggggaagggcgggctgaatcgtgggtgggagtcttggctcaaagccccaggtgagtggaggaattgggggcggacctgaagtactgtcttga

SEQ ID NO: 60010 - DNA, 681 bp, Homo sapiens; identical to SEQ ID NO: 35495
  chr1:38510052-38510733
  hypo

SEQ ID NO: 60011 - DNA, 1026 bp, Homo sapiens; identical to SEQ ID NO: 355
  chr1:38510773-38511799
  hypo

SEQ ID NO: 60012 - DNA, 292 bp, Homo sapiens; identical to SEQ ID NO: 35497
  chr1:38511821-38512113
  hypo

SEQ ID NO: 60013 - DNA, 313 bp, Homo sapiens; identical to SEQ ID NO: 35498
  chr1:38512126-38512439
  hypo

SEQ ID NO: 60014 - DNA, 99 bp, Homo sapiens; identical to SEQ ID NO: 35499
  chr1:38580184-38580283
  hypo

SEQ ID NO: 60015 - DNA, 259 bp, Homo sapiens
  chr1:38953060-38953319
  hypo
atctgttacaacttacagttgcgtcaatacaggatggagctccccagacggtgctggctgttgagtgctgcagcgagtgcgatattggccctttagatttcacagacaccctctccaagtacaaacacacactcacacacacacagacacatgcgcgcgcctactccatcgcgggctgcgtggtgtgtgcagtcagcagccgtgtggagaatgtgaaatcacacctcgctctccttccgaggcagtgagatctttattg

SEQ ID NO: 60016 - DNA, 128 bp, Homo sapiens; identical to SEQ ID NO: 35500
  chr1:39044125-39044253
  hypo

SEQ ID NO: 60017 - DNA, 145 bp, Homo sapiens; identical to SEQ ID NO: 14510
  chr1:39174395-39174540
  hypo

SEQ ID NO: 60018 - DNA, 399 bp, Homo sapiens; identical to SEQ ID NO: 35501
  chr1:39269714-39270113
  hypo

SEQ ID NO: 60019 - DNA, 30 bp, Homo sapiens; identical to SEQ ID NO: 35502
  chr1:39284362-39284392
  hypo

SEQ ID NO: 60020 - DNA, 34 bp, Homo sapiens; identical to SEQ ID NO: 14511
  chr1:39345383-39345417
  hypo

SEQ ID NO: 60021 - DNA, 121 bp, Homo sapiens
  chr1:39345656-39345777
  hypo
gggattacaagcgtgagccaccgcgcccggctctgttaatacgatttgcaaaagcatcaaccttctaaaatatagttgtattcctgaaatagagaaactttccattgactttattatgtta

SEQ ID NO: 60022 - DNA, 83 bp, Homo sapiens
  chr1:39388384-39388467
  hypo
atttcctcatctctcccgctcacgtttatcttctgccccactcctgaatttctgaggaaatattacctattagattggtaaca

SEQ ID NO: 60023 - DNA, 106 bp, Homo sapiens; identical to SEQ ID NO: 14513
  chr1:39416851-39416957
  hypo

SEQ ID NO: 60024 - DNA, 30 bp, Homo sapiens; identical to SEQ ID NO: 358
  chr1:39483421-39483451
  hypo

SEQ ID NO: 60025 - DNA, 25 bp, Homo sapiens
  chr1:39643085-39643110
  hypo
tcccggcctaactactgtttctata

SEQ ID NO: 60026 - DNA, 32 bp, Homo sapiens; identical to SEQ ID NO: 14515
  chr1:39739271-39739303
  hypo

SEQ ID NO: 60027 - DNA, 32 bp, Homo sapiens; identical to SEQ ID NO: 14516
  chr1:39739542-39739574
  hypo

SEQ ID NO: 60028 - DNA, 40 bp, Homo sapiens
  chr1:39920596-39920636
  hypo
agcagcaccagcagcgtcttgaaacggccttgtcagaact

SEQ ID NO: 60029 - DNA, 480 bp, Homo sapiens; identical to SEQ ID NO: 35509
  chr1:39956619-39957099
  hypo

SEQ ID NO: 60030 - DNA, 35 bp, Homo sapiens; identical to SEQ ID NO: 35510
  chr1:39957300-39957335
  hypo

SEQ ID NO: 60031 - DNA, 135 bp, Homo sapiens
  chr1:40030073-40030208
  hypo
tctaaaggccagtttgctcaccgactctctgagtggtagtagggaggccacgagaggccggagcattaccagttggagccagatggcgaagagttggacgaggcccagactggcgtatagcacttggcattcctt

SEQ ID NO: 60032 - DNA, 576 bp, Homo sapiens; identical to SEQ ID NO: 35512
  chr1:40105060-40105636
  hypo

SEQ ID NO: 60033 - DNA, 34 bp, Homo sapiens
  chr1:40117399-40117433
  hypo
cattaataaagaagttcgtaggccgagtgtggtg

SEQ ID NO: 60034 - DNA, 47 bp, Homo sapiens; identical to SEQ ID NO: 35515
  chr1:40254995-40255042
  hypo

SEQ ID NO: 60035 - DNA, 87 bp, Homo sapiens; identical to SEQ ID NO: 35516
  chr1:40255068-40255155
  hypo

SEQ ID NO: 60036 - DNA, 30 bp, Homo sapiens; identical to SEQ ID NO: 14518
  chr1:40346515-40346545
  hypo

SEQ ID NO: 60037 - DNA, 86 bp, Homo sapiens; identical to SEQ ID NO: 14519
  chr1:40349615-40349701
  hypo

SEQ ID NO: 60038 - DNA, 19 bp, Homo sapiens
  chr1:40350297-40350316
  hypo
actccgtcccaaacaaaac

SEQ ID NO: 60039 - DNA, 23 bp, Homo sapiens
  chr1:40357270-40357293
  hypo
cagattcctggccctgacctacg

SEQ ID NO: 60040 - DNA, 23 bp, Homo sapiens
  chr1:40357592-40357615
  hypo
ccgggtgggtagattcttaagac

SEQ ID NO: 60041 - DNA, 4 bp, Homo sapiens
  chr1:40409734-40409738
  hypo
ttga

SEQ ID NO: 60042 - DNA, 30 bp, Homo sapiens; identical to SEQ ID NO: 35517
  chr1:40420567-40420597
  hypo

SEQ ID NO: 60043 - DNA, 22 bp, Homo sapiens
  chr1:40651080-40651102
  hypo
cgtgagccaccttgcctagtcc

SEQ ID NO: 60044 - DNA, 22 bp, Homo sapiens
  chr1:40685885-40685907
  hypo
cgagactctgtctcaaaaaaga

SEQ ID NO: 60045 - DNA, 149 bp, Homo sapiens
  chr1:40771001-40771150
  hypo
caggcgtgagccaccgcgcccggcgtgatcatttatttcatgtctatttcttccattaaactataccctccatatgaagaggagactcatagttgcaagtgtttagtgaatgtttatgcaatgaataaatgaacgaacaactctgcctg

SEQ ID NO: 60046 - DNA, 30 bp, Homo sapiens
  chr1:40985010-40985040
  hypo
agtccaaaacggctgcgcaaaatccagtca

SEQ ID NO: 60047 - DNA, 31 bp, Homo sapiens
  chr1:41116841-41116872
  hypo
ggtttggaaacacggtcgttgcagatgtgac

SEQ ID NO: 60048 - DNA, 31 bp, Homo sapiens; identical to SEQ ID NO: 14525
  chr1:41236636-41236667
  hypo

SEQ ID NO: 60049 - DNA, 30 bp, Homo sapiens; identical to SEQ ID NO: 14526
  chr1:41253451-41253481
  hypo

SEQ ID NO: 60050 - DNA, 30 bp, Homo sapiens
  chr1:41255333-41255363
  hypo
ttcttccattgaagacgcgctgctagatgt

SEQ ID NO: 60051 - DNA, 30 bp, Homo sapiens; identical to SEQ ID NO: 14527
  chr1:41271855-41271885
  hypo

SEQ ID NO: 60052 - DNA, 319 bp, Homo sapiens
  chr1:41281552-41281871
  hypo
caggtctctctgaccccgagctgctgtccttaaggtcaccacgaaacatgaatataaataaagccacatagaaggtgacttgggccacacatagggaggcaagcatcgggagttggcagttctgaaggggggatagtggggtgcgggaatcagaggctccgtagagctttgtagcatttgtgttcctgtaggcgtggacgatgagcagagtctcgcaggcacagacatgaggtgttctgcgtagcatgcaccgtgccagcaacggtgcagaggtggggagactggggacatctgggaaggctggcgggtcagtacacag

SEQ ID NO: 60053 - DNA, 30 bp, Homo sapiens
  chr1:41285481-41285511
  hypo
tacccccaacaagccgtaggtggcccccgt

SEQ ID NO: 60054 - DNA, 31 bp, Homo sapiens
  chr1:41292201-41292232
  hypo
ctttcccaccagctaccggaggccggcccca

SEQ ID NO: 60055 - DNA, 31 bp, Homo sapiens
  chr1:41304606-41304637
  hypo
cctcccgccaagtccccgccccacttggggg

SEQ ID NO: 60056 - DNA, 502 bp, Homo sapiens; identical to SEQ ID NO: 35528
  chr1:41327011-41327513
  hypo

SEQ ID NO: 60057 - DNA, 20 bp, Homo sapiens
  chr1:41448078-41448098
  hypo
tttgaggtagtcttattctg

SEQ ID NO: 60058 - DNA, 114 bp, Homo sapiens
  chr1:41451934-41452048
  hypo
gagctgagaggccagtcacagcgagagtggaatgagaagtgcggaggcgcagggctacgaaggcgtggttggtccgggaatggaggggaggccggcatagctaaggcagagtga

SEQ ID NO: 60059 - DNA, 378 bp, Homo sapiens
  chr1:41472931-41473309
  hypo
gagcctccacccaaccgaggttacaaatgccaactgggaggcattttcttctgtgacaaaatgtctcataaggaaagcctggagaattagagcttacttacaagcctttgccacccactcagcgagggaggtttctctctagcggaagcagagttctgtagttggtgtctgttttctgaacatctccaggtcgtagacatgccagaacacaacccagggcagatgggcggaaccatgaggctgggcaagaggagaaccctgttccagaccaagaactcagtcatgagtaagagctgcctcacgctggcccagcctttggctctgcgtgcccaggacgcgtgtcttagggtgatgctgtggcttcgaggagcaggctgg

SEQ ID NO: 60060 - DNA, 138 bp, Homo sapiens
  chr1:41483522-41483660
  hypo
cacgtagcgccgcacgtggtgcttgaaggccaggctgaggtactcgccgctaccccgcttgaactccatattgcgggtctcgctgcccaggaaggcaccctggaagagctggtccttgcccacgatctgctggtgcac

SEQ ID NO: 60061 - DNA, 30 bp, Homo sapiens
  chr1:41484025-41484055
  hypo
agggttccagtcagcgctcctttccctgcc

SEQ ID NO: 60062 - DNA, 348 bp, Homo sapiens
  chr1:41485928-41486276
  hypo
ctcaatagcaggtccttcccacgggctgccagctccttgaggattaggtgctcctccagggccgtctgcaggcgccaggggagggaggccagggtgtccctgtggacagtcacctgcaccagtgcataggccttccgcggccgcctcaccacttcaatgtgctcccgcgccaccggcatctccagccgctccagggtgtctcgcagcaggcaggcaagcaccggcactgagaactgggggttcagatggcccacatagagagtgtgcgccgagggagcctcctcgaggtcagagtactccgtcagggactgctctgcgggtagctccggcagggactcctcaccccag

SEQ ID NO: 60063 - DNA, 52 bp, Homo sapiens
  chr1:41488286-41488338
  hypo
tctccttgcccgcccgggcagcagccaggttgggctcggctttgtgtccaca

SEQ ID NO: 60064 - DNA, 30 bp, Homo sapiens; identical to SEQ ID NO: 14531
  chr1:41622015-41622045
  hypo

SEQ ID NO: 60065 - DNA, 30 bp, Homo sapiens; identical to SEQ ID NO: 14532
  chr1:41825183-41825213
  hypo

SEQ ID NO: 60066 - DNA, 476 bp, Homo sapiens; identical to SEQ ID NO: 35531
  chr1:41832017-41832493
  hypo

SEQ ID NO: 60067 - DNA, 48 bp, Homo sapiens
  chr1:41967565-41967613
  hypo
gcccagccccaaaccacgggtaactagagacgccgggagcaggtggat

SEQ ID NO: 60068 - DNA, 212 bp, Homo sapiens
  chr1:41970957-41971169
  hypo
ttctcatggctcccttcgtcctcccgacccttaggacttttccaaggaaaagtcccctgggtgatgcagactcactctggattagcactgtcattctcttccaccacagcagtgatggccgctgtgattgagtaactgatgatggcctcccctgctacaatgtgagctcctcgtggtggatctgtgtctgtcttgctcgctgttgtatcaat

SEQ ID NO: 60069 - DNA, 57 bp, Homo sapiens
  chr1:41976411-41976468
  hypo
gggtgcaggggctgtgcgtgggtgtgggctctgcaggtgccccggtcccatggggtg

SEQ ID NO: 60070 - DNA, 31 bp, Homo sapiens; identical to SEQ ID NO: 14535
  chr1:41976830-41976861
  hypo

SEQ ID NO: 60071 - DNA, 30 bp, Homo sapiens
  chr1:41978734-41978764
  hypo
agagcacatgtgctcgaggggccagttctc

SEQ ID NO: 60072 - DNA, 183 bp, Homo sapiens
  chr1:41979368-41979551
  hypo
agcctctgaaccctctcgtccttccgagtcctggaacaggtcgtcactggttcctgagggcaaacacagaagacccaaggtcacagttgggccttggccccactgcccacacggctgctcctctctgagccccagtttccttgcctgctgactgggcaaaatagccatcgcaagggcacaaga

SEQ ID NO: 60073 - DNA, 525 bp, Homo sapiens; identical to SEQ ID NO: 374
  chr1:41981636-41982161
  hypo

SEQ ID NO: 60074 - DNA, 34 bp, Homo sapiens
  chr1:41991668-41991702
  hypo
tgccctcacatactcacgccgcaccacctgcccc

SEQ ID NO: 60075 - DNA, 31 bp, Homo sapiens
  chr1:42049652-42049683
  hypo
ctcttccccagggatccgctccatctccagc

SEQ ID NO: 60076 - DNA, 36 bp, Homo sapiens; identical to SEQ ID NO: 14537
  chr1:42120783-42120819
  hypo

SEQ ID NO: 60077 - DNA, 30 bp, Homo sapiens
  chr1:42497791-42497821
  hypo
aaatcagaaaaaagcgcagccaatgcgccc

SEQ ID NO: 60078 - DNA, 30 bp, Homo sapiens
  chr1:42506339-42506369
  hypo
gaggatgcgcaggacgtcctctccaactgc

SEQ ID NO: 60079 - DNA, 31 bp, Homo sapiens; identical to SEQ ID NO: 14538
  chr1:42506900-42506931
  hypo

SEQ ID NO: 60080 - DNA, 198 bp, Homo sapiens
  chr1:42633129-42633327
  hypo
gtgtgtgtgtgctgacgtgtgtgtatacactgaggtgcgtgtgtgctgaagtgtgtgtatacactgaggtgtgcgtgagtgctgacgtgtgtgtatacactgaggtgtgtgtgagtgctgacgtgtgtgtgtgcactgacgtgtgtgtgtgctgacgtgtgtgtatacactgaggtgtgtgtgcgtgcctggacatgt

SEQ ID NO: 60081 - DNA, 30 bp, Homo sapiens
  chr1:42633579-42633609
  hypo
ggggcttgcggagaccggagcggggttggg

SEQ ID NO: 60082 - DNA, 36 bp, Homo sapiens
  chr1:42802313-42802349
  hypo
taagagggaatcctgctctcccgcccaggctggagt

SEQ ID NO: 60083 - DNA, 36 bp, Homo sapiens
  chr1:42802588-42802624
  hypo
gcctgcaattttaaatagagccgtcagcatgggcct

SEQ ID NO: 60084 - DNA, 31 bp, Homo sapiens
  chr1:42851866-42851897
  hypo
tacgggcgtgagccaccgagcctggccccta

SEQ ID NO: 60085 - DNA, 31 bp, Homo sapiens
  chr1:42918351-42918382
  hypo
tgacagagcaagactccgtctcaaaaaaata

SEQ ID NO: 60086 - DNA, 30 bp, Homo sapiens
  chr1:42919383-42919413
  hypo
gcaggttttacccacggcggtttactggcc

SEQ ID NO: 60087 - DNA, 20 bp, Homo sapiens
  chr1:42927508-42927528
  hypo
cccagccacccaggctcctt

SEQ ID NO: 60088 - DNA, 30 bp, Homo sapiens; identical to SEQ ID NO: 14542
  chr1:43202508-43202538
  hypo

SEQ ID NO: 60089 - DNA, 54 bp, Homo sapiens; identical to SEQ ID NO: 14543
  chr1:43203988-43204042
  hypo

SEQ ID NO: 60090 - DNA, 30 bp, Homo sapiens
  chr1:43209591-43209621
  hypo
agtcgcatctcagccgggctgccatcaccc

SEQ ID NO: 60091 - DNA, 30 bp, Homo sapiens
  chr1:43250396-43250426
  hypo
cctcgcctccccagcgcatttcccgcccca

SEQ ID NO: 60092 - DNA, 89 bp, Homo sapiens; identical to SEQ ID NO: 14544
  chr1:43296452-43296541
  hypo

SEQ ID NO: 60093 - DNA, 196 bp, Homo sapiens; identical to SEQ ID NO: 14545
  chr1:43310137-43310333
  hypo

SEQ ID NO: 60094 - DNA, 294 bp, Homo sapiens
  chr1:43353270-43353564
  hypo
tctgcatcatgaactccgagaagatgtggacggccacagcgcagcccagcgcagtccccagacacaggagccacatgagccccagcatggccgcctgccgcagcctcccgcacacgctcctggggctctgccgcagctgctgctcgggccagcagctccttctcccggtgcgaatgttgtctgttgtcttgctgagggcggggggcccgcttctgcctcaccttgcagtcccaggagcagaagatagtgacggcgtggatgccagaggtgctgcccacccggtattagcattag

SEQ ID NO: 60095 - DNA, 133 bp, Homo sapiens
  chr1:43400330-43400463
  hypo
aggatcccacaggcccaatcccgccggctcccagcagcctccgcaaccctgggtcatgtgtgaggtgagacctggcacgtgcctgttctgaacgctcccacctcacatgcccgtcccaagcttaggatttaaa

SEQ ID NO: 60096 - DNA, 80 bp, Homo sapiens
  chr1:43412603-43412683
  hypo
ttggtttcctcacctagaaaacggggatgaaagttccttccttaaagggttgctgttacgttttctatcagtatccatca

SEQ ID NO: 60097 - DNA, 28 bp, Homo sapiens
  chr1:43419893-43419921
  hypo
aaaaaacacagctaggccaggcgcggtg

SEQ ID NO: 60098 - DNA, 30 bp, Homo sapiens
  chr1:43472358-43472388
  hypo
tagtagggaacccgcgacggtgacgccaca

SEQ ID NO: 60099 - DNA, 32 bp, Homo sapiens; identical to SEQ ID NO: 14547
  chr1:43478270-43478302
  hypo

SEQ ID NO: 60100 - DNA, 31 bp, Homo sapiens
  chr1:43498269-43498300
  hypo
tgcacataaaaacagacgcacattttttttc

SEQ ID NO: 60101 - DNA, 90 bp, Homo sapiens; identical to SEQ ID NO: 14548
  chr1:43521464-43521554
  hypo

SEQ ID NO: 60102 - DNA, 31 bp, Homo sapiens
  chr1:43524035-43524066
  hypo
ctgacagcatgctggacgtggggaaaaaggc

SEQ ID NO: 60103 - DNA, 146 bp, Homo sapiens
  chr1:43532589-43532735
  hypo
ggaccccaggcccttctagaacgaagtctcagcgtgggagccaggagcagacagggtctcgacctcagagagcttccagcctgatggagagagccggaagagtcaggctggctctgtggctgcccgtggtcttggggcaggagggc

SEQ ID NO: 60104 - DNA, 84 bp, Homo sapiens; identical to SEQ ID NO: 14549
  chr1:43533471-43533555
  hypo

SEQ ID NO: 60105 - DNA, 405 bp, Homo sapiens; identical to SEQ ID NO: 14550
  chr1:43534660-43535065
  hypo

SEQ ID NO: 60106 - DNA, 24 bp, Homo sapiens
  chr1:43593210-43593234
  hypo
gtgagactccgcctcaaaaaaaaa

SEQ ID NO: 60107 - DNA, 36 bp, Homo sapiens
  chr1:43626938-43626974
  hypo
caggcgtgagtcaccgtgccctatcactttttgttt

SEQ ID NO: 60108 - DNA, 33 bp, Homo sapiens; identical to SEQ ID NO: 14551
  chr1:43702285-43702318
  hypo

SEQ ID NO: 60109 - DNA, 239 bp, Homo sapiens
  chr1:43738644-43738883
  hypo
acagctgatgagctcggctgtgcaggacatgaactgcatccgccaggcccaccatgtggccctgctgcgcagtggtggaggggccgacgccctcgtggtgctgctcagtggcctcgtgctgctggtcaccggcctgaccctggccgggctggccgccgcccctgcccctgctcggccgctggccgccatgctgtctgtgggcattgctctggctgccttgggctcgcttttgctgctgg

SEQ ID NO: 60110 - DNA, 31 bp, Homo sapiens; identical to SEQ ID NO: 14553
  chr1:43739132-43739163
  hypo

SEQ ID NO: 60111 - DNA, 108 bp, Homo sapiens
  chr1:43750606-43750714
  hypo
tcagaaccagtcattgctaggcgggcagctccccgtgggcaacggctggctgaaggatctgtaccctggcgctgcagggagctgggcgttcagcccctcagtgtggtg

SEQ ID NO: 60112 - DNA, 164 bp, Homo sapiens; identical to SEQ ID NO: 14554
  chr1:43754320-43754484
  hypo

SEQ ID NO: 60113 - DNA, 30 bp, Homo sapiens
  chr1:43774696-43774726
  hypo
gttcaacttagagacgatgccccggatcaa

SEQ ID NO: 60114 - DNA, 31 bp, Homo sapiens
  chr1:43775219-43775250
  hypo
gtccacagggaatggacggtgagcagagtag

SEQ ID NO: 60115 - DNA, 31 bp, Homo sapiens
  chr1:43782855-43782886
  hypo
ctcatcctgtgaagggcgaggagaccatcct

SEQ ID NO: 60116 - DNA, 152 bp, Homo sapiens
  chr1:43783571-43783723
  hypo
tgaatatgccccctacgggaacctgctagattttctgcggaaaagccgggtcctagagactgacccagcttttgctcgagagcatgggacagcctctacccttagctcccggcagctgctgcgtttcgccagtgatgcggccaatggcatgc

SEQ ID NO: 60117 - DNA, 31 bp, Homo sapiens; identical to SEQ ID NO: 14556
  chr1:43798209-43798240
  hypo

SEQ ID NO: 60118 - DNA, 44 bp, Homo sapiens; identical to SEQ ID NO: 382
  chr1:43803508-43803552
  hypo

SEQ ID NO: 60119 - DNA, 30 bp, Homo sapiens; identical to SEQ ID NO: 383
  chr1:43803852-43803882
  hypo

SEQ ID NO: 60120 - DNA, 30 bp, Homo sapiens; identical to SEQ ID NO: 384
  chr1:43804341-43804371
  hypo

SEQ ID NO: 60121 - DNA, 209 bp, Homo sapiens; identical to SEQ ID NO: 385
  chr1:43805019-43805228
  hypo

SEQ ID NO: 60122 - DNA, 104 bp, Homo sapiens; identical to SEQ ID NO: 386
  chr1:43814926-43815030
  hypo

SEQ ID NO: 60123 - DNA, 30 bp, Homo sapiens; identical to SEQ ID NO: 387
  chr1:43817944-43817974
  hypo

SEQ ID NO: 60124 - DNA, 269 bp, Homo sapiens; identical to SEQ ID NO: 388
  chr1:43818176-43818445
  hypo

SEQ ID NO: 60125 - DNA, 30 bp, Homo sapiens
  chr1:43831026-43831056
  hypo
ggtagccctggatccggggatctatgaata

SEQ ID NO: 60126 - DNA, 202 bp, Homo sapiens
  chr1:43842606-43842808
  hypo
ttatggcaaagtggcaagagtcgtagagtatgccatgacaaaacaaagtctgaaggactggtggtcagtgtggcgggaagagaggcaagcatggcaccaaagagctccggttttgatctccagtgaattacacacagccacccacgaagaactgagcccgacctagcaagcacagacaagcgaggcaagaattcatcacaac

SEQ ID NO: 60127 - DNA, 30 bp, Homo sapiens; identical to SEQ ID NO: 14565
  chr1:43888256-43888286
  hypo

SEQ ID NO: 60128 - DNA, 466 bp, Homo sapiens
  chr1:43888922-43889388
  hypo
caggccctgtctgaccggccctgccttgtggtcctgcataagccactggacaaactgctcatcaggttggtacagaggtgtggaagggcgtggcttagcagggtatgagtggtacagaggtgtggagggcatggcttagcccggtgtgagtagtatagaggtgtggagtgcgtggcttagtggggtatgagtggtacaaaggtgtggaagggtgtggcttagcggggtgaggtgtggaagggcgtggcttagcagggtatgagtggtacggaggtgtggaagggcgtggcttagtggggtatgagtggtacagaggtgtggaagggcatggcttagcggggtatgagtggtacagaggtgtggagggcatggcttagcccggtgtgagtagtatagaggtgtggaagggtctggcctagtggggtatgagtggtacagagttgcagaagggcgtggcttagcgggg

SEQ ID NO: 60129 - DNA, 169 bp, Homo sapiens
  chr1:43889645-43889814
  hypo
tggtacagaggcatggaagggcgtggcttagccgggtatgagtggtacagaggtgtggaagggcgtggcttagccgggtatgagtggtacagaggtgtggaagggcgtggcttagccgggtatcagtggtacagaggtgtggaagggcgtggcttagccagctgtgagt

SEQ ID NO: 60130 - DNA, 144 bp, Homo sapiens
  chr1:43905547-43905691
  hypo
ccagctcagaatggggccccacggcttcgattggatgtgtgggaaaaggggaacattagtattgtgcagctggaggagaaactccgaggagcagctcgccaggccctggccgatgccatcatcgagcttcagctgctgccagct

SEQ ID NO: 60131 - DNA, 287 bp, Homo sapiens; identical to SEQ ID NO: 35562
  chr1:43919240-43919527
  hypo

SEQ ID NO: 60132 - DNA, 119 bp, Homo sapiens; identical to SEQ ID NO: 391
  chr1:43919541-43919660
  hypo

SEQ ID NO: 60133 - DNA, 89 bp, Homo sapiens; identical to SEQ ID NO: 14568
  chr1:43969025-43969114
  hypo

SEQ ID NO: 60134 - DNA, 30 bp, Homo sapiens; identical to SEQ ID NO: 14569
  chr1:43971524-43971554
  hypo

SEQ ID NO: 60135 - DNA, 190 bp, Homo sapiens; identical to SEQ ID NO: 14570
  chr1:43987295-43987485
  hypo

SEQ ID NO: 60136 - DNA, 36 bp, Homo sapiens
  chr1:43991182-43991218
  hypo
gcaacatcaggccaggcgtggtggctcacgcctgta

SEQ ID NO: 60137 - DNA, 31 bp, Homo sapiens; identical to SEQ ID NO: 14571
  chr1:44016540-44016571
  hypo

SEQ ID NO: 60138 - DNA, 174 bp, Homo sapiens
  chr1:44030025-44030199
  hypo
cagccctgccacctacgaggttccttcatgtgtctcgtccctgcatgtgtctccaggcgcacgtgttttggcataggtgtgtctggctgtgcatgtctccacatgtgtgtttgcgtgtctctgtgtgcaccgcctctggatctgcttgcatgcgcctgtttccacaggtgctag

SEQ ID NO: 60139 - DNA, 30 bp, Homo sapiens
  chr1:44030402-44030432
  hypo
ctgtgtgtgcgggtgcgtgcctgcgtttgc

SEQ ID NO: 60140 - DNA, 103 bp, Homo sapiens
  chr1:44044917-44045020
  hypo
tgtgtgtgtgcacacacgggcacacttatctgtgtgtaaatgcatgcatacctggcctggctttccttcagtacatcctcctgcctgccgcagcatggtgggc

SEQ ID NO: 60141 - DNA, 88 bp, Homo sapiens
  chr1:44047808-44047896
  hypo
aattctcagggctcccagtgtcgctctctgaggccacgcgactgctacatttaatgggacagtacacgtgaagcaccaggcacattgc

SEQ ID NO: 60142 - DNA, 31 bp, Homo sapiens
  chr1:44053822-44053853
  hypo
ctgagaccctggcaggcggccctgctgcttg

SEQ ID NO: 60143 - DNA, 30 bp, Homo sapiens
  chr1:44060101-44060131
  hypo
gctgcagtagctgccggatctatggcagtc

SEQ ID NO: 60144 - DNA, 94 bp, Homo sapiens; identical to SEQ ID NO: 14574
  chr1:44063578-44063672
  hypo

SEQ ID NO: 60145 - DNA, 30 bp, Homo sapiens
  chr1:44064500-44064530
  hypo
taccaggtcacctacgtgcggctggagaat

SEQ ID NO: 60146 - DNA, 149 bp, Homo sapiens
  chr1:44069554-44069703
  hypo
ccgaggacctgcccagcggcttcccccaaaacctgcatgtgacaggactgaccacgtctaccacagaactggcctgggacccgccagtgctggcggagaggaacgggcgcatcatcagctacaccgtggtgttccgagacatcaacagc

SEQ ID NO: 60147 - DNA, 129 bp, Homo sapiens
  chr1:44070959-44071088
  hypo
aaccgtggcagcagcgcagggggcctgcagcacctggtgtccatccgcacagcccccgacctcctgcctcacaagccgctgcctgcctctgcctacatagaggacggccgcttcgatctctccatgccc

SEQ ID NO: 60148 - DNA, 239 bp, Homo sapiens
  chr1:44072458-44072697
  hypo
gcctgctgttctccaccgggccacagaagcgctatgcctccagcccctactcggatgagatcgtggtccaggtgacaccagcccagcagcaggaggagccggagatgctgtgggtgacgggtcccgtgctggcagtcatcctcatcatcctcattgtcatcgccatcctcttgttcaaaaggtgagcactgccctcagagctccgggaacggccacctgcccctcgcctttcaggccct

SEQ ID NO: 60149 - DNA, 30 bp, Homo sapiens; identical to SEQ ID NO: 14576
  chr1:44074439-44074469
  hypo

SEQ ID NO: 60150 - DNA, 31 bp, Homo sapiens
  chr1:44082000-44082031
  hypo
tatcattattgctctccgaggtgaagaagag

SEQ ID NO: 60151 - DNA, 348 bp, Homo sapiens
  chr1:44084830-44085178
  hypo
cctgcaaccccctagacgcagggcccatggtggtgcactgcaggtgagagggtacagtgccacccagaggggtgggtggggtgggaggtgggggcgcctgtgcctcaagctgagcccgtgtcctgcagcgcgggcgtgggccgcaccggctgcttcatcgtgattgatgccatgttggagcggatgaagcacgagaagacggtggacatctatggccacgtgacctgcatgcgatcacagaggaactacatggtgcagacggaggaccagtacgtgttcatccatgaggcgctgctggaggctgccacgtgcggccacacagaggtgcctgcccgcaacctgtatgcc

SEQ ID NO: 60152 - DNA, 30 bp, Homo sapiens
  chr1:44087701-44087731
  hypo
ccgccgtggggctccggaggggacccagct

SEQ ID NO: 60153 - DNA, 81 bp, Homo sapiens
  chr1:44110062-44110143
  hypo
gtgctgggattacaggcgtgagccacgtcacctggcctaggtgtagttaactttttaagcgaataatattgccattatgat

SEQ ID NO: 60154 - DNA, 190 bp, Homo sapiens
  chr1:44132656-44132846
  hypo
tttcccttatggttaccatgccggctttaaccatggttttaactgtgcggagtctaccaattttgctacccgtcggtggattgagtacggcaagcaagctgtgctggtaagtctgcttgatttctttctataacaccatgacaaaaatgagcaaattctggttagatacgttggctggtgattagagtat

SEQ ID NO: 60155 - DNA, 30 bp, Homo sapiens
  chr1:44137587-44137617
  hypo
ggaggacaccctgtcgggaggggatctgtg

SEQ ID NO: 60156 - DNA, 74 bp, Homo sapiens
  chr1:44138997-44139071
  hypo
ttcactatggaaaatttctgacgtacgtacaaaataccatcacgagcccccgcgtgtactcatcatatatatga

SEQ ID NO: 60157 - DNA, 30 bp, Homo sapiens; identical to SEQ ID NO: 14579
  chr1:44170374-44170404
  hypo

SEQ ID NO: 60158 - DNA, 43 bp, Homo sapiens
  chr1:44303657-44303700
  hypo
aaacaccttatcccagccactcgggaggctgaggcaggagaat

SEQ ID NO: 60159 - DNA, 202 bp, Homo sapiens
  chr1:44351031-44351233
  hypo
ccgtctcctccttccccgggtccttctcacgcactcacacacaccctgctgaaacctgatcctgaggctgcctcgcgtgccggggtgctggcggggctggcgggctggggcctgtcttttggagcctgccccaccctcccctgctaccccctaggccagggcaagcaggtcaggcgtcccacacccccgctagtctgaccag

SEQ ID NO: 60160 - DNA, 31 bp, Homo sapiens
  chr1:44436575-44436606
  hypo
agtgatgacagcaactcgcctccagaagaga

SEQ ID NO: 60161 - DNA, 121 bp, Homo sapiens; identical to SEQ ID NO: 35569
  chr1:44444588-44444709
  hypo

SEQ ID NO: 60162 - DNA, 30 bp, Homo sapiens
  chr1:44447463-44447493
  hypo
caccccagcccagacggtggcggtcatcat

SEQ ID NO: 60163 - DNA, 30 bp, Homo sapiens; identical to SEQ ID NO: 14582
  chr1:44461875-44461905
  hypo

SEQ ID NO: 60164 - DNA, 693 bp, Homo sapiens
  chr1:44463202-44463895
  hypo
cctggcagctgtgctcatatccgggagtcctggaggcggctggagccattactgcccacaatggggatctgcgccttgtccgggtgcagtggctggacctcgaagccgtcctcaggagagggggctatggtgggggcgtagcgccctgtccggtgctccaggagggcagggccccagtctctgcttggctttgtggcatttttcaaacgctgcatgaggtaggcatggggcacaggggcagggcacgtcaggagggagcccttaagccccttccagctggcccctcccattttgcctggctacccagcctgtccctgccctcacctggaggagggtgtccccgtctgtgcggcagagccggaacatggcgtagagggggatgcagaggacggaggacagagccatgaggaagccaatggccacggcccagcctgggtactggtagtggttgtaggtgatcggctggtactggatcacagtgaaaactagaataaactgcacggggcaggtgtgggagtgggcgtgaggccgacccagagcccagaccccaggccatccctctaccagcaccctttcctctctggtttcccaaactagaaaagggcatttggggcagaacagggacagctgtcaacatctgggccgtggaagaagcaggcagggccgggggccggagcgcggtgagtgggaagg

SEQ ID NO: 60165 - DNA, 30 bp, Homo sapiens
  chr1:44466586-44466616
  hypo
caagggccgggtcgcgggaggccggaggct

SEQ ID NO: 60166 - DNA, 227 bp, Homo sapiens
  chr1:44483084-44483311
  hypo
tggggcagagcaggcgagagggtggctcactccccccacggagctgaccagacgctgtctgagcccacaggcctagcactgggtgggctcctgctagggtagttgggtgtctgatgagtgacggggtctgccccattgggccctggatggtgaccggcaggaggatggaaggcacagtccacagggcaccaccagagcagctcaggctccacggaggggtgcgggct

SEQ ID NO: 60167 - DNA, 30 bp, Homo sapiens
  chr1:44492771-44492801
  hypo
tccagtctcttctacgtgtggaagatccac

SEQ ID NO: 60168 - DNA, 23 bp, Homo sapiens
  chr1:44494137-44494160
  hypo
ccaggccaggctgggcgcggtgg

SEQ ID NO: 60169 - DNA, 30 bp, Homo sapiens; identical to SEQ ID NO: 14585
  chr1:44497679-44497709
  hypo

SEQ ID NO: 60170 - DNA, 59 bp, Homo sapiens
  chr1:44584402-44584461
  hypo
ggctgcgagggcggcgcagggcgggacgggtggggcctgaccccgccccttggcgcagc

SEQ ID NO: 60171 - DNA, 31 bp, Homo sapiens
  chr1:44595367-44595398
  hypo
gggtagccaggcccttcggtgggaatctaag

SEQ ID NO: 60172 - DNA, 254 bp, Homo sapiens
  chr1:44718006-44718260
  hypo
ctggctctcccctctcgtggctctgcccgccttggctgctgccccattagcttagtggccagccatctgcgacgggcctgccgcatagccctgctgtaggtgcggcgggtggccccctgtgtaacagggagctttgccattagcgcctttaatattctgacacctcagcgcagcctgctattacatgcaaacactgatcgccctgtgaaattacattgctgggcccgcgaaatggaatcgtgtataatcagcct

SEQ ID NO: 60173 - DNA, 550 bp, Homo sapiens
  chr1:44726772-44727322
  hypo
cagtcctttgagaactcgacaggcctcgacttgaaaagggtgctaaaagcaatgatgtctccaagtgtgatgggagatatttgtgtctgctttacccttggctttttgctccggttcaggtaggagcggggtgggccggctggcagatctgagagcgtggcacgccccagcgggcagggcgcacagcgcggaggaaggcgcgagtcagtctggagtgctccccatttatcaagctcacgcaggccgccagccgagcgagtctttctatcattacacctctcaaaatccgattcataccactaatcctgccttcattctcccagattaataacatctctttcaaccttcacagtgtgataaatagacaaagagagaacaaaaggagagacagaagagagagaaagagctggagcaagtccccataatagagagagctgagaaagaggagagggaaaaaaggagagcgaacgagagcaggcagcggccagagactgcagctaccttagagagccgctctgaggagagctggcggctgcgccccgctatgcgc

SEQ ID NO: 60174 - DNA, 82 bp, Homo sapiens
  chr1:44755340-44755422
  hypo
actgagccatactggctgggccgagacagccctgatggcaaacaggtgtggctagcccggcgccagccaaggcaggggatag

SEQ ID NO: 60175 - DNA, 30 bp, Homo sapiens; identical to SEQ ID NO: 14589
  chr1:44786159-44786189
  hypo

SEQ ID NO: 60176 - DNA, 243 bp, Homo sapiens
  chr1:44792159-44792402
  hypo
ctgctcctaaataatttatggcgggttaaatttattgccaagccctggctggctgcaaattcgaattgccaaataattagattttagggcaaagcttataaattacccgtcgatttgtccggacttgtttgtcagttgctttgtgcttcgggtcatctttggcatttggctgtttgggttttaattgctgatttacactttgacagatgagagctgatgctcgaagtttcaggacaaggaagg

SEQ ID NO: 60177 - DNA, 249 bp, Homo sapiens; identical to SEQ ID NO: 396
  chr1:44872923-44873172
  hypo

SEQ ID NO: 60178 - DNA, 123 bp, Homo sapiens; identical to SEQ ID NO: 35575
  chr1:44873509-44873632
  hypo

SEQ ID NO: 60179 - DNA, 99 bp, Homo sapiens; identical to SEQ ID NO: 35576
  chr1:44883115-44883214
  hypo

SEQ ID NO: 60180 - DNA, 371 bp, Homo sapiens; identical to SEQ ID NO: 35577
  chr1:44883751-44884122
  hypo

SEQ ID NO: 60181 - DNA, 144 bp, Homo sapiens
  chr1:45068756-45068900
  hypo
aggacaaataaggtttcccaacgcaattgaaaatgattacaggcagctacagatggggccaatctgatgcgcagcagcaaatcaaatcgaatttccttatcggcgtattattttaggcgttatctggcacgttgatgcagttat

SEQ ID NO: 60182 - DNA, 30 bp, Homo sapiens; identical to SEQ ID NO: 14594
  chr1:45079951-45079981
  hypo

SEQ ID NO: 60183 - DNA, 356 bp, Homo sapiens; identical to SEQ ID NO: 14595
  chr1:45087573-45087929
  hypo

SEQ ID NO: 60184 - DNA, 31 bp, Homo sapiens
  chr1:45092411-45092442
  hypo
ttcaaaagcatgataccggccgggtgcagtg

SEQ ID NO: 60185 - DNA, 100 bp, Homo sapiens; identical to SEQ ID NO: 14596
  chr1:45101745-45101845
  hypo

SEQ ID NO: 60186 - DNA, 281 bp, Homo sapiens; identical to SEQ ID NO: 14597
  chr1:45106052-45106333
  hypo

SEQ ID NO: 60187 - DNA, 30 bp, Homo sapiens; identical to SEQ ID NO: 14598
  chr1:45106534-45106564
  hypo

SEQ ID NO: 60188 - DNA, 211 bp, Homo sapiens; identical to SEQ ID NO: 14599
  chr1:45111997-45112208
  hypo

SEQ ID NO: 60189 - DNA, 192 bp, Homo sapiens
  chr1:45120344-45120536
  hypo
gacccggcgtgccaggcgtgcctccaccatgcgttctatgtctctggccaggactacttcgtcagccctcgagtagaggtagagctcgggccagcgagagcccgcgtcctgtagcctgtcatagaagtgggtgtggaagagggctgtgatgggagcaagcaggacgtggaacaggacgaccaccagggcaaa

SEQ ID NO: 60190 - DNA, 26 bp, Homo sapiens
  chr1:45131013-45131039
  hypo
aacatgcaatctttgccgggcgcagt

SEQ ID NO: 60191 - DNA, 82 bp, Homo sapiens
  chr1:45156592-45156674
  hypo
gggagtacaggcataagacaccgcgcccagtgaagcttcttgaaaaggttgttgaggggcggggcgcggtgactcacgcctg

SEQ ID NO: 60192 - DNA, 30 bp, Homo sapiens
  chr1:45183973-45184003
  hypo
ggacgtgctgcaggcgacaaagccaagtgt

SEQ ID NO: 60193 - DNA, 19 bp, Homo sapiens
  chr1:45197952-45197971
  hypo
cccatccagtttattacca

SEQ ID NO: 60194 - DNA, 30 bp, Homo sapiens
  chr1:45253064-45253094
  hypo
tgaggtctgctgagcggttgcagtaccggg

SEQ ID NO: 60195 - DNA, 30 bp, Homo sapiens
  chr1:45253413-45253443
  hypo
gcccccagggctgtcgtttagttctccaga

SEQ ID NO: 60196 - DNA, 216 bp, Homo sapiens; identical to SEQ ID NO: 14601
  chr1:45268610-45268826
  hypo

SEQ ID NO: 60197 - DNA, 30 bp, Homo sapiens
  chr1:45269312-45269342
  hypo
gtgagcggcctcatgcgcacatccgttggc

SEQ ID NO: 60198 - DNA, 30 bp, Homo sapiens
  chr1:45271737-45271767
  hypo
cgaggccagcccatcgcgcgccacgtccca

SEQ ID NO: 60199 - DNA, 137 bp, Homo sapiens
  chr1:45280522-45280659
  hypo
gcctcagctccttctttcattccagacctgcccccctggagatcgctccctgaatgcccctcagacaccacaggctcggcgagaaattgatctccccagcttttccccagctctgcccccatcgtgtttctcatttc

SEQ ID NO: 60200 - DNA, 88 bp, Homo sapiens
  chr1:45308227-45308315
  hypo
cgtgagtcaccgcgcccggccggcataggcccattttctgagagcaggatacatatgtacacacacctgtcgtcgggtggacacagag

SEQ ID NO: 60201 - DNA, 84 bp, Homo sapiens
  chr1:45454355-45454439
  hypo
cttgccgtcgacagcgatgtcgaacacggtggggttaaccatggctgatcgtacagagctcctggcgtcggtggctgcatttgc

SEQ ID NO: 60202 - DNA, 30 bp, Homo sapiens
  chr1:45469112-45469142
  hypo
ggccaagagggacacgtgcagtcttgctgg

SEQ ID NO: 60203 - DNA, 106 bp, Homo sapiens
  chr1:45529303-45529409
  hypo
gaccaaaaaacccaaccgttctcattgttaatattacttcagctccagagtcagggccgcaatgagaaacagaaaccataggaaggcgcagtggctcacacctgta

SEQ ID NO: 60204 - DNA, 39 bp, Homo sapiens
  chr1:45656869-45656908
  hypo
gctgggattacaggcgtgagccaccgcgcccggccgaaa

SEQ ID NO: 60205 - DNA, 168 bp, Homo sapiens
  chr1:45759289-45759457
  hypo
taatcccagcaagagacggtggtaatccaagcaagagacgctggtaacgcggattaggacaacagcagtagagacagaagtgaaaatggaaagaagtggatgctttcaagagccatgtaagagagaaaattggcagcacttggtgactggacacggctacagggtgag

SEQ ID NO: 60206 - DNA, 25 bp, Homo sapiens
  chr1:45909227-45909252
  hypo
cgagatccatcgcaaaaaaaaaaaa

SEQ ID NO: 60207 - DNA, 121 bp, Homo sapiens; identical to SEQ ID NO: 14604
  chr1:45950718-45950839
  hypo

SEQ ID NO: 60208 - DNA, 84 bp, Homo sapiens; identical to SEQ ID NO: 14605
  chr1:46049071-46049155
  hypo

SEQ ID NO: 60209 - DNA, 228 bp, Homo sapiens
  chr1:46089386-46089614
  hypo
catggccatggaggcccttaccgcggcccgctggggttcagtggcaactgatgcctgtgctccaaatgtcatctcttgggtcgggtggccaatgcagaagcgctgagtatgggtggctaacagagctgaggagcggaaaaccatgtcacaggtcccacagggcaggagcgcaggctccccagagtgggagtccatgggatgggacccgtttcctgaaaccagccaaga

SEQ ID NO: 60210 - DNA, 80 bp, Homo sapiens
  chr1:46131434-46131514
  hypo
aaaaaggaaagtttccaagtcttgtttatttcattacttcttttccacctgttactttcgactcttcaaggtcaaattac

SEQ ID NO: 60211 - DNA, 31 bp, Homo sapiens
  chr1:46278401-46278432
  hypo
cctatttttaatagtccgtgtaacattttca

SEQ ID NO: 60212 - DNA, 36 bp, Homo sapiens
  chr1:46338429-46338465
  hypo
ggcgtgagccaccacgcctggccatgaatagcacca

SEQ ID NO: 60213 - DNA, 20 bp, Homo sapiens
  chr1:46409260-46409280
  hypo
tacaaaattagctgggcgtg

SEQ ID NO: 60214 - DNA, 30 bp, Homo sapiens
  chr1:46485337-46485367
  hypo
ttgcccgcccagcacgtctcctggaatgcc

SEQ ID NO: 60215 - DNA, 191 bp, Homo sapiens
  chr1:46653314-46653505
  hypo
cacacttctcctctgccgtgtgcctgtgtggaggctgcatgggatttgtttgcccagggcgggcctctacctcatcatgggctaattgctgctcaacctggctgttgtgccacctcaggcactatatccagctccaacaaacactgaaggcgtcagggtggcgagatatgtccaagcgacataccacccat

SEQ ID NO: 60216 - DNA, 31 bp, Homo sapiens; identical to SEQ ID NO: 14606
  chr1:46743579-46743610
  hypo

SEQ ID NO: 60217 - DNA, 90 bp, Homo sapiens; identical to SEQ ID NO: 14607
  chr1:46751245-46751335
  hypo

SEQ ID NO: 60218 - DNA, 30 bp, Homo sapiens
  chr1:46751627-46751657
  hypo
gggctgcagcacatcgctcagcagcatccc

SEQ ID NO: 60219 - DNA, 31 bp, Homo sapiens; identical to SEQ ID NO: 14608
  chr1:46752099-46752130
  hypo

SEQ ID NO: 60220 - DNA, 30 bp, Homo sapiens
  chr1:46805266-46805296
  hypo
ggcagcgtgagccaccgcgcccggccaagt

SEQ ID NO: 60221 - DNA, 287 bp, Homo sapiens
  chr1:46807506-46807793
  hypo
ccctccagaatgcggcgtccctgtcttcaaggcacgtactgtgaccagcacactaatctctgttactctagcggatggccttcagcttttggaaccagcccggcaacctcctttccccttgctcatcagtccccgggaacgagcccagtgacctcccctcagctcactcatgtacccttggaaactggacccatgatttcgcctcctcctacacataggaccccgggaacttgcctcacgatttcacctcctcttgctcgccggccggtggaaactagtcctatggc

SEQ ID NO: 60222 - DNA, 30 bp, Homo sapiens; identical to SEQ ID NO: 14609
  chr1:46871217-46871247
  hypo

SEQ ID NO: 60223 - DNA, 30 bp, Homo sapiens
  chr1:46910870-46910900
  hypo
gcggtaagaggatccgtcggagttctggtg

SEQ ID NO: 60224 - DNA, 111 bp, Homo sapiens; identical to SEQ ID NO: 35607
  chr1:46913765-46913876
  hypo

SEQ ID NO: 60225 - DNA, 359 bp, Homo sapiens; identical to SEQ ID NO: 408
  chr1:46913886-46914245
  hypo

SEQ ID NO: 60226 - DNA, 78 bp, Homo sapiens; identical to SEQ ID NO: 409
  chr1:46914285-46914363
  hypo

SEQ ID NO: 60227 - DNA, 128 bp, Homo sapiens
  chr1:46921731-46921859
  hypo
cgcagccaggcccccgagtgtgcgccgtgtaaagtgacacatattcatcaccagctcgtggcgccggcgccgacgctgatacaatattagtgttgccccccctttcggagcccgctccgcccggctcc

SEQ ID NO: 60228 - DNA, 398 bp, Homo sapiens; identical to SEQ ID NO: 35610
  chr1:46932179-46932577
  hypo

SEQ ID NO: 60229 - DNA, 244 bp, Homo sapiens; identical to SEQ ID NO: 14612
  chr1:46963444-46963688
  hypo

SEQ ID NO: 60230 - DNA, 30 bp, Homo sapiens; identical to SEQ ID NO: 14613
  chr1:47018057-47018087
  hypo

SEQ ID NO: 60231 - DNA, 86 bp, Homo sapiens
  chr1:47033311-47033397
  hypo
cccttatttatgagccgcggcttcatccagaccacaatatatatgctcttgaatacacacatgtatatacacgcagagctgtgaac

SEQ ID NO: 60232 - DNA, 30 bp, Homo sapiens; identical to SEQ ID NO: 14614
  chr1:47035300-47035330
  hypo

SEQ ID NO: 60233 - DNA, 319 bp, Homo sapiens; identical to SEQ ID NO: 14615
  chr1:47041012-47041331
  hypo

SEQ ID NO: 60234 - DNA, 30 bp, Homo sapiens; identical to SEQ ID NO: 14616
  chr1:47073123-47073153
  hypo

SEQ ID NO: 60235 - DNA, 290 bp, Homo sapiens; identical to SEQ ID NO: 35621
  chr1:47078537-47078827
  hypo

SEQ ID NO: 60236 - DNA, 31 bp, Homo sapiens
  chr1:47652619-47652650
  hypo
cacccaaaggagggaccgcaccttctagagg

SEQ ID NO: 60237 - DNA, 113 bp, Homo sapiens
  chr1:47684468-47684581
  hypo
gagaatgcacagatggggctgcgcatctactcagcaccagcgtacgcccatcagcacactggcattcactcgccagcatgaacagtgatgtcgaggagttgaagcccacatgc

SEQ ID NO: 60238 - DNA, 440 bp, Homo sapiens
  chr1:47685396-47685836
  hypo
gagggccggctccatcggcggcaggcagcatggcaggatggaggctgcgggccgtgtgtttgggcgcgggctcctccgtgtagctgtccgggctggctgccccatccagggagctgccgcagctggagttgggggaaagcacgtcttgcaggaggtcatctgggggcgcgccgccccctcccccacctccacccccaccagcccccaccacagggtccttgccagtcttggcccgctgggtgccctcctcctcctggtcattgagcagcttggccaagaagttgatatacttcatggccaggcggaggatctcattcttgctgagcttcttgtccgggggatgtgtggggatcagcttgcggagctcggcaaaggccccgttcacattctgctgccgccatcgctcccggctgttggtgaagatacgccgcacaactttg

SEQ ID NO: 60239 - DNA, 26 bp, Homo sapiens
  chr1:47793445-47793471
  hypo
tatctgaggccaggtgcgatggctca

SEQ ID NO: 60240 - DNA, 27 bp, Homo sapiens
  chr1:47801450-47801477
  hypo
gtttttgtgacagtctcactccgtcac

SEQ ID NO: 60241 - DNA, 31 bp, Homo sapiens
  chr1:47813588-47813619
  hypo
catcgtgcccggtccatgatcttaagttgaa

SEQ ID NO: 60242 - DNA, 450 bp, Homo sapiens; identical to SEQ ID NO: 35635
  chr1:47903679-47904129
  hypo

SEQ ID NO: 60243 - DNA, 110 bp, Homo sapiens; identical to SEQ ID NO: 35638
  chr1:47910748-47910858
  hypo

SEQ ID NO: 60244 - DNA, 103 bp, Homo sapiens
  chr1:48187538-48187641
  hypo
ttatttgaaatgttcccggcttcctcccacccagggaagttcaaatgcacagattccactgctaggaatgcccctcctgactccaggccggccctagtcaatt

SEQ ID NO: 60245 - DNA, 196 bp, Homo sapiens; identical to SEQ ID NO: 35647
  chr1:48190694-48190890
  hypo

SEQ ID NO: 60246 - DNA, 282 bp, Homo sapiens; identical to SEQ ID NO: 434
  chr1:48190924-48191206
  hypo

SEQ ID NO: 60247 - DNA, 31 bp, Homo sapiens
  chr1:48231659-48231690
  hypo
tgctggcgggccctggcgggtcctgctgttg

SEQ ID NO: 60248 - DNA, 104 bp, Homo sapiens
  chr1:48246982-48247086
  hypo
ccaggaaaaaaagccctgcctcgggctgtacaggagcagcagcaaatatttactgactgctgcgcggctgctccaagaggagcgtttctgggactgagtagagg

SEQ ID NO: 60249 - DNA, 189 bp, Homo sapiens
  chr1:48257293-48257482
  hypo
taggtgaggagtggagcgggtatgtcttcaggtctcactccaccaagagagtgcttagtcccagctctgcacgtaagtcagcctgtcaccagatgtgggactcagaaattacatgatcataagaatgtaacgaggccggagtggacttccctcaccacagctttcatgcggatgcgttccatgtcaata

SEQ ID NO: 60250 - DNA, 30 bp, Homo sapiens; identical to SEQ ID NO: 14622
  chr1:48270061-48270091
  hypo

SEQ ID NO: 60251 - DNA, 470 bp, Homo sapiens; identical to SEQ ID NO: 14623
  chr1:48459791-48460261
  hypo

SEQ ID NO: 60252 - DNA, 31 bp, Homo sapiens; identical to SEQ ID NO: 35651
  chr1:48463141-48463172
  hypo

SEQ ID NO: 60253 - DNA, 60 bp, Homo sapiens; identical to SEQ ID NO: 435
  chr1:48463405-48463465
  hypo

SEQ ID NO: 60254 - DNA, 30 bp, Homo sapiens
  chr1:48555188-48555218
  hypo
gctggtgcccgggccgcgcttcgggctgca

SEQ ID NO: 60255 - DNA, 31 bp, Homo sapiens; identical to SEQ ID NO: 14625
  chr1:48694609-48694640
  hypo

SEQ ID NO: 60256 - DNA, 31 bp, Homo sapiens
  chr1:48733207-48733238
  hypo
ttcctctgaagttggccgcccagcagctgga

SEQ ID NO: 60257 - DNA, 410 bp, Homo sapiens; identical to SEQ ID NO: 35654
  chr1:49242175-49242585
  hypo

SEQ ID NO: 60258 - DNA, 670 bp, Homo sapiens; identical to SEQ ID NO: 442
  chr1:50798646-50799316
  hypo

SEQ ID NO: 60259 - DNA, 30 bp, Homo sapiens; identical to SEQ ID NO: 14628
  chr1:50919070-50919100
  hypo

SEQ ID NO: 60260 - DNA, 30 bp, Homo sapiens
  chr1:51165681-51165711
  hypo
atggtgcttaaatagcgcactttaaaacaa

SEQ ID NO: 60261 - DNA, 36 bp, Homo sapiens; identical to SEQ ID NO: 14629
  chr1:51424029-51424065
  hypo

SEQ ID NO: 60262 - DNA, 30 bp, Homo sapiens; identical to SEQ ID NO: 35683
  chr1:51426399-51426429
  hypo

SEQ ID NO: 60263 - DNA, 310 bp, Homo sapiens; identical to SEQ ID NO: 14630
  chr1:51439563-51439873
  hypo

SEQ ID NO: 60264 - DNA, 30 bp, Homo sapiens
  chr1:51749369-51749399
  hypo
tttcttttttagacagagtctcgctctgtc

SEQ ID NO: 60265 - DNA, 252 bp, Homo sapiens
  chr1:51761676-51761928
  hypo
gcctggctggtctgtccatagcggcctacacggtgggagtggcctacacagtgggagcacgatgtgggacccaccgaaataattccacttcgtcgtccccgaacggcttgtggtcctccttcccaaacatgctgaggtaggcggccttcatgtaaatgtaggtggcctgtgcgagacagagcaacagccaggtgtgagcagccctcctccagccccagccgggctggaatctgcagacggacctcacgtggc

SEQ ID NO: 60266 - DNA, 394 bp, Homo sapiens; identical to SEQ ID NO: 14632
  chr1:51763205-51763599
  hypo

SEQ ID NO: 60267 - DNA, 31 bp, Homo sapiens; identical to SEQ ID NO: 14633
  chr1:51767451-51767482
  hypo

SEQ ID NO: 60268 - DNA, 30 bp, Homo sapiens
  chr1:51793645-51793675
  hypo
ggcgtgagcaactgcgtgcggctttaccat

SEQ ID NO: 60269 - DNA, 25 bp, Homo sapiens
  chr1:51800920-51800945
  hypo
taagaaggcccttaatatggccggg

SEQ ID NO: 60270 - DNA, 30 bp, Homo sapiens
  chr1:51808546-51808576
  hypo
ttcttccttcttagcgtctacctcccattc

SEQ ID NO: 60271 - DNA, 9 bp, Homo sapiens
  chr1:51848398-51848407
  hypo
ttttaaaat

SEQ ID NO: 60272 - DNA, 21 bp, Homo sapiens
  chr1:51897402-51897423
  hypo
gttaccgcgcctggccagaaa

SEQ ID NO: 60273 - DNA, 45 bp, Homo sapiens; identical to SEQ ID NO: 14635
  chr1:52060512-52060557
  hypo

SEQ ID NO: 60274 - DNA, 204 bp, Homo sapiens; identical to SEQ ID NO: 35690
  chr1:52081940-52082144
  hypo

SEQ ID NO: 60275 - DNA, 39 bp, Homo sapiens; identical to SEQ ID NO: 14637
  chr1:52089595-52089634
  hypo

SEQ ID NO: 60276 - DNA, 25 bp, Homo sapiens
  chr1:52110287-52110312
  hypo
ccgcgcccagcccatgttgagtttt

SEQ ID NO: 60277 - DNA, 349 bp, Homo sapiens; identical to SEQ ID NO: 460
  chr1:52194940-52195289
  hypo

SEQ ID NO: 60278 - DNA, 46 bp, Homo sapiens
  chr1:52310964-52311010
  hypo
atgaaatgtctccttttggcccggccgcagtggctcacacccgtaa

SEQ ID NO: 60279 - DNA, 39 bp, Homo sapiens
  chr1:52337809-52337848
  hypo
tgggattacaggcgtgagccacggcgcccagtcagaaaa

SEQ ID NO: 60280 - DNA, 39 bp, Homo sapiens; identical to SEQ ID NO: 14639
  chr1:52455124-52455163
  hypo

SEQ ID NO: 60281 - DNA, 44 bp, Homo sapiens
  chr1:52549395-52549439
  hypo
atattcagaaacatggctgggcgtggtggctcatgcctgtattc

SEQ ID NO: 60282 - DNA, 20 bp, Homo sapiens
  chr1:52559282-52559302
  hypo
cagagcgagactccatctcc

SEQ ID NO: 60283 - DNA, 30 bp, Homo sapiens
  chr1:52559874-52559904
  hypo
aacttgaaagagggccgggcaaggtggctc

SEQ ID NO: 60284 - DNA, 301 bp, Homo sapiens
  chr1:52659365-52659666
  hypo
caaaactctgtctcaaaaaaaaaaaaaaaaaaaaaaaaagatacacactaatgactcagtaattgtgcatcttaatgtcttaatgtttatcttcaaacacacacgcacgcgcgcacacacacacatgtgtccaaggaggcatatacaagggtgttaatgggagcattcttggtaatcgttgaaaaataggggaaaatgtaaatgcttattcgtgctttatataactgataaataacaggaaaattatgatatggttatattttagaattctatgtgtacaattaaagtagttgtaatccca

SEQ ID NO: 60285 - DNA, 95 bp, Homo sapiens
  chr1:52832631-52832726
  hypo
ttttctaaggaaagcacgtttctccctgcggcttgcagagtccagttaacaagagattgagctcaggagtccgagaccagcctgggcaacatggc

SEQ ID NO: 60286 - DNA, 78 bp, Homo sapiens
  chr1:52879565-52879643
  hypo
tcacctgatcaccgccggagaagctaccgagacttggacaagccccgtcgctctcccacactgcgctacaggaggagt

SEQ ID NO: 60287 - DNA, 105 bp, Homo sapiens; identical to SEQ ID NO: 14642
  chr1:53053489-53053594
  hypo

SEQ ID NO: 60288 - DNA, 689 bp, Homo sapiens; identical to SEQ ID NO: 35702
  chr1:53067916-53068605
  hypo

SEQ ID NO: 60289 - DNA, 554 bp, Homo sapiens; identical to SEQ ID NO: 35703
  chr1:53098719-53099273
  hypo

SEQ ID NO: 60290 - DNA, 20 bp, Homo sapiens
  chr1:53129422-53129442
  hypo
aactgcgtctaaaaaaaaag

SEQ ID NO: 60291 - DNA, 169 bp, Homo sapiens
  chr1:53238153-53238322
  hypo
tctctcacgattacaccgatctgtgaaggagtaaggcccttcttggccagtttgtaaatctgctccttcacgtcgtcagatgtcaacttcaaccaagtggggaagctgcgtcgatagggtaaagccgactgggacaggcccttctcaggagcacgcatacgacccatga

SEQ ID NO: 60292 - DNA, 214 bp, Homo sapiens; identical to SEQ ID NO: 465
  chr1:53308393-53308607
  hypo

SEQ ID NO: 60293 - DNA, 35 bp, Homo sapiens; identical to SEQ ID NO: 14648
  chr1:53479847-53479882
  hypo

SEQ ID NO: 60294 - DNA, 93 bp, Homo sapiens
  chr1:53535641-53535734
  hypo
agccccgaagagaacgaatttgcggaggaggagccggtgctggtactgagccctgaggagcccgggcctggcccagccgcggtcagctgcccc

SEQ ID NO: 60295 - DNA, 31 bp, Homo sapiens; identical to SEQ ID NO: 14649
  chr1:53537412-53537443
  hypo

SEQ ID NO: 60296 - DNA, 264 bp, Homo sapiens
  chr1:53544124-53544388
  hypo
cacttggagaagaacgccatccggagcgtggacgcgaatgtgctgacccccatccgcagcctggagtacctgctgctgcacagcaaccagctgcgggagcagggcatccacccactggccttccagggcctcaagcggttgcacacggtgcacctgtacaacaacgcgctggagcgcgtgcccagtggcctgcctcgccgcgtgcgcaccctcatgatcctgcacaaccagatcacaggcattggccgcgaagactttgccacc

SEQ ID NO: 60297 - DNA, 31 bp, Homo sapiens; identical to SEQ ID NO: 14650
  chr1:53562234-53562265
  hypo

SEQ ID NO: 60298 - DNA, 30 bp, Homo sapiens
  chr1:53593696-53593726
  hypo
cacggcaatgataacgaatacacacagaca

SEQ ID NO: 60299 - DNA, 31 bp, Homo sapiens
  chr1:53607948-53607979
  hypo
tcctggacaggggtcccgagatgctctgggt

SEQ ID NO: 60300 - DNA, 3 bp, Homo sapiens
  chr1:53703092-53703095
  hypo
tcc

SEQ ID NO: 60301 - DNA, 24 bp, Homo sapiens
  chr1:53705684-53705708
  hypo
cacggagtccttttctccctgcaa

SEQ ID NO: 60302 - DNA, 104 bp, Homo sapiens
  chr1:53769706-53769810
  hypo
ggctggtgataggtttcggtgggaaaaagaaaggaaaggggcgatgaattccaacttgctgagcgataaaggaaattaaggcataataccgaggaggcagcagt

SEQ ID NO: 60303 - DNA, 30 bp, Homo sapiens
  chr1:53789949-53789979
  hypo
ggtggcctagaatgcgggaagggctgagga

SEQ ID NO: 60304 - DNA, 30 bp, Homo sapiens
  chr1:53828480-53828510
  hypo
agatcacacacccacgagtccgtgggtccc

SEQ ID NO: 60305 - DNA, 31 bp, Homo sapiens; identical to SEQ ID NO: 14651
  chr1:53859594-53859625
  hypo

SEQ ID NO: 60306 - DNA, 237 bp, Homo sapiens
  chr1:53905597-53905834
  hypo
aaggggtaaagagtcgccatgcactgttgccttcctgagaggcctttctggagtcctcacccaactatgccggtttaggggaatggtcatctccatggcagtgacgttccacggtgcgaatgggcagagagagccagtggcttccggccttacataaccttctcacctggtaggtaggtgagtttcccccagctcacacaccactcctgtctcccaacaaacggttgtagtgggagc

SEQ ID NO: 60307 - DNA, 30 bp, Homo sapiens
  chr1:53926212-53926242
  hypo
cctccgtttccccacgtgcaggtgagggga

SEQ ID NO: 60308 - DNA, 57 bp, Homo sapiens
  chr1:53986259-53986316
  hypo
ggcccctcctgggctacgcccctggccctgcctccccgcacacgtacctgggagcag

SEQ ID NO: 60309 - DNA, 76 bp, Homo sapiens
  chr1:54060384-54060460
  hypo
cgcttcaggctgccctcggggaggtgggtctcgggctggaggcccaggccagagctgggttcgctgcccagaaggt

SEQ ID NO: 60310 - DNA, 799 bp, Homo sapiens; identical to SEQ ID NO: 35719
  chr1:54203828-54204627
  hypo

SEQ ID NO: 60311 - DNA, 31 bp, Homo sapiens; identical to SEQ ID NO: 14655
  chr1:54260082-54260113
  hypo

SEQ ID NO: 60312 - DNA, 190 bp, Homo sapiens; identical to SEQ ID NO: 14656
  chr1:54408755-54408945
  hypo

SEQ ID NO: 60313 - DNA, 31 bp, Homo sapiens; identical to SEQ ID NO: 14657
  chr1:54417838-54417869
  hypo

SEQ ID NO: 60314 - DNA, 30 bp, Homo sapiens; identical to SEQ ID NO: 14658
  chr1:54474563-54474593
  hypo

SEQ ID NO: 60315 - DNA, 30 bp, Homo sapiens; identical to SEQ ID NO: 14659
  chr1:54583785-54583815
  hypo

SEQ ID NO: 60316 - DNA, 31 bp, Homo sapiens; identical to SEQ ID NO: 14660
  chr1:54595917-54595948
  hypo

SEQ ID NO: 60317 - DNA, 84 bp, Homo sapiens; identical to SEQ ID NO: 14661
  chr1:54602341-54602425
  hypo

SEQ ID NO: 60318 - DNA, 205 bp, Homo sapiens; identical to SEQ ID NO: 14662
  chr1:54605373-54605578
  hypo

SEQ ID NO: 60319 - DNA, 51 bp, Homo sapiens; identical to SEQ ID NO: 14663
  chr1:54610115-54610166
  hypo

SEQ ID NO: 60320 - DNA, 30 bp, Homo sapiens
  chr1:54645108-54645138
  hypo
ttccttcaactggacggcagtgcccttcct

SEQ ID NO: 60321 - DNA, 30 bp, Homo sapiens
  chr1:54684008-54684038
  hypo
tggcctgctgctctcgctgacaataaagag

SEQ ID NO: 60322 - DNA, 31 bp, Homo sapiens; identical to SEQ ID NO: 14664
  chr1:54685802-54685833
  hypo

SEQ ID NO: 60323 - DNA, 244 bp, Homo sapiens
  chr1:54722602-54722846
  hypo
aggcaggtgaactgccgcaccatgggcacagcggggacatggggccctctctggggaacagctagtaagctaccagccacgttaaacctgcccctccacccctcaatcctttccctcaactttcattttgtgtcaaagtccacctagggccaaggatggctgagggaggggagagagaacatgaaaaggtacagtacctggtttcccattctgatcgggggcctggggccgcctgcgtatcgcg

SEQ ID NO: 60324 - DNA, 30 bp, Homo sapiens
  chr1:54724003-54724033
  hypo
acggcgagcgggagcgagagaagctgataa

SEQ ID NO: 60325 - DNA, 31 bp, Homo sapiens; identical to SEQ ID NO: 14665
  chr1:54725169-54725200
  hypo

SEQ ID NO: 60326 - DNA, 30 bp, Homo sapiens
  chr1:54726655-54726685
  hypo
gcctgcccacctctcggcacagagccagac

SEQ ID NO: 60327 - DNA, 208 bp, Homo sapiens; identical to SEQ ID NO: 14666
  chr1:54746226-54746434
  hypo

SEQ ID NO: 60328 - DNA, 359 bp, Homo sapiens
  chr1:54747982-54748341
  hypo
caataaatatccatgactcaacgaataaatgaacagaccaactgggaaacactgctggagagggtgacggagggcagagcgtgttcttggccctgcagggtcctaggtgtctcatgagagagaggggcctcgcgaagtggggggaccgtcattccttttctctttaaacactgctgttctggcatttgcctggtatatctgcctcaacaaatgcctcccaggggtgagcagacattgctctccccagcctggcctccttccaaaggatctgtgtgcaacctattcaggtggtcggcgcgtctgtgcctggccccgtgctcacacaggcggggcggggcgaggctgagacatctgggccc

SEQ ID NO: 60329 - DNA, 106 bp, Homo sapiens
  chr1:54756001-54756107
  hypo
cagccagactcagccaaggtacgggttcagcaaccggcggcccagagccagagacacagctccaggtaaaggaccacgtgctgacgtcctaagattccctgaccac

SEQ ID NO: 60330 - DNA, 44 bp, Homo sapiens
  chr1:54757159-54757203
  hypo
gccacacgggttcggcgctgagcagatgccgtctaagcctttaa

SEQ ID NO: 60331 - DNA, 30 bp, Homo sapiens
  chr1:54757485-54757515
  hypo
tcaggcagccctccacgcccagctgtcagg

SEQ ID NO: 60332 - DNA, 43 bp, Homo sapiens
  chr1:54766193-54766236
  hypo
aaccagtgcaacacagagtaccgcacaggcctgtactcagctc

SEQ ID NO: 60333 - DNA, 30 bp, Homo sapiens; identical to SEQ ID NO: 14667
  chr1:54808674-54808704
  hypo

SEQ ID NO: 60334 - DNA, 122 bp, Homo sapiens
  chr1:54818600-54818722
  hypo
caaaaaatgtgagccgacgccgggcccctcaacggattctgaatggcaaacccgagaactgcaggagagacaggaggcagtaggtgacgcggggaggcggcccgaccggacagcgccgtgtc

SEQ ID NO: 60335 - DNA, 30 bp, Homo sapiens; identical to SEQ ID NO: 14669
  chr1:54819977-54820007
  hypo

SEQ ID NO: 60336 - DNA, 30 bp, Homo sapiens; identical to SEQ ID NO: 14670
  chr1:54839966-54839996
  hypo

SEQ ID NO: 60337 - DNA, 79 bp, Homo sapiens
  chr1:54860654-54860733
  hypo
cgtgagccaccgcgcccggctaagactcctttttttttttttattgtatgtgggaatcgcctttgtgggatttccacat

SEQ ID NO: 60338 - DNA, 31 bp, Homo sapiens; identical to SEQ ID NO: 35726
  chr1:54871324-54871355
  hypo

SEQ ID NO: 60339 - DNA, 30 bp, Homo sapiens; identical to SEQ ID NO: 14671
  chr1:54876220-54876250
  hypo

SEQ ID NO: 60340 - DNA, 139 bp, Homo sapiens
  chr1:54880302-54880441
  hypo
gccccgggaagacagcgcttccaggagagagtggccgagcaacggagagcatgaacacggcttttggaaagagctctgtgaagggcacagttggccggtgtagagcagtattactattttttttaagacggagtctccc

SEQ ID NO: 60341 - DNA, 37 bp, Homo sapiens
  chr1:54944839-54944876
  hypo
gatgtgagccaccgtgcctggccgaaaagaaataact

SEQ ID NO: 60342 - DNA, 31 bp, Homo sapiens; identical to SEQ ID NO: 14672
  chr1:54961586-54961617
  hypo

SEQ ID NO: 60343 - DNA, 45 bp, Homo sapiens
  chr1:55009516-55009561
  hypo
gaggggatcagaagaacgaagtctggacagcgaggccagggctga

SEQ ID NO: 60344 - DNA, 95 bp, Homo sapiens
  chr1:55033217-55033312
  hypo
ctgggattacaggcgtgagccactgtgcctggccttttttccctaatttttatcctgcctaccacctcccatcatctccacgaccaagtccccta

SEQ ID NO: 60345 - DNA, 156 bp, Homo sapiens; identical to SEQ ID NO: 14673
  chr1:55050845-55051001
  hypo

SEQ ID NO: 60346 - DNA, 73 bp, Homo sapiens; identical to SEQ ID NO: 14674
  chr1:55065737-55065810
  hypo

SEQ ID NO: 60347 - DNA, 190 bp, Homo sapiens; identical to SEQ ID NO: 14675
  chr1:55066932-55067122
  hypo

SEQ ID NO: 60348 - DNA, 294 bp, Homo sapiens
  chr1:55067376-55067670
  hypo
gtcagatgtgggttggaacctcgcctctactacattcaagtgatgccccctcgagctttcagtctccatttgtaaaatgggtgtatctgcagtccctacctcacaggactgtggggcgatagatgcagtactgactccatgcctggctgcgccctgggagcggtcaggaggatggtgaaagcaacgcaaggggcacgggaagacagtcaggagcctggtgcaaggtcctctcttacaaaatgctccctgtgcctcctgtgggccaggccttggagaggccgctccctcccttgg

SEQ ID NO: 60349 - DNA, 207 bp, Homo sapiens
  chr1:55074066-55074273
  hypo
ccataaaacccagcagcgcagtccgtgttgatggaaaacatggggaggaggctgagggaaagcgagggtggggtactgcagcctcccccctcacagcttctattagggccctgcagcctgggtctggccttgagactcacccagcagagactcagccggtgtttgctgaattcatatgcttgaacccatgagcgcctcagaaccatc

SEQ ID NO: 60350 - DNA, 20 bp, Homo sapiens
  chr1:55137068-55137088
  hypo
tctcaaaacaaaatgaaaca

SEQ ID NO: 60351 - DNA, 31 bp, Homo sapiens; identical to SEQ ID NO: 14677
  chr1:55144367-55144398
  hypo

SEQ ID NO: 60352 - DNA, 206 bp, Homo sapiens
  chr1:55146064-55146270
  hypo
attgaaaggaggtctgcgtgtccgtcctgactctgcctccagctgctgtgtgggtcttgggtagcccatttgtcctctctttcccccttaggcaaaagaaggaaatgatccctgcaatcccaccccaggtgggtggtcatgacagtaatgcagccagcggtgctgagtgcctgctcaggcctgggcccgtgcggaagggtgctcca

SEQ ID NO: 60353 - DNA, 31 bp, Homo sapiens
  chr1:55160577-55160608
  hypo
tttctagctctgtgaccgtgggcggttcaca

SEQ ID NO: 60354 - DNA, 31 bp, Homo sapiens
  chr1:55166801-55166832
  hypo
ctcctgccccacagaccgccaaggtgaaggc

SEQ ID NO: 60355 - DNA, 30 bp, Homo sapiens
  chr1:55180695-55180725
  hypo
agccatttgctggccggtagagaggctgca

SEQ ID NO: 60356 - DNA, 270 bp, Homo sapiens
  chr1:55261712-55261982
  hypo
gtgatgatcaaatgagataatcgatgaaaagcacttgtgtgcacagtgcctgggatatcatccagcttcatctacctcctcatggagctgaaccaaatcaaaccactcagaattgtggagtcgtgtgtgtgtgcgcgtgtgtgtgtctgtgcgcgtgcgcacgtgtggacacgcatgcgtgcataccagggatcctgggcttgctgacctatgacactctcttgggccttcccgccaggtccccaccccgctgggcgcagtgatggattg

SEQ ID NO: 60357 - DNA, 237 bp, Homo sapiens; identical to SEQ ID NO: 479
  chr1:55352447-55352684
  hypo

SEQ ID NO: 60358 - DNA, 774 bp, Homo sapiens; identical to SEQ ID NO: 35739
  chr1:55462134-55462908
  hypo

SEQ ID NO: 60359 - DNA, 30 bp, Homo sapiens; identical to SEQ ID NO: 14680
  chr1:55474300-55474330
  hypo

SEQ ID NO: 60360 - DNA, 31 bp, Homo sapiens
  chr1:55494086-55494117
  hypo
aaaaaaataaatttagcgtagcctaaatgta

SEQ ID NO: 60361 - DNA, 199 bp, Homo sapiens; identical to SEQ ID NO: 14681
  chr1:55517830-55518029
  hypo

SEQ ID NO: 60362 - DNA, 31 bp, Homo sapiens
  chr1:55524322-55524353
  hypo
gactgtacccctccttcgtgtgtgtgtgtgt

SEQ ID NO: 60363 - DNA, 31 bp, Homo sapiens
  chr1:55525309-55525340
  hypo
gccaccaacagggccacgtcctcacaggtag

SEQ ID NO: 60364 - DNA, 76 bp, Homo sapiens
  chr1:55532713-55532789
  hypo
aatatacacggtggacgatcctgatgaagctttacagtgaggacggcaggtgctaggggtgcggaaggcgttgttt

SEQ ID NO: 60365 - DNA, 42 bp, Homo sapiens
  chr1:55567198-55567240
  hypo
ttttcaagtaacgcacgtattatctatcgtaccaaaaaggat

SEQ ID NO: 60366 - DNA, 31 bp, Homo sapiens; identical to SEQ ID NO: 14682
  chr1:55573225-55573256
  hypo

SEQ ID NO: 60367 - DNA, 41 bp, Homo sapiens
  chr1:55583106-55583147
  hypo
caaaagaaactgtggccgggcgcggtggctcacgcctgtaa

SEQ ID NO: 60368 - DNA, 30 bp, Homo sapiens
  chr1:55590212-55590242
  hypo
ccaacaagatcaagccgtcctgcagccgca

SEQ ID NO: 60369 - DNA, 184 bp, Homo sapiens
  chr1:55620059-55620243
  hypo
tcaaagcgagcttcccggcctattcgtccaatcaggctcaaaagcttctgtcttactctatcactctcagtctcccagctctgtagaacggaaaagacacaggaattgcttcacgatcaaactggcaaaatatgcaaaaattttaaacttgagctaaaaacattaacaacgtaagaaaagtaca

SEQ ID NO: 60370 - DNA, 30 bp, Homo sapiens; identical to SEQ ID NO: 14684
  chr1:56169493-56169523
  hypo

SEQ ID NO: 60371 - DNA, 30 bp, Homo sapiens; identical to SEQ ID NO: 35741
  chr1:56943671-56943701
  hypo

SEQ ID NO: 60372 - DNA, 126 bp, Homo sapiens; identical to SEQ ID NO: 483
  chr1:57044386-57044512
  hypo

SEQ ID NO: 60373 - DNA, 66 bp, Homo sapiens; identical to SEQ ID NO: 35744
  chr1:57044976-57045042
  hypo

SEQ ID NO: 60374 - DNA, 30 bp, Homo sapiens
  chr1:57046882-57046912
  hypo
gtaggttatcagcgccgcggcatctctcta

SEQ ID NO: 60375 - DNA, 25 bp, Homo sapiens
  chr1:57110714-57110739
  hypo
cggaccccgcgcatctggcgcagcc

SEQ ID NO: 60376 - DNA, 130 bp, Homo sapiens; identical to SEQ ID NO: 35746
  chr1:57111084-57111214
  hypo

SEQ ID NO: 60377 - DNA, 495 bp, Homo sapiens; identical to SEQ ID NO: 489
  chr1:58715359-58715854
  hypo

SEQ ID NO: 60378 - DNA, 166 bp, Homo sapiens; identical to SEQ ID NO: 35750
  chr1:58715978-58716144
  hypo

SEQ ID NO: 60379 - DNA, 31 bp, Homo sapiens
  chr1:58794164-58794195
  hypo
atcccaggccctttgccgcagcagccacact

SEQ ID NO: 60380 - DNA, 44 bp, Homo sapiens; identical to SEQ ID NO: 495
  chr1:59369442-59369486
  hypo

SEQ ID NO: 60381 - DNA, 31 bp, Homo sapiens; identical to SEQ ID NO: 14691
  chr1:59404584-59404615
  hypo

SEQ ID NO: 60382 - DNA, 110 bp, Homo sapiens; identical to SEQ ID NO: 496
  chr1:59762086-59762196
  hypo

SEQ ID NO: 60383 - DNA, 30 bp, Homo sapiens; identical to SEQ ID NO: 497
  chr1:59799495-59799525
  hypo

SEQ ID NO: 60384 - DNA, 155 bp, Homo sapiens
  chr1:59911862-59912017
  hypo
ccaggggcttcatcacgatcttggaatattttggtggcaactttaagatcttttgttttctgactcttagatctctttcttttggtggcatgggaaaattccctcaactcgattatttattcagttctttcatgctccccatattgtcatggcca

SEQ ID NO: 60385 - DNA, 205 bp, Homo sapiens; identical to SEQ ID NO: 14694
  chr1:60220991-60221196
  hypo

SEQ ID NO: 60386 - DNA, 279 bp, Homo sapiens; identical to SEQ ID NO: 35762
  chr1:60280812-60281091
  hypo

SEQ ID NO: 60387 - DNA, 25 bp, Homo sapiens
  chr1:60371579-60371604
  hypo
gaatatattttcctcacgcttgtaa

SEQ ID NO: 60388 - DNA, 43 bp, Homo sapiens
  chr1:61333527-61333570
  hypo
aatcaaaggacagtacaagatcggagtttcacactaaaggcaa

SEQ ID NO: 60389 - DNA, 77 bp, Homo sapiens
  chr1:61445391-61445468
  hypo
tcaaagcagggatgttcggctatcaacatcaaaaatagtgaaacgaaccgagctgctaaacttaatttttttttttt

SEQ ID NO: 60390 - DNA, 197 bp, Homo sapiens
  chr1:61456436-61456633
  hypo
ctttggattattagccgggttggatcacgttaccctgtttggctctgcagaaatcacacttttcattttgcctttaatcctaaaggtcaccgggaaggtcagccccaaacacaaatgatactttgtggtcttactttcagacaattatcaactcataaatcttggtcagactgtaatgagagcgcgaggaataattg

SEQ ID NO: 60391 - DNA, 521 bp, Homo sapiens; identical to SEQ ID NO: 35764
  chr1:61508594-61509115
  hypo

SEQ ID NO: 60392 - DNA, 41 bp, Homo sapiens; identical to SEQ ID NO: 501
  chr1:61516033-61516074
  hypo

SEQ ID NO: 60393 - DNA, 31 bp, Homo sapiens
  chr1:61530060-61530091
  hypo
aaacaaaagagaaggccgggcatggtggctc

SEQ ID NO: 60394 - DNA, 37 bp, Homo sapiens; identical to SEQ ID NO: 14699
  chr1:61541525-61541562
  hypo

SEQ ID NO: 60395 - DNA, 31 bp, Homo sapiens; identical to SEQ ID NO: 14700
  chr1:61543522-61543553
  hypo

SEQ ID NO: 60396 - DNA, 340 bp, Homo sapiens; identical to SEQ ID NO: 35771
  chr1:61547844-61548184
  hypo

SEQ ID NO: 60397 - DNA, 902 bp, Homo sapiens; identical to SEQ ID NO: 35772
  chr1:61548440-61549342
  hypo

SEQ ID NO: 60398 - DNA, 30 bp, Homo sapiens; identical to SEQ ID NO: 14705
  chr1:61554399-61554429
  hypo

SEQ ID NO: 60399 - DNA, 253 bp, Homo sapiens
  chr1:61601534-61601787
  hypo
tctggacatatccatagagcacgcattttaaatctgaaagaatatatgtagtctcccctaccccagctttttttaagtagcaagggctattgaaaaaaatcagaaccctccgcttacgctcgcatacatgtagcttaaaatatatgttgcttattgaaagcattgtttaagttgaactcacgagatatactacatcatgtaatatgtctgcatttgtccatgcattcttttcggaaacctgatcttacttatg

SEQ ID NO: 60400 - DNA, 31 bp, Homo sapiens
  chr1:61655354-61655385
  hypo
aggctgccataggttgcgtctccagctttca

SEQ ID NO: 60401 - DNA, 25 bp, Homo sapiens
  chr1:61663363-61663388
  hypo
cagacgtaggcatggcgcggtggct

SEQ ID NO: 60402 - DNA, 24 bp, Homo sapiens
  chr1:61663687-61663711
  hypo
gagaaagaacgaacagacatagat

SEQ ID NO: 60403 - DNA, 30 bp, Homo sapiens
  chr1:61664315-61664345
  hypo
gcgtctgtatgcgaccggaaggcagtgctg

SEQ ID NO: 60404 - DNA, 134 bp, Homo sapiens
  chr1:61833607-61833741
  hypo
taataagatggagatcacacacgtctcactttgtccttcgagtaggatcaagcgctcagaagcagagcgatgtatacgtttgtcgaacgaatgagcgttgctccgcttgcatcggagaacccagatgtacaatt

SEQ ID NO: 60405 - DNA, 30 bp, Homo sapiens; identical to SEQ ID NO: 14707
  chr1:61848981-61849011
  hypo

SEQ ID NO: 60406 - DNA, 160 bp, Homo sapiens
  chr1:61875329-61875489
  hypo
gaacccccaattacatcgtcatagctaccaggtcgctggcaggactagaccacagcagcccttcctacatatggtccgccctagcctgtaaagctgatggcatgaaggtgcgggtggcagtgtgcttcccaccagcacctgtccccgaagaggaagagac

SEQ ID NO: 60407 - DNA, 417 bp, Homo sapiens
  chr1:61913158-61913575
  hypo
aaagccgcgaaaccccgtcgccactgcattttccgcagcagagccatccactgcactgtctgggctccacccagaaaatccggcagtgccatcatgaccaaatagataggaactctggacaatttcatcgggtcattgtccccttaatctccacgctgcacctcagatctcaagcagcttccgtggcgcaggctcaatttaatggatagaatctatttttcatgaaaaagcaggaaataagctgtctctttcataaaaagatttacaaaatgtaatcattgttgaaatattccctttgaactgccgtgtccacgggggtctccggctcccagagtcgtgcttcattagaaccccgtcataagcggctccagaagggcaggtacgctggtggtgcccggctttgatgtcttgaatgaa

SEQ ID NO: 60408 - DNA, 31 bp, Homo sapiens
  chr1:61959223-61959254
  hypo
atgttggtacaggggtcgggaaccgaccttg

SEQ ID NO: 60409 - DNA, 118 bp, Homo sapiens
  chr1:62119987-62120105
  hypo
cccgcagacctgggcgccgaggctggcttgcagcccgctgcttggggccttgcgtcagctccccaggaccgaggagctgcagcaactgctcttcatcaacaacgcgggctctcctggg

SEQ ID NO: 60410 - DNA, 31 bp, Homo sapiens
  chr1:62120543-62120574
  hypo
tcaagcctggagcccacgtggacttctacta

SEQ ID NO: 60411 - DNA, 602 bp, Homo sapiens; identical to SEQ ID NO: 509
  chr1:62207659-62208261
  hypo

SEQ ID NO: 60412 - DNA, 519 bp, Homo sapiens; identical to SEQ ID NO: 510
  chr1:62208291-62208810
  hypo

SEQ ID NO: 60413 - DNA, 37 bp, Homo sapiens
  chr1:62213622-62213659
  hypo
tgcgaaggctggagccgcctcctgggttcaagtgatt

SEQ ID NO: 60414 - DNA, 31 bp, Homo sapiens; identical to SEQ ID NO: 14712
  chr1:62285410-62285441
  hypo

SEQ ID NO: 60415 - DNA, 59 bp, Homo sapiens
  chr1:62729379-62729438
  hypo
tatcaggacacctgcgtgtgtttaataggcatagctggaaaatcgcaacatcttactaa

SEQ ID NO: 60416 - DNA, 31 bp, Homo sapiens
  chr1:62734254-62734285
  hypo
gcctcgggtaacactccgcagcttgctaatc

SEQ ID NO: 60417 - DNA, 961 bp, Homo sapiens; identical to SEQ ID NO: 35776
  chr1:62784144-62785105
  hypo

SEQ ID NO: 60418 - DNA, 61 bp, Homo sapiens
  chr1:62836528-62836589
  hypo
cagctctcatactttggtatgcggcataagtgctctatgcgtacttcctattcaacagaga

SEQ ID NO: 60419 - DNA, 31 bp, Homo sapiens; identical to SEQ ID NO: 512
  chr1:63153559-63153590
  hypo

SEQ ID NO: 60420 - DNA, 30 bp, Homo sapiens; identical to SEQ ID NO: 513
  chr1:63348082-63348112
  hypo

SEQ ID NO: 60421 - DNA, 558 bp, Homo sapiens; identical to SEQ ID NO: 514
  chr1:63539430-63539988
  hypo

SEQ ID NO: 60422 - DNA, 480 bp, Homo sapiens; identical to SEQ ID NO: 35790
  chr1:63788286-63788766
  hypo

SEQ ID NO: 60423 - DNA, 577 bp, Homo sapiens; identical to SEQ ID NO: 518
  chr1:63788919-63789496
  hypo

SEQ ID NO: 60424 - DNA, 63 bp, Homo sapiens; identical to SEQ ID NO: 519
  chr1:63789728-63789791
  hypo

SEQ ID NO: 60425 - DNA, 63 bp, Homo sapiens; identical to SEQ ID NO: 520
  chr1:63789849-63789912
  hypo

SEQ ID NO: 60426 - DNA, 205 bp, Homo sapiens
  chr1:63832611-63832816
  hypo
cacagccgtccatgcgtgattggacagaagcctagactgagatggaaatagtggaactggaaaggaagggatcaatgcaaaaggaaaagtgtgcaggtcttactaacttactagataggtatttttggcaagtttgggaccaggtgattcaagctgcccgctggggcacgtgtagtggctactcgagggcagggctgtccttttg

SEQ ID NO: 60427 - DNA, 131 bp, Homo sapiens
  chr1:64383871-64384002
  hypo
atgttgtactttctgccaaagcgtccctccctgagtcagaatagtggaaggctgactatattccacccagcacgacgcactgaatgcttggtatgagcagcacatcatacgacaggaatctcacaacaaag

SEQ ID NO: 60428 - DNA, 30 bp, Homo sapiens
  chr1:64608502-64608532
  hypo
aaggtaccaaaacacgttctcaagaagtca

SEQ ID NO: 60429 - DNA, 150 bp, Homo sapiens
  chr1:64734440-64734590
  hypo
gattaacatggcatgccaaatcgtgccatttgataacggagtgtgtcatgtatagtaaaactccacaactgacgcataccctccactggatatgacgtcagatctgaagttaaggttctataggaacgcgaggccccagcccccttgtga

SEQ ID NO: 60430 - DNA, 14 bp, Homo sapiens
  chr1:65210893-65210907
  hypo
cgcgggcctgggca

SEQ ID NO: 60431 - DNA, 419 bp, Homo sapiens; identical to SEQ ID NO: 35809
  chr1:65210939-65211358
  hypo

SEQ ID NO: 60432 - DNA, 92 bp, Homo sapiens
  chr1:65513411-65513503
  hypo
aaaagtcatacagatcgcacagagcttacattctagtggagtcaggcagcgttaaacacagtaagtatactgaagtacgttagtgtggacgt

SEQ ID NO: 60433 - DNA, 30 bp, Homo sapiens
  chr1:65682141-65682171
  hypo
ccctccctgcctcccgcttccccaaagttc

SEQ ID NO: 60434 - DNA, 40 bp, Homo sapiens; identical to SEQ ID NO: 538
  chr1:65720328-65720368
  hypo

SEQ ID NO: 60435 - DNA, 31 bp, Homo sapiens; identical to SEQ ID NO: 540
  chr1:65886883-65886914
  hypo

SEQ ID NO: 60436 - DNA, 30 bp, Homo sapiens
  chr1:66030258-66030288
  hypo
cgtgaatccgtttcttaatgttttacacta

SEQ ID NO: 60437 - DNA, 436 bp, Homo sapiens; identical to SEQ ID NO: 35829
  chr1:66258671-66259107
  hypo

SEQ ID NO: 60438 - DNA, 128 bp, Homo sapiens
  chr1:66834311-66834439
  hypo
cattgtaattccattttttttcggtgcatatgtcataattataatgcaactaaaatgttctcgggtttagtaccaagcgtactagtatgagaggcatgagatgttccggcagtatttacacctaattt

SEQ ID NO: 60439 - DNA, 742 bp, Homo sapiens; identical to SEQ ID NO: 35835
  chr1:67773094-67773836
  hypo

SEQ ID NO: 60440 - DNA, 31 bp, Homo sapiens; identical to SEQ ID NO: 14728
  chr1:67797228-67797259
  hypo

SEQ ID NO: 60441 - DNA, 43 bp, Homo sapiens
  chr1:68174579-68174622
  hypo
atgtaattctgccataaaggccgagaccagacaaagctgcaaa

SEQ ID NO: 60442 - DNA, 37 bp, Homo sapiens
  chr1:68344802-68344839
  hypo
gtgagccaccgcgcccggcctctgtgtcatttctgaa

SEQ ID NO: 60443 - DNA, 131 bp, Homo sapiens
  chr1:68629017-68629148
  hypo
tccacggcaaaaggcgcccactctggaggccgcggtggcggtggctcccgcccctcccaccccaccctgcggcggtggcggtggcggtggctgcagctgtgcagcctcccctcagcgcagcatggctccct

SEQ ID NO: 60444 - DNA, 31 bp, Homo sapiens
  chr1:68704034-68704065
  hypo
agacaacacccagtaccgtggcagacttggc

SEQ ID NO: 60445 - DNA, 22 bp, Homo sapiens
  chr1:68958070-68958092
  hypo
ctttatagttttgttacgatcg

SEQ ID NO: 60446 - DNA, 36 bp, Homo sapiens
  chr1:69982629-69982665
  hypo
aagtgttaaaatagggccaggcgcggtggctcacgc

SEQ ID NO: 60447 - DNA, 35 bp, Homo sapiens
  chr1:69982904-69982939
  hypo
cagagcgagactccgtctcaaaaaaaaagagataa

SEQ ID NO: 60448 - DNA, 46 bp, Homo sapiens
  chr1:70661585-70661631
  hypo
tgggagtacaggcgtgagccaccacgccaggacctatacttactac

SEQ ID NO: 60449 - DNA, 30 bp, Homo sapiens
  chr1:70691509-70691539
  hypo
agtaaaatatgtgtcgtatttggaagcagt

SEQ ID NO: 60450 - DNA, 39 bp, Homo sapiens
  chr1:70710367-70710406
  hypo
cggtcaagaagcagatcgagacggcggtcacattctaag

SEQ ID NO: 60451 - DNA, 28 bp, Homo sapiens
  chr1:70796947-70796975
  hypo
tagaacactaagtaggccaggcgcagtg

SEQ ID NO: 60452 - DNA, 27 bp, Homo sapiens
  chr1:70797094-70797121
  hypo
ttagccgggcatggtaacacacacctg

SEQ ID NO: 60453 - DNA, 31 bp, Homo sapiens; identical to SEQ ID NO: 14731
  chr1:71175455-71175486
  hypo

SEQ ID NO: 60454 - DNA, 31 bp, Homo sapiens
  chr1:71519979-71520010
  hypo
ctgtgttcccagccagcgctagtggcagctg

SEQ ID NO: 60455 - DNA, 37 bp, Homo sapiens
  chr1:71555023-71555060
  hypo
tttttttttttttttttgagacggagtctggctggag

SEQ ID NO: 60456 - DNA, 35 bp, Homo sapiens; identical to SEQ ID NO: 14732
  chr1:72383169-72383204
  hypo

SEQ ID NO: 60457 - DNA, 35 bp, Homo sapiens; identical to SEQ ID NO: 14733
  chr1:72383443-72383478
  hypo

SEQ ID NO: 60458 - DNA, 145 bp, Homo sapiens
  chr1:72740461-72740606
  hypo
cagctgtgtaaaagatcgggtagaaaaagtgggccaggtgatcagagttatttgcatcctcagccaccccatcaagaacaccaatgatgccaactcctgccagatcattattccacagaaccaagtcaatcgaaagtcagatatc

SEQ ID NO: 60459 - DNA, 31 bp, Homo sapiens
  chr1:72885249-72885280
  hypo
tacgcctctctgtttccgtggatgtgtgtgt

SEQ ID NO: 60460 - DNA, 42 bp, Homo sapiens; identical to SEQ ID NO: 14734
  chr1:73222392-73222434
  hypo

SEQ ID NO: 60461 - DNA, 491 bp, Homo sapiens; identical to SEQ ID NO: 35868
  chr1:75601917-75602408
  hypo

SEQ ID NO: 60462 - DNA, 31 bp, Homo sapiens; identical to SEQ ID NO: 14736
  chr1:76192235-76192266
  hypo

SEQ ID NO: 60463 - DNA, 30 bp, Homo sapiens; identical to SEQ ID NO: 14737
  chr1:76840017-76840047
  hypo

SEQ ID NO: 60464 - DNA, 74 bp, Homo sapiens
  chr1:77165570-77165644
  hypo
aggtgccggccgacaccgaggtggtttgtactccgcctactgcctatatcgacttcgcccggcagaagctagat

SEQ ID NO: 60465 - DNA, 11 bp, Homo sapiens
  chr1:77614423-77614434
  hypo
agagtcttgct

SEQ ID NO: 60466 - DNA, 31 bp, Homo sapiens
  chr1:77992103-77992134
  hypo
gtcaggacaggtcctgcgcatgtttggaagc

SEQ ID NO: 60467 - DNA, 36 bp, Homo sapiens
  chr1:78152466-78152502
  hypo
tcatgaaaagtgcaggtcacccgtctgggaagtgag

SEQ ID NO: 60468 - DNA, 25 bp, Homo sapiens
  chr1:78246592-78246617
  hypo
cttttttttttttttttgaggcgga

SEQ ID NO: 60469 - DNA, 163 bp, Homo sapiens; identical to SEQ ID NO: 14738
  chr1:78254758-78254921
  hypo

SEQ ID NO: 60470 - DNA, 69 bp, Homo sapiens; identical to SEQ ID NO: 578
  chr1:78354048-78354117
  hypo

SEQ ID NO: 60471 - DNA, 779 bp, Homo sapiens; identical to SEQ ID NO: 35884
  chr1:78354190-78354969
  hypo

SEQ ID NO: 60472 - DNA, 91 bp, Homo sapiens; identical to SEQ ID NO: 14740
  chr1:78458352-78458443
  hypo

SEQ ID NO: 60473 - DNA, 81 bp, Homo sapiens; identical to SEQ ID NO: 14741
  chr1:78463739-78463820
  hypo

SEQ ID NO: 60474 - DNA, 36 bp, Homo sapiens
  chr1:78510239-78510275
  hypo
gtgagccaccgcgccggcctcctaaagaattcttaa

SEQ ID NO: 60475 - DNA, 818 bp, Homo sapiens; identical to SEQ ID NO: 35888
  chr1:78511527-78512345
  hypo

SEQ ID NO: 60476 - DNA, 32 bp, Homo sapiens
  chr1:79267842-79267874
  hypo
acaattatgtcggaagggttccatgttgatta

SEQ ID NO: 60477 - DNA, 130 bp, Homo sapiens; identical to SEQ ID NO: 14743
  chr1:83243220-83243350
  hypo

SEQ ID NO: 60478 - DNA, 1159 bp, Homo sapiens; identical to SEQ ID NO: 35900
  chr1:84543140-84544299
  hypo

SEQ ID NO: 60479 - DNA, 100 bp, Homo sapiens; identical to SEQ ID NO: 35901
  chr1:84544390-84544490
  hypo

SEQ ID NO: 60480 - DNA, 39 bp, Homo sapiens; identical to SEQ ID NO: 14745
  chr1:84944529-84944568
  hypo

SEQ ID NO: 60481 - DNA, 30 bp, Homo sapiens
  chr1:85102831-85102861
  hypo
aacacccctagtcagcggcatgcaatcagg

SEQ ID NO: 60482 - DNA, 316 bp, Homo sapiens; identical to SEQ ID NO: 35907
  chr1:85358276-85358592
  hypo

SEQ ID NO: 60483 - DNA, 456 bp, Homo sapiens; identical to SEQ ID NO: 35908
  chr1:85358751-85359207
  hypo

SEQ ID NO: 60484 - DNA, 172 bp, Homo sapiens; identical to SEQ ID NO: 35910
  chr1:85462938-85463110
  hypo

SEQ ID NO: 60485 - DNA, 312 bp, Homo sapiens; identical to SEQ ID NO: 35915
  chr1:85666851-85667163
  hypo

SEQ ID NO: 60486 - DNA, 18 bp, Homo sapiens
  chr1:85720385-85720403
  hypo
taacgagttaattatcac

SEQ ID NO: 60487 - DNA, 37 bp, Homo sapiens; identical to SEQ ID NO: 14748
  chr1:85725177-85725214
  hypo

SEQ ID NO: 60488 - DNA, 150 bp, Homo sapiens
  chr1:85743362-85743512
  hypo
tttaactactatggcgctgtgtaagaagcaacctgagaagtgtggatgaaaagctacaggtagagccctgggcccaagacggtggcttggacaacatgctaaataaactataaactagatggtatttgaagctacgagagtagataaaaa

SEQ ID NO: 60489 - DNA, 1012 bp, Homo sapiens; identical to SEQ ID NO: 35919
  chr1:85929934-85930946
  hypo

SEQ ID NO: 60490 - DNA, 30 bp, Homo sapiens; identical to SEQ ID NO: 35920
  chr1:86042134-86042164
  hypo

SEQ ID NO: 60491 - DNA, 146 bp, Homo sapiens
  chr1:86175120-86175266
  hypo
cataaatatattaggcgaaagtgcctaatgcccggtattgctgaataacattgcattgtatgaatgtggcacgttttttcatgcatgtaccagttggtgggcatttggcttgtttccagtttgggctattacgaataattctgctt

SEQ ID NO: 60492 - DNA, 101 bp, Homo sapiens; identical to SEQ ID NO: 14751
  chr1:86860848-86860949
  hypo

SEQ ID NO: 60493 - DNA, 213 bp, Homo sapiens
  chr1:86973441-86973654
  hypo
tggttgtctgggttaaacatgcgcatctgggtgatggccgctatagttattctttcttgtatctgtttgctagacatctgcagatggctctgtgctgctacccagcgcgtcgacaaccagggaagaacgatagaagtttaccttgcattggatgaccagcacgctctaagaattaaagaagggggagacgtcgggggtgcatggcaacacatt

SEQ ID NO: 60494 - DNA, 30 bp, Homo sapiens
  chr1:87018745-87018775
  hypo
accaagtggtccagcggcgcccaccctgca

SEQ ID NO: 60495 - DNA, 91 bp, Homo sapiens
  chr1:87299758-87299849
  hypo
taatggaacctgaattagatgcgtcgagagacccaaacattaagaacagaaagagctggattcacgagtcatggggcccaaaatggcatca

SEQ ID NO: 60496 - DNA, 86 bp, Homo sapiens
  chr1:87607362-87607448
  hypo
ctgtgtgtggcatgactccttcgaatggcgttccttttcccaccccgtggcattgctctgctctcgcagtctctctccatagtaac

SEQ ID NO: 60497 - DNA, 128 bp, Homo sapiens; identical to SEQ ID NO: 35930
  chr1:87793798-87793926
  hypo

SEQ ID NO: 60498 - DNA, 31 bp, Homo sapiens; identical to SEQ ID NO: 14753
  chr1:87797490-87797521
  hypo

SEQ ID NO: 60499 - DNA, 30 bp, Homo sapiens; identical to SEQ ID NO: 603
  chr1:87907740-87907770
  hypo

SEQ ID NO: 60500 - DNA, 30 bp, Homo sapiens
  chr1:88734863-88734893
  hypo
cacgatgtctgtagtcgtctgttaaagggc

SEQ ID NO: 60501 - DNA, 23 bp, Homo sapiens
  chr1:89132151-89132174
  hypo
tataaaattcccagacctgaccg

SEQ ID NO: 60502 - DNA, 23 bp, Homo sapiens
  chr1:89132413-89132436
  hypo
ccgtctcaagaaaaaaagaaaaa

SEQ ID NO: 60503 - DNA, 85 bp, Homo sapiens
  chr1:89148473-89148558
  hypo
aatcctttctgtaactccaaagcctaggaaaccatctggcttttagttaccagtaaaggtaatcatatcccggcctttccaagtg

SEQ ID NO: 60504 - DNA, 30 bp, Homo sapiens
  chr1:89154152-89154182
  hypo
aaattggccaaaaacgtaattaaccaacat

SEQ ID NO: 60505 - DNA, 78 bp, Homo sapiens
  chr1:89228940-89229018
  hypo
gcagggagctccttttcgcagggaaaagacacaatgagatttcaagtttagaaagttcacatccatccggccacatgt

SEQ ID NO: 60506 - DNA, 25 bp, Homo sapiens
  chr1:89240660-89240685
  hypo
ggattataggcgtgagccactatgc

SEQ ID NO: 60507 - DNA, 21 bp, Homo sapiens
  chr1:89347741-89347762
  hypo
cagaacgctgggaggtcgagg

SEQ ID NO: 60508 - DNA, 106 bp, Homo sapiens
  chr1:89919386-89919492
  hypo
cctggaaagagccatggtgggcgcctgcatggctacctctatcaggccctgcagcaggcccaaaaatgcagaaagcaagaccgtcgctgtcaaggagcttctaggc

SEQ ID NO: 60509 - DNA, 30 bp, Homo sapiens; identical to SEQ ID NO: 35938
  chr1:90098324-90098354
  hypo

SEQ ID NO: 60510 - DNA, 614 bp, Homo sapiens; identical to SEQ ID NO: 607
  chr1:90098723-90099337
  hypo

SEQ ID NO: 60511 - DNA, 30 bp, Homo sapiens; identical to SEQ ID NO: 35940
  chr1:90229080-90229110
  hypo

SEQ ID NO: 60512 - DNA, 768 bp, Homo sapiens; identical to SEQ ID NO: 611
  chr1:90308852-90309620
  hypo

SEQ ID NO: 60513 - DNA, 163 bp, Homo sapiens
  chr1:90400240-90400403
  hypo
cttgagatgccttcacgtgaagttcactgatgtggctgaaattcctgcctgggtgtatttgctcaaaaaccttcgagagttgtacttaataggcaatttgaactctgaaaacaataagatgataggacttgaatctctccgagagttgcggcaccttaagatt

SEQ ID NO: 60514 - DNA, 199 bp, Homo sapiens; identical to SEQ ID NO: 14758
  chr1:90448904-90449103
  hypo

SEQ ID NO: 60515 - DNA, 30 bp, Homo sapiens; identical to SEQ ID NO: 14759
  chr1:90478708-90478738
  hypo

SEQ ID NO: 60516 - DNA, 35 bp, Homo sapiens
  chr1:91072760-91072795
  hypo
cactgtattagtctgctctcacgctgctatgaaga

SEQ ID NO: 60517 - DNA, 360 bp, Homo sapiens; identical to SEQ ID NO: 617
  chr1:91183250-91183610
  hypo

SEQ ID NO: 60518 - DNA, 741 bp, Homo sapiens; identical to SEQ ID NO: 35956
  chr1:91183775-91184516
  hypo

SEQ ID NO: 60519 - DNA, 203 bp, Homo sapiens; identical to SEQ ID NO: 628
  chr1:91195143-91195346
  hypo

SEQ ID NO: 60520 - DNA, 30 bp, Homo sapiens; identical to SEQ ID NO: 14762
  chr1:91359518-91359548
  hypo

SEQ ID NO: 60521 - DNA, 30 bp, Homo sapiens; identical to SEQ ID NO: 633
  chr1:91904864-91904894
  hypo

SEQ ID NO: 60522 - DNA, 30 bp, Homo sapiens
  chr1:92001227-92001257
  hypo
atggccaacctgggcgaggcgggcgccgcg

SEQ ID NO: 60523 - DNA, 196 bp, Homo sapiens
  chr1:92102534-92102730
  hypo
cctgacatttacatagcgggtgatctcagtgagttattcaacctctcggagggccagttttgtcattcataaaataagtgatccttagggctgaataagctaatatgaataaactatttaatacatataagcattcagtaagtggtacttattattttccgagatagtaaagcaattccgccgtttttactataaa

SEQ ID NO: 60524 - DNA, 45 bp, Homo sapiens
  chr1:92371563-92371608
  hypo
aattttaaagataattctggacgggcgcggtggctcacgcctgta

SEQ ID NO: 60525 - DNA, 30 bp, Homo sapiens
  chr1:92415130-92415160
  hypo
tgggtgggaacaaccgttttttcccccctc

SEQ ID NO: 60526 - DNA, 191 bp, Homo sapiens
  chr1:92683499-92683690
  hypo
ccaggcaccctgggcgctctgccctaccggcggcgcctctcactgctcacggaacgttctggaagtttgggaaaccctgagcggtctctgaggacctggtgagcaggtgggtttgcagcgctggggatgaggcctcggcagacctgtctcttcgcgtttttctttcttcgttcttcgccggcgtagtgctc

SEQ ID NO: 60527 - DNA, 36 bp, Homo sapiens; identical to SEQ ID NO: 35988
  chr1:92946277-92946313
  hypo

SEQ ID NO: 60528 - DNA, 60 bp, Homo sapiens; identical to SEQ ID NO: 35989
  chr1:92946604-92946664
  hypo

SEQ ID NO: 60529 - DNA, 924 bp, Homo sapiens; identical to SEQ ID NO: 35990
  chr1:92946768-92947692
  hypo

SEQ ID NO: 60530 - DNA, 2763 bp, Homo sapiens; identical to SEQ ID NO: 35992
  chr1:92949853-92952616
  hypo

SEQ ID NO: 60531 - DNA, 21 bp, Homo sapiens
  chr1:93226594-93226615
  hypo
acacagcgaggctccatctca

SEQ ID NO: 60532 - DNA, 428 bp, Homo sapiens; identical to SEQ ID NO: 35993
  chr1:93250630-93251058
  hypo

SEQ ID NO: 60533 - DNA, 5 bp, Homo sapiens
  chr1:93507031-93507036
  hypo
ggctg

SEQ ID NO: 60534 - DNA, 22 bp, Homo sapiens
  chr1:93542194-93542216
  hypo
ttttttcttttttcttcgagac

SEQ ID NO: 60535 - DNA, 31 bp, Homo sapiens; identical to SEQ ID NO: 14769
  chr1:93647179-93647210
  hypo

SEQ ID NO: 60536 - DNA, 30 bp, Homo sapiens
  chr1:93720787-93720817
  hypo
gtgagctaccgtgcccggccgaagagtcag

SEQ ID NO: 60537 - DNA, 1012 bp, Homo sapiens; identical to SEQ ID NO: 35999
  chr1:93913453-93914465
  hypo

SEQ ID NO: 60538 - DNA, 31 bp, Homo sapiens
  chr1:93917485-93917516
  hypo
cgtgagccaccgtgcccggtcttcatcatat

SEQ ID NO: 60539 - DNA, 22 bp, Homo sapiens
  chr1:93971512-93971534
  hypo
cgtgagccaccatgcctggccc

SEQ ID NO: 60540 - DNA, 45 bp, Homo sapiens
  chr1:93973206-93973251
  hypo
tttatttatttatttatgagacggagtttcacgctttctcccagg

SEQ ID NO: 60541 - DNA, 34 bp, Homo sapiens
  chr1:93975135-93975169
  hypo
gatatataaaatgtagtcaatcggaggagccaag

SEQ ID NO: 60542 - DNA, 591 bp, Homo sapiens
  chr1:94047870-94048461
  hypo
ctcagtacgtgctgggcgatgaccttggggtcgttgttggtgaacagttcttttgcacgtttcaacattgctgtttccaggggcttattctcagggggaaggaactttgactcaaactcgttgggcctgaaggaggagacagtctccaggaggggcgtcacaaactcgcccttgtcccactgccccttctccatctgagctgccgcaggttcccaaggtctttccctgtcatcatcatcaaggatcaagtagttgacgccagagttccggggacctggcgcctcattctgcttggctgtgagcagttctgtgtggcttccctgggcacatgagggtagctttgctcccctgccgcagcctgtggcaaacgctgggttcagttcacagtagttggcctctgagttgagccaggcagagggagacgagggaaccttgaggaacggcaccttgcagggcttaggcgggggcttagggcacagttgactgtctgatcccctcagcgcctccccagccctggcgtctgaggagaccctccgaaccactgctgggctcagggcaggctcgcttcccgtcctgaacacaggtgagttt

SEQ ID NO: 60543 - DNA, 30 bp, Homo sapiens
  chr1:94054820-94054850
  hypo
gcggctgtaggcctcgctgagtcgcagaac

SEQ ID NO: 60544 - DNA, 30 bp, Homo sapiens; identical to SEQ ID NO: 36001
  chr1:94146690-94146720
  hypo

SEQ ID NO: 60545 - DNA, 26 bp, Homo sapiens
  chr1:94343567-94343593
  hypo
aaaatcaaaatttggccgggcgcggt

SEQ ID NO: 60546 - DNA, 93 bp, Homo sapiens
  chr1:94345694-94345787
  hypo
ttgtgtgcatgtctttagggacggcatctaaaagagaggaggccgtccctgacttttttttttggagacggagtcttgctctgtcgcccaggg

SEQ ID NO: 60547 - DNA, 33 bp, Homo sapiens
  chr1:94346026-94346059
  hypo
tgggattataggcctaaacgacctcgcccagcc

SEQ ID NO: 60548 - DNA, 67 bp, Homo sapiens
  chr1:94354602-94354669
  hypo
acttttcacaatgaccgaataccgcagtagccacagcggcacccactcgtgcgcttgaatgtcagga

SEQ ID NO: 60549 - DNA, 193 bp, Homo sapiens
  chr1:94466587-94466780
  hypo
tctctgatgatgctcacgatgacgttccacagcatgcggcgtgcctgggggtccatccctgtggtgggctcatcctggggggtggagagaaggttgggggcacaggctgggagctggcccttctgattactgcttccccctgggctggctcccctgtggaggatgagctgacagaaggcgcacacagtcactc

SEQ ID NO: 60550 - DNA, 279 bp, Homo sapiens
  chr1:94495947-94496226
  hypo
ctagtcttcttaggacaggggcgcgtaggcacttacggaagccacccttccttcaggcagcggttgccaaagcctggcttattcaggaggacgtctgcaagtaccgtgaactgctcactgcctggttcatccatgctagacagagtgagacatgtgactgggacagagcaggcgcgtgccaacatcatgcaactcagagcctttactggatagctgctgtgtgccaggtatgtattggaggcaccgaatgctgccttgggatggcgctagctctcctgg

SEQ ID NO: 60551 - DNA, 44 bp, Homo sapiens
  chr1:94507307-94507351
  hypo
tcataaagaacacacacgtgcatactctcactaactggagatgt

SEQ ID NO: 60552 - DNA, 103 bp, Homo sapiens; identical to SEQ ID NO: 14777
  chr1:94507710-94507813
  hypo

SEQ ID NO: 60553 - DNA, 31 bp, Homo sapiens
  chr1:94528402-94528433
  hypo
aaatctttctcctaaacgcttcaaaaggatc

SEQ ID NO: 60554 - DNA, 103 bp, Homo sapiens
  chr1:94546399-94546502
  hypo
atccttaatccagctgcgaaaaacaaaaaacaaaacctactgccatctacttagggactaggagaatactaggatgagccttaaagaaaatcacagagtggcc

SEQ ID NO: 60555 - DNA, 30 bp, Homo sapiens
  chr1:94587574-94587604
  hypo
cttcatagagtttgcggtctggttgtaaac

SEQ ID NO: 60556 - DNA, 657 bp, Homo sapiens; identical to SEQ ID NO: 36005
  chr1:94702420-94703077
  hypo

SEQ ID NO: 60557 - DNA, 425 bp, Homo sapiens; identical to SEQ ID NO: 651
  chr1:94703103-94703528
  hypo

SEQ ID NO: 60558 - DNA, 26 bp, Homo sapiens
  chr1:94812326-94812352
  hypo
tgagactccatcgaaaaaaaaaaaaa

SEQ ID NO: 60559 - DNA, 874 bp, Homo sapiens; identical to SEQ ID NO: 36009
  chr1:95006823-95007697
  hypo

SEQ ID NO: 60560 - DNA, 24 bp, Homo sapiens
  chr1:95071324-95071348
  hypo
gccggcaaccctgttttatttgtt

SEQ ID NO: 60561 - DNA, 32 bp, Homo sapiens
  chr1:95222490-95222522
  hypo
aatgcagctctttggccgggcacggtggttca

SEQ ID NO: 60562 - DNA, 31 bp, Homo sapiens; identical to SEQ ID NO: 14783
  chr1:95314374-95314405
  hypo

SEQ ID NO: 60563 - DNA, 101 bp, Homo sapiens
  chr1:95340130-95340231
  hypo
tcaggcagctaggaactcctgcgaggcaattgagtggtcagtgcaaatgacttcgacttcctcctaagtgtgcggctcccgaagacaagaataccagccac

SEQ ID NO: 60564 - DNA, 239 bp, Homo sapiens; identical to SEQ ID NO: 36012
  chr1:95391394-95391633
  hypo

SEQ ID NO: 60565 - DNA, 827 bp, Homo sapiens; identical to SEQ ID NO: 36018
  chr1:95582741-95583568
  hypo

SEQ ID NO: 60566 - DNA, 26 bp, Homo sapiens
  chr1:95693439-95693465
  hypo
ttttttttttttgagacggagtctcg

SEQ ID NO: 60567 - DNA, 23 bp, Homo sapiens
  chr1:97184492-97184515
  hypo
tgagatggagcctctctctgtcg

SEQ ID NO: 60568 - DNA, 213 bp, Homo sapiens
  chr1:97185220-97185433
  hypo
tcaatcaatatcgatcgagcgaatgtggggaataccaagaattaataccatagttcccgccctttggtagcttgcacattcaattgttgagtgaaaacacatgtatgaaaccacaaatatgtgaaaagtgattattagtggcactaataacagatcctttattttaaggtttaaggtgaagtggttattgtaggaaatttgatatgtggtttt

SEQ ID NO: 60569 - DNA, 43 bp, Homo sapiens
  chr1:97185732-97185775
  hypo
cttttttttttttttttttaacgattgacaatcccataggcaa

SEQ ID NO: 60570 - DNA, 20 bp, Homo sapiens
  chr1:98386546-98386566
  hypo
gccaagtgacagcagccgga

SEQ ID NO: 60571 - DNA, 310 bp, Homo sapiens; identical to SEQ ID NO: 36023
  chr1:98386618-98386928
  hypo

SEQ ID NO: 60572 - DNA, 969 bp, Homo sapiens; identical to SEQ ID NO: 36028
  chr1:99127041-99128010
  hypo

SEQ ID NO: 60573 - DNA, 169 bp, Homo sapiens; identical to SEQ ID NO: 14790
  chr1:99667087-99667256
  hypo

SEQ ID NO: 60574 - DNA, 164 bp, Homo sapiens
  chr1:100106763-100106927
  hypo
tataaaaaataaacaccgtattcttagcgtgacactacttctggcctccagaagtctgagaagttataaagagagaaagacgggaagaaaaagagagagaaagaaagagagaagagtgagaaggagaatgagcatccagttttttaacacgggatctggtttca

SEQ ID NO: 60575 - DNA, 139 bp, Homo sapiens; identical to SEQ ID NO: 36036
  chr1:100437130-100437269
  hypo

SEQ ID NO: 60576 - DNA, 182 bp, Homo sapiens; identical to SEQ ID NO: 14792
  chr1:100500498-100500680
  hypo

SEQ ID NO: 60577 - DNA, 30 bp, Homo sapiens
  chr1:100678752-100678782
  hypo
aatgggccctgccccgcgtctgcctcagag

SEQ ID NO: 60578 - DNA, 150 bp, Homo sapiens; identical to SEQ ID NO: 14793
  chr1:100928354-100928504
  hypo

SEQ ID NO: 60579 - DNA, 277 bp, Homo sapiens; identical to SEQ ID NO: 677
  chr1:101004539-101004816
  hypo

SEQ ID NO: 60580 - DNA, 992 bp, Homo sapiens; identical to SEQ ID NO: 36048
  chr1:101004842-101005834
  hypo

SEQ ID NO: 60581 - DNA, 36 bp, Homo sapiens; identical to SEQ ID NO: 14796
  chr1:101675508-101675544
  hypo

SEQ ID NO: 60582 - DNA, 980 bp, Homo sapiens; identical to SEQ ID NO: 36051
  chr1:101702033-101703013
  hypo

SEQ ID NO: 60583 - DNA, 30 bp, Homo sapiens; identical to SEQ ID NO: 36052
  chr1:101703237-101703267
  hypo

SEQ ID NO: 60584 - DNA, 113 bp, Homo sapiens
  chr1:101721454-101721567
  hypo
tgactcaccactgttcgctcttgtgaggaacagttggtcaggaagccgcgcagcagccatggcttttaagaataccgggcactttgggaggccgaggtggacggatcacaagg

SEQ ID NO: 60585 - DNA, 85 bp, Homo sapiens
  chr1:101721806-101721891
  hypo
tcaaaaaaaaaaaaaaaaaaaaaaaaagaattccggaaacacactcgtggagccagaggtggcaattcaccgaattcgaatcact

SEQ ID NO: 60586 - DNA, 33 bp, Homo sapiens
  chr1:102292872-102292905
  hypo
gaattttttttttttttgagacggagtctcact

SEQ ID NO: 60587 - DNA, 31 bp, Homo sapiens
  chr1:102415995-102416026
  hypo
tttctttttttttttttgagacggagtctcg

SEQ ID NO: 60588 - DNA, 1770 bp, Homo sapiens; identical to SEQ ID NO: 36059
  chr1:107682706-107684476
  hypo

SEQ ID NO: 60589 - DNA, 29 bp, Homo sapiens
  chr1:108199571-108199600
  hypo
ttttttttttttttttttttccgagacga

SEQ ID NO: 60590 - DNA, 45 bp, Homo sapiens
  chr1:108314146-108314191
  hypo
ttacaagcgcgagctaccgcgcccggcctgttgttagcttttcta

SEQ ID NO: 60591 - DNA, 227 bp, Homo sapiens; identical to SEQ ID NO: 690
  chr1:108507148-108507375
  hypo

SEQ ID NO: 60592 - DNA, 112 bp, Homo sapiens; identical to SEQ ID NO: 691
  chr1:108507494-108507606
  hypo

SEQ ID NO: 60593 - DNA, 872 bp, Homo sapiens; identical to SEQ ID NO: 692
  chr1:108507657-108508529
  hypo

SEQ ID NO: 60594 - DNA, 38 bp, Homo sapiens; identical to SEQ ID NO: 693
  chr1:108508549-108508587
  hypo

SEQ ID NO: 60595 - DNA, 351 bp, Homo sapiens
  chr1:108735213-108735564
  hypo
ccaaaagagatctccgtagagggagtccatcgaggatgtctccctcgcagctccgcggcctgagtgagccccagcggggtggaagtgcgaccgacgaacgggatctctgcccaccacacacgtccagtgggaagaggcctaagacagcatcctcctcaggggcgccaaacacaatgcaccttcatcggttaaagctctggaaggagagggctcatcctaacggcttcagcgcaaaggcgcgagcgcgcaggacccgggacctgcgtgggaccgcactctgggctgcgctgggagaccgcggagttcctgcctcactcacgtctgatcagaagccccggctcccactccagg

SEQ ID NO: 60596 - DNA, 656 bp, Homo sapiens; identical to SEQ ID NO: 695
  chr1:109203572-109204228
  hypo

SEQ ID NO: 60597 - DNA, 204 bp, Homo sapiens
  chr1:109241832-109242036
  hypo
agtagaagtcatcatcgggagggccatgggtcttctagttttgacagagaattagaaagagagaaagaacgccagcgactagagcgtgaagccaaagaaagggagaaagaacggcgaagatcccgaagtattgaccgggggttagaacgcaggcgcagcagaagtagggaaaggcatagaagtcgcagtcgaagtcgtgatagg

SEQ ID NO: 60598 - DNA, 30 bp, Homo sapiens; identical to SEQ ID NO: 696
  chr1:109257153-109257183
  hypo

SEQ ID NO: 60599 - DNA, 30 bp, Homo sapiens
  chr1:109285035-109285065
  hypo
cctgagataacaaacgccctcatcgcaagt

SEQ ID NO: 60600 - DNA, 31 bp, Homo sapiens; identical to SEQ ID NO: 697
  chr1:109420435-109420466
  hypo

SEQ ID NO: 60601 - DNA, 17 bp, Homo sapiens
  chr1:109423193-109423210
  hypo
tccgtctcaaaaaaaaa

SEQ ID NO: 60602 - DNA, 30 bp, Homo sapiens
  chr1:109513840-109513870
  hypo
aggtcacagcagcacgagctcacatggaag

SEQ ID NO: 60603 - DNA, 31 bp, Homo sapiens
  chr1:109585386-109585417
  hypo
atacgtgatgttcaaccgagcttaattaagc

SEQ ID NO: 60604 - DNA, 28 bp, Homo sapiens
  chr1:109593505-109593533
  hypo
tcaagggccaggcaccgcggctcacgcc

SEQ ID NO: 60605 - DNA, 31 bp, Homo sapiens
  chr1:109605918-109605949
  hypo
cgcccggcccgtgaaacttgctttcttaaaa

SEQ ID NO: 60606 - DNA, 105 bp, Homo sapiens; identical to SEQ ID NO: 14809
  chr1:109609235-109609340
  hypo

SEQ ID NO: 60607 - DNA, 29 bp, Homo sapiens
  chr1:109617388-109617417
  hypo
gagactccgtctcaaaaaaaaaaaaaaag

SEQ ID NO: 60608 - DNA, 92 bp, Homo sapiens
  chr1:109646189-109646281
  hypo
gccccggacatccggcggatctcattaatgttggcgccttgggggccgattacacagccaattaagttatctggaatggtgaatttgtgggt

SEQ ID NO: 60609 - DNA, 45 bp, Homo sapiens
  chr1:109646880-109646925
  hypo
gggattacagaagttagccaccgcgcccctccatagtttgagtag

SEQ ID NO: 60610 - DNA, 30 bp, Homo sapiens
  chr1:109694776-109694806
  hypo
tgagccactgcgccccgctgctaattttga

SEQ ID NO: 60611 - DNA, 77 bp, Homo sapiens
  chr1:109725167-109725244
  hypo
gatccaaacccatatccgtctagcttaaaatctcattccaggccgggagcggtggctcacacctgtaatcccagcac

SEQ ID NO: 60612 - DNA, 30 bp, Homo sapiens
  chr1:109729836-109729866
  hypo
tccaagagctggcccgagacagtttgccag

SEQ ID NO: 60613 - DNA, 146 bp, Homo sapiens
  chr1:109741854-109742000
  hypo
caggacaccccctcccctccccgcataacagcagctaacatcttgacgggcactagcgtcttgaggaagacgttttggatatgctgcgcctaaactgactggggagatggggagcaaagcagggcgtcttgacccagtagtggtgt

SEQ ID NO: 60614 - DNA, 138 bp, Homo sapiens
  chr1:109772085-109772223
  hypo
catcctgaagtgtgacgcggagcggataaagttggaagcagagcggtttgagaacctccgagagattgggaaccttctgcacccttctgtacccatcagtaacgatgaggtaggtggctgtgccgcagcaggaggctg

SEQ ID NO: 60615 - DNA, 30 bp, Homo sapiens; identical to SEQ ID NO: 14812
  chr1:109772424-109772454
  hypo

SEQ ID NO: 60616 - DNA, 30 bp, Homo sapiens
  chr1:109793451-109793481
  hypo
accaagagcacccacgtcttcagggtcacg

SEQ ID NO: 60617 - DNA, 601 bp, Homo sapiens; identical to SEQ ID NO: 14813
  chr1:109795508-109796109
  hypo

SEQ ID NO: 60618 - DNA, 30 bp, Homo sapiens; identical to SEQ ID NO: 14814
  chr1:109801412-109801442
  hypo

SEQ ID NO: 60619 - DNA, 36 bp, Homo sapiens
  chr1:109801646-109801682
  hypo
cgctgccgcagccgcgagggcggctacacctgcctc

SEQ ID NO: 60620 - DNA, 30 bp, Homo sapiens; identical to SEQ ID NO: 14816
  chr1:109805569-109805599
  hypo

SEQ ID NO: 60621 - DNA, 68 bp, Homo sapiens; identical to SEQ ID NO: 14817
  chr1:109812119-109812187
  hypo

SEQ ID NO: 60622 - DNA, 263 bp, Homo sapiens
  chr1:109816070-109816333
  hypo
gaagtgtctgcccaccatcagcgagaagagcagcctcctgcggctccccctggagcaatgcacagggtcttcccggggctcctccgctagtgagggcagccggggaggcccccctccccgcccaccgccccggcagagcctccaggagcagctgaacggggtcatgcccatcgccatgagcatcaaggcaggcacggtggatgaggactcgtcaggctccgagtgagtgtggccgggtgggcgggacggggtgcagcccctcg

SEQ ID NO: 60623 - DNA, 618 bp, Homo sapiens; identical to SEQ ID NO: 36083
  chr1:109940218-109940836
  hypo

SEQ ID NO: 60624 - DNA, 31 bp, Homo sapiens; identical to SEQ ID NO: 14820
  chr1:110027020-110027051
  hypo

SEQ ID NO: 60625 - DNA, 30 bp, Homo sapiens
  chr1:110039689-110039719
  hypo
tggcttaaccaagccgaaggctgctggctg

SEQ ID NO: 60626 - DNA, 79 bp, Homo sapiens
  chr1:110042270-110042349
  hypo
agccaggtcttgttttgaaaacctcactgtgggagattcaggcatcctccctaagccagctggccgctgtgctaaagcc

SEQ ID NO: 60627 - DNA, 31 bp, Homo sapiens; identical to SEQ ID NO: 702
  chr1:110052254-110052285
  hypo

SEQ ID NO: 60628 - DNA, 31 bp, Homo sapiens; identical to SEQ ID NO: 14823
  chr1:110061030-110061061
  hypo

SEQ ID NO: 60629 - DNA, 171 bp, Homo sapiens
  chr1:110085338-110085509
  hypo
aaggccattccgaaagcggagtgttgagtgggtcaggctcctgcacctctcacgtctcctgcttcttagcagtcaccaaggcagaccctgcagctacctccggccagaaaggggatgagcttctgatccttcagctgcctggcctggcgctctgtacgcagacaaacctgc

SEQ ID NO: 60630 - DNA, 45 bp, Homo sapiens; identical to SEQ ID NO: 14825
  chr1:110085847-110085892
  hypo

SEQ ID NO: 60631 - DNA, 30 bp, Homo sapiens
  chr1:110141591-110141621
  hypo
cacactttggtctacggcacatctccaagt

SEQ ID NO: 60632 - DNA, 103 bp, Homo sapiens; identical to SEQ ID NO: 14826
  chr1:110167961-110168064
  hypo

SEQ ID NO: 60633 - DNA, 271 bp, Homo sapiens; identical to SEQ ID NO: 14827
  chr1:110170705-110170976
  hypo

SEQ ID NO: 60634 - DNA, 30 bp, Homo sapiens
  chr1:110171345-110171375
  hypo
tgggacaagctggcgcgctgggccgtcatg

SEQ ID NO: 60635 - DNA, 30 bp, Homo sapiens; identical to SEQ ID NO: 14828
  chr1:110196411-110196441
  hypo

SEQ ID NO: 60636 - DNA, 30 bp, Homo sapiens
  chr1:110200945-110200975
  hypo
aggcagctcaggggcggccagagggccttt

SEQ ID NO: 60637 - DNA, 157 bp, Homo sapiens
  chr1:110305359-110305516
  hypo
gaggactctgaggctcaaagacggtaacaggcctgaggtcacaaatgaacgtttaatagagagcaacccagatctgtccgattgcaagcttcgtgttttaatggtttataaacatgcctctgccgctgggctgtgcgcagtcacagagggagtctag

SEQ ID NO: 60638 - DNA, 31 bp, Homo sapiens; identical to SEQ ID NO: 14829
  chr1:110307261-110307292
  hypo

SEQ ID NO: 60639 - DNA, 30 bp, Homo sapiens
  chr1:110307557-110307587
  hypo
caccacccaaccaacgctgccctggatggc

SEQ ID NO: 60640 - DNA, 38 bp, Homo sapiens; identical to SEQ ID NO: 14830
  chr1:110338323-110338361
  hypo

SEQ ID NO: 60641 - DNA, 31 bp, Homo sapiens; identical to SEQ ID NO: 14831
  chr1:110354911-110354942
  hypo

SEQ ID NO: 60642 - DNA, 148 bp, Homo sapiens; identical to SEQ ID NO: 36095
  chr1:110453159-110453307
  hypo

SEQ ID NO: 60643 - DNA, 422 bp, Homo sapiens; identical to SEQ ID NO: 36096
  chr1:110453530-110453952
  hypo

SEQ ID NO: 60644 - DNA, 30 bp, Homo sapiens
  chr1:110596846-110596876
  hypo
gggaacccctccgccgtgcatctgaatttc

SEQ ID NO: 60645 - DNA, 30 bp, Homo sapiens; identical to SEQ ID NO: 14834
  chr1:110623923-110623953
  hypo

SEQ ID NO: 60646 - DNA, 840 bp, Homo sapiens; identical to SEQ ID NO: 36105
  chr1:110626790-110627630
  hypo

SEQ ID NO: 60647 - DNA, 529 bp, Homo sapiens; identical to SEQ ID NO: 712
  chr1:110692967-110693496
  hypo

SEQ ID NO: 60648 - DNA, 264 bp, Homo sapiens; identical to SEQ ID NO: 36108
  chr1:110693736-110694000
  hypo

SEQ ID NO: 60649 - DNA, 30 bp, Homo sapiens
  chr1:110716489-110716519
  hypo
ctgctgtgtttatggcgctgccgacgtgct

SEQ ID NO: 60650 - DNA, 30 bp, Homo sapiens
  chr1:110737252-110737282
  hypo
acttccccgcctccccgttctggtccgtca

SEQ ID NO: 60651 - DNA, 39 bp, Homo sapiens
  chr1:110738170-110738209
  hypo
acctttgcccccaaaccggcctcccggctctctgtagtg

SEQ ID NO: 60652 - DNA, 384 bp, Homo sapiens; identical to SEQ ID NO: 714
  chr1:110753509-110753893
  hypo

SEQ ID NO: 60653 - DNA, 399 bp, Homo sapiens; identical to SEQ ID NO: 715
  chr1:110753957-110754356
  hypo

SEQ ID NO: 60654 - DNA, 30 bp, Homo sapiens
  chr1:110765709-110765739
  hypo
gcgtgcacttccggcgggaggtagagacag

SEQ ID NO: 60655 - DNA, 30 bp, Homo sapiens
  chr1:110768704-110768734
  hypo
gacgctccaccactcgagacagaaacaaga

SEQ ID NO: 60656 - DNA, 65 bp, Homo sapiens
  chr1:110772191-110772256
  hypo
gccattcccacccagcctctgcgctctgtattcctgccagaaccggagactcatctaatttctat

SEQ ID NO: 60657 - DNA, 30 bp, Homo sapiens
  chr1:110838286-110838316
  hypo
agcaccggcgatggtcgttaactccttgta

SEQ ID NO: 60658 - DNA, 677 bp, Homo sapiens
  chr1:110883513-110884190
  hypo
agtatgaaagcctggatgcagcgcatgctgcctggacccatatgcggggcttcccacttggtggcccagatcgacgccttagagtagactttgccgacaccgaacatcgttaccagcagcagtatctgcagcctctgcccttgactcattatgagctggtgacagatgcttttggacatcgggcaccagaccctttgaggggtgctcgggataggacaccacccttactatacagagatcgtgatagggacctttatcctgactctgattgggtgccacccccacccccagtccgagaacgcagcactcggactgcagctacttctgtgcctgcttacgagccactggatagcctagatcgcaggcgggatggttggtccttggaccgggacagaggtgatcgagatctgcccagcagcagagaccagcctaggaagcgaaggctgcctgaggagagtggaggacgtcatctggataggtctcctgagagtgaccgcccacgaaaacgtcactgcgctccttctcctgaccgcagtccagaattgagcagtagccgggatcgttacaacagcgacaatgatcgatcttcccgtcttctcttggaaaggccctctccaatcagagacagacgaggtagtttggagaagagccagggtgacaagcgagaccgtaaaaac

SEQ ID NO: 60659 - DNA, 30 bp, Homo sapiens; identical to SEQ ID NO: 14840
  chr1:110946979-110947009
  hypo

SEQ ID NO: 60660 - DNA, 34 bp, Homo sapiens; identical to SEQ ID NO: 14841
  chr1:110947364-110947398
  hypo

SEQ ID NO: 60661 - DNA, 121 bp, Homo sapiens; identical to SEQ ID NO: 14842
  chr1:110947697-110947818
  hypo

SEQ ID NO: 60662 - DNA, 33 bp, Homo sapiens
  chr1:111001560-111001593
  hypo
aagagagagagggggccgggcgcggtggctcac

SEQ ID NO: 60663 - DNA, 152 bp, Homo sapiens
  chr1:111022637-111022789
  hypo
cagcacccttccaccgtggaacagggcctatgtccctaggggtgcatgtgccttgggcctgccttctctcttagactgtgctctgtaggagtggagggcacacctgctctgtgctctaaaccccaagctccactcacggggatgacagaatg

SEQ ID NO: 60664 - DNA, 30 bp, Homo sapiens
  chr1:111061359-111061389
  hypo
tcaaaattgaccagcgcaacctccatttct

SEQ ID NO: 60665 - DNA, 1036 bp, Homo sapiens; identical to SEQ ID NO: 36115
  chr1:111148992-111150028
  hypo

SEQ ID NO: 60666 - DNA, 258 bp, Homo sapiens; identical to SEQ ID NO: 36116
  chr1:111216714-111216972
  hypo

SEQ ID NO: 60667 - DNA, 697 bp, Homo sapiens; identical to SEQ ID NO: 718
  chr1:111217194-111217891
  hypo

SEQ ID NO: 60668 - DNA, 59 bp, Homo sapiens; identical to SEQ ID NO: 36118
  chr1:111217923-111217982
  hypo

SEQ ID NO: 60669 - DNA, 30 bp, Homo sapiens
  chr1:111490654-111490684
  hypo
ttattttttcatctcgaatggtttcttcta

SEQ ID NO: 60670 - DNA, 30 bp, Homo sapiens
  chr1:111890784-111890814
  hypo
aatctcttattggacgacattttcctgaca

SEQ ID NO: 60671 - DNA, 200 bp, Homo sapiens
  chr1:112084791-112084991
  hypo
gataatcctttgaaggaagatcgtttagaccagcttaatgaaacagacatccttcgcgtactgacggaaacactggcggcacatattgaggccgtatttcaggatcagacctgccggttcgaacacacgcgacaagagcaaagaagttaaaagagaagtgtctgtgtggctccttccacgtgggtgaaggactgtgccag

SEQ ID NO: 60672 - DNA, 31 bp, Homo sapiens
  chr1:112155751-112155782
  hypo
gcttttttggtgaaaacgtagggtttttttt

SEQ ID NO: 60673 - DNA, 29 bp, Homo sapiens
  chr1:112160643-112160672
  hypo
acagagcaagactccgcctcaaaaaaaaa

SEQ ID NO: 60674 - DNA, 25 bp, Homo sapiens
  chr1:112232578-112232603
  hypo
tgagccactgcgcccggcctcaggt

SEQ ID NO: 60675 - DNA, 31 bp, Homo sapiens
  chr1:112245184-112245215
  hypo
aagctcttttttttttttttccgagacagag

SEQ ID NO: 60676 - DNA, 31 bp, Homo sapiens; identical to SEQ ID NO: 14850
  chr1:112317424-112317455
  hypo

SEQ ID NO: 60677 - DNA, 1036 bp, Homo sapiens
  chr1:112524369-112525405
  hypo
agaagagaagaaagcccagttcggaggcacagctcttcagtgtgtagcccaggatccgcaggccctgggagtggcgggaaaacttgaagatcctgaagacgcggaagacccggagcgtgacgaaggcgccggacacgtcctcgttgttggtcatgaccagaccgatgtagtagggcatgatggccaccacgtcgatgatgctcatgacgctgcggatgaagcggtagcggctgggagccgcgaagagccgcaggaggtactccacggtgaagatcatgacgcacgccgtgtccaggcagaagaaggccaccgagtagcgctccccgcacggcagctccttgctgcccgggaccgtgccgcacggcaccgtctccaccacgttggtgatgaccgagacagcgatgaagaagccagtcacgtagtagaagaccagggccagcgtgctggtgtgggggttctcgaaggcccgccacatggtctggcggaagctgagcgagggcatggactcctggttgttctccgagtcgttgtcgtccatgagccgctcggcgttctccctcttgcggtccttgtactcctcgtagcagcagtccccgatgatctccgggaggatgccgtagaaggccagctcgtcgtcgtaggcagagatgcactcgtagcgcgggtagtgcagcttccccgtgcggtagaagttgagcacgcagcggaacacctcggggtcccggtcgaagaagtactccttggtgtcctcgttgaagaagaactccttctccgtgctgcccagcagggtgtccgggtagcgctccagcgtggtcctccaggtctggaacctccgcccactcacgttgaggacaatcagctcatcctgccgcttgttcttgtcggccggggccaggggcatggggcagttggccaccggcatccacccgatggccgcagcccgggcaaaaggcagccaggccgcaactccggccgccatggtgactccagctcttgggccggcagccgcgcggacgctaggcacaccagcttggag

SEQ ID NO: 60678 - DNA, 30 bp, Homo sapiens
  chr1:112773188-112773218
  hypo
tcctcccagcacttgcggaggggcctgtct

SEQ ID NO: 60679 - DNA, 528 bp, Homo sapiens; identical to SEQ ID NO: 36132
  chr1:113051156-113051684
  hypo

SEQ ID NO: 60680 - DNA, 162 bp, Homo sapiens
  chr1:113059790-113059952
  hypo
ggttcctgtactctgcgcacctgctggcgtgcactctcagatttccgccgcacaggtgattacctgcggcgacgctatgatggggctgtgcaggtgatggccacccaagatggtgccaacttcaccgcagcccgccaaggctatcgccgtgccacccggact

SEQ ID NO: 60681 - DNA, 30 bp, Homo sapiens
  chr1:113240695-113240725
  hypo
gagaacgcttctgccgctgggcgggcctac

SEQ ID NO: 60682 - DNA, 206 bp, Homo sapiens; identical to SEQ ID NO: 14853
  chr1:113244293-113244499
  hypo

SEQ ID NO: 60683 - DNA, 191 bp, Homo sapiens; identical to SEQ ID NO: 36136
  chr1:113249225-113249416
  hypo

SEQ ID NO: 60684 - DNA, 156 bp, Homo sapiens
  chr1:113290950-113291106
  hypo
agctgcattatcggcgtggttgtgggccagcttaaggcggatgaagaccccatcaaggggttccaccagatgttcctattaaagaacatcaacgatggcttttgcgccaatgacatgttcaggtttgccctgcacaatttcggctgacctcctctc

SEQ ID NO: 60685 - DNA, 31 bp, Homo sapiens
  chr1:113399486-113399517
  hypo
cattttccatgaatctcgtgaagcttttggg

SEQ ID NO: 60686 - DNA, 36 bp, Homo sapiens
  chr1:113442039-113442075
  hypo
gaactccatcctcccggccaaaaccaagcttcttaa

SEQ ID NO: 60687 - DNA, 30 bp, Homo sapiens
  chr1:113465947-113465977
  hypo
aatccctaaagccacgcggccgccaactcc

SEQ ID NO: 60688 - DNA, 1588 bp, Homo sapiens; identical to SEQ ID NO: 36140
  chr1:113497848-113499436
  hypo

SEQ ID NO: 60689 - DNA, 77 bp, Homo sapiens
  chr1:113630282-113630359
  hypo
tattttagtcttctgtcttttgggaggtacttttaaaaaaagaaataggaaaggcatgcttacggggaacacgagta

SEQ ID NO: 60690 - DNA, 30 bp, Homo sapiens; identical to SEQ ID NO: 14857
  chr1:113749371-113749401
  hypo

SEQ ID NO: 60691 - DNA, 31 bp, Homo sapiens; identical to SEQ ID NO: 14858
  chr1:113774557-113774588
  hypo

SEQ ID NO: 60692 - DNA, 706 bp, Homo sapiens; identical to SEQ ID NO: 732
  chr1:113932572-113933278
  hypo

SEQ ID NO: 60693 - DNA, 778 bp, Homo sapiens; identical to SEQ ID NO: 36142
  chr1:113933305-113934083
  hypo

SEQ ID NO: 60694 - DNA, 27 bp, Homo sapiens
  chr1:114223091-114223118
  hypo
acacagggccgggcgcggtggctcacg

SEQ ID NO: 60695 - DNA, 26 bp, Homo sapiens
  chr1:114295292-114295318
  hypo
actgcgcccagcctactgtcattttt

SEQ ID NO: 60696 - DNA, 30 bp, Homo sapiens; identical to SEQ ID NO: 14862
  chr1:114298138-114298168
  hypo

SEQ ID NO: 60697 - DNA, 27 bp, Homo sapiens
  chr1:114299489-114299516
  hypo
acttaaaaccatactctaggccgggcg

SEQ ID NO: 60698 - DNA, 245 bp, Homo sapiens; identical to SEQ ID NO: 36144
  chr1:114302509-114302754
  hypo

SEQ ID NO: 60699 - DNA, 30 bp, Homo sapiens; identical to SEQ ID NO: 36147
  chr1:114448373-114448403
  hypo

SEQ ID NO: 60700 - DNA, 30 bp, Homo sapiens; identical to SEQ ID NO: 14864
  chr1:114505986-114506016
  hypo

SEQ ID NO: 60701 - DNA, 30 bp, Homo sapiens; identical to SEQ ID NO: 14865
  chr1:114522655-114522685
  hypo

SEQ ID NO: 60702 - DNA, 251 bp, Homo sapiens
  chr1:114522989-114523240
  hypo
catgctgctgagctgcgggacttcaagaacaagatgctgccactgctggaggtggcagagaaggagcgggaggcactcagaactgaggccgacaccatctccgggagagtggatcgtctggagcgggaggtagactatctggagacccagaacccagctctgccctgtgtagagtttgatgagaaggtgactggaggccctgggaccaaaggcaagggaagaaggaatgagaagtacgatatggtgacagg

SEQ ID NO: 60703 - DNA, 590 bp, Homo sapiens; identical to SEQ ID NO: 36149
  chr1:114695146-114695736
  hypo

SEQ ID NO: 60704 - DNA, 383 bp, Homo sapiens; identical to SEQ ID NO: 36150
  chr1:114695799-114696182
  hypo

SEQ ID NO: 60705 - DNA, 31 bp, Homo sapiens; identical to SEQ ID NO: 741
  chr1:114697994-114698025
  hypo

SEQ ID NO: 60706 - DNA, 30 bp, Homo sapiens; identical to SEQ ID NO: 14869
  chr1:115049733-115049763
  hypo

SEQ ID NO: 60707 - DNA, 30 bp, Homo sapiens; identical to SEQ ID NO: 744
  chr1:115252199-115252229
  hypo

SEQ ID NO: 60708 - DNA, 72 bp, Homo sapiens; identical to SEQ ID NO: 745
  chr1:115256505-115256577
  hypo

SEQ ID NO: 60709 - DNA, 95 bp, Homo sapiens; identical to SEQ ID NO: 746
  chr1:115258667-115258762
  hypo

SEQ ID NO: 60710 - DNA, 123 bp, Homo sapiens
  chr1:115829154-115829277
  hypo
gcacacggggtgaacggagtcgccgctttttaaacagcctggggtccacagtaatgttgcgggtctgccccgccacgcgtgcagctatcgccgctgccggggcgctgcgggctctgcgaaggg

SEQ ID NO: 60711 - DNA, 648 bp, Homo sapiens; identical to SEQ ID NO: 750
  chr1:115880146-115880794
  hypo

SEQ ID NO: 60712 - DNA, 1147 bp, Homo sapiens; identical to SEQ ID NO: 36167
  chr1:116184426-116185573
  hypo

SEQ ID NO: 60713 - DNA, 31 bp, Homo sapiens
  chr1:116205679-116205710
  hypo
acaggtgtgagccaccgcgccccagtccata

SEQ ID NO: 60714 - DNA, 31 bp, Homo sapiens; identical to SEQ ID NO: 14875
  chr1:116206290-116206321
  hypo

SEQ ID NO: 60715 - DNA, 355 bp, Homo sapiens
  chr1:116214015-116214370
  hypo
ctccagcccaggtttcggggagccgggatccacttgggcaggccgggagcctcagactccagacttttcatggtgcgctccttcctgcttactcaggaggaaggcgaggcagtccagcatcctgggtggagtggaggtgtttcgagtccatatctaaatctttttcttagagcaccctaagcaggctgctgtctttgatccccatgcctctgctgtttatcttggtgtgattcatcactgtaatttaagacgtggagagagcaaagttcccatcccaggcaggggaggcgcagtgcaggttggactgtgtaaggaaatggcagcatggcgaggtttgtgccgcggcctacaagca

SEQ ID NO: 60716 - DNA, 160 bp, Homo sapiens
  chr1:116219340-116219500
  hypo
gagacttaacctgccttagggcgatgccgacctcagccagcacctggtatacttggatctcgcaggctgctgctggaggttccgagtagctgcctgtaccaggcctgccccagtcaattcattagcctttcagtaagacgttttatgccactgagtattt

SEQ ID NO: 60717 - DNA, 37 bp, Homo sapiens
  chr1:116224396-116224433
  hypo
ggattacaggcgtgagccaccgcgcgtggccaaggcc

SEQ ID NO: 60718 - DNA, 157 bp, Homo sapiens
  chr1:116225056-116225213
  hypo
aacagcctccaaattccgagcagccaagcatatggccgggctgaaagtctacaatgtagatggtatgtgccttgaaagggtgtccgtggtgctcacaggggcacagttgggtgactatttaagattcatggtacgtttggttcgacttcttctctgg

SEQ ID NO: 60719 - DNA, 101 bp, Homo sapiens; identical to SEQ ID NO: 14877
  chr1:116226507-116226608
  hypo

SEQ ID NO: 60720 - DNA, 31 bp, Homo sapiens
  chr1:116228226-116228257
  hypo
ctagaagtgataaaatcgaaaggcatctcta

SEQ ID NO: 60721 - DNA, 187 bp, Homo sapiens
  chr1:116295787-116295974
  hypo
gtgctgatctagggctcgggggagaggtcctgcgtgagaggtcaaggcttgaggacaggtgacatctttgggagacgagtatgaaagaaagccacagggtcaagggctggctgtctcagaaggaagagaaagaagcctaccctggaggcagagcggagctatgggagaagtgcggggagagaaagga

SEQ ID NO: 60722 - DNA, 2211 bp, Homo sapiens; identical to SEQ ID NO: 36169
  chr1:116380294-116382505
  hypo

SEQ ID NO: 60723 - DNA, 286 bp, Homo sapiens
  chr1:116573984-116574270
  hypo
agattcattcctgaatcacctcgttggttatactcccagggtcgactgagtgaggctgaagaggcgctgtacctcattgccaagaggaaccgcaaactcaagtgcacgttctcactaacacacccagccaacaggagctgcagggagactggaagtttcctggatctctttcgttaccgggtcctgttaggacacactttgatcctgatgttcatctggtaattatactaaggcgtgttctgttgctctttaactaaggttgctcgagcttctcttgatatcctgc

SEQ ID NO: 60724 - DNA, 31 bp, Homo sapiens; identical to SEQ ID NO: 14879
  chr1:116642573-116642604
  hypo

SEQ ID NO: 60725 - DNA, 19 bp, Homo sapiens
  chr1:116674141-116674160
  hypo
ttttttgtttttgagacgg

SEQ ID NO: 60726 - DNA, 52 bp, Homo sapiens
  chr1:116840628-116840680
  hypo
gagcagggggtggggccggtcggggaggctggggctgcgtgggaacttgggg

SEQ ID NO: 60727 - DNA, 144 bp, Homo sapiens
  chr1:116935454-116935598
  hypo
agatgatgtctctgttcacagcgggcagttgcaggagatgcctctgagtcagcactcttaaagtgcatagagctgtgctgtggttccgtgaaggagatgagagaaagatacgccaaaatcgtcgagatacccttcaactccacc

SEQ ID NO: 60728 - DNA, 30 bp, Homo sapiens
  chr1:116947188-116947218
  hypo
gtggggaagcaagacgtcctggaatgaagc

SEQ ID NO: 60729 - DNA, 30 bp, Homo sapiens
  chr1:116952580-116952610
  hypo
ggctgcggctgtctgcgtacggggatgtgt

SEQ ID NO: 60730 - DNA, 20 bp, Homo sapiens
  chr1:117021628-117021648
  hypo
caacatggtgaaaccccgtc

SEQ ID NO: 60731 - DNA, 31 bp, Homo sapiens; identical to SEQ ID NO: 14881
  chr1:117055697-117055728
  hypo

SEQ ID NO: 60732 - DNA, 62 bp, Homo sapiens
  chr1:117060146-117060208
  hypo
cactgaccacagcaaccgactccacaaaaccaaaggtcttaacccctcgcctacctccttgt

SEQ ID NO: 60733 - DNA, 204 bp, Homo sapiens; identical to SEQ ID NO: 14882
  chr1:117076614-117076818
  hypo

SEQ ID NO: 60734 - DNA, 161 bp, Homo sapiens
  chr1:117077073-117077234
  hypo
gctggctgggctagcgggagatttgagctgccagcccccactcgccgccctctacgcctcctccgctgggccgccggcgaggaagccgcccgcagcgcagaacaaagcgacttgaccttcagggcagtgggcggcagggcaggggcgcaccgggtgctggg

SEQ ID NO: 60735 - DNA, 77 bp, Homo sapiens
  chr1:117127237-117127314
  hypo
agtggaagcttggggacgtggaccctcacctggtcgcatgactgtcagagctgtctgcccagcggtgtcctctgccc

SEQ ID NO: 60736 - DNA, 172 bp, Homo sapiens
  chr1:117131422-117131594
  hypo
ccgctgtcgctgacctcggctctctggacggtgaggctgaacaggccccccgacacatgcctctcaaactggagcctggctctcaggccctcctcctcggcgtaagtaccgtattcaaaggcggagttgtgggtggtcttcaggataagcttgccatcggcatccgagggct

SEQ ID NO: 60737 - DNA, 35 bp, Homo sapiens
  chr1:117157579-117157614
  hypo
caaggcttgggtcttacgggtctcctgctgggaac

SEQ ID NO: 60738 - DNA, 339 bp, Homo sapiens; identical to SEQ ID NO: 36176
  chr1:117209808-117210147
  hypo

SEQ ID NO: 60739 - DNA, 38 bp, Homo sapiens
  chr1:117250042-117250080
  hypo
ctgggattgcaggcatgagccaccgtacttggcctaac

SEQ ID NO: 60740 - DNA, 30 bp, Homo sapiens; identical to SEQ ID NO: 14887
  chr1:117284787-117284817
  hypo

SEQ ID NO: 60741 - DNA, 74 bp, Homo sapiens; identical to SEQ ID NO: 14888
  chr1:117297900-117297974
  hypo

SEQ ID NO: 60742 - DNA, 31 bp, Homo sapiens; identical to SEQ ID NO: 14889
  chr1:117371752-117371783
  hypo

SEQ ID NO: 60743 - DNA, 30 bp, Homo sapiens
  chr1:117418210-117418240
  hypo
ggcctgctggcgtgccggtgcctgtcggtg

SEQ ID NO: 60744 - DNA, 97 bp, Homo sapiens
  chr1:117450852-117450949
  hypo
aatttttttttagagacggtgtctcacaatgttgcccgagtggtctcaaacttctagcctcaaataaaaaaaaaaaagaaagaaaaaagaaaaagaa

SEQ ID NO: 60745 - DNA, 36 bp, Homo sapiens; identical to SEQ ID NO: 14890
  chr1:117451188-117451224
  hypo

SEQ ID NO: 60746 - DNA, 31 bp, Homo sapiens
  chr1:117452157-117452188
  hypo
tttggcataggccaagcggctggttggtggg

SEQ ID NO: 60747 - DNA, 30 bp, Homo sapiens
  chr1:117487524-117487554
  hypo
taccacagtggggacgtgcgcctcgacacc

SEQ ID NO: 60748 - DNA, 70 bp, Homo sapiens
  chr1:117503896-117503966
  hypo
aaggtccccgggtttgcggatgaccccacagagctggcatgccgggtggtggacacgaagagtggggagg

SEQ ID NO: 60749 - DNA, 31 bp, Homo sapiens
  chr1:117509520-117509551
  hypo
cattcattccagattccgtgcttgtggtgaa

SEQ ID NO: 60750 - DNA, 227 bp, Homo sapiens
  chr1:117529537-117529764
  hypo
tcaggagacacggcgcgagcgccgcaggctcatgtcgatggagatggactaggctggcccgggaggggagtgacagagggacgttctaggagcaattggggcaagaagaggacagtgatattttaaaacaaagtgtgttacactaaaaaccagtcctctctaatctcaggtgggacttggcgctctctcttttctgcatgtcaagttctgagcgcggacatgtttac

SEQ ID NO: 60751 - DNA, 30 bp, Homo sapiens
  chr1:117529993-117530023
  hypo
gagagccagcttccgcgttggaggcacgtg

SEQ ID NO: 60752 - DNA, 43 bp, Homo sapiens
  chr1:117560923-117560966
  hypo
cacatcttccaccagcttattcgaatcacccacaatggcacta

SEQ ID NO: 60753 - DNA, 11 bp, Homo sapiens
  chr1:117625853-117625864
  hypo
actccgtctca

SEQ ID NO: 60754 - DNA, 220 bp, Homo sapiens
  chr1:117630358-117630578
  hypo
tccctccgaatgaaacgctttgcctccactccttctcccaggttaatttttttaaacctgcttcaagaatcttttctggaccactcccttcccaccttcccccggtttggttgaatgcctctgccagcaccttgtgcttacataagttatagcactttgtttcttcagcagacgttgagtatccactatgggtcaggtgctgtttcgtcaagagcagcca

SEQ ID NO: 60755 - DNA, 23 bp, Homo sapiens
  chr1:117630869-117630892
  hypo
gaaaagtcggctgggcgcggtgg

SEQ ID NO: 60756 - DNA, 30 bp, Homo sapiens
  chr1:117661240-117661270
  hypo
cctggcacacgggccggtcacagaactcac

SEQ ID NO: 60757 - DNA, 30 bp, Homo sapiens; identical to SEQ ID NO: 36180
  chr1:117664961-117664991
  hypo

SEQ ID NO: 60758 - DNA, 30 bp, Homo sapiens
  chr1:117665338-117665368
  hypo
gaagatgaacacgtccgacccctttaactt

SEQ ID NO: 60759 - DNA, 24 bp, Homo sapiens
  chr1:117670097-117670121
  hypo
aaacaataaatatgctgggcacgg

SEQ ID NO: 60760 - DNA, 23 bp, Homo sapiens
  chr1:117670360-117670383
  hypo
gcgagattctgtctcaaaaaaaa

SEQ ID NO: 60761 - DNA, 31 bp, Homo sapiens; identical to SEQ ID NO: 762
  chr1:117695844-117695875
  hypo

SEQ ID NO: 60762 - DNA, 31 bp, Homo sapiens; identical to SEQ ID NO: 14893
  chr1:117715857-117715888
  hypo

SEQ ID NO: 60763 - DNA, 170 bp, Homo sapiens
  chr1:118083727-118083897
  hypo
ctgtgcaggaccagcttttttcggcactgtccacagcacagtccctgaagacgtcaggactgagaagaaaactggagactgctggaagcctcccaaagacatgtcaggcagggatgttctcctgaaagggcacccgtgtgacgcaatccgcagttccctctgggcattca

SEQ ID NO: 60764 - DNA, 152 bp, Homo sapiens; identical to SEQ ID NO: 14894
  chr1:118147371-118147523
  hypo

SEQ ID NO: 60765 - DNA, 81 bp, Homo sapiens
  chr1:118163136-118163217
  hypo
acagtaaagccagccccgtaactttctgtaattattagaacttaattgtgtagctcagggttccccacccccctgaccacg

SEQ ID NO: 60766 - DNA, 234 bp, Homo sapiens; identical to SEQ ID NO: 14895
  chr1:118163672-118163906
  hypo

SEQ ID NO: 60767 - DNA, 229 bp, Homo sapiens; identical to SEQ ID NO: 14896
  chr1:118166361-118166590
  hypo

SEQ ID NO: 60768 - DNA, 151 bp, Homo sapiens; identical to SEQ ID NO: 14897
  chr1:118172977-118173128
  hypo

SEQ ID NO: 60769 - DNA, 166 bp, Homo sapiens; identical to SEQ ID NO: 14898
  chr1:118173734-118173900
  hypo

SEQ ID NO: 60770 - DNA, 178 bp, Homo sapiens
  chr1:118198079-118198257
  hypo
ctctcaaaacatatacacacacgcgcacacgcgtgcacacacacacgcacacacacacacacttgatgtggattgtgggaccagagcattcaggactttacagctctaaaggaccttcgagctcattgagctcttgaccaccttaatgtcaagaatcgcccaaagtacccatttaaaa

SEQ ID NO: 60771 - DNA, 93 bp, Homo sapiens
  chr1:118223359-118223452
  hypo
tgaaggaggtggtttcgctgaaagatgattgcctctcataaaatgacggccatagttcaagttcttcagcatccagctcgccacatactatgt

SEQ ID NO: 60772 - DNA, 31 bp, Homo sapiens
  chr1:118475521-118475552
  hypo
caacagttggtgttgttctggcgcagtggct

SEQ ID NO: 60773 - DNA, 30 bp, Homo sapiens; identical to SEQ ID NO: 765
  chr1:119168297-119168327
  hypo

SEQ ID NO: 60774 - DNA, 31 bp, Homo sapiens
  chr1:119876257-119876288
  hypo
gcctgcctactctggccgcccttgaggagcc

SEQ ID NO: 60775 - DNA, 171 bp, Homo sapiens
  chr1:120166011-120166182
  hypo
cgggtagggcttctcgcccgtgtgcaggcgccggtgcttgagcaggtcggcgcgccagctgaagctcttgccgcagtcggcgcacaggttgggccgctcgcccgtgtgcaggcgcaggtggttggtcaggtaggtgttgcggctgaagcccttgccgcactccccgcagcg

SEQ ID NO: 60776 - DNA, 40 bp, Homo sapiens; identical to SEQ ID NO: 14901
  chr1:120166426-120166466
  hypo

SEQ ID NO: 60777 - DNA, 86 bp, Homo sapiens; identical to SEQ ID NO: 36209
  chr1:120190363-120190449
  hypo

SEQ ID NO: 60778 - DNA, 293 bp, Homo sapiens; identical to SEQ ID NO: 780
  chr1:120190519-120190812
  hypo

SEQ ID NO: 60779 - DNA, 154 bp, Homo sapiens
  chr1:120321238-120321392
  hypo
gaagtgctttgttcaagtgcacgtagctggttaagtggtggtgccagggactccggactcctactctcgtgaaaactcttgtgcctgaaaattattgtaaaatatctggaattattattattatttatttttattttttgagacggagtctcgc

SEQ ID NO: 60780 - DNA, 33 bp, Homo sapiens
  chr1:120321631-120321664
  hypo
tacaggcgagagccaccgcgcccggcctggaat

SEQ ID NO: 60781 - DNA, 30 bp, Homo sapiens; identical to SEQ ID NO: 782
  chr1:120336067-120336097
  hypo

SEQ ID NO: 60782 - DNA, 30 bp, Homo sapiens; identical to SEQ ID NO: 36213
  chr1:121280597-121280627
  hypo

SEQ ID NO: 60783 - DNA, 30 bp, Homo sapiens; identical to SEQ ID NO: 36214
  chr1:145644968-145644998
  hypo

SEQ ID NO: 60784 - DNA, 5 bp, Homo sapiens
  chr1:150283343-150283348
  hypo
ctcca

SEQ ID NO: 60785 - DNA, 30 bp, Homo sapiens; identical to SEQ ID NO: 14906
  chr1:150445752-150445782
  hypo

SEQ ID NO: 60786 - DNA, 187 bp, Homo sapiens
  chr1:150484151-150484338
  hypo
aagaacatctgccacctgaggcgcttccgctctgtgccacgcaacctgccagctactgaccccctacaaagggagctgctggcactgatccagctggagagggagttccagcgctgctgccgccaggggaacaatcacacctgtacatggaaggccgtaagtgggcgtcccagcctccctgagagcc

SEQ ID NO: 60787 - DNA, 30 bp, Homo sapiens; identical to SEQ ID NO: 14907
  chr1:150486246-150486276
  hypo

SEQ ID NO: 60788 - DNA, 77 bp, Homo sapiens
  chr1:150504348-150504425
  hypo
tcccactcctctgcctgccttcgaagctccgtcaaaatgcaagtgcagatggctgacacccttgctctgtcgcccag

SEQ ID NO: 60789 - DNA, 31 bp, Homo sapiens
  chr1:150519103-150519134
  hypo
caggcatgagccaccgcgcccggcccaattc

SEQ ID NO: 60790 - DNA, 30 bp, Homo sapiens
  chr1:150525897-150525927
  hypo
tcaggtcccggcttcgagaccccatcaagc

SEQ ID NO: 60791 - DNA, 30 bp, Homo sapiens
  chr1:150529155-150529185
  hypo
gggtcctacagggccggcgggaccgtcttt

SEQ ID NO: 60792 - DNA, 111 bp, Homo sapiens
  chr1:150529746-150529857
  hypo
ggggtctccagctgcgtactggaaacgagtgggacactctgcatgctcagcgtcctgcgggaaaggtgagacatcacagtgcgttccccgcatctcggtccaaacccccca

SEQ ID NO: 60793 - DNA, 181 bp, Homo sapiens
  chr1:150565321-150565502
  hypo
gagccaccgcacctggcctggtttaccctttcattgacagtggagcctgtgcccactgcattaaagttgaagctctgtcactggcgatttggcagattcccctagagctgtcgccaattccagccatatgtgtcttgaattcatgctttttgctttttatattcaagctggtggttttagg

SEQ ID NO: 60794 - DNA, 88 bp, Homo sapiens; identical to SEQ ID NO: 14909
  chr1:150579403-150579491
  hypo

SEQ ID NO: 60795 - DNA, 44 bp, Homo sapiens; identical to SEQ ID NO: 14910
  chr1:150581802-150581846
  hypo

SEQ ID NO: 60796 - DNA, 29 bp, Homo sapiens
  chr1:150603551-150603580
  hypo
gagagtccgtctcaaaaaaaaaaaaaaaa

SEQ ID NO: 60797 - DNA, 139 bp, Homo sapiens
  chr1:150633719-150633858
  hypo
taataaatgttatgtatattttaccacagtaagaatgttactcgttgatttacatatgacccagttatctactcctagctacatacccacaagaaatgaaaacatgttcaaacaaaaacttgtccgtgcgtgttcacag

SEQ ID NO: 60798 - DNA, 39 bp, Homo sapiens; identical to SEQ ID NO: 14912
  chr1:150643982-150644021
  hypo

SEQ ID NO: 60799 - DNA, 30 bp, Homo sapiens
  chr1:150693284-150693314
  hypo
gtctgaggggcgggcgccggagaccagaag

SEQ ID NO: 60800 - DNA, 23 bp, Homo sapiens
  chr1:150863268-150863291
  hypo
gcgcctggcccaatgtgaaattt

SEQ ID NO: 60801 - DNA, 78 bp, Homo sapiens
  chr1:150889715-150889793
  hypo
cctgaagtgctgggattacaggcgtgagcccggcctagcttttttttttttaaacacggttaaagagtattctattgt

SEQ ID NO: 60802 - DNA, 30 bp, Homo sapiens; identical to SEQ ID NO: 14913
  chr1:150940916-150940946
  hypo

SEQ ID NO: 60803 - DNA, 403 bp, Homo sapiens; identical to SEQ ID NO: 14914
  chr1:150941387-150941790
  hypo

SEQ ID NO: 60804 - DNA, 30 bp, Homo sapiens; identical to SEQ ID NO: 14915
  chr1:150959365-150959395
  hypo

SEQ ID NO: 60805 - DNA, 38 bp, Homo sapiens; identical to SEQ ID NO: 14916
  chr1:151019714-151019752
  hypo

SEQ ID NO: 60806 - DNA, 30 bp, Homo sapiens
  chr1:151044722-151044752
  hypo
cacttattgaaaggttttggccgggcgcag

SEQ ID NO: 60807 - DNA, 27 bp, Homo sapiens
  chr1:151056645-151056672
  hypo
cctaaatgctgcaattgcaggcgtgag

SEQ ID NO: 60808 - DNA, 28 bp, Homo sapiens
  chr1:151095642-151095670
  hypo
caaaaatggctgggcacggtggctcacg

SEQ ID NO: 60809 - DNA, 26 bp, Homo sapiens
  chr1:151098356-151098382
  hypo
gcgtgagccaccgagcccggccaaat

SEQ ID NO: 60810 - DNA, 318 bp, Homo sapiens
  chr1:151105802-151106120
  hypo
ggagagagggcgcgggagccccggagtctcgatgtccttgccccgacgtcggtgggcgcggcgacaagcacaggagaccaggaggccagagactgaggcgcccagggcaaaagctgcggccacactggccaggaggagtgggatggggacggagcgggaggccgaggctgggggcaggtcccggcgcacgcctgccgaccgagagggaggagggaggctcagccaaggggaggcggtgcggggtacctaggcccagaggcgccggcagttcccaggcctgacatcatcgtccctcccgctgctactcagcctcactcc

SEQ ID NO: 60811 - DNA, 29 bp, Homo sapiens
  chr1:151114518-151114547
  hypo
cttttttttttttttttgagacggagtct

SEQ ID NO: 60812 - DNA, 21 bp, Homo sapiens
  chr1:151122206-151122227
  hypo
acagagcgagactccatctca

SEQ ID NO: 60813 - DNA, 100 bp, Homo sapiens
  chr1:151146164-151146264
  hypo
cctccaggaggtagaatgctgcgtcacgaagggacactggaaagcctgagtcctctacaaactcaagagtccttagccccctgatctctcaagaactgaa

SEQ ID NO: 60814 - DNA, 65 bp, Homo sapiens
  chr1:151148216-151148281
  hypo
tatgtgagacacatcgacaatgtaaactatacacagttaaggggtaggacggcacagtggcagaa

SEQ ID NO: 60815 - DNA, 30 bp, Homo sapiens
  chr1:151149046-151149076
  hypo
gcagggagaagaaacggaacagcaagagcc

SEQ ID NO: 60816 - DNA, 31 bp, Homo sapiens
  chr1:151164981-151165012
  hypo
ttctagtgttcttggccgggtgtggtggctc

SEQ ID NO: 60817 - DNA, 121 bp, Homo sapiens
  chr1:151169637-151169758
  hypo
tgcatggggatattctatggatgttcgggtcctaggttactttatgaggacccacaagacatctggaaagaggataaccaggtcattctgggggttacaaaacctgttttttttgtttgtt

SEQ ID NO: 60818 - DNA, 149 bp, Homo sapiens
  chr1:151170057-151170206
  hypo
aaacctgttttaatggagttatttcatgggccatgagtttgagaggatctatctgaccgactcttaccccgaatgttttaccattcctctttatttattcattccacagataattatggagcccctactatgtacgaagtcactggagg

SEQ ID NO: 60819 - DNA, 37 bp, Homo sapiens
  chr1:151173583-151173620
  hypo
ataggcgtgagccaccgtgccccacctgggtttttat

SEQ ID NO: 60820 - DNA, 17 bp, Homo sapiens
  chr1:151222754-151222771
  hypo
gagactgtctaaaaaaa

SEQ ID NO: 60821 - DNA, 267 bp, Homo sapiens
  chr1:151252541-151252808
  hypo
tcaggtgggtattataatccccgttttactcatgagaaaacaggatctgggaggttgagcgacttgcccattgcgaccatagggcaagtggtggctccaggattcccatccagaagttctgattcatacttcaaaggagctcggaaactctccgggtgcgccggggagtcctggttccggtgtcctgggactcctgggcagggtaacgaaaccacttttaaaaactttgccgggcccggtgggtcacatctgtaatcccagcacttt

SEQ ID NO: 60822 - DNA, 22 bp, Homo sapiens
  chr1:151325112-151325134
  hypo
agacagtgtcttgctttctcac

SEQ ID NO: 60823 - DNA, 31 bp, Homo sapiens
  chr1:151338236-151338267
  hypo
cactcacctggcatttcgggcagcagccagc

SEQ ID NO: 60824 - DNA, 243 bp, Homo sapiens
  chr1:151338719-151338962
  hypo
tgggaggggagggccagagggcgtatgtcacctcgttcttgtagaagcgctggatggtggagctgagtgcgcagcccacaaagccttgggcagcgtctgggttgtgcaggaagcggatctccaagggaataagcccatcttttagagacagggtctgcacaatctcatggcgctgccagtcccatacatataagtggctcccgtacagtcctggggtgggagtggggccggaggataggctca

SEQ ID NO: 60825 - DNA, 170 bp, Homo sapiens; identical to SEQ ID NO: 14923
  chr1:151339196-151339366
  hypo

SEQ ID NO: 60826 - DNA, 313 bp, Homo sapiens
  chr1:151345675-151345988
  hypo
gaccagctcgtgctctttagtgggtgcctgggtgtgtgtggatttgtgtgtctgggcatgtgtgtgttcctgtatacctgcgtgttgctcgtgcacgtgcctgcatgagtgtgtatctgtgcctgtgtgtgaatttccacgtgtgtgaatgtgcctgtgagtgtgcttgtgtgtatttgtgcgtgtgtgtgtgtgcgcgcctctgtatgtgcctaccagagtatctacgcctgtgtgtgtgtgtgtgtgtgtgtgcgcgcctctgtgagtatgtgcttgctagagtatctacgcctgtgtggacatgtgcata

SEQ ID NO: 60827 - DNA, 31 bp, Homo sapiens
  chr1:151346972-151347003
  hypo
agtaaaggtagaggggcgattctcctgcctc

SEQ ID NO: 60828 - DNA, 178 bp, Homo sapiens
  chr1:151356359-151356537
  hypo
tctaggtttggatttgcgttctctgacccgatactgccaccaccaccatctatagacatcctggatgtctcatacactatcacagtgccccacactgagttaccacttctgacaaagggtctcactgtacagtgaaagacgggtaatgatacccagcgtgtgacgagtcctgcaagtg

SEQ ID NO: 60829 - DNA, 27 bp, Homo sapiens
  chr1:151362759-151362786
  hypo
ccggccgctttcatttattttttattg

SEQ ID NO: 60830 - DNA, 30 bp, Homo sapiens
  chr1:151372991-151373021
  hypo
tgtacagccggcgctcgaagatgaaccctt

SEQ ID NO: 60831 - DNA, 78 bp, Homo sapiens
  chr1:151373753-151373831
  hypo
agccagaccgaggcccgcgacttagtagaacgctgcatgcgagtgctgtactaccgagatgcccgttcttacaaccgg

SEQ ID NO: 60832 - DNA, 261 bp, Homo sapiens
  chr1:151378262-151378523
  hypo
ggagtcaggtggtgccgcagcatgaaacgcacagcccactcataggagatcttaaaccccccttccaaagaacgtcctattttggtggccttctggaacaaggtctcctcatttacaggtagctgttgttcgcgctgggttagcacccactcagccagtttctcttctgcctcaaagctcagatatttgccctctagattctccccctgggaggcctggaaacgtcgaagccaacggcgaatacgtcgctggggatttcgg

SEQ ID NO: 60833 - DNA, 35 bp, Homo sapiens
  chr1:151378887-151378922
  hypo
ggtacatattcttcacgttccggtcatgcactcgg

SEQ ID NO: 60834 - DNA, 30 bp, Homo sapiens
  chr1:151379233-151379263
  hypo
atataaacttcaggtcggaaggtttctaat

SEQ ID NO: 60835 - DNA, 226 bp, Homo sapiens; identical to SEQ ID NO: 14927
  chr1:151481570-151481796
  hypo

SEQ ID NO: 60836 - DNA, 102 bp, Homo sapiens
  chr1:151557470-151557572
  hypo
ctcagacatgcagccgtcatcaacagcgtcctgtaaacctggagcgtcagcccagcacgggaaaagaagcagcagcaccctgcctgccgaacaactgcccca

SEQ ID NO: 60837 - DNA, 105 bp, Homo sapiens; identical to SEQ ID NO: 14929
  chr1:151597622-151597727
  hypo

SEQ ID NO: 60838 - DNA, 662 bp, Homo sapiens; identical to SEQ ID NO: 799
  chr1:151693823-151694485
  hypo

SEQ ID NO: 60839 - DNA, 197 bp, Homo sapiens; identical to SEQ ID NO: 14931
  chr1:151699288-151699485
  hypo

SEQ ID NO: 60840 - DNA, 86 bp, Homo sapiens
  chr1:151742597-151742683
  hypo
gagggagagggagcggccaaacattttaactgtttttctgtggctcctagtttgactgcaaccctggagtacgtggaagagaagac

SEQ ID NO: 60841 - DNA, 180 bp, Homo sapiens; identical to SEQ ID NO: 36247
  chr1:151763982-151764162
  hypo

SEQ ID NO: 60842 - DNA, 10 bp, Homo sapiens
  chr1:151826518-151826528
  hypo
tcacaggccg

SEQ ID NO: 60843 - DNA, 30 bp, Homo sapiens; identical to SEQ ID NO: 14933
  chr1:151827369-151827399
  hypo

SEQ ID NO: 60844 - DNA, 81 bp, Homo sapiens
  chr1:151829047-151829128
  hypo
agaggggatcctcaggcggccctgacagctggaagctggttccagcaaggtggccccaggaggaaagagctgtcctcctaa

SEQ ID NO: 60845 - DNA, 149 bp, Homo sapiens; identical to SEQ ID NO: 14934
  chr1:151882271-151882420
  hypo

SEQ ID NO: 60846 - DNA, 337 bp, Homo sapiens
  chr1:152191328-152191665
  hypo
agccagacccatgtcggccactgctggaagaccgaccggagccagacccatgtcggccatagctgggagactgccctgacccagacccacgctggccgtggcctggagactggccagatccagagccatgtcggccgcggcccgaagcgtgatgggaggcagactcatgctgaccatagctggaagattgacctgagctagagtcatgttggccggagcttgatgactgccctgacgtagatccatgtcgtccctggctagagaagtgacctgaggcagaaccatgctgactatagccctgtcctgagccagactcgtgttgcccaaaaccagaagc

SEQ ID NO: 60847 - DNA, 43 bp, Homo sapiens
  chr1:152192943-152192986
  hypo
agagcttgatgcctgccctgacgtagatccatgttgtccctgg

SEQ ID NO: 60848 - DNA, 262 bp, Homo sapiens; identical to SEQ ID NO: 14935
  chr1:152733096-152733358
  hypo

SEQ ID NO: 60849 - DNA, 26 bp, Homo sapiens
  chr1:153121398-153121424
  hypo
cgcccggctaatgttattttgtattt

SEQ ID NO: 60850 - DNA, 33 bp, Homo sapiens; identical to SEQ ID NO: 14936
  chr1:153352634-153352667
  hypo

SEQ ID NO: 60851 - DNA, 172 bp, Homo sapiens
  chr1:153352906-153353078
  hypo
actccgtctcggaaaaaaaaaaaaatctggtaacagaagaatgggatgatccagaatgcgtgttgcctgtatgcttcgtaattagccttaattacgtaattagccttaattctcatgatatcagtatcatgagaagagaaatcgcaatggcaatgcacgtattggcgtcatc

SEQ ID NO: 60852 - DNA, 162 bp, Homo sapiens
  chr1:153519005-153519167
  hypo
gtaaggctcagggtcggggcggggggatctggaggggaacaggctcacacccaaaggaggctctgggaccacctcaggaacgtcagtgggaaaggtcctgggtgaggtagtgatggagtggagtggcagtgaggcgtgggggctcacggatagatctcaggt

SEQ ID NO: 60853 - DNA, 154 bp, Homo sapiens
  chr1:153537352-153537506
  hypo
attctttttgcagcaacgcccacatgcacacctcctgctcctaggcctagacccccaaagaagggcccctagactgagatatccaggggagggcctcagagcaacccctgcactgagacctcacagaggaacctggagaaaaacccttcagtcg

SEQ ID NO: 60854 - DNA, 53 bp, Homo sapiens
  chr1:153539591-153539644
  hypo
tgagggtgagggacaagggagcgcaatgcatcgattttcacagccattctttc

SEQ ID NO: 60855 - DNA, 398 bp, Homo sapiens
  chr1:153540017-153540415
  hypo
ttaaaaagcctggcagtgaggcgctccagactcggcctgctgctgcgtgtcccttaaacacaccggcacatgcaactagtgtggccaagaccctcggcttgcgctgacccctctgttcagaacgtgcccacacatgcccatgccctctatcctgctgaaatccaacccccccttcaaaggccactgcagggagccttcccagggcccaaccggattcagtgtctacctgttctgtcctgtacaaagcgccccttttgcccttttcgtgtgtacttagagaattctgattttgactgaatcacctgtgtacttgttttctctcagcctcacccccacatggtgagctcaccggtcttactcatttctgcatgaggtaagggtctcgcccacaccaggtg

SEQ ID NO: 60856 - DNA, 30 bp, Homo sapiens
  chr1:153587687-153587717
  hypo
ggtggggtgtgctccgtccataccggcatg

SEQ ID NO: 60857 - DNA, 30 bp, Homo sapiens
  chr1:153597876-153597906
  hypo
ttcgaggccagagtcgatgaaatttaagac

SEQ ID NO: 60858 - DNA, 1445 bp, Homo sapiens; identical to SEQ ID NO: 36261
  chr1:153650994-153652439
  hypo

SEQ ID NO: 60859 - DNA, 30 bp, Homo sapiens; identical to SEQ ID NO: 14941
  chr1:153662338-153662368
  hypo

SEQ ID NO: 60860 - DNA, 31 bp, Homo sapiens
  chr1:153669242-153669273
  hypo
tgcccggcccgacaaatccttatttattaac

SEQ ID NO: 60861 - DNA, 99 bp, Homo sapiens
  chr1:153914369-153914468
  hypo
ctgagacggagtagcggtaaaggaaggtgaggaaggcgcggaaggcagggaaggcaggccagcgggacagcacagcgatggcacgccggctgcgcacag

SEQ ID NO: 60862 - DNA, 30 bp, Homo sapiens
  chr1:153933030-153933060
  hypo
gctggggctccactcgcctgtgggacccct

SEQ ID NO: 60863 - DNA, 177 bp, Homo sapiens; identical to SEQ ID NO: 808
  chr1:153936614-153936791
  hypo

SEQ ID NO: 60864 - DNA, 79 bp, Homo sapiens; identical to SEQ ID NO: 14945
  chr1:153937069-153937148
  hypo

SEQ ID NO: 60865 - DNA, 181 bp, Homo sapiens; identical to SEQ ID NO: 14946
  chr1:153937387-153937568
  hypo

SEQ ID NO: 60866 - DNA, 331 bp, Homo sapiens; identical to SEQ ID NO: 810
  chr1:153958646-153958977
  hypo

SEQ ID NO: 60867 - DNA, 27 bp, Homo sapiens
  chr1:153963224-153963251
  hypo
ttccgctttcgctcctttccggcggtg

SEQ ID NO: 60868 - DNA, 34 bp, Homo sapiens
  chr1:154098519-154098553
  hypo
aggcgtgagccaccgcgcccggccaagaaatgtt

SEQ ID NO: 60869 - DNA, 22 bp, Homo sapiens
  chr1:154107501-154107523
  hypo
ccacgcccggcctctgtgtacc

SEQ ID NO: 60870 - DNA, 33 bp, Homo sapiens; identical to SEQ ID NO: 14949
  chr1:154115065-154115098
  hypo

SEQ ID NO: 60871 - DNA, 58 bp, Homo sapiens
  chr1:154116695-154116753
  hypo
aaaataaagttgtagtcgtattaaaggattatactttattctacgtcttacttttaaa

SEQ ID NO: 60872 - DNA, 166 bp, Homo sapiens; identical to SEQ ID NO: 14951
  chr1:154179782-154179948
  hypo

SEQ ID NO: 60873 - DNA, 32 bp, Homo sapiens; identical to SEQ ID NO: 14952
  chr1:154243764-154243796
  hypo

SEQ ID NO: 60874 - DNA, 31 bp, Homo sapiens; identical to SEQ ID NO: 14953
  chr1:154243915-154243946
  hypo

SEQ ID NO: 60875 - DNA, 79 bp, Homo sapiens
  chr1:154273377-154273456
  hypo
ctcgaattcctgggctcaagtgattctcacgcccgggatggaaggcatgaaccaccgcgcccagccactttacttcttc

SEQ ID NO: 60876 - DNA, 361 bp, Homo sapiens; identical to SEQ ID NO: 36277
  chr1:154297628-154297989
  hypo

SEQ ID NO: 60877 - DNA, 114 bp, Homo sapiens; identical to SEQ ID NO: 36278
  chr1:154298038-154298152
  hypo

SEQ ID NO: 60878 - DNA, 221 bp, Homo sapiens; identical to SEQ ID NO: 36279
  chr1:154298253-154298474
  hypo

SEQ ID NO: 60879 - DNA, 30 bp, Homo sapiens
  chr1:154328848-154328878
  hypo
ccagcatagtagaaccggccagcttgccct

SEQ ID NO: 60880 - DNA, 96 bp, Homo sapiens
  chr1:154343719-154343815
  hypo
aaaaaaaaaaaaagactttagtttgcatgggaagtgaatgcgttgccagcatggtacctactgactgtagtttccgtagctctctcttattttcct

SEQ ID NO: 60881 - DNA, 184 bp, Homo sapiens; identical to SEQ ID NO: 14957
  chr1:154402828-154403012
  hypo

SEQ ID NO: 60882 - DNA, 284 bp, Homo sapiens; identical to SEQ ID NO: 36281
  chr1:154474300-154474584
  hypo

SEQ ID NO: 60883 - DNA, 34 bp, Homo sapiens; identical to SEQ ID NO: 815
  chr1:154474743-154474777
  hypo

SEQ ID NO: 60884 - DNA, 80 bp, Homo sapiens; identical to SEQ ID NO: 816
  chr1:154474987-154475067
  hypo

SEQ ID NO: 60885 - DNA, 67 bp, Homo sapiens; identical to SEQ ID NO: 817
  chr1:154475371-154475438
  hypo

SEQ ID NO: 60886 - DNA, 31 bp, Homo sapiens
  chr1:154533445-154533476
  hypo
taaaaatttaaaagatcggccgggcgcggtg

SEQ ID NO: 60887 - DNA, 30 bp, Homo sapiens
  chr1:154544523-154544553
  hypo
ccagtggcgggccccgggcgctcaggggag

SEQ ID NO: 60888 - DNA, 30 bp, Homo sapiens
  chr1:154564014-154564044
  hypo
gaggtggcttctaccgctccggctggtaat

SEQ ID NO: 60889 - DNA, 30 bp, Homo sapiens
  chr1:154573995-154574025
  hypo
ttcaggaacactgttcgtatttctcttgat

SEQ ID NO: 60890 - DNA, 30 bp, Homo sapiens; identical to SEQ ID NO: 14961
  chr1:154680598-154680628
  hypo

SEQ ID NO: 60891 - DNA, 303 bp, Homo sapiens
  chr1:154685554-154685857
  hypo
agttaccatggccatcgttaccgtctggtccttgctagcatgcttcacagccgtgcaaactcaagcccaacctcaggagtccctcaatgtgcagctcataaaatgacacggaaaaggtttagtcagctcattaatttcacgcagagacacacctgagcgatttcacttaagaaacaaacaccaagtttcaaaagcccacaagacataccggtagattgcaaatgaaacaaacttgagcctaggtatttttgaaccaagcagaaatttttctttgcttgcctggtcccgcgctgtccagtgcga

SEQ ID NO: 60892 - DNA, 30 bp, Homo sapiens; identical to SEQ ID NO: 14962
  chr1:154744743-154744773
  hypo

SEQ ID NO: 60893 - DNA, 92 bp, Homo sapiens
  chr1:154808779-154808871
  hypo
aggaacaccccacctgatactcgactggccttaatttgggctcctgccccccgtctattttgccctgcaccggttacagaatattagttcta

SEQ ID NO: 60894 - DNA, 31 bp, Homo sapiens; identical to SEQ ID NO: 818
  chr1:154816590-154816621
  hypo

SEQ ID NO: 60895 - DNA, 30 bp, Homo sapiens
  chr1:154919131-154919161
  hypo
cctggagccgggcccgcagctgctgcagct

SEQ ID NO: 60896 - DNA, 242 bp, Homo sapiens; identical to SEQ ID NO: 14964
  chr1:154931247-154931489
  hypo

SEQ ID NO: 60897 - DNA, 30 bp, Homo sapiens
  chr1:154938424-154938454
  hypo
tgtcaaacaggtcccggggtgcactgccat

SEQ ID NO: 60898 - DNA, 38 bp, Homo sapiens
  chr1:154944720-154944758
  hypo
caaaaaaaaaaaaatacgtattccccccagctcacctt

SEQ ID NO: 60899 - DNA, 23 bp, Homo sapiens
  chr1:154954135-154954158
  hypo
tttttctttttgatggagcctcg

SEQ ID NO: 60900 - DNA, 181 bp, Homo sapiens
  chr1:154954397-154954578
  hypo
gattacaggcgtgagtcaccgcgcccggcctttttttctttttttcaattgagagaactcaagcaatcctccctcctcagactcccaaagtgctgcgcccgaccaagggttttgaagagtaaaatttggcaaggtgtggtttaccagtcctacaaagaatgaattcggcccggcgcggtgg

SEQ ID NO: 60901 - DNA, 23 bp, Homo sapiens
  chr1:154954877-154954900
  hypo
atgaattcgggcccttaccattc

SEQ ID NO: 60902 - DNA, 30 bp, Homo sapiens
  chr1:154960698-154960728
  hypo
cttctttctccaaccgcttcacccatgtcc

SEQ ID NO: 60903 - DNA, 94 bp, Homo sapiens
  chr1:154965404-154965498
  hypo
taccgtgcggaacccggccctgaagtgcctgagcccaggaggacaccccacataccgtccagcctatctactggagaacgaagaagaggagcgg

SEQ ID NO: 60904 - DNA, 30 bp, Homo sapiens
  chr1:154966303-154966333
  hypo
accatggctggcatcgctcaggtgggcagg

SEQ ID NO: 60905 - DNA, 37 bp, Homo sapiens; identical to SEQ ID NO: 14966
  chr1:154987688-154987725
  hypo

SEQ ID NO: 60906 - DNA, 32 bp, Homo sapiens
  chr1:155005173-155005205
  hypo
aaagaacttgcggacccggtcagccacctctt

SEQ ID NO: 60907 - DNA, 31 bp, Homo sapiens
  chr1:155005731-155005762
  hypo
ggccctgccctgggggcgacagctttgttag

SEQ ID NO: 60908 - DNA, 243 bp, Homo sapiens
  chr1:155012855-155013098
  hypo
ctgtatagttctaggcgatgggcactatttgcagagggaagctgagcgggtttgagaaagtgctggttatacagggaggtgaccaaccagggcctctttctccagggccagtagccaatctgcgacacaatctcaacaacgtgatcgcatcgctgggctgcaccgtggagctgcagatcaacaacacccgcgcagcttggcgcatctccacagcccccttacgggccatgttcaaggacctgc

SEQ ID NO: 60909 - DNA, 30 bp, Homo sapiens
  chr1:155030081-155030111
  hypo
tgatgcccggcccccgtgctcctgcccaca

SEQ ID NO: 60910 - DNA, 38 bp, Homo sapiens; identical to SEQ ID NO: 14968
  chr1:155082408-155082446
  hypo

SEQ ID NO: 60911 - DNA, 415 bp, Homo sapiens; identical to SEQ ID NO: 36300
  chr1:155099555-155099970
  hypo

SEQ ID NO: 60912 - DNA, 30 bp, Homo sapiens
  chr1:155148142-155148172
  hypo
ggtggggatgggaacgctgagctattcatc

SEQ ID NO: 60913 - DNA, 33 bp, Homo sapiens
  chr1:155149476-155149509
  hypo
caactctgccgggtgcggcgcacccacagcggg

SEQ ID NO: 60914 - DNA, 123 bp, Homo sapiens; identical to SEQ ID NO: 14971
  chr1:155149964-155150087
  hypo

SEQ ID NO: 60915 - DNA, 444 bp, Homo sapiens; identical to SEQ ID NO: 36306
  chr1:155152068-155152512
  hypo

SEQ ID NO: 60916 - DNA, 138 bp, Homo sapiens; identical to SEQ ID NO: 14972
  chr1:155160919-155161057
  hypo

SEQ ID NO: 60917 - DNA, 54 bp, Homo sapiens
  chr1:155162034-155162088
  hypo
ccacctggggtagagcttgcatgaccagaacccgtaacaactgttgcgggttta

SEQ ID NO: 60918 - DNA, 796 bp, Homo sapiens; identical to SEQ ID NO: 36307
  chr1:155164178-155164974
  hypo

SEQ ID NO: 60919 - DNA, 30 bp, Homo sapiens
  chr1:155167898-155167928
  hypo
ataggcccgaaaatccgtaagcgttacctc

SEQ ID NO: 60920 - DNA, 109 bp, Homo sapiens
  chr1:155311711-155311820
  hypo
aggaaggagactcaccgagaaatcttttttgggagtgagcttcttggggaagtgatcaaaagcatagggtttggtgcagacaggatagcggttccggtggatcttgtaa

SEQ ID NO: 60921 - DNA, 30 bp, Homo sapiens; identical to SEQ ID NO: 14975
  chr1:155317637-155317667
  hypo

SEQ ID NO: 60922 - DNA, 224 bp, Homo sapiens
  chr1:155363621-155363845
  hypo
tgtgagccaccgcacccagccttctccttttctttcatttgtacggcaaatatttgataaacttctattatgtaccaggtgctgggaaatccagggagagtaagaaagacaatgatcctgtactgccggagattataatctaatggaggagccaaataaatattgtaattatagatatagagagtgatgttatctagaacaaagagagacgaagcctcttttga

SEQ ID NO: 60923 - DNA, 30 bp, Homo sapiens
  chr1:155386188-155386218
  hypo
atgagccaccgtgcccggcatgagaaaatt

SEQ ID NO: 60924 - DNA, 184 bp, Homo sapiens; identical to SEQ ID NO: 14976
  chr1:155403642-155403826
  hypo

SEQ ID NO: 60925 - DNA, 35 bp, Homo sapiens
  chr1:155412079-155412114
  hypo
taaaaaaaaaacacaaaggcccggcaaggtggctt

SEQ ID NO: 60926 - DNA, 83 bp, Homo sapiens; identical to SEQ ID NO: 14977
  chr1:155466711-155466794
  hypo

SEQ ID NO: 60927 - DNA, 28 bp, Homo sapiens
  chr1:155489764-155489792
  hypo
accagtcgctgcagacagaagaaatgga

SEQ ID NO: 60928 - DNA, 7 bp, Homo sapiens
  chr1:155516122-155516129
  hypo
aaaaaaa

SEQ ID NO: 60929 - DNA, 136 bp, Homo sapiens
  chr1:155518909-155519045
  hypo
agagtatacaaacagggaggtcgagacgaacctgggcaataaagcatgactctctctctacaaaaaccaaaaaaattacccgaatattgtgtcgtgagcctgtaatcccacctacgcaggaagctgaggtaggaaa

SEQ ID NO: 60930 - DNA, 3 bp, Homo sapiens
  chr1:155578924-155578927
  hypo
tgt

SEQ ID NO: 60931 - DNA, 34 bp, Homo sapiens
  chr1:155620900-155620934
  hypo
cattcttcggtggggcgcggtggctcacgcctgt

SEQ ID NO: 60932 - DNA, 76 bp, Homo sapiens
  chr1:155640723-155640799
  hypo
agtgttggattacaggcgtaagccacggcgcccggcctctcttactctttcttacgtgtaacactttattcacaaa

SEQ ID NO: 60933 - DNA, 152 bp, Homo sapiens
  chr1:155654054-155654206
  hypo
aacaaaaaaccatagcgagacctaatctcaattaaaaaaataaagaaattgtatacacatacatgcacatatatgcacactacacacacatatcacatgtacgttttgagaaaaataacaccatgaacctactacccgttaaaaattagaga

SEQ ID NO: 60934 - DNA, 34 bp, Homo sapiens
  chr1:155674455-155674489
  hypo
ttaggagtgctttggcgtcttcattaaatagtat

SEQ ID NO: 60935 - DNA, 451 bp, Homo sapiens; identical to SEQ ID NO: 36311
  chr1:155830058-155830509
  hypo

SEQ ID NO: 60936 - DNA, 83 bp, Homo sapiens
  chr1:155862236-155862319
  hypo
caggcatgcaccaccacgacacacgtgctaccacacctggctaacttaaaaaaattttctgtggagacaggctggttggaact

SEQ ID NO: 60937 - DNA, 27 bp, Homo sapiens
  chr1:155892696-155892723
  hypo
tgctataaagacagtcctggccgggcg

SEQ ID NO: 60938 - DNA, 94 bp, Homo sapiens
  chr1:155893728-155893822
  hypo
gttcataaaattactataaaacgtattaatattgacataggtttaaatgaaaattatttcagacttatcacagctcactttaagatttgctttt

SEQ ID NO: 60939 - DNA, 270 bp, Homo sapiens
  chr1:155911659-155911929
  hypo
ttgctgggaaatttggcggtgctgtgggtactgagtaactgtgcccggagagcccctggcccaccttcagacaccttcgtcttcaacctggctctggcggacctgggactggcactcactctccccttttgggcagccgagtcggcactggactttcactggcccttcggaggtgccctctgcaagatggttctgacggccactgtcctcaacgtctatgccagcatcttcctcatcacagcgctgagcgttgctcgctactgggtggtg

SEQ ID NO: 60940 - DNA, 30 bp, Homo sapiens
  chr1:155920795-155920825
  hypo
cactctcccggagccgggcctccaggctgc

SEQ ID NO: 60941 - DNA, 203 bp, Homo sapiens
  chr1:155931416-155931619
  hypo
ttgaattcctgcctagtctgccgagcaggtctgacctttgaagcgccccgtcgctgtcttccagagcaggcagccatcgtggatgagtttgcgcctcagaagttcctctcggccaaaggggcccttgccaggcactggggtttgggcccgagggtccatgcggttgtagatctcctgcagacgggcccctttctccagctgat

SEQ ID NO: 60942 - DNA, 37 bp, Homo sapiens
  chr1:155972835-155972872
  hypo
gctacaaaactgattgtcagccgggcatggtggctca

SEQ ID NO: 60943 - DNA, 4 bp, Homo sapiens
  chr1:156009428-156009432
  hypo
acaa

SEQ ID NO: 60944 - DNA, 101 bp, Homo sapiens
  chr1:156010522-156010623
  hypo
gtgagccaccgcgcccagccagtccacagaatttaacttgggttgcacctggactggacaccacctagtttagctctctcgtgccttgcacaaagctgggt

SEQ ID NO: 60945 - DNA, 30 bp, Homo sapiens; identical to SEQ ID NO: 14982
  chr1:156030822-156030852
  hypo

SEQ ID NO: 60946 - DNA, 37 bp, Homo sapiens; identical to SEQ ID NO: 14983
  chr1:156032531-156032568
  hypo

SEQ ID NO: 60947 - DNA, 318 bp, Homo sapiens
  chr1:156047206-156047524
  hypo
ggcccaccaccagccccaccacgcggtagggcacccgcacacggatggtcacctggccgggcagagcaggagccacaccaaaggcggcgcctgacttgttgcgggaggcacggatcatggagaagtgctccgctgctgagatgatttcccgccgggctgtggccacgtcctcccgtcgccctgtcaccatgaacactggttcctcgcccctcaccggtgtcttgatgtaggtgttggtcttggccctcaaggccttaatcttgcagcctgggatagggcggggaaggagagagacaaagaaacgcacacagcaaggtt

SEQ ID NO: 60948 - DNA, 30 bp, Homo sapiens; identical to SEQ ID NO: 14985
  chr1:156081253-156081283
  hypo

SEQ ID NO: 60949 - DNA, 30 bp, Homo sapiens; identical to SEQ ID NO: 838
  chr1:156084256-156084286
  hypo

SEQ ID NO: 60950 - DNA, 31 bp, Homo sapiens; identical to SEQ ID NO: 36322
  chr1:156084628-156084659
  hypo

SEQ ID NO: 60951 - DNA, 31 bp, Homo sapiens; identical to SEQ ID NO: 14987
  chr1:156085875-156085906
  hypo

SEQ ID NO: 60952 - DNA, 45 bp, Homo sapiens
  chr1:156111503-156111548
  hypo
tacatgcttggcctagcgtggtggcacgcacgcctgtagtcccag

SEQ ID NO: 60953 - DNA, 144 bp, Homo sapiens
  chr1:156143322-156143466
  hypo
aagtggcaggtaaagttgtggcgggagcaggcggccagagtccaggacacatgtcgagctgggcagctgtgggtggcgggggggacagcacctgagctgggctgggagtgaagctgtagcagcggggtgtgacttggtgggtgt

SEQ ID NO: 60954 - DNA, 30 bp, Homo sapiens
  chr1:156167252-156167282
  hypo
aaactgctttgtcccggctgggtgcggtgg

SEQ ID NO: 60955 - DNA, 197 bp, Homo sapiens; identical to SEQ ID NO: 14989
  chr1:156179132-156179329
  hypo

SEQ ID NO: 60956 - DNA, 21 bp, Homo sapiens
  chr1:156218408-156218429
  hypo
tttttttttaaggtggagtct

SEQ ID NO: 60957 - DNA, 30 bp, Homo sapiens; identical to SEQ ID NO: 14990
  chr1:156232286-156232316
  hypo

SEQ ID NO: 60958 - DNA, 31 bp, Homo sapiens; identical to SEQ ID NO: 14991
  chr1:156239868-156239899
  hypo

SEQ ID NO: 60959 - DNA, 37 bp, Homo sapiens
  chr1:156254134-156254171
  hypo
gggcagctccttcccggacggacggatggacagacgc

SEQ ID NO: 60960 - DNA, 438 bp, Homo sapiens
  chr1:156255261-156255699
  hypo
ctcagcccagtgctccgttcccggatccccctggctggcgggacattgaaccagagccccctgagtcagaaccacttaccaagctagaggagctgcccgaagacgatgccaacctgctgcctgagaaagcggcccgtgccttcgtgcctattgacctacagtgcattgagcggcagccccaagaagaccttatcgtgcgctgtgaggcaggcgagggcgagtgccgaaccttcatgcccccccgggtcacccaccccgaccccactgagcgcaagtgggctgaggcagtggtgaggccgcctggctgttcctgtgggggctgcgggagctgtggagaccgtgagtggctaagggctgtggcctccgtgggagccgcactcattctcttcccttgcctactatacggggcatatgccttcctgccgtttgatgtcccac

SEQ ID NO: 60961 - DNA, 30 bp, Homo sapiens; identical to SEQ ID NO: 14994
  chr1:156256100-156256130
  hypo

SEQ ID NO: 60962 - DNA, 30 bp, Homo sapiens
  chr1:156262768-156262798
  hypo
aacctccagagtttcgaggcacagcaagac

SEQ ID NO: 60963 - DNA, 30 bp, Homo sapiens
  chr1:156269033-156269063
  hypo
tacttccgttcacccggatttcggcaagag

SEQ ID NO: 60964 - DNA, 85 bp, Homo sapiens; identical to SEQ ID NO: 14995
  chr1:156276622-156276707
  hypo

SEQ ID NO: 60965 - DNA, 672 bp, Homo sapiens; identical to SEQ ID NO: 36327
  chr1:156357855-156358527
  hypo

SEQ ID NO: 60966 - DNA, 151 bp, Homo sapiens
  chr1:156362386-156362537
  hypo
gagaagagcgaaattccgagtgagcgggtgtgggatgaatggcaggcccacctcccccacatcggacccagagtccaggcggctggagaggtgggggaagggccaggagtgccccagctgggggcttgggcttctccgccactgacaccag

SEQ ID NO: 60967 - DNA, 1174 bp, Homo sapiens; identical to SEQ ID NO: 36328
  chr1:156390041-156391215
  hypo

SEQ ID NO: 60968 - DNA, 359 bp, Homo sapiens; identical to SEQ ID NO: 843
  chr1:156391242-156391601
  hypo

SEQ ID NO: 60969 - DNA, 436 bp, Homo sapiens; identical to SEQ ID NO: 36330
  chr1:156405634-156406070
  hypo

SEQ ID NO: 60970 - DNA, 604 bp, Homo sapiens; identical to SEQ ID NO: 36331
  chr1:156406104-156406708
  hypo

SEQ ID NO: 60971 - DNA, 224 bp, Homo sapiens; identical to SEQ ID NO: 15002
  chr1:156432118-156432342
  hypo

SEQ ID NO: 60972 - DNA, 145 bp, Homo sapiens
  chr1:156432941-156433086
  hypo
aggcaagtttaagagaagacgaccctggctggaaggcatggcggagtggggtggggtggtcctgtggggtgtgtcaggtggggagaaagaggctccttggcactgttaaagcactttgaaagggcaagagcggcttcctctgctg

SEQ ID NO: 60973 - DNA, 55 bp, Homo sapiens
  chr1:156433372-156433427
  hypo
ctgagacatgtggaagtgccccgccctgaaggccgccccccattcttccctgctg

SEQ ID NO: 60974 - DNA, 38 bp, Homo sapiens; identical to SEQ ID NO: 15004
  chr1:156441192-156441230
  hypo

SEQ ID NO: 60975 - DNA, 240 bp, Homo sapiens
  chr1:156445327-156445567
  hypo
agggaagggagacatcgtccatcccctgtctctctggagcccactctccatccatcacactgcagcacacgccccggcagaggcgtgctggcatctgcgaggggaatgtggggcctggcgtggcgtgtgcctgcgcgtatgcacacacgtgtgtggggctgtcagctccatctgccgctgagtcacttgtttattccaactccatgctggggccgaaactgccgccgtgttggccgccaa

SEQ ID NO: 60976 - DNA, 30 bp, Homo sapiens
  chr1:156452243-156452273
  hypo
gttggtgcggctctcgtgtggctcattgta

SEQ ID NO: 60977 - DNA, 30 bp, Homo sapiens
  chr1:156479696-156479726
  hypo
aagaggtacgctgtcgctaagcaacaagag

SEQ ID NO: 60978 - DNA, 17 bp, Homo sapiens
  chr1:156481145-156481162
  hypo
gttgaaagtgctaatga

SEQ ID NO: 60979 - DNA, 33 bp, Homo sapiens; identical to SEQ ID NO: 36334
  chr1:156542085-156542118
  hypo

SEQ ID NO: 60980 - DNA, 222 bp, Homo sapiens
  chr1:156553585-156553807
  hypo
cagaaggagccagattctgtgcgagaacggctggtggccaagctggcagacaccgtgaggacgcgcttggcccaggtggggctggtccagactcacaccctggtgagatgacacctgagacaaggagatgggggtggagagaggttacccagagaaggggttggtggtaagcagagacgctgttccctgggatgctgcgcgcttggccgctcatctgtgttc

SEQ ID NO: 60981 - DNA, 1435 bp, Homo sapiens; identical to SEQ ID NO: 848
  chr1:156593617-156595052
  hypo

SEQ ID NO: 60982 - DNA, 103 bp, Homo sapiens; identical to SEQ ID NO: 849
  chr1:156595080-156595183
  hypo

SEQ ID NO: 60983 - DNA, 82 bp, Homo sapiens; identical to SEQ ID NO: 36339
  chr1:156595221-156595303
  hypo

SEQ ID NO: 60984 - DNA, 40 bp, Homo sapiens; identical to SEQ ID NO: 15008
  chr1:156664564-156664604
  hypo

SEQ ID NO: 60985 - DNA, 43 bp, Homo sapiens
  chr1:156667363-156667406
  hypo
agaagtgggaggccctggccccggggcaccctggtcttgcagg

SEQ ID NO: 60986 - DNA, 844 bp, Homo sapiens; identical to SEQ ID NO: 36351
  chr1:156675830-156676674
  hypo

SEQ ID NO: 60987 - DNA, 31 bp, Homo sapiens; identical to SEQ ID NO: 15011
  chr1:156716807-156716838
  hypo

SEQ ID NO: 60988 - DNA, 130 bp, Homo sapiens; identical to SEQ ID NO: 15012
  chr1:156754045-156754175
  hypo

SEQ ID NO: 60989 - DNA, 103 bp, Homo sapiens
  chr1:156823852-156823955
  hypo
agaggcgcgtcccgcggatgactgctaggttggggaagaggtcgcgcaggctctccagtccgtagacacggaagagcagcaggtagtcggtgacctgggtgag

SEQ ID NO: 60990 - DNA, 104 bp, Homo sapiens
  chr1:156838290-156838394
  hypo
ggccaggtgtgcccacgctgaaggtccaggtgcccaatgcctcggtggatgtgggggacgacgtgctgctgcggtgccaggtggaggggcggggcctggagcag

SEQ ID NO: 60991 - DNA, 30 bp, Homo sapiens
  chr1:156843563-156843593
  hypo
tgagttcctggagccggcagccaatgagac

SEQ ID NO: 60992 - DNA, 237 bp, Homo sapiens
  chr1:156849660-156849897
  hypo
aagtgctgggattacaggcgtgaaccaccgagcttgtgtatttatttttaatgatggggctggggtaggctgtgccttgacgggctgtcccaggcgcccctggaattgatgcagtgtccgcccgtggcaggtgggaggccgcaccatgctgcccattcgctggatgccgcccgagagcatcctgtaccgtaagttcaccaccgagagcgacgtgtggagcttcggcgtggtgctctg

SEQ ID NO: 60993 - DNA, 338 bp, Homo sapiens; identical to SEQ ID NO: 36363
  chr1:156897315-156897653
  hypo

SEQ ID NO: 60994 - DNA, 30 bp, Homo sapiens; identical to SEQ ID NO: 15014
  chr1:156905969-156905999
  hypo

SEQ ID NO: 60995 - DNA, 30 bp, Homo sapiens; identical to SEQ ID NO: 15015
  chr1:157039340-157039370
  hypo

SEQ ID NO: 60996 - DNA, 144 bp, Homo sapiens
  chr1:157458772-157458916
  hypo
ggacttggcaaccagccggacactgattccattcctgcttctaccgctaagctctgtcatccagcagatcctcaatggcctcatctggaaaatgggataatacttcctctgcagggttgctgggaggactaaatagatagaaga

SEQ ID NO: 60997 - DNA, 30 bp, Homo sapiens
  chr1:157719992-157720022
  hypo
atgtaaaacaagaaacgcagtatattagca

SEQ ID NO: 60998 - DNA, 517 bp, Homo sapiens
  chr1:157895153-157895670
  hypo
tctgaatctgctagccggcggctccctgctggggtcagtttccttctgtagcagcgaggatgctccaaggtgacgacaagaaacagggcgtgaggagggtaagaggccctatgggcactgtagtcttgtgatgggggaggtggtggcagcggcagcggtggcagagagctagaggagggtgagaaggtggacgcggggccatgtatcccgagctcttcaccagagcccagcacagctctgccggaagcacccctgcagggttagaccagcaggtgcgaggtgcgacgtgggaaagagtccagggccggcggggtgctatgaggcgaggacttcctgagccgaggaccgggtgggttgtgagttgcgaccagcctcgctgacggaccctactacctctttcagttccagtgtcgcgtcttctcctcagcttcattgctcctggcgccctggccttcattggccatgtggtggagcttcactgcgaagacaggagagcgtctgcacccattctgttttg

SEQ ID NO: 60999 - DNA, 83 bp, Homo sapiens
  chr1:158098451-158098534
  hypo
aatgtgtagtctatgccgttttatcatacctgtagattcttgcagccaccgctgcaatcaagataacagaactattttatcac

SEQ ID NO: 61000 - DNA, 506 bp, Homo sapiens; identical to SEQ ID NO: 867
  chr1:158150550-158151056
  hypo

SEQ ID NO: 61001 - DNA, 22 bp, Homo sapiens
  chr1:158151116-158151138
  hypo
cggcacagagttcgctggcatc

SEQ ID NO: 61002 - DNA, 154 bp, Homo sapiens; identical to SEQ ID NO: 15018
  chr1:158237093-158237247
  hypo

SEQ ID NO: 61003 - DNA, 246 bp, Homo sapiens; identical to SEQ ID NO: 15019
  chr1:158669636-158669882
  hypo

SEQ ID NO: 61004 - DNA, 115 bp, Homo sapiens; identical to SEQ ID NO: 15020
  chr1:158710950-158711065
  hypo

SEQ ID NO: 61005 - DNA, 30 bp, Homo sapiens; identical to SEQ ID NO: 15021
  chr1:158736097-158736127
  hypo

SEQ ID NO: 61006 - DNA, 34 bp, Homo sapiens; identical to SEQ ID NO: 15022
  chr1:158753869-158753903
  hypo

SEQ ID NO: 61007 - DNA, 29 bp, Homo sapiens
  chr1:158815317-158815346
  hypo
ccgcgcccggcctcctgctcaaagtttta

SEQ ID NO: 61008 - DNA, 23 bp, Homo sapiens
  chr1:158855869-158855892
  hypo
ggagtaaaagaataatgtagccg

SEQ ID NO: 61009 - DNA, 121 bp, Homo sapiens
  chr1:158992058-158992179
  hypo
cccactttttgatgggattatttgtatgtgcaatgcttgttccctggtgccataaataaatagcatttgaatatcaatttaattttttcagcaaggccatttttatactttttgtagaaag

SEQ ID NO: 61010 - DNA, 60 bp, Homo sapiens; identical to SEQ ID NO: 868
  chr1:159141702-159141762
  hypo

SEQ ID NO: 61011 - DNA, 40 bp, Homo sapiens; identical to SEQ ID NO: 15026
  chr1:159202103-159202143
  hypo

SEQ ID NO: 61012 - DNA, 46 bp, Homo sapiens; identical to SEQ ID NO: 15027
  chr1:159229595-159229641
  hypo

SEQ ID NO: 61013 - DNA, 30 bp, Homo sapiens
  chr1:159266991-159267021
  hypo
cttcaaacttcctaacgccacttctgcaga

SEQ ID NO: 61014 - DNA, 23 bp, Homo sapiens
  chr1:159650194-159650217
  hypo
ccggcccactttttttaaactaa

SEQ ID NO: 61015 - DNA, 35 bp, Homo sapiens; identical to SEQ ID NO: 36375
  chr1:159750816-159750851
  hypo

SEQ ID NO: 61016 - DNA, 438 bp, Homo sapiens; identical to SEQ ID NO: 36376
  chr1:159824586-159825024
  hypo

SEQ ID NO: 61017 - DNA, 176 bp, Homo sapiens
  chr1:159842713-159842889
  hypo
aggaggagattccagcgcacctcagctcttcaagctttttcctcttgatctcatcgatgcgctcacggcgtttctgggcctcctctttgaggcgccggccctcctcaaaggtggcaatccggttctgcacttccttctgctggttctcgcgcacctggcgccggagctcattggca

SEQ ID NO: 61018 - DNA, 142 bp, Homo sapiens
  chr1:159869542-159869684
  hypo
caccgcgcccggcccaccagtgctttttcccacaccacatccacaatctttggtccacagaggccccgctgtaatggcaacggggagagggttggggcatccctttctccccaactcctccgctcagcgcgctccacatttc

SEQ ID NO: 61019 - DNA, 30 bp, Homo sapiens
  chr1:159897041-159897071
  hypo
aggggcagtgccctcgtttgaaactaggtc

SEQ ID NO: 61020 - DNA, 195 bp, Homo sapiens
  chr1:159909832-159910027
  hypo
tacaggccatctaatattaggcgttgtcaccatatttaatcctcccaagaattccattgtagctgaaggaattaatgttaagtttctttccaaaatcacatggctagtaagtgacaaagccaggcttctttctccagacgcggcgtgctttccatggacacgggtgttaggaccgagtgctgttcagggcactgg

SEQ ID NO: 61021 - DNA, 102 bp, Homo sapiens; identical to SEQ ID NO: 15030
  chr1:159931576-159931678
  hypo

SEQ ID NO: 61022 - DNA, 241 bp, Homo sapiens
  chr1:159931917-159932158
  hypo
agcctggggacagagcaagactccatctcaaaaaaaaaaaaggtttacctttgacggcaaggggaacagaggatgggaggcaaagggaaaacatggggtagagggataattttattgccaatgatttcgttttaagagtggagatgaggctacaaagatggactgcaggcggctcactgggggtatatagacctactgagtttataagttatgcactcaagaagtttacctttggcccggg

SEQ ID NO: 61023 - DNA, 42 bp, Homo sapiens
  chr1:159932217-159932259
  hypo
tgaacatatttaaatgctgacgagcagatccagtaggaatag

SEQ ID NO: 61024 - DNA, 30 bp, Homo sapiens
  chr1:160012192-160012222
  hypo
tgtgctccattctcacgttgctgcgaccat

SEQ ID NO: 61025 - DNA, 23 bp, Homo sapiens
  chr1:160012719-160012742
  hypo
ccgtctcaaaaaaaaaaaaaagt

SEQ ID NO: 61026 - DNA, 30 bp, Homo sapiens; identical to SEQ ID NO: 15034
  chr1:160058299-160058329
  hypo

SEQ ID NO: 61027 - DNA, 61 bp, Homo sapiens; identical to SEQ ID NO: 15035
  chr1:160063719-160063780
  hypo

SEQ ID NO: 61028 - DNA, 30 bp, Homo sapiens; identical to SEQ ID NO: 877
  chr1:160093911-160093941
  hypo

SEQ ID NO: 61029 - DNA, 30 bp, Homo sapiens
  chr1:160097217-160097247
  hypo
ggcctccagatctgcggctttggctcacct

SEQ ID NO: 61030 - DNA, 30 bp, Homo sapiens
  chr1:160121268-160121298
  hypo
cagacctggaccatcgccaaggcaagactt

SEQ ID NO: 61031 - DNA, 43 bp, Homo sapiens
  chr1:160121589-160121632
  hypo
tcctcttcccagcggacggctggaggaccgctcagtctctcct

SEQ ID NO: 61032 - DNA, 25 bp, Homo sapiens
  chr1:160135222-160135247
  hypo
atattattgttatctcctccacgtt

SEQ ID NO: 61033 - DNA, 30 bp, Homo sapiens
  chr1:160146137-160146167
  hypo
tatgatccagctctcgcacctcctgcaaga

SEQ ID NO: 61034 - DNA, 30 bp, Homo sapiens
  chr1:160171133-160171163
  hypo
acagaggacgatgacgatgatgatgatgac

SEQ ID NO: 61035 - DNA, 31 bp, Homo sapiens; identical to SEQ ID NO: 878
  chr1:160175619-160175650
  hypo

SEQ ID NO: 61036 - DNA, 25 bp, Homo sapiens
  chr1:160214686-160214711
  hypo
ccacgcccagcccaactaacttcaa

SEQ ID NO: 61037 - DNA, 268 bp, Homo sapiens
  chr1:160255642-160255910
  hypo
attgtttccctcaaatattatcttttctgaaacgctttccttggccattcccgttccttttcttcctaacactgaacagtatctgacatactatctaccgtacttttttattctccgctccccaccctgcagaatttaaacaccatgaacgcaaagattttcgtctgttgtcttcactgctgtaaagcccaactcccaggctagggtttaaaacttagtaggcattcattggccactctttgctctcgcagtccctaatcaggcacat

SEQ ID NO: 61038 - DNA, 148 bp, Homo sapiens; identical to SEQ ID NO: 15039
  chr1:160293180-160293328
  hypo

SEQ ID NO: 61039 - DNA, 192 bp, Homo sapiens; identical to SEQ ID NO: 36390
  chr1:160370193-160370385
  hypo

SEQ ID NO: 61040 - DNA, 157 bp, Homo sapiens
  chr1:160385714-160385871
  hypo
ggtgacatgcgtggcggagggagggttgggggctgttaagaggtgggcacgtgcaggggtggtagggtagagtggctgctgagaagaccctggtccaccactggactttctgtgccttttctggcttcctgccgcagggaccgccgggaccgacacc

SEQ ID NO: 61041 - DNA, 30 bp, Homo sapiens
  chr1:160389359-160389389
  hypo
ccgacggcgccagccgcttctacaacgttg

SEQ ID NO: 61042 - DNA, 30 bp, Homo sapiens
  chr1:160508436-160508466
  hypo
gcctcccaatacaggcgtgagccactgtgc

SEQ ID NO: 61043 - DNA, 28 bp, Homo sapiens
  chr1:160524876-160524904
  hypo
ttttttttttttgagacggagtcttgct

SEQ ID NO: 61044 - DNA, 189 bp, Homo sapiens; identical to SEQ ID NO: 881
  chr1:160526914-160527103
  hypo

SEQ ID NO: 61045 - DNA, 52 bp, Homo sapiens; identical to SEQ ID NO: 15042
  chr1:160693909-160693961
  hypo

SEQ ID NO: 61046 - DNA, 35 bp, Homo sapiens
  chr1:160752823-160752858
  hypo
tggggtgaaaacaaccctgaacgcaggtgactcta

SEQ ID NO: 61047 - DNA, 234 bp, Homo sapiens
  chr1:160771681-160771915
  hypo
cacgtgtgagcgtgcgggagggctaggccctcgcccccacctgccactggagaccgctccgccatccccacctcaccgccgcgcagcagagctggaagggtcctgccgatgggaccctgccaggcccagtgccactgccccccgaggctgctagacgtgggcgttaggcgtgtcccacccacccgccgcctcccatggcacgtcgggaacaccggagccgccaacttggagact

SEQ ID NO: 61048 - DNA, 30 bp, Homo sapiens; identical to SEQ ID NO: 15044
  chr1:160772122-160772152
  hypo

SEQ ID NO: 61049 - DNA, 30 bp, Homo sapiens
  chr1:160865082-160865112
  hypo
ctgggcgggtgaaacgattaccacccatag

SEQ ID NO: 61050 - DNA, 128 bp, Homo sapiens
  chr1:160878332-160878460
  hypo
gggaatattgggctttctcctcgagaacaggtaggagacaactgaacccctcctgatgatgaaagacctgtcgttggagaatcgaccagcaatgatagcgatgactcggaaggcatctgacattacct

SEQ ID NO: 61051 - DNA, 46 bp, Homo sapiens
  chr1:160902455-160902501
  hypo
ccctctccctctgtccttctccggctttccacggtctccctctgtt

SEQ ID NO: 61052 - DNA, 56 bp, Homo sapiens
  chr1:160924873-160924929
  hypo
tatctaatcagattcgtggataggtcacaatcctcccctgcgttctccctctccca

SEQ ID NO: 61053 - DNA, 30 bp, Homo sapiens; identical to SEQ ID NO: 882
  chr1:160948028-160948058
  hypo

SEQ ID NO: 61054 - DNA, 323 bp, Homo sapiens
  chr1:160953509-160953832
  hypo
attagaggcagaatacgattttttttccctttttttttttttaatgtagagtgtctcgctctatcgcccggtggtgcagtgccaaagatcataactcacggcaggctcaaactcctgggctccagcgggtctcccacttcggcctaccaaagtgctgggattacagtgcgaaccacggctccagggacaataactgcaatattaaagtaactgaagcttcaggcccccgtccaaggtcctgtacccaattttgtattttttcttaaagagatcctcaatcggtgccgggctcagtgactcacgcctgtaatcccagcacttgg

SEQ ID NO: 61055 - DNA, 37 bp, Homo sapiens
  chr1:160985843-160985880
  hypo
gtggccaggtgcaggggttcacgcctgtaatcccagc

SEQ ID NO: 61056 - DNA, 18 bp, Homo sapiens
  chr1:160987544-160987562
  hypo
ccaccttacgagaaacac

SEQ ID NO: 61057 - DNA, 24 bp, Homo sapiens
  chr1:160992337-160992361
  hypo
ttaatagtcttggccgggtgcgtg

SEQ ID NO: 61058 - DNA, 30 bp, Homo sapiens; identical to SEQ ID NO: 15048
  chr1:161004656-161004686
  hypo

SEQ ID NO: 61059 - DNA, 256 bp, Homo sapiens
  chr1:161044439-161044695
  hypo
actcattgctgacatggcagacgtagatgccgctgtgctcagtggtcagtgggggaaagcccaaagtgtccccatccactcgtaccccactgggcagaggcccatccagcctggaagacagggaagctgaagggtgccagccgggaagggctgaagccaccaccacccaacgtgtccagacagctctccaccctccacccccatgacgtcacccagagccgcaggctgttcccacggtgcccctccctccaccagg

SEQ ID NO: 61060 - DNA, 20 bp, Homo sapiens
  chr1:161122835-161122855
  hypo
gtctccaaaaaaaaaaaaaa

SEQ ID NO: 61061 - DNA, 190 bp, Homo sapiens
  chr1:161145674-161145864
  hypo
ctgaggttactgtagacatcacgagggtgagaatagtcaaatgtcggtccctgatctcggccaaatagggcactgagacttcggaagccccccagtgacaggtacatcatgacagccagctgggagcccacaagcagggccagcgtgcaaggccgctccagcagcctccgcaacatcctgggggtgagat

SEQ ID NO: 61062 - DNA, 30 bp, Homo sapiens
  chr1:161305960-161305990
  hypo
ttaggaggcccggtgcggtggctcatgcct

SEQ ID NO: 61063 - DNA, 31 bp, Homo sapiens
  chr1:161342806-161342837
  hypo
gcgagactccgtctcaacaaaaaaaagattt

SEQ ID NO: 61064 - DNA, 22 bp, Homo sapiens
  chr1:161361044-161361066
  hypo
tgggtgtggtggcagtcgcctg

SEQ ID NO: 61065 - DNA, 241 bp, Homo sapiens; identical to SEQ ID NO: 15051
  chr1:161367366-161367607
  hypo

SEQ ID NO: 61066 - DNA, 165 bp, Homo sapiens
  chr1:161367786-161367951
  hypo
ggccaaaaaatgttttattttaaattcaaaatgctgtaatggaggctgggtgcagtggctttttttactcagcatacttgagattcatgttgttgtatatgtgagcagttccgtcctttttttggctgagtaacattccattgtatggatcggtctttcacttgt

SEQ ID NO: 61067 - DNA, 698 bp, Homo sapiens; identical to SEQ ID NO: 891
  chr1:161369560-161370258
  hypo

SEQ ID NO: 61068 - DNA, 37 bp, Homo sapiens
  chr1:161370746-161370783
  hypo
actggatgaaagagcaaaacttcgtcaaaaaaaaaaa

SEQ ID NO: 61069 - DNA, 40 bp, Homo sapiens; identical to SEQ ID NO: 892
  chr1:161410664-161410704
  hypo

SEQ ID NO: 61070 - DNA, 197 bp, Homo sapiens; identical to SEQ ID NO: 15055
  chr1:161450370-161450567
  hypo

SEQ ID NO: 61071 - DNA, 31 bp, Homo sapiens; identical to SEQ ID NO: 15056
  chr1:161466295-161466326
  hypo

SEQ ID NO: 61072 - DNA, 31 bp, Homo sapiens; identical to SEQ ID NO: 15057
  chr1:161466385-161466416
  hypo

SEQ ID NO: 61073 - DNA, 30 bp, Homo sapiens; identical to SEQ ID NO: 895
  chr1:161601157-161601187
  hypo

SEQ ID NO: 61074 - DNA, 24 bp, Homo sapiens
  chr1:161662015-161662039
  hypo
ttttgttttgtttttttgagacgg

SEQ ID NO: 61075 - DNA, 30 bp, Homo sapiens
  chr1:161860368-161860398
  hypo
cccgccagccaggccgccaggtaggtggaa

SEQ ID NO: 61076 - DNA, 26 bp, Homo sapiens
  chr1:161910636-161910662
  hypo
ccaccgtgcctggccagaaaatgttc

SEQ ID NO: 61077 - DNA, 243 bp, Homo sapiens; identical to SEQ ID NO: 15060
  chr1:161953578-161953821
  hypo

SEQ ID NO: 61078 - DNA, 30 bp, Homo sapiens
  chr1:161954642-161954672
  hypo
gtaatagttggttacgtaaatccgctcatc

SEQ ID NO: 61079 - DNA, 782 bp, Homo sapiens; identical to SEQ ID NO: 898
  chr1:162039283-162040065
  hypo

SEQ ID NO: 61080 - DNA, 30 bp, Homo sapiens; identical to SEQ ID NO: 36425
  chr1:162058274-162058304
  hypo

SEQ ID NO: 61081 - DNA, 46 bp, Homo sapiens; identical to SEQ ID NO: 15062
  chr1:162116824-162116870
  hypo

SEQ ID NO: 61082 - DNA, 86 bp, Homo sapiens; identical to SEQ ID NO: 15063
  chr1:162335160-162335246
  hypo

SEQ ID NO: 61083 - DNA, 225 bp, Homo sapiens
  chr1:162343770-162343995
  hypo
gacagcaggctgtgcggggtgacctcagactggacagaaggctgtgactaactttattggcatctctctagagacataagtaggcttcaccgccaatttgcctaaggtgttcagcaggactattgaaggcctggcagctgccggaggagagcctgtctcccagccgggccttctgctccttgctccagagggctttgagcttgcggtagtacaccttgcagctga

SEQ ID NO: 61084 - DNA, 86 bp, Homo sapiens
  chr1:162344601-162344687
  hypo
taggggtacaaagggccgttggatcttggggcaggagaggctgcttttagttggtaagccttggtatttgtcgaggccttcccctc

SEQ ID NO: 61085 - DNA, 49 bp, Homo sapiens
  chr1:162346579-162346628
  hypo
tattctgaccactgcgggggtacagagatcacacgcctgctctggagag

SEQ ID NO: 61086 - DNA, 30 bp, Homo sapiens; identical to SEQ ID NO: 15065
  chr1:162351042-162351072
  hypo

SEQ ID NO: 61087 - DNA, 154 bp, Homo sapiens
  chr1:162351642-162351796
  hypo
ttcctcatcatgcctctctgtcgcctctttgttcatagttgaccacggcatgtttgagaatttgaacacagccctcactccaaagctccaggccagccgctccttcccccacttgtccaagcccgtggcccccggctctgcccctctgggctct

SEQ ID NO: 61088 - DNA, 30 bp, Homo sapiens; identical to SEQ ID NO: 36426
  chr1:162393905-162393935
  hypo

SEQ ID NO: 61089 - DNA, 38 bp, Homo sapiens; identical to SEQ ID NO: 15066
  chr1:162426946-162426984
  hypo

SEQ ID NO: 61090 - DNA, 37 bp, Homo sapiens; identical to SEQ ID NO: 15067
  chr1:162427223-162427260
  hypo

SEQ ID NO: 61091 - DNA, 163 bp, Homo sapiens
  chr1:162428145-162428308
  hypo
gtcagagaagtggttttcatgcgcgtttgcctaatgactaatgtgttgaacgacttttcacgtgctggcaaataagcacatgaaatgcacatgaaaaccagatgagacaccactccatacatatgataatgtctaaaattacggtgagcagaccaactatttg

SEQ ID NO: 61092 - DNA, 30 bp, Homo sapiens; identical to SEQ ID NO: 36430
  chr1:162660818-162660848
  hypo

SEQ ID NO: 61093 - DNA, 31 bp, Homo sapiens; identical to SEQ ID NO: 902
  chr1:163378140-163378171
  hypo

SEQ ID NO: 61094 - DNA, 90 bp, Homo sapiens; identical to SEQ ID NO: 903
  chr1:163378350-163378440
  hypo

SEQ ID NO: 61095 - DNA, 287 bp, Homo sapiens
  chr1:163392833-163393120
  hypo
cattgccttctcagttgtccccgccagtggtattgtggtattgccggcccccacctcccgcacagcggtgcttcacggaattcctgaggcgtactgggagcaccggcacagccgccgccatttcccggcaggggcacatgggagcgacagcgaggcgtcagggccggaagtgtccctgtctttgccctcgttggctactgcggggcaggctgggaccgaggctgtgtgcagaggcctttggtggctgcgcacgttggggaggggacgtagaactcagagtgattttg

SEQ ID NO: 61096 - DNA, 46 bp, Homo sapiens; identical to SEQ ID NO: 15070
  chr1:163872822-163872868
  hypo

SEQ ID NO: 61097 - DNA, 30 bp, Homo sapiens
  chr1:164325916-164325946
  hypo
cgtggaggcagctagcgcgaggctggggag

SEQ ID NO: 61098 - DNA, 35 bp, Homo sapiens; identical to SEQ ID NO: 15071
  chr1:164518129-164518164
  hypo

SEQ ID NO: 61099 - DNA, 44 bp, Homo sapiens
  chr1:164550440-164550484
  hypo
atatccagcagctccccgaccgccatttttttttttttttttga

SEQ ID NO: 61100 - DNA, 43 bp, Homo sapiens
  chr1:164550723-164550766
  hypo
aagtggtgggattacaggcatgagccaccgcacccagccccct

SEQ ID NO: 61101 - DNA, 25 bp, Homo sapiens
  chr1:164563531-164563556
  hypo
tacttttctttttttttgagacgga

SEQ ID NO: 61102 - DNA, 28 bp, Homo sapiens
  chr1:164570177-164570205
  hypo
aatagcagacacagggctgggcgcagtg

SEQ ID NO: 61103 - DNA, 31 bp, Homo sapiens; identical to SEQ ID NO: 15075
  chr1:164579428-164579459
  hypo

SEQ ID NO: 61104 - DNA, 105 bp, Homo sapiens
  chr1:164590519-164590624
  hypo
ttcctcccctattttcttaacagtcttccttctctttctgtctgtctgtatttgtattttgccttccttttcttttatccccaacgggggcgagaattaggttcc

SEQ ID NO: 61105 - DNA, 174 bp, Homo sapiens; identical to SEQ ID NO: 15076
  chr1:164604711-164604885
  hypo

SEQ ID NO: 61106 - DNA, 123 bp, Homo sapiens
  chr1:164637869-164637992
  hypo
tgtaacatactcttcccctttcgccttaccttccccaggcgcagccaacacttgacatctttttatcagatgagcttggcactgccaggaccggctcctcgcgccaatgtggcagcagccaca

SEQ ID NO: 61107 - DNA, 126 bp, Homo sapiens
  chr1:164651957-164652083
  hypo
gagtaatcaggccactgtgctcggggacataaaacctgtggctgctgccattgcagagtcccgtcatggatcagagttcgtccctgggaaacaacttgtgccgacggaaggagttcttcctttgct

SEQ ID NO: 61108 - DNA, 26 bp, Homo sapiens
  chr1:164655944-164655970
  hypo
gtgatctttgggaggctgaggcgggc

SEQ ID NO: 61109 - DNA, 25 bp, Homo sapiens
  chr1:164656209-164656234
  hypo
aaacgaaaacaaaaacaaaaccaaa

SEQ ID NO: 61110 - DNA, 272 bp, Homo sapiens
  chr1:164667271-164667543
  hypo
ttggattttctagtgtcgggctcttctcttttttaggaagggagaagcgggtctgggaaattaaagtgcctgtatctcccagggcaccgattgttaagagggttgggacctcagtatgttttttttccattctgccacacctgagatagaaaaaagaaataccacggtccctcgggtagcagtagagggtgagagcaagactcctacctctgaatgccgttagatttagaagttcattttgactgctttacgatacaaagttgagtaataat

SEQ ID NO: 61111 - DNA, 23 bp, Homo sapiens
  chr1:164680517-164680540
  hypo
tgaaacagagtcttgctctgtcg

SEQ ID NO: 61112 - DNA, 30 bp, Homo sapiens
  chr1:164714292-164714322
  hypo
cagagagcagcagaacgttgctgaaggcca

SEQ ID NO: 61113 - DNA, 43 bp, Homo sapiens
  chr1:164723969-164724012
  hypo
gtttatgggcatgatatgcttcgtgatttttttgtgttaagta

SEQ ID NO: 61114 - DNA, 10 bp, Homo sapiens
  chr1:164730963-164730973
  hypo
gccaccgcgc

SEQ ID NO: 61115 - DNA, 20 bp, Homo sapiens
  chr1:164736212-164736232
  hypo
cctcagcctcccaaagtgct

SEQ ID NO: 61116 - DNA, 194 bp, Homo sapiens
  chr1:164753546-164753740
  hypo
cctcgcccaggcagccggcacccatccagaaaggcaggggcctatcgcccagcacattagctttctccctgccagctggcccagggaggcgcagcgtgccaagtggggaacgtgtgaatgggatccatgcccatgcatcccctgagaagtagaaaatgcacgtgaccagaaccgccaaaacctaacccagggaa

SEQ ID NO: 61117 - DNA, 337 bp, Homo sapiens
  chr1:164761682-164762019
  hypo
tctttcttgggttactattaacgctcccttccctgtctttttctgtagttttgagtatccgaggagcccaggaggaggaacccacagacccccagctgatgcggctggacaacatgctgttagcggaaggcgtggcggggcctgagaagggcggagggtcggcggcagcggcggcagcggcggcggcttctggaggggcaggttcagacaactcagtggagcattcagattacagagccaaactctcacagatcagacaaatctaccatacggagctggagaaatacgagcaggtaaccagaaccacctggggctcggcacccaggccctttaggaa

SEQ ID NO: 61118 - DNA, 37 bp, Homo sapiens; identical to SEQ ID NO: 15085
  chr1:164765527-164765564
  hypo

SEQ ID NO: 61119 - DNA, 557 bp, Homo sapiens
  chr1:164768738-164769295
  hypo
ataaataaaaataaaaattcaacattatcgccaaaactttgagccacaggggctgaaagggacgtctaccacaaactatcctagttttctttatttgcacaagtctctagaaaagcccacgtggcctaatgtcatagacttgatgcgtgttgaggcttggaccctcaatgacggtgttgattgtcctgccattccaggcctgcaacgagttcaccacccacgtgatgaatctcctgcgagagcaaagccggaccaggcccatctccccaaaggagattgagcggatggtcagcatcatccaccgcaagttcagctccatccagatgcagctcaagcagagcacgtgcgaggcggtgatgatcctgcgttcccgatttctggatgcgcggtgagtctcccatggggctgtcctgccctctctgggagtccctgatctggggctggagtccacagccgctgcccccttcaggctctagtttcaccccatcaacgctgaaccaagtgataccctgaggatggttctgcgagactagatgggccatcggtttcacacagta

SEQ ID NO: 61120 - DNA, 89 bp, Homo sapiens
  chr1:164776127-164776216
  hypo
gtatcaccctcttcactttcacggaagaagctgatcgaaatcacccagctgatattcaattgaccgaggattcaaaaccaagatggggc

SEQ ID NO: 61121 - DNA, 194 bp, Homo sapiens; identical to SEQ ID NO: 15086
  chr1:164790952-164791146
  hypo

SEQ ID NO: 61122 - DNA, 174 bp, Homo sapiens; identical to SEQ ID NO: 36440
  chr1:165204522-165204696
  hypo

SEQ ID NO: 61123 - DNA, 736 bp, Homo sapiens; identical to SEQ ID NO: 36441
  chr1:165204732-165205468
  hypo

SEQ ID NO: 61124 - DNA, 988 bp, Homo sapiens; identical to SEQ ID NO: 36446
  chr1:165324196-165325184
  hypo

SEQ ID NO: 61125 - DNA, 310 bp, Homo sapiens; identical to SEQ ID NO: 36447
  chr1:165325538-165325848
  hypo

SEQ ID NO: 61126 - DNA, 151 bp, Homo sapiens; identical to SEQ ID NO: 36449
  chr1:165345283-165345434
  hypo

SEQ ID NO: 61127 - DNA, 33 bp, Homo sapiens
  chr1:165495512-165495545
  hypo
agctagttaaagaattcaggccgggcgcagtgg

SEQ ID NO: 61128 - DNA, 24 bp, Homo sapiens
  chr1:165591139-165591163
  hypo
ctggcacagtggctcacgcctgta

SEQ ID NO: 61129 - DNA, 730 bp, Homo sapiens; identical to SEQ ID NO: 918
  chr1:166134160-166134890
  hypo

SEQ ID NO: 61130 - DNA, 772 bp, Homo sapiens; identical to SEQ ID NO: 36458
  chr1:166134933-166135705
  hypo

SEQ ID NO: 61131 - DNA, 30 bp, Homo sapiens; identical to SEQ ID NO: 36459
  chr1:166136044-166136074
  hypo

SEQ ID NO: 61132 - DNA, 29 bp, Homo sapiens
  chr1:166317393-166317422
  hypo
caagaaatgctgtgagggtggcgggcgcc

SEQ ID NO: 61133 - DNA, 28 bp, Homo sapiens
  chr1:166317541-166317569
  hypo
agactccgtctcaaaaaaaaaaaaaaaa

SEQ ID NO: 61134 - DNA, 37 bp, Homo sapiens
  chr1:166479111-166479148
  hypo
ctctcttttttttttttgagacggagtctctctctgt

SEQ ID NO: 61135 - DNA, 36 bp, Homo sapiens
  chr1:166479387-166479423
  hypo
tgagccaccgcgcccggcaatctgactcctctctta

SEQ ID NO: 61136 - DNA, 17 bp, Homo sapiens
  chr1:166579268-166579285
  hypo
tgaagggggccagcccg

SEQ ID NO: 61137 - DNA, 32 bp, Homo sapiens
  chr1:166958566-166958598
  hypo
ccaggaagtttgaccgcgctgccatgccgaac

SEQ ID NO: 61138 - DNA, 30 bp, Homo sapiens; identical to SEQ ID NO: 15091
  chr1:166959015-166959045
  hypo

SEQ ID NO: 61139 - DNA, 30 bp, Homo sapiens; identical to SEQ ID NO: 15092
  chr1:167042607-167042637
  hypo

SEQ ID NO: 61140 - DNA, 30 bp, Homo sapiens; identical to SEQ ID NO: 15093
  chr1:167063943-167063973
  hypo

SEQ ID NO: 61141 - DNA, 31 bp, Homo sapiens
  chr1:167065623-167065654
  hypo
ggataggtgacagtttcgtgtattgctaaga

SEQ ID NO: 61142 - DNA, 30 bp, Homo sapiens; identical to SEQ ID NO: 15094
  chr1:167088543-167088573
  hypo

SEQ ID NO: 61143 - DNA, 239 bp, Homo sapiens; identical to SEQ ID NO: 36471
  chr1:167090626-167090865
  hypo

SEQ ID NO: 61144 - DNA, 280 bp, Homo sapiens; identical to SEQ ID NO: 15095
  chr1:167096196-167096476
  hypo

SEQ ID NO: 61145 - DNA, 238 bp, Homo sapiens; identical to SEQ ID NO: 925
  chr1:167190163-167190401
  hypo

SEQ ID NO: 61146 - DNA, 99 bp, Homo sapiens; identical to SEQ ID NO: 15097
  chr1:167221024-167221123
  hypo

SEQ ID NO: 61147 - DNA, 267 bp, Homo sapiens
  chr1:167393531-167393798
  hypo
gtatcttccctaaggtcaggtcggggaaagaaagacttccagcttcttacctctgcgtgcatgggcacgtgtgcattgctcagtccgcaggaggtctcactccgcaggaaacgctctcctcccgcataagtctgtacttccatcccctcatctgtggtagtagtgaaggctaggtgagtaagcgtgggctgttctacccaccagaagtccaggagctgttgtatacctcatttctaactcgtgaccgagtgacttgctttaactttc

SEQ ID NO: 61148 - DNA, 30 bp, Homo sapiens
  chr1:167411780-167411810
  hypo
gaggcaccgagtattcgggttcagagcaca

SEQ ID NO: 61149 - DNA, 47 bp, Homo sapiens; identical to SEQ ID NO: 926
  chr1:167423948-167423995
  hypo

SEQ ID NO: 61150 - DNA, 117 bp, Homo sapiens
  chr1:167486868-167486985
  hypo
tcgtctcatctgccccgtgttctgtcaatgccgggccctctggctgggctagatggccgcctaaggggcaggctggggtgagtcacggagcctgggatggtgcgtcacccggcagtc

SEQ ID NO: 61151 - DNA, 162 bp, Homo sapiens; identical to SEQ ID NO: 15100
  chr1:167487338-167487500
  hypo

SEQ ID NO: 61152 - DNA, 217 bp, Homo sapiens; identical to SEQ ID NO: 15101
  chr1:167524972-167525189
  hypo

SEQ ID NO: 61153 - DNA, 777 bp, Homo sapiens; identical to SEQ ID NO: 36480
  chr1:167599107-167599884
  hypo

SEQ ID NO: 61154 - DNA, 23 bp, Homo sapiens
  chr1:167741350-167741373
  hypo
ccgaaaaaaggaggagagagagg

SEQ ID NO: 61155 - DNA, 30 bp, Homo sapiens
  chr1:167819120-167819150
  hypo
gttaggggaatggagcggcccagcgtgact

SEQ ID NO: 61156 - DNA, 81 bp, Homo sapiens; identical to SEQ ID NO: 15103
  chr1:167823387-167823468
  hypo

SEQ ID NO: 61157 - DNA, 43 bp, Homo sapiens
  chr1:167844892-167844935
  hypo
aagaagtactacttggctgggcgcagtgactcacgcctgtaat

SEQ ID NO: 61158 - DNA, 40 bp, Homo sapiens
  chr1:167852541-167852581
  hypo
ctgggattacaggcgtgagccaccacgcccagcctctagg

SEQ ID NO: 61159 - DNA, 21 bp, Homo sapiens
  chr1:168054672-168054693
  hypo
acagtgacatgctcccaaggc

SEQ ID NO: 61160 - DNA, 71 bp, Homo sapiens
  chr1:168054754-168054825
  hypo
gcaccctgaggccctcatctctgctcggcagctaaaacatctccttcttcgatgctctgcaactgcagcct

SEQ ID NO: 61161 - DNA, 66 bp, Homo sapiens; identical to SEQ ID NO: 15104
  chr1:168058061-168058127
  hypo

SEQ ID NO: 61162 - DNA, 22 bp, Homo sapiens
  chr1:168101995-168102017
  hypo
ttttaagatggagtttcgctct

SEQ ID NO: 61163 - DNA, 30 bp, Homo sapiens
  chr1:168107375-168107405
  hypo
agagtctaggtcacgcggcaagccagacac

SEQ ID NO: 61164 - DNA, 46 bp, Homo sapiens
  chr1:168116115-168116161
  hypo
ctattacctattagaactacacgtagaagccgggtgcggtggctct

SEQ ID NO: 61165 - DNA, 241 bp, Homo sapiens; identical to SEQ ID NO: 15105
  chr1:168150754-168150995
  hypo

SEQ ID NO: 61166 - DNA, 37 bp, Homo sapiens; identical to SEQ ID NO: 15106
  chr1:168151294-168151331
  hypo

SEQ ID NO: 61167 - DNA, 33 bp, Homo sapiens; identical to SEQ ID NO: 15107
  chr1:168151563-168151596
  hypo

SEQ ID NO: 61168 - DNA, 187 bp, Homo sapiens
  chr1:168260493-168260680
  hypo
ctggaagtacgtcaacggggaatgggtgcccgctggcaagccagaggtctccagccacagctgcgtctacattcacccggactcccccaactttggggcccactggatgaaagctcccatctccttcagcaaagtgaagctgaccaacaagctcaatggaggcgggcaggtacgaatgaggcgggca

SEQ ID NO: 61169 - DNA, 234 bp, Homo sapiens
  chr1:168399586-168399820
  hypo
attcttggcagagtacgagagaaaggcctgactgaagccatcaaacttctttcagggagctgttggctgcaaggagagcctcagctgaggacagtgtctgagagaataacctcctcaggccccgcggagggacggatgcgtgcgggtcacagccagccattgctcagagcagcgtgggcggccgggagggcccacacagcacttgactgctgcgctgcagccatcattcccagc

SEQ ID NO: 61170 - DNA, 32 bp, Homo sapiens
  chr1:168698960-168698992
  hypo
cccttgagtataagcgcgggtataccagtttg

SEQ ID NO: 61171 - DNA, 27 bp, Homo sapiens
  chr1:168847750-168847777
  hypo
tggatttggccaggcacggtggttcat

SEQ ID NO: 61172 - DNA, 84 bp, Homo sapiens
  chr1:168878545-168878629
  hypo
cagtggagtggtattcgagaagttttgcaaaggagaggagagccttgaggatacgaagcagagtggccagccatcaaaagttga

SEQ ID NO: 61173 - DNA, 127 bp, Homo sapiens
  chr1:168882769-168882896
  hypo
aagttttcatagctaacgaagaggtggggccaaaattcaaaccaagacacttcattgccaaacagtgtctgtgctcttaaagtccgatgcctccctaccccaagactccctccgacaagcagcaggg

SEQ ID NO: 61174 - DNA, 284 bp, Homo sapiens; identical to SEQ ID NO: 36493
  chr1:169076041-169076325
  hypo

SEQ ID NO: 61175 - DNA, 30 bp, Homo sapiens
  chr1:169342757-169342787
  hypo
agccctggctcttacggcctgtttacctat

SEQ ID NO: 61176 - DNA, 42 bp, Homo sapiens
  chr1:169355661-169355703
  hypo
aaaactgacctcctggggggccgaggcaggcagatcacaagg

SEQ ID NO: 61177 - DNA, 29 bp, Homo sapiens
  chr1:169457177-169457206
  hypo
gagtactcgtctcaaaaaacaaaacaaca

SEQ ID NO: 61178 - DNA, 89 bp, Homo sapiens
  chr1:169575558-169575647
  hypo
aatgtatgtatatcaagtacaatgcagatagaatgtttatactgaatccacacatttctttcttctgagaatcccgtaacctccagtat

SEQ ID NO: 61179 - DNA, 184 bp, Homo sapiens
  chr1:169838010-169838194
  hypo
caagagcaggcagcagtgttccggaagcagctggcgtcaccacaccagatgccctcacctgaagaagtcatgagatagtaaggtgcagagcgctggccgacattttggaatgggattcagcaaagttgagtgcaaggtctgttgaaagctggagagaacatccgctgaaactgaaatccagagc

SEQ ID NO: 61180 - DNA, 79 bp, Homo sapiens
  chr1:169850179-169850258
  hypo
ggcgtgagccaccgtgcccaggtgaaggccacatatttacctcttcagttatttaatcgctatttaaagcagatattgt

SEQ ID NO: 61181 - DNA, 91 bp, Homo sapiens
  chr1:170064327-170064418
  hypo
cttggctcctcccccttagaatatgttttaatgtccgttattctgcatggatgattcagttacatggtgcgttctttcaatacatagattc

SEQ ID NO: 61182 - DNA, 31 bp, Homo sapiens; identical to SEQ ID NO: 15112
  chr1:170521417-170521448
  hypo

SEQ ID NO: 61183 - DNA, 30 bp, Homo sapiens
  chr1:171519337-171519367
  hypo
caggatgaagaacgccgaaagaaggaagaa

SEQ ID NO: 61184 - DNA, 91 bp, Homo sapiens
  chr1:171554193-171554284
  hypo
gcttgagccaccacacctggctgctttttgttttttgtttttttttaattaagggggaaaaaacaacttaggtttccgtgtaattatttat

SEQ ID NO: 61185 - DNA, 277 bp, Homo sapiens; identical to SEQ ID NO: 15113
  chr1:171554920-171555197
  hypo

SEQ ID NO: 61186 - DNA, 31 bp, Homo sapiens
  chr1:171563323-171563354
  hypo
aaacaaatctgtcagccgggcgtggtggctc

SEQ ID NO: 61187 - DNA, 200 bp, Homo sapiens
  chr1:171570072-171570272
  hypo
tccctgaccgggaaacgaggcagacaaaacctgggtagttaaggggctacccgaggcagccccttaggcggcttaggcctgctgtgtggagcatccctgcaggggactccagccagcctgagtgaagccatccgaagagcgatcccaggtagagaattgccccggtggaacgcctcgccagagcagtgcgtagcaggccc

SEQ ID NO: 61188 - DNA, 41 bp, Homo sapiens
  chr1:171625524-171625565
  hypo
aacactgacccttggccgggcgcggtgactcatgcctgtaa

SEQ ID NO: 61189 - DNA, 30 bp, Homo sapiens
  chr1:171639841-171639871
  hypo
gcagcagtgagtcccggatcaccgaacatt

SEQ ID NO: 61190 - DNA, 42 bp, Homo sapiens
  chr1:171640196-171640238
  hypo
gctgccgtctggaccgtggctctgctcgctgtgcagcagcct

SEQ ID NO: 61191 - DNA, 153 bp, Homo sapiens
  chr1:171707341-171707494
  hypo
gctcaagctattctgcttcagcgtcccaagtgcggcgattgcaggcatgagcaaccacgcccggatggtttttcttctattattcacaaagggaatgaaaacatattttgaatcttttgtttttaaagcttaagattccgaacttaccctttc

SEQ ID NO: 61192 - DNA, 20 bp, Homo sapiens
  chr1:171730071-171730091
  hypo
cccggcgcagaagaagactt

SEQ ID NO: 61193 - DNA, 30 bp, Homo sapiens
  chr1:171753402-171753432
  hypo
gtgctcaggagcagcgcaagcctgtgcggc

SEQ ID NO: 61194 - DNA, 202 bp, Homo sapiens; identical to SEQ ID NO: 950
  chr1:171810194-171810396
  hypo

SEQ ID NO: 61195 - DNA, 773 bp, Homo sapiens; identical to SEQ ID NO: 951
  chr1:171810513-171811286
  hypo

SEQ ID NO: 61196 - DNA, 330 bp, Homo sapiens; identical to SEQ ID NO: 36520
  chr1:171811320-171811650
  hypo

SEQ ID NO: 61197 - DNA, 18 bp, Homo sapiens
  chr1:172448841-172448859
  hypo
cttttttaaaaactgcac

SEQ ID NO: 61198 - DNA, 78 bp, Homo sapiens; identical to SEQ ID NO: 15120
  chr1:172449158-172449236
  hypo

SEQ ID NO: 61199 - DNA, 30 bp, Homo sapiens
  chr1:172717473-172717503
  hypo
cgggtgaagagcggcgcgtaattcctgtgg

SEQ ID NO: 61200 - DNA, 17 bp, Homo sapiens
  chr1:172902935-172902952
  hypo
ctctatctcaaaaaaaa

SEQ ID NO: 61201 - DNA, 30 bp, Homo sapiens
  chr1:173389051-173389081
  hypo
gggatgagaggctgcggtccaaatggaatg

SEQ ID NO: 61202 - DNA, 36 bp, Homo sapiens; identical to SEQ ID NO: 15122
  chr1:173714248-173714284
  hypo

SEQ ID NO: 61203 - DNA, 37 bp, Homo sapiens; identical to SEQ ID NO: 15123
  chr1:173795056-173795093
  hypo

SEQ ID NO: 61204 - DNA, 28 bp, Homo sapiens
  chr1:173897635-173897663
  hypo
ccgtctcgaggaaaaaaaaaaaaaagta

SEQ ID NO: 61205 - DNA, 31 bp, Homo sapiens; identical to SEQ ID NO: 957
  chr1:173991621-173991652
  hypo

SEQ ID NO: 61206 - DNA, 100 bp, Homo sapiens
  chr1:173993030-173993130
  hypo
ccttaagcagtatgatttttacgttgtttatttttatctcgtcaatatttcaattaaaaatacgttaaaggacagatagatgcagtggctcacgcctgta

SEQ ID NO: 61207 - DNA, 37 bp, Homo sapiens
  chr1:174048025-174048062
  hypo
aaggctgagagtagtggctcacgctggcaatcccagc

SEQ ID NO: 61208 - DNA, 80 bp, Homo sapiens; identical to SEQ ID NO: 15125
  chr1:174166675-174166755
  hypo

SEQ ID NO: 61209 - DNA, 20 bp, Homo sapiens
  chr1:174166934-174166954
  hypo
tctaaaaaaaaaaaatctgt

SEQ ID NO: 61210 - DNA, 36 bp, Homo sapiens
  chr1:174634559-174634595
  hypo
tcgcctcgccccgccccgccccgccccgcctcgcct

SEQ ID NO: 61211 - DNA, 31 bp, Homo sapiens
  chr1:174903583-174903614
  hypo
tgaactgttactctcccgtactggctgtgtt

SEQ ID NO: 61212 - DNA, 30 bp, Homo sapiens
  chr1:175014360-175014390
  hypo
tcagtgccactcaacgcccacgggggcaga

SEQ ID NO: 61213 - DNA, 30 bp, Homo sapiens
  chr1:175014790-175014820
  hypo
cgaggctccgggctcgggacagcggggtgg

SEQ ID NO: 61214 - DNA, 375 bp, Homo sapiens; identical to SEQ ID NO: 36532
  chr1:175048455-175048830
  hypo

SEQ ID NO: 61215 - DNA, 30 bp, Homo sapiens; identical to SEQ ID NO: 959
  chr1:175091630-175091660
  hypo

SEQ ID NO: 61216 - DNA, 30 bp, Homo sapiens
  chr1:175331827-175331857
  hypo
ctttcctccctgccccgcacgctgttgagg

SEQ ID NO: 61217 - DNA, 366 bp, Homo sapiens
  chr1:175355011-175355377
  hypo
ggaaacctcttgcttccttctcgcggtgtctatgacaaggccaatgctctgacacaccttgcctcattcctaatactcctcttgctgtgatgacaccaccggttggctccacccctctttccctccttgtgcgtctctcccccaccgcagccttacctgttgtgaactgagtggtggcagaatcgctctcgttggtccctcggacggcactgactgacacctcgtatcgggagccaggccgcagggcctgcactgagtattggctcaggggaggctgcagccggaaggtggtcctcccaccttccccgcccaccaggccatatttcaaaagaatgaaatcgactttggctcgagggggaatccact

SEQ ID NO: 61218 - DNA, 260 bp, Homo sapiens; identical to SEQ ID NO: 15129
  chr1:175365709-175365969
  hypo

SEQ ID NO: 61219 - DNA, 29 bp, Homo sapiens
  chr1:175371143-175371172
  hypo
gcataaaaaagggaatcaggccgggcgcg

SEQ ID NO: 61220 - DNA, 445 bp, Homo sapiens; identical to SEQ ID NO: 15130
  chr1:175372293-175372738
  hypo

SEQ ID NO: 61221 - DNA, 334 bp, Homo sapiens; identical to SEQ ID NO: 15131
  chr1:175375119-175375453
  hypo

SEQ ID NO: 61222 - DNA, 37 bp, Homo sapiens
  chr1:175385844-175385881
  hypo
tttgaaatataagaagtgggccgggtgcggtggctca

SEQ ID NO: 61223 - DNA, 147 bp, Homo sapiens; identical to SEQ ID NO: 15132
  chr1:175957579-175957726
  hypo

SEQ ID NO: 61224 - DNA, 38 bp, Homo sapiens
  chr1:176694917-176694955
  hypo
tttcttttcttttttttgagacggagtctcgctctgtc

SEQ ID NO: 61225 - DNA, 38 bp, Homo sapiens
  chr1:176695194-176695232
  hypo
cgtgagccaccgcgcccggccagagttttcacttctct

SEQ ID NO: 61226 - DNA, 39 bp, Homo sapiens; identical to SEQ ID NO: 15133
  chr1:178007138-178007177
  hypo

SEQ ID NO: 61227 - DNA, 1355 bp, Homo sapiens; identical to SEQ ID NO: 36545
  chr1:178062488-178063843
  hypo

SEQ ID NO: 61228 - DNA, 45 bp, Homo sapiens
  chr1:178099910-178099955
  hypo
aaaaaataacatttgtcgcctgtaatcccagcactttgggaggcc

SEQ ID NO: 61229 - DNA, 21 bp, Homo sapiens
  chr1:178197698-178197719
  hypo
agactccgtcccggggaaacg

SEQ ID NO: 61230 - DNA, 31 bp, Homo sapiens; identical to SEQ ID NO: 15135
  chr1:178228197-178228228
  hypo

SEQ ID NO: 61231 - DNA, 31 bp, Homo sapiens
  chr1:178228553-178228584
  hypo
aagaatgttctaaaatcgtctatgttgattg

SEQ ID NO: 61232 - DNA, 151 bp, Homo sapiens; identical to SEQ ID NO: 15136
  chr1:178271748-178271899
  hypo

SEQ ID NO: 61233 - DNA, 40 bp, Homo sapiens
  chr1:178465303-178465343
  hypo
ccagccccatgcagggcgcccctcccgccggcctctccag

SEQ ID NO: 61234 - DNA, 30 bp, Homo sapiens
  chr1:178482117-178482147
  hypo
ctcatctcagtggccgaagccccccaggcc

SEQ ID NO: 61235 - DNA, 30 bp, Homo sapiens
  chr1:178507381-178507411
  hypo
ggcaggagtgagtgcgtgctgagaacactc

SEQ ID NO: 61236 - DNA, 23 bp, Homo sapiens
  chr1:178513388-178513411
  hypo
gcgcctggcctgttttgttttcc

SEQ ID NO: 61237 - DNA, 207 bp, Homo sapiens
  chr1:178531643-178531850
  hypo
cagccaccgcacccgacctctactttttagctataatgatttgcaagggcaaaaatttcacggtacaaggagctttcttttgaaacaatgagtaagctcttcacaagtaccaacatgtcgggaaccgtaaacccttgtcgcgggggaaaagctagtctaactgtatcctagaggctctaggttcaggctgaacggaagtacatgtcg

SEQ ID NO: 61238 - DNA, 21 bp, Homo sapiens
  chr1:178665799-178665820
  hypo
gacagagccagactccatctc

SEQ ID NO: 61239 - DNA, 31 bp, Homo sapiens; identical to SEQ ID NO: 966
  chr1:178694819-178694850
  hypo

SEQ ID NO: 61240 - DNA, 42 bp, Homo sapiens
  chr1:178828801-178828843
  hypo
caaaccatgccacatcatacacgaagcacttttttttttttt

SEQ ID NO: 61241 - DNA, 42 bp, Homo sapiens
  chr1:178829082-178829124
  hypo
acctcgtgatccacccgtctcggctacacaaagcacttctac

SEQ ID NO: 61242 - DNA, 148 bp, Homo sapiens; identical to SEQ ID NO: 15139
  chr1:178928476-178928624
  hypo

SEQ ID NO: 61243 - DNA, 84 bp, Homo sapiens; identical to SEQ ID NO: 15140
  chr1:178988891-178988975
  hypo

SEQ ID NO: 61244 - DNA, 129 bp, Homo sapiens
  chr1:178994187-178994316
  hypo
aggcacactaagtttgcgctttagtatatggtgaataaatggatggacacagtggcggctctgtataagtcagctgaaagcaaacaaagggaaggcagaatctttcattcacacgatttatccgcgccc

SEQ ID NO: 61245 - DNA, 31 bp, Homo sapiens; identical to SEQ ID NO: 967
  chr1:178995254-178995285
  hypo

SEQ ID NO: 61246 - DNA, 35 bp, Homo sapiens; identical to SEQ ID NO: 15143
  chr1:179046570-179046605
  hypo

SEQ ID NO: 61247 - DNA, 30 bp, Homo sapiens
  chr1:179053282-179053312
  hypo
agacccctcctagtcgtgcctcttccttgc

SEQ ID NO: 61248 - DNA, 30 bp, Homo sapiens; identical to SEQ ID NO: 15144
  chr1:179100485-179100515
  hypo

SEQ ID NO: 61249 - DNA, 44 bp, Homo sapiens; identical to SEQ ID NO: 15145
  chr1:179229271-179229315
  hypo

SEQ ID NO: 61250 - DNA, 98 bp, Homo sapiens
  chr1:179333922-179334020
  hypo
tgctgggattacaggcgtgagccaccggccgctgatggtattctttcctgagggcagattttcacgccagaagccccgacaattatacctgagctggt

SEQ ID NO: 61251 - DNA, 601 bp, Homo sapiens; identical to SEQ ID NO: 36552
  chr1:179544699-179545300
  hypo

SEQ ID NO: 61252 - DNA, 269 bp, Homo sapiens
  chr1:179557860-179558129
  hypo
acaatggatccatgccaactacgagcagaagctcttcctggccccgctaccctgcacggagctgtccctgggccagcacccgcttcgggccaccgcagacgaagaccggcagatggccatcctgctgctggtgcacagctcctgggacaaggtgaaagaaacctttggggagggagacagagatggccgcactgcactgcatctggcctgccacaagggaagtgtggtcctggtgcagctcctgatctggtaccgggtggacgtcatgg

SEQ ID NO: 61253 - DNA, 49 bp, Homo sapiens; identical to SEQ ID NO: 15147
  chr1:179782917-179782966
  hypo

SEQ ID NO: 61254 - DNA, 77 bp, Homo sapiens
  chr1:179835815-179835892
  hypo
aggagtgagccaccgtgcccgggtgcccaccacctagttttattggtttatacaccgtgtcattctgagaaggcaag

SEQ ID NO: 61255 - DNA, 19 bp, Homo sapiens
  chr1:179868796-179868815
  hypo
tgagacagagtcttgctct

SEQ ID NO: 61256 - DNA, 19 bp, Homo sapiens
  chr1:179869054-179869073
  hypo
taggcgtgagccactgcac

SEQ ID NO: 61257 - DNA, 22 bp, Homo sapiens
  chr1:180050297-180050319
  hypo
cggcccactgtactgctttttg

SEQ ID NO: 61258 - DNA, 300 bp, Homo sapiens
  chr1:180097382-180097682
  hypo
ggcattcaaacccaaaacatacgcttcgaaccactctacggatcactggtgaccagctcaggatgccagcaagagcaggcctcccatgagagagcgtcgtgcagtttgctggatacggtgggaatgacccatatttgagctcccaggggagaagcaaatgggggacaggactggacagccaaggtgcagggcatcctctgggaaggcgcgtggctcggaacacaaaggcttcccgggtgcagcatgggagggagcccgggccaggcttcttgggtccacgcctagctctgccactcagac

SEQ ID NO: 61259 - DNA, 214 bp, Homo sapiens; identical to SEQ ID NO: 36560
  chr1:180123472-180123686
  hypo

SEQ ID NO: 61260 - DNA, 890 bp, Homo sapiens; identical to SEQ ID NO: 975
  chr1:180123700-180124590
  hypo

SEQ ID NO: 61261 - DNA, 217 bp, Homo sapiens
  chr1:180137305-180137522
  hypo
tcagaggctcctcagcgccaccccatgtcacgcagcgcacgcagcctggatgcctcaggtgagtcaccatctcctgaactgcctggctggctgtgggaggggcactgggagggccctcgctgggctcctcagccctcccctgcctccagacgggcagcacctggcagggccagtctggtagtcatctgtccacagaccaacacggtggcctcccccg

SEQ ID NO: 61262 - DNA, 43 bp, Homo sapiens
  chr1:180138777-180138820
  hypo
ccatctcactcctgggccacccgtggggctgctggtagctggt

SEQ ID NO: 61263 - DNA, 223 bp, Homo sapiens; identical to SEQ ID NO: 36565
  chr1:180202648-180202871
  hypo

SEQ ID NO: 61264 - DNA, 97 bp, Homo sapiens
  chr1:180223402-180223499
  hypo
gcaggcaggcagagatgggtgcgccagaggctcccggtagcgggatggaggccgctgtgtcgcaggggagctgtgcggctgctgggccaggccagga

SEQ ID NO: 61265 - DNA, 18 bp, Homo sapiens
  chr1:180265586-180265604
  hypo
cagagtttcactctgtcg

SEQ ID NO: 61266 - DNA, 35 bp, Homo sapiens
  chr1:180302702-180302737
  hypo
actgacagctcccagtgtgagcgacgcagaagacg

SEQ ID NO: 61267 - DNA, 97 bp, Homo sapiens; identical to SEQ ID NO: 15154
  chr1:180477769-180477866
  hypo

SEQ ID NO: 61268 - DNA, 82 bp, Homo sapiens; identical to SEQ ID NO: 15155
  chr1:180478105-180478187
  hypo

SEQ ID NO: 61269 - DNA, 121 bp, Homo sapiens
  chr1:180497353-180497474
  hypo
gggattacaggcgcgagccaccacgcctagtgttgccctctttaatgagtgctacacaaatgtcttggtgatttcacatccgcagttgttgtggggtgtgttttgtttgtttgtttgtttt

SEQ ID NO: 61270 - DNA, 102 bp, Homo sapiens
  chr1:180497653-180497755
  hypo
gtgtgtgtttagtagagatggggtttcacgttgttagccacgcatttcttgaggattagactgctgttgcagatgagcgccgtcctctgtctctgagttcca

SEQ ID NO: 61271 - DNA, 31 bp, Homo sapiens; identical to SEQ ID NO: 979
  chr1:180606644-180606675
  hypo

SEQ ID NO: 61272 - DNA, 30 bp, Homo sapiens; identical to SEQ ID NO: 15157
  chr1:180805729-180805759
  hypo

SEQ ID NO: 61273 - DNA, 537 bp, Homo sapiens; identical to SEQ ID NO: 36573
  chr1:180881295-180881832
  hypo

SEQ ID NO: 61274 - DNA, 95 bp, Homo sapiens; identical to SEQ ID NO: 15159
  chr1:180885146-180885241
  hypo

SEQ ID NO: 61275 - DNA, 179 bp, Homo sapiens
  chr1:180888524-180888703
  hypo
ccacagtgttgaggagcgtgactacagaaaggcctgtgggcctcagccggctctgctcccctgtctgcgccctgttcaagttgccttctgtctttttccctctttctgtgcggagccctggaggagagggctggggcagatgccctcttctgcagaggtggtgccgcctctgcctgcag

SEQ ID NO: 61276 - DNA, 42 bp, Homo sapiens; identical to SEQ ID NO: 15160
  chr1:180891950-180891992
  hypo

SEQ ID NO: 61277 - DNA, 102 bp, Homo sapiens; identical to SEQ ID NO: 15161
  chr1:180892051-180892153
  hypo

SEQ ID NO: 61278 - DNA, 127 bp, Homo sapiens
  chr1:180896511-180896638
  hypo
ggcaggagaggacagagggtgcggaacgatgctggagacagtgggctggctgtcgtgtgctctgctccgcttgcaattgacgttcgaccttgaacaatgtgccagcgttcttctctgctctggacac

SEQ ID NO: 61279 - DNA, 297 bp, Homo sapiens
  chr1:180918318-180918615
  hypo
agagtgagccgagctgggctgcgaacagcgagggtgccaaaggctgcgctgagcagcctgaattccgccagtgctgatgcccacaccaggggtgtgccccgcagtccctccagcaaactcagcttgtgtctcagcccctgtgtccacccagcatgaagcatgggcatcagggggtccagcctgccctgggagagccagcacctcacttactctcccaggtgggagcagctggaggggaatttgaaaggtttccagccgcggttgaggccggcgggcgggggttgggggcagggggcc

SEQ ID NO: 61280 - DNA, 230 bp, Homo sapiens
  chr1:180919549-180919779
  hypo
atcctcgaggtgaacggggccaaggtggcagggctgggcttggctcacattaaggagctcctggcccactcagagagcttgtcaatccgtgtcctgaggcagagacctgtcccacggtgacccagaagtgccgctgccctcactgtcacggcctcggaagccctgaagcactcagggtggttggcaggaacgtgctgcacagagctgctctgtggcggaaacagatcctg

SEQ ID NO: 61281 - DNA, 30 bp, Homo sapiens
  chr1:180920422-180920452
  hypo
agccccatgccaccccggccgctgcctctg

SEQ ID NO: 61282 - DNA, 203 bp, Homo sapiens
  chr1:180925238-180925441
  hypo
ttggcaagaagctctgcccagcgctctctggctgtgggttggccaggtcggagtgctggaccctgaggaaaggggctgcggggactggcgctgatatgtgcccatggagccagggcttaacagctgccctgccagtcctggagggtatccggagctctcctgtggctgccaggctgcctgccgggcctgcctttgtcttgtcc

SEQ ID NO: 61283 - DNA, 218 bp, Homo sapiens
  chr1:180945763-180945981
  hypo
gcacaccattggcgccgatctggaaggcaggacatggggattagctctcacagggactccacattccccaagatacagttatatggaatttatggcaccctttgaagcagaaaaggggcagaacgtgcaaatgacggggccatgatcttacacctgcctaggtgcctgatgctctaatgctgctctgttcttggcctgcacttcgcatgcagtcacaa

SEQ ID NO: 61284 - DNA, 30 bp, Homo sapiens
  chr1:180957389-180957419
  hypo
agctcccctccgatgcgctgggacatgttc

SEQ ID NO: 61285 - DNA, 28 bp, Homo sapiens
  chr1:181013387-181013415
  hypo
tgcgcccggcctgatcttttttcttaac

SEQ ID NO: 61286 - DNA, 152 bp, Homo sapiens; identical to SEQ ID NO: 15164
  chr1:181066371-181066523
  hypo

SEQ ID NO: 61287 - DNA, 66 bp, Homo sapiens
  chr1:181111088-181111154
  hypo
gcaggcttgattgattttaaacgttctgcccctttgtttttccacgtcaacaaattcacaaatcat

SEQ ID NO: 61288 - DNA, 30 bp, Homo sapiens
  chr1:181382276-181382306
  hypo
tctgtgatggtgcccgagatgcgtggactg

SEQ ID NO: 61289 - DNA, 230 bp, Homo sapiens
  chr1:181382624-181382854
  hypo
cgcgggggcctcatcgagcagcgcgacatcatcaaggcccacgaggcgcacaagatgcagagcaccccgcaggcccggcgcaaggaatgggagtgagtatggcggggacgcgggggcgggcatggctggctgggcctgaggtcggggtgggttcctggagcggatgggccccgtgaggccgccctggagggtcgggagatgctttcgctgtgctgcgactaacgagaggc

SEQ ID NO: 61290 - DNA, 30 bp, Homo sapiens
  chr1:181518952-181518982
  hypo
aaccactggagtgggcgtggagtggagcat

SEQ ID NO: 61291 - DNA, 163 bp, Homo sapiens; identical to SEQ ID NO: 15165
  chr1:181765802-181765965
  hypo

SEQ ID NO: 61292 - DNA, 283 bp, Homo sapiens; identical to SEQ ID NO: 15166
  chr1:181767630-181767913
  hypo

SEQ ID NO: 61293 - DNA, 105 bp, Homo sapiens
  chr1:181979313-181979418
  hypo
tggctccctctccctcttcctcgtctcccactttccacggtctccctctgatgccgctccctcgtctcccactttccacggtctccctctgatgccgagccgagg

SEQ ID NO: 61294 - DNA, 41 bp, Homo sapiens
  chr1:182148662-182148703
  hypo
ataactccattaactccgtctctgggtgatagacactaaag

SEQ ID NO: 61295 - DNA, 31 bp, Homo sapiens; identical to SEQ ID NO: 15167
  chr1:182183508-182183539
  hypo

SEQ ID NO: 61296 - DNA, 34 bp, Homo sapiens
  chr1:182230563-182230597
  hypo
agccactgcgcccggccacatttgcattcttata

SEQ ID NO: 61297 - DNA, 30 bp, Homo sapiens
  chr1:182270926-182270956
  hypo
accagcatgcacgcgcgcgcacacacacac

SEQ ID NO: 61298 - DNA, 31 bp, Homo sapiens; identical to SEQ ID NO: 15168
  chr1:182292205-182292236
  hypo

SEQ ID NO: 61299 - DNA, 30 bp, Homo sapiens
  chr1:182354897-182354927
  hypo
ggcaggcatgacctcggcattagtccccgc

SEQ ID NO: 61300 - DNA, 30 bp, Homo sapiens
  chr1:182575627-182575657
  hypo
cagtaagccgagatcgcgccattgcaaaaa

SEQ ID NO: 61301 - DNA, 557 bp, Homo sapiens; identical to SEQ ID NO: 988
  chr1:182583782-182584339
  hypo

SEQ ID NO: 61302 - DNA, 217 bp, Homo sapiens; identical to SEQ ID NO: 989
  chr1:182584403-182584620
  hypo

SEQ ID NO: 61303 - DNA, 70 bp, Homo sapiens
  chr1:182637877-182637947
  hypo
ctattctctctcctgcgacagcgggcatcttatgtgtctactcgcgcttgcaaatcgcagggtgtctgac

SEQ ID NO: 61304 - DNA, 30 bp, Homo sapiens
  chr1:182643143-182643173
  hypo
tggagaaacagagacgcgtcatttaaaagt

SEQ ID NO: 61305 - DNA, 40 bp, Homo sapiens; identical to SEQ ID NO: 15171
  chr1:182767635-182767675
  hypo

SEQ ID NO: 61306 - DNA, 191 bp, Homo sapiens; identical to SEQ ID NO: 15172
  chr1:182827757-182827948
  hypo

SEQ ID NO: 61307 - DNA, 30 bp, Homo sapiens
  chr1:182835287-182835317
  hypo
aaacaaacccccctacgtatgctgtgccct

SEQ ID NO: 61308 - DNA, 41 bp, Homo sapiens
  chr1:182856865-182856906
  hypo
aataaagtattacaccgaatacttgccgtgtagtttgtttg

SEQ ID NO: 61309 - DNA, 438 bp, Homo sapiens; identical to SEQ ID NO: 36589
  chr1:182992749-182993187
  hypo

SEQ ID NO: 61310 - DNA, 225 bp, Homo sapiens
  chr1:183129297-183129522
  hypo
actgcatgatgaaggcgggtgtggctcccagtgggagtgtcccgcctccagaacatggccagaggctacagaatcagacttttgccaaaggaagaaagagcgcctgaagcatgtgttcaccgggcaactatgaatggcttgactgggtggagccttcagtatctttttagttaagccttttagtctcaaaaatggaagaggcaaagctcaattcttaaagatcac

SEQ ID NO: 61311 - DNA, 30 bp, Homo sapiens
  chr1:183196746-183196776
  hypo
atgtccctgtcataacgggttcagctgctc

SEQ ID NO: 61312 - DNA, 137 bp, Homo sapiens
  chr1:183338765-183338902
  hypo
actgtctttaagcaaacagttcggtggcattaagtatattgccactgttgagcagccgtcgctgtcatccattttcagcactttttcatcttctcaaactgaaactctgtacccattaaacacgaactccccattcc

SEQ ID NO: 61313 - DNA, 34 bp, Homo sapiens
  chr1:183443724-183443758
  hypo
aaataaaagatacgaagtgttttgagtccaaagg

SEQ ID NO: 61314 - DNA, 37 bp, Homo sapiens; identical to SEQ ID NO: 15177
  chr1:183462994-183463031
  hypo

SEQ ID NO: 61315 - DNA, 30 bp, Homo sapiens; identical to SEQ ID NO: 15178
  chr1:183486872-183486902
  hypo

SEQ ID NO: 61316 - DNA, 30 bp, Homo sapiens
  chr1:183503077-183503107
  hypo
ttttctgccgactctcgggaattgaactga

SEQ ID NO: 61317 - DNA, 17 bp, Homo sapiens
  chr1:183550812-183550829
  hypo
tttttttttgagacaga

SEQ ID NO: 61318 - DNA, 137 bp, Homo sapiens
  chr1:183551068-183551205
  hypo
tgggattacaggcgtgagccacctcgcctcgccaactaagtgtcgtttttaaacatgtctctgaaagcaccggcctgcttcccagccccctcgttccctgctgcaggcctcttttcggcctctccacttgtttaccc

SEQ ID NO: 61319 - DNA, 175 bp, Homo sapiens
  chr1:183944150-183944325
  hypo
tccatggttctagtttttggacgactgatttggatacacctgagatgacagttgtcaagaaatcaaacatctgtttttaccagaatgtagtctgaccatttttccctcgcagttcgaagggctgcctgtcgtagtttcatcacatgggcaaaccgggaggttggccagtgctttg

SEQ ID NO: 61320 - DNA, 1111 bp, Homo sapiens; identical to SEQ ID NO: 36599
  chr1:184005519-184006630
  hypo

SEQ ID NO: 61321 - DNA, 30 bp, Homo sapiens
  chr1:184195196-184195226
  hypo
tagcccttgagacgcgcgggagggttggaa

SEQ ID NO: 61322 - DNA, 166 bp, Homo sapiens
  chr1:184333000-184333166
  hypo
cttcctcctgggtccccggcagaggctggggtgggctatttagcttctctgcagtgttgcttccagctcggatggaagctctctgagcccagggccttagcacaggtgacacacagcccacaggcctgggacaggcaggcagatgagtgcccgagcttggcaccat

SEQ ID NO: 61323 - DNA, 508 bp, Homo sapiens; identical to SEQ ID NO: 997
  chr1:184355380-184355888
  hypo

SEQ ID NO: 61324 - DNA, 279 bp, Homo sapiens; identical to SEQ ID NO: 998
  chr1:184355935-184356214
  hypo

SEQ ID NO: 61325 - DNA, 97 bp, Homo sapiens; identical to SEQ ID NO: 999
  chr1:184356590-184356687
  hypo

SEQ ID NO: 61326 - DNA, 31 bp, Homo sapiens
  chr1:184442500-184442531
  hypo
cttacctctctctaagcgctgtggtttcagg

SEQ ID NO: 61327 - DNA, 260 bp, Homo sapiens
  chr1:184448489-184448749
  hypo
tagagctaccatttatggagccgtcaccatgtgtcaaacatcgcaaggcatttacattcatttttatgttgaattttcacaacaatcttgtgaaatatgtgctacgcaaattttacatacttggaaactgaacacagagagacggacttgtccgaggttacccagctacgaagtgctagaatccagattgctcagactccaaagtccacctttctttctccatgttgtttcctgatgccgtgcagcctcccataggtctt

SEQ ID NO: 61328 - DNA, 30 bp, Homo sapiens; identical to SEQ ID NO: 1000
  chr1:184464148-184464178
  hypo

SEQ ID NO: 61329 - DNA, 30 bp, Homo sapiens
  chr1:184467178-184467208
  hypo
tatctattctatgccgctcattagctttgc

SEQ ID NO: 61330 - DNA, 30 bp, Homo sapiens; identical to SEQ ID NO: 15185
  chr1:184591066-184591096
  hypo

SEQ ID NO: 61331 - DNA, 40 bp, Homo sapiens
  chr1:184720864-184720904
  hypo
tcttcagtaatttctgtaagtcggctttttctcttttttt

SEQ ID NO: 61332 - DNA, 40 bp, Homo sapiens; identical to SEQ ID NO: 15186
  chr1:184721203-184721243
  hypo

SEQ ID NO: 61333 - DNA, 245 bp, Homo sapiens; identical to SEQ ID NO: 1001
  chr1:184722804-184723049
  hypo

SEQ ID NO: 61334 - DNA, 30 bp, Homo sapiens
  chr1:184725471-184725501
  hypo
ctcatctttagccttcggggtccacgtgca

SEQ ID NO: 61335 - DNA, 53 bp, Homo sapiens
  chr1:184764468-184764521
  hypo
ggccccaggggctcctcggtgagccctccactggctggcggagaggctgggct

SEQ ID NO: 61336 - DNA, 31 bp, Homo sapiens; identical to SEQ ID NO: 15188
  chr1:184774919-184774950
  hypo

SEQ ID NO: 61337 - DNA, 36 bp, Homo sapiens
  chr1:184934143-184934179
  hypo
acacagggccgggcgcggcggctcacgcctgtaatc

SEQ ID NO: 61338 - DNA, 14 bp, Homo sapiens
  chr1:184970689-184970703
  hypo
aacagctccggtct

SEQ ID NO: 61339 - DNA, 30 bp, Homo sapiens; identical to SEQ ID NO: 15189
  chr1:185013774-185013804
  hypo

SEQ ID NO: 61340 - DNA, 30 bp, Homo sapiens
  chr1:185023726-185023756
  hypo
cacgcctctagaggcggggcctgaattcct

SEQ ID NO: 61341 - DNA, 40 bp, Homo sapiens; identical to SEQ ID NO: 15190
  chr1:185024835-185024875
  hypo

SEQ ID NO: 61342 - DNA, 17 bp, Homo sapiens
  chr1:185076315-185076332
  hypo
agcgagactccgtctca

SEQ ID NO: 61343 - DNA, 30 bp, Homo sapiens
  chr1:185190053-185190083
  hypo
tatatgtatgtgagacgtattgcttccgag

SEQ ID NO: 61344 - DNA, 25 bp, Homo sapiens
  chr1:185335933-185335958
  hypo
gttttttttttttttttgagacgaa

SEQ ID NO: 61345 - DNA, 84 bp, Homo sapiens; identical to SEQ ID NO: 15193
  chr1:185336197-185336281
  hypo

SEQ ID NO: 61346 - DNA, 31 bp, Homo sapiens
  chr1:185413916-185413947
  hypo
gaacacttgcttggcacgaattctaagtctt

SEQ ID NO: 61347 - DNA, 30 bp, Homo sapiens; identical to SEQ ID NO: 1005
  chr1:185510393-185510423
  hypo

SEQ ID NO: 61348 - DNA, 157 bp, Homo sapiens
  chr1:185554767-185554924
  hypo
cttggaaatcccaagcgggcaccaatgacttactgactcactgactgtgccgtccttttcacccctatttttgagggttccattatgatcctttgtagttttcctcacatggggcaccacctgccagggtctgacccgcagacgtaggctgcacgat

SEQ ID NO: 61349 - DNA, 31 bp, Homo sapiens
  chr1:185630509-185630540
  hypo
tcttttaacctgtgttcgattcattcagaac

SEQ ID NO: 61350 - DNA, 30 bp, Homo sapiens
  chr1:186340980-186341010
  hypo
taaatacacacacacgcgcgcacacattaa

SEQ ID NO: 61351 - DNA, 49 bp, Homo sapiens; identical to SEQ ID NO: 15195
  chr1:186344812-186344861
  hypo

SEQ ID NO: 61352 - DNA, 30 bp, Homo sapiens; identical to SEQ ID NO: 36616
  chr1:186344947-186344977
  hypo

SEQ ID NO: 61353 - DNA, 27 bp, Homo sapiens
  chr1:186428408-186428435
  hypo
tttaacaagctctaagcctgccgagtg

SEQ ID NO: 61354 - DNA, 27 bp, Homo sapiens
  chr1:186428554-186428581
  hypo
ggtgccgggattgcagacatacagata

SEQ ID NO: 61355 - DNA, 30 bp, Homo sapiens
  chr1:186889143-186889173
  hypo
gggccccaggcttaacgtctatgagcacgg

SEQ ID NO: 61356 - DNA, 177 bp, Homo sapiens; identical to SEQ ID NO: 15196
  chr1:188612097-188612274
  hypo

SEQ ID NO: 61357 - DNA, 30 bp, Homo sapiens; identical to SEQ ID NO: 1009
  chr1:189649417-189649447
  hypo

SEQ ID NO: 61358 - DNA, 16 bp, Homo sapiens
  chr1:191673020-191673036
  hypo
gcgcccggccgatttc

SEQ ID NO: 61359 - DNA, 30 bp, Homo sapiens; identical to SEQ ID NO: 15199
  chr1:192175260-192175290
  hypo

SEQ ID NO: 61360 - DNA, 30 bp, Homo sapiens; identical to SEQ ID NO: 15200
  chr1:192175529-192175559
  hypo

SEQ ID NO: 61361 - DNA, 35 bp, Homo sapiens; identical to SEQ ID NO: 15201
  chr1:192197324-192197359
  hypo

SEQ ID NO: 61362 - DNA, 26 bp, Homo sapiens
  chr1:192262608-192262634
  hypo
gcttgagccaccgcgcccggcctgct

SEQ ID NO: 61363 - DNA, 30 bp, Homo sapiens
  chr1:192469716-192469746
  hypo
aggagccaagatggccgaataggaacagct

SEQ ID NO: 61364 - DNA, 30 bp, Homo sapiens; identical to SEQ ID NO: 15202
  chr1:193075625-193075655
  hypo

SEQ ID NO: 61365 - DNA, 366 bp, Homo sapiens; identical to SEQ ID NO: 15203
  chr1:193149421-193149787
  hypo

SEQ ID NO: 61366 - DNA, 30 bp, Homo sapiens
  chr1:193377534-193377564
  hypo
cggagtctacatcatcggtcctctggctct

SEQ ID NO: 61367 - DNA, 30 bp, Homo sapiens
  chr1:194547596-194547626
  hypo
gtgagccaccgcgaccggccaaccttttcc

SEQ ID NO: 61368 - DNA, 34 bp, Homo sapiens
  chr1:195578616-195578650
  hypo
aagactcacaaacaggccaggcgcagtggctcac

SEQ ID NO: 61369 - DNA, 21 bp, Homo sapiens
  chr1:196117348-196117369
  hypo
ccaccgcgcccggccggcaat

SEQ ID NO: 61370 - DNA, 96 bp, Homo sapiens; identical to SEQ ID NO: 15204
  chr1:197091609-197091705
  hypo

SEQ ID NO: 61371 - DNA, 25 bp, Homo sapiens
  chr1:197100691-197100716
  hypo
tttttttttgagaaggagtctcgct

SEQ ID NO: 61372 - DNA, 31 bp, Homo sapiens
  chr1:197108436-197108467
  hypo
atgtttttggccgggcgcggtggctcacgcc

SEQ ID NO: 61373 - DNA, 33 bp, Homo sapiens; identical to SEQ ID NO: 15205
  chr1:197116741-197116774
  hypo

SEQ ID NO: 61374 - DNA, 39 bp, Homo sapiens; identical to SEQ ID NO: 15206
  chr1:197324918-197324957
  hypo

SEQ ID NO: 61375 - DNA, 40 bp, Homo sapiens; identical to SEQ ID NO: 15207
  chr1:197418768-197418808
  hypo

SEQ ID NO: 61376 - DNA, 93 bp, Homo sapiens
  chr1:197704759-197704852
  hypo
gccgccatgaaggtcgagctatgcggtttcagccggtacaaggtctaccccggacacgggaggcgctacgccaggaccgacaggaaagttttc

SEQ ID NO: 61377 - DNA, 165 bp, Homo sapiens; identical to SEQ ID NO: 1017
  chr1:197886901-197887066
  hypo

SEQ ID NO: 61378 - DNA, 310 bp, Homo sapiens; identical to SEQ ID NO: 36638
  chr1:197887146-197887456
  hypo

SEQ ID NO: 61379 - DNA, 81 bp, Homo sapiens; identical to SEQ ID NO: 15211
  chr1:198124718-198124799
  hypo

SEQ ID NO: 61380 - DNA, 30 bp, Homo sapiens; identical to SEQ ID NO: 15212
  chr1:198828045-198828075
  hypo

SEQ ID NO: 61381 - DNA, 30 bp, Homo sapiens
  chr1:199206418-199206448
  hypo
ggcctcccaaagtgccgggagtgctgcgtg

SEQ ID NO: 61382 - DNA, 157 bp, Homo sapiens
  chr1:199636235-199636392
  hypo
agtttcaacatggcttgactttctctctgggcgtgagctagccttgttgcgagtgagccataggcgcaagccgtatgtacagcatcggtaagatagttataccttttacagacaacaccagctctgagccagccacgagctcacatgagtggttacc

SEQ ID NO: 61383 - DNA, 30 bp, Homo sapiens; identical to SEQ ID NO: 36643
  chr1:200007416-200007446
  hypo

SEQ ID NO: 61384 - DNA, 42 bp, Homo sapiens
  chr1:200027877-200027919
  hypo
attacaagcatgaaccaccgcgctgggctgggttttgttttt

SEQ ID NO: 61385 - DNA, 30 bp, Homo sapiens
  chr1:200117040-200117070
  hypo
gtgatgtggtgcagcgcttcgccggtgttg

SEQ ID NO: 61386 - DNA, 30 bp, Homo sapiens
  chr1:200182928-200182958
  hypo
tccatttacttggccggcaaagtggaagag

SEQ ID NO: 61387 - DNA, 30 bp, Homo sapiens; identical to SEQ ID NO: 1026
  chr1:200379460-200379490
  hypo

SEQ ID NO: 61388 - DNA, 284 bp, Homo sapiens; identical to SEQ ID NO: 1027
  chr1:200379702-200379986
  hypo

SEQ ID NO: 61389 - DNA, 33 bp, Homo sapiens
  chr1:200386098-200386131
  hypo
gcgtgggccaccgcccccagccaacaacttcat

SEQ ID NO: 61390 - DNA, 31 bp, Homo sapiens
  chr1:200513746-200513777
  hypo
agacagaacaagattccgtctcaaagaaacg

SEQ ID NO: 61391 - DNA, 35 bp, Homo sapiens
  chr1:200556911-200556946
  hypo
gggcaacaagaatgaaactccgtctcaaaataaaa

SEQ ID NO: 61392 - DNA, 93 bp, Homo sapiens; identical to SEQ ID NO: 15216
  chr1:200588799-200588892
  hypo

SEQ ID NO: 61393 - DNA, 31 bp, Homo sapiens; identical to SEQ ID NO: 15217
  chr1:200589466-200589497
  hypo

SEQ ID NO: 61394 - DNA, 31 bp, Homo sapiens; identical to SEQ ID NO: 15218
  chr1:200612480-200612511
  hypo

SEQ ID NO: 61395 - DNA, 236 bp, Homo sapiens; identical to SEQ ID NO: 36654
  chr1:200708631-200708867
  hypo

SEQ ID NO: 61396 - DNA, 31 bp, Homo sapiens
  chr1:200937987-200938018
  hypo
cgtgcaccacgcacagcgtagtccaggccct

SEQ ID NO: 61397 - DNA, 31 bp, Homo sapiens
  chr1:200941619-200941650
  hypo
cccgccttcccgggggcgctgggcacaagac

SEQ ID NO: 61398 - DNA, 112 bp, Homo sapiens; identical to SEQ ID NO: 15220
  chr1:200942599-200942711
  hypo

SEQ ID NO: 61399 - DNA, 31 bp, Homo sapiens
  chr1:200951960-200951991
  hypo
ccccagctctagctggcgcagtccaaggcct

SEQ ID NO: 61400 - DNA, 51 bp, Homo sapiens
  chr1:200956135-200956186
  hypo
cgggtaggcagactgacggtgcgcgagaccctgtcccggtaataggggtct

SEQ ID NO: 61401 - DNA, 31 bp, Homo sapiens; identical to SEQ ID NO: 15222
  chr1:200964905-200964936
  hypo

SEQ ID NO: 61402 - DNA, 30 bp, Homo sapiens
  chr1:200969658-200969688
  hypo
taggggctcctagccgaggcccgtgagagg

SEQ ID NO: 61403 - DNA, 20 bp, Homo sapiens
  chr1:200970224-200970244
  hypo
aactccgtctcagaaaaaaa

SEQ ID NO: 61404 - DNA, 177 bp, Homo sapiens
  chr1:200971315-200971492
  hypo
cctggctcatgagctgggtgacgcggttgttgatggcatcgatggcctcctgcatggctttcacccgcagccgcagggccccattctccttctgtagcatggcattctctcggaacagatcactatagccctcagcgccatcctctcctatcactcgcttgccctgggagcaggggc

SEQ ID NO: 61405 - DNA, 30 bp, Homo sapiens
  chr1:200975147-200975177
  hypo
tgagaagatcctgtcgtattcctggacttg

SEQ ID NO: 61406 - DNA, 31 bp, Homo sapiens; identical to SEQ ID NO: 15223
  chr1:201036179-201036210
  hypo

SEQ ID NO: 61407 - DNA, 31 bp, Homo sapiens; identical to SEQ ID NO: 1029
  chr1:201050380-201050411
  hypo

SEQ ID NO: 61408 - DNA, 79 bp, Homo sapiens
  chr1:201055717-201055796
  hypo
catagagaaggtacagtaaagatacaatcttagcgcaccactgttgtggatgcagcccgtcattgactgaaatgtcatc

SEQ ID NO: 61409 - DNA, 260 bp, Homo sapiens
  chr1:201058347-201058607
  hypo
gaagggagatggttctgcaggcgcgggcccagacccacccagtaaaggacgtcagtccatccctccatggtaatgcactggtacacggtgagcatggagaagccgaagttgtcgaagtgggtgatgccatggttgggccctggccagccgccccggcactcactgccattgatggtgcaccggcgccctgagcccgtcctggcgcagggcgatggctcttcattctccaccgtggccacgatatctggaggcagaaggca

SEQ ID NO: 61410 - DNA, 31 bp, Homo sapiens; identical to SEQ ID NO: 15226
  chr1:201069412-201069443
  hypo

SEQ ID NO: 61411 - DNA, 407 bp, Homo sapiens; identical to SEQ ID NO: 36656
  chr1:201083265-201083672
  hypo

SEQ ID NO: 61412 - DNA, 203 bp, Homo sapiens
  chr1:201168309-201168512
  hypo
tccctcttgctgggatcgtccacgccttagaggacagtggggagagcagggctctgggactccatcagtttctcaggaagaccatcaacatgtcttgcttctctccctgcttgtccacatcgactccttcctctcctccctggatgttgcagttggctttcggaagaatcggaagaggcacagggaaccgcaggaaggtaggc

SEQ ID NO: 61413 - DNA, 30 bp, Homo sapiens; identical to SEQ ID NO: 15229
  chr1:201181868-201181898
  hypo

SEQ ID NO: 61414 - DNA, 31 bp, Homo sapiens
  chr1:201187509-201187540
  hypo
gggaactgagtcacagcgggtggagggatgt

SEQ ID NO: 61415 - DNA, 356 bp, Homo sapiens
  chr1:201194900-201195256
  hypo
agccctgctgggtcccctccacgtgacctccctctgccgtctctcctgaagcatgcccgcaggcccctgggcccatccacctgcaggagaacgtgcctgggacggtgacggccgagtgggaaccctctcctgacgaggcccaggatgtcccgctgcactacgcggtgttcacacgctcctcagcgcacggtccctggcacgaggcagccgaccgcatccacaccaaccgcttcaccctcctgggcatcctccccggccacgaataccacttcagggtggtggccaagaatgagctgggggccagcaaaccctcggacaccagccagccctggtgcatcccccggcagcgcggtaag

SEQ ID NO: 61416 - DNA, 30 bp, Homo sapiens
  chr1:201196132-201196162
  hypo
tgcagggctcgccccggccccacgtcacct

SEQ ID NO: 61417 - DNA, 190 bp, Homo sapiens
  chr1:201244906-201245096
  hypo
aaggaggagggaaccccggtccccgtgtgggggaagtaggacccagacacccaggactttgcaagaccacatcaccatgccgctctctactcagctgcctcttctgacaaatgcaggggctccaagggatgggctctgaggccccttccacctctgccgttctgaagtctccaagcgtagtaatggcaga

SEQ ID NO: 61418 - DNA, 209 bp, Homo sapiens; identical to SEQ ID NO: 15231
  chr1:201261830-201262039
  hypo

SEQ ID NO: 61419 - DNA, 42 bp, Homo sapiens; identical to SEQ ID NO: 15232
  chr1:201276066-201276108
  hypo

SEQ ID NO: 61420 - DNA, 118 bp, Homo sapiens
  chr1:201328244-201328362
  hypo
cctggggtgcccaggagggcccgggaactgggggagtgcaggccggaggcaggtgcgagcgaggagcagatctttggtgaaggaggccaggctctatttccagcgcccggtgacttta

SEQ ID NO: 61421 - DNA, 170 bp, Homo sapiens
  chr1:201355457-201355627
  hypo
ccaacctggagtgtgacgggtgggaggcgggaggccacagtcggagggtctgaagccccctgctttgccaaagagggcaggttcttcccagggagggcccttcctctctgctccttggtggtggctgggcttcccccagaggctggcggctcctgcgccaggggctgctc

SEQ ID NO: 61422 - DNA, 31 bp, Homo sapiens; identical to SEQ ID NO: 15234
  chr1:201358467-201358498
  hypo

SEQ ID NO: 61423 - DNA, 31 bp, Homo sapiens; identical to SEQ ID NO: 15235
  chr1:201380508-201380539
  hypo

SEQ ID NO: 61424 - DNA, 121 bp, Homo sapiens
  chr1:201432875-201432996
  hypo
gtgcctggatacgtcttttccttatgcctgaacccccaccatcagttaccctccggtttgattgaagagcaaagattctatttttttttcttttttttctgagatggagtcttgctttatt

SEQ ID NO: 61425 - DNA, 23 bp, Homo sapiens
  chr1:201433235-201433258
  hypo
agccaccgcgccccgcccaaaga

SEQ ID NO: 61426 - DNA, 30 bp, Homo sapiens; identical to SEQ ID NO: 1034
  chr1:201449031-201449061
  hypo

SEQ ID NO: 61427 - DNA, 30 bp, Homo sapiens; identical to SEQ ID NO: 36665
  chr1:201507559-201507589
  hypo

SEQ ID NO: 61428 - DNA, 31 bp, Homo sapiens; identical to SEQ ID NO: 1036
  chr1:201507612-201507643
  hypo

SEQ ID NO: 61429 - DNA, 30 bp, Homo sapiens
  chr1:201687844-201687874
  hypo
gggcaagaccatgacggaggatgatgacat

SEQ ID NO: 61430 - DNA, 140 bp, Homo sapiens; identical to SEQ ID NO: 15238
  chr1:201797435-201797575
  hypo

SEQ ID NO: 61431 - DNA, 124 bp, Homo sapiens
  chr1:201851171-201851295
  hypo
aattccccattctcacggggatttagactaggtcttaaccatactttaccaagattccagtagcaaagcacccaaaagtaatcgcaataaaattccaatttttgtaggccgggcatagtggctc

SEQ ID NO: 61432 - DNA, 30 bp, Homo sapiens; identical to SEQ ID NO: 15239
  chr1:201864486-201864516
  hypo

SEQ ID NO: 61433 - DNA, 30 bp, Homo sapiens
  chr1:201923648-201923678
  hypo
aatgtccctgaaatcgagggctccaaattg

SEQ ID NO: 61434 - DNA, 30 bp, Homo sapiens
  chr1:201938904-201938934
  hypo
ataaatgtttaaatcgctaaaggaaaatac

SEQ ID NO: 61435 - DNA, 106 bp, Homo sapiens; identical to SEQ ID NO: 36671
  chr1:201977861-201977967
  hypo

SEQ ID NO: 61436 - DNA, 94 bp, Homo sapiens
  chr1:201981179-201981273
  hypo
gcaagcgccattgacttctcacgatgtgacatggatggcgccaccctctgcaattgtgcccttgaggagctgcgtctggtctttgggcctctgg

SEQ ID NO: 61437 - DNA, 60 bp, Homo sapiens
  chr1:201981828-201981888
  hypo
ccccggcagctgtggcgcaggagccccctcccctggcagctctgacgtctccaccgcagg

SEQ ID NO: 61438 - DNA, 190 bp, Homo sapiens
  chr1:201982338-201982528
  hypo
cccaagcacgggaagcggaaacgaggccggccccgaaagctgagcaaagagtactgggactgtctcgagggcaagaagagcaagcacggtgagctccgggggcacgtgggtcctccctgcgccgggctgagcggcttcctggggcactgcgggttgttgcaggtatcccttctcccgttttctctggcct

SEQ ID NO: 61439 - DNA, 303 bp, Homo sapiens; identical to SEQ ID NO: 15241
  chr1:201982935-201983238
  hypo

SEQ ID NO: 61440 - DNA, 38 bp, Homo sapiens; identical to SEQ ID NO: 15242
  chr1:201984008-201984046
  hypo

SEQ ID NO: 61441 - DNA, 77 bp, Homo sapiens; identical to SEQ ID NO: 15243
  chr1:201997742-201997819
  hypo

SEQ ID NO: 61442 - DNA, 29 bp, Homo sapiens
  chr1:201998118-201998147
  hypo
cgcctgtcgtaactcacaacttcttaagc

SEQ ID NO: 61443 - DNA, 121 bp, Homo sapiens
  chr1:202009832-202009953
  hypo
ttacaggcgtaaaccaccgcgcccgaccttctttcacttttttcacacttcggtgaattctgtgcctacttaacctaacctgtgctgactctgcacaatgttaacacactcttcttttttt

SEQ ID NO: 61444 - DNA, 43 bp, Homo sapiens
  chr1:202022786-202022829
  hypo
cagatgcagccaggcacggtggctcaagcctgtaatcccagca

SEQ ID NO: 61445 - DNA, 80 bp, Homo sapiens
  chr1:202032891-202032971
  hypo
caacaatgtgagacgctgtctcaaaaaaaaaaaaaaaaaaaaaagcagaataaagacaggattttcgaaaaactttcagg

SEQ ID NO: 61446 - DNA, 20 bp, Homo sapiens
  chr1:202033901-202033921
  hypo
agacaaaacaaaacatatgt

SEQ ID NO: 61447 - DNA, 141 bp, Homo sapiens
  chr1:202041209-202041350
  hypo
tgggtgacgagagtgaaactccgtctcaaaaaaaaaaaaaaaaaagaacgatgaggcccagggaatgccatatatgctaggcggccagtctgggttcttaatgacatttttgcccttcacgtctaaggcctctcaatccct

SEQ ID NO: 61448 - DNA, 118 bp, Homo sapiens
  chr1:202042448-202042566
  hypo
agtcccagccctcaaagagctcgccgtctgagtggacatgtcaagtaaacaggctattgccgagcaacgtaagtgcgatattagaggtgtgtactccgcatggaggtagagggagtga

SEQ ID NO: 61449 - DNA, 30 bp, Homo sapiens; identical to SEQ ID NO: 15245
  chr1:202044090-202044120
  hypo

SEQ ID NO: 61450 - DNA, 31 bp, Homo sapiens
  chr1:202049891-202049922
  hypo
aaggatggagatgaaacgggtgagggtaggc

SEQ ID NO: 61451 - DNA, 25 bp, Homo sapiens
  chr1:202051925-202051950
  hypo
agccaccgcccggcctgggaagact

SEQ ID NO: 61452 - DNA, 39 bp, Homo sapiens
  chr1:202052583-202052622
  hypo
caaaagttttctcactcggaggctcggtctccccatctg

SEQ ID NO: 61453 - DNA, 43 bp, Homo sapiens
  chr1:202058379-202058422
  hypo
tgagtcccagagaagtcgaggtcaaggtcgagtaactgtcttt

SEQ ID NO: 61454 - DNA, 29 bp, Homo sapiens
  chr1:202085507-202085536
  hypo
actgcgcccggcctcgaatgtgaatttca

SEQ ID NO: 61455 - DNA, 62 bp, Homo sapiens
  chr1:202097361-202097423
  hypo
agaacgtctgcaacatcgtggtggcctacctctccaccgagctgacccgccagaccctggac

SEQ ID NO: 61456 - DNA, 92 bp, Homo sapiens
  chr1:202115846-202115938
  hypo
gggattacaggcatgagccaccacgccaggccagcaatacatttctgttgtttagaagccacatggtttacggtagtgtgaattgttacagc

SEQ ID NO: 61457 - DNA, 30 bp, Homo sapiens
  chr1:202116522-202116552
  hypo
cagatccaactcctcgggggtttccacaga

SEQ ID NO: 61458 - DNA, 31 bp, Homo sapiens; identical to SEQ ID NO: 15249
  chr1:202127154-202127185
  hypo

SEQ ID NO: 61459 - DNA, 30 bp, Homo sapiens; identical to SEQ ID NO: 36674
  chr1:202187160-202187190
  hypo

SEQ ID NO: 61460 - DNA, 190 bp, Homo sapiens
  chr1:202218131-202218321
  hypo
ctttgagcatctcctgcgtgatagataccaggtaccttcctcaggctgatctccattcagcagcagggccaccagtaccactcaccgaggctccactgcagccgactcctgacttcgctctctcctccccttcacagtccacaccagtggtgtccatcagttcttcatctacaggcgaagcattcttacc

SEQ ID NO: 61461 - DNA, 448 bp, Homo sapiens
  chr1:202287418-202287866
  hypo
ccgcagtgcagtgcagcgtctccgtctcctgtgtccgggcctatgggaagtccccctccctgggcagcgttcgagcaggggtcctaggctgcctggcactggcagggctggccgccgcgctgcccctggcctcagtgggagaatacggggcctccccactctgcctgccctacgcgccacctgagggtcagccagcagccctgggcttcaccgtggccctggtgatgatgaactccttctgtttcctggtcgtggccggtgcctacatcaaactgtactgtgacctgccgcggggcgactttgaggccgtgtgggactgcgccatggtgaggcacgtggcctggctcatcttcgcagacgggctcctctactgtcccgtggccttcctcagctttgcctccatgctgggcctcttccctgtcacgcccgaggccgtcaagtctgtcct

SEQ ID NO: 61462 - DNA, 31 bp, Homo sapiens; identical to SEQ ID NO: 15252
  chr1:202306342-202306373
  hypo

SEQ ID NO: 61463 - DNA, 31 bp, Homo sapiens; identical to SEQ ID NO: 15253
  chr1:202455900-202455931
  hypo

SEQ ID NO: 61464 - DNA, 242 bp, Homo sapiens
  chr1:202531787-202532029
  hypo
ttctggccagggctccgaaatacttcttagaaaaggcgcaaactacccctgagcattaccttctccccactactttgttctcaaaaccaatttttatctttaatattatctcccacaggttggaatcgggaggtagtaatcctacaaccagtgattcttacggtgaccgggcttcagcaagagcccgtcgggaggcccgggaggcccgcctagccaccctgaccagccgtgtagaagaagac

SEQ ID NO: 61465 - DNA, 898 bp, Homo sapiens; identical to SEQ ID NO: 36676
  chr1:202611677-202612575
  hypo

SEQ ID NO: 61466 - DNA, 158 bp, Homo sapiens; identical to SEQ ID NO: 36677
  chr1:202612864-202613022
  hypo

SEQ ID NO: 61467 - DNA, 178 bp, Homo sapiens; identical to SEQ ID NO: 36682
  chr1:202830593-202830771
  hypo

SEQ ID NO: 61468 - DNA, 30 bp, Homo sapiens
  chr1:202897516-202897546
  hypo
gagttcctccctaccgctcactaggcaggg

SEQ ID NO: 61469 - DNA, 102 bp, Homo sapiens
  chr1:202898227-202898329
  hypo
attacaggcgtcagccacagcgcctagccctttgattcttaagggtactaaaaccatagccaagtgggtagcattctaaatttacaacgtgtccccatcttc

SEQ ID NO: 61470 - DNA, 168 bp, Homo sapiens; identical to SEQ ID NO: 15254
  chr1:202933724-202933892
  hypo

SEQ ID NO: 61471 - DNA, 151 bp, Homo sapiens
  chr1:202934386-202934537
  hypo
cggccctggcccttacgtgcatacacatgtgtacacacagccatactgtgccaagaggactatgggaactgataaagtgggagacaggctcaaggagaagacaggtcattaccttttccagtgtaagtgagcaacccgcttggcccccgaa

SEQ ID NO: 61472 - DNA, 31 bp, Homo sapiens; identical to SEQ ID NO: 1046
  chr1:202935961-202935992
  hypo

SEQ ID NO: 61473 - DNA, 38 bp, Homo sapiens
  chr1:202940665-202940703
  hypo
ggaattacaggcatgagccactgcgcctggccccagct

SEQ ID NO: 61474 - DNA, 181 bp, Homo sapiens
  chr1:202995150-202995331
  hypo
agccaggtgcctgaaggcaagcgacacaattcactgaagagcatactacagatgtagtatccggatatcaagtttccccacttaaaaaatgggtgcgatcaaaggaaaagcaaggaacgggcaggagagcaagcgtgaaaggtgacaaacttgacaattacaaggccgagactaaggccaa

SEQ ID NO: 61475 - DNA, 31 bp, Homo sapiens; identical to SEQ ID NO: 15258
  chr1:203054705-203054736
  hypo

SEQ ID NO: 61476 - DNA, 188 bp, Homo sapiens
  chr1:203139341-203139529
  hypo
agaggggtgcagagacgcggaggaagaagcagagacagggagagagttagcacagccagctccgggcccaaacccacctgccttctggatgtgggcgagctccttggtgacggtggccgaggtgctgagtccacacaggttttctgagaagacccggaaggagtacgagttgccgatgatgaggtcag

SEQ ID NO: 61477 - DNA, 36 bp, Homo sapiens
  chr1:203140949-203140985
  hypo
tgcggaaggatgaagccgtctcgctgggtctcagct

SEQ ID NO: 61478 - DNA, 31 bp, Homo sapiens; identical to SEQ ID NO: 36693
  chr1:203143408-203143439
  hypo

SEQ ID NO: 61479 - DNA, 232 bp, Homo sapiens
  chr1:203192502-203192734
  hypo
gtgccatgcagatacgtgaagcagctggctctgggggcagagcagcccccacatgtgctgtgggggctccagctctgggtccctgcacagactggtgatccccgccccgcccagccatacctgtaccagggttgtgaagcgctccttgtctacggcagggctcccctggcttcctgggtactcccagtcaaggtcaaggccgtcaaagctgtatttgcgcagaaacctgatg

SEQ ID NO: 61480 - DNA, 31 bp, Homo sapiens; identical to SEQ ID NO: 15259
  chr1:203242259-203242290
  hypo

SEQ ID NO: 61481 - DNA, 104 bp, Homo sapiens
  chr1:203298361-203298465
  hypo
gtatcatacctgtatccttaccgcatagatgtgtcagggaaagaaatgtcatagaagtgaaagcactttatattttctgggttaaaaaaaaggtgtggcgccgg

SEQ ID NO: 61482 - DNA, 88 bp, Homo sapiens; identical to SEQ ID NO: 15261
  chr1:203429558-203429646
  hypo

SEQ ID NO: 61483 - DNA, 154 bp, Homo sapiens
  chr1:203455858-203456012
  hypo
caacgacctagtggcgttccatgacttctcctcggacctggagaacgtgccacacctgcgctacctgcggctggatggaaactacttgaagccgcccatcccgctggacctcatgatgtgcttccgcctcctgcagtccgtggtcatctaggcc

SEQ ID NO: 61484 - DNA, 215 bp, Homo sapiens
  chr1:203524539-203524754
  hypo
ctctcagatctccaaaggcagcgcaggaaggtagtgcaggaatgtggaaaggcttgcagcgtttggacggagacaggaccctgcgctggagtgggcgaggaggtgggaaacaccctcccgtcatgctcttctcgctcagctttgggaggctgagctttgacacctccttccctccctctcaccccagcctctgcggcccccaattcagctgactc

SEQ ID NO: 61485 - DNA, 66 bp, Homo sapiens
  chr1:203525916-203525982
  hypo
agagaggaggggcaccagaggcctgagaattagaaactcagtgacgggatcaggtctgcaagagat

SEQ ID NO: 61486 - DNA, 31 bp, Homo sapiens; identical to SEQ ID NO: 1050
  chr1:203561334-203561365
  hypo

SEQ ID NO: 61487 - DNA, 30 bp, Homo sapiens
  chr1:203652370-203652400
  hypo
cgatggccgagagccgtgaaggggactttg

SEQ ID NO: 61488 - DNA, 102 bp, Homo sapiens; identical to SEQ ID NO: 15263
  chr1:203690590-203690692
  hypo

SEQ ID NO: 61489 - DNA, 30 bp, Homo sapiens
  chr1:203697688-203697718
  hypo
gaaagttccccagtcggccaggcatggtgg

SEQ ID NO: 61490 - DNA, 30 bp, Homo sapiens
  chr1:203708779-203708809
  hypo
aggaggagttgccacgaacaccactcctgg

SEQ ID NO: 61491 - DNA, 26 bp, Homo sapiens
  chr1:203759743-203759769
  hypo
gtctgtggaaaattcttcacacgtct

SEQ ID NO: 61492 - DNA, 28 bp, Homo sapiens
  chr1:203829352-203829380
  hypo
cctggccgctttgtgtagtttaaaaatc

SEQ ID NO: 61493 - DNA, 162 bp, Homo sapiens
  chr1:204003760-204003922
  hypo
gctgccaccatgccggcgtatgttactaagttttggggtaatttgttatgcagcaataactctttcaagagactagagaggtgagagtttcgcaggggggcagtcttttaaagcagttccccataaaaatgtccttaaacaggacaggcatggtggctcaca

SEQ ID NO: 61494 - DNA, 31 bp, Homo sapiens; identical to SEQ ID NO: 15265
  chr1:204031964-204031995
  hypo

SEQ ID NO: 61495 - DNA, 1004 bp, Homo sapiens; identical to SEQ ID NO: 1055
  chr1:204043133-204044137
  hypo

SEQ ID NO: 61496 - DNA, 20 bp, Homo sapiens
  chr1:204066524-204066544
  hypo
aacttgcttatgaggccggg

SEQ ID NO: 61497 - DNA, 29 bp, Homo sapiens
  chr1:204079234-204079263
  hypo
caggcatgagccgccgcgtctggccagtt

SEQ ID NO: 61498 - DNA, 31 bp, Homo sapiens
  chr1:204091447-204091478
  hypo
gagcagctgtgtgccccgcccccccagccat

SEQ ID NO: 61499 - DNA, 31 bp, Homo sapiens; identical to SEQ ID NO: 15267
  chr1:204092697-204092728
  hypo

SEQ ID NO: 61500 - DNA, 284 bp, Homo sapiens
  chr1:204093884-204094168
  hypo
aagcgcacctgcatcgtggagggcaagcggctgcgcgtgggagagtacaaggccctgatgaggacccggcgtcaggatgcccgccagagctacgtgatcccgtgagcaggcccccccgcaggcagccaggagactgtgtgtacatgtgtagctctcatgagtggctgggtgtcagtgtgtggcctgcctttgtgtgtgaccccaggggtgctgtgtgtatgcgtacgtgtgtgtgttatctgtgtatagctgagcctgcacgtgcgacccgactgtgtatggct

SEQ ID NO: 61501 - DNA, 31 bp, Homo sapiens; identical to SEQ ID NO: 15269
  chr1:204106497-204106528
  hypo

SEQ ID NO: 61502 - DNA, 21 bp, Homo sapiens
  chr1:204122434-204122455
  hypo
atttgagacagaatttcgctc

SEQ ID NO: 61503 - DNA, 224 bp, Homo sapiens
  chr1:204124902-204125126
  hypo
tccagcctttctccctgccaccgagggggccgactcgaacctcacctgaaatacatagtccgcgctggtgagcgtgtattctttgcctcccaggtggaaagagatgtcggggagtgtagggccctcgttacacttcacgacatactggggtggggggcaaagagagccttcttgagtatggaagacgtctcagcagacaaggagtcctgcgctggtggcctggt

SEQ ID NO: 61504 - DNA, 30 bp, Homo sapiens
  chr1:204166950-204166980
  hypo
taatgggctgaagacgctaacttttttttt

SEQ ID NO: 61505 - DNA, 31 bp, Homo sapiens; identical to SEQ ID NO: 15272
  chr1:204187311-204187342
  hypo

SEQ ID NO: 61506 - DNA, 31 bp, Homo sapiens
  chr1:204197938-204197969
  hypo
ctccaggtcaatgtaccgttcagggatgagg

SEQ ID NO: 61507 - DNA, 31 bp, Homo sapiens
  chr1:204198307-204198338
  hypo
ctttcccttcccagctcgcctgatctagctg

SEQ ID NO: 61508 - DNA, 196 bp, Homo sapiens; identical to SEQ ID NO: 15273
  chr1:204199535-204199731
  hypo

SEQ ID NO: 61509 - DNA, 59 bp, Homo sapiens; identical to SEQ ID NO: 15274
  chr1:204212335-204212394
  hypo

SEQ ID NO: 61510 - DNA, 31 bp, Homo sapiens
  chr1:204216413-204216444
  hypo
acctttgcttttgtctcgaggccaactcctc

SEQ ID NO: 61511 - DNA, 104 bp, Homo sapiens
  chr1:204217169-204217273
  hypo
ccgagccacactttcacggggctttttctgctgcttcttggagccattctccaagcagtctgtgtcggaaggtctgcccttacctgctgggaagtagtgaccag

SEQ ID NO: 61512 - DNA, 31 bp, Homo sapiens
  chr1:204220390-204220421
  hypo
ttcaagagcagagttgcgatccccagcatgg

SEQ ID NO: 61513 - DNA, 425 bp, Homo sapiens; identical to SEQ ID NO: 15276
  chr1:204226523-204226948
  hypo

SEQ ID NO: 61514 - DNA, 176 bp, Homo sapiens
  chr1:204228402-204228578
  hypo
cgggggtaccccccggcgcagattcacccactgctgaagctggttcatggagctcttgcgctgggcaattttgtcagggttggtgcgtggtgggaaactccgccggtgtcccccagtctctccatcctgagacgggaaagctgtgctccctggccggcttggggagtggtactgcc

SEQ ID NO: 61515 - DNA, 29 bp, Homo sapiens
  chr1:204278104-204278133
  hypo
ccacgcccggcctcaagaaggtaattcta

SEQ ID NO: 61516 - DNA, 31 bp, Homo sapiens; identical to SEQ ID NO: 15278
  chr1:204286091-204286122
  hypo

SEQ ID NO: 61517 - DNA, 43 bp, Homo sapiens
  chr1:204299941-204299984
  hypo
tagatcaccctggctcagagccgaaaacaaacagcatctccag

SEQ ID NO: 61518 - DNA, 26 bp, Homo sapiens
  chr1:204301508-204301534
  hypo
tttttttttaagacagagtctcgctg

SEQ ID NO: 61519 - DNA, 30 bp, Homo sapiens
  chr1:204306931-204306961
  hypo
tatgctggtgaacaacgcacacacccaaag

SEQ ID NO: 61520 - DNA, 166 bp, Homo sapiens
  chr1:204346112-204346278
  hypo
tattactgagagtagcaaaggcgcgctctctctcaagaatgccaaacatacagtgggcatcgtccccctccctcttgaccacagccccataaagaagcaggacaggagaggagaactgctgtcctgggcacgctgagtctggggcgagggttgccaggaactgagt

SEQ ID NO: 61521 - DNA, 293 bp, Homo sapiens; identical to SEQ ID NO: 36708
  chr1:204347105-204347398
  hypo

SEQ ID NO: 61522 - DNA, 31 bp, Homo sapiens
  chr1:204358693-204358724
  hypo
tgtgggagcaaactttcgatccagtctactc

SEQ ID NO: 61523 - DNA, 31 bp, Homo sapiens
  chr1:204394217-204394248
  hypo
gaatccagagggaacccgagagggagatggt

SEQ ID NO: 61524 - DNA, 194 bp, Homo sapiens
  chr1:204407990-204408184
  hypo
tgtggttaaagagctgtgtgccggcatcaggcacacacacacaccagacgcactccccacccacaaccctaccttctcatactcgtcctccccagggttgtgtttctgcagccagtctgccaggggccggtccttgaacgagccggtcaccccatgctccacctggatcttacgcagggtctcagcattaggga

SEQ ID NO: 61525 - DNA, 251 bp, Homo sapiens
  chr1:204424235-204424486
  hypo
gtgtgtgcgcgtgcacgtgcatgcgcaagtgagaagggtgggggaggaagacgacatatgccgacatgaatgccaacacacgggggtccctgtggctcatgacaggtgcctgacagaagaggtcagagaaggccccggtttcccaggctgcctcctttgttctctgccaatcgcccagaggaatacattaagtaaggaacaaagagagaaggggaagggggttggggaaaggggaccggcaggggcggggt

SEQ ID NO: 61526 - DNA, 44 bp, Homo sapiens; identical to SEQ ID NO: 15281
  chr1:204486799-204486843
  hypo

SEQ ID NO: 61527 - DNA, 44 bp, Homo sapiens; identical to SEQ ID NO: 15282
  chr1:204487137-204487181
  hypo

SEQ ID NO: 61528 - DNA, 106 bp, Homo sapiens; identical to SEQ ID NO: 36713
  chr1:204487762-204487868
  hypo

SEQ ID NO: 61529 - DNA, 31 bp, Homo sapiens
  chr1:204497982-204498013
  hypo
cgagctgtcatggtgacgacgtccttgaagc

SEQ ID NO: 61530 - DNA, 201 bp, Homo sapiens; identical to SEQ ID NO: 36714
  chr1:204518655-204518856
  hypo

SEQ ID NO: 61531 - DNA, 409 bp, Homo sapiens; identical to SEQ ID NO: 15284
  chr1:204531125-204531534
  hypo

SEQ ID NO: 61532 - DNA, 264 bp, Homo sapiens
  chr1:204531593-204531857
  hypo
cccgaccctgcttagtttccgagatctggcgtgttcagggtggtatggccgtagacactaatggtggtgcctggctgcctcttcaagagcccggcccagccacgcccgcccgactccaggcgtcactgccaccccagggtcgtggggctcggactggggacccctgagctgctcgcctgcggtcggactgctctccccttctacgcccaagcaccgccggtctgccctgctgcgccttccaccggcctcccagagcctccagcc

SEQ ID NO: 61533 - DNA, 30 bp, Homo sapiens; identical to SEQ ID NO: 15286
  chr1:204536216-204536246
  hypo

SEQ ID NO: 61534 - DNA, 118 bp, Homo sapiens
  chr1:204537917-204538035
  hypo
cagggattcctgtgccatctccggtcccttctggatctgagattcaggaattctggggctgtgattccttgaaggcagagccgggaacatgaaaaccgtagacactaatcaatgcctg

SEQ ID NO: 61535 - DNA, 122 bp, Homo sapiens
  chr1:204540720-204540842
  hypo
gcaaattaatgtcagcattcccgatggcttctgtatgcatctgctctttggattcttttttgagcggtcgtaacatcttactagttcccttattaatcgacgagttaaatcattggcatgtc

SEQ ID NO: 61536 - DNA, 30 bp, Homo sapiens
  chr1:204586532-204586562
  hypo
tgagggcagccccccgaggtgagatggagt

SEQ ID NO: 61537 - DNA, 47 bp, Homo sapiens
  chr1:204721216-204721263
  hypo
ctgtagccgcccaacccgcagctacagacccacgcctcctgctgtat

SEQ ID NO: 61538 - DNA, 101 bp, Homo sapiens; identical to SEQ ID NO: 15289
  chr1:204913447-204913548
  hypo

SEQ ID NO: 61539 - DNA, 30 bp, Homo sapiens; identical to SEQ ID NO: 15290
  chr1:204948123-204948153
  hypo

SEQ ID NO: 61540 - DNA, 213 bp, Homo sapiens; identical to SEQ ID NO: 15291
  chr1:204948535-204948748
  hypo

SEQ ID NO: 61541 - DNA, 200 bp, Homo sapiens
  chr1:204954944-204955144
  hypo
caagcaaaggaaagaccggtcactaccaccaccactaacaactaacccagccctgcctgcctgacccctcaccagcctgcctctgtcccgaaggcctactactggagggagagcagcttgctgaagaacctgtgggtgtctcagaagagacagcaagccagcttccctggtgaccgcctccgtggcgtggtgtcccgcct

SEQ ID NO: 61542 - DNA, 314 bp, Homo sapiens; identical to SEQ ID NO: 15293
  chr1:204955352-204955666
  hypo

SEQ ID NO: 61543 - DNA, 31 bp, Homo sapiens
  chr1:204962416-204962447
  hypo
gccggggtagtcaacacgccatgtggacatt

SEQ ID NO: 61544 - DNA, 30 bp, Homo sapiens
  chr1:204962775-204962805
  hypo
cagagagtctctgcccgctgtccttggtcg

SEQ ID NO: 61545 - DNA, 383 bp, Homo sapiens
  chr1:205038771-205039154
  hypo
gctctgactcaaacgcggataacttcctgtcccccttccacgcacccgctgccccttacgcgaatccacgctgcaggcgtaggcgtccagggccgctactcttggcaaaggttgggtggggccagggaacgggcagggacacatgccgcggaccctcgcccatgccatgctcttgcccctcagcccatgtcacgggagtaccagaacggagacggcttcggctacctgctgtccttccgcaggcagggcagcactcactggcagaccgcccgggtgcctggcgccgatgcccagtactttgtctacagcaacgagagcgtccggccctacacgccctttgaggtcaagatccgcagctacaaccgccgcggggatgggcccga

SEQ ID NO: 61546 - DNA, 31 bp, Homo sapiens; identical to SEQ ID NO: 15295
  chr1:205042897-205042928
  hypo

SEQ ID NO: 61547 - DNA, 21 bp, Homo sapiens
  chr1:205051221-205051242
  hypo
gccaccgcgcctggccagaaa

SEQ ID NO: 61548 - DNA, 16 bp, Homo sapiens
  chr1:205094564-205094580
  hypo
ttttgagacggagtct

SEQ ID NO: 61549 - DNA, 30 bp, Homo sapiens; identical to SEQ ID NO: 15297
  chr1:205114619-205114649
  hypo

SEQ ID NO: 61550 - DNA, 46 bp, Homo sapiens
  chr1:205144483-205144529
  hypo
tgctgggattacaggcgtgagccaccgtgcccgccagaagctgcct

SEQ ID NO: 61551 - DNA, 30 bp, Homo sapiens; identical to SEQ ID NO: 15298
  chr1:205156818-205156848
  hypo

SEQ ID NO: 61552 - DNA, 30 bp, Homo sapiens; identical to SEQ ID NO: 15299
  chr1:205159808-205159838
  hypo

SEQ ID NO: 61553 - DNA, 20 bp, Homo sapiens
  chr1:205174866-205174886
  hypo
ccagccgaaaatgcctattt

SEQ ID NO: 61554 - DNA, 30 bp, Homo sapiens
  chr1:205210755-205210785
  hypo
cagcagggtatgtccgaccatgactcccca

SEQ ID NO: 61555 - DNA, 30 bp, Homo sapiens
  chr1:205220964-205220994
  hypo
tttctcgtttagtcacgtcagctcatggta

SEQ ID NO: 61556 - DNA, 178 bp, Homo sapiens
  chr1:205245772-205245950
  hypo
tcactcagccagaagagcagtcggggtggtgacagcagcgatgcccgccagacacagggcctcccaggagagcactcccgccttggtccccccataccccaaggctcgactgtccggatgaagcatcctgggcccagcggtgccacctcagccatgcgcctgcctccaggcagccatc

SEQ ID NO: 61557 - DNA, 31 bp, Homo sapiens; identical to SEQ ID NO: 15300
  chr1:205250964-205250995
  hypo

SEQ ID NO: 61558 - DNA, 33 bp, Homo sapiens; identical to SEQ ID NO: 15301
  chr1:205269966-205269999
  hypo

SEQ ID NO: 61559 - DNA, 61 bp, Homo sapiens; identical to SEQ ID NO: 15302
  chr1:205273576-205273637
  hypo

SEQ ID NO: 61560 - DNA, 87 bp, Homo sapiens
  chr1:205310684-205310771
  hypo
aactacaagcctgggtcgacagcaccggctcagtgccttctgttaccctattccatcaccctaattgccacctgttactgaataatc

SEQ ID NO: 61561 - DNA, 30 bp, Homo sapiens; identical to SEQ ID NO: 1061
  chr1:205312680-205312710
  hypo

SEQ ID NO: 61562 - DNA, 447 bp, Homo sapiens; identical to SEQ ID NO: 36724
  chr1:205399688-205400135
  hypo

SEQ ID NO: 61563 - DNA, 1209 bp, Homo sapiens; identical to SEQ ID NO: 36726
  chr1:205425208-205426417
  hypo

SEQ ID NO: 61564 - DNA, 189 bp, Homo sapiens
  chr1:205548917-205549106
  hypo
ggccatctccctggtgtttgccgtcatccccttctgccgcgacgtgaaggtgctggcctcagtcatggcgctggcgggcttggccatgggctgcatcgacaccgtggccaacatgcagctggtaaggatgtaccagaaggactcggccgtcttcctccaggtaagcccggccagcaggcacagggctgg

SEQ ID NO: 61565 - DNA, 30 bp, Homo sapiens; identical to SEQ ID NO: 15306
  chr1:205550654-205550684
  hypo

SEQ ID NO: 61566 - DNA, 663 bp, Homo sapiens
  chr1:205631892-205632555
  hypo
cacagccccgagtgtcgtctctggtgggcggctcccacaccagcctctgctggctgccaaggccttaccttcatcatagtgtctccgggcctcggtgcccggctcagctctgggcacgccctggtacagcccctcgcccacgaaatccgtgtaaaacagcgtgaaggtcatgagtgccatccagctgcacagctcagccacgaagagccggcgcagggtgcggggcatgcggcagcacagctggtgcagccggggaagcagggcgcccaggttccggaaagccaagcgggcccggcatggacagcagtggggcgacaaggagggggccgacagcccttctgctggctcggtggggcccagcgctgcctcctcagccaccagcagtgtggctgctacgcaggtgaggaagatgagggtgagcaggccaaagaggcactcctcctgggtgcccaggtagggggccagggcactggtgtcccagtcaatggcaggcaggaggtagcccaggcagcccccaagactgatcatgaaggcatagacagagtaggcctggcgacagtggtccgggtcccggaagaggtcagagagcagggcctccagtggagtgaagcacacctggccacagaagtccagcagccccacgcccaggatgagcagtgccag

SEQ ID NO: 61567 - DNA, 140 bp, Homo sapiens; identical to SEQ ID NO: 1065
  chr1:205721777-205721917
  hypo

SEQ ID NO: 61568 - DNA, 30 bp, Homo sapiens
  chr1:205779663-205779693
  hypo
aacccaggcttgggcgccgcaggacctctt

SEQ ID NO: 61569 - DNA, 30 bp, Homo sapiens
  chr1:205818469-205818499
  hypo
aacatcccacaccccgggaacactccactc

SEQ ID NO: 61570 - DNA, 30 bp, Homo sapiens; identical to SEQ ID NO: 1066
  chr1:206955685-206955715
  hypo

SEQ ID NO: 61571 - DNA, 31 bp, Homo sapiens; identical to SEQ ID NO: 15310
  chr1:207063116-207063147
  hypo

SEQ ID NO: 61572 - DNA, 30 bp, Homo sapiens
  chr1:207075385-207075415
  hypo
ggtttctgctattccggagagcattcaaac

SEQ ID NO: 61573 - DNA, 30 bp, Homo sapiens
  chr1:207081169-207081199
  hypo
tccctaccacttcccggcccccagccgcat

SEQ ID NO: 61574 - DNA, 124 bp, Homo sapiens
  chr1:207087069-207087193
  hypo
gtagtctgagcctccaatcagcggaggaacctaccactgtggacattcagggtgactttctgggtctttccccggtctgtgttcatgcccgctccgcaggcatagactccgctgtcactttctg

SEQ ID NO: 61575 - DNA, 190 bp, Homo sapiens; identical to SEQ ID NO: 15312
  chr1:207088567-207088757
  hypo

SEQ ID NO: 61576 - DNA, 30 bp, Homo sapiens
  chr1:207089084-207089114
  hypo
agtcccctaacagtccgggatatgagagag

SEQ ID NO: 61577 - DNA, 99 bp, Homo sapiens
  chr1:207105075-207105174
  hypo
ctccaaattccctggagttctcgaagtctgacatgctaatgtctgtcctgtagcttctgattgaaactcggtctgtccgggaggaagaggagttggtgt

SEQ ID NO: 61578 - DNA, 184 bp, Homo sapiens
  chr1:207130058-207130242
  hypo
caagcaaggggcacggcgatccagaacatagctgtggaggtgggctgctccgagtggcctttgctgaagtacacaccttgcagagcctgctccctcattggttgaataggatccatgatgtctgtcctatctccgttacaggattatttggggcaggtcattgagaaagcgaacaggaaaatag

SEQ ID NO: 61579 - DNA, 141 bp, Homo sapiens; identical to SEQ ID NO: 15313
  chr1:207182656-207182797
  hypo

SEQ ID NO: 61580 - DNA, 298 bp, Homo sapiens
  chr1:207195375-207195673
  hypo
ttgacactgacacagggggggcgaggaagcttgtcacggctctgtccttggtaggacaggcgcttggagctctgctcctgctccaggtcagccagcttgcctacctggatacctgcaaaatctttccccgtgcccagggaggccgggcggggccgagaattacgtaagacactgggcgagatcttgtccaagaaggagccctttcccagagaagtgctggttttggggctggcatctttctcagttgaaaggtagctgctcagtcccacgcctgagcgctccagagtgttggacttga

SEQ ID NO: 61581 - DNA, 593 bp, Homo sapiens
  chr1:207200593-207201186
  hypo
cctaatgaaaatcggcggaaaaagtctcatttgcccagttgctctctaaggtcgtcccatcctattctctatagagccagggctgactcaggcagaaagcacccactggtgttgtgaatcactccccaacaatgaaagagaaggtgcagtgagccaggatgggtggcaggaaaggatagggcagggcagggcagggcaggtgtgcagagagcagaccaggttgcgggagggagagtattacgtacagatccagagcgggtggaggtgctgctcatcatgctgtcacagctgccgacacgggtcacgggttctgagccagtccccgctggccacagctccctctcgggcatcacccgaaacaaggtgcagggatggcaaagggggcttctagaggggaagcgaggggaagtgaacaatgtcccaagccgggcctgaaaagagaagaatcaaagccacacatgagccgaggcttcggcaaggctctgcccaggccctgggcggcatggcgggaaggacaccaagcaagcagagagctggaaggggggcatgaacagccactgcccgacacccccggcctgcatggaaggaccctg

SEQ ID NO: 61582 - DNA, 93 bp, Homo sapiens; identical to SEQ ID NO: 15316
  chr1:207227536-207227629
  hypo

SEQ ID NO: 61583 - DNA, 48 bp, Homo sapiens
  chr1:207241013-207241061
  hypo
ttgggggtgactctggcctctcggtgcggggaaagcaggtgagtaatt

SEQ ID NO: 61584 - DNA, 154 bp, Homo sapiens; identical to SEQ ID NO: 15317
  chr1:207478914-207479068
  hypo

SEQ ID NO: 61585 - DNA, 19 bp, Homo sapiens
  chr1:207575673-207575692
  hypo
tggagtgcgatgttgcgat

SEQ ID NO: 61586 - DNA, 31 bp, Homo sapiens
  chr1:207596502-207596533
  hypo
gactggccaccataaccgtgagtgaaagcag

SEQ ID NO: 61587 - DNA, 30 bp, Homo sapiens; identical to SEQ ID NO: 15319
  chr1:207643127-207643157
  hypo

SEQ ID NO: 61588 - DNA, 466 bp, Homo sapiens; identical to SEQ ID NO: 36740
  chr1:207669321-207669787
  hypo

SEQ ID NO: 61589 - DNA, 295 bp, Homo sapiens; identical to SEQ ID NO: 36741
  chr1:207669828-207670123
  hypo

SEQ ID NO: 61590 - DNA, 31 bp, Homo sapiens
  chr1:207832515-207832546
  hypo
atggaggatgggatcccgccaagggaactct

SEQ ID NO: 61591 - DNA, 27 bp, Homo sapiens
  chr1:207921528-207921555
  hypo
gggtagaacatcatggtgccctgcatt

SEQ ID NO: 61592 - DNA, 42 bp, Homo sapiens
  chr1:207921794-207921836
  hypo
aactctccactccttaaaaccactccacgtgtgcccatctcg

SEQ ID NO: 61593 - DNA, 125 bp, Homo sapiens
  chr1:207936509-207936634
  hypo
gcttgggcctgctgccgtccggcctcccacctccagctgcaattgcattctgacctgggcaagtaggaacacgtagtggagatcctgatggagacctgagccaggcgtcccggagtgctggccag

SEQ ID NO: 61594 - DNA, 38 bp, Homo sapiens
  chr1:207963084-207963122
  hypo
tgagggtgttaggccgggtttggtggctcacgcctgta

SEQ ID NO: 61595 - DNA, 42 bp, Homo sapiens
  chr1:207974073-207974115
  hypo
aaactggctcactgggccaggcgaggtggttcacgcctgtaa

SEQ ID NO: 61596 - DNA, 374 bp, Homo sapiens
  chr1:207991578-207991952
  hypo
tgcatcttctctctcggtcgcaagaaggtggggtggggtggggcggggcggggcggggcggggcggggcggggcggggcggggcggggcgggacgggacgggacggggcgggacggggcggggcagggcggggggatcacgcgcctatagcgcaaagctgcggtatggagaaaagcctagaacccacagccgccatgatgacgcaaacaaaattaaaagggtcaagaactcaaggcccactgtttcacctaagaagaaaaggaagaagatgaaggggagaagagaagctctgatttgggtcaatatggaaaggggaggctgacgcaggctgcccaagagccagcctttagcttagtgacggtgatgcggatccg

SEQ ID NO: 61597 - DNA, 61 bp, Homo sapiens
  chr1:207992292-207992353
  hypo
ccctgctgagttacctggtgtcgctcccatcctgatgcccgggcggtggccgccttctctg

SEQ ID NO: 61598 - DNA, 31 bp, Homo sapiens; identical to SEQ ID NO: 1071
  chr1:207995366-207995397
  hypo

SEQ ID NO: 61599 - DNA, 627 bp, Homo sapiens; identical to SEQ ID NO: 36745
  chr1:208084083-208084710
  hypo

SEQ ID NO: 61600 - DNA, 283 bp, Homo sapiens; identical to SEQ ID NO: 15326
  chr1:208136458-208136741
  hypo

SEQ ID NO: 61601 - DNA, 30 bp, Homo sapiens
  chr1:208164340-208164370
  hypo
ggtggcaatgcgagtcgccttccagcgtct

SEQ ID NO: 61602 - DNA, 30 bp, Homo sapiens
  chr1:208164602-208164632
  hypo
ttcttaatcgcctctcgactgtctgttaat

SEQ ID NO: 61603 - DNA, 31 bp, Homo sapiens
  chr1:208201565-208201596
  hypo
ccgggcccaggtccttcgagggcactgatgt

SEQ ID NO: 61604 - DNA, 213 bp, Homo sapiens
  chr1:208212990-208213203
  hypo
cggatgagcttgtcctcgctcagggagtagcgggcctcgcccgtgatggcatcaatggggcccttctccatctgctgcttgatggcacagtatagcatgaagagtggctcccctgcgcactcctgtgggcacagacagggcaggaggtgtgggcacggcctcctcaggtttgtacgttttccctttcctctctcggagcgaggccagtggaag

SEQ ID NO: 61605 - DNA, 31 bp, Homo sapiens
  chr1:208215054-208215085
  hypo
acagctctagaggcaccgggaggaagagact

SEQ ID NO: 61606 - DNA, 31 bp, Homo sapiens
  chr1:208317146-208317177
  hypo
gtattgactacctactcgaattgttctctaa

SEQ ID NO: 61607 - DNA, 166 bp, Homo sapiens
  chr1:208328463-208328629
  hypo
caggtgcatggagcgcgaaccccttgcatagtggccgttccagcctgcttttgaaggcagcctctctcagagcaaggaggagtcgtttgactagggtctccacaggaccggtgctggggacacagagggccgcagtcactgggccgaagggatggcagccttctgt

SEQ ID NO: 61608 - DNA, 31 bp, Homo sapiens; identical to SEQ ID NO: 15328
  chr1:208397335-208397366
  hypo

SEQ ID NO: 61609 - DNA, 667 bp, Homo sapiens
  chr1:208404412-208405079
  hypo
agacatttgagacccttgaggcgctatcagcccagccccggacctcttggatccctcagcccactgtgagggagagtgacgggcgcagttttctgagaggttgagacagggggaagaatgtgctgatggggagcagggtgggaatggcaggccggggagggaggacctagggcaggagatgaaaagtgctccctgagtgagaatctggccctggatgatgaatggggtgtgagagagaagccgggaaaagggtaaacagccaggagggacccaggagggaagcgggagggaggggtgaggagaaagaatgtggaggtcaaggagcaaagaaaatgctcctggagtgattgactcaagatccaacatgttccgcaccggatgaaggcacatgtgcacacagatgtgcctggtcacccgccctcccctccacacgcctgcgaaggtgtgagcacgtctgtctgctctcctcccagatgcattccatgcccttcggaaaaacctttcttctgatgtttggttctgagtgtgcaagggaccccactgtaatacgaacaagtatttgtgcaatgattttatagtttcctaaaaatttcacatgcatcatcccgctaacgtaccccttactcaagctggtgaggttgagagcagcatacgcatcaccagttta

SEQ ID NO: 61610 - DNA, 531 bp, Homo sapiens; identical to SEQ ID NO: 36746
  chr1:208416771-208417302
  hypo

SEQ ID NO: 61611 - DNA, 31 bp, Homo sapiens; identical to SEQ ID NO: 1076
  chr1:208418805-208418836
  hypo

SEQ ID NO: 61612 - DNA, 39 bp, Homo sapiens
  chr1:208837627-208837666
  hypo
ccatcatatgtggaacgtggcgctcgcatatttcatttt

SEQ ID NO: 61613 - DNA, 30 bp, Homo sapiens; identical to SEQ ID NO: 15334
  chr1:209346596-209346626
  hypo

SEQ ID NO: 61614 - DNA, 30 bp, Homo sapiens
  chr1:209602627-209602657
  hypo
accgcatccggcctcatgttctttttcatt

SEQ ID NO: 61615 - DNA, 31 bp, Homo sapiens
  chr1:209790962-209790993
  hypo
ggtgggtctcataggtcggggggttcatccc

SEQ ID NO: 61616 - DNA, 30 bp, Homo sapiens
  chr1:209799176-209799206
  hypo
gcagggcctgctcccggaggtccgcatcat

SEQ ID NO: 61617 - DNA, 198 bp, Homo sapiens
  chr1:209803088-209803286
  hypo
ggtctcctgaatggaagctcccgggcgccggttccggaaatagtgcagctgacaccgctcacagttcttgccttcggtgtggtcccggcaattgtcacacacacctccatatgccccctggctggcggcaaacacagcggggtcaaagtgacatgtctctgagtgcccattgcagtcgcaccctggaaaaagagagtc

SEQ ID NO: 61618 - DNA, 31 bp, Homo sapiens
  chr1:209808685-209808716
  hypo
atttcccctttccccacgttcactcttactc

SEQ ID NO: 61619 - DNA, 28 bp, Homo sapiens
  chr1:209814136-209814164
  hypo
ctagcacaggccaggcgcggtggctcac

SEQ ID NO: 61620 - DNA, 52 bp, Homo sapiens
  chr1:209823345-209823397
  hypo
agtccacaggtagatgaagctcggagaaaccgggtcctcccaacaagcaggt

SEQ ID NO: 61621 - DNA, 102 bp, Homo sapiens; identical to SEQ ID NO: 15335
  chr1:209825650-209825752
  hypo

SEQ ID NO: 61622 - DNA, 121 bp, Homo sapiens; identical to SEQ ID NO: 15336
  chr1:210032047-210032168
  hypo

SEQ ID NO: 61623 - DNA, 227 bp, Homo sapiens; identical to SEQ ID NO: 1079
  chr1:210110983-210111210
  hypo

SEQ ID NO: 61624 - DNA, 138 bp, Homo sapiens; identical to SEQ ID NO: 1080
  chr1:210111283-210111421
  hypo

SEQ ID NO: 61625 - DNA, 126 bp, Homo sapiens; identical to SEQ ID NO: 1081
  chr1:210111796-210111922
  hypo

SEQ ID NO: 61626 - DNA, 38 bp, Homo sapiens; identical to SEQ ID NO: 1082
  chr1:210112036-210112074
  hypo

SEQ ID NO: 61627 - DNA, 28 bp, Homo sapiens
  chr1:210439527-210439555
  hypo
gggcgcggtggctcacgcctgtaatccc

SEQ ID NO: 61628 - DNA, 308 bp, Homo sapiens; identical to SEQ ID NO: 1084
  chr1:210465688-210465996
  hypo

SEQ ID NO: 61629 - DNA, 60 bp, Homo sapiens
  chr1:210495123-210495183
  hypo
aagacaagcagagatcctcaacgttcagacacttctgccggtgtgtgaagcattaaaggt

SEQ ID NO: 61630 - DNA, 47 bp, Homo sapiens; identical to SEQ ID NO: 15343
  chr1:210560010-210560057
  hypo

SEQ ID NO: 61631 - DNA, 149 bp, Homo sapiens
  chr1:210637836-210637985
  hypo
tttgcctttcaggaggactggcgttagcccaggtgctctttttctacgtgaagtacttggtgctctttggcgtgcctgctctgctcatgcgcctggatggactcactccacccgccctcccccgctgcgtgagcaccatgttcagtttc

SEQ ID NO: 61632 - DNA, 43 bp, Homo sapiens
  chr1:210699156-210699199
  hypo
atgtaaaaagctctgagtcagcgatgttgcttagaaagatggg

SEQ ID NO: 61633 - DNA, 32 bp, Homo sapiens
  chr1:210714465-210714497
  hypo
tgagccactgcgtctagccaagtattgctttt

SEQ ID NO: 61634 - DNA, 692 bp, Homo sapiens
  chr1:210856747-210857439
  hypo
tctcaatattggtcattttggcgtttaaggccttgatgtcctccttcagctcgtgcctcacctccaggactgtggcctgcagcgtctgctcagggatggggtagaacgaatgcttgacctctgccaggatgggactccgatcctggggactcctggcctcacccacgttgtccaggcgcaagtcgctcttggtgatgccactgtcacacgagtctgtcttcttcagtgtggcctcgcctgacgcttttgtcctctcgggaagtgtctccatcgactcagccttggacaccttgttccagtcctcactcttcccgcaagcatctttgaagcgggcccagcttttgcgcttggcacaatcgcccccgccccccttggggcccaggcactcggaccctggcgcctgtagctttgcgtggtctggcaccccggaggtggaggctgcctggaaggatacgggcgtggcaggactctcacgcacggtgaccacgctggccttcacgaggctgtggttggcggaggcatgctctgtaaggacattgcccttctccacatctaggtcatccaggtcccggccccctctctcagctgccagcctggcctctttctgctgtcggaatctctggaagaggcgccggacagggtggtccgggggcaagatcaggggggcctcattctttcgtttcatgcgttct

SEQ ID NO: 61635 - DNA, 106 bp, Homo sapiens
  chr1:211430455-211430561
  hypo
tggcctatcaagccattctaaagcattctttccatgtccagcttcttcttttcctcttctaacccattacagtcaggcatttccaagatttcgccttagacctttt

SEQ ID NO: 61636 - DNA, 24 bp, Homo sapiens
  chr1:211510372-211510396
  hypo
cacgtgcactgttttatgtgttgg

SEQ ID NO: 61637 - DNA, 31 bp, Homo sapiens
  chr1:211518071-211518102
  hypo
gtgctttctcctccttcgttttcctttcctt

SEQ ID NO: 61638 - DNA, 30 bp, Homo sapiens
  chr1:211518761-211518791
  hypo
atcacaggattcaacgccagccatgacctt

SEQ ID NO: 61639 - DNA, 77 bp, Homo sapiens
  chr1:211606710-211606787
  hypo
caggtgtgagccaccgtacctggcccatgtacttcttacttagtttttcttcccgcgtcttatgtttacatttgcaa

SEQ ID NO: 61640 - DNA, 243 bp, Homo sapiens
  chr1:211712703-211712946
  hypo
agctcccactctgcacctctgcgacacccttgccttcacgtgaatgtcccttcccttcagcctgcccaaatctccacgtccttctgaacccagcttgcgtgctcacgcctgtgaagtccctgaccatgaaaagccattccttgccctggcccatcagttatagcctgtgcccggcaggcatggattgccgcccgttattccatgtaggtcctccctggtgacggctgtgctgcccaaggacaa

SEQ ID NO: 61641 - DNA, 78 bp, Homo sapiens
  chr1:211801002-211801080
  hypo
ctagaggtagtttggcgggggcggtgttctcgtttttttgtgttaatttttttttcttttgagatggagtctcgctct

SEQ ID NO: 61642 - DNA, 71 bp, Homo sapiens
  chr1:211824878-211824949
  hypo
cagcacatcctggcagcgtgttctccttagcttatgtcagactcctggatctggtccgccaggcctggttc

SEQ ID NO: 61643 - DNA, 27 bp, Homo sapiens
  chr1:211839838-211839865
  hypo
ctaatttttaaaaataagtatcggctg

SEQ ID NO: 61644 - DNA, 30 bp, Homo sapiens
  chr1:211851652-211851682
  hypo
gaatgtggctcctacgcacatatgctcatt

SEQ ID NO: 61645 - DNA, 31 bp, Homo sapiens; identical to SEQ ID NO: 15345
  chr1:211969081-211969112
  hypo

SEQ ID NO: 61646 - DNA, 31 bp, Homo sapiens
  chr1:211990520-211990551
  hypo
tcatattagggggaaacgtatatattgatct

SEQ ID NO: 61647 - DNA, 768 bp, Homo sapiens; identical to SEQ ID NO: 36772
  chr1:212003415-212004183
  hypo

SEQ ID NO: 61648 - DNA, 31 bp, Homo sapiens
  chr1:212086234-212086265
  hypo
cgtgaaccactgtgaccgacctcttttttta

SEQ ID NO: 61649 - DNA, 34 bp, Homo sapiens; identical to SEQ ID NO: 15348
  chr1:212321600-212321634
  hypo

SEQ ID NO: 61650 - DNA, 30 bp, Homo sapiens; identical to SEQ ID NO: 1088
  chr1:212395928-212395958
  hypo

SEQ ID NO: 61651 - DNA, 45 bp, Homo sapiens; identical to SEQ ID NO: 15350
  chr1:212456676-212456721
  hypo

SEQ ID NO: 61652 - DNA, 40 bp, Homo sapiens; identical to SEQ ID NO: 15351
  chr1:212555381-212555421
  hypo

SEQ ID NO: 61653 - DNA, 40 bp, Homo sapiens
  chr1:212555660-212555700
  hypo
ggcatgagccaccacgcccggctggagtgttttatggttg

SEQ ID NO: 61654 - DNA, 31 bp, Homo sapiens
  chr1:212557992-212558023
  hypo
gtaaatcaatacaaaacgcctaccctgtctt

SEQ ID NO: 61655 - DNA, 30 bp, Homo sapiens
  chr1:212788585-212788615
  hypo
tccatcacaaaagccgaggtgggttctatc

SEQ ID NO: 61656 - DNA, 268 bp, Homo sapiens; identical to SEQ ID NO: 36779
  chr1:212873455-212873723
  hypo

SEQ ID NO: 61657 - DNA, 793 bp, Homo sapiens; identical to SEQ ID NO: 36780
  chr1:212873750-212874543
  hypo

SEQ ID NO: 61658 - DNA, 17 bp, Homo sapiens
  chr1:212963986-212964003
  hypo
gggcgaggtggctcacg

SEQ ID NO: 61659 - DNA, 31 bp, Homo sapiens; identical to SEQ ID NO: 15354
  chr1:212964371-212964402
  hypo

SEQ ID NO: 61660 - DNA, 21 bp, Homo sapiens
  chr1:213007809-213007830
  hypo
tgagaaggagtctcactctgt

SEQ ID NO: 61661 - DNA, 474 bp, Homo sapiens
  chr1:213029990-213030464
  hypo
ctccagatctcaagacggtgtctggcacataccattcaatacaagtttggtacctggaacccactgaatatgcatgtccagtaactattaactacatgtgttggtgcaagggagaaggtcgagcaaccggatctgctccatcatagcccgtctcagtcgcttcattcaagtcagcggggtgaggttgaggggattccaacttcacaagggcagatttctcatggactctctttctctggttgtactggaacactttctggcgttattcctctgctgggacagcatgaacttatgaaacgtggtcctgtctgccctaaagccagggtctcaccgacaaggacagcgatgctggggcgagaaataaagttcgtcctgggcctgcgtacggtacagcgcccttgggaagcccttgtggagttaagggtgatgcccacttctttgtctccctcattctgtttcggtggctctctcgtt

SEQ ID NO: 61662 - DNA, 43 bp, Homo sapiens
  chr1:213117544-213117587
  hypo
ttatagcaatgtgagaatggacgaatacatcctgtctctacaa

SEQ ID NO: 61663 - DNA, 205 bp, Homo sapiens
  chr1:213134378-213134583
  hypo
gtgaccatgctgccatcggctctcaggagcacctctctctctggtggctttagccctctgcctgcccccagaagctgggccccagagcgcctccttcataaacacctcctcttctctatttttctgcagccttcaataccccaggtcccaaactacaggctgtcgatgacgatcccagactggctccaggcgatccagaattaca

SEQ ID NO: 61664 - DNA, 181 bp, Homo sapiens
  chr1:213189653-213189834
  hypo
taaacagagcagtgaaaatttttaattgcccaaagtgcagattcccagctgaggctgaacaacgcatcctctgggtgcccatggaactgaggtaccacagaattttgcaattaatgttgcggaagcacagccatagctctcactttaaaatgtacgtgtatgggccgggcgcggtggctca

SEQ ID NO: 61665 - DNA, 31 bp, Homo sapiens; identical to SEQ ID NO: 36785
  chr1:213266553-213266584
  hypo

SEQ ID NO: 61666 - DNA, 31 bp, Homo sapiens; identical to SEQ ID NO: 15356
  chr1:213346046-213346077
  hypo

SEQ ID NO: 61667 - DNA, 30 bp, Homo sapiens; identical to SEQ ID NO: 1094
  chr1:213529200-213529230
  hypo

SEQ ID NO: 61668 - DNA, 30 bp, Homo sapiens; identical to SEQ ID NO: 15358
  chr1:213562763-213562793
  hypo

SEQ ID NO: 61669 - DNA, 30 bp, Homo sapiens
  chr1:214503107-214503137
  hypo
agcatccagtgatgacggcaacgaagcatt

SEQ ID NO: 61670 - DNA, 191 bp, Homo sapiens
  chr1:214503368-214503559
  hypo
ccttaaagtaaacagcgcattcctccgctgcagcccgccttatcctctgcatgggccctgcaggtgactgcaaaggcacgggaatgacaaggattgagtttacctgtagcagactgaagctttatctttttggaccccgtaggtttttaccagctatattgatctcctgtacccaacggaagatagaaatg

SEQ ID NO: 61671 - DNA, 31 bp, Homo sapiens
  chr1:214543809-214543840
  hypo
caatcgctgtaggtcacgttactcctttcgg

SEQ ID NO: 61672 - DNA, 763 bp, Homo sapiens; identical to SEQ ID NO: 15359
  chr1:214556791-214557554
  hypo

SEQ ID NO: 61673 - DNA, 39 bp, Homo sapiens
  chr1:214557875-214557914
  hypo
ggcctgtacgagggcacgatgatcgcgctgtgccggtgg

SEQ ID NO: 61674 - DNA, 190 bp, Homo sapiens
  chr1:214569255-214569445
  hypo
tatccccctacccacacgtgaggagaagagcctgctgcagtcccctaccggtcaccacattgcattataatttttacttctgtgatgagatctctgatgagaccaagcagaccacaggccccatacccggtgcagggattctgccttcttcgtttctgtgttccaagcactgaatcgagtacctggccca

SEQ ID NO: 61675 - DNA, 22 bp, Homo sapiens
  chr1:214600332-214600354
  hypo
tatgattacaggccagcgtggt

SEQ ID NO: 61676 - DNA, 445 bp, Homo sapiens; identical to SEQ ID NO: 15360
  chr1:214637792-214638237
  hypo

SEQ ID NO: 61677 - DNA, 201 bp, Homo sapiens
  chr1:214662583-214662784
  hypo
ctcatgttatgggtgacgaaactgaggcttgcggaggttgagattttgctcaaggacacaaagccaggaagtggcagagccaaacccaaaaccgtatccatctgtaccatgccctctccccttgcccacccttttcccatatgcgccagtcacctgcaaagagcaggaaccatggaaccaccataccgtttctaatctcca

SEQ ID NO: 61678 - DNA, 31 bp, Homo sapiens
  chr1:214679484-214679515
  hypo
catcaatagcattaatcgaaaaacttctcag

SEQ ID NO: 61679 - DNA, 23 bp, Homo sapiens
  chr1:214736761-214736784
  hypo
aaattttttttttttttgagacg

SEQ ID NO: 61680 - DNA, 20 bp, Homo sapiens
  chr1:214765486-214765506
  hypo
agagtcaaaaaaaaagaaag

SEQ ID NO: 61681 - DNA, 30 bp, Homo sapiens; identical to SEQ ID NO: 15362
  chr1:214788496-214788526
  hypo

SEQ ID NO: 61682 - DNA, 210 bp, Homo sapiens; identical to SEQ ID NO: 15363
  chr1:214788822-214789032
  hypo

SEQ ID NO: 61683 - DNA, 172 bp, Homo sapiens; identical to SEQ ID NO: 15364
  chr1:214809711-214809883
  hypo

SEQ ID NO: 61684 - DNA, 100 bp, Homo sapiens
  chr1:214819260-214819360
  hypo
gctgagaagaggcatcgagaaactgagagttcgcattgaggccgatgaaaagaagcagctgcacatcgcagagaaactgaaagaacgcgagcgggagaat

SEQ ID NO: 61685 - DNA, 31 bp, Homo sapiens; identical to SEQ ID NO: 15365
  chr1:215567332-215567363
  hypo

SEQ ID NO: 61686 - DNA, 149 bp, Homo sapiens; identical to SEQ ID NO: 1114
  chr1:215740889-215741038
  hypo

SEQ ID NO: 61687 - DNA, 32 bp, Homo sapiens; identical to SEQ ID NO: 36809
  chr1:215744969-215745001
  hypo

SEQ ID NO: 61688 - DNA, 91 bp, Homo sapiens
  chr1:215745300-215745391
  hypo
agcatgttttgataatgatagaaaatttattttggagactaaggcactttttatggaacagtgcatacacggcttctgctgttactgacac

SEQ ID NO: 61689 - DNA, 42 bp, Homo sapiens; identical to SEQ ID NO: 15369
  chr1:215764970-215765012
  hypo

SEQ ID NO: 61690 - DNA, 620 bp, Homo sapiens; identical to SEQ ID NO: 36810
  chr1:216774193-216774813
  hypo

SEQ ID NO: 61691 - DNA, 37 bp, Homo sapiens
  chr1:217805230-217805267
  hypo
aatgaacgtatctgccgggtgtggtggctcacgcctg

SEQ ID NO: 61692 - DNA, 26 bp, Homo sapiens
  chr1:218567538-218567564
  hypo
ccgcacccggccggcattggcctctt

SEQ ID NO: 61693 - DNA, 31 bp, Homo sapiens; identical to SEQ ID NO: 15371
  chr1:218897274-218897305
  hypo

SEQ ID NO: 61694 - DNA, 600 bp, Homo sapiens; identical to SEQ ID NO: 1126
  chr1:219346992-219347592
  hypo

SEQ ID NO: 61695 - DNA, 167 bp, Homo sapiens; identical to SEQ ID NO: 1127
  chr1:220101043-220101210
  hypo

SEQ ID NO: 61696 - DNA, 242 bp, Homo sapiens; identical to SEQ ID NO: 1128
  chr1:220101370-220101612
  hypo

SEQ ID NO: 61697 - DNA, 129 bp, Homo sapiens; identical to SEQ ID NO: 1129
  chr1:220101674-220101803
  hypo

SEQ ID NO: 61698 - DNA, 303 bp, Homo sapiens; identical to SEQ ID NO: 36832
  chr1:220101864-220102167
  hypo

SEQ ID NO: 61699 - DNA, 39 bp, Homo sapiens; identical to SEQ ID NO: 15377
  chr1:220376259-220376298
  hypo

SEQ ID NO: 61700 - DNA, 38 bp, Homo sapiens; identical to SEQ ID NO: 15378
  chr1:220426846-220426884
  hypo

SEQ ID NO: 61701 - DNA, 892 bp, Homo sapiens; identical to SEQ ID NO: 36835
  chr1:220701600-220702492
  hypo

SEQ ID NO: 61702 - DNA, 31 bp, Homo sapiens; identical to SEQ ID NO: 15380
  chr1:220881047-220881078
  hypo

SEQ ID NO: 61703 - DNA, 777 bp, Homo sapiens; identical to SEQ ID NO: 36837
  chr1:220921396-220922173
  hypo

SEQ ID NO: 61704 - DNA, 30 bp, Homo sapiens
  chr1:220978323-220978353
  hypo
ggaaatctctacacacgtgtcaggggcagg

SEQ ID NO: 61705 - DNA, 1318 bp, Homo sapiens; identical to SEQ ID NO: 36839
  chr1:221051891-221053209
  hypo

SEQ ID NO: 61706 - DNA, 496 bp, Homo sapiens; identical to SEQ ID NO: 36840
  chr1:221053255-221053751
  hypo

SEQ ID NO: 61707 - DNA, 30 bp, Homo sapiens; identical to SEQ ID NO: 1139
  chr1:221118798-221118828
  hypo

SEQ ID NO: 61708 - DNA, 46 bp, Homo sapiens
  chr1:221660545-221660591
  hypo
tgattctataatgcctcgagcctatcttcatcattacatcactgga

SEQ ID NO: 61709 - DNA, 24 bp, Homo sapiens
  chr1:221724006-221724030
  hypo
tttgtgccactgttaccgggggtc

SEQ ID NO: 61710 - DNA, 29 bp, Homo sapiens
  chr1:221753160-221753189
  hypo
caggcatgagccaccgcgcccggccggaa

SEQ ID NO: 61711 - DNA, 30 bp, Homo sapiens; identical to SEQ ID NO: 36845
  chr1:222045430-222045460
  hypo

SEQ ID NO: 61712 - DNA, 30 bp, Homo sapiens; identical to SEQ ID NO: 36846
  chr1:222164932-222164962
  hypo

SEQ ID NO: 61713 - DNA, 43 bp, Homo sapiens; identical to SEQ ID NO: 15384
  chr1:222222864-222222907
  hypo

SEQ ID NO: 61714 - DNA, 83 bp, Homo sapiens; identical to SEQ ID NO: 15385
  chr1:222260738-222260821
  hypo

SEQ ID NO: 61715 - DNA, 30 bp, Homo sapiens
  chr1:222794499-222794529
  hypo
gtgttaatgtaccgcggtgaggctcttgaa

SEQ ID NO: 61716 - DNA, 255 bp, Homo sapiens
  chr1:222910922-222911177
  hypo
tgggagagtagtacaagatggcgtcagaaagctcgtaggggttaggtatacagccttgtaggccattatgaggagtttggcttttactctaggtgagacgggaacccactggagagttttaagcaaagacatgacatggtctcacttaggatttaacaattctggctccttttcgagcgtagactggagggggccaattaggaggctgctgcaataatctaggtgagagacgacggcaagggtgagagatgatag

SEQ ID NO: 61717 - DNA, 45 bp, Homo sapiens; identical to SEQ ID NO: 15386
  chr1:223003689-223003734
  hypo

SEQ ID NO: 61718 - DNA, 31 bp, Homo sapiens; identical to SEQ ID NO: 15387
  chr1:223195635-223195666
  hypo

SEQ ID NO: 61719 - DNA, 386 bp, Homo sapiens
  chr1:223211665-223212051
  hypo
tggggcgcagggtggccgaggctgcgcgtccacatctcatcattcctggactgttgagattggccattggtgactttacctcctgtctgcgctgtgccagcaaaggtggagcccacaccctggggtagaacagctcttgctcagggagggcccgctctgggcatggttgggctcggggcttcgttgggcccggggcatggttgggctccacgcctgagtctccctgcagctcccacgtgtgtgcctcctcctcagtgagacatagtccctgcagtgtttaaaggtggggatcacatgttttgctcagtggctttggggactgggtgtttctcctctcaaacaaaattgggagccttctgggtctttggccccgcctgcctctgcat

SEQ ID NO: 61720 - DNA, 20 bp, Homo sapiens
  chr1:223233055-223233075
  hypo
atttgagtcctccttgcggc

SEQ ID NO: 61721 - DNA, 186 bp, Homo sapiens
  chr1:223257416-223257602
  hypo
taattaactgtggcgcgtatgtttgtcttctccagttgatgctggtgcacgtgtatagtctgaggtttgtttttccccagcctcacccccatggtgcctaatacaccacatcgtgcacagcaggcgcttggagcacgcctgtaaactgaaggctgcttgggatgcccatcacgttcccttatgcca

SEQ ID NO: 61722 - DNA, 93 bp, Homo sapiens; identical to SEQ ID NO: 1143
  chr1:223307233-223307326
  hypo

SEQ ID NO: 61723 - DNA, 31 bp, Homo sapiens
  chr1:223396862-223396893
  hypo
cctaaggcactcaagccgccactcacagctt

SEQ ID NO: 61724 - DNA, 1380 bp, Homo sapiens; identical to SEQ ID NO: 36853
  chr1:223537347-223538727
  hypo

SEQ ID NO: 61725 - DNA, 165 bp, Homo sapiens; identical to SEQ ID NO: 15393
  chr1:223813495-223813660
  hypo

SEQ ID NO: 61726 - DNA, 30 bp, Homo sapiens; identical to SEQ ID NO: 15394
  chr1:223853130-223853160
  hypo

SEQ ID NO: 61727 - DNA, 30 bp, Homo sapiens; identical to SEQ ID NO: 15395
  chr1:223888416-223888446
  hypo

SEQ ID NO: 61728 - DNA, 101 bp, Homo sapiens
  chr1:223894432-223894533
  hypo
aaaactgagactgacacgtggaggtgcaaaattaaaaaggaagctttggttagtatctccagaacctggctaggcacggtggctcacatctgtaatctcag

SEQ ID NO: 61729 - DNA, 21 bp, Homo sapiens
  chr1:223899321-223899342
  hypo
tttatttttgatatggagttt

SEQ ID NO: 61730 - DNA, 21 bp, Homo sapiens
  chr1:223899581-223899602
  hypo
aactaccgcacccagccttat

SEQ ID NO: 61731 - DNA, 776 bp, Homo sapiens; identical to SEQ ID NO: 36855
  chr1:223899910-223900686
  hypo

SEQ ID NO: 61732 - DNA, 195 bp, Homo sapiens
  chr1:223907485-223907680
  hypo
gtaatttctcaggggtgtgtgcgtgtgtgtgtgtgtgtgtgtgtgtgtgcgcgcgcgcgcgtataatgcagtattggtcattttgttctttcagccttttattttggaggactctagttagatcacaatctgtgaaatgtggtatactgtactctcaccctgattctggcacctggccagcgggtgctgatgggg

SEQ ID NO: 61733 - DNA, 43 bp, Homo sapiens
  chr1:223908288-223908331
  hypo
gattacaggcgtgagccactgcgcccagccaagatcattcttt

SEQ ID NO: 61734 - DNA, 204 bp, Homo sapiens
  chr1:223922151-223922355
  hypo
ccagtgctcactatttacctttatttcttccttattcggacaccccttgcttccaaagaagagtttcggaaggctcaagacggtgagacagacaccttatgcactgcttcactctcccccgcagctcccctccctcctcactgacccccggccacaaccctctctccttgcccctcaccagccggcacccttggcaaccctggc

SEQ ID NO: 61735 - DNA, 173 bp, Homo sapiens; identical to SEQ ID NO: 36856
  chr1:223936579-223936752
  hypo

SEQ ID NO: 61736 - DNA, 69 bp, Homo sapiens; identical to SEQ ID NO: 1148
  chr1:223936995-223937064
  hypo

SEQ ID NO: 61737 - DNA, 30 bp, Homo sapiens
  chr1:223953280-223953310
  hypo
gagcagcattcgctccgcgcgtgcctctga

SEQ ID NO: 61738 - DNA, 18 bp, Homo sapiens
  chr1:223954365-223954383
  hypo
gaatgcaggcccatggcg

SEQ ID NO: 61739 - DNA, 30 bp, Homo sapiens
  chr1:223968136-223968166
  hypo
agacagcgatgtgacggcactggtcctttc

SEQ ID NO: 61740 - DNA, 30 bp, Homo sapiens
  chr1:224044367-224044397
  hypo
cacagcttcctgctcgattagaccgtcccc

SEQ ID NO: 61741 - DNA, 105 bp, Homo sapiens
  chr1:224051403-224051508
  hypo
taatgtaactaagtcacagtccgcctagaagcattcgcagtggacagtggaggggccagacttgtcatactcctcctgcttgctgatccatatctgctggaaggt

SEQ ID NO: 61742 - DNA, 27 bp, Homo sapiens
  chr1:224242939-224242966
  hypo
agtggatgagccaggcgcggtggctca

SEQ ID NO: 61743 - DNA, 20 bp, Homo sapiens
  chr1:224251307-224251327
  hypo
cccagcccaataaagcattt

SEQ ID NO: 61744 - DNA, 30 bp, Homo sapiens; identical to SEQ ID NO: 15407
  chr1:224252071-224252101
  hypo

SEQ ID NO: 61745 - DNA, 271 bp, Homo sapiens
  chr1:224300431-224300702
  hypo
cttagtctttgtcttttgtaacgttaacacttttgaataatttatgggcccgtcatctagcgatgtctacctcaaacgcaactcgtgctttttttgcatgaatactacattatgctgcgtccttttcagggtattatattaataggcatatgatattggctcctcctataactgtggcgttagtcttgatcatttggttatgatggtgtccaccaaatttctctattgtaaactttttttttttttctcgctctgttgcccaggctggagt

SEQ ID NO: 61746 - DNA, 17 bp, Homo sapiens
  chr1:224321489-224321506
  hypo
ggcgtgagcctccaagc

SEQ ID NO: 61747 - DNA, 30 bp, Homo sapiens; identical to SEQ ID NO: 15409
  chr1:224327150-224327180
  hypo

SEQ ID NO: 61748 - DNA, 264 bp, Homo sapiens
  chr1:224345146-224345410
  hypo
aaacaaatggtgctggcgtgactgttctcaggcgtgaaatttctgagcttcgcaccaaagtgcaagaacagcaaaaacagcttcaagaccaggaccagaaactgctagagcagacccagatcataggtgaacaaaatgcacggttggcagagctagaacgcaaactacgagaagtaatggaaagtgctgtaggaaattcctcagggtccgggcagaatgaggagtctcctcggaaacgaaaaaaggccacggaagccatagact

SEQ ID NO: 61749 - DNA, 91 bp, Homo sapiens; identical to SEQ ID NO: 15411
  chr1:224368627-224368718
  hypo

SEQ ID NO: 61750 - DNA, 120 bp, Homo sapiens; identical to SEQ ID NO: 15412
  chr1:224386053-224386173
  hypo

SEQ ID NO: 61751 - DNA, 29 bp, Homo sapiens
  chr1:224407011-224407040
  hypo
acagaggctggagtgcaatggcgcaatct

SEQ ID NO: 61752 - DNA, 29 bp, Homo sapiens
  chr1:224407159-224407188
  hypo
gggatttcgccatgttggctaggctggat

SEQ ID NO: 61753 - DNA, 28 bp, Homo sapiens
  chr1:224447647-224447675
  hypo
aggcatgagccatcgcatccagccgtaa

SEQ ID NO: 61754 - DNA, 31 bp, Homo sapiens; identical to SEQ ID NO: 36859
  chr1:224481115-224481146
  hypo

SEQ ID NO: 61755 - DNA, 29 bp, Homo sapiens
  chr1:224493969-224493998
  hypo
aaaaattttttttttttgagacggagtct

SEQ ID NO: 61756 - DNA, 22 bp, Homo sapiens
  chr1:224529878-224529900
  hypo
ttacaggcgtgagccacccctg

SEQ ID NO: 61757 - DNA, 30 bp, Homo sapiens
  chr1:224543850-224543880
  hypo
tcctactggatatccggattaaaagcgttc

SEQ ID NO: 61758 - DNA, 35 bp, Homo sapiens; identical to SEQ ID NO: 1151
  chr1:224622765-224622800
  hypo

SEQ ID NO: 61759 - DNA, 30 bp, Homo sapiens; identical to SEQ ID NO: 36863
  chr1:224622840-224622870
  hypo

SEQ ID NO: 61760 - DNA, 251 bp, Homo sapiens; identical to SEQ ID NO: 1152
  chr1:224691179-224691430
  hypo

SEQ ID NO: 61761 - DNA, 706 bp, Homo sapiens; identical to SEQ ID NO: 36865
  chr1:224803589-224804295
  hypo

SEQ ID NO: 61762 - DNA, 291 bp, Homo sapiens; identical to SEQ ID NO: 1154
  chr1:224804395-224804686
  hypo

SEQ ID NO: 61763 - DNA, 92 bp, Homo sapiens; identical to SEQ ID NO: 15420
  chr1:225113073-225113165
  hypo

SEQ ID NO: 61764 - DNA, 639 bp, Homo sapiens; identical to SEQ ID NO: 36870
  chr1:225117199-225117838
  hypo

SEQ ID NO: 61765 - DNA, 21 bp, Homo sapiens
  chr1:225118300-225118321
  hypo
accatacttttttttttgaga

SEQ ID NO: 61766 - DNA, 35 bp, Homo sapiens
  chr1:225581811-225581846
  hypo
cgcccggccacagcgatgttatctttatgatttta

SEQ ID NO: 61767 - DNA, 30 bp, Homo sapiens
  chr1:225590847-225590877
  hypo
aaagatcaactactcggctccatagtcctg

SEQ ID NO: 61768 - DNA, 409 bp, Homo sapiens; identical to SEQ ID NO: 15424
  chr1:225597843-225598252
  hypo

SEQ ID NO: 61769 - DNA, 30 bp, Homo sapiens; identical to SEQ ID NO: 15425
  chr1:225598546-225598576
  hypo

SEQ ID NO: 61770 - DNA, 34 bp, Homo sapiens; identical to SEQ ID NO: 15426
  chr1:225608022-225608056
  hypo

SEQ ID NO: 61771 - DNA, 605 bp, Homo sapiens; identical to SEQ ID NO: 1160
  chr1:225614687-225615292
  hypo

SEQ ID NO: 61772 - DNA, 30 bp, Homo sapiens
  chr1:225635110-225635140
  hypo
accgatgttcatgcacgcaggagcatgtgt

SEQ ID NO: 61773 - DNA, 30 bp, Homo sapiens
  chr1:225635825-225635855
  hypo
ggcttctggacttttcgttactttagcctg

SEQ ID NO: 61774 - DNA, 229 bp, Homo sapiens
  chr1:225637188-225637417
  hypo
cgactgccaactatacgggtgcatatctcagcgcggtcacacccttcttgcccagacctgcctctgctctgtcctcctggcccctgaggagcacctggggcagaggaggagcccctaggaaccttccatgatagagcacaggagtctgcaagcggttgatttggtctcctctacccggcccctccctctctctggaccctgcaatgtcgaggtagagagtgttattccc

SEQ ID NO: 61775 - DNA, 31 bp, Homo sapiens; identical to SEQ ID NO: 15429
  chr1:225645397-225645428
  hypo

SEQ ID NO: 61776 - DNA, 26 bp, Homo sapiens
  chr1:225646855-225646881
  hypo
agaaaaataatcggttgtggaggtgg

SEQ ID NO: 61777 - DNA, 30 bp, Homo sapiens; identical to SEQ ID NO: 15430
  chr1:225651944-225651974
  hypo

SEQ ID NO: 61778 - DNA, 30 bp, Homo sapiens
  chr1:225663386-225663416
  hypo
gcagaacaaacagacggatccagagccgat

SEQ ID NO: 61779 - DNA, 46 bp, Homo sapiens
  chr1:225696994-225697040
  hypo
cggacactgtcactaaagaggcggcgggtggaaggatgagggagta

SEQ ID NO: 61780 - DNA, 30 bp, Homo sapiens; identical to SEQ ID NO: 15431
  chr1:225842738-225842768
  hypo

SEQ ID NO: 61781 - DNA, 30 bp, Homo sapiens
  chr1:225883146-225883176
  hypo
ggttacgaaaataacgcaccataatatttc

SEQ ID NO: 61782 - DNA, 93 bp, Homo sapiens
  chr1:225907935-225908028
  hypo
cataataagtggccactgaaccggtgagtgcgttcttttccatcctatcaaaaagaggatcagaacagttgattcacttggaacagacaacat

SEQ ID NO: 61783 - DNA, 93 bp, Homo sapiens
  chr1:225908327-225908420
  hypo
aaaaaaagtacatttacagtcttgccccagggctgtgttaatgctcctgctcgtggcataatatagtcctgagagacacgggctggctggata

SEQ ID NO: 61784 - DNA, 83 bp, Homo sapiens
  chr1:225920483-225920566
  hypo
tagaagttgttactcctttctaaagaaacgactaacctacagggactacctgcagaaggagtgggcatcgggtatgttaacag

SEQ ID NO: 61785 - DNA, 44 bp, Homo sapiens
  chr1:225945259-225945303
  hypo
agcaaggggctagatgcggtggctcatgcctgtactcccagcac

SEQ ID NO: 61786 - DNA, 29 bp, Homo sapiens
  chr1:225980372-225980401
  hypo
ccgtgcccggctccagtatgaccttttaa

SEQ ID NO: 61787 - DNA, 79 bp, Homo sapiens
  chr1:225988362-225988441
  hypo
cttctgagcgcccagcttacccaccgagctcctttcggtcatcctcaggtttcctttgatgatgcgtcctccacttcca

SEQ ID NO: 61788 - DNA, 30 bp, Homo sapiens
  chr1:225996967-225996997
  hypo
gatcaacgctctcacggaagctaaaagagc

SEQ ID NO: 61789 - DNA, 51 bp, Homo sapiens; identical to SEQ ID NO: 36876
  chr1:225998106-225998157
  hypo

SEQ ID NO: 61790 - DNA, 28 bp, Homo sapiens
  chr1:226003695-226003723
  hypo
agagaatgccaaggactggcccggcatg

SEQ ID NO: 61791 - DNA, 56 bp, Homo sapiens
  chr1:226026644-226026700
  hypo
caccaggctctccttccggcggggtgagcagggagttggcccgaggaagctgggaa

SEQ ID NO: 61792 - DNA, 109 bp, Homo sapiens
  chr1:226053431-226053540
  hypo
ggagccactccatacacgtgtggcagggccaggtccttctcagatctcacctggatacccaagcgagagacagaaggcgctcacctaaggtgctcgccctgcgggtggg

SEQ ID NO: 61793 - DNA, 43 bp, Homo sapiens
  chr1:226059445-226059488
  hypo
ctggggaagcccaagggattccgtaccccttcctgcctgcaaa

SEQ ID NO: 61794 - DNA, 30 bp, Homo sapiens
  chr1:226062326-226062356
  hypo
ctgcctagttctgcacgtcagccctgtctc

SEQ ID NO: 61795 - DNA, 226 bp, Homo sapiens
  chr1:226062773-226062999
  hypo
ctcctcaggctgagccagaaacggtcagttttttcctctgagtttgattcccctgaaggcaggccccgcaggccctgcaatcccccagcagagagcatgcatgcaggcagcaaggcaccacgagaacctgtgctcgggctggcttggcctccgtaagctgggacacctcagcaagcttgtgtccaatggcaacctcagggctggactaagccgcttagctctagac

SEQ ID NO: 61796 - DNA, 263 bp, Homo sapiens; identical to SEQ ID NO: 15435
  chr1:226077114-226077377
  hypo

SEQ ID NO: 61797 - DNA, 31 bp, Homo sapiens
  chr1:226094607-226094638
  hypo
atggtgtgtgtgtgtgcgtgtgtgtgtgtgc

SEQ ID NO: 61798 - DNA, 148 bp, Homo sapiens; identical to SEQ ID NO: 15436
  chr1:226102815-226102963
  hypo

SEQ ID NO: 61799 - DNA, 356 bp, Homo sapiens; identical to SEQ ID NO: 15437
  chr1:226109457-226109813
  hypo

SEQ ID NO: 61800 - DNA, 233 bp, Homo sapiens
  chr1:226163117-226163350
  hypo
ataacacaaaaataaagacatggttgtatacacagacactgaaattcctctagcggaaaacaacagcaaatgattaaagataacgttgtttgttgaggacagaagtaataatgttatgggatattcagcaagactaaatgatttattcaccacctgtacagtgaaaactgaagctaaatctgagaattaaggaatcagaaagaacagggcgccgggcgcggtggctcacgtcc

SEQ ID NO: 61801 - DNA, 31 bp, Homo sapiens
  chr1:226196858-226196889
  hypo
accctagaccacaatgcgctgttataaaaga

SEQ ID NO: 61802 - DNA, 31 bp, Homo sapiens; identical to SEQ ID NO: 15439
  chr1:226250006-226250037
  hypo

SEQ ID NO: 61803 - DNA, 172 bp, Homo sapiens; identical to SEQ ID NO: 36883
  chr1:226297379-226297551
  hypo

SEQ ID NO: 61804 - DNA, 30 bp, Homo sapiens
  chr1:226304035-226304065
  hypo
agggtcagggtgagccgtgttcgggccctt

SEQ ID NO: 61805 - DNA, 36 bp, Homo sapiens
  chr1:226310958-226310994
  hypo
gctgggattacatgcgtgagcccccagcctaaaagt

SEQ ID NO: 61806 - DNA, 31 bp, Homo sapiens
  chr1:226378903-226378934
  hypo
taacttacataaacagttcagcgcaactatc

SEQ ID NO: 61807 - DNA, 30 bp, Homo sapiens
  chr1:226410182-226410212
  hypo
atctccctttgagtcgaccacagtgagtga

SEQ ID NO: 61808 - DNA, 120 bp, Homo sapiens; identical to SEQ ID NO: 1166
  chr1:226411103-226411223
  hypo

SEQ ID NO: 61809 - DNA, 765 bp, Homo sapiens; identical to SEQ ID NO: 36887
  chr1:226411246-226412011
  hypo

SEQ ID NO: 61810 - DNA, 18 bp, Homo sapiens
  chr1:226437619-226437637
  hypo
ctcacacctgtaatcccg

SEQ ID NO: 61811 - DNA, 30 bp, Homo sapiens; identical to SEQ ID NO: 36888
  chr1:226497344-226497374
  hypo

SEQ ID NO: 61812 - DNA, 108 bp, Homo sapiens
  chr1:226596302-226596410
  hypo
gggatcaggggcatgagctaccacgccggccccaaactcttaagtgtgtcctctctcccctgagggcagctgggtccgggaagcgcaggcccccgcctcgggaatata

SEQ ID NO: 61813 - DNA, 21 bp, Homo sapiens
  chr1:226643671-226643692
  hypo
cagctgcggtgtcttcatgga

SEQ ID NO: 61814 - DNA, 817 bp, Homo sapiens; identical to SEQ ID NO: 36890
  chr1:226736710-226737527
  hypo

SEQ ID NO: 61815 - DNA, 29 bp, Homo sapiens
  chr1:226737804-226737833
  hypo
cgtgcccctgtcggcgagcctgttgccaa

SEQ ID NO: 61816 - DNA, 30 bp, Homo sapiens
  chr1:226748116-226748146
  hypo
tgctggttggcaagacgcgagcagcctcca

SEQ ID NO: 61817 - DNA, 31 bp, Homo sapiens
  chr1:226774439-226774470
  hypo
ctaaggagatggtagccgtgttgtctcctat

SEQ ID NO: 61818 - DNA, 279 bp, Homo sapiens; identical to SEQ ID NO: 15445
  chr1:226789938-226790217
  hypo

SEQ ID NO: 61819 - DNA, 31 bp, Homo sapiens; identical to SEQ ID NO: 15446
  chr1:226822615-226822646
  hypo

SEQ ID NO: 61820 - DNA, 377 bp, Homo sapiens
  chr1:226826316-226826693
  hypo
gcagagcatctatccagtctgcgagccgctgcagcagcaacacacaagacagaactttgtcatgaacttgtacaacccacactcctggactcggagacagctcgccagctcttgctggcagggagcagcgtgacctcgggcacacaagatggggacaagcaggtctacccacagcaggtctgctgtgaagatttgctgcacgcttggcatgacacctggcagacggcgggcactgttctctctctcagggcatgggaaatgctctctggagctatggggccgatggctaagggagagtcagtgagtgtccgccaagcttccccgcctacccgccgcacgccagggacaagcacatcgccttcttctttactttccaa

SEQ ID NO: 61821 - DNA, 272 bp, Homo sapiens
  chr1:226829481-226829753
  hypo
gtctggccttggggcgggccacccacattctgagcctgtgcctggagaagcttacagcttccaaagggcgctgagagaagccaagccccctgaggtgggcacgggtggggcccgaggctgccctcactcgccggcctcaccttgattccctcgatcctgaaccccagggtggccgtggagctgatggtctcccgccactgcatgtaccgtggcttggtcacagcccgctgtgctttttcctcctcggtgggggcctcggggtccacctcgat

SEQ ID NO: 61822 - DNA, 153 bp, Homo sapiens
  chr1:226833940-226834093
  hypo
aacatgagcaccgcacgctggacaccatgggggccgacagccttagggaggttcaccaagcctgcacaggggagaaggagccgtgctgtggatgactcagggtggaagggcagcagtttgagaggtaatgagaaaacccggctgcctaaaact

SEQ ID NO: 61823 - DNA, 30 bp, Homo sapiens
  chr1:226834588-226834618
  hypo
gcctcagaacccagccggtgccctttttct

SEQ ID NO: 61824 - DNA, 70 bp, Homo sapiens
  chr1:226834884-226834954
  hypo
gtccatcacacagggcgagtcgaagtcggccagcaggtcgtccatctggttgtagcgctccccgtccttc

SEQ ID NO: 61825 - DNA, 209 bp, Homo sapiens; identical to SEQ ID NO: 15447
  chr1:226908274-226908483
  hypo

SEQ ID NO: 61826 - DNA, 31 bp, Homo sapiens; identical to SEQ ID NO: 15448
  chr1:226911753-226911784
  hypo

SEQ ID NO: 61827 - DNA, 2121 bp, Homo sapiens; identical to SEQ ID NO: 36895
  chr1:226924900-226927021
  hypo

SEQ ID NO: 61828 - DNA, 22 bp, Homo sapiens
  chr1:226983985-226984007
  hypo
taaaaggtggctcttgctgggc

SEQ ID NO: 61829 - DNA, 30 bp, Homo sapiens; identical to SEQ ID NO: 36898
  chr1:227058890-227058920
  hypo

SEQ ID NO: 61830 - DNA, 30 bp, Homo sapiens
  chr1:227163685-227163715
  hypo
cgccttaaacagagcgtcctggtgtgagcc

SEQ ID NO: 61831 - DNA, 30 bp, Homo sapiens; identical to SEQ ID NO: 15450
  chr1:227163981-227164011
  hypo

SEQ ID NO: 61832 - DNA, 30 bp, Homo sapiens
  chr1:227165249-227165279
  hypo
ggcagggtgggccccgggagggttgagcct

SEQ ID NO: 61833 - DNA, 30 bp, Homo sapiens
  chr1:227167005-227167035
  hypo
cactgagtccctgccgccttctgcctgtga

SEQ ID NO: 61834 - DNA, 30 bp, Homo sapiens
  chr1:227170613-227170643
  hypo
tgggccccaactggcgggacaagttggaat

SEQ ID NO: 61835 - DNA, 30 bp, Homo sapiens
  chr1:227172589-227172619
  hypo
attttggggcaacgcgggaatatgacagat

SEQ ID NO: 61836 - DNA, 30 bp, Homo sapiens
  chr1:227174061-227174091
  hypo
agaactcagcgccccgggcactgtgggagg

SEQ ID NO: 61837 - DNA, 122 bp, Homo sapiens; identical to SEQ ID NO: 15451
  chr1:227175822-227175944
  hypo

SEQ ID NO: 61838 - DNA, 30 bp, Homo sapiens
  chr1:227182600-227182630
  hypo
agggcatgggctgccgcttggcactgtagc

SEQ ID NO: 61839 - DNA, 196 bp, Homo sapiens
  chr1:227191026-227191222
  hypo
tacacttggggactgcacttacgctggcacactcgatcgacactctctctgatctccaagcaagtaccatgctcccgggaaagcacacacttgagaaagttacagaaaagcaaccttcagccaagaacattcttccccaagtgaagctacaatgatcacttgataatctacaatcgcactgcttataatccaggaa

SEQ ID NO: 61840 - DNA, 83 bp, Homo sapiens
  chr1:227248037-227248120
  hypo
tgaaccatatctacttcggcaatttctaacattcagtgcaacctaacatttgttgtgagctcacaatacgttggatactaagc

SEQ ID NO: 61841 - DNA, 31 bp, Homo sapiens
  chr1:227254155-227254186
  hypo
gaacttgagcgttatgcgaaatatcttggat

SEQ ID NO: 61842 - DNA, 31 bp, Homo sapiens
  chr1:227311005-227311036
  hypo
agaaaaaacagtactacgaaactgggttagc

SEQ ID NO: 61843 - DNA, 25 bp, Homo sapiens
  chr1:227318266-227318291
  hypo
aggggaggtgtaggtgcggtggctc

SEQ ID NO: 61844 - DNA, 172 bp, Homo sapiens
  chr1:227370568-227370740
  hypo
gcatgaagcctgcttccgctttccctgccctgggacatcagactccaggttcaccagcctttggacttgcaccagcagcttcccggggaatctcaggacttcagccacagactgaaggctgccatgtcggcttccctggttttccggctttcaaactcggactgagccatta

SEQ ID NO: 61845 - DNA, 45 bp, Homo sapiens; identical to SEQ ID NO: 15454
  chr1:227376421-227376466
  hypo

SEQ ID NO: 61846 - DNA, 120 bp, Homo sapiens; identical to SEQ ID NO: 15455
  chr1:227422354-227422474
  hypo

SEQ ID NO: 61847 - DNA, 28 bp, Homo sapiens
  chr1:227453319-227453347
  hypo
agactccgtcttaaaaaaaaaaaaaaaa

SEQ ID NO: 61848 - DNA, 35 bp, Homo sapiens; identical to SEQ ID NO: 15456
  chr1:227463300-227463335
  hypo

SEQ ID NO: 61849 - DNA, 23 bp, Homo sapiens
  chr1:227469606-227469629
  hypo
gaagccaggcatgttggctcacg

SEQ ID NO: 61850 - DNA, 29 bp, Homo sapiens
  chr1:227478959-227478988
  hypo
gaagtctaggctgggcgcggtggctcatg

SEQ ID NO: 61851 - DNA, 31 bp, Homo sapiens
  chr1:227488696-227488727
  hypo
tcatatccatcctttgcgtcatttacatcat

SEQ ID NO: 61852 - DNA, 31 bp, Homo sapiens; identical to SEQ ID NO: 15457
  chr1:227545941-227545972
  hypo

SEQ ID NO: 61853 - DNA, 21 bp, Homo sapiens
  chr1:227551690-227551711
  hypo
aaactccgtgtcaaaaaaaag

SEQ ID NO: 61854 - DNA, 211 bp, Homo sapiens; identical to SEQ ID NO: 15458
  chr1:227618269-227618480
  hypo

SEQ ID NO: 61855 - DNA, 206 bp, Homo sapiens; identical to SEQ ID NO: 1175
  chr1:227652538-227652744
  hypo

SEQ ID NO: 61856 - DNA, 253 bp, Homo sapiens; identical to SEQ ID NO: 36902
  chr1:227729829-227730082
  hypo

SEQ ID NO: 61857 - DNA, 34 bp, Homo sapiens; identical to SEQ ID NO: 15460
  chr1:227730784-227730818
  hypo

SEQ ID NO: 61858 - DNA, 65 bp, Homo sapiens
  chr1:227750842-227750907
  hypo
ggcgcaccggaatgcgcctcccctttccacccgccagcattcccaagcacgcctcggcttctgac

SEQ ID NO: 61859 - DNA, 19 bp, Homo sapiens
  chr1:227768582-227768601
  hypo
atcccgcctttgcactcca

SEQ ID NO: 61860 - DNA, 31 bp, Homo sapiens
  chr1:227825261-227825292
  hypo
actccatgctgttcatcggtatagttggaga

SEQ ID NO: 61861 - DNA, 182 bp, Homo sapiens
  chr1:227947115-227947297
  hypo
agatgcattggtgctcagaagcgcaagaacctcttcccccgcagagaagagctgctcagtctggcatgcaggttagtgaccgacaaggcagtgagcgcgtgcacagacttctaaaattacaggcagactcagcacgcctgtgggaaatgcctaacagatgcgtcacctagagcagctgctgg

SEQ ID NO: 61862 - DNA, 205 bp, Homo sapiens; identical to SEQ ID NO: 15462
  chr1:227948692-227948897
  hypo

SEQ ID NO: 61863 - DNA, 319 bp, Homo sapiens
  chr1:227962630-227962949
  hypo
ccagctccttgctctgcatggcgtttcctgtgcacgcctggagtgagctcagctggcccggctgaatcaaagtcccctctgagcagcgaggccgccgtgctcattgcctcgacccaccgccgcgggggcgtcctgaggaggggggccctgcatctgcccccccggctagtgcacagaccaccttggcctccaggaatgcagcggaggggacttgggcgggccgcagggtggtctgcgagtgccgagtgtgacagatcgcagcagagagtgttctttacggcctccagagcttggctgcggtgagagccaattttccccc

SEQ ID NO: 61864 - DNA, 159 bp, Homo sapiens
  chr1:227963155-227963314
  hypo
tgatgtgccgcactccggcgtcgcgaggcgagccagagcagacatgtcccatgggacacaagagccgatgtcccgcagagtttggaggccaaggccgtgcgtgcctctggagcactgtcttcccgggctgctggtggcagcgaacgcacaaggctggga

SEQ ID NO: 61865 - DNA, 79 bp, Homo sapiens
  chr1:228003874-228003953
  hypo
actacgcaggcctccacgtctgcggcggctccatcctcaatgagtactgggtgctgtcagctgcgcactgctttcacag

SEQ ID NO: 61866 - DNA, 31 bp, Homo sapiens
  chr1:228030205-228030236
  hypo
agagcattgacaataacgtatctgcttttgt

SEQ ID NO: 61867 - DNA, 31 bp, Homo sapiens
  chr1:228078002-228078033
  hypo
ttgagcccattcccctcgcagatgccccgcc

SEQ ID NO: 61868 - DNA, 85 bp, Homo sapiens
  chr1:228079083-228079168
  hypo
cagccctggagcttagctccccggagggcagccatgggggccgagcacatgtgctagaggccccgccaccccctgcatgggtgca

SEQ ID NO: 61869 - DNA, 450 bp, Homo sapiens
  chr1:228081839-228082289
  hypo
ttggactgcattcaatgtttccgcaggagaaggggagcaagtggggcggagtgactgcatcctttgggtactggcatgggacaaggtgggtgcccgagagccctggagcacagatgtctgtgcacggctctgtgcaccagcccaggtgcagggtgtccacagtgcaagagcccacaagcacacaaccacaataggtgttcgcacacgagcccaggatgtgtggtgcctgcaggcatgtgcccaggacccaaggtgtccacaaacgtacccatgcccttcacatggactcagacacagggtgtccacgatgcaagcatccacgcacgtgcccatgccacatgcacacaaccatgaagggtgtccatacacaagccccggacacatggtgcttgcaggcatgcgcctgggacctttggttttcacgaacgcgtccatgctcttcacatggac

SEQ ID NO: 61870 - DNA, 234 bp, Homo sapiens
  chr1:228083393-228083627
  hypo
atgagccatcagacacaactacggaagtgcaaaggtcagtcctggaggcggcgagttggcagtagcctgagggtaggacttgcgtctccctgtgtacctgccgcctccaagttcagatgcactggccgttctcgctggggccatgagccaggcagcacccggggcccggcaccccaggcctggactcctgggcctctgctcgctccagtttccggcacctttcccaggaggggc

SEQ ID NO: 61871 - DNA, 46 bp, Homo sapiens
  chr1:228092975-228093021
  hypo
ttcaagtcacacacttcgcagagatcagccccgcttcctctgggag

SEQ ID NO: 61872 - DNA, 366 bp, Homo sapiens; identical to SEQ ID NO: 15467
  chr1:228109225-228109591
  hypo

SEQ ID NO: 61873 - DNA, 189 bp, Homo sapiens
  chr1:228111801-228111990
  hypo
ccctcccttcccaccccgccagccccaccccacttgccttcacacccacgaggttgttgtggaagtccacacgggctcgcagatccttgcttgaccgtctgcccaggaattccttgacgaacttgctgctgtacttaaggttgtctccgcagcccccccactgccaggcctcacggttctccaggtcgg

SEQ ID NO: 61874 - DNA, 306 bp, Homo sapiens; identical to SEQ ID NO: 15469
  chr1:228112929-228113235
  hypo

SEQ ID NO: 61875 - DNA, 30 bp, Homo sapiens; identical to SEQ ID NO: 15470
  chr1:228114206-228114236
  hypo

SEQ ID NO: 61876 - DNA, 630 bp, Homo sapiens; identical to SEQ ID NO: 1176
  chr1:228134673-228135303
  hypo

SEQ ID NO: 61877 - DNA, 388 bp, Homo sapiens; identical to SEQ ID NO: 1177
  chr1:228135362-228135750
  hypo

SEQ ID NO: 61878 - DNA, 372 bp, Homo sapiens; identical to SEQ ID NO: 36909
  chr1:228135899-228136271
  hypo

SEQ ID NO: 61879 - DNA, 1707 bp, Homo sapiens; identical to SEQ ID NO: 36911
  chr1:228194869-228196576
  hypo

SEQ ID NO: 61880 - DNA, 30 bp, Homo sapiens; identical to SEQ ID NO: 36913
  chr1:228238538-228238568
  hypo

SEQ ID NO: 61881 - DNA, 30 bp, Homo sapiens
  chr1:228267797-228267827
  hypo
tctgacctggttctcgggtgcagccacccc

SEQ ID NO: 61882 - DNA, 104 bp, Homo sapiens; identical to SEQ ID NO: 15476
  chr1:228281207-228281311
  hypo

SEQ ID NO: 61883 - DNA, 143 bp, Homo sapiens
  chr1:228282124-228282267
  hypo
actcataaaaggccctcttttcgttccatttcatgcttgggtttttcatgcgaacctgtcattattagtttttccgcattgcctagagttgcccaaccccataataagaatacgtaggtggcgtgccccattcttgcaggtgt

SEQ ID NO: 61884 - DNA, 30 bp, Homo sapiens
  chr1:228285353-228285383
  hypo
atgaggatgctggccgaggacgagctccgg

SEQ ID NO: 61885 - DNA, 30 bp, Homo sapiens
  chr1:228286291-228286321
  hypo
acagtagagatccccgcaactcgcttgtcc

SEQ ID NO: 61886 - DNA, 30 bp, Homo sapiens
  chr1:228294386-228294416
  hypo
ggcagcttcaagaacgagtgatttaagaac

SEQ ID NO: 61887 - DNA, 357 bp, Homo sapiens
  chr1:228295265-228295622
  hypo
gaccacagccacatgtccatccgaaggcgactggtcaccagcacccccaccacagcctcgaccccagcccggcacctggaagcacctggagagggaagcttaccgccagcatgcgccgtggctccctgtagcggatgtggatggtggagccatcctgcttcaccagcagcacggggtagagtcgtgcataagcctggcggtgcacacgagtgagtgaggccctgctgctgtcagctcgccaggaggatgtgtgcaggcggcggagtgcaggtccggtggccttcacggtgctctgcctcagccggctgcagataaatgttcaagctctggtcagccgacagtgctgcagcagagtgc

SEQ ID NO: 61888 - DNA, 24 bp, Homo sapiens
  chr1:228299832-228299856
  hypo
acacttgataaaaacttcagccga

SEQ ID NO: 61889 - DNA, 30 bp, Homo sapiens
  chr1:228307988-228308018
  hypo
actgcaaagttcaggcggccgaatgtcagt

SEQ ID NO: 61890 - DNA, 267 bp, Homo sapiens; identical to SEQ ID NO: 15477
  chr1:228322364-228322631
  hypo

SEQ ID NO: 61891 - DNA, 30 bp, Homo sapiens
  chr1:228332043-228332073
  hypo
gtgtccaaggtgtgcgtgtggccaggggtc

SEQ ID NO: 61892 - DNA, 30 bp, Homo sapiens
  chr1:228347166-228347196
  hypo
ggggtgcgggggtgcgtgtccccattccct

SEQ ID NO: 61893 - DNA, 30 bp, Homo sapiens
  chr1:228360516-228360546
  hypo
tgtctgggccacatcgcctgtgtttccctg

SEQ ID NO: 61894 - DNA, 31 bp, Homo sapiens
  chr1:228361363-228361394
  hypo
ggacccttgggctcctcgatggcttccctgg

SEQ ID NO: 61895 - DNA, 30 bp, Homo sapiens
  chr1:228395224-228395254
  hypo
ggacaagggtctctcggtccctggctgtgg

SEQ ID NO: 61896 - DNA, 30 bp, Homo sapiens; identical to SEQ ID NO: 15478
  chr1:228397962-228397992
  hypo

SEQ ID NO: 61897 - DNA, 30 bp, Homo sapiens; identical to SEQ ID NO: 15479
  chr1:228403112-228403142
  hypo

SEQ ID NO: 61898 - DNA, 30 bp, Homo sapiens
  chr1:228403407-228403437
  hypo
agatccactgtgatcgcacccggcacacgc

SEQ ID NO: 61899 - DNA, 43 bp, Homo sapiens
  chr1:228406667-228406710
  hypo
ggtccacatgatggcccgtgtccataggcggtggacttccagg

SEQ ID NO: 61900 - DNA, 31 bp, Homo sapiens; identical to SEQ ID NO: 1182
  chr1:228444739-228444770
  hypo

SEQ ID NO: 61901 - DNA, 30 bp, Homo sapiens
  chr1:228460615-228460645
  hypo
ccctgccaacactccgctgcctctgggctg

SEQ ID NO: 61902 - DNA, 665 bp, Homo sapiens; identical to SEQ ID NO: 15481
  chr1:228461795-228462460
  hypo

SEQ ID NO: 61903 - DNA, 81 bp, Homo sapiens
  chr1:228465425-228465506
  hypo
cgcccatactgagccgcctttgtccccaggaaggacatacactctcatctaccggagagtcctggcggaagatgcaggaga

SEQ ID NO: 61904 - DNA, 165 bp, Homo sapiens
  chr1:228466466-228466631
  hypo
gtgtcccgggccagcgcccaggtgcggtggttcaagggcagtcaggagctgcagcccgggcccaagtacgagctggtcagtgatggcctctaccgcaagctgatcatcagtgatgtccacgcagaggacgaggacacctacacctgtgacgccggtgatgtcaag

SEQ ID NO: 61905 - DNA, 30 bp, Homo sapiens
  chr1:228467973-228468003
  hypo
ggaggtcgagtggtcgctcaacgggatgcc

SEQ ID NO: 61906 - DNA, 30 bp, Homo sapiens
  chr1:228468609-228468639
  hypo
ctgctctgctgagccggggaggtcagggga

SEQ ID NO: 61907 - DNA, 306 bp, Homo sapiens
  chr1:228473689-228473995
  hypo
tctgtcctggggagcgtctgtcctggggagcactgctggccaagcctgcccaggacggtggggcccctgagcagtctgtgcctttgcaggccggagagtgcacatcatcgaggacctggaggatgtggatgtgcaggagggctcctcggccaccttccgttgccggatctccccggccaactacgagcctgtgcactggttcctggacaagacacccctgcatgccaacgagctcaatgagatcgatgcccagcccgggggctaccacgtgctgaccctgcggcagctggcgctcaaggactcggg

SEQ ID NO: 61908 - DNA, 30 bp, Homo sapiens
  chr1:228475448-228475478
  hypo
gtgctgccacactgcgctgtgtgctgtcat

SEQ ID NO: 61909 - DNA, 30 bp, Homo sapiens
  chr1:228477752-228477782
  hypo
gaagcaggtagctccggtcacaggcacaag

SEQ ID NO: 61910 - DNA, 30 bp, Homo sapiens
  chr1:228504439-228504469
  hypo
aaaacgcggcggtccgggccggcgcacagg

SEQ ID NO: 61911 - DNA, 30 bp, Homo sapiens; identical to SEQ ID NO: 15485
  chr1:228504746-228504776
  hypo

SEQ ID NO: 61912 - DNA, 346 bp, Homo sapiens
  chr1:228509365-228509711
  hypo
cggcaccatcacatcgaccagcttggggatggcacctgctctctgctgatcactggcctggaccgtgctgatgctggctgctacacctgtcaggtgagcaacaagtttggccaggtgacccacagtgcctgtgtggtggtcagtgggtcagagagtgaagccgagagctcctctgggggtgagctggacgatgccttccgccgggctgcccgtcggctgcaccggctcttccgcaccaaaagtccggctgaagtttcagatgaggagctcttcctgagtgcagacgagggccctgcagagccagaggagcccgcggactggcagacataccgcgaagatgagcatt

SEQ ID NO: 61913 - DNA, 30 bp, Homo sapiens; identical to SEQ ID NO: 15487
  chr1:228510971-228511001
  hypo

SEQ ID NO: 61914 - DNA, 31 bp, Homo sapiens; identical to SEQ ID NO: 15488
  chr1:228525868-228525899
  hypo

SEQ ID NO: 61915 - DNA, 52 bp, Homo sapiens; identical to SEQ ID NO: 15489
  chr1:228528449-228528501
  hypo

SEQ ID NO: 61916 - DNA, 626 bp, Homo sapiens; identical to SEQ ID NO: 15490
  chr1:228528721-228529347
  hypo

SEQ ID NO: 61917 - DNA, 31 bp, Homo sapiens
  chr1:228551865-228551896
  hypo
ccccaccatggtctcacgcttaattccctaa

SEQ ID NO: 61918 - DNA, 204 bp, Homo sapiens; identical to SEQ ID NO: 15491
  chr1:228552501-228552705
  hypo

SEQ ID NO: 61919 - DNA, 598 bp, Homo sapiens
  chr1:228558801-228559399
  hypo
tccctcggcgtagcccggcacctctgcagggacactggtggctcctccagttcctcctcctcctctgacaacgagctcgccccatttgcccgggctaagtcactgccaccctccccggtgacacactcaccactgctgcacccccggggcttcctgcggccctcggccagcctgcctgaggaagccgaggccagtgagcgctccaccgaggccccagctccgcctgcatctcccgagggtgccgggccaccggccgcccagggctgcgtgccccggcacagcgtcatccgcagcctgttctaccaccaggcgggtgagagccctgagcacggggccctggccccggggagcaggcggcacccggcccggcggcggcacctgctgaagggcgggtacattgcgggggcgctgccaggcctgcgcgagccactgatggagcaccgcgtgctggaggaggaggccgccagggaggagcaggccaccctcctggccaaagccccctcattcgagactgccctccggctgcctgcctctggcacccacttggcccctggccacagccactccctggaacatgactctccgagcaccccccgcc

SEQ ID NO: 61920 - DNA, 471 bp, Homo sapiens; identical to SEQ ID NO: 36919
  chr1:228566547-228567018
  hypo

SEQ ID NO: 61921 - DNA, 30 bp, Homo sapiens
  chr1:228584759-228584789
  hypo
aacccaggtgttgtcgccatggccaacagc

SEQ ID NO: 61922 - DNA, 30 bp, Homo sapiens
  chr1:228586628-228586658
  hypo
ctctgcacagaacacgggccctccaggggc

SEQ ID NO: 61923 - DNA, 31 bp, Homo sapiens
  chr1:228601706-228601737
  hypo
gcaggggatcaaaatacgtcacccagaatgt

SEQ ID NO: 61924 - DNA, 30 bp, Homo sapiens; identical to SEQ ID NO: 15493
  chr1:228612803-228612833
  hypo

SEQ ID NO: 61925 - DNA, 30 bp, Homo sapiens
  chr1:228613067-228613097
  hypo
ctcagcggattgctcgcttttatagagctt

SEQ ID NO: 61926 - DNA, 38 bp, Homo sapiens
  chr1:228614002-228614040
  hypo
agccagcgtgcccggccggcattccacttttacacagt

SEQ ID NO: 61927 - DNA, 387 bp, Homo sapiens; identical to SEQ ID NO: 1186
  chr1:228644856-228645243
  hypo

SEQ ID NO: 61928 - DNA, 601 bp, Homo sapiens; identical to SEQ ID NO: 1187
  chr1:228645305-228645906
  hypo

SEQ ID NO: 61929 - DNA, 121 bp, Homo sapiens; identical to SEQ ID NO: 1188
  chr1:228646025-228646146
  hypo

SEQ ID NO: 61930 - DNA, 459 bp, Homo sapiens; identical to SEQ ID NO: 36927
  chr1:228646865-228647324
  hypo

SEQ ID NO: 61931 - DNA, 36 bp, Homo sapiens
  chr1:228857020-228857056
  hypo
cctgggcaacacagattccatcgcaaaaaataaaaa

SEQ ID NO: 61932 - DNA, 1406 bp, Homo sapiens; identical to SEQ ID NO: 36933
  chr1:228870692-228872098
  hypo

SEQ ID NO: 61933 - DNA, 224 bp, Homo sapiens; identical to SEQ ID NO: 15498
  chr1:228919236-228919460
  hypo

SEQ ID NO: 61934 - DNA, 114 bp, Homo sapiens
  chr1:229038503-229038617
  hypo
tgtatgtatctatctatctatcgatcggtcgatcgatcatttattttttatcttgattacaccagataagctgaggattttgcaggtaagcacgtggaagctaaaggccagcaa

SEQ ID NO: 61935 - DNA, 55 bp, Homo sapiens
  chr1:229073282-229073337
  hypo
ttggcaaagtcatctccggccctacgttctcaggtgtgaacggtggagtcagggg

SEQ ID NO: 61936 - DNA, 28 bp, Homo sapiens
  chr1:229104135-229104163
  hypo
tttttttttttttttttgagacggagtc

SEQ ID NO: 61937 - DNA, 268 bp, Homo sapiens
  chr1:229104402-229104670
  hypo
ggattacagacgtgagccaccgcgcccggccccacatcaaattacttttattgattttcagatgtgaaactaaccttgcaacttgatcttgatacattgccttttctatctagtgccgggtcgcatttgctaaacatttgtgtagagtttttctatctttaaatgagagttaccgtaatttttcttttttgcagttagaccaagaagatcacttccgtctcctggggacggcactaattcaaagctggctgcccgtgcctgtgagggt

SEQ ID NO: 61938 - DNA, 31 bp, Homo sapiens; identical to SEQ ID NO: 15503
  chr1:229116092-229116123
  hypo

SEQ ID NO: 61939 - DNA, 30 bp, Homo sapiens
  chr1:229125520-229125550
  hypo
gcgcagaaaacaagcgtgggttatggacag

SEQ ID NO: 61940 - DNA, 31 bp, Homo sapiens
  chr1:229134663-229134694
  hypo
gcaggggagtgggagacggcaggcttcctgc

SEQ ID NO: 61941 - DNA, 31 bp, Homo sapiens
  chr1:229141514-229141545
  hypo
ccttggtcccgggtcccgccattgggaggca

SEQ ID NO: 61942 - DNA, 131 bp, Homo sapiens
  chr1:229155567-229155698
  hypo
ctggggacctgaccccttccccgtcctgccttcttgggatatctgaggaccagagaggtagctctcgagacaagggccggaggcagcaaaaggaaagggcgacatggcccgctctcacactatccacccag

SEQ ID NO: 61943 - DNA, 164 bp, Homo sapiens
  chr1:229160201-229160365
  hypo
gcatgggctctggaggaccagcgcctctgactctctatggccccgggcaagtctccaggtctccattgcctcacctctaaagtgaacgtagagtctagaacgtaagccagtgcgtgctgacggtccccacaccgcactgccaggggcctcgggctctgctctag

SEQ ID NO: 61944 - DNA, 159 bp, Homo sapiens; identical to SEQ ID NO: 15506
  chr1:229202156-229202315
  hypo

SEQ ID NO: 61945 - DNA, 31 bp, Homo sapiens; identical to SEQ ID NO: 15507
  chr1:229210259-229210290
  hypo

SEQ ID NO: 61946 - DNA, 146 bp, Homo sapiens
  chr1:229223743-229223889
  hypo
ccaggcctggcctgaaccccacgcttcccctgactccaggacctagcctgacccaccttcgagatttcatctcgggccagcccctcccacgccggggtccggagtcagtgtgggctgtaacccccggggtcaggagtcaatgtggg

SEQ ID NO: 61947 - DNA, 31 bp, Homo sapiens; identical to SEQ ID NO: 15508
  chr1:229252144-229252175
  hypo

SEQ ID NO: 61948 - DNA, 87 bp, Homo sapiens
  chr1:229256677-229256764
  hypo
tgggttttccatttgagaggtcggtgtcagccagtgtgtgcagaccaggccgcctcacagccatgcgagtctaactgtagcccagaa

SEQ ID NO: 61949 - DNA, 30 bp, Homo sapiens
  chr1:229299476-229299506
  hypo
gccaccggtctgctcggtgcaaatccagct

SEQ ID NO: 61950 - DNA, 30 bp, Homo sapiens
  chr1:229438688-229438718
  hypo
gcacaggccccgaacgctcaggagtgtggt

SEQ ID NO: 61951 - DNA, 117 bp, Homo sapiens; identical to SEQ ID NO: 15509
  chr1:229462408-229462525
  hypo

SEQ ID NO: 61952 - DNA, 30 bp, Homo sapiens
  chr1:229583881-229583911
  hypo
aaaaacgggaggagccgggcgtggtggctc

SEQ ID NO: 61953 - DNA, 151 bp, Homo sapiens
  chr1:229606405-229606556
  hypo
gtgttgacaaggtcagaaagccgggagtggtggttcttgagaacaatggcggctgacagcttttcggcatgctcacagagcaacagtcgagtggccatcggtgtccctctaactggaaaactgcctagacgtccaaataagccaaccttgc

SEQ ID NO: 61954 - DNA, 391 bp, Homo sapiens
  chr1:229644847-229645238
  hypo
ttccctcaaccactgcgtagcctcttctgccagcgggagggagtaggggagatggggagagggttccttacctgtgtctagtcttcctccactctatcttctcactgccaacacaatgaattaaggcaaacgtaatgctgctcttgggcctgtaaatgcttcagtggctgaccattgccagtaggttatttgctaagctcctttgcaaggtcctatgtgatctaagtcaggttggcttttccgtccgtgttgtacttccagcacttcccacttgcactccacattccgagaacttaaaaacccaaatctccctccagtgcccatgtccatgtttctctcacctggaatgcactccctgccttgttggtccagaaggcgcctaccttccgca

SEQ ID NO: 61955 - DNA, 92 bp, Homo sapiens
  chr1:229678008-229678100
  hypo
tgagtgactttggtcagtttccgtagatatcgcccataaattacagcaatgattgacactggaggcaccacgctcaaaacaaaggtggccag

SEQ ID NO: 61956 - DNA, 36 bp, Homo sapiens; identical to SEQ ID NO: 15512
  chr1:229678577-229678613
  hypo

SEQ ID NO: 61957 - DNA, 30 bp, Homo sapiens
  chr1:229706214-229706244
  hypo
cgccgctgcatccggcgcccacgcccacgt

SEQ ID NO: 61958 - DNA, 22 bp, Homo sapiens
  chr1:229713274-229713296
  hypo
tcctcttgccgggtgcggcggc

SEQ ID NO: 61959 - DNA, 30 bp, Homo sapiens
  chr1:229727159-229727189
  hypo
agaagcaagagtctcgtaactttggctggg

SEQ ID NO: 61960 - DNA, 30 bp, Homo sapiens; identical to SEQ ID NO: 15513
  chr1:229764636-229764666
  hypo

SEQ ID NO: 61961 - DNA, 30 bp, Homo sapiens
  chr1:229795127-229795157
  hypo
aagatgttctaattcgtagtattggtatac

SEQ ID NO: 61962 - DNA, 63 bp, Homo sapiens
  chr1:230080282-230080345
  hypo
atgtgtgtgtccggcgtcccgctcgcctgcggtagccacgtagactccgcgtcccccccaggc

SEQ ID NO: 61963 - DNA, 201 bp, Homo sapiens; identical to SEQ ID NO: 15514
  chr1:230219679-230219880
  hypo

SEQ ID NO: 61964 - DNA, 220 bp, Homo sapiens; identical to SEQ ID NO: 1200
  chr1:230223229-230223449
  hypo

SEQ ID NO: 61965 - DNA, 308 bp, Homo sapiens; identical to SEQ ID NO: 15516
  chr1:230256220-230256528
  hypo

SEQ ID NO: 61966 - DNA, 297 bp, Homo sapiens
  chr1:230266282-230266579
  hypo
gtttactagggagtcagccagcgtgagtcacgtggtatcaggaacaccgggccctggggaccgacccctgtgtctcccctaagtaggatgctcccatgcaggagcagaaggacaagcagcccggagctgctgcccggctgtgcccaaagtgggatttctgctgatcaagagtctggaatttacactccagcaggtttggaagtctcggcgacagctcctgtatgttcagtcaagcttggctgaccatggctaaaccactttaatgagtttatgggacaccagcgaagctgcaaactg

SEQ ID NO: 61967 - DNA, 30 bp, Homo sapiens
  chr1:230272361-230272391
  hypo
gcggctctgctctgccgcgccccttcagga

SEQ ID NO: 61968 - DNA, 106 bp, Homo sapiens
  chr1:230272603-230272709
  hypo
ctcagaccgaagagccggccgtctgtgcattttgcttttcccgcagttcagccgggactctgcttcacggatgctttcacctcacggacagcgaagccagacacac

SEQ ID NO: 61969 - DNA, 28 bp, Homo sapiens
  chr1:230284900-230284928
  hypo
tacaggcgtgagccactgagcctagcct

SEQ ID NO: 61970 - DNA, 254 bp, Homo sapiens
  chr1:230308281-230308535
  hypo
ttttgccaatcctctgggaaacgaatggttggactgcacagtgccctgcacgcatagattcgatcaatagtgcctaaggggcttgctcatcttccagccactgtacctcctcatccccacggcgcctttcctcctccactcccctgaccacttgcctttggcaactgagccaagaacacttcttatttttttcttatttggatcagagacagattatactgggaatattctattaacaacgaaacctatattta

SEQ ID NO: 61971 - DNA, 43 bp, Homo sapiens
  chr1:230347094-230347137
  hypo
ggctttgttggcatttgtggccgtggggcaggtggagtttggg

SEQ ID NO: 61972 - DNA, 265 bp, Homo sapiens
  chr1:230379467-230379732
  hypo
catgggagcagtttccttccccgcctacagcttcgcagagtgcttagaacattgcccggcacctagcaagtgccatctcttgcagctcgcagagcggggcgtgctggggaagctgtccctggggccacctctctgctcttagtgagtagggcaggttagcccagcaggcttccaggctcctgtgggagagggttgtggctaggaagcatacagggaccggtggggttgtcagagggtgatccgcggctccacttctgcaccttct

SEQ ID NO: 61973 - DNA, 42 bp, Homo sapiens
  chr1:230393112-230393154
  hypo
acagtcatgcacctgtaacagcgtttcggtcggtgacagtag

SEQ ID NO: 61974 - DNA, 77 bp, Homo sapiens; identical to SEQ ID NO: 15521
  chr1:230393523-230393600
  hypo

SEQ ID NO: 61975 - DNA, 313 bp, Homo sapiens
  chr1:230398098-230398411
  hypo
tccaatggttcagtaagcacccgctgaggctggctccccacaggtccagctcgaggtgctggtggggacagcccaccctctgctgtgtgccgtgatcccagctggagctgctgcacacccagagggagccgcctcagtcacacgccagcagacaggtgcaaatggagtgatgcagacagaaagaaaggaaatcacacctcaagatttattttctttctagaaacacccgccgggcagcagaggtctggatggatgaatacaaaaatttctattatgcagcagtgccttctgctagaaacgttccttatggaaa

SEQ ID NO: 61976 - DNA, 30 bp, Homo sapiens
  chr1:230403673-230403703
  hypo
tgctgctgtgggtcccgctgtggtccaggt

SEQ ID NO: 61977 - DNA, 474 bp, Homo sapiens
  chr1:230404003-230404477
  hypo
aatgcagacatgtggataattcgtgtagggttgggtgaagcttacctctggtctgtggatgacaaaacggacgaggtgcccacccaggttccgtactgtctgggtgttgggcctcttgtgatccctggccagcctcacctccgtgtttaatctctggagttcccactgtcactctgcagtgttctgatgatttatggaaggttggagaggtcactcctttctgtgtcagcgcctctgctggaaagcgacacaccttacgctacagcacattaaacagaagcgtgtgctcaggccccggccgagagagttcgtcatcagagtctcgggccccagcttcatcccctgtgcgtcaggctctgtgactggctcaccccccgccagcattgcaccttaattaccgcacagctagtaacacgagacagagtctgggccctgtggaggtggcaggtctacgggaaccaaagactttgtctg

SEQ ID NO: 61978 - DNA, 30 bp, Homo sapiens
  chr1:230414278-230414308
  hypo
tgagtttggttgttcgcttgatttgagtgt

SEQ ID NO: 61979 - DNA, 276 bp, Homo sapiens
  chr1:230414970-230415246
  hypo
aggtcctgaattcacacgaatctgtttgtactcctttgcttgtgcccacactctaaggcactctcctgtgtcttgcagaaatgggaacagatcgagggcaactccaagctgaggcacgtgggcagcaacctgtgcctggacagtcgcacggccaagagcgggggcctaagcgtggaggtgtgtggcccggccctttcgcagcagtggaagttcacgctcaacctgcagcagtaggagggtccgggaggccctgccgtcctgtctcctgcaccattg

SEQ ID NO: 61980 - DNA, 30 bp, Homo sapiens; identical to SEQ ID NO: 15525
  chr1:230417081-230417111
  hypo

SEQ ID NO: 61981 - DNA, 31 bp, Homo sapiens; identical to SEQ ID NO: 15526
  chr1:230446596-230446627
  hypo

SEQ ID NO: 61982 - DNA, 163 bp, Homo sapiens
  chr1:230453224-230453387
  hypo
aactgtcactctttagtccagcgaggcttgggtgaagacggcagaagaatgaatcaaagactagcgagacgcaccaagaacagaggtgcgctgccgggggctgacccttggggaggggagggccgaggctgatttatctggcgggctcagcctcacccttcac

SEQ ID NO: 61983 - DNA, 199 bp, Homo sapiens
  chr1:230453609-230453808
  hypo
agagtagctagtgacatggagcgcacaatcaagtctcccgcaggagtctcctcattacgaccgtgtatacatgggtatacacggaagggtgaaggtgccccaccctccccggaacacagttcacacagagctgccaccagcgccagcaccaccgccctacactcaagagaggctgcccggcccccaccagacaggggtc

SEQ ID NO: 61984 - DNA, 30 bp, Homo sapiens
  chr1:230459099-230459129
  hypo
tgggcaagttggaacggcaggctctcctcc

SEQ ID NO: 61985 - DNA, 31 bp, Homo sapiens
  chr1:230469989-230470020
  hypo
ctccattcctagcaaccgcacgtgaccactc

SEQ ID NO: 61986 - DNA, 31 bp, Homo sapiens
  chr1:230485876-230485907
  hypo
gcagcaagtgagcgtgcggtcagcagtcacc

SEQ ID NO: 61987 - DNA, 211 bp, Homo sapiens
  chr1:230529556-230529767
  hypo
cgagactccgtctcaaaaaaaaaaaaaaaaaaaataataggcccggggcccgccagtccacagcctgattagaaacatgtggcttcgcaaggctctccctcactggctccccgccctagagtccgccacacctgccccggcctggcatcctctgcaggcttccagctctcccactcttctggctcattccgcccctgactgggctacaaat

SEQ ID NO: 61988 - DNA, 30 bp, Homo sapiens
  chr1:230781769-230781799
  hypo
cccatgcctggatccggtgccctctccctt

SEQ ID NO: 61989 - DNA, 119 bp, Homo sapiens; identical to SEQ ID NO: 15527
  chr1:230821540-230821659
  hypo

SEQ ID NO: 61990 - DNA, 110 bp, Homo sapiens
  chr1:230827244-230827354
  hypo
ggcatgagcgacgacgacaaaatcaggctgcagttggccctagatgttgagtacttgggagagcaggtaacccatcagccgccggcagctccagcgagcctgaaaccaaa

SEQ ID NO: 61991 - DNA, 30 bp, Homo sapiens
  chr1:230829261-230829291
  hypo
tcactccagcaacacgcccatgcgtcttct

SEQ ID NO: 61992 - DNA, 31 bp, Homo sapiens
  chr1:230840798-230840829
  hypo
tgaacctcgaggacatcgtggtggttgccgg

SEQ ID NO: 61993 - DNA, 43 bp, Homo sapiens
  chr1:230841594-230841637
  hypo
aggtgtgtctactccccaccccgcccccagcctgggcaggaca

SEQ ID NO: 61994 - DNA, 36 bp, Homo sapiens
  chr1:230870970-230871006
  hypo
cagagcatggaaatctcgccccgactgcagcgggag

SEQ ID NO: 61995 - DNA, 31 bp, Homo sapiens; identical to SEQ ID NO: 15528
  chr1:230872266-230872297
  hypo

SEQ ID NO: 61996 - DNA, 510 bp, Homo sapiens
  chr1:230882794-230883304
  hypo
accaacctcccttccgactacaaaactctgccattctctgatgcaggagatgggactcaagaccacaccgtgcacttctccgtaaagccacctcctggaccagttgggtttcttgctccttttccttctgaagcaatcctctctctcccatgaggccccctgagcgcactaagcagaggtgccgcctctgagtggaatgtgccaggccccagagctgcctctgagtctgcaggagtgcagagtgggcagagggctctctctgctgttttccatcagggcgtgtcccatctcagtctaacagggaggtgcccagaaaataggtggaggtgagggccactcagcccagtggccctctgagctgttccttcttgaccggcacacacagctcgcttcttcactttcttttccatccactgccggacccaagccagccttccagggagcagccatgccttacctctaccgggccccagggcctcaggcacacccggttcccaaggacgcccggat

SEQ ID NO: 61997 - DNA, 132 bp, Homo sapiens
  chr1:230887781-230887913
  hypo
gaacaaatgtacatccaggatcgacacgcacatgcaggacactcacacgtagacaatgctcccaagtgcacatgcaaccagcatacatgtggagcatgcacaagcacacacgtgtaccacacctgggcacac

SEQ ID NO: 61998 - DNA, 110 bp, Homo sapiens
  chr1:230888880-230888990
  hypo
tcactccctttccagccaccacggagatcagagtcatttaatgaaatggcgccaaagctacctggagctgggggtgggaatgcaaagacgtgtgagacctggcagaggac

SEQ ID NO: 61999 - DNA, 148 bp, Homo sapiens
  chr1:230894273-230894421
  hypo
ctcagaaagccagaaccagggcgattcggaattagctttcccgatgttcagccctggcgagtctctcttgcctgtgtcaaacagccagaaagggccatattacaatgtcccaagcccagtgacatacggtgctttccagaaatgtgaa

SEQ ID NO: 62000 - DNA, 360 bp, Homo sapiens
  chr1:230898510-230898870
  hypo
tgctggaaaaagcctacgccaagtgagtgacagcttccccagctcaggcagcctcccgacaggagtctctacactagtctttgtagtgagcatctaagggctgggaaaaaatcagggctctgggtttgcaggtgaggctcggcaggacccaaccctctcagggctcaagcggggttggaggtggttttcctgtcgtagcctagatgtgcccatctttgggagcagtggctacattcatgaccctttttctccctgggccatgaatctggcctttggaagagctgggaaggcaagcggaggggaattctggctgtgccgacagcacttagtgcttcacacttccctcggacactggcatgg

SEQ ID NO: 62001 - DNA, 31 bp, Homo sapiens
  chr1:230953934-230953965
  hypo
cctcccaccctacacacgcttacaccccaga

SEQ ID NO: 62002 - DNA, 31 bp, Homo sapiens
  chr1:230976920-230976951
  hypo
gagacagaaaacagaacggagagatgggcag

SEQ ID NO: 62003 - DNA, 506 bp, Homo sapiens
  chr1:230979396-230979902
  hypo
cagcgactggaactcggcctcaggcccctcccctcgggaccgctcagcattgatcttccagaatgacgcttcctcctccttcctggtggggcccagggcgtccaggctggaggacctgctgccttgggaggacttgagggcctgggagccctgggaagctttggacagtggtctgggctcgctggcggcggtgccgttgctcggctcctggatggatagggcggagatactgaactccatctgactctagggtgggacatgagaaaggacagaaaaaagaaagagatcctgagaatcgaccgtcacaagtgtgccagctcacgcacccctcctcagcataaggacgcacaccagccacacacgagttgttgcccatgtgctggaactgtctgtcctgagtggtgggtatggtcaggactcccatcgcacacctgaaatgcatcagaagcttaaatgccaaggccgggtgacagagtgtgggtggtggtcccctcccaaatctcatg

SEQ ID NO: 62004 - DNA, 121 bp, Homo sapiens; identical to SEQ ID NO: 15532
  chr1:230980021-230980142
  hypo

SEQ ID NO: 62005 - DNA, 125 bp, Homo sapiens
  chr1:230986634-230986759
  hypo
atgggcagcaaagccccgaaagtcacagatagacctgagctccaattgctctccgcccactcgacctgccaggcacctgaccccctgcatcccggtgtcctgacccacagcgtgaacagggacac

SEQ ID NO: 62006 - DNA, 69 bp, Homo sapiens
  chr1:230988835-230988904
  hypo
cccagctcccatcaggcgatcagatgacacataagtgatcccaggcaaggccaacggaagaacagtcca

SEQ ID NO: 62007 - DNA, 30 bp, Homo sapiens
  chr1:230991693-230991723
  hypo
acaacagggaatgccggtgaggccccccaa

SEQ ID NO: 62008 - DNA, 169 bp, Homo sapiens
  chr1:230992695-230992864
  hypo
ttcagcttttgacagagcctccgccaccctagcttagcctcagacactgggggcaaatgccagggcccacgcagggggagtgcctcaccaacacataagtgtacacattcagccttccagaccccgagtgtgcgttctctgtgcagacgcctcctaacatgaacagcca

SEQ ID NO: 62009 - DNA, 31 bp, Homo sapiens; identical to SEQ ID NO: 15533
  chr1:231012508-231012539
  hypo

SEQ ID NO: 62010 - DNA, 35 bp, Homo sapiens; identical to SEQ ID NO: 15534
  chr1:231037830-231037865
  hypo

SEQ ID NO: 62011 - DNA, 500 bp, Homo sapiens; identical to SEQ ID NO: 15535
  chr1:231038104-231038604
  hypo

SEQ ID NO: 62012 - DNA, 25 bp, Homo sapiens
  chr1:231104726-231104751
  hypo
gaaagcttagggggctgggtgcggt

SEQ ID NO: 62013 - DNA, 25 bp, Homo sapiens
  chr1:231104990-231105015
  hypo
aagcgacactccatctcaaaaaaag

SEQ ID NO: 62014 - DNA, 30 bp, Homo sapiens
  chr1:231120262-231120292
  hypo
gcccaggggtgttagagagaacgccacact

SEQ ID NO: 62015 - DNA, 202 bp, Homo sapiens; identical to SEQ ID NO: 15538
  chr1:231122191-231122393
  hypo

SEQ ID NO: 62016 - DNA, 41 bp, Homo sapiens; identical to SEQ ID NO: 15539
  chr1:231127689-231127730
  hypo

SEQ ID NO: 62017 - DNA, 331 bp, Homo sapiens
  chr1:231162837-231163168
  hypo
aggtaaacacaggagcctgaacgcttctaggtttcaaaggctctgactccccatgaccccattccagccagacacgtggctccaggcttttctcctgacagtgccatttccaaggtattcccaggcccaccgaggtgatgcacccggcagggagtcgaaagcaaagaggatctctccctggacacttctgcactgtagcacccagatgactcacaaagctgccttgtcgtcaggtggaacactggcctagaaaggaatcctgaccgcctaggaatacagcgcagccccgcacacacctattacacaacccgacacatggcaaaagttcaga

SEQ ID NO: 62018 - DNA, 51 bp, Homo sapiens
  chr1:231163530-231163581
  hypo
actgcatctgtgaatgctcctcgaccacccgccctgtacctgattccctcc

SEQ ID NO: 62019 - DNA, 584 bp, Homo sapiens; identical to SEQ ID NO: 36953
  chr1:231175064-231175648
  hypo

SEQ ID NO: 62020 - DNA, 707 bp, Homo sapiens; identical to SEQ ID NO: 36954
  chr1:231175692-231176399
  hypo

SEQ ID NO: 62021 - DNA, 1824 bp, Homo sapiens; identical to SEQ ID NO: 36955
  chr1:231296883-231298707
  hypo

SEQ ID NO: 62022 - DNA, 31 bp, Homo sapiens
  chr1:231345006-231345037
  hypo
gccccatcctgcctcccgtggacacaggttg

SEQ ID NO: 62023 - DNA, 31 bp, Homo sapiens; identical to SEQ ID NO: 15541
  chr1:231367187-231367218
  hypo

SEQ ID NO: 62024 - DNA, 133 bp, Homo sapiens
  chr1:231401052-231401185
  hypo
aaaatggttggtgagctgctacgaatgtcgggtgcctttttcatgcggcgtacctttggtggcaataaactctactgggctgtattctctgaatatgtaaaaactatgttacgggtaaatgcaaataattccc

SEQ ID NO: 62025 - DNA, 32 bp, Homo sapiens; identical to SEQ ID NO: 15542
  chr1:231409277-231409309
  hypo

SEQ ID NO: 62026 - DNA, 272 bp, Homo sapiens
  chr1:231475547-231475819
  hypo
tggaatgtgttccatccgtctcagcgaaccccttttgaagttgaggccaagaaaggatcttgtagaggtatttttcgtgtaaacttgcttcctagcgcagtaatttacaaatacttgtcaatgatttagactgctgtgaattcgcctgtatgtatcgttaaaaaaagtcactttgccctcagtgaaagcttgaattatggggcaaacaataatgaacaccttatgttttttatagtgcttcatagtaaaaaaaaaaaaaacaaaaaaaaggc

SEQ ID NO: 62027 - DNA, 16 bp, Homo sapiens
  chr1:231476446-231476462
  hypo
ggcaggaggatctctt

SEQ ID NO: 62028 - DNA, 31 bp, Homo sapiens; identical to SEQ ID NO: 15545
  chr1:231476521-231476552
  hypo

SEQ ID NO: 62029 - DNA, 30 bp, Homo sapiens; identical to SEQ ID NO: 15546
  chr1:231663377-231663407
  hypo

SEQ ID NO: 62030 - DNA, 63 bp, Homo sapiens
  chr1:231713010-231713073
  hypo
gaaagtagctttcctgtattacgtaagtaatacgtaccatacgtatgtattaggcttattgtt

SEQ ID NO: 62031 - DNA, 80 bp, Homo sapiens
  chr1:231820897-231820977
  hypo
tgggaaggactgcttcacttgcgtagaactctccctctctcttgcgctatcttcatatcgatgtctacctttctctttgt

SEQ ID NO: 62032 - DNA, 205 bp, Homo sapiens; identical to SEQ ID NO: 15547
  chr1:232192428-232192633
  hypo

SEQ ID NO: 62033 - DNA, 30 bp, Homo sapiens
  chr1:232455135-232455165
  hypo
acaagggacaggactcggcaggaccaggcc

SEQ ID NO: 62034 - DNA, 88 bp, Homo sapiens
  chr1:232466922-232467010
  hypo
cagactcaatgagcttgactccgtaaggaacctttacttcaaggagggaagaagaattgttttcgtatttttttggtggagacggggt

SEQ ID NO: 62035 - DNA, 31 bp, Homo sapiens
  chr1:232550812-232550843
  hypo
aggtgaacagacttctcggcctgtgcttgtc

SEQ ID NO: 62036 - DNA, 199 bp, Homo sapiens; identical to SEQ ID NO: 15548
  chr1:232566619-232566818
  hypo

SEQ ID NO: 62037 - DNA, 193 bp, Homo sapiens
  chr1:232568781-232568974
  hypo
aatcccactccaagggcgcacacacacagcaaacccctgctgcacgtgcaactgtcaacatggaacaatgttgattagaagcactgattttaagaactccccaatggcagcaacccaaatcatcaatagtagaaggatattcgattaataactatgaatgaatacacggaatactctacgaatgaatggactg

SEQ ID NO: 62038 - DNA, 61 bp, Homo sapiens; identical to SEQ ID NO: 15549
  chr1:232649853-232649914
  hypo

SEQ ID NO: 62039 - DNA, 441 bp, Homo sapiens; identical to SEQ ID NO: 36966
  chr1:232765595-232766036
  hypo

SEQ ID NO: 62040 - DNA, 107 bp, Homo sapiens; identical to SEQ ID NO: 36967
  chr1:232766239-232766346
  hypo

SEQ ID NO: 62041 - DNA, 19 bp, Homo sapiens
  chr1:232801855-232801874
  hypo
cagagctaataacacacat

SEQ ID NO: 62042 - DNA, 90 bp, Homo sapiens
  chr1:232889010-232889100
  hypo
agaattatgttgtcatcgaaattcttattggcaaaactgtatgttgaaaaaaaatctgggccgggcgcagtggctcacacctgtaatccc

SEQ ID NO: 62043 - DNA, 62 bp, Homo sapiens
  chr1:232909164-232909226
  hypo
aaacggcagaacagcgcggcagagaaggagcgaaaagaaggaacatccggaggagttcggct

SEQ ID NO: 62044 - DNA, 31 bp, Homo sapiens
  chr1:233015538-233015569
  hypo
atcctctaaacctctgcgctgagctctataa

SEQ ID NO: 62045 - DNA, 204 bp, Homo sapiens; identical to SEQ ID NO: 15552
  chr1:233085193-233085397
  hypo

SEQ ID NO: 62046 - DNA, 30 bp, Homo sapiens
  chr1:233112512-233112542
  hypo
gatcacgggattgacgcagccaggaccagt

SEQ ID NO: 62047 - DNA, 154 bp, Homo sapiens
  chr1:233116463-233116617
  hypo
atttaaaggaagaagaggtgccgtggcagaactccacgtgaccgtcccctccctgcacgcagccaggatgagaggagcagagctgagcgccacctccctgtcggtgccacggctgaggtgaggagctcttgccggatggtggggtgggggcagc

SEQ ID NO: 62048 - DNA, 31 bp, Homo sapiens
  chr1:233135996-233136027
  hypo
ctcagatagagagacacgagccaacagggga

SEQ ID NO: 62049 - DNA, 30 bp, Homo sapiens; identical to SEQ ID NO: 1213
  chr1:233143151-233143181
  hypo

SEQ ID NO: 62050 - DNA, 33 bp, Homo sapiens; identical to SEQ ID NO: 15554
  chr1:233264702-233264735
  hypo

SEQ ID NO: 62051 - DNA, 16 bp, Homo sapiens
  chr1:233465111-233465127
  hypo
tctatgggccaggcgc

SEQ ID NO: 62052 - DNA, 17 bp, Homo sapiens
  chr1:233465426-233465443
  hypo
aatatgattttattatt

SEQ ID NO: 62053 - DNA, 791 bp, Homo sapiens; identical to SEQ ID NO: 36974
  chr1:233749768-233750559
  hypo

SEQ ID NO: 62054 - DNA, 83 bp, Homo sapiens; identical to SEQ ID NO: 15558
  chr1:233799534-233799617
  hypo

SEQ ID NO: 62055 - DNA, 23 bp, Homo sapiens
  chr1:233799856-233799879
  hypo
tgagccaccgtgcccggccttca

SEQ ID NO: 62056 - DNA, 223 bp, Homo sapiens; identical to SEQ ID NO: 36975
  chr1:234040257-234040480
  hypo

SEQ ID NO: 62057 - DNA, 212 bp, Homo sapiens; identical to SEQ ID NO: 1219
  chr1:234041148-234041360
  hypo

SEQ ID NO: 62058 - DNA, 28 bp, Homo sapiens
  chr1:234089753-234089781
  hypo
cttttttttttttttttgagacggagtc

SEQ ID NO: 62059 - DNA, 212 bp, Homo sapiens; identical to SEQ ID NO: 15562
  chr1:234541032-234541244
  hypo

SEQ ID NO: 62060 - DNA, 162 bp, Homo sapiens; identical to SEQ ID NO: 15563
  chr1:234541508-234541670
  hypo

SEQ ID NO: 62061 - DNA, 30 bp, Homo sapiens
  chr1:234544633-234544663
  hypo
gctctgtgtaggcggcggaagaggtgaacc

SEQ ID NO: 62062 - DNA, 31 bp, Homo sapiens
  chr1:234548569-234548600
  hypo
tatctcgggtgacccccggtcaaccaaccct

SEQ ID NO: 62063 - DNA, 278 bp, Homo sapiens
  chr1:234587510-234587788
  hypo
aatgatgaatgactggatcatcgaagtggtcaggactaaaagacaccacacaggtacaatgagtgagcaagtcaatgacgctaaaggaggttgttctgtgtaggtctttatcaagtcggataatcttaagatattattgtctaacagtgaggtcagccggtatttatcttttaacagtatacacttttctttgcattcctctaaaactggccagactgcgttgcctaattattgctacaaaatacgtgaggcttttcgaatcttgtatttccacaggc

SEQ ID NO: 62064 - DNA, 30 bp, Homo sapiens; identical to SEQ ID NO: 15564
  chr1:234617727-234617757
  hypo

SEQ ID NO: 62065 - DNA, 30 bp, Homo sapiens
  chr1:234620925-234620955
  hypo
acagaggcgatccagcgtgtgaacagccag

SEQ ID NO: 62066 - DNA, 31 bp, Homo sapiens; identical to SEQ ID NO: 15565
  chr1:234621891-234621922
  hypo

SEQ ID NO: 62067 - DNA, 31 bp, Homo sapiens
  chr1:234641873-234641904
  hypo
ctcctacagctttagccgcctggaagaaact

SEQ ID NO: 62068 - DNA, 31 bp, Homo sapiens; identical to SEQ ID NO: 15566
  chr1:234643572-234643603
  hypo

SEQ ID NO: 62069 - DNA, 83 bp, Homo sapiens
  chr1:234690618-234690701
  hypo
tccttgcaccctggggtgagccgggaggggcgatgcagtccgcaccagccaggaccgcacacgtggtgacatcaggcctgcct

SEQ ID NO: 62070 - DNA, 182 bp, Homo sapiens; identical to SEQ ID NO: 15567
  chr1:234691149-234691331
  hypo

SEQ ID NO: 62071 - DNA, 31 bp, Homo sapiens
  chr1:234721944-234721975
  hypo
gccttgcggcatgtcccggcataacagaaag

SEQ ID NO: 62072 - DNA, 496 bp, Homo sapiens
  chr1:234724570-234725066
  hypo
tgtaaaagtgtttcttagaggcggttatgaggattaaatgacccgacagaggcaaaacagctttgtaaaccataaatcattttgttcggagtcaacaggatgactttttcccctcacacaatttagaattatgtacctgttgaggtagcaacgccctcgtttaatcccagccatgtttggtccccaaatgcctctctcactcgcccagagtgatactgaggccacaaaaagctctgctgttttttttttctcgtggtctttctcaattccaacgtggtacacaggtacctggcgtgtgtctgctcagacagtggatggcccttgttcaaagactgatgggaacacctagtgtacgaggtggcgccggggccgcccacaccaacaggccgtgtgctcccatctcactgtgcacgaggaaccggtgtgcttttcggccaggctgcatcaccctccctcccttggctttctgtgtgacgtgcctgtgccagagactgca

SEQ ID NO: 62073 - DNA, 80 bp, Homo sapiens; identical to SEQ ID NO: 36985
  chr1:234736358-234736438
  hypo

SEQ ID NO: 62074 - DNA, 142 bp, Homo sapiens; identical to SEQ ID NO: 15569
  chr1:234795525-234795667
  hypo

SEQ ID NO: 62075 - DNA, 111 bp, Homo sapiens
  chr1:234808100-234808211
  hypo
gccaaaggtgagaggcgctctaacccatgaggcttttttttccccttcctttctgtcctcactcacagcacctctttctttgccccaaagcgctcccgccacatctgtgcc

SEQ ID NO: 62076 - DNA, 142 bp, Homo sapiens; identical to SEQ ID NO: 1223
  chr1:234828213-234828355
  hypo

SEQ ID NO: 62077 - DNA, 562 bp, Homo sapiens; identical to SEQ ID NO: 15571
  chr1:234844949-234845511
  hypo

SEQ ID NO: 62078 - DNA, 36 bp, Homo sapiens
  chr1:234863730-234863766
  hypo
ctgatttaaatgtattctggccgggcacagtggctc

SEQ ID NO: 62079 - DNA, 211 bp, Homo sapiens
  chr1:234868419-234868630
  hypo
agacaggacaggagagggcacctgggcagtcagccgaggtctctctgcagaggtgatcttcaagcttaagagaagccatctctgtgagacctggggagtggcattccaggaggagggagcagctggtccaaggccacagggcaggaatgagcctagcttgtgtgaggagccaaaagggtgggcgagggcggagagccgggagcaaagcaga

SEQ ID NO: 62080 - DNA, 134 bp, Homo sapiens
  chr1:234868846-234868980
  hypo
ttggtcctggggagggcgagggttccgacagtgggctccgccgaccatcactgccgcaagggatgctggtcacctgcctcagcaacacccctggtgtgcagttcaccggggagccccatcggtggacccaggca

SEQ ID NO: 62081 - DNA, 384 bp, Homo sapiens
  chr1:234869962-234870346
  hypo
tattagatttttaaaaattaaatgagtttgttagaaggtgacaagtgctttttaaatgaaatggagtagagtggatggagagaggtggggtgaggaagggcacagctctaagccatgtgaagggtgggcttcttggcaaaggtgacggctgaacagagacttctggaggcgagggagcgagccacatggatctccagggatgagaatcgtaggcacaaggatcggccaactctgagtgggacagctctggggtgtctgagcctgcgggggcggggcacttggctggaggggagagcgagtgggtggtgagtggcagtggatgacatgggaatggggggtgaccaggtccgggttgcccaggggaggactcggaggccatgggga

SEQ ID NO: 62082 - DNA, 285 bp, Homo sapiens; identical to SEQ ID NO: 15574
  chr1:234871740-234872025
  hypo

SEQ ID NO: 62083 - DNA, 100 bp, Homo sapiens; identical to SEQ ID NO: 15575
  chr1:234893899-234893999
  hypo

SEQ ID NO: 62084 - DNA, 160 bp, Homo sapiens
  chr1:234895629-234895789
  hypo
gaagcctctggatcaacgatatccaaagtctctgatctcagcttggaggtgctttgagcctctggccccggtgctctgcactgtcccagagaaaggggtgggccacttttggtcctaacaagcagttcaccaagaacagggcaacggctaaaagatgaag

SEQ ID NO: 62085 - DNA, 192 bp, Homo sapiens
  chr1:234957453-234957645
  hypo
ttcatttactccctcacgtgttcatttattccatacaattttgcagagcttttttcatgggcttcctgcaaagcatctaaccgccaaccccagcgtctggttgtcactgtctggccgcagaaccagctttccctggctggacctgtcttcagagtcaggttgcttgccttgcagccccgcacccactcacat

SEQ ID NO: 62086 - DNA, 37 bp, Homo sapiens
  chr1:234960408-234960445
  hypo
tcgtgatccgcccaccgaagaattttaaagtatttat

SEQ ID NO: 62087 - DNA, 31 bp, Homo sapiens; identical to SEQ ID NO: 15578
  chr1:234962495-234962526
  hypo

SEQ ID NO: 62088 - DNA, 76 bp, Homo sapiens
  chr1:235003814-235003890
  hypo
aaaaaaaaaaaaaaatttaattttaatccactcggattttaaaatagcatatcacgatggaaaaagccttgaactt

SEQ ID NO: 62089 - DNA, 31 bp, Homo sapiens
  chr1:235009660-235009691
  hypo
caaggtgggtcttggccgttcttgttttgtt

SEQ ID NO: 62090 - DNA, 31 bp, Homo sapiens; identical to SEQ ID NO: 15579
  chr1:235019853-235019884
  hypo

SEQ ID NO: 62091 - DNA, 30 bp, Homo sapiens
  chr1:235035672-235035702
  hypo
aagcatgtgggtcccggggagaccaagtct

SEQ ID NO: 62092 - DNA, 86 bp, Homo sapiens
  chr1:235036867-235036953
  hypo
gagatggtttagacagcgccacagtcacaaatgcaaacaaacaaacaaaaaaatgtaatttcttttttttttttcttttttctttt

SEQ ID NO: 62093 - DNA, 206 bp, Homo sapiens
  chr1:235037072-235037278
  hypo
ggatcacaggcgcccaccactgcgcccggctaaaaaaaaacgtcatttcattaatgctcacggaggtccctcagtcgcttgggatccagcactcataatcccaaacatccactcttgtagccaggaaacccttctccgtggcttccccatattttttgccctatgtctttgtggggagggctaaggaaagccgctccctccaggtg

SEQ ID NO: 62094 - DNA, 80 bp, Homo sapiens; identical to SEQ ID NO: 15581
  chr1:235042106-235042186
  hypo

SEQ ID NO: 62095 - DNA, 281 bp, Homo sapiens
  chr1:235044522-235044803
  hypo
gggctgttaaacccaccgaatgcagacccaagtggggctggatgtgcacacacagtcccctgccactcgccgctgcctgctgggccttctccactgtggctgttacgtgtctcctcccagcaccctccgaggccgccttctcctatatttccaaagccagtctgtgtgtgcaggccccttgcctccagaggctccagcttcatctcaagaatcattcgctctctgttccagttcaccccaatgcacctcgcctcccatttctattgcgaacagagctctca

SEQ ID NO: 62096 - DNA, 77 bp, Homo sapiens; identical to SEQ ID NO: 15583
  chr1:235067967-235068044
  hypo

SEQ ID NO: 62097 - DNA, 178 bp, Homo sapiens; identical to SEQ ID NO: 15584
  chr1:235129829-235130007
  hypo

SEQ ID NO: 62098 - DNA, 21 bp, Homo sapiens
  chr1:235255587-235255608
  hypo
ttttgtttttttgagacggag

SEQ ID NO: 62099 - DNA, 162 bp, Homo sapiens
  chr1:235267080-235267242
  hypo
aaggaaaaaaaaaaaaaaagaagatattctcatgccctttggaaatgaggcacctaagcctcagagaagttaagtgccccagtacgctgcacatttagaactcaaacccaagcccctgcttctaaaaaccgtgttcgttccgccaccccacagctgcccctc

SEQ ID NO: 62100 - DNA, 30 bp, Homo sapiens
  chr1:235270913-235270943
  hypo
cctcggatgccatacgagggacatgatgtt

SEQ ID NO: 62101 - DNA, 30 bp, Homo sapiens; identical to SEQ ID NO: 15587
  chr1:235293017-235293047
  hypo

SEQ ID NO: 62102 - DNA, 22 bp, Homo sapiens
  chr1:235313404-235313426
  hypo
tttgagacagaatctcgctttg

SEQ ID NO: 62103 - DNA, 207 bp, Homo sapiens; identical to SEQ ID NO: 15588
  chr1:235317094-235317301
  hypo

SEQ ID NO: 62104 - DNA, 35 bp, Homo sapiens
  chr1:235325379-235325414
  hypo
aaccagcctggtcgatctagcgagacttattctct

SEQ ID NO: 62105 - DNA, 31 bp, Homo sapiens
  chr1:235356124-235356155
  hypo
aagaggtcatgtcaggccaggcgcggtggct

SEQ ID NO: 62106 - DNA, 30 bp, Homo sapiens; identical to SEQ ID NO: 15589
  chr1:235410285-235410315
  hypo

SEQ ID NO: 62107 - DNA, 21 bp, Homo sapiens
  chr1:235433310-235433331
  hypo
aacgccagccgggcgcggtgc

SEQ ID NO: 62108 - DNA, 20 bp, Homo sapiens
  chr1:235447655-235447675
  hypo
cagagcgagactccgtctct

SEQ ID NO: 62109 - DNA, 30 bp, Homo sapiens; identical to SEQ ID NO: 15592
  chr1:235486727-235486757
  hypo

SEQ ID NO: 62110 - DNA, 41 bp, Homo sapiens
  chr1:235508755-235508796
  hypo
ttttggtttgagacagagtctcgctctgtctggcaggctgg

SEQ ID NO: 62111 - DNA, 243 bp, Homo sapiens
  chr1:235613455-235613698
  hypo
tcagacttgcactcagattatcgtttgcctgccctgattttagactctgctaattcaagtccctgttatcttgcttgacatcgacaaggatcaccgcaccgttccttcagtttccacagttccgtcagttcccacggagaatactgaggagaagacagcattcctgtctcacaggtcttctcacacagccacagactgtcctgttgagaaacaaccaaagccgatctgagagtggtgaaactg

SEQ ID NO: 62112 - DNA, 148 bp, Homo sapiens; identical to SEQ ID NO: 15594
  chr1:235665689-235665837
  hypo

SEQ ID NO: 62113 - DNA, 26 bp, Homo sapiens
  chr1:235714544-235714570
  hypo
taagaaaaccattccacggccgggtg

SEQ ID NO: 62114 - DNA, 31 bp, Homo sapiens
  chr1:235751252-235751283
  hypo
caggtgggtcatgtggcggggagggaacagc

SEQ ID NO: 62115 - DNA, 31 bp, Homo sapiens
  chr1:235754113-235754144
  hypo
tgagccacttctacttcgtgattccttagtg

SEQ ID NO: 62116 - DNA, 1402 bp, Homo sapiens; identical to SEQ ID NO: 36995
  chr1:235811919-235813321
  hypo

SEQ ID NO: 62117 - DNA, 21 bp, Homo sapiens
  chr1:235844182-235844203
  hypo
gccaccgcgcctggcctacaa

SEQ ID NO: 62118 - DNA, 32 bp, Homo sapiens
  chr1:235855353-235855385
  hypo
tgggcacagtggctcacgcatgtaatcccagc

SEQ ID NO: 62119 - DNA, 176 bp, Homo sapiens
  chr1:235955183-235955359
  hypo
atgtgccaagatgaaagcagccgatggggaaaactctctctatcagcctctttcttgctccgtgaaactcgtgctcttctcaataaacccatggccttactgtttaaaatcccaggatacttttgtgatgaaacaccgttgcttaaatttggagcgtgcagtaaagggaaggttag

SEQ ID NO: 62120 - DNA, 30 bp, Homo sapiens; identical to SEQ ID NO: 15597
  chr1:235971843-235971873
  hypo

SEQ ID NO: 62121 - DNA, 31 bp, Homo sapiens
  chr1:236055034-236055065
  hypo
tctgaataaaatctaacgtttagttgtacca

SEQ ID NO: 62122 - DNA, 95 bp, Homo sapiens
  chr1:236062547-236062642
  hypo
ggattacaggcatgatccaccacacctggccgactttaactttttttactttagatcactggctccacttctttgaagtccgtgtttcctggatg

SEQ ID NO: 62123 - DNA, 40 bp, Homo sapiens
  chr1:236069952-236069992
  hypo
gcaacaatgctggaacgcaagaggacgaacatctgcagat

SEQ ID NO: 62124 - DNA, 21 bp, Homo sapiens
  chr1:236093296-236093317
  hypo
ttttttttttttgagacggag

SEQ ID NO: 62125 - DNA, 31 bp, Homo sapiens; identical to SEQ ID NO: 15599
  chr1:236125189-236125220
  hypo

SEQ ID NO: 62126 - DNA, 186 bp, Homo sapiens
  chr1:236143071-236143257
  hypo
gtgggtggaggggcaggcccacgcagcccccatggctacagctgacgtacatcttccagtctgtgaaatacagattcttcccgtagctcgtcacagcaaaaggatactggagcccttcgagagccttgcgtctgctgggctgactggggttcaggcattccgcccgattggtgcctgtgtggagtg

SEQ ID NO: 62127 - DNA, 30 bp, Homo sapiens; identical to SEQ ID NO: 15600
  chr1:236154186-236154216
  hypo

SEQ ID NO: 62128 - DNA, 193 bp, Homo sapiens
  chr1:236155721-236155914
  hypo
ctaaaccctgcttcacatgggcgcctgctccaaacccatcccaggctcctcgttgccctcatgaccaatactcaggcttagaaacgtggctcacacggtgctgcttctggaaagcctcacccatgagcccaccgccccacgcaagccaggattccgcctcggctccctggtcgctgtctgcttctcctaaagc

SEQ ID NO: 62129 - DNA, 536 bp, Homo sapiens; identical to SEQ ID NO: 15601
  chr1:236156642-236157178
  hypo

SEQ ID NO: 62130 - DNA, 203 bp, Homo sapiens
  chr1:236161320-236161523
  hypo
tgaggagtcagtgggaggtgacgagacaaggcacacagagacatttcgagctctgcacccagatgttcatttgcgactggatcctcgcaaagcagacacagtgacattccataagtgtgttgccagtgaatatttgaagtacctttgtctgtgttgccagttctcatgttggtttgcttaacgtggttgctcccttggtgaga

SEQ ID NO: 62131 - DNA, 41 bp, Homo sapiens; identical to SEQ ID NO: 15602
  chr1:236189393-236189434
  hypo

SEQ ID NO: 62132 - DNA, 312 bp, Homo sapiens; identical to SEQ ID NO: 15603
  chr1:236192796-236193108
  hypo

SEQ ID NO: 62133 - DNA, 30 bp, Homo sapiens; identical to SEQ ID NO: 15604
  chr1:236193502-236193532
  hypo

SEQ ID NO: 62134 - DNA, 85 bp, Homo sapiens; identical to SEQ ID NO: 15605
  chr1:236194736-236194821
  hypo

SEQ ID NO: 62135 - DNA, 269 bp, Homo sapiens; identical to SEQ ID NO: 15606
  chr1:236212015-236212284
  hypo

SEQ ID NO: 62136 - DNA, 180 bp, Homo sapiens
  chr1:236274570-236274750
  hypo
cttcaccatcactccaggctccgagcagatccacgccaccattgagcgggacagctacgcacagattttgaggaatgtgggtggcatcgtcctggccaatgcttgtggcccctgcattggccgctgggacacgaaggacatcaagaaggggaagaagtacacaatcgtcacctcctacaa

SEQ ID NO: 62137 - DNA, 30 bp, Homo sapiens
  chr1:236275319-236275349
  hypo
tcggggacgagaactcgagccgggagcacg

SEQ ID NO: 62138 - DNA, 21 bp, Homo sapiens
  chr1:236280818-236280839
  hypo
ccattgcgcctggccaacaat

SEQ ID NO: 62139 - DNA, 211 bp, Homo sapiens
  chr1:236339560-236339771
  hypo
gtgtatcatgacacatgaggtcgaatccctaagacttcacagcgctctccatcatcacacagctcttggggggtggggggcactgttcccatcccactgcagccatgctggggtggcgggtcccctcctgcatgtccgactcgctcatctctccgatgcaagtactttgtccctcctccagggcacacacgttccttactgtggcaccttc

SEQ ID NO: 62140 - DNA, 710 bp, Homo sapiens; identical to SEQ ID NO: 37003
  chr1:236444197-236444907
  hypo

SEQ ID NO: 62141 - DNA, 451 bp, Homo sapiens; identical to SEQ ID NO: 1233
  chr1:236445120-236445571
  hypo

SEQ ID NO: 62142 - DNA, 200 bp, Homo sapiens
  chr1:236451639-236451839
  hypo
actataaaatccagcgcactccatcacccaccggtctttccttgcagaagcctctgtctcactagagagctactctgctttctctttcttttgcctattaagcctctgctcctaaactcatgtgtgttcctgtcctaaatcttcctggcgcaagacgacgaatcctgggtatttaccccagacaacgaagccacttcaaa

SEQ ID NO: 62143 - DNA, 30 bp, Homo sapiens
  chr1:236511371-236511401
  hypo
ggtgaccttcggggcggtgagagagtccag

SEQ ID NO: 62144 - DNA, 45 bp, Homo sapiens
  chr1:236514729-236514774
  hypo
aatgaggaggctgggcgcggtggctcatgcctataatcccagcac

SEQ ID NO: 62145 - DNA, 121 bp, Homo sapiens; identical to SEQ ID NO: 15611
  chr1:236540754-236540875
  hypo

SEQ ID NO: 62146 - DNA, 553 bp, Homo sapiens; identical to SEQ ID NO: 1235
  chr1:236558653-236559206
  hypo

SEQ ID NO: 62147 - DNA, 119 bp, Homo sapiens; identical to SEQ ID NO: 1236
  chr1:236559256-236559375
  hypo

SEQ ID NO: 62148 - DNA, 57 bp, Homo sapiens; identical to SEQ ID NO: 15614
  chr1:236561304-236561361
  hypo

SEQ ID NO: 62149 - DNA, 154 bp, Homo sapiens
  chr1:236626419-236626573
  hypo
gtttcataaatgttattcacacggcatttctctgctatcctcggaatagtgtttgtatcgtgtcactctggcacggggctctacagaacatgtcgagcgtgttgccttccctactgcccacatcgtttgagagaacacattttaaacatttttt

SEQ ID NO: 62150 - DNA, 30 bp, Homo sapiens
  chr1:236646223-236646253
  hypo
atggattcatgccacgttgaagataaaatt

SEQ ID NO: 62151 - DNA, 115 bp, Homo sapiens
  chr1:236657555-236657670
  hypo
cacgtgtccttctcccgccccggccacactcatggggcacactgtccttccctggctaatcctcccacactcgataccactttctctgggatattgcacccgatcttcagccgca

SEQ ID NO: 62152 - DNA, 31 bp, Homo sapiens
  chr1:236660745-236660776
  hypo
gtgggagaatcacttgcgttccagctgtagt

SEQ ID NO: 62153 - DNA, 18 bp, Homo sapiens
  chr1:236681268-236681286
  hypo
ccatgtatactatttata

SEQ ID NO: 62154 - DNA, 60 bp, Homo sapiens
  chr1:236723109-236723169
  hypo
gatatagccgagaacggtctccagcaacctgaaacacagaggctcgctcagcaaacggca

SEQ ID NO: 62155 - DNA, 30 bp, Homo sapiens
  chr1:236902692-236902722
  hypo
tccgggattaccgccggaagcacaagccac

SEQ ID NO: 62156 - DNA, 31 bp, Homo sapiens; identical to SEQ ID NO: 15615
  chr1:236903311-236903342
  hypo

SEQ ID NO: 62157 - DNA, 137 bp, Homo sapiens
  chr1:236907942-236908079
  hypo
ctgcagaaggattacgagtcggcgtcgctgacagaggtgcgggctctgctgcggaagcacgaggcgttcgagagcgacctggcagcgcaccaggaccgcgtggagcagatcgcagccatcgcgcaggagctcaagta

SEQ ID NO: 62158 - DNA, 29 bp, Homo sapiens
  chr1:236938014-236938043
  hypo
cgagccactgcgcccggcttaaattctct

SEQ ID NO: 62159 - DNA, 30 bp, Homo sapiens
  chr1:237000549-237000579
  hypo
aagcaaaactggtagcgtgccttttctttt

SEQ ID NO: 62160 - DNA, 162 bp, Homo sapiens
  chr1:237053950-237054112
  hypo
gaatcccttcagaggttgttacggtcaaaatgtcaatcgttacgaattatattgtagttgggattaaaagcaccacggaatacgaggcacaggtcgcgtctcccagaggtcactgcaaagtcagtggagttgtatgtgcacgaggaatgtcagtgaggaatg

SEQ ID NO: 62161 - DNA, 30 bp, Homo sapiens
  chr1:237061501-237061531
  hypo
tggcaaaaggcatgcgctcactgcttgctt

SEQ ID NO: 62162 - DNA, 30 bp, Homo sapiens; identical to SEQ ID NO: 1237
  chr1:237093369-237093399
  hypo

SEQ ID NO: 62163 - DNA, 272 bp, Homo sapiens
  chr1:237144672-237144944
  hypo
aagaaggaggagctgcggaaacagctggatgacctgaaggtggagctgtcccagctgcgcgtcgccaaagtgacaggcggtgcggcctccaagctctctaagatccgagtcgtccacaaatccattgcccattttctcacagttattaaccagactcagaaagaaaacctcaggaaattctacaagggcaagaagtacaagcccctggacctgcggcctaagaagacacgcgccacgcgccaccggctcaacaagcgcgaggagcacctgaa

SEQ ID NO: 62164 - DNA, 82 bp, Homo sapiens; identical to SEQ ID NO: 37010
  chr1:237205141-237205223
  hypo

SEQ ID NO: 62165 - DNA, 164 bp, Homo sapiens; identical to SEQ ID NO: 1239
  chr1:237206101-237206265
  hypo

SEQ ID NO: 62166 - DNA, 153 bp, Homo sapiens; identical to SEQ ID NO: 1240
  chr1:237206511-237206664
  hypo

SEQ ID NO: 62167 - DNA, 17 bp, Homo sapiens
  chr1:237257875-237257892
  hypo
tattattattatttttt

SEQ ID NO: 62168 - DNA, 39 bp, Homo sapiens
  chr1:237584238-237584277
  hypo
aatattaaacataattgtgaccgggcacagggtggctca

SEQ ID NO: 62169 - DNA, 23 bp, Homo sapiens
  chr1:237699615-237699638
  hypo
aatcccagcactttgggaggccg

SEQ ID NO: 62170 - DNA, 732 bp, Homo sapiens
  chr1:237947070-237947802
  hypo
tcttaaaactaaaggatttgacgtcgtctgatacttttaaagaatatgaccccgatggcaagggagtcatttccaagagggacttccacaaagcgatggagagccataagcactacacgcagtcagaaacggaatttcttttgtcttgtgcggagacggatgagaatgaaaccctcgactacgaagagttcgtcaaacgcttccacgaacctgcgaaggacatcggcttcaacgtcgccgtccttctgacaaacctctctgagcacatgcccaacgatacccgacttcagacttttctggaattagcagagagcgtcctgaattatttccagccctttctgggccgcatcgaaatcatgggaagcgccaaacgcatcgagagggtctattttgaaatcagtgagtccagccgaacccagtgggagaagccccaggtcaaggagtccaaaagacagttcatatttgacgtggtcaacgaaggcggagagaaagagaagatggaactctttgtgaacttctgcgaggacaccatctttgaaatgcagctggcggctcagatctcggagtcggacttgaacgagaggtcagcgaataaggaagaaagcgagaaggagaggccggaagagcaggggccgaggatggctttcttctccattctgacggtcaggtcggccctgtttgcgctcaggtacaatatcttgacccttatgcgaatgctcagtctgaagagcc

SEQ ID NO: 62171 - DNA, 46 bp, Homo sapiens; identical to SEQ ID NO: 15622
  chr1:238017557-238017603
  hypo

SEQ ID NO: 62172 - DNA, 30 bp, Homo sapiens
  chr1:238080341-238080371
  hypo
caggcagcctgaaaacgagtctataaatta

SEQ ID NO: 62173 - DNA, 314 bp, Homo sapiens
  chr1:238081973-238082287
  hypo
cctcggcgtgcaggtcgcagtcctttacatcaccaacaacaacaacaaaaaacttttcagcaacaagacgccccaccttctactgtatgcccacgatgccaaaagggctttcactgggcatctcaatgccattccagatttgatattgatggcaatcctttacagccttttaaaaatcagggaaacgggatgaggggccggccccaggcccctttaaacaatggggcattcctcaactctcagcccctggcgtccagccagacgggagccttcccagttcaatccattcaacctccaccccaattcccacttca

SEQ ID NO: 62174 - DNA, 28 bp, Homo sapiens
  chr1:238296987-238297015
  hypo
acagagcgagactctgtctcaaaaaaaa

SEQ ID NO: 62175 - DNA, 118 bp, Homo sapiens
  chr1:239138536-239138654
  hypo
tcagtcacttagtagccatctcggttctcagatctactgtcgtggtatggcagtgcttgtgttcaagtcaccgttattttactacatactggctttaaaacacaagcgtagtgggccg

SEQ ID NO: 62176 - DNA, 83 bp, Homo sapiens; identical to SEQ ID NO: 15624
  chr1:239509032-239509115
  hypo

SEQ ID NO: 62177 - DNA, 17 bp, Homo sapiens
  chr1:239935451-239935468
  hypo
tttctttttttttcttt

SEQ ID NO: 62178 - DNA, 201 bp, Homo sapiens
  chr1:240064134-240064335
  hypo
aatatttttaatccatcgtattcaggcgagcaagatcagtcatttcatttttgtataacttgcctcgaagctgcctgttgtggccccattctgcatagcaaatcaccacaaacttagcagcttacaacaaggttccctgttcagggtctcaacactgaaatcaaggtgttcgcccagctgagtttacgtcttaggcaagac

SEQ ID NO: 62179 - DNA, 27 bp, Homo sapiens
  chr1:240187923-240187950
  hypo
gggcacagtggctcacgcctgtaatcc

SEQ ID NO: 62180 - DNA, 31 bp, Homo sapiens; identical to SEQ ID NO: 15626
  chr1:240216145-240216176
  hypo

SEQ ID NO: 62181 - DNA, 23 bp, Homo sapiens
  chr1:240233155-240233178
  hypo
cttttttttttttttttttgacg

SEQ ID NO: 62182 - DNA, 1220 bp, Homo sapiens; identical to SEQ ID NO: 1242
  chr1:240254938-240256158
  hypo

SEQ ID NO: 62183 - DNA, 42 bp, Homo sapiens; identical to SEQ ID NO: 15628
  chr1:240372832-240372874
  hypo

SEQ ID NO: 62184 - DNA, 84 bp, Homo sapiens
  chr1:240641238-240641322
  hypo
cgtctcaaatcaaacaaacaaacaaaacgacagaaagaaaggacacgtcacttaaaatgaaacggcagttattctgaaagtaga

SEQ ID NO: 62185 - DNA, 22 bp, Homo sapiens
  chr1:240908226-240908248
  hypo
cgtctccaaaaacaacaacaac

SEQ ID NO: 62186 - DNA, 320 bp, Homo sapiens
  chr1:241051969-241052289
  hypo
aactgcacagccgcgcgttgagaagaggtgctatcaactttcccattttgctgatgaggcaatttaggctggatgagaggacgagactgagtactactttcttggtggaggcgacagtcaaagccaggcattagaccggaatcgactcagttaaccactaggctgtgtgtgacagctggaggttagggaacgcggaggcagagagagggaagcagcgggtgcaaagggcagagctacttcggattttatgacggtcaaaggcctcaatgaagaaagaggtaacatttgtttttgttttgtttttgagacggagtcccact

SEQ ID NO: 62187 - DNA, 25 bp, Homo sapiens
  chr1:241253065-241253090
  hypo
gaggaagaggtgggcagatcacgag

SEQ ID NO: 62188 - DNA, 46 bp, Homo sapiens; identical to SEQ ID NO: 15629
  chr1:241271634-241271680
  hypo

SEQ ID NO: 62189 - DNA, 151 bp, Homo sapiens; identical to SEQ ID NO: 15630
  chr1:241434338-241434489
  hypo

SEQ ID NO: 62190 - DNA, 1249 bp, Homo sapiens; identical to SEQ ID NO: 37018
  chr1:241519637-241520886
  hypo

SEQ ID NO: 62191 - DNA, 85 bp, Homo sapiens; identical to SEQ ID NO: 15632
  chr1:241541311-241541396
  hypo

SEQ ID NO: 62192 - DNA, 89 bp, Homo sapiens; identical to SEQ ID NO: 15633
  chr1:241559202-241559291
  hypo

SEQ ID NO: 62193 - DNA, 29 bp, Homo sapiens
  chr1:241559530-241559559
  hypo
gagactccgtctcaaaaaaaaaaaaaaaa

SEQ ID NO: 62194 - DNA, 777 bp, Homo sapiens; identical to SEQ ID NO: 37019
  chr1:241587077-241587854
  hypo

SEQ ID NO: 62195 - DNA, 81 bp, Homo sapiens
  chr1:241647321-241647402
  hypo
agccgtgagccactgcgcctggacgtgtctatccttttctatagcacctctaggaaacacgaaccatgtccaagatacaat

SEQ ID NO: 62196 - DNA, 203 bp, Homo sapiens
  chr1:241753208-241753411
  hypo
ttgtgtttggcattgcgatgagtgggaatgaagaataatactaagtcgcagtgagaaatagctgtatttgttcaaaagcgttctttaagactgtcattattgcagatgcgagcacatgtcaactcaagctggttcatttttcagaagaacatggagagatttcttcatgcgattatgccatcgacctttatccctctctatac

SEQ ID NO: 62197 - DNA, 30 bp, Homo sapiens
  chr1:241755388-241755418
  hypo
tacaacatgtttccccgcaaaggccgtgga

SEQ ID NO: 62198 - DNA, 30 bp, Homo sapiens; identical to SEQ ID NO: 37023
  chr1:242034247-242034277
  hypo

SEQ ID NO: 62199 - DNA, 88 bp, Homo sapiens
  chr1:242153593-242153681
  hypo
ccagcccaggggctggacttgcgaatgaagaagcctttggatgatttcagctcccagccatttttttttttttttttttcctgagatg

SEQ ID NO: 62200 - DNA, 30 bp, Homo sapiens
  chr1:242202218-242202248
  hypo
taacccatgaacctacgtggacacatcatc

SEQ ID NO: 62201 - DNA, 905 bp, Homo sapiens; identical to SEQ ID NO: 37024
  chr1:242686694-242687599
  hypo

SEQ ID NO: 62202 - DNA, 423 bp, Homo sapiens; identical to SEQ ID NO: 1250
  chr1:242687610-242688033
  hypo

SEQ ID NO: 62203 - DNA, 163 bp, Homo sapiens; identical to SEQ ID NO: 1251
  chr1:242688080-242688243
  hypo

SEQ ID NO: 62204 - DNA, 447 bp, Homo sapiens; identical to SEQ ID NO: 37027
  chr1:242688277-242688724
  hypo

SEQ ID NO: 62205 - DNA, 196 bp, Homo sapiens; identical to SEQ ID NO: 15641
  chr1:242767787-242767983
  hypo

SEQ ID NO: 62206 - DNA, 31 bp, Homo sapiens; identical to SEQ ID NO: 1253
  chr1:243418478-243418509
  hypo

SEQ ID NO: 62207 - DNA, 78 bp, Homo sapiens
  chr1:243432190-243432268
  hypo
tgggctgtcagagtggggcagcggggtgcagcgcggggagggcttttctctttcttcgtgcctctggtgctggagtcc

SEQ ID NO: 62208 - DNA, 162 bp, Homo sapiens
  chr1:243479807-243479969
  hypo
ctccacaatagatgattgtcccgcacagatgccgtcctgccacgaaggctcttagcctttctggctgctccgcccgccgctcgccaagtgaggacagagggtctttctctggggtgtgctttatttcatatgtgctcagccggcctaccctggctcttctaa

SEQ ID NO: 62209 - DNA, 30 bp, Homo sapiens
  chr1:243491038-243491068
  hypo
tcttttagtatgtgcggtccagtgtgagag

SEQ ID NO: 62210 - DNA, 132 bp, Homo sapiens; identical to SEQ ID NO: 15644
  chr1:243566400-243566532
  hypo

SEQ ID NO: 62211 - DNA, 645 bp, Homo sapiens; identical to SEQ ID NO: 15645
  chr1:243637570-243638215
  hypo

SEQ ID NO: 62212 - DNA, 30 bp, Homo sapiens
  chr1:243650526-243650556
  hypo
gtcctcctctctcccggccgctcactgttc

SEQ ID NO: 62213 - DNA, 336 bp, Homo sapiens
  chr1:243652441-243652777
  hypo
ggtactgtgcagaacgcggcgcaggtgggagtccttgggcgggcgtctacaggtggatcttttatgcacctcaacaggccggctttctcacggatcacatcggttagcagtaagctgggagggaggtcccgaagactgtgctgggcacagtgcaggacccagagaagcggagccatgggcccgtcctggtgagggagttaaagtccgtgcaggtgaacagaccccggcccgcgaatcaacgaaccacaccgagtgccaagttgcgccgtgcaggctgcggagggtgcgagagcagggagaagcgggaggacggccgtgggcggcagaacaggcttt

SEQ ID NO: 62214 - DNA, 40 bp, Homo sapiens; identical to SEQ ID NO: 15646
  chr1:243750609-243750649
  hypo

SEQ ID NO: 62215 - DNA, 857 bp, Homo sapiens; identical to SEQ ID NO: 37031
  chr1:244012278-244013135
  hypo

SEQ ID NO: 62216 - DNA, 542 bp, Homo sapiens; identical to SEQ ID NO: 37034
  chr1:244080519-244081061
  hypo

SEQ ID NO: 62217 - DNA, 36 bp, Homo sapiens; identical to SEQ ID NO: 37035
  chr1:244081077-244081113
  hypo

SEQ ID NO: 62218 - DNA, 253 bp, Homo sapiens; identical to SEQ ID NO: 15647
  chr1:244142770-244143023
  hypo

SEQ ID NO: 62219 - DNA, 43 bp, Homo sapiens
  chr1:244243993-244244036
  hypo
ggtgggaagaggcagagaagacgtgagtttcttgccaattcca

SEQ ID NO: 62220 - DNA, 217 bp, Homo sapiens; identical to SEQ ID NO: 15648
  chr1:244345253-244345470
  hypo

SEQ ID NO: 62221 - DNA, 31 bp, Homo sapiens; identical to SEQ ID NO: 15649
  chr1:244455411-244455442
  hypo

SEQ ID NO: 62222 - DNA, 133 bp, Homo sapiens
  chr1:244499986-244500119
  hypo
ctggtgaccagctgggagtgccgggctccaaggctgagaggtgttgctcaatcagctgaagtgtcctagtccatgaaaagggtacgatttctctttgccgaagagacaatgcgggaaccttaggagaaaacag

SEQ ID NO: 62223 - DNA, 30 bp, Homo sapiens; identical to SEQ ID NO: 15650
  chr1:244534632-244534662
  hypo

SEQ ID NO: 62224 - DNA, 144 bp, Homo sapiens; identical to SEQ ID NO: 15651
  chr1:244641920-244642064
  hypo

SEQ ID NO: 62225 - DNA, 82 bp, Homo sapiens
  chr1:244758874-244758956
  hypo
agctaggtggattccacaccacggaaggccttctatcaagtcttacggtggagtggcatgatcaaatatttgctttaggctg

SEQ ID NO: 62226 - DNA, 74 bp, Homo sapiens
  chr1:244815256-244815330
  hypo
attttaaaatccttccgggatctggcctctgcctacctgcccagctcatctagtaccgtcgactccttgcctac

SEQ ID NO: 62227 - DNA, 87 bp, Homo sapiens
  chr1:244823751-244823838
  hypo
gccaccgcacccggtcggatttttcttaagatgggatgtacttacactttccgtttgttgactgtcgaattctctacaagattattt

SEQ ID NO: 62228 - DNA, 90 bp, Homo sapiens
  chr1:244826767-244826857
  hypo
gcacctggctgcaaattttaagaataaagtaaaaaatcctacaaatacacaaaggcaaaaaagttacacgggaacaaaatcaggctaatt

SEQ ID NO: 62229 - DNA, 40 bp, Homo sapiens
  chr1:244883480-244883520
  hypo
ttattttttggtaggcggccggggggaggtttgggacagc

SEQ ID NO: 62230 - DNA, 1007 bp, Homo sapiens; identical to SEQ ID NO: 37037
  chr1:244893208-244894215
  hypo

SEQ ID NO: 62231 - DNA, 96 bp, Homo sapiens
  chr1:244896510-244896606
  hypo
aaacgcactgcacatgcggcccctgctctcaagtgcgacatgcagcccaccacacgcgcagacagcccaccccacgggaggaactgggagaaggaa

SEQ ID NO: 62232 - DNA, 194 bp, Homo sapiens
  chr1:244920544-244920738
  hypo
tggttggtatagctgtgactacggcacagcaaaccaggcggcggtgcagcccacgcaaccccgaggccattggtgccttttgtggacggctaggccagagccttttctgtcgaagtcaagtgcagagttcgggcaatgcaccgtgtgagtgtgtcagcaatctccaagttctcgaggtgtgcactgaagaggtc

SEQ ID NO: 62233 - DNA, 31 bp, Homo sapiens
  chr1:244943827-244943858
  hypo
acgtgctctcaccagcgcgcccacccacccc

SEQ ID NO: 62234 - DNA, 20 bp, Homo sapiens
  chr1:244990926-244990946
  hypo
ttttttttttttgagacgga

SEQ ID NO: 62235 - DNA, 509 bp, Homo sapiens
  chr1:245032184-245032693
  hypo
ccggcctatatgcagttatcgtataccaattatacctccataaagctggggaggttgggggaggaagacaaaagaattcaggcctgcggggaatgatgggagtgggtaggagaggagagaggggagagaggaaaacacagatcaccagcagcctcgtgggtggttttgtaaaggactttggcttttgctttctgctatggactgaacgtttgtgtccccacaaaagtcctgtgttgaaacctaatcccccatgatattaggagctgaggcctttggaggcaacgaggtcatgagcgtggagccctcatcaatgggattagaaaatttatacagagctgaagagaccagcgttcgtgtcttctgccctgtgaggacacagcaagaaggtgccctgggtggggaggcgggccctcaccagtcactgaggcgctgggcttcttagcttccagaactgcgaccaataagtgtctgttgtttataagctactcggcttatgatgtttgttagaa

SEQ ID NO: 62236 - DNA, 141 bp, Homo sapiens; identical to SEQ ID NO: 15656
  chr1:245135713-245135854
  hypo

SEQ ID NO: 62237 - DNA, 21 bp, Homo sapiens
  chr1:245136153-245136174
  hypo
gagaagcactcatgtgctgta

SEQ ID NO: 62238 - DNA, 143 bp, Homo sapiens
  chr1:245205093-245205236
  hypo
ccagagagacagtgggatgctcgcgcacagaggggtgaccaggtgagggcacagggagaaaaagtggcgcctacaaattgaggaaggccccagaagcagccgacctgctgacacctttatctgggacctctggcctccggaac

SEQ ID NO: 62239 - DNA, 93 bp, Homo sapiens
  chr1:245209850-245209943
  hypo
atgtctttggcaccagaaatacgatgcgaggatagtgcataggatcattcggtcatttttgcctctagccccgtatttcagaacatgggagga

SEQ ID NO: 62240 - DNA, 306 bp, Homo sapiens; identical to SEQ ID NO: 15658
  chr1:245254414-245254720
  hypo

SEQ ID NO: 62241 - DNA, 157 bp, Homo sapiens
  chr1:245281662-245281819
  hypo
ttgtggcttcctgaaggccctcgaagtttgcccctgcagctttcttcggagaactgggagaacaccatgtgtcaccttgtggagcattttaaaaacgagtgagaaacctttatcgggaagatactacgtgctgtaaaacaatgacagtaagccgggc

SEQ ID NO: 62242 - DNA, 31 bp, Homo sapiens
  chr1:245328080-245328111
  hypo
agaaagattgctggccaggcacggtggctca

SEQ ID NO: 62243 - DNA, 30 bp, Homo sapiens
  chr1:245328350-245328380
  hypo
tgacggtgcgagactccatctttaaaaaaa

SEQ ID NO: 62244 - DNA, 167 bp, Homo sapiens
  chr1:245377006-245377173
  hypo
ggatgcacacgtgaccgtgtgccgcacctttgttctgcccgttccttactccttatttaggtgatgaaagatgtggtgccccaactttaagttccacttgacgcagaatttcctgattgaggatggagcctggggctaccttgaggtaattacgggatagtcgttgt

SEQ ID NO: 62245 - DNA, 30 bp, Homo sapiens; identical to SEQ ID NO: 15660
  chr1:245425171-245425201
  hypo

SEQ ID NO: 62246 - DNA, 140 bp, Homo sapiens
  chr1:245481133-245481273
  hypo
caacttgcagatgttcagatgcgcagagttaaggtctaaaacaagaaaagtttgctaacgtagagtggccgctgggtcttatctttccgtcttcaatggccttgaaaaatatggggcacgcatggggatttcacactctt

SEQ ID NO: 62247 - DNA, 31 bp, Homo sapiens
  chr1:245492187-245492218
  hypo
gaccgtgtctctgttgcggttcttatgtcca

SEQ ID NO: 62248 - DNA, 100 bp, Homo sapiens; identical to SEQ ID NO: 15661
  chr1:245497278-245497378
  hypo

SEQ ID NO: 62249 - DNA, 641 bp, Homo sapiens
  chr1:245499277-245499918
  hypo
gaaaggagggtcccacgcagggaaaggagagtcccacgcagggagagtcccacgcagggaaaggagggtcccacgcagggaaaggagagtcccacgcagggaaaggagggtcccacgcagggaaaggagggtcccacgcagggaaagaagagtcccacgcagggagagtcccatgcagggaaagaaggtcccacgcagggaaaggagagtcccacgcagggattgctgttccactctgcatagccgctgggctttctgctgcacggatgccatctagaagaagcaccatccactgttctcagaaagaagagagaggaaggagacaggagtgcgtagagtgagtgggccatcagaaaaaggactgctctggggatgcaggagacccgcttgtaggatttaggggcaccgtgcaagacaggggtcatggtatgcgggtgcctccgactggcggctgcgtggtggatctggccacttggtgaaggtcgcagtgaccttgatctgctctggggagggatgctgttttgcctttcttcacgcacgtggaatcaggactagctggactggcaggaaaaggttctctctggaataatggtttgcttctctgcaggctcgtgcggcggctcgtgcggagccctgtgagc

SEQ ID NO: 62250 - DNA, 147 bp, Homo sapiens
  chr1:245508140-245508287
  hypo
ttagctcacagttacatttttcggactgatctacgttgattcgtggaaaaacaggtgataccgcttctttccttctatcccccggcttcagttgagttcattctataccccacccgatgcctccgcgtacacactgtagctaattct

SEQ ID NO: 62251 - DNA, 100 bp, Homo sapiens; identical to SEQ ID NO: 15663
  chr1:245525462-245525562
  hypo

SEQ ID NO: 62252 - DNA, 185 bp, Homo sapiens
  chr1:245530127-245530312
  hypo
ttctgtaggaccctgctttctcggctgtgattcacgacaaactccaggtccccaacaccatccggaaggcatggaacgaccgggacaaccgctgtgacatttgcgccactcacctgaaccagttgaagcaggaggccatccagatggtgctgacgttggagcaggcagccggcagtgagcactac

SEQ ID NO: 62253 - DNA, 98 bp, Homo sapiens
  chr1:245537643-245537741
  hypo
tgccgattgtggcttcgtggaaagcagaagcgtgtgttctagtatggctgatgtcgggagatgaggtatacacgtgctcttcccggccgaaccacttt

SEQ ID NO: 62254 - DNA, 30 bp, Homo sapiens
  chr1:245538221-245538251
  hypo
tacgttcaatctgggcgtttgcttggtgtg

SEQ ID NO: 62255 - DNA, 193 bp, Homo sapiens; identical to SEQ ID NO: 15665
  chr1:245576465-245576658
  hypo

SEQ ID NO: 62256 - DNA, 283 bp, Homo sapiens; identical to SEQ ID NO: 15666
  chr1:245582886-245583169
  hypo

SEQ ID NO: 62257 - DNA, 48 bp, Homo sapiens
  chr1:245627599-245627647
  hypo
agacctaggtaatgtgtgtcccgtcccccgacccagtgagcacgtgtg

SEQ ID NO: 62258 - DNA, 121 bp, Homo sapiens; identical to SEQ ID NO: 15667
  chr1:245627766-245627887
  hypo

SEQ ID NO: 62259 - DNA, 12 bp, Homo sapiens
  chr1:245628571-245628583
  hypo
gcccggacccat

SEQ ID NO: 62260 - DNA, 36 bp, Homo sapiens
  chr1:245704934-245704970
  hypo
tgtagtgaaagaaagacgtggcggtttaatttttta

SEQ ID NO: 62261 - DNA, 30 bp, Homo sapiens; identical to SEQ ID NO: 15669
  chr1:245755253-245755283
  hypo

SEQ ID NO: 62262 - DNA, 152 bp, Homo sapiens; identical to SEQ ID NO: 15670
  chr1:245764441-245764593
  hypo

SEQ ID NO: 62263 - DNA, 310 bp, Homo sapiens
  chr1:245772565-245772875
  hypo
aggaaaatcctacaccatgatcggaaaggatgattccatgcagaacctgggcatcattccctgtgccatctcttggctcttcaagctcataaacgaacgcaaggaaaagaccggcgcccgtttctcagtccgggtttccgccgtggaagtgtgggggaaggaggagaacctgcgggacctgctgtcggaggtggccacgggcagcctgcaggacggccagtccccgggcgtgtacctctgtgaggaccccatctgcggcacgcaggtgattgcttctgaagcctggctcgccccaaggtggctccctccc

SEQ ID NO: 62264 - DNA, 30 bp, Homo sapiens; identical to SEQ ID NO: 15672
  chr1:245836498-245836528
  hypo

SEQ ID NO: 62265 - DNA, 607 bp, Homo sapiens; identical to SEQ ID NO: 15673
  chr1:245848540-245849147
  hypo

SEQ ID NO: 62266 - DNA, 30 bp, Homo sapiens
  chr1:245849347-245849377
  hypo
acccaggagcgtcccgggcagcagtagcca

SEQ ID NO: 62267 - DNA, 539 bp, Homo sapiens; identical to SEQ ID NO: 15674
  chr1:245849778-245850317
  hypo

SEQ ID NO: 62268 - DNA, 30 bp, Homo sapiens
  chr1:245852142-245852172
  hypo
gggcggcaggtgggcgagctgcccaaaccc

SEQ ID NO: 62269 - DNA, 244 bp, Homo sapiens
  chr1:245855704-245855948
  hypo
gcaaaggctgcagagaaatgtcgggattgagcttggtccgggagggtgcttacatcgggacaggcagagagggcgcagggcatcgaggctgaggcagggatgggactgcaaactcccagcggcaagagcctggcctgtgggcgacacagcgagattaactcaaggagggaccgtcccagcaagcagagcaagacgctagcaaacgcaagccacagtcacacccggaacaaacacaagccacagt

SEQ ID NO: 62270 - DNA, 194 bp, Homo sapiens
  chr1:245866075-245866269
  hypo
gtaggaaaggtgcaaacgtcaaacaccgtggaaggagaaaaggatgggaagcccgaggggtgtccaagccctgtgagactgaaaaagcactttgaggaaccttaaagaccttgtttgtacataagaactgctagcaaaagagacctcactcttctcttgctttcgtgagaaaggaggggcgtggatgtaggatt

SEQ ID NO: 62271 - DNA, 149 bp, Homo sapiens
  chr1:245911711-245911860
  hypo
tcgtcagaggacttgcggcgccctctgtgaaagacggggagggctcctgagcgggactcaggaatgtgggttgctactctggattctgccaccgcccatttccttgcttgtgaaataaagtgtggatgactgcacgctctctaagaatc

SEQ ID NO: 62272 - DNA, 30 bp, Homo sapiens; identical to SEQ ID NO: 15675
  chr1:245915279-245915309
  hypo

SEQ ID NO: 62273 - DNA, 567 bp, Homo sapiens
  chr1:245925688-245926255
  hypo
ctgtgttgggtgcatcgcacattaggaaatttcctgcacgttgtttttctgtcaggactttcacacagtaggcccttgataaggatttgctgtaccttgctgattcgactggctgacaagtacccccagaccagaaaaggaaagttctccctgaggctgcaacagacggtgcggtgttcttcccccgcctgggtaaacatgccagacatgataaaaagaacagaatagctgagtgccctcagggaatcctagtgttactcccgttggccacacgctgactttatttagagatcaagtaaaggcgctatggctagcattcggcgaaaatgagcactgtggaatctggcttttaagaatcccttcggcatttgtcatttctcttaggtccatgtgggcggctgccagtgttttgggatcagccggcccctggacacgccctgagcaaccctgacgcccgatccttccaccgtcactcttctgcacacaagggcatggcggcccagagggtcctgttaaagtgtcaagcgcttcctatgatacccgcacgccaggtctccatacaaccca

SEQ ID NO: 62274 - DNA, 297 bp, Homo sapiens
  chr1:245986516-245986813
  hypo
tctcttctacattgttcaggacgattgcaaaatccatttctccttctctgtccctgcttctctgcccttcccccaagctttcttgctctctgccacacgtgcgtgtgcacacacacacgcgcgctcgtgcttgctcgctctcgctctctctctctcttttctaaggctccaggcatccgtccctggagaagtgcaccttgggaaggcgatgaaatgaaagaagggcacatcctcctttaaccccaaacatctgaagtcagcgccgcgcactactgcgatttcctgggccaaatgcat

SEQ ID NO: 62275 - DNA, 184 bp, Homo sapiens
  chr1:246019928-246020112
  hypo
ggaagagaaggttgcaaaatacgtgcagaacagacacccgtgtaggtgtgtggtcttctttatggatgtggtggacccatgtaaagtttctgtgcttaagagtggcccgagcagggcagcctgagtgtcgaaagggaggatgaggcagaagaatcagtgcagcgctagccaagagtgaggaacc

SEQ ID NO: 62276 - DNA, 123 bp, Homo sapiens
  chr1:246026858-246026981
  hypo
tgagttttgattattacctaacggtagtgagttattattcacgctgattttgccacgaacttccttgtcattactcaaactgctggccagggtcggaggtgcggcctgtgaccatggaacaga

SEQ ID NO: 62277 - DNA, 79 bp, Homo sapiens
  chr1:246032886-246032965
  hypo
aagacagaactgtgccgttgttctcaggtaagaacgagtctcatttgtccattctctctctgaccgcacaagccccttg

SEQ ID NO: 62278 - DNA, 93 bp, Homo sapiens
  chr1:246033505-246033598
  hypo
ggttgttcctttcacagcacacgtctaccttgactctaatattactacactaagatcagatacgttcccaccgcagctgtgggtatttgtcaa

SEQ ID NO: 62279 - DNA, 136 bp, Homo sapiens
  chr1:246094265-246094401
  hypo
ggagaaagagcaagtgcgaaggccctacgctaggaatgcccgtggtaacagaggaacagcaaagaggctagtgtgaccaaagcggagcaagaaagtagggggcaaaacacgagctcaaagacggagtgggatcact

SEQ ID NO: 62280 - DNA, 134 bp, Homo sapiens
  chr1:246160269-246160403
  hypo
gaattggcactgaggcgacgtcgctggtgcggaacaccatgacgtctgtgtctagggtatgcgcatatgctgcgtttttccgcaggtgcctcgcagtctgctctggctcttagggcttccgaactcagttcagg

SEQ ID NO: 62281 - DNA, 30 bp, Homo sapiens
  chr1:246171648-246171678
  hypo
catcctgtaatgcgacgtaaataagaaata

SEQ ID NO: 62282 - DNA, 66 bp, Homo sapiens
  chr1:246171898-246171964
  hypo
cgcttggggagtagccgtacctctgaagttttcctttcctttctcgagcaacgcagggagggagct

SEQ ID NO: 62283 - DNA, 190 bp, Homo sapiens
  chr1:246172193-246172383
  hypo
cccaggtgagacaggagagtccggggatgaagaattcggctctggagtcacagactcaagttcaagtgccagccgtaccgcttgctagcagcgtggccttgggcaagtcacttggcttcggtttcctcctcttagctgcaaaatatgaaaaacgggcctgctatgaaacgactggcccatagtcaacact

SEQ ID NO: 62284 - DNA, 220 bp, Homo sapiens
  chr1:246310280-246310500
  hypo
taatcggcaggcaggcgtgacagtgttcggcagaggacaatctgttcgagaataattagattccccctcgcttcttgcgttggtggcggaagcacccggagtatttacaatacaccattttgcttccatccgagtccatatgttcgctggtcaggttaaaactgaggctgcatggcacatttttcactgtaaacaacgctgccccggcaaaccctagggg

SEQ ID NO: 62285 - DNA, 137 bp, Homo sapiens
  chr1:246310772-246310909
  hypo
ctgctgctgcaacagggaggccggctagggctgcacactccatggaggcggtgggagcctcacccattctgggttggggcaggggctccgtgggtgccactgcagccacccaaatcgtggctgcagaccaggcttcc

SEQ ID NO: 62286 - DNA, 384 bp, Homo sapiens
  chr1:246311124-246311508
  hypo
acctttactgagttggtggagcgtgaactccgcaggtgcagacctggcatctctgcagcctgcaccctggagggcccgggaagacccgccccccacttcatccctgcaggctcgggggtgtctgctcccgcttcccagcccctctcctctccagatgcctgctctgatctccgaccggggttggggccgagcccggggcagcaggaggcagagagattcctgggtggaaggcggcagtccccgtaaggcccctccttcagaccagggagggcctgaaggctgggggccaggatgccagtccgggaccggagtggggacttgtggtgcctcgtctgggtgcacatggaggaccatgggccaatcggcaggaacttcctcccctct

SEQ ID NO: 62287 - DNA, 264 bp, Homo sapiens
  chr1:246320237-246320501
  hypo
tggtttggataaacaatccaacgtaggcaccattcacaaagaaagggatgctaggaggtacgagggcaaagatgaaaaggtcatacgcagaccgcaaagcttaaaccttcgcctcacatctgtttggaacagcagtagctttttacttagcgcttacatcaccaaagccaatgagtagcgaagtctgggacgaggacaagagctgcccttggcatcactgcctgtcacctgtcccttcggggcgccccctgcctccactgcttg

SEQ ID NO: 62288 - DNA, 215 bp, Homo sapiens
  chr1:246324304-246324519
  hypo
gggactgtgagacaacgccatcagacaagcgagacgatgccatcagacaagacaggtgttccagcgattgctctaggtaagcctcattctctttgttcactggcagcaccaccccgctccaccctgcgcctcatttgcagagtcctctacaaatgaacatgcagcctgcctggcacacctggcacagctcacctgcatgccgccaagcatgacag

SEQ ID NO: 62289 - DNA, 30 bp, Homo sapiens
  chr1:246324795-246324825
  hypo
ctccacctttgatttcgatggtctccttca

SEQ ID NO: 62290 - DNA, 224 bp, Homo sapiens; identical to SEQ ID NO: 15680
  chr1:246330192-246330416
  hypo

SEQ ID NO: 62291 - DNA, 25 bp, Homo sapiens
  chr1:246489785-246489810
  hypo
cttcaggaggccgggcgtggcagtt

SEQ ID NO: 62292 - DNA, 24 bp, Homo sapiens
  chr1:246490049-246490073
  hypo
aacgagactctgtctaaaaacaaa

SEQ ID NO: 62293 - DNA, 96 bp, Homo sapiens
  chr1:246518820-246518916
  hypo
tcagcagggaggctggcggtctggggcaagttctcagccacagtcaccagctgcctggaaacagactccgtgctgctgtgggggcacggtgggagt

SEQ ID NO: 62294 - DNA, 75 bp, Homo sapiens
  chr1:246582056-246582131
  hypo
gttctgctggccgacggcctcccagcgtgctggcatctgttgctgtgctcttctgcctgcgtgctcccctttgtc

SEQ ID NO: 62295 - DNA, 31 bp, Homo sapiens
  chr1:246625741-246625772
  hypo
tcaagtcataggcccccgactgtgccactgt

SEQ ID NO: 62296 - DNA, 130 bp, Homo sapiens
  chr1:246655155-246655285
  hypo
cagacaaggccactctgtgaccgtgatggatcaaaacgaaaacaagaccactctgtaatcatgtctgaacgcaactctgttcaactaccgatgtgctccctggctggacggcaggaactaaagctagagc

SEQ ID NO: 62297 - DNA, 30 bp, Homo sapiens
  chr1:246655683-246655713
  hypo
cggtatctcagagaacgccgatggctcctg

SEQ ID NO: 62298 - DNA, 12 bp, Homo sapiens
  chr1:246666986-246666998
  hypo
ggggacagcggc

SEQ ID NO: 62299 - DNA, 23 bp, Homo sapiens
  chr1:246711494-246711517
  hypo
tttctaatcgattaatacgtcat

SEQ ID NO: 62300 - DNA, 30 bp, Homo sapiens
  chr1:246768682-246768712
  hypo
gcctgggccgggcgcggtggctcacgcctg

SEQ ID NO: 62301 - DNA, 86 bp, Homo sapiens; identical to SEQ ID NO: 15684
  chr1:246783953-246784039
  hypo

SEQ ID NO: 62302 - DNA, 31 bp, Homo sapiens; identical to SEQ ID NO: 15685
  chr1:246864972-246865003
  hypo

SEQ ID NO: 62303 - DNA, 19 bp, Homo sapiens
  chr1:246869238-246869257
  hypo
gtatagtgagccaggcgcg

SEQ ID NO: 62304 - DNA, 30 bp, Homo sapiens; identical to SEQ ID NO: 15686
  chr1:246886499-246886529
  hypo

SEQ ID NO: 62305 - DNA, 738 bp, Homo sapiens; identical to SEQ ID NO: 37046
  chr1:246887310-246888048
  hypo

SEQ ID NO: 62306 - DNA, 31 bp, Homo sapiens; identical to SEQ ID NO: 15688
  chr1:246913294-246913325
  hypo

SEQ ID NO: 62307 - DNA, 334 bp, Homo sapiens
  chr1:246930841-246931175
  hypo
tgtgttcctggtagattttcacgaatgagctggcaggtctaatgggggaggcggcgtcccagtctgtgttgcagcagcattctcatcgggggtgcgcacaccatcgttactgtcgggcagtaactgccgcttgccttgccgcagtaggagggaaatctcaccttccttccacatactgtcttgagcctttgctaaattaaactgcactttttgctatttttgcctagtttttcgccaatctacactgattttggactgttacctaagttgaaaaataaaaggttgtcaatcgaatggtggtttaatgtttggacctgccgatgtatttgtatag

SEQ ID NO: 62308 - DNA, 122 bp, Homo sapiens
  chr1:246931770-246931892
  hypo
ggaccttagaaaaggttttatcggctgtgaaattagaaagcagtacaggagcaatagagcccacgactagctgcacatctgaatcacgaaacagtaacaggttcctccgtgcctgcagcaac

SEQ ID NO: 62309 - DNA, 92 bp, Homo sapiens
  chr1:246944243-246944335
  hypo
aactgaccttaaaatacggagattagcctggagtatccaggtggccccaatgaaatcacaagggtcttcaatatggccgagagaagcagaag

SEQ ID NO: 62310 - DNA, 53 bp, Homo sapiens
  chr1:246954178-246954231
  hypo
ggaaggtctacagctgcggaggatggcaggtggcatctcggggcctcctgtgt

SEQ ID NO: 62311 - DNA, 31 bp, Homo sapiens
  chr1:246954579-246954610
  hypo
tggcatcccctctccccgccctgctcccctg

SEQ ID NO: 62312 - DNA, 161 bp, Homo sapiens
  chr1:246969292-246969453
  hypo
acaggcgtgaggcaccgcgcccagccgatatccccattgttaagcggtgcatgactgtggtaatacccagtgatttgcacaggaatgttcataatagcactacttataatagcaaaaaacaaagtggggacaatcaaaatgccaatcgagaatgaataaat

SEQ ID NO: 62313 - DNA, 100 bp, Homo sapiens; identical to SEQ ID NO: 15690
  chr1:247017213-247017313
  hypo

SEQ ID NO: 62314 - DNA, 94 bp, Homo sapiens; identical to SEQ ID NO: 15691
  chr1:247027353-247027447
  hypo

SEQ ID NO: 62315 - DNA, 30 bp, Homo sapiens; identical to SEQ ID NO: 15692
  chr1:247048743-247048773
  hypo

SEQ ID NO: 62316 - DNA, 30 bp, Homo sapiens; identical to SEQ ID NO: 15693
  chr1:247090976-247091006
  hypo

SEQ ID NO: 62317 - DNA, 16 bp, Homo sapiens
  chr1:247103101-247103117
  hypo
gcgactctgtctcaaa

SEQ ID NO: 62318 - DNA, 28 bp, Homo sapiens
  chr1:247111339-247111367
  hypo
tacctgtgaggcgatgagtgacgtcgtt

SEQ ID NO: 62319 - DNA, 21 bp, Homo sapiens
  chr1:247116659-247116680
  hypo
cagcactttaggaggccgagg

SEQ ID NO: 62320 - DNA, 31 bp, Homo sapiens
  chr1:247129039-247129070
  hypo
gtgacagtgcaaaaaacgaagaaagaaaaag

SEQ ID NO: 62321 - DNA, 18 bp, Homo sapiens
  chr1:247136657-247136675
  hypo
acatatttctaatgattg

SEQ ID NO: 62322 - DNA, 39 bp, Homo sapiens
  chr1:247156410-247156449
  hypo
ctctgtaattaagaaaatagccgggtgcagtggctcacg

SEQ ID NO: 62323 - DNA, 31 bp, Homo sapiens; identical to SEQ ID NO: 15694
  chr1:247163508-247163539
  hypo

SEQ ID NO: 62324 - DNA, 375 bp, Homo sapiens; identical to SEQ ID NO: 37047
  chr1:247170805-247171180
  hypo

SEQ ID NO: 62325 - DNA, 31 bp, Homo sapiens; identical to SEQ ID NO: 15696
  chr1:247275934-247275965
  hypo

SEQ ID NO: 62326 - DNA, 31 bp, Homo sapiens; identical to SEQ ID NO: 1263
  chr1:247278690-247278721
  hypo

SEQ ID NO: 62327 - DNA, 183 bp, Homo sapiens; identical to SEQ ID NO: 15698
  chr1:247348620-247348803
  hypo

SEQ ID NO: 62328 - DNA, 88 bp, Homo sapiens
  chr1:247399633-247399721
  hypo
aaaaaagtgtgataaataaaacgggatatttatatacaaacaagaatagtgtggccgggcgcaatggctcacgcctgtaatcccagca

SEQ ID NO: 62329 - DNA, 28 bp, Homo sapiens
  chr1:247399960-247399988
  hypo
aggctccgtctcaaaaaaataaaaagaa

SEQ ID NO: 62330 - DNA, 30 bp, Homo sapiens
  chr1:247418059-247418089
  hypo
actgtgaactaaaccgtatatccaattcac

SEQ ID NO: 62331 - DNA, 30 bp, Homo sapiens
  chr1:247464057-247464087
  hypo
gggacccttgtccgcgtcctcggatgccgc

SEQ ID NO: 62332 - DNA, 30 bp, Homo sapiens
  chr1:247464343-247464373
  hypo
attttcccacagttcggacacacgtaggac

SEQ ID NO: 62333 - DNA, 30 bp, Homo sapiens
  chr1:247464662-247464692
  hypo
ggagtttacaaacccgtgtttttacaatgg

SEQ ID NO: 62334 - DNA, 31 bp, Homo sapiens; identical to SEQ ID NO: 15699
  chr1:247482929-247482960
  hypo

SEQ ID NO: 62335 - DNA, 79 bp, Homo sapiens; identical to SEQ ID NO: 37056
  chr1:247495754-247495833
  hypo

SEQ ID NO: 62336 - DNA, 31 bp, Homo sapiens; identical to SEQ ID NO: 15700
  chr1:247501077-247501108
  hypo

SEQ ID NO: 62337 - DNA, 30 bp, Homo sapiens
  chr1:247512115-247512145
  hypo
tggacaaaaacgttccgatccatcccctct

SEQ ID NO: 62338 - DNA, 834 bp, Homo sapiens
  chr1:247587054-247587888
  hypo
gttaccactcgcttccgatgacaggccccagctgagagcgcatctcaggtggatgtgtgtatactttccccctaacttcctgtctttgccgtagattaccgtaagaagtacagaaagtacgtgagaagcagattccagtgcattgaagacaggaatgcccgtctgggtgagagtgtgagcctcaacaaacgctacacacgactgcgtctcatcaaggagcaccggagccagcaggagagggagcaggagcttctggccatcggcaagaccaagacgtgtgagagccccgtgagtcccattaagatggagttgctgtttgaccccgatgatgagcattctgagcctgtgcacaccgtggtgttccagggggcggcagggattgggaaaacaatcctggccaggaagatgatgttggactgggcgtcggggacactctaccaagacaggtttgactatctgttctatatccactgtcgagaggtgagccttgtgacacagaggagcctgggggacctgatcatgagctgctgccccgacccaaacccacccatccacaagatcgtgagaaaaccctccagaatcctcttcctcatggacggcttcgatgagctgcaaggtgcctttgacgagcacataggaccgctctgcactgactggcagaaggccgagcggggagacattctcctgagcagcctcatcagaaagaagctgcttcccgaggcctctctgctcatcaccacgagacctgtggccctggagaaactgcagcacttgctggaccatcctcggcatgtggagatcctgggtttctccgaggccaaaaggaaagagtac

SEQ ID NO: 62339 - DNA, 95 bp, Homo sapiens
  chr1:247590065-247590160
  hypo
agtatccaaagcacaaggggacgaacctgttcaccagcggggcacgggtgggtgtccccgctcagccagcttccggaggatgggcagtgagagag

SEQ ID NO: 62340 - DNA, 30 bp, Homo sapiens
  chr1:247596707-247596737
  hypo
tgcacaggcccacaccgcccgcttcactta

SEQ ID NO: 62341 - DNA, 290 bp, Homo sapiens; identical to SEQ ID NO: 15702
  chr1:247614674-247614964
  hypo

SEQ ID NO: 62342 - DNA, 30 bp, Homo sapiens; identical to SEQ ID NO: 15703
  chr1:247695313-247695343
  hypo

SEQ ID NO: 62343 - DNA, 30 bp, Homo sapiens; identical to SEQ ID NO: 15704
  chr1:247978776-247978806
  hypo

SEQ ID NO: 62344 - DNA, 33 bp, Homo sapiens; identical to SEQ ID NO: 15705
  chr1:248000442-248000475
  hypo

SEQ ID NO: 62345 - DNA, 31 bp, Homo sapiens
  chr1:248010073-248010104
  hypo
gggcacggtggctcacgcctgtaaccccagc

SEQ ID NO: 62346 - DNA, 139 bp, Homo sapiens; identical to SEQ ID NO: 1264
  chr1:248020309-248020448
  hypo

SEQ ID NO: 62347 - DNA, 115 bp, Homo sapiens; identical to SEQ ID NO: 1265
  chr1:248020515-248020630
  hypo

SEQ ID NO: 62348 - DNA, 400 bp, Homo sapiens; identical to SEQ ID NO: 37059
  chr1:248020956-248021356
  hypo

SEQ ID NO: 62349 - DNA, 25 bp, Homo sapiens
  chr1:248026518-248026543
  hypo
agtcaaagcaagaagttatcacgtt

SEQ ID NO: 62350 - DNA, 307 bp, Homo sapiens; identical to SEQ ID NO: 15709
  chr1:248027959-248028266
  hypo

SEQ ID NO: 62351 - DNA, 46 bp, Homo sapiens
  chr1:248036979-248037025
  hypo
attcactagaccgggcgtggcagctcacgcctgtaatcccaacatt

SEQ ID NO: 62352 - DNA, 226 bp, Homo sapiens
  chr1:248074826-248075052
  hypo
tcttatattgttccttataaccgggggggacgggatgatattagtcccaatgtcgcagagggtgtacaccgcctctgtaatatccacgggggaaaaggatgatacaattcccactatcgaagggggtgtacccccctgttgtattgttcctgatatccagggcgtgaggaaatgatatcactcttaatatcgcagggtgtgtacaccctcacgttgataatgttcg

SEQ ID NO: 62353 - DNA, 557 bp, Homo sapiens
  chr1:248099572-248100129
  hypo
gcttcttggtacaggagatcacgcgtaatgggatgagccgtagggtcttcaacatcaccaggcgctcttggttttcacaggtctggaagagtgtgaaacctggtagtacttaaagagaaggtagcccatgccctggacatggcaggggcgtgtccagcccagatcaaggatcagttcaggcaggcgacagtgaccgtggtcaccatggcgatgtggtgcccacggtcagaggtggcattggggaagtcagccactcggacgctggtgctcctcactgacttctcatcgctcctgtgctcgctgtagacggtgtttaactcagaatccacatgcaggatgttctcggttttcaggtgtgcgtgggtcagccggttctcgtgcagaaatctaagggtgtggcagagctggtgggccatgtgccagacatgtgggaggggaatggctggatgttattctccttcgggaactcaagggttttcctgcccaggagctcaaaggtgatatgcatggaccgcggagggtgaaccagtcacaccccaagacgcacagcagctggt

SEQ ID NO: 62354 - DNA, 137 bp, Homo sapiens
  chr1:248328622-248328759
  hypo
tcaggcggctccagtcctcagggggctccagtcctcaggagggcgctccagcacccgtgactcgccaggctccgtctgagacccgtgctaggctcgctctgtccctgcgttccctcgcctctctctccagttgtttt

SEQ ID NO: 62355 - DNA, 30 bp, Homo sapiens
  chr1:248480154-248480184
  hypo
gcagactccagactgcggtgcgggcactga

SEQ ID NO: 62356 - DNA, 339 bp, Homo sapiens; identical to SEQ ID NO: 15713
  chr1:249106192-249106531
  hypo

SEQ ID NO: 62357 - DNA, 99 bp, Homo sapiens
  chr1:249113998-249114097
  hypo
gggctgcatgcggcccacaggccacgggttggaaaagcttgctctaaattttctcgaagagacttattcaacagaaacgtaacaggagctgcacatgga

SEQ ID NO: 62358 - DNA, 34 bp, Homo sapiens
  chr1:249121615-249121649
  hypo
cgtgagccaccacgcccagcctagcttgctattc

SEQ ID NO: 62359 - DNA, 175 bp, Homo sapiens; identical to SEQ ID NO: 15714
  chr1:249141904-249142079
  hypo

SEQ ID NO: 62360 - DNA, 30 bp, Homo sapiens; identical to SEQ ID NO: 15715
  chr1:249142490-249142520
  hypo

SEQ ID NO: 62361 - DNA, 235 bp, Homo sapiens; identical to SEQ ID NO: 1267
  chr1:249167653-249167888
  hypo

SEQ ID NO: 62362 - DNA, 39 bp, Homo sapiens; identical to SEQ ID NO: 15717
  chr1:249172379-249172418
  hypo

SEQ ID NO: 62363 - DNA, 124 bp, Homo sapiens; identical to SEQ ID NO: 15718
  chr1:249212001-249212125
  hypo

SEQ ID NO: 62364 - DNA, 138 bp, Homo sapiens; identical to SEQ ID NO: 15719
  chr1:249212376-249212514
  hypo

SEQ ID NO: 62365 - DNA, 193 bp, Homo sapiens; identical to SEQ ID NO: 15720
  chr1:249218263-249218456
  hypo

SEQ ID NO: 62366 - DNA, 28 bp, Homo sapiens
  chr2:90801-90829
  hypo
tgtgccattgagaggtgacagcgtgctg

SEQ ID NO: 62367 - DNA, 28 bp, Homo sapiens
  chr2:99795-99823
  hypo
agactccgcctcaaaaaaaaaaaaagtt

SEQ ID NO: 62368 - DNA, 202 bp, Homo sapiens
  chr2:142611-142813
  hypo
gagtgatactccgtctcaaaaccaaaaaaagaaagaccccgccaggtgttgctgataactcgcccaccatcacagtgaaggagaagctcggcttcacgagagcttcgcctgtgaccgcacctgtgactgaaatggccgtgactcctggtaaggactcgaggttgaatccccagacagtaacgtccaggtcaagggtttataa

SEQ ID NO: 62369 - DNA, 581 bp, Homo sapiens; identical to SEQ ID NO: 37065
  chr2:263890-264471
  hypo

SEQ ID NO: 62370 - DNA, 112 bp, Homo sapiens
  chr2:272129-272241
  hypo
atgagccacgttgcccggcaggtaccgtccttggacttgaagttgtgtgttttgtgtttcagtgggtcattgacagcggtgctgtttctgactggaacgtgggccggtcccc

SEQ ID NO: 62371 - DNA, 959 bp, Homo sapiens; identical to SEQ ID NO: 37067
  chr2:287859-288818
  hypo

SEQ ID NO: 62372 - DNA, 31 bp, Homo sapiens; identical to SEQ ID NO: 1273
  chr2:288831-288862
  hypo

SEQ ID NO: 62373 - DNA, 743 bp, Homo sapiens; identical to SEQ ID NO: 15724
  chr2:314482-315225
  hypo

SEQ ID NO: 62374 - DNA, 271 bp, Homo sapiens; identical to SEQ ID NO: 15725
  chr2:318852-319123
  hypo

SEQ ID NO: 62375 - DNA, 450 bp, Homo sapiens
  chr2:319182-319632
  hypo
tgggcgtgtgtgggcgtgtgtgtgtcgtgtgtgcacaggcatgtgtgcggccgtgtgtgtgtggacacgtgtgtgtgggtgtgtgcggaaacgtgtgggggcacgtgtgtgtgggcacgtgtgtgcctgggcacgtgtatgcgggtgtgtgtgtgtgggcgtgtgtgcggatgtgtgtgtgggtgtgtgtgggtgtgtgcgtgggtgtgtgcaggcgtgtgtgcaggcacgtgtgtgcgggtgtgtgggggtgtgtgcgcgggtgtgtgcaggcgtgtgtgcgggcacgtgtgtgtgtgggcgtgtgtgcaggcagaaagcaccaagatgtaaacagctggcgctcacttgtgcaccaccaaagctagaatgtttcatctcccctggtggcttagtaagtgacagaacagcaccaagatgtaaacagccggtgctatgcttgcagggagg

SEQ ID NO: 62376 - DNA, 298 bp, Homo sapiens; identical to SEQ ID NO: 15727
  chr2:364139-364437
  hypo

SEQ ID NO: 62377 - DNA, 43 bp, Homo sapiens
  chr2:366700-366743
  hypo
cagcacctgcacccttgtctgcgctgcttttcctttcaaaccc

SEQ ID NO: 62378 - DNA, 187 bp, Homo sapiens
  chr2:374751-374938
  hypo
tctaggaaatactcagggtctcgcttcctccttcaacatccatccgtgtcttccacaccccatcctgaaccaggcgcccgaattccgagttccgtgttccttctgtcacacgtggctaaagaccggctgctccctagaaaatcactgctttccaaagcgcactgccgagtcttacatgaagtatttt

SEQ ID NO: 62379 - DNA, 43 bp, Homo sapiens
  chr2:416711-416754
  hypo
tcatacaatttcagggtaaatcgccacttgatgtcattgctaa

SEQ ID NO: 62380 - DNA, 20 bp, Homo sapiens
  chr2:426595-426615
  hypo
ggcacgcagggggctccgca

SEQ ID NO: 62381 - DNA, 30 bp, Homo sapiens
  chr2:427565-427595
  hypo
gggctccgctggcacgcagggggctctgct

SEQ ID NO: 62382 - DNA, 278 bp, Homo sapiens
  chr2:451670-451948
  hypo
gaggagagagagggaactgcacgtctgaccaaaagaggaggccgcctggcaccccaggacacatcggcagcctccccagtggaaacgcccaagacaggcgaagaccagaggggacgcatggagacaagtcttcatgtttgccttaagaccgttgtggcgacaatggccttgctttagatgagaaataacagagtgccgtggagccgcggtccccggcctcgctggcaccagggatcggttcaacggaagacagtttttccacggatgggatgggggtg

SEQ ID NO: 62383 - DNA, 30 bp, Homo sapiens
  chr2:469790-469820
  hypo
gtctgggcattcatgcgatacgcagcgctc

SEQ ID NO: 62384 - DNA, 30 bp, Homo sapiens
  chr2:487713-487743
  hypo
atgatgacaatgaccgtggcgctcaccctg

SEQ ID NO: 62385 - DNA, 77 bp, Homo sapiens
  chr2:497167-497244
  hypo
tggtttatattcctgcttgtgcgtgcgtgtcgctaatgcacctacatttttgtatcggtcaaattctttgtgtctct

SEQ ID NO: 62386 - DNA, 391 bp, Homo sapiens
  chr2:502871-503262
  hypo
caaaatggcaaaagtttggggcggtgggcaggaggcccttgccactgtggcgccaggagactgggtaaggcgcccaccacagggctggggatctcaggggcgtctgaagaggaagagctggctcggggcgctcggggtagcacagccacacatccaaccacggcgcgagaatcaaggtgccagaatcacaggacgcgggaatcacgggacgcaggaatcacgggacgcgggaatcacgggacgcgggaatcacgggacgcgggaatcacgggacgcgggaatcacgggacgcgggaatcacagggtgccggaatcaagggacgccagaatcacggggcgcgggaatcaagcttctccataaatgactgacgcaggggagacatgccagaat

SEQ ID NO: 62387 - DNA, 61 bp, Homo sapiens
  chr2:503730-503791
  hypo
gcagcctttggtctcgcgccaagacctgccccaccagatcccacccgccccaccggcctgc

SEQ ID NO: 62388 - DNA, 399 bp, Homo sapiens
  chr2:522157-522556
  hypo
tgatggcacagaaccagaacccgacagcatggaacctgacggtggcttggaacccaatggcagcatggaacccaacagcacggaaccggaactgacagcacagaacctgatgtctgctcggaacccaacggcagcatggaacccgaaagcacggaaccggaactgacagcacggaacctgatgtcggctcggaacccaacggcagcatggaacccaacagtacacaaccggaaccaacagtacggaaccagaactgacagcacagaacctgagggcacagaactcgacggcacagagctggaacctgacagatggaacccgacggctcagaaccctatggcacagaacctgagggcagcacggaacctggaagatgccggaggagactggagcatgaac

SEQ ID NO: 62389 - DNA, 394 bp, Homo sapiens
  chr2:582775-583169
  hypo
agcccacagaacctcagccagcgtgtgaggaagaagctccaggcggcggcagccagcgtgtgaggaagaagctccacgcggcggccagtgtgtgaggaagaagctccacgcggcggcggccagtgtgtaagaaagaagctccacgcagcggccagcgtgtgaggaagaagctccacgcagcggccagcgtgtgaggaagaagctccaggcggcggcggccagcgtgtgaggaagaagctccacgcggcggccagtgtgtgagaaaagctccacgcagcggccagcgtgtgaggaagaagctccaggcggcggccgccagcgtgtgaggaagaagctccacgcggcgcttgctcagggaatcctgctccagggcgtgctcacttgctgttattgt

SEQ ID NO: 62390 - DNA, 30 bp, Homo sapiens
  chr2:620825-620855
  hypo
ccggtccaggcctgcggctcctctgtcatt

SEQ ID NO: 62391 - DNA, 30 bp, Homo sapiens
  chr2:674925-674955
  hypo
cagtctctgcatgtcgggctgctgccctcc

SEQ ID NO: 62392 - DNA, 193 bp, Homo sapiens
  chr2:720803-720996
  hypo
gttgtggagacagaatttacacgcagtgagatgctcagtgcttctgtgcgtgactcagtgactttggcaacgcggccgccgacaaactcacattcccatcaagacacggagcatttctctcagctgagaaagtcccgcttgggacacttttattcctaatgaataagcgttcgtagttctagtgcccactgat

SEQ ID NO: 62393 - DNA, 267 bp, Homo sapiens
  chr2:816396-816663
  hypo
cagccctcagtgccacatccacgtctctgcactcagccttcagtgccacgttcacgtccctgcactcagccctcagtgccacgttcacgtccctgcactcagccctcagtgccacatccacgtctctgcactcagccctcagtgccacgtccacgtctctgcactcagccctcagtaccacgtccacgtctctgcactagccctcagtgccacgttcacgtctctgcactcagccctcagtgccacgttcacgtctctgcactcggc

SEQ ID NO: 62394 - DNA, 414 bp, Homo sapiens; identical to SEQ ID NO: 15731
  chr2:816915-817329
  hypo

SEQ ID NO: 62395 - DNA, 203 bp, Homo sapiens; identical to SEQ ID NO: 15732
  chr2:817620-817823
  hypo

SEQ ID NO: 62396 - DNA, 194 bp, Homo sapiens; identical to SEQ ID NO: 15733
  chr2:875846-876040
  hypo

SEQ ID NO: 62397 - DNA, 259 bp, Homo sapiens
  chr2:910391-910650
  hypo
caagatggaaggccccttccacgctctcccaatgactgggcaccacagggatgccggtgctgaccgtgatccaggaacccacatgcagaagatggaaggccccttccacgccgtcccaatgactgggcaccacagggatgccggtgctgaccgtgatccagaacccacaggcagaagatggaaggccccgtccatgctctcccaatgactgggcaccacagggatgccggtgctgaccgtgatccagaacacacaggca

SEQ ID NO: 62398 - DNA, 30 bp, Homo sapiens; identical to SEQ ID NO: 15735
  chr2:916486-916516
  hypo

SEQ ID NO: 62399 - DNA, 30 bp, Homo sapiens; identical to SEQ ID NO: 15736
  chr2:916872-916902
  hypo

SEQ ID NO: 62400 - DNA, 202 bp, Homo sapiens
  chr2:923172-923374
  hypo
ggaccccgagatctgcgggcaacaagcacccccgtgattccaatctgcaggcaggatcccggcatctgtaggcaacaagcacccccatgattccaatgcaggcaggaccccgggatccgcgggcaacaagcacgctcatgattccaatgcaggcaggaccccgggatccacgggcaacaagcacccccgtgattccaatgca

SEQ ID NO: 62401 - DNA, 767 bp, Homo sapiens; identical to SEQ ID NO: 37074
  chr2:945450-946217
  hypo

SEQ ID NO: 62402 - DNA, 114 bp, Homo sapiens; identical to SEQ ID NO: 37075
  chr2:946289-946403
  hypo

SEQ ID NO: 62403 - DNA, 134 bp, Homo sapiens; identical to SEQ ID NO: 37076
  chr2:946432-946566
  hypo

SEQ ID NO: 62404 - DNA, 30 bp, Homo sapiens
  chr2:949672-949702
  hypo
gggtgtgtttgcatcgcaggcctcctattt

SEQ ID NO: 62405 - DNA, 46 bp, Homo sapiens
  chr2:982993-983039
  hypo
agagatggtccccatggatgtcggcgtcctgatcctgaactgtgaa

SEQ ID NO: 62406 - DNA, 36 bp, Homo sapiens
  chr2:1130680-1130716
  hypo
gggctgcaattcatcgtcatctcattaaaccccagg

SEQ ID NO: 62407 - DNA, 30 bp, Homo sapiens
  chr2:1204039-1204069
  hypo
tgccggtcgctggggcggcagcacctggtt

SEQ ID NO: 62408 - DNA, 30 bp, Homo sapiens
  chr2:1204268-1204298
  hypo
cgagagccgcagacccgacgaggcctcacc

SEQ ID NO: 62409 - DNA, 30 bp, Homo sapiens; identical to SEQ ID NO: 15740
  chr2:1266558-1266588
  hypo

SEQ ID NO: 62410 - DNA, 410 bp, Homo sapiens
  chr2:1311460-1311870
  hypo
tattagggtccctgcttctttcgtctggagtcgcatgaaaacatttaaagcacaaatctcgctttcaaccaacatggctgcgagtgcattggcaggtgttcacgggctccgcagcctgaagcccagagaccttccgggcagagcccaggagcagagaacccaacccgggcttcccctcagaagcggcacgtgctggtccgggccgccctccgcacaaaccaccggccgcgggtgggatgcgcttcagactgcagaccttctcgcaccgtgtgaccgatgtagtttttgtttgtttttggtggtatccctgcagtactgcgctgctgcttggtggcggtgtaaattgtactgctcttcagaattttctcaggaaagtgccgcttccagcttctgccggaacatgcttgtgg

SEQ ID NO: 62411 - DNA, 30 bp, Homo sapiens
  chr2:1426166-1426196
  hypo
ggccatggggagagcgagagcctggtgtgc

SEQ ID NO: 62412 - DNA, 31 bp, Homo sapiens; identical to SEQ ID NO: 15742
  chr2:1461907-1461938
  hypo

SEQ ID NO: 62413 - DNA, 333 bp, Homo sapiens
  chr2:1482073-1482406
  hypo
aaggatgggctgtttgatatgcgagtcaccgtgtgtgtctgttgcaccaggccctgtggcggcctgggcatcgtgtctgcagtcctagccgggagcctgcagggaggtgcgcgtcagtcctgttctaaaggaggcactggagccttgtccgaggaggcacaggggctgtgtgtggcaccggctgcccccgggcaccatgcgcccctgccgctttctggccttcactgcactggggtccaggccccaaaggtcagagcagagggtctgggaagcctccatgcgctgggtgttaacccttagttcctgggtggcgaggggacctggagcttcctg

SEQ ID NO: 62414 - DNA, 272 bp, Homo sapiens
  chr2:1488387-1488659
  hypo
catccccaggatcctgggacccgaggccttccagcagtacgtgggtccctatgaaggctatgactccaccgccaaccccactgtgtccaacgtgttctccacagccgccttccgcttcggccatgccacgatccacccgctggtgaggaggctggacgccagcttccaggagcaccccgacctgcccgggctgtggctgcaccaggctttcttcagcccatggacattactccgtggaggtgagtgagtgcggtccctgcagctggtcccca

SEQ ID NO: 62415 - DNA, 70 bp, Homo sapiens
  chr2:1501007-1501077
  hypo
aagtgtggcttcctggcggtaatttgagagcaggatggggaggcacctttcaggccgcaaggcaagacag

SEQ ID NO: 62416 - DNA, 178 bp, Homo sapiens
  chr2:1506965-1507143
  hypo
tgctgcctccagcctggccctcggcggaggctgcacccaggccagctctgttccctccagacagagcagctcctggaagagctcgtgttccccacactgacagcacctgctccatttagagaatgcgcactgggcatgtagagaagacctgtgacacgctacagcttcttttctaaaa

SEQ ID NO: 62417 - DNA, 258 bp, Homo sapiens
  chr2:1516282-1516540
  hypo
tgcatggtgctgtccctgccccgctccgcccctgctgggctcctggctgccgaacctgaagtcagggtccgccgcagaacacgtcttcccgctgagccctgcagcccctcaagcagctggctgcctccgaggagcttcctctccgacagctgccgtgtacctccctgacctccctggctgtgactcaggccctccggaggcactgggccaggccgccggtggagcctgatggtggacgatggtggacagtgaccttct

SEQ ID NO: 62418 - DNA, 133 bp, Homo sapiens
  chr2:1520207-1520340
  hypo
gccaagggcaaaacctcacagcgttataccgcgtcccttacagcccaccttgcgaacctttcccgccccggtccgaggcctccagggctccctgggtcctgtggtccactccgagggcactgagagccctccc

SEQ ID NO: 62419 - DNA, 279 bp, Homo sapiens; identical to SEQ ID NO: 15746
  chr2:1543305-1543584
  hypo

SEQ ID NO: 62420 - DNA, 179 bp, Homo sapiens
  chr2:1589590-1589769
  hypo
gcagacaggagaggacggccactcttgaggggcgtgggcggccatcggcaggctgagggggtgggcggctgcgggttgaggggttgggtgcctgtcttcaggctgctcctctacgcaggcccgagcctgtgatcaaggagtcacccagagcccagttatgtctacgggagctcttctca

SEQ ID NO: 62421 - DNA, 109 bp, Homo sapiens
  chr2:1606632-1606741
  hypo
gcccaccaggccccaggctgccgcaggggcccaggttcaaggcccttccccgctcctcccccagggtctccagtgtgctggaatctccgtcttctcaccataacctcac

SEQ ID NO: 62422 - DNA, 297 bp, Homo sapiens; identical to SEQ ID NO: 15747
  chr2:1613966-1614263
  hypo

SEQ ID NO: 62423 - DNA, 280 bp, Homo sapiens
  chr2:1647056-1647336
  hypo
atctgcaggtcattaagcacccgccaagcagtcaccaaaaccagggatgaaaaaggaacagacatggtgcccctggcacgcaccttcacagcagtcctgccacacccggaggtctaccctggggatctcgtcacagctgccgtagccgtgagggaactccgccaccctgaacacgtcgctctgcacccgggtgatgttgtccgcgttgtcgcataggatcctggccagcgacgtctgcttgatctgagtcagctgggccggggagaacaccccagggttc

SEQ ID NO: 62424 - DNA, 97 bp, Homo sapiens
  chr2:1652503-1652600
  hypo
atagtagatggtgtcgccgtcccagtgcgggttcagcttgagcagctccgtggcaatgcggttgtgctcgcggaaccacagcgtgtgcatgctggtc

SEQ ID NO: 62425 - DNA, 452 bp, Homo sapiens; identical to SEQ ID NO: 15749
  chr2:1653096-1653548
  hypo

SEQ ID NO: 62426 - DNA, 122 bp, Homo sapiens
  chr2:1666259-1666381
  hypo
ctccagcccccagtccctcaccgatggtggggcagtctcaggcatatgctgtgccgcagggcccacagaggataacaagctctggggagagcccgactctcggagaaggaaacagaggggag

SEQ ID NO: 62427 - DNA, 253 bp, Homo sapiens
  chr2:1669970-1670223
  hypo
aggatggatacccaccctggacgatgatgaaagcggtggcatggacgctgtcaatgttgttggtcgcagagcacgcatactctccgctgtccccctgtacgacgttctgtatgtaaagcccgccagaaggcgtgatgttcacccgcgggtcaactggcaagggtgtgcggtcacctctcgtccaggagatccgcggcggggggtggcctgtggcgctgcactccagcgtgacgctctccccaaccagcacctc

SEQ ID NO: 62428 - DNA, 30 bp, Homo sapiens
  chr2:1683988-1684018
  hypo
tggttgccactgagcgtccctggatgcgtc

SEQ ID NO: 62429 - DNA, 289 bp, Homo sapiens; identical to SEQ ID NO: 15750
  chr2:1688941-1689230
  hypo

SEQ ID NO: 62430 - DNA, 253 bp, Homo sapiens; identical to SEQ ID NO: 15751
  chr2:1709543-1709796
  hypo

SEQ ID NO: 62431 - DNA, 380 bp, Homo sapiens; identical to SEQ ID NO: 1283
  chr2:1747627-1748007
  hypo

SEQ ID NO: 62432 - DNA, 411 bp, Homo sapiens; identical to SEQ ID NO: 1284
  chr2:1748396-1748807
  hypo

SEQ ID NO: 62433 - DNA, 321 bp, Homo sapiens; identical to SEQ ID NO: 15754
  chr2:1771819-1772140
  hypo

SEQ ID NO: 62434 - DNA, 30 bp, Homo sapiens
  chr2:1792479-1792509
  hypo
aggctctacaaaggacgtgaccgccctgcc

SEQ ID NO: 62435 - DNA, 99 bp, Homo sapiens
  chr2:1796264-1796363
  hypo
aacaccaggaggacctaggagcgcgtggtcgttgccgggggccacagtctactgggtgcgaagaaggggcctctcgctgaaggagaaaggcttcgggcc

SEQ ID NO: 62436 - DNA, 162 bp, Homo sapiens
  chr2:1816187-1816349
  hypo
aataggtgcccagtgacgacttctgaaagcataaaatgtctgaatgcactttgtgatggctcagtgagtggaggcccagggtgagtgtgagtgcacccaggctctggaaggtgcagactgagccctcaaagaggcctgcggcaggattttgcaggacttcca

SEQ ID NO: 62437 - DNA, 85 bp, Homo sapiens
  chr2:1828325-1828410
  hypo
aggggccagcctgtgacaccccggccaggccatgcgagggtggcgccgggacgccgccctctgcggctcctttggggagcactga

SEQ ID NO: 62438 - DNA, 601 bp, Homo sapiens; identical to SEQ ID NO: 15755
  chr2:1846364-1846965
  hypo

SEQ ID NO: 62439 - DNA, 494 bp, Homo sapiens
  chr2:1863597-1864091
  hypo
cagcgttggggacagcgcgccggatgagaggggctctgggaaaggggacccgggccgcgctggtgacaggtctgtctccactcctgggcttgttttctggggattctctcgctgcggtttggctgtttggggagcacccaggggctgccacggcagcgtcactgtccatgctgcatgcagtttgtctgtttcccgaccatgcagcctaggactcttcacttatccctctgtgttgatcatgctgccctcgttgccaacactgcgaaccgctgcagggccgaaaggcgccccaagtacatccagcaataggctcctgtccagtgcggcagaacgtacctagcacatcctgacgtcccattcacttaacgggatgtgtccatgggaactgctgccagagcacatgcacgtccagcagcagtggagcggctaagcaagaggctggggccgccggagccagtattggggttggactcggaggacccatgcaaaaaaaa

SEQ ID NO: 62440 - DNA, 227 bp, Homo sapiens
  chr2:1887328-1887555
  hypo
ttgcacaaatgtattctttttcgctttttggcctgtggtctcagtgaacgtcacagccaggcagggctcacggtgaccctgtgaggtcgactcctagaaagggcatacaaggtgacggtgaactccacctcaaagcatcgacgcgcaaaagtctgccaggcacagaggctttcggaactgggtgtccctcctccgtctgcctcctcgaagtgtcccttttaccctgg

SEQ ID NO: 62441 - DNA, 469 bp, Homo sapiens
  chr2:1895686-1896155
  hypo
ttaggagatcacggcgtttgccccatacagctgccccgaaagcgccgcgtgtctcggtggctgggtccgcggcccggcctcccccacccgccaggtggctccacctgcccaggcgcgcgtacccgcgtggcgcacaggtcctgcggcttggtgctcaggttctgcggcatctcgcggcagcgcgtggacaggttgaggatggcggtggccgccatgtgggccgcctccatgtcgtgcgtgtagtcgaagctgctcttgctgcacgtgctgctggcgctgctgcccccgccgcagctcaggttgctgctgctgctgggcgcgtagctgctggtgctgctgctgctggggctggggtccttgcagtaccgcttcgctggggagacagggacagggatgactcaggccccggccgcagggcacacggcagacagcacacggcagggcctgcccgccccggcctcagccacac

SEQ ID NO: 62442 - DNA, 30 bp, Homo sapiens
  chr2:1896470-1896500
  hypo
tgagtggggctcctccgcagcacatgaggg

SEQ ID NO: 62443 - DNA, 310 bp, Homo sapiens; identical to SEQ ID NO: 15756
  chr2:1926246-1926556
  hypo

SEQ ID NO: 62444 - DNA, 168 bp, Homo sapiens; identical to SEQ ID NO: 15757
  chr2:1932937-1933105
  hypo

SEQ ID NO: 62445 - DNA, 632 bp, Homo sapiens
  chr2:1940948-1941580
  hypo
aagcagcccctgcttcctgttcgactcccctgacccccacatcgactctgcctcagggcggcctccatgccttgcccagagcagctgcagccatcatttcgcacatcaagaagttcctaacgtccgcggccatcagatcgcacatcaagaaggtcctaatgtctgcagccatcagatcgcacagcgagaaggccctaatgtccgcggccatcagatcgcacagcgagaaagccctaacgtctgcggccatcagatcgtacatcgagaaggccctaacgtccgcagccatcagatcgtacgtcgagaaggccctaacgtccgcggccatcagattgcacatcgagaaggccctaatgtccgcagccatcagatcgcacagtgagaaggccctaatgtccacagccatcagatcgcaagtcgagaaggccctaatgtccacagccatcagatcgcacactgagaaggccctaacatccgcggccatcagatcgcacatcgagaaggccctaatgtccacagccatcagatcacaagtcgagaaggccctaacgtccacagccatcagatggcaagtcgagaaggccctaatgtccgcggccatcagatcgcacgtggagaaggccctaaggtga

SEQ ID NO: 62446 - DNA, 43 bp, Homo sapiens
  chr2:2166002-2166045
  hypo
agggaatgcagacagtgcctgcggtccacagagaaggtcaggt

SEQ ID NO: 62447 - DNA, 1157 bp, Homo sapiens
  chr2:2189142-2190299
  hypo
aactcaccacaaattgtgtggcgtgcaaactaatatattcacctgattggcctccacacgtgagggggacgcagccgggcctcctcgagtcccgcgttccttctgtgagggggacgcagccaggccttccgggccttcccgagtcccgcgttccttctgtgaggcggacgcagccgggcctcctcgagtcccgcgttccttccgtgagggggacgcagccaggccttccgggccttcccgagtcccgcgttccttctgtgaggcggacgcagccgggcctcccagacgcccgcgttccttacgtgagggggacgcagccgggccttccgggccttcccgagtcccgcgttccttacgtgaggcggacgcagccgggcctcccagacgcccgcgttccttacgtgagggggacgcagccgggccttccgggccttccgggccttcccgagtcccgcgttccttctgtgagggggacgcagccgggcctcccagacgcccgcgttccttacgtgagggggacgcagccgggccttccgggccttcccaagtcccgcgttccttctgtgaggcggacgcagccgggcctcccagacgtccgcgttccttccttgagggggacgcagccaggccttccgggccttcccgagtcccgcgttccttccgtgaggcggacgcagccgggcctcccagacgcccgcgttccttccgtgagggggacgcagccaggccttccgggccttccggagtcccgcgttccttccgtgagggggacgcagccgggcctcccagacgcccgcgttccttacgtgagggggacgcagccaggccttccgggccttcccgagtcccgcgttccttacgtgagggggacgcagccaggccttccgggccttcccgagtcccgcgttcctttcgtgagggggacgtagccgggcctccccgagttccgcggtcattatgtgagggggacgcagccgggccttcccgagtcctgcggtccttactggttaactgtagtcccgcactgttaatgtttttcgttttttgaagccaagatagcgtgctcaccgcaaaagaaatatggacctcgatgaacagataatagggagaatctcatgcacccatcctggaattacgtttttagctttgcccccatc

SEQ ID NO: 62448 - DNA, 65 bp, Homo sapiens
  chr2:2325020-2325085
  hypo
tcagagaagcacagggtccaccggcagatgcggcactgatttccgaatgttcacaatctaccagg

SEQ ID NO: 62449 - DNA, 30 bp, Homo sapiens
  chr2:2569469-2569499
  hypo
ttacctggagtcaccgtcttaccgggggac

SEQ ID NO: 62450 - DNA, 175 bp, Homo sapiens
  chr2:2572705-2572880
  hypo
acaccagggcaaggtccacatcgcacctacagaatgagcatctaagcggagtatttcaggtaactctaggccaagacgggggagattgaagaacctttccagactggtggctgacctcctactagatacagcataatgctggctggggctggacggaagagggctgcattttcct

SEQ ID NO: 62451 - DNA, 261 bp, Homo sapiens
  chr2:2584323-2584584
  hypo
actgtgcatgtctgtcgaggatgtatgtatgggtgcgcactatgcatgtctgtcaagggtgtatgtccggggggtgtaccgtgcatgtctctggagggcgtatgtgtgggggatgcactgtgcatgtctgtcgagggtgtatttccggggggtgcactgtgcatgtctgtcgagggtgtatgtgcggggggtgcactgtgcatgtctgtcgagggcatatgtctgggggatgcactgtgcatgtctgtcgaggatgtatgt

SEQ ID NO: 62452 - DNA, 741 bp, Homo sapiens
  chr2:2584643-2585384
  hypo
tctctcgagggtgtatttccggggggtgcactgtgcatgtctgtcgagggtgtatgtccaggggtgcactgtgcatgtcatgtctgtcgaggttgtatgtctgggggtgcacggtgcgtgtctctcgagggtgttatgtccaggggtgcactgtgcatgtctgtagagggcggatgtccggggggtgcattgtgcatgtctgtcgagggcgtatgtccagggatgcactgtgcatgtctgtcgaggatgtatgtccaggaggtgcactgtgcatgtctgtcgagggcgtatgtccgggggtgcactgtgcatgtctctcgagggtgtatttccggggggtgcactgtgcatgtctgtcgagggtgtatgaccgggggtgcactgtgcatgtcatgtctgtcgaggttgtatgtctgggggtgcactgtgcatgtctttcgagggtgtatgtccgggggtgtactgtgcatgtcatgtctgtcgaggttgtatgtctgggggtgcactgtgcatgtctgtcgagggcgtatgtccagggggtacactgtgggtgtctgtggagggtgtatgtccgggaggtgcactatgggtgtctgtcgagggcgtatgtccaagtgtgcactgtgcatgtctgtcgaatgaacagatcaacagtacaaagcaggacgctgacgcaggcgcacagacacgctcggcttccatagatactctctacggagcagcctgcgctgcctcggggct

SEQ ID NO: 62453 - DNA, 30 bp, Homo sapiens
  chr2:2654041-2654071
  hypo
atttgctcgctgctgcgtccctgagatctg

SEQ ID NO: 62454 - DNA, 30 bp, Homo sapiens
  chr2:2654333-2654363
  hypo
gagatctgatttgctcgctgctgcgtccct

SEQ ID NO: 62455 - DNA, 205 bp, Homo sapiens
  chr2:2668975-2669180
  hypo
ggcctgcccatgcccacccaccggggagctccttggctcaggctcacaggttccaaggcctccgagttactcgggctgtgcacaggccgccagctcactcacacagacagaggccctcgctgactcacacagtggccgccagctcacacacagacagaagccctcgctcactcacacagaggccgccagctcacttacacagaca

SEQ ID NO: 62456 - DNA, 50 bp, Homo sapiens
  chr2:2672246-2672296
  hypo
tagtgggccacacctgtcattcgcttagcggaatcttgatttgttcaaaa

SEQ ID NO: 62457 - DNA, 318 bp, Homo sapiens; identical to SEQ ID NO: 15760
  chr2:2673022-2673340
  hypo

SEQ ID NO: 62458 - DNA, 152 bp, Homo sapiens
  chr2:2705290-2705442
  hypo
atagggacagccccctcccaccgtgcacttggaaattttgcctccccacacccgtacgcgcaaacccacatgcaaggtggagagactccgtcgcatgtcccgagtctgaggacatgaccggagcggagtccgggaagtccctcaggggcaag

SEQ ID NO: 62459 - DNA, 270 bp, Homo sapiens
  chr2:2734117-2734387
  hypo
gacactgtgtgttcccctgggcggggtggacccacgggctctgcccaccagcctcttcgaattctcagacgtctcaagaaaacggccatcaggccccgctgtcctcctccacatcctcccttcgctgcacgcctccctccatggtgggagttgccccctccacagggacgtgtcaagccttgatatacccactgcgtaccccagggccacgctcaggagctgccgctggatgaataagaggatttgaacgggaaaagactcccacagtgc

SEQ ID NO: 62460 - DNA, 151 bp, Homo sapiens
  chr2:2734983-2735134
  hypo
agcagctgccagaatcatgggcggccagtgatgcccaagtctgggctcccctccgacaggagccacctcacggcacagcctctgcacaccccgcaccgtccggcggccttcccttcaccccacactggccgtggcacacctgagaccaggc

SEQ ID NO: 62461 - DNA, 163 bp, Homo sapiens
  chr2:2735785-2735948
  hypo
acacagcaatgtgaaggtgaccggccgaccccagcaagacgcagatactcagtaagacacacagcaacgtgaaggtgaccggccgaccccagcaagacgcagatactcagtaagacacacagcaatgtgaaggtgaccggccgaccccagcaagatgcagata

SEQ ID NO: 62462 - DNA, 291 bp, Homo sapiens; identical to SEQ ID NO: 15761
  chr2:2737133-2737424
  hypo

SEQ ID NO: 62463 - DNA, 167 bp, Homo sapiens
  chr2:2755042-2755209
  hypo
cccaggggtggccccggggacacccacctgactccgcaccccccacgagaggggaggatccttgcagacctcacctttgctggcaacgctgcggcccgcaggctcttccccatctgagcgtcctggccccctgttatttttgccacagtgccgcctcatcctccctc

SEQ ID NO: 62464 - DNA, 201 bp, Homo sapiens
  chr2:2797362-2797563
  hypo
tcccattttctttcataaatacggcagattcccagccaggctcaccgtggaagccccctggctttgcgcctctccccggcttgaaggcctcggttcttgtcactaggaccaactcctggccgctcactgaagcacacctcatacacagccatccccgtgatcggcagattttgttcctacgaatctacctacttgctaaaa

SEQ ID NO: 62465 - DNA, 30 bp, Homo sapiens; identical to SEQ ID NO: 15762
  chr2:2799355-2799385
  hypo

SEQ ID NO: 62466 - DNA, 161 bp, Homo sapiens
  chr2:2799591-2799752
  hypo
catttaaaactgatcagtgtacgcgcgagagtagccaaagactcagcgcattaaggaggacgctggcgtggggtcagcagggagtgcgcgtgggcagcctcccaccaggcgggtctggcagtgccctggcctcaggcagcgactgcaccctccctccctct

SEQ ID NO: 62467 - DNA, 160 bp, Homo sapiens
  chr2:2800084-2800244
  hypo
aaagggacctgagtggtttcccgacttgagaaccgtctgcatcagcctggcttcctgcacagtgtctgcgccggtgcacaccttagaggggagctgcgccatcagatgaaccaggaccctggcggaggaagggggtgccggcagggctcccatggcacct

SEQ ID NO: 62468 - DNA, 148 bp, Homo sapiens; identical to SEQ ID NO: 15763
  chr2:2849144-2849292
  hypo

SEQ ID NO: 62469 - DNA, 421 bp, Homo sapiens
  chr2:2854223-2854644
  hypo
acccttcctgctcccagtcaccggggaagccttcctcagggtttctgcagaagccctgcccactgccccctgcagagagccatcctgccacagagatgcgccccagatgcgtcctggatggatcaagtcactgcgtgtcagggaacggctcctctgctgctcctgatgcctggccacccgtcccggtccacccctcgcgaggaaggccaggcctccgctcctctgcggagcctttcaggaacatgaggccgcctgtgtcagccatcagggtacccaccggcgctgctcatccacctgccacccccacctgccacttactcctagcacaagcaggtgccccatgaatcccgcggaatgagttatttcaggatccgcggaacacacgtaaccagacccccccgtttgttgttttgggggacat

SEQ ID NO: 62470 - DNA, 215 bp, Homo sapiens
  chr2:2876122-2876337
  hypo
ttccccagacagcagccagcacgttcctgatatggcagacaatgctgtgtgcaacacatcgtctcctcatctggacacgcgacaatggtgctcccagccgccctcacagtgagcctgggcacgtgacgttctcgccaacggacctcgcacagaagcgatgtgccacttctagtccaaggcagagagtgctccccgacccatctctcttctctggc

SEQ ID NO: 62471 - DNA, 220 bp, Homo sapiens; identical to SEQ ID NO: 15765
  chr2:2879706-2879926
  hypo

SEQ ID NO: 62472 - DNA, 434 bp, Homo sapiens
  chr2:2893355-2893789
  hypo
tccccctgaagccatgatgtgcgcactgtgcagagaagcgagggactggagctcagaaaggaggcgctttggacaaaacccctgaaaacgtggctcggagcaggcagaagcccccgtggagctgccaggaccctgcagagccggccactggaacagttctccccccgacgccgattgccatcaaggttggtggataatgcttatcagaaagaatgttccccaatctgatcataatggatgcagtgtgctgtgtcgaatcacgtcctctttcctgattgcggataagaagaacgtgactcaatcagagcatctgagcagctcagagctaagcagcctcagcaagcacagcatccctggcccggcctcctgcacagcccggcagaaacgccaccaccagtctagaggccggtcccggctctcacccacagcagaaa

SEQ ID NO: 62473 - DNA, 87 bp, Homo sapiens
  chr2:2897935-2898022
  hypo
catgtcctcatgtggcaggagcgaaagaagagcaaaaagaagctaggccgaggtgggcaggtcgcctgaggtcgggagttcaagacc

SEQ ID NO: 62474 - DNA, 86 bp, Homo sapiens
  chr2:2936578-2936664
  hypo
gcctcatcaaagtactaaaggcgaggcggaaccacagcttcaccctgagcttcacatgtccacatatgccaggagcttgtgtgtgt

SEQ ID NO: 62475 - DNA, 26 bp, Homo sapiens
  chr2:2936723-2936749
  hypo
tgtacgtgtgtgcctatgtgtgtgtg

SEQ ID NO: 62476 - DNA, 30 bp, Homo sapiens
  chr2:2940388-2940418
  hypo
actcaaggtgacgacggattcaggggtaca

SEQ ID NO: 62477 - DNA, 143 bp, Homo sapiens
  chr2:2945841-2945984
  hypo
ccaggtgcaaggatttctcttcgttaagtgtacacgagcccatcccaagtttccgcacatacccaggtgttggtgaagccccacttcattaattcaggctagcgcccaccaacggctgcagcgtcaagcctctgagacatcag

SEQ ID NO: 62478 - DNA, 151 bp, Homo sapiens
  chr2:3039118-3039269
  hypo
ctgaccttatcacttccctaccgaaagtctttcactgggcccctgttgcccagcgcaggggtccgagagccctggctgtaagggccagagaggatgtatttcggctttgccaccctgcagtctccgtcgcggtgactcagctctgccatgg

SEQ ID NO: 62479 - DNA, 145 bp, Homo sapiens
  chr2:3041659-3041804
  hypo
gtcaagagcctgtgagctgggcgcagcggtatcttcacgccacacctcctggaaagctccgtgtcgaaacatgctgacttctccctcttccgcattccactgccctgtttccatgtgcgtttccgtgacctcacccagtgtgcta

SEQ ID NO: 62480 - DNA, 341 bp, Homo sapiens
  chr2:3063351-3063692
  hypo
cctctcccagaaacaaacagacgagaccaccaccgcctggaacgctgttaatcgtgccggtcaggatctcagcggaaaacgcatggcacctgccaccgtgcatcagaggcactgttcacaacggcgtggacagagtgcaaggaacaaagcaggatgatgaggccccgggggccggcagcagcggtccaggcttacagggcaaggggagaggccgtgaccggggagaaggccttggccctcccgctccgtggggcagcccggctggaaggagctgggagcatacatgcccaccccatctccgccttctcggcaccctccgcggaggccaaggggccagacag

SEQ ID NO: 62481 - DNA, 31 bp, Homo sapiens; identical to SEQ ID NO: 15766
  chr2:3084233-3084264
  hypo

SEQ ID NO: 62482 - DNA, 30 bp, Homo sapiens
  chr2:3109840-3109870
  hypo
ggaccatctttgggtcggtgggaccccacc

SEQ ID NO: 62483 - DNA, 168 bp, Homo sapiens
  chr2:3113369-3113537
  hypo
cacatgaaccctgagtatatccgagagctgatgggagggcgctgtggaccccgggctgactgcacaggacacacgagcagtcccggcaccgcactttcagaacaggcaccccgcaccaaaaccaggagaagcaacaaggccagaaacgcatactgtagggtcaggaga

SEQ ID NO: 62484 - DNA, 102 bp, Homo sapiens; identical to SEQ ID NO: 15767
  chr2:3173338-3173440
  hypo

SEQ ID NO: 62485 - DNA, 30 bp, Homo sapiens; identical to SEQ ID NO: 15768
  chr2:3174505-3174535
  hypo

SEQ ID NO: 62486 - DNA, 250 bp, Homo sapiens
  chr2:3176032-3176282
  hypo
ttgtgttatgacacacgatataaaaggctcctggtggctgttctgcaagagttaccggcaggagagaccagcagcaagttctgggtaattacagccgtcatcaggtgagcctggacgttacccggaatcagccctcacacctgcaaggggctccgcgctttctgaagggcttctgcgccgtgcgctgtagtaatggtaatggaagtaggagtaagagtgataataacactatcgtcgtggtaataacttt

SEQ ID NO: 62487 - DNA, 30 bp, Homo sapiens
  chr2:3187869-3187899
  hypo
tccctcccatcacccggccaggcagagagc

SEQ ID NO: 62488 - DNA, 30 bp, Homo sapiens
  chr2:3193224-3193254
  hypo
gtcctcgtgctcctcgtaggtggcgatcac

SEQ ID NO: 62489 - DNA, 30 bp, Homo sapiens; identical to SEQ ID NO: 15770
  chr2:3197981-3198011
  hypo

SEQ ID NO: 62490 - DNA, 30 bp, Homo sapiens; identical to SEQ ID NO: 15771
  chr2:3201759-3201789
  hypo

SEQ ID NO: 62491 - DNA, 30 bp, Homo sapiens; identical to SEQ ID NO: 15772
  chr2:3207245-3207275
  hypo

SEQ ID NO: 62492 - DNA, 31 bp, Homo sapiens
  chr2:3213314-3213345
  hypo
aggagaaagcaggagacgatcttcagcatcc

SEQ ID NO: 62493 - DNA, 287 bp, Homo sapiens
  chr2:3214975-3215262
  hypo
gtgaacaggagggtcgctgctggaaccagcagtcaggttccacgcatgaagttctccactttaacactaacgaaacaagcctctttcctctgtaccacgtctcttccagtttggagaacaagaaagatgaaaacagaacaggctttccaaggtgcgccggcaaggagccatagaacccaccgaccgcccacaaagttcccagcccctccccacgagctctgagattaagctcggcttctgcccactgctctcttggtccccaaaacacaaacgctatttgcattaca

SEQ ID NO: 62494 - DNA, 91 bp, Homo sapiens
  chr2:3215522-3215613
  hypo
ggagcgaatcctcacgcaagcttccttctcgctccgccactgtcggctccttgacagaagctatttatttcgtggcgagtgaaagctggga

SEQ ID NO: 62495 - DNA, 30 bp, Homo sapiens
  chr2:3259990-3260020
  hypo
agggaaacctgagtcggtcctcagtccccg

SEQ ID NO: 62496 - DNA, 434 bp, Homo sapiens
  chr2:3260561-3260995
  hypo
agctcatgaagcagcgactggccagggagccacgtgaatgacacaccacatgccggacacgggcgggcttgggcacgcagccccacaggcacaccacgcattcatgctttgtccacgggaggaagggattgtaagcctcaacctgaagtggtaaataattgccatgtgagtgtgaataagtgcatgctgaccaagctgaaaagccacacagcgctcgagggcagtgcagtgcctgaccctttaccctctggcaggtccccacgggcaacactcctcttagatgaagaggagaaagtggggatgcaggcgcgctggctacatttctgtcaatgcggctaatctagaaaacacagggactaaaattaaaaatcaaattctcgcagctttttaaaagaaaggagcgtttccgaggtgtggacggtggctcctgcaaa

SEQ ID NO: 62497 - DNA, 86 bp, Homo sapiens
  chr2:3266888-3266974
  hypo
gcaggcgctgtcagacggctacgctcaggagacggctgggagagcatggagggaaagctgattgtgaagaacggtgatcatgaggc

SEQ ID NO: 62498 - DNA, 31 bp, Homo sapiens; identical to SEQ ID NO: 15776
  chr2:3272898-3272929
  hypo

SEQ ID NO: 62499 - DNA, 108 bp, Homo sapiens; identical to SEQ ID NO: 15777
  chr2:3280968-3281076
  hypo

SEQ ID NO: 62500 - DNA, 30 bp, Homo sapiens
  chr2:3281410-3281440
  hypo
gactaggctgagtaacgcccacctgctact

SEQ ID NO: 62501 - DNA, 30 bp, Homo sapiens
  chr2:3284146-3284176
  hypo
caggtgcctcgaggcggcatctcaggcttc

SEQ ID NO: 62502 - DNA, 30 bp, Homo sapiens; identical to SEQ ID NO: 15778
  chr2:3285033-3285063
  hypo

SEQ ID NO: 62503 - DNA, 30 bp, Homo sapiens; identical to SEQ ID NO: 15779
  chr2:3285952-3285982
  hypo

SEQ ID NO: 62504 - DNA, 30 bp, Homo sapiens
  chr2:3289696-3289726
  hypo
gtcgccgggaccctcgcacggagcagaagt

SEQ ID NO: 62505 - DNA, 462 bp, Homo sapiens
  chr2:3290090-3290552
  hypo
ctgctcctgtgtaaacgtgtggccgtgacatggcctccgttcagctccaggtgtcaagtgccagattccaggaagccccaggagtgggcccagaaggagcagtgccaaggacccccgggggtggggccatcctaccaggcatgtcctgggcacatgggaagaccgagaggtgagggacacttggtgtccgtgacagggaaaggctgaggcatcaggcttcgggctgtgtctaccttggtgactctggaagcgttttcataagcacttgtcatatgtcatatgcagtgtgctccaggggagcaggggatctcacagtccagagtgccccgcagagcacccgagacagcggctggcagagcacaggcagcaatgccccagaggaacaagccagcccctgcgtccccacgtgctgagtccatcctcccagcagctccaagaggcggagctatcaatttcacatac

SEQ ID NO: 62506 - DNA, 245 bp, Homo sapiens
  chr2:3291171-3291416
  hypo
aagcgtgttcaccacgctccggaaagctcgttcacaatccagaaagcgcgttcaccacactccagaaagctcgttcaccacactccagaaagttcgttcaccacactccagaaagtttgttcaccacgctccagaaagctcgttcaccacaatctagaaagcgcgttcaccacgctccagaaagcacgttcaccatgctccagaaagttcattcaggctccagaaagttcgttcaccacgctccg

SEQ ID NO: 62507 - DNA, 31 bp, Homo sapiens; identical to SEQ ID NO: 15782
  chr2:3303472-3303503
  hypo

SEQ ID NO: 62508 - DNA, 295 bp, Homo sapiens
  chr2:3313512-3313807
  hypo
cgacagatgcttcccgatgggagtgaaggttgaagagaccggtccacacctccttctgttctaacaccccccttactacctgttcaaaggaggtaatcatgtgggagagaggcagcagagctgggggttaggaaagagacggtggtgtgggtaggattctccctgcaggctctggcagcgcccctgtgtacgcacaggtgtgcaggctctggcagtgcccgtgtacgcacagggcagggacgctccctgcgctgctccaaactggaatattcgcgtctccccactgcagacacca

SEQ ID NO: 62509 - DNA, 188 bp, Homo sapiens; identical to SEQ ID NO: 15784
  chr2:3321053-3321241
  hypo

SEQ ID NO: 62510 - DNA, 91 bp, Homo sapiens
  chr2:3321983-3322074
  hypo
ggagaagctggccccggttctttacagtcttactggaaaaattaattcaaattgggctttgtctaagcaccccctcgtgggctgaaacctg

SEQ ID NO: 62511 - DNA, 30 bp, Homo sapiens
  chr2:3322500-3322530
  hypo
ttctcctcacacaccgttccaaactctgaa

SEQ ID NO: 62512 - DNA, 30 bp, Homo sapiens
  chr2:3325946-3325976
  hypo
ggctttagggctgacggtcacggtgaggtg

SEQ ID NO: 62513 - DNA, 338 bp, Homo sapiens
  chr2:3346920-3347258
  hypo
gcatgcgagctctgccgccccgccacctgccctgtggatgcactctgcagggcggcagcaagccagagtgagaggcagctcccagctggagggaagaaccagtacctcaactctctgttctcagggcaccaccctacacccagctcacctgaaagtataaacaactgttttgttgaataaacatacgcaggtacaggccggctccgaaaacaagcaatgcgagaaagaaacaccgtaactaaggtgagtgcaaaagattaccagggcccaaaagaaagacccattaacaccagctaggcaggtctgcaaaggcggtcgccctgtgagcagtacttaaa

SEQ ID NO: 62514 - DNA, 38 bp, Homo sapiens
  chr2:3347545-3347583
  hypo
acagagctgtggggccgggccaccgagtacagagctgc

SEQ ID NO: 62515 - DNA, 253 bp, Homo sapiens
  chr2:3352457-3352710
  hypo
ctgcattatgcagtaacgatgcaggtaccgggcattttccagggaatcaacgactgaaaggagcgaggacctgaggcaacaccaggagctattaacccttcccagccaccactccccaggagagctggagctccagagtgagggatggcggcttccgactgtgcaggaggagaccagactccgttgtcacagaaggcaggggcagggctgcagtccacagccagtggagccttcccggcgtctctcctggtct

SEQ ID NO: 62516 - DNA, 135 bp, Homo sapiens
  chr2:3372624-3372759
  hypo
atgaatttgctcagcattttgcgatcttaacgaccctccgtgttggtcttttatttgcagttgcagtactgccctttatctttcaagtgtcattaccttcactcagcggtcaacgatcagatctctatcctttca

SEQ ID NO: 62517 - DNA, 23 bp, Homo sapiens
  chr2:3373014-3373037
  hypo
tcagggaggagccaagatggccg

SEQ ID NO: 62518 - DNA, 31 bp, Homo sapiens; identical to SEQ ID NO: 15788
  chr2:3382209-3382240
  hypo

SEQ ID NO: 62519 - DNA, 86 bp, Homo sapiens
  chr2:3391388-3391474
  hypo
agggtcatggaggacgctggcggcggcgaggagaccccggccccggaggccccgcacccccctcagctcgcgcctccggaggagca

SEQ ID NO: 62520 - DNA, 30 bp, Homo sapiens; identical to SEQ ID NO: 15790
  chr2:3391940-3391970
  hypo

SEQ ID NO: 62521 - DNA, 30 bp, Homo sapiens
  chr2:3392484-3392514
  hypo
gcgtctgtgagatacgcacagtgccccttt

SEQ ID NO: 62522 - DNA, 493 bp, Homo sapiens; identical to SEQ ID NO: 15791
  chr2:3418352-3418845
  hypo

SEQ ID NO: 62523 - DNA, 35 bp, Homo sapiens; identical to SEQ ID NO: 15792
  chr2:3446896-3446931
  hypo

SEQ ID NO: 62524 - DNA, 30 bp, Homo sapiens
  chr2:3447558-3447588
  hypo
tccccttctcgatgcgcatcttgcacgcgg

SEQ ID NO: 62525 - DNA, 146 bp, Homo sapiens
  chr2:3449810-3449956
  hypo
gtcacatcctaggaacgtttctctcaggctgactgggcgtggggccaccgtcagtgagagagccactcatgcttctcgttccctccgctggtctacagttccacctgcctctcatcttgtgaatacataaccgcacttcaggtatc

SEQ ID NO: 62526 - DNA, 355 bp, Homo sapiens
  chr2:3452856-3453211
  hypo
agtgaagaagaacatataccacgagttaaaataaatttcccgtgctgctgaaaaatcagtgccgccatcctctgaccctgctcctcccacgcgccctgcaggctgtctccctctggggtcgagagagcttcacagaccatttgggaaagagccaagcaaacacacttctgcaagccatttgcataagtagacataatccatacggaatgatgcactgttcggttgtagtttcattcgtcagtgacctgcatctgcccgcccagtcttgagttcagctccatccctccctgcagttccgcagcctccggcttccccacctcagcttggctgagagtttcacgttcatccaagtgct

SEQ ID NO: 62527 - DNA, 81 bp, Homo sapiens
  chr2:3458784-3458865
  hypo
gtggtgtgcggaggcgcagaacaagctcaggagtctgctgacctggtgcgccacaccccggggaccgccagtgggcgtgtt

SEQ ID NO: 62528 - DNA, 176 bp, Homo sapiens; identical to SEQ ID NO: 1285
  chr2:3465088-3465264
  hypo

SEQ ID NO: 62529 - DNA, 44 bp, Homo sapiens
  chr2:3467374-3467418
  hypo
gagcactgaaagagcggttagggtgatgcggctggccacggcat

SEQ ID NO: 62530 - DNA, 30 bp, Homo sapiens
  chr2:3471330-3471360
  hypo
gccccagtaagttccggcttgggcaggtca

SEQ ID NO: 62531 - DNA, 30 bp, Homo sapiens
  chr2:3482992-3483022
  hypo
aacaacaacgctgccgtgtgtctgctctac

SEQ ID NO: 62532 - DNA, 43 bp, Homo sapiens
  chr2:3498264-3498307
  hypo
cccaactgactgaatggaacccgttggccaaccttaaaaaacg

SEQ ID NO: 62533 - DNA, 192 bp, Homo sapiens
  chr2:3504355-3504547
  hypo
ctgtccaccaggatcgcaggcaggggccacggaggctgccacggaaggacagctgtcacctcggacatcgcctgcggctccacagactctccttgaagcacaggtcgaggagtcccgagcccagcgaccgcgcttggagtctgcggaagccgcgcagttcagcggcagagatgccacggccagggccaccac

SEQ ID NO: 62534 - DNA, 31 bp, Homo sapiens
  chr2:3507168-3507199
  hypo
ttcacacacatgcacacgtacacacacgagt

SEQ ID NO: 62535 - DNA, 356 bp, Homo sapiens; identical to SEQ ID NO: 15797
  chr2:3582015-3582371
  hypo

SEQ ID NO: 62536 - DNA, 30 bp, Homo sapiens; identical to SEQ ID NO: 15798
  chr2:3593320-3593350
  hypo

SEQ ID NO: 62537 - DNA, 72 bp, Homo sapiens; identical to SEQ ID NO: 15799
  chr2:3593597-3593669
  hypo

SEQ ID NO: 62538 - DNA, 30 bp, Homo sapiens
  chr2:3634056-3634086
  hypo
gaggcctccatgagcgagcggtcgtgaatg

SEQ ID NO: 62539 - DNA, 81 bp, Homo sapiens
  chr2:3648214-3648295
  hypo
cgcattcaggatggcgtcccccaggggagggcgcgtggatgggagcggggctggggctttggggccggtgaggcaggtgca

SEQ ID NO: 62540 - DNA, 404 bp, Homo sapiens; identical to SEQ ID NO: 15800
  chr2:3675047-3675451
  hypo

SEQ ID NO: 62541 - DNA, 471 bp, Homo sapiens
  chr2:3681099-3681570
  hypo
gggggttctgagaaacccttgcgctggctgcttgctgattgtgagggtgctgtgagcgcgtccagcctgatctggcagcctggacctcctcgcgaggggacagagcggggaccacagctgaccgacgggggagcggcgtgaagacgtggagggggaaataagaagcataaacattgaggctgtcccaaccttcctcctgatggtcagcacagaacctctggaatagtgcggtggagagctgggcgagtttgtctttggacagaaggcccgaggaagatgcgtgttcccgaccttcctcctcatggtcagcacagaacctcaggaccggtgcggtggagagctgggtacaggaggcccgaggaagacacatgtttcctgcgcagacagggcctgggacaacacgaaacagcagatgtgcattttcagggaatatcagcttttctgtaggaccctctgcgggaggccgagcag

SEQ ID NO: 62542 - DNA, 291 bp, Homo sapiens
  chr2:3685678-3685969
  hypo
cctgggctcagtctgcacctgcgggttctaattgcaccgtctccgctgctgcatttggctgcacggccgtggtaaggcgggcagatcagctgcgcctcccgtgatgagagactgaggccaggacaggcaaggggttgctcagaaggtgctgctcctatgcgcccccgccccccgccatctggtcagtggacgtctttggagcgcctggcttgttccaggtctatgctgggctctgggggacgaagtcggtgggagggcaaggagctggccgtccctgagctcttcaggtgt

SEQ ID NO: 62543 - DNA, 171 bp, Homo sapiens
  chr2:3695325-3695496
  hypo
tcctctcctgatggacactagcgttgtctcagccttcactccctggtgatcactaacgcatcctctcctgatggacactagcgttgtctcagccttcactctcgcaacccagctgcggtcaggctccttgactgcaccttgatgtgcgccggtgagaccctatctgtaggg

SEQ ID NO: 62544 - DNA, 30 bp, Homo sapiens
  chr2:3700892-3700922
  hypo
agggactgtggccacgtttgcagtttgcca

SEQ ID NO: 62545 - DNA, 309 bp, Homo sapiens; identical to SEQ ID NO: 15802
  chr2:3714207-3714516
  hypo

SEQ ID NO: 62546 - DNA, 203 bp, Homo sapiens
  chr2:3810862-3811065
  hypo
caggcaccatctccattctatcgcacctcagagagacctgagaccacacagctgacgtggtgggcccgcgacccagcgctggtgagcgcggctcgagatgtcacccagctcaggagatcccactgccagccaggctcctagaatggtcatggatttttctaaaatggaaatttaattagcacggtaactgaaggctccttgcc

SEQ ID NO: 62547 - DNA, 16 bp, Homo sapiens
  chr2:3884451-3884467
  hypo
aaaaaaaaaaaaaaag

SEQ ID NO: 62548 - DNA, 43 bp, Homo sapiens
  chr2:3919765-3919808
  hypo
taacaggtgagggactggtcccggtctctggcctgggcttggg

SEQ ID NO: 62549 - DNA, 266 bp, Homo sapiens
  chr2:3990854-3991120
  hypo
gtctctccctgctacctgcaccgatactgacaccaaatgaagttctcgcaccccggactccctctctgggtgccaccgacattacagctagacttttgctttcctatccaccctgtattctaagctccctgggtcagggtctgcctgttcctcacctgtgtttcctgtgggcccagtggctgctgttgcgcacctggggagaagagactgcaagagggaacctccctgtgcgcccttggggtgcgtttcctcgccttgtcctcact

SEQ ID NO: 62550 - DNA, 31 bp, Homo sapiens; identical to SEQ ID NO: 15803
  chr2:4271695-4271726
  hypo

SEQ ID NO: 62551 - DNA, 185 bp, Homo sapiens
  chr2:4976753-4976938
  hypo
aaggaatagtgaatgcgtgacaaagccctagcatattaaatgtaaacacatgagaacattccagcagaacaacaaggaaggcaagcgatgcaggtgccgacaaaacgcagtggctccggatgtgccctcgacggaagggaagccatgaggggaagcagagaaaagggtgtcgatagagaaggagg

SEQ ID NO: 62552 - DNA, 17 bp, Homo sapiens
  chr2:5214016-5214033
  hypo
ctctgtctcaaaaaaaa

SEQ ID NO: 62553 - DNA, 80 bp, Homo sapiens
  chr2:5694954-5695034
  hypo
ttgagaggatgagaatgaggtcggaagaaagatttttcttttttttttttttttcaggcggagtctcgctgtatacccca

SEQ ID NO: 62554 - DNA, 142 bp, Homo sapiens
  chr2:6024404-6024546
  hypo
aggtggaaggattccagatagcggagatgagaaaagcgggaagcaaagtagcatgaacagctgtagaaaggactcgggtgtgccctagaaatatgtgttatgttctccgctttttttttgagatggagtctcgctctgtcgc

SEQ ID NO: 62555 - DNA, 212 bp, Homo sapiens; identical to SEQ ID NO: 15804
  chr2:6402888-6403100
  hypo

SEQ ID NO: 62556 - DNA, 30 bp, Homo sapiens
  chr2:7001576-7001606
  hypo
agaaagagcacagacgttctctcaaactgc

SEQ ID NO: 62557 - DNA, 569 bp, Homo sapiens; identical to SEQ ID NO: 1300
  chr2:7005629-7006198
  hypo

SEQ ID NO: 62558 - DNA, 658 bp, Homo sapiens; identical to SEQ ID NO: 37111
  chr2:7057747-7058405
  hypo

SEQ ID NO: 62559 - DNA, 27 bp, Homo sapiens
  chr2:7063031-7063058
  hypo
ggcgtgagccaccgcgcccggcctcct

SEQ ID NO: 62560 - DNA, 31 bp, Homo sapiens
  chr2:7064666-7064697
  hypo
gggcaaagacccaggacgggcagggtttgtt

SEQ ID NO: 62561 - DNA, 271 bp, Homo sapiens; identical to SEQ ID NO: 15806
  chr2:7073080-7073351
  hypo

SEQ ID NO: 62562 - DNA, 131 bp, Homo sapiens
  chr2:7099077-7099208
  hypo
tagatcatcttgcaggtgcagcgtgggcgtccagttactgctctccggggcttgctcccctgatcactctcttactgccctcagagcacagaacacgtgatgctcctggcgaagcacctcattgactcatt

SEQ ID NO: 62563 - DNA, 99 bp, Homo sapiens; identical to SEQ ID NO: 15807
  chr2:7109818-7109917
  hypo

SEQ ID NO: 62564 - DNA, 299 bp, Homo sapiens; identical to SEQ ID NO: 15808
  chr2:7164397-7164696
  hypo

SEQ ID NO: 62565 - DNA, 34 bp, Homo sapiens
  chr2:7180009-7180043
  hypo
acagtgtcaggctggacgccgtgatttcagggac

SEQ ID NO: 62566 - DNA, 113 bp, Homo sapiens
  chr2:7229709-7229822
  hypo
tgtggcaggagccgcgttacgagctgcctccttggagaaacagcctcacatctgtgagaagggcctgcggtggagcccatactcaggtggaaggaaccgggaggtttctggcc

SEQ ID NO: 62567 - DNA, 96 bp, Homo sapiens; identical to SEQ ID NO: 15809
  chr2:7237059-7237155
  hypo

SEQ ID NO: 62568 - DNA, 319 bp, Homo sapiens; identical to SEQ ID NO: 37112
  chr2:7571157-7571476
  hypo

SEQ ID NO: 62569 - DNA, 86 bp, Homo sapiens; identical to SEQ ID NO: 1302
  chr2:7571576-7571662
  hypo

SEQ ID NO: 62570 - DNA, 183 bp, Homo sapiens; identical to SEQ ID NO: 15812
  chr2:7907357-7907540
  hypo

SEQ ID NO: 62571 - DNA, 30 bp, Homo sapiens; identical to SEQ ID NO: 15813
  chr2:7909326-7909356
  hypo

SEQ ID NO: 62572 - DNA, 152 bp, Homo sapiens
  chr2:8214268-8214420
  hypo
ttgctgccagacaaaaagaaacgtacgatacttatcacggcagaaaaaggaattgctcctgttccaattaaaatctgcctaaagccttggacatttcccaagaaggccagtctttgctcctgtacgttcccgtaactcttacctgaaacctc

SEQ ID NO: 62573 - DNA, 30 bp, Homo sapiens; identical to SEQ ID NO: 15814
  chr2:8234819-8234849
  hypo

SEQ ID NO: 62574 - DNA, 30 bp, Homo sapiens; identical to SEQ ID NO: 15815
  chr2:8301444-8301474
  hypo

SEQ ID NO: 62575 - DNA, 30 bp, Homo sapiens
  chr2:8359034-8359064
  hypo
atcttgcaggattgtcgagattattagagg

SEQ ID NO: 62576 - DNA, 30 bp, Homo sapiens; identical to SEQ ID NO: 15816
  chr2:8395180-8395210
  hypo

SEQ ID NO: 62577 - DNA, 30 bp, Homo sapiens; identical to SEQ ID NO: 15817
  chr2:8406381-8406411
  hypo

SEQ ID NO: 62578 - DNA, 30 bp, Homo sapiens; identical to SEQ ID NO: 15818
  chr2:8448296-8448326
  hypo

SEQ ID NO: 62579 - DNA, 121 bp, Homo sapiens; identical to SEQ ID NO: 15819
  chr2:8647531-8647652
  hypo

SEQ ID NO: 62580 - DNA, 126 bp, Homo sapiens
  chr2:8647899-8648025
  hypo
atagagggttagtgcagtcagcgtgattgttcaattcctaatgtacatgagcataatcactccgcaagtgccgcaccgctttcacacatgtgaacagctagagccgaaagcataaatatatgtctt

SEQ ID NO: 62581 - DNA, 32 bp, Homo sapiens
  chr2:8648362-8648394
  hypo
ttggatatttgtccccgcccaaatctcatgtt

SEQ ID NO: 62582 - DNA, 53 bp, Homo sapiens
  chr2:8658285-8658338
  hypo
ggattccagtggggtgcgggagtgggaagcactccatccgggccgagggagga

SEQ ID NO: 62583 - DNA, 166 bp, Homo sapiens; identical to SEQ ID NO: 15821
  chr2:8691180-8691346
  hypo

SEQ ID NO: 62584 - DNA, 184 bp, Homo sapiens
  chr2:8706972-8707156
  hypo
aaataaaaccagcttcggaaaatgtaaacccagagcaaggtgatccgtcactaaaatttcctgggaggaagctcaccttccgtgaccataaattgttggtgagccatctcacctattgtgcggtgctctccaaacagacacctgttgccatagcaaccctcacatctgtcgctaccttagaaga

SEQ ID NO: 62585 - DNA, 84 bp, Homo sapiens
  chr2:8713306-8713390
  hypo
ataatgtctacattatgagagcgttatgccatttcagtgaggtgatacttgtgccagctccgcgaagccagaggcagacagcct

SEQ ID NO: 62586 - DNA, 363 bp, Homo sapiens
  chr2:8735924-8736287
  hypo
aagaaagcagccacacggcagcccgaatgctcatgcgttccagagcattctccaggaactttctcattcatccctccacacttttctgcttttcaaaataatgctggtacagggccagacacacacgcatgccacacacatgcactagactccctacaggctcacagacacacaccagtgcacacactgcgcgttcctctctgctgacatctgagcgaggcaggttcacaagcagccagcggcctcccacatccacccgtcgcaaaggcatcagccttctcccctttctcactttcaacagccccttcgttcacctacgtgtggacctgtggccaaagctgcagtattcgggagagaaaagga

SEQ ID NO: 62587 - DNA, 30 bp, Homo sapiens; identical to SEQ ID NO: 15823
  chr2:8768425-8768455
  hypo

SEQ ID NO: 62588 - DNA, 30 bp, Homo sapiens; identical to SEQ ID NO: 15824
  chr2:8781806-8781836
  hypo

SEQ ID NO: 62589 - DNA, 30 bp, Homo sapiens
  chr2:8785642-8785672
  hypo
tggggcgaggctaccgagtcaccacgaccc

SEQ ID NO: 62590 - DNA, 42 bp, Homo sapiens; identical to SEQ ID NO: 37114
  chr2:8818538-8818580
  hypo

SEQ ID NO: 62591 - DNA, 471 bp, Homo sapiens; identical to SEQ ID NO: 1303
  chr2:8818828-8819299
  hypo

SEQ ID NO: 62592 - DNA, 170 bp, Homo sapiens; identical to SEQ ID NO: 37116
  chr2:8821591-8821761
  hypo

SEQ ID NO: 62593 - DNA, 696 bp, Homo sapiens; identical to SEQ ID NO: 1305
  chr2:8821975-8822671
  hypo

SEQ ID NO: 62594 - DNA, 209 bp, Homo sapiens; identical to SEQ ID NO: 37119
  chr2:8825634-8825843
  hypo

SEQ ID NO: 62595 - DNA, 157 bp, Homo sapiens
  chr2:8833972-8834129
  hypo
tctctctctgagagctcggggggtttctgtctcctgacggggccctgactggtaccccaggctccatgagagcaccgtggacaacaggagcagccgaacacgcagaatctgcgggaaggggaatcgggcagtgggtgcggcccgtgcaaaggcccgg

SEQ ID NO: 62596 - DNA, 591 bp, Homo sapiens
  chr2:8834447-8835038
  hypo
gcatggtgggggacagtgggccggagcaaggcagccaggggcccagtgcgaggagaggagaacggacaggatgggggaggcccatcacacccagcctcacaggccgcgctaagagctttggcctttactttgtgtaaactgggaccttggagagctttgcgcaggagagtgatggaaccaaactatttagcagccacatttcttttaatgtttctcgtttataggttacacatttgttgttattattattgatttaataatactgtgtcaagataaagttgtcaaaatcacggcacccaaacttcacattataaaattttaatcacaacctgttttatcacaatcgctttgcagcaacggaaattattcgtagtaattattaagttggtgcaaaattatttgtggtttttgccatcacttttaatggcaaacgccgcaaataattttgcaccaacctaaatattataactaaggaaacgaatagaatggtgtgcatcagaggtacctccgccagtgcttaccccgtttgttatagagggacgggttgtccctgctgcttttttatggagcgctatatcaaaagggctgagt

SEQ ID NO: 62597 - DNA, 172 bp, Homo sapiens; identical to SEQ ID NO: 15830
  chr2:8854101-8854273
  hypo

SEQ ID NO: 62598 - DNA, 232 bp, Homo sapiens
  chr2:8860512-8860744
  hypo
gatcacctgcagatccggactccgttcctgtctaccagtgaggctgctgtgactcgaaggaagagccaagaggaaggagccggggaaagctggggctgccttggctgagcacgtgttttatgctctccaccaaccttgtctacgagggaagatggagacaaatgctgcccaggcctgcgcagccgagagtggtggacactgggggaagccggtaccgcggtgtgcgtggaaa

SEQ ID NO: 62599 - DNA, 63 bp, Homo sapiens
  chr2:8868789-8868852
  hypo
gaacgcactgcacagcgctgctgggcgctagcatgctgtgggcacaaacgcttcataaagcac

SEQ ID NO: 62600 - DNA, 148 bp, Homo sapiens; identical to SEQ ID NO: 15831
  chr2:8870323-8870471
  hypo

SEQ ID NO: 62601 - DNA, 31 bp, Homo sapiens; identical to SEQ ID NO: 15832
  chr2:8875261-8875292
  hypo

SEQ ID NO: 62602 - DNA, 30 bp, Homo sapiens
  chr2:8936669-8936699
  hypo
cagctgctgtgagccgtagaaggaaagtcg

SEQ ID NO: 62603 - DNA, 318 bp, Homo sapiens
  chr2:8978037-8978355
  hypo
cttccggatccaggagcgagacctctgcctttcgcggggcctgtagttcacactccttccaggtctcccagcacctcccctcacctccttcagcctccacattcctaggccttgctgccaacaagcgtcaatcttgatttttgaaaaggtccaaggatgattacgacgtgcgtaggttgcgaaccatcgaaaagcacccaccaatgtgtcaacctggcaactcaggaaaaagccaataaggagcctgacttcatcagaagttggtgcggggtggggacaatggctcactcctgtaatcccagcattttgggaggccaa

SEQ ID NO: 62604 - DNA, 188 bp, Homo sapiens; identical to SEQ ID NO: 15834
  chr2:8983019-8983207
  hypo

SEQ ID NO: 62605 - DNA, 30 bp, Homo sapiens
  chr2:8997962-8997992
  hypo
tgcctgcagagtcgcggctgtgccccgtgc

SEQ ID NO: 62606 - DNA, 167 bp, Homo sapiens; identical to SEQ ID NO: 15835
  chr2:9002473-9002640
  hypo

SEQ ID NO: 62607 - DNA, 30 bp, Homo sapiens
  chr2:9066723-9066753
  hypo
ggctcagtcgaggagcgagtgctgtgaact

SEQ ID NO: 62608 - DNA, 390 bp, Homo sapiens; identical to SEQ ID NO: 15836
  chr2:9078567-9078957
  hypo

SEQ ID NO: 62609 - DNA, 31 bp, Homo sapiens
  chr2:9119835-9119866
  hypo
gcaattctaaatcacacgtttttgacttcca

SEQ ID NO: 62610 - DNA, 102 bp, Homo sapiens
  chr2:9134398-9134500
  hypo
cagagtagaatacagtgaaagcggggcatgatgggactgttcggagggccctaaccaacagggcagcccaggcattctctcgcagcactgcttcctggagtt

SEQ ID NO: 62611 - DNA, 211 bp, Homo sapiens; identical to SEQ ID NO: 37122
  chr2:9143657-9143868
  hypo

SEQ ID NO: 62612 - DNA, 460 bp, Homo sapiens; identical to SEQ ID NO: 37123
  chr2:9144089-9144549
  hypo

SEQ ID NO: 62613 - DNA, 30 bp, Homo sapiens
  chr2:9192102-9192132
  hypo
ttgctatcaactgtccgcatcccagcaact

SEQ ID NO: 62614 - DNA, 30 bp, Homo sapiens; identical to SEQ ID NO: 15839
  chr2:9193456-9193486
  hypo

SEQ ID NO: 62615 - DNA, 24 bp, Homo sapiens
  chr2:9217108-9217132
  hypo
tgcgccattccacttcagcctggg

SEQ ID NO: 62616 - DNA, 97 bp, Homo sapiens; identical to SEQ ID NO: 15841
  chr2:9218663-9218760
  hypo

SEQ ID NO: 62617 - DNA, 32 bp, Homo sapiens
  chr2:9234916-9234948
  hypo
caggcacagtggctaacgcctgtaatcccagc

SEQ ID NO: 62618 - DNA, 533 bp, Homo sapiens
  chr2:9236515-9237048
  hypo
ctgaggaatcagctgcggcccgcagagaggcagggttttcccttggtggcacaggcagacacatacccggccccacagtggtctcctccatctggggtcccatcagagccatcgctccctcctggagttccgctcagtggcctgccccagggggcccccgcacagccacagggctgtgggaagggaatggtccaggcaggccggtcaggccggctcccccagatcccttggctccccccaggagctggcttctcactcctcacagacaacaagggcgctatgagatgtcatcagagatgccaccaaacaccacaggcaagggacccgtcactcagcccgggctgctgaacgtgctgaggcggctctgatatgcccagaaagtgcccaagcaggtgacacttgggccaggacaggcacacggagatgacctcccactgcctccccaaggatgaccctgctactctgactgagagggtcttcaggtcaagggcggggagggtggcaacagacaccaaagccgagggctctgagca

SEQ ID NO: 62619 - DNA, 31 bp, Homo sapiens
  chr2:9241807-9241838
  hypo
tacctgcagctcctaacggtgccaagtacat

SEQ ID NO: 62620 - DNA, 24 bp, Homo sapiens
  chr2:9244771-9244795
  hypo
aaagggggccgggcgcgatggcgc

SEQ ID NO: 62621 - DNA, 266 bp, Homo sapiens; identical to SEQ ID NO: 15842
  chr2:9245034-9245300
  hypo

SEQ ID NO: 62622 - DNA, 175 bp, Homo sapiens
  chr2:9250673-9250848
  hypo
gtgcctgcagagatggcggcctgctctctaggtcaggccaggttcccgggagccgaggtctggctgttattccaggagtgcccagccccagagctgccacctcaggcccctggaagttctgcagcctgagctgccgtcctcagaccactctgcctctgagcgtgcaagaggctca

SEQ ID NO: 62623 - DNA, 30 bp, Homo sapiens; identical to SEQ ID NO: 15843
  chr2:9251134-9251164
  hypo

SEQ ID NO: 62624 - DNA, 31 bp, Homo sapiens
  chr2:9266321-9266352
  hypo
gagcggcactttgccacggcagccccaggaa

SEQ ID NO: 62625 - DNA, 189 bp, Homo sapiens
  chr2:9289932-9290121
  hypo
ttacttaagcccccagggccccggtttcttgtctgtgtaatgggatcaatagcgcctcctccaagacgccatggggacttgctgggataccgtgtgagggcctcaggccgatggcatgcagggagtcctcagtgcccgggacgcgttgactgttccagcagccagtgcggggtgtttgggtgggaagga

SEQ ID NO: 62626 - DNA, 31 bp, Homo sapiens
  chr2:9291497-9291528
  hypo
cggggatcattaaggtcgctgagaattaagg

SEQ ID NO: 62627 - DNA, 31 bp, Homo sapiens
  chr2:9314160-9314191
  hypo
catcgatggggtgaaccgaaagagggaaggc

SEQ ID NO: 62628 - DNA, 1591 bp, Homo sapiens; identical to SEQ ID NO: 37125
  chr2:9346367-9347958
  hypo

SEQ ID NO: 62629 - DNA, 258 bp, Homo sapiens
  chr2:9352744-9353002
  hypo
cacgtttccaggcaccggtgccttcctttgtggagcatatacatgcattccaggcccgcactgtctgatgaggcagcctaagacaaatccagctctcagccgccacattgcaagtactcagtagccacacgtggctggtggctaccatattggctcagcaaccaccgggagagccatcacctggaaacttgctgaaatgcagagccccgggttccacccaggacaatttttacagcatctccacgtacaccacaggca

SEQ ID NO: 62630 - DNA, 30 bp, Homo sapiens
  chr2:9369724-9369754
  hypo
gcctgaatctcagtcgagcctggaaggaca

SEQ ID NO: 62631 - DNA, 30 bp, Homo sapiens; identical to SEQ ID NO: 15847
  chr2:9402088-9402118
  hypo

SEQ ID NO: 62632 - DNA, 175 bp, Homo sapiens
  chr2:9409364-9409539
  hypo
gagaggaattattttgcgggggggagggggcgcgcataacatttatcttaattaatttgggttcagttggtctttcctgtgaccctgtccttgcattcattggaaatgttcgtctggaaacacccttagctcacggttggataaaagctgtcccgcaggccgtgtgtgcccaccc

SEQ ID NO: 62633 - DNA, 471 bp, Homo sapiens; identical to SEQ ID NO: 15849
  chr2:9455453-9455924
  hypo

SEQ ID NO: 62634 - DNA, 139 bp, Homo sapiens; identical to SEQ ID NO: 15850
  chr2:9456807-9456946
  hypo

SEQ ID NO: 62635 - DNA, 31 bp, Homo sapiens
  chr2:9507573-9507604
  hypo
gtattatttcattaaacgtttaagaatctga

SEQ ID NO: 62636 - DNA, 181 bp, Homo sapiens; identical to SEQ ID NO: 15852
  chr2:9513161-9513342
  hypo

SEQ ID NO: 62637 - DNA, 30 bp, Homo sapiens
  chr2:9514856-9514886
  hypo
ttgcaaggcaattacgtttggtttcaggaa

SEQ ID NO: 62638 - DNA, 337 bp, Homo sapiens
  chr2:9518891-9519228
  hypo
ccccagccatgtaggcagggacggtgccaggtcccaccaccttggcgatgatttacagaaaccgttcactcggggactgtctgcctttcctgtgcccgtagcccaggctccctgccgggcagtccctggtcgtccagcctgtgacacactatgctctctctctgttcctgttctcgggcagtgggaacctggataaacagacagggaaaggcagcacagccctgcactactgctgcctgaccgacaatgccgagtgcctcaagttgctcctgcgggggaaggcctccatcgagataggtgagtgggcccgggccccgggggtgggctcagctgcacc

SEQ ID NO: 62639 - DNA, 43 bp, Homo sapiens
  chr2:9608089-9608132
  hypo
cctgtgacctgctaggtcagccgtttgtgtttcatttaataca

SEQ ID NO: 62640 - DNA, 402 bp, Homo sapiens; identical to SEQ ID NO: 15853
  chr2:9609461-9609863
  hypo

SEQ ID NO: 62641 - DNA, 30 bp, Homo sapiens
  chr2:9624300-9624330
  hypo
aacatcctccctggcgcctcagaagattcc

SEQ ID NO: 62642 - DNA, 132 bp, Homo sapiens
  chr2:9676811-9676943
  hypo
aagctccatactaaccaaccacgtgtccagtgaagaagtcctgccattttacagtgtactcgctttcgtttttaccatccaccaccacgaccttgaaattttgtgaaaaacgttcagtacttgatgtcaggt

SEQ ID NO: 62643 - DNA, 33 bp, Homo sapiens
  chr2:9694209-9694242
  hypo
aaaaaaccttacgatctgcaaatgttatgaatt

SEQ ID NO: 62644 - DNA, 43 bp, Homo sapiens
  chr2:9737396-9737439
  hypo
attcatctatggaaatattttcgatcattaataaaatgaatgc

SEQ ID NO: 62645 - DNA, 26 bp, Homo sapiens
  chr2:9747620-9747646
  hypo
ccatcgtacctggcatttttctatta

SEQ ID NO: 62646 - DNA, 31 bp, Homo sapiens; identical to SEQ ID NO: 15854
  chr2:9770735-9770766
  hypo

SEQ ID NO: 62647 - DNA, 30 bp, Homo sapiens; identical to SEQ ID NO: 15855
  chr2:9772360-9772390
  hypo

SEQ ID NO: 62648 - DNA, 135 bp, Homo sapiens
  chr2:9785577-9785712
  hypo
gctgcattgatgggttcccagcgagaaaagctgtgcgaggacgtggctgcttcaggagagtgaagtgctgctcgggctaatcctgaggaggctgagaaactcaacacatggcacgtgagtagtgtttgtggctct

SEQ ID NO: 62649 - DNA, 30 bp, Homo sapiens
  chr2:9800436-9800466
  hypo
ttctcgttttggcacgttggcgtctccggc

SEQ ID NO: 62650 - DNA, 91 bp, Homo sapiens
  chr2:9853194-9853285
  hypo
gatgagatctaacaaccggtgggcattggtggatgagttctgtcttaccttgtgtttatcttttgaaatctaggtaatcttagccaggagc

SEQ ID NO: 62651 - DNA, 31 bp, Homo sapiens; identical to SEQ ID NO: 15856
  chr2:9865161-9865192
  hypo

SEQ ID NO: 62652 - DNA, 175 bp, Homo sapiens
  chr2:9921446-9921621
  hypo
tccaacccctggttggcggctgggaggtgtggaaagggagtactgggcgccaggaaaatggggttcccggaagatgactcaggcagccccagaatatgtctccatcactaatagagtccagaagcaagcctgtgcccatccactgcgatgagggtttctacgtgatgttactgtc

SEQ ID NO: 62653 - DNA, 43 bp, Homo sapiens
  chr2:9942206-9942249
  hypo
agacagctcctgggggtttgtcggcctgatcagaataagcaaa

SEQ ID NO: 62654 - DNA, 31 bp, Homo sapiens
  chr2:9949033-9949064
  hypo
gtgcctggcaaggcagcgggagagtttcagg

SEQ ID NO: 62655 - DNA, 176 bp, Homo sapiens
  chr2:9952203-9952379
  hypo
tcctgccccggcggccgggccagttccccccgggagccccggtgtccccctcctgtgtgtcctgctggttcccggcagatgctccgggcgccactgctctgttagccgctgttggcctcctcctgtcacatgtttatgcttgtagtagcagaatccaaatccgggccattatcgca

SEQ ID NO: 62656 - DNA, 711 bp, Homo sapiens
  chr2:9960203-9960914
  hypo
ggatatcagcctgccaggtgtcggcagtcaccgtgggcctctcttctctcttcatacaccaggaaccaacccagccaggttaaaggacttgcccaaggtcacgcggaggaaagctggttggtgccaagtggttaggagagaaagggtgaggtcatgagagcaaacctaagagggctgctaccgactcccaggatgaaatcacagatgaagtcacagaatcggaatgctggctttgggagagaccgccctgctccttcaggaagctgggggtgggggcgggagtgggggcggggagcaggtgcaggggaaggggtaagagctcagactctggacttagaaggatccgattgatgattccagatcccagtggcttcatgaacgtgggcgagttacacaacttctcggtctcctgcttttctccttagtaaaacaacccatgccccacggaggtgccgtaaagacagaacgactctgcagatagcgttaagcacgatgccagccaccttggaggcgcacagtacatacggctcatggcatttcagggagcggcaagccagttgctgccaacccgcccgatgactgtgtctaaggcggaatctggaagcctctctgagcctccgtctccctcactgtcccctcggggtgagggaggccactctataaggagaccatgtgtgtggaagcaccttgggaaacgctgcgcgcaggccg

SEQ ID NO: 62657 - DNA, 31 bp, Homo sapiens
  chr2:9962491-9962522
  hypo
ctgcatctgttgccttcgcccttgttaaaca

SEQ ID NO: 62658 - DNA, 31 bp, Homo sapiens
  chr2:9964325-9964356
  hypo
aataaaccatggtggccgatgtttgtaaatc

SEQ ID NO: 62659 - DNA, 38 bp, Homo sapiens
  chr2:9977943-9977981
  hypo
gtaaaattgtgtctgtgtagccgggcgcggtggctcac

SEQ ID NO: 62660 - DNA, 135 bp, Homo sapiens
  chr2:10008083-10008218
  hypo
gcatgtgtggggtcattgatgcgcgatgttttcagtggtgaagatattagcgctgtaagagagatgttcatggaagaaggagacctgatggcagggctggcagccggtttcctcgcccatccttgtctgtgactc

SEQ ID NO: 62661 - DNA, 23 bp, Homo sapiens
  chr2:10035344-10035367
  hypo
gtggttaggcatggtggcttacg

SEQ ID NO: 62662 - DNA, 152 bp, Homo sapiens
  chr2:10047573-10047725
  hypo
ccagaaagctaaaagcggttttaaacatgctgagacaatagccgcccctcctcaacgcctttaaaggtgaccaggtagcctctggggctcggggaaagctttcggcaagtatgtcacacacaccctgcctgagtaagcgctgcccctttgat

SEQ ID NO: 62663 - DNA, 31 bp, Homo sapiens
  chr2:10107384-10107415
  hypo
gtggccagctcttcttcgttgggtgtggtca

SEQ ID NO: 62664 - DNA, 214 bp, Homo sapiens; identical to SEQ ID NO: 15859
  chr2:10110632-10110846
  hypo

SEQ ID NO: 62665 - DNA, 17 bp, Homo sapiens
  chr2:10115710-10115727
  hypo
agatataaacacaggcc

SEQ ID NO: 62666 - DNA, 301 bp, Homo sapiens; identical to SEQ ID NO: 15860
  chr2:10150734-10151035
  hypo

SEQ ID NO: 62667 - DNA, 121 bp, Homo sapiens; identical to SEQ ID NO: 15861
  chr2:10151094-10151215
  hypo

SEQ ID NO: 62668 - DNA, 186 bp, Homo sapiens; identical to SEQ ID NO: 1316
  chr2:10151689-10151875
  hypo

SEQ ID NO: 62669 - DNA, 121 bp, Homo sapiens; identical to SEQ ID NO: 1317
  chr2:10151929-10152050
  hypo

SEQ ID NO: 62670 - DNA, 186 bp, Homo sapiens; identical to SEQ ID NO: 1318
  chr2:10152409-10152595
  hypo

SEQ ID NO: 62671 - DNA, 541 bp, Homo sapiens; identical to SEQ ID NO: 15865
  chr2:10152954-10153495
  hypo

SEQ ID NO: 62672 - DNA, 661 bp, Homo sapiens
  chr2:10153554-10154215
  hypo
tgggcaggcgtttgtatgggcgggtcaggtgggcaggagttcttatggtcgggtcaggtgggcaggcgtgcatatggtcggtttaggtggacaggcgtgtgtatgggtgtgcgtatggacgagtcaggtgggcaggcatcctacaggcgggtcaggtgggcaggcgtttgtatgggtgggtcaggtgggcaggtgttcttatggtcgggtcaggtgggcagacgtgcatatggtcgggtcaggtggacaggcatgtgtatgggtgtgcgtatggacgagtcaggtggacaggcgtgcgtatgggagagtcaggtggacaggcatgtgtatgggcgagtcaggtggacacgcgtgcgtatgggcaagtcaggtgggcaggcatgcgtatgggagagtcaggtggacagccctgcgtatgagcgagtcaggtggacaggattgcgtatgggcaagtcaggtggacaggcgtgcgtatgagtgagtcaggtggacaggattgcgtatgggagagtcaggtggacagccctgcgtatgagcgagtcaggtggacaggattgcttatgggcaagtcaggtggacaggcgtgcgtatgagcgagtcaggtggacaggattgcgtatgggagagtcaggtggacaggcgtgcatatgagcgagtcagg

SEQ ID NO: 62673 - DNA, 121 bp, Homo sapiens; identical to SEQ ID NO: 15868
  chr2:10154874-10154995
  hypo

SEQ ID NO: 62674 - DNA, 241 bp, Homo sapiens; identical to SEQ ID NO: 15869
  chr2:10155174-10155415
  hypo

SEQ ID NO: 62675 - DNA, 181 bp, Homo sapiens
  chr2:10155774-10155955
  hypo
agtgtgcgtatgggcgagtcaggtgggcagacgtgcatatgggtgtgcatatgggtgattcaggtggacaggcgtgcgtatgggcggctcacgtggacaggcgtgcgtgtcagcgtgtcacgtggacaggcgtgtgtgtgggcgggtcaggtgggcaggcgtgtgtatgggcgggtcaggt

SEQ ID NO: 62676 - DNA, 349 bp, Homo sapiens
  chr2:10156254-10156603
  hypo
atggctgtgcgtttgggcgagtcaggtgggcagacgtgcgtatgggcagtcaggtggacaggcgtgtgtatgggtgagtcaggtggaccactgtgtgtacgggcgagtcaggtggaccggcgtgcatatgggcaggtcaggtgggtaggcgtgtgtatggatgtgcatatgggcgggtcaggtggacaggtgtgtatatgggtgtacatgtgtgcacaggtgctactttactctgtgttcaacacgtgttcgtggacgtgctccaggcccaaggcgaaggaataggatgtagcaggggcagggtctccgccccatactcagagtccttgggctccgggaagacacaacc

SEQ ID NO: 62677 - DNA, 283 bp, Homo sapiens
  chr2:10162202-10162485
  hypo
gtgtctgggcatgagcggtctgtggaggcagcagccaggctgtgtccaggtagccctgacggccactgcacaagagcagtgtcgggtagagtccgagcacccatcagctcagccccaggctccatcagaggcggtggaacgggccctgaggatgcctcagtcctgggccttagtgggaggccttccaggtgaagccctggggaccaggtagccctgctcagcaagcagccctggaccctacctcagcagccccggaccccacctcggccgccgcaggaagcca

SEQ ID NO: 62678 - DNA, 31 bp, Homo sapiens; identical to SEQ ID NO: 15872
  chr2:10172772-10172803
  hypo

SEQ ID NO: 62679 - DNA, 161 bp, Homo sapiens
  chr2:10178431-10178592
  hypo
agctgcccacagcccccgactctgggccagcttacaaggactcagcacgtgctcttagcagcctcttttccaggggcaggcagctgggacaaagcagcactggacccgagctggagggatggatcccgggccctccactcactggccgacaatgacgggca

SEQ ID NO: 62680 - DNA, 199 bp, Homo sapiens; identical to SEQ ID NO: 1320
  chr2:10183603-10183802
  hypo

SEQ ID NO: 62681 - DNA, 453 bp, Homo sapiens; identical to SEQ ID NO: 37134
  chr2:10183814-10184267
  hypo

SEQ ID NO: 62682 - DNA, 30 bp, Homo sapiens; identical to SEQ ID NO: 15875
  chr2:10192464-10192494
  hypo

SEQ ID NO: 62683 - DNA, 127 bp, Homo sapiens
  chr2:10195849-10195976
  hypo
atgctctcccatgtgctcacacgtgcacgagcgtgccccactgctgggaacagagaatgctctcacggatccaccaatcaatgtcagcagcaggtgtccaggcaacgtgggtgagtggggacaagtg

SEQ ID NO: 62684 - DNA, 30 bp, Homo sapiens
  chr2:10198586-10198616
  hypo
gaagtgttgtggcgcggatgccaggagggg

SEQ ID NO: 62685 - DNA, 30 bp, Homo sapiens
  chr2:10198944-10198974
  hypo
cctccgaggcctggcgggggtggagcatgc

SEQ ID NO: 62686 - DNA, 43 bp, Homo sapiens
  chr2:10226143-10226186
  hypo
cagatggcaaaactgaggctccgaagagtggggagctggccta

SEQ ID NO: 62687 - DNA, 30 bp, Homo sapiens; identical to SEQ ID NO: 15876
  chr2:10238085-10238115
  hypo

SEQ ID NO: 62688 - DNA, 129 bp, Homo sapiens
  chr2:10281144-10281273
  hypo
ctggggctgcatctcgcccacgtcgctgtcatgtgcggggcccacgttgtgagttgtgtgtctgctcactattgtgctgtagcctctggaagttgcttaggagcttgggatttcgtggagaggtgggag

SEQ ID NO: 62689 - DNA, 30 bp, Homo sapiens
  chr2:10284309-10284339
  hypo
ccccaactctgggccgggtctggggctctg

SEQ ID NO: 62690 - DNA, 38 bp, Homo sapiens; identical to SEQ ID NO: 15877
  chr2:10289568-10289606
  hypo

SEQ ID NO: 62691 - DNA, 235 bp, Homo sapiens
  chr2:10306803-10307038
  hypo
tgcctgcaaagccctcgccctgttccctatggcgcaccagctgcttggatgctcccacgcagcagtgccttgtcatcacattctatttgctgagcggcgatggaacaggccctgcgtccccgcctgtgtcctaagcactccacaagcatgagcgtgtctagatggtgatggtttgctcatggtctctctctcagagcttttaccctggcggggttgggagcgtggcaatgggtca

SEQ ID NO: 62692 - DNA, 30 bp, Homo sapiens
  chr2:10307514-10307544
  hypo
tgctcggcttggactcgcctctcgccctgc

SEQ ID NO: 62693 - DNA, 151 bp, Homo sapiens; identical to SEQ ID NO: 15878
  chr2:10328930-10329081
  hypo

SEQ ID NO: 62694 - DNA, 61 bp, Homo sapiens; identical to SEQ ID NO: 15879
  chr2:10334909-10334970
  hypo

SEQ ID NO: 62695 - DNA, 193 bp, Homo sapiens
  chr2:10344635-10344828
  hypo
tgtggtcactggctgtgaccccgccagccctgctcagcgctgtgcccagccctgggtgcagggaggtgcggtttgctctcagaggagcagctagctgggagcatccgaggccattagggacaggacgctaatgcatcggcgccccattgattctgcctggcttttgtgaacacgtctgcgctgactaatttgt

SEQ ID NO: 62696 - DNA, 31 bp, Homo sapiens
  chr2:10381198-10381229
  hypo
catgtgacctgcatcccggggaacccaggac

SEQ ID NO: 62697 - DNA, 30 bp, Homo sapiens; identical to SEQ ID NO: 15880
  chr2:10395174-10395204
  hypo

SEQ ID NO: 62698 - DNA, 31 bp, Homo sapiens
  chr2:10397608-10397639
  hypo
aaccatggacaccatacgtccagccctacac

SEQ ID NO: 62699 - DNA, 61 bp, Homo sapiens
  chr2:10487203-10487264
  hypo
tcagaagtctctagagagccccgcaccgcccccgccccccgcaggtgctggagttcagcct

SEQ ID NO: 62700 - DNA, 528 bp, Homo sapiens
  chr2:10512199-10512727
  hypo
aacacgttgcttacacgttgggtgcacagtgaatatgtatcagtccagcgcttttcaccatctggtctggttttagtgttgctttatttctggtcattcctcaatcggggctaaagatcagaaaaatcgcatctccaggtcctgagccatggcgaggaagctgggtggtgccctgtgctgtgtggctaaggtgggggacgagggttgtcggtgggggaagccccatgggggccccactggagtcataggagcgaatggagcacccactccatgccttctgtcaattacaaagcacctattatgtcccggatactgtgtccaacacagtggacacattgatgggtaaggcataatccccccccaggagctcccagttggattgaggaggcagacaggcgagcgtatggctgtgacacacccagcaactcccagttggatcggggaggcggacaggcgagcgtatggctgtgacacaggggggcaagtggcgtcaccaaggcagaacccagcagccggggcctgaagccc

SEQ ID NO: 62701 - DNA, 30 bp, Homo sapiens
  chr2:10517353-10517383
  hypo
caggccgcgccgccccgaatggcaggtgga

SEQ ID NO: 62702 - DNA, 43 bp, Homo sapiens
  chr2:10517628-10517671
  hypo
atccctgtcctttcacgcactgtctgcccgcacacactcttcc

SEQ ID NO: 62703 - DNA, 245 bp, Homo sapiens; identical to SEQ ID NO: 15881
  chr2:10517931-10518176
  hypo

SEQ ID NO: 62704 - DNA, 48 bp, Homo sapiens
  chr2:10519034-10519082
  hypo
ctggtcagtattcatttacagcgaggcggacagactcatgctgtaatt

SEQ ID NO: 62705 - DNA, 211 bp, Homo sapiens
  chr2:10526101-10526312
  hypo
atgtgctggccttgggttttacggctgtctggcaattagaatattaatgtcgataacacagcaggacttgcgtgtgacaagctgagccacataacgtcacagtcgctcttgaacatctcggactttcacatgggccagccacaccccagcctaggttgctccctcacctcctcagggcctccctgatgtcggtttagacatgtgccttcca

SEQ ID NO: 62706 - DNA, 31 bp, Homo sapiens; identical to SEQ ID NO: 15883
  chr2:10528985-10529016
  hypo

SEQ ID NO: 62707 - DNA, 30 bp, Homo sapiens
  chr2:10535653-10535683
  hypo
gagccccgctggcacgccgcactgtgctga

SEQ ID NO: 62708 - DNA, 43 bp, Homo sapiens
  chr2:10536067-10536110
  hypo
gtaccagaggctgcaggttcacggaggaggagtcaccaatcca

SEQ ID NO: 62709 - DNA, 138 bp, Homo sapiens
  chr2:10536464-10536602
  hypo
ctgaagggagcagggcacagtcgtgggtggcaggcctgggtgtgcctgattccactgaaccctcgtaacagccctgggtgcagagtgtagagtgctgggtgaggacggaggctgtgcgtctgtgatggccccaggtga

SEQ ID NO: 62710 - DNA, 114 bp, Homo sapiens; identical to SEQ ID NO: 15884
  chr2:10545012-10545126
  hypo

SEQ ID NO: 62711 - DNA, 30 bp, Homo sapiens
  chr2:10556500-10556530
  hypo
agctgtctgggatccgccaaggcaacacag

SEQ ID NO: 62712 - DNA, 79 bp, Homo sapiens
  chr2:10566538-10566617
  hypo
cgttccttaataagcgaagtgtggggtgatttctaaaaggatttaaatggccctcatcagccacgtcctgctgagcttg

SEQ ID NO: 62713 - DNA, 354 bp, Homo sapiens
  chr2:10566934-10567288
  hypo
cagtcagttctgagcgagcggcccctggacagttgcagagaaacacaggcttgtcgtgccgtttaagctttgcttgcaagagtggatgccccgcaatcgttcctgctctcccgggccccgggcctggggcatgcgttgcacctgcccagcccggtggctgcgcctccctcctccacctgaccaacgcgacattcctcccctcacgcctggcccggtcccttccagggcaactcccagggatgtggtgacatgcagggttcaagtgttcttggttccaggcacctcccggctcacggggagctcagaggtccatgccgaggagaccaggcaggacctcccgaggctgcgccccgg

SEQ ID NO: 62714 - DNA, 114 bp, Homo sapiens
  chr2:10577403-10577517
  hypo
gagtttatgtcttcacgcgggaaacctattttacaatcctcgtaaagtcagtaatacattccaatatcaaaagcgcagtgtggagccagtccccactctcggcccaggcctctg

SEQ ID NO: 62715 - DNA, 661 bp, Homo sapiens; identical to SEQ ID NO: 1324
  chr2:10588855-10589516
  hypo

SEQ ID NO: 62716 - DNA, 153 bp, Homo sapiens; identical to SEQ ID NO: 15887
  chr2:10600736-10600889
  hypo

SEQ ID NO: 62717 - DNA, 101 bp, Homo sapiens; identical to SEQ ID NO: 15888
  chr2:10601534-10601635
  hypo

SEQ ID NO: 62718 - DNA, 80 bp, Homo sapiens
  chr2:10615283-10615363
  hypo
aatgacatctgtagaacggagtccctcttccacagagggggacccagaggctcacggcggtcaggcggctcacccaaggc

SEQ ID NO: 62719 - DNA, 85 bp, Homo sapiens; identical to SEQ ID NO: 15890
  chr2:10615572-10615657
  hypo

SEQ ID NO: 62720 - DNA, 380 bp, Homo sapiens
  chr2:10634368-10634748
  hypo
aactgaggctcacagaggtgacgtgtctgttctaagttcgtgaatgccaacttagaattggtggagctgggaacagaacccaggtcttcggacctgatgttggccacatgggtgggccccacagtcaggacaagaggggtgggggctctgcagaaggatggggctgtgggtggacagccagggccttttccagacgtgggccatggaagtccagcagctggatcaaaaccccatgagctgagcctgcccctatggatcacaggtcacagacatgtcttcggaagccagtcggggaggccagggctggggcgggccaggaccaatccacaccagaggcacaacagcagttcccaaggaagagcagtcgagggcaagggcca

SEQ ID NO: 62721 - DNA, 44 bp, Homo sapiens
  chr2:10642585-10642629
  hypo
atttcatgcctgtcctcggttcagcccctcgcagcctacagaag

SEQ ID NO: 62722 - DNA, 109 bp, Homo sapiens
  chr2:10645139-10645248
  hypo
ctcccaggagtgctcacggggcacccctggagtctccaacagtcagctgagatgggactgggggtcacacagggaagggccgccaggacgggagcgctgagctcctcca

SEQ ID NO: 62723 - DNA, 31 bp, Homo sapiens; identical to SEQ ID NO: 15892
  chr2:10659326-10659357
  hypo

SEQ ID NO: 62724 - DNA, 307 bp, Homo sapiens; identical to SEQ ID NO: 15893
  chr2:10666471-10666778
  hypo

SEQ ID NO: 62725 - DNA, 74 bp, Homo sapiens
  chr2:10673121-10673195
  hypo
tgccttcacaggggctggtctcggaccccccactgcagagctcctggctctgcgggaccatcagctcccagctg

SEQ ID NO: 62726 - DNA, 31 bp, Homo sapiens
  chr2:10676513-10676544
  hypo
gtgtattggggtgtttcggggggttctgtgt

SEQ ID NO: 62727 - DNA, 462 bp, Homo sapiens
  chr2:10686606-10687068
  hypo
tctaaataaataaataaatgttgaataattatctattggtatcctccaaacttactagacgccaccacagcctttgctgttgcagccggtttgatctattgccccccgaatatgccttacacgtacctatctctggtgcttcgcttattccattttccccttttggaatgctcttcctttgttcttggaacaaagttccaaacaaagtccttgtaacaaattcccgagttcttggcatgaactcgagccctgttcatgccatattgtgcagctcaaccccaacttctttcaggaaatattcttgaatgatgcctttaccccataccccaggcgcaggctttctctctcctggggcccgcagatcttaccgtctgcactgagcgaagcctccctgctactgcttcccagccatgcggcgagctctttgaaggaagccgtggcggtatatttctcttgtacctc

SEQ ID NO: 62728 - DNA, 30 bp, Homo sapiens
  chr2:10710484-10710514
  hypo
gctagctgactgaccgtggagccatggatc

SEQ ID NO: 62729 - DNA, 118 bp, Homo sapiens; identical to SEQ ID NO: 15894
  chr2:10732498-10732616
  hypo

SEQ ID NO: 62730 - DNA, 206 bp, Homo sapiens; identical to SEQ ID NO: 15895
  chr2:10742495-10742701
  hypo

SEQ ID NO: 62731 - DNA, 23 bp, Homo sapiens
  chr2:10804796-10804819
  hypo
ctgcatctatggtatgcaccacg

SEQ ID NO: 62732 - DNA, 23 bp, Homo sapiens
  chr2:10804938-10804961
  hypo
acgtgagccaccacacccagcca

SEQ ID NO: 62733 - DNA, 30 bp, Homo sapiens; identical to SEQ ID NO: 37142
  chr2:10861577-10861607
  hypo

SEQ ID NO: 62734 - DNA, 456 bp, Homo sapiens; identical to SEQ ID NO: 37143
  chr2:10862069-10862525
  hypo

SEQ ID NO: 62735 - DNA, 304 bp, Homo sapiens
  chr2:10917526-10917830
  hypo
gccttcaccactccaggagcccggtgggcacctaccacatctctagtctagccagcacgcgagtcccgagggtgggcctgaattcctgagcttgctctcgcgtgcctttcaggcgatgagaatgatttatttgtttgtgatgcatgtttgctgaaagattaataaatcatttctgtgcctttagcaaacttcctgtgttgctcttaaaaagggatcatccaccttcccggaccacaaggttaaggtaaccccgctaggtaaccctgataggcctgctgcggggcagaccgacagagagagagag

SEQ ID NO: 62736 - DNA, 30 bp, Homo sapiens
  chr2:10920051-10920081
  hypo
gtgtggctgcgtcccgcgtcacggagcact

SEQ ID NO: 62737 - DNA, 149 bp, Homo sapiens
  chr2:10925011-10925160
  hypo
gagtaaaccaggactgctgcccgcacagcttccctcccgggcactcacctcgccatccctgccgtcccaaggctctctctcaacgatggtagggaaagccccgcctcctacaggtgccgtggagccacgcccaaaagagagctccctta

SEQ ID NO: 62738 - DNA, 96 bp, Homo sapiens
  chr2:10926447-10926543
  hypo
ggggaaagaaaacacccattaaccatattaaccaactacaatgagagagagctgggagggaaggagccacagtctgccccccgccggcagaggctg

SEQ ID NO: 62739 - DNA, 30 bp, Homo sapiens; identical to SEQ ID NO: 15898
  chr2:10999966-10999996
  hypo

SEQ ID NO: 62740 - DNA, 30 bp, Homo sapiens
  chr2:11049717-11049747
  hypo
gacatgttagtaatgcgttctttcaatgac

SEQ ID NO: 62741 - DNA, 115 bp, Homo sapiens
  chr2:11053787-11053902
  hypo
ctacaacaagcagcgcgtcctggagaccgcggccaagcacgagctggagctgatggaactcaactccagcagcgggggcgagggcaagaccgggggctcccgcagtgacctggac

SEQ ID NO: 62742 - DNA, 30 bp, Homo sapiens; identical to SEQ ID NO: 15900
  chr2:11166612-11166642
  hypo

SEQ ID NO: 62743 - DNA, 31 bp, Homo sapiens; identical to SEQ ID NO: 15901
  chr2:11209932-11209963
  hypo

SEQ ID NO: 62744 - DNA, 31 bp, Homo sapiens; identical to SEQ ID NO: 15902
  chr2:11243180-11243211
  hypo

SEQ ID NO: 62745 - DNA, 31 bp, Homo sapiens
  chr2:11312055-11312086
  hypo
atgtactttcatcagcgcggccagtaagttt

SEQ ID NO: 62746 - DNA, 30 bp, Homo sapiens; identical to SEQ ID NO: 15903
  chr2:11397460-11397490
  hypo

SEQ ID NO: 62747 - DNA, 92 bp, Homo sapiens
  chr2:11487884-11487976
  hypo
tacaggggtgagtcacagagccgggcctcaacctggcctttaaaaagacgctacccgtttacattctcagcgtgagtagaagaaactgccca

SEQ ID NO: 62748 - DNA, 24 bp, Homo sapiens
  chr2:11527872-11527896
  hypo
gtgagccaccgtgcccagccaacc

SEQ ID NO: 62749 - DNA, 30 bp, Homo sapiens
  chr2:11536186-11536216
  hypo
cactgctggccgggccgcccaggaggggct

SEQ ID NO: 62750 - DNA, 41 bp, Homo sapiens
  chr2:11536461-11536502
  hypo
cctacttggctatttcgtgcccctttcgtgactaacgcttt

SEQ ID NO: 62751 - DNA, 31 bp, Homo sapiens; identical to SEQ ID NO: 15905
  chr2:11537161-11537192
  hypo

SEQ ID NO: 62752 - DNA, 22 bp, Homo sapiens
  chr2:11594726-11594748
  hypo
agcctcccgaagtactgggatt

SEQ ID NO: 62753 - DNA, 30 bp, Homo sapiens; identical to SEQ ID NO: 37149
  chr2:11622889-11622919
  hypo

SEQ ID NO: 62754 - DNA, 31 bp, Homo sapiens; identical to SEQ ID NO: 15906
  chr2:11758939-11758970
  hypo

SEQ ID NO: 62755 - DNA, 31 bp, Homo sapiens
  chr2:11995229-11995260
  hypo
gatgatgcagggtgagcgcttagacccagtg

SEQ ID NO: 62756 - DNA, 261 bp, Homo sapiens
  chr2:12005881-12006142
  hypo
gggaaatggtgagtttcggagacaaacttgggacccactcagcagtggaggcggcagttcatcctaacatccttgctcttttatgtttctccagaaattgtgatcaaccagaatccagaacacgctgtgcttaatggagtgaactgcctgtgaagcgcaggtgtgaggggcggatgataagtgacagtgccggtgcccccagcgcccttttacctgatggctcacccggcctacagctgcgcccttccctttgaatcgtct

SEQ ID NO: 62757 - DNA, 206 bp, Homo sapiens
  chr2:12103261-12103467
  hypo
tgacccaaggaaagaatgtttcgcacatacctagcaaccagagcgaactcataaaacgttcattccaaggcaacaccattcatctttgcgtatctccctgtgactgctgccataaaacttcactctagagtagacgtccctacagctttatagggatgaaacttccagaactcttcacttaaaatgcacgtcgtttaaagattctc

SEQ ID NO: 62758 - DNA, 146 bp, Homo sapiens
  chr2:12145186-12145332
  hypo
aattgcaaatgattctgtccacgtaattttccgtccattgtcccagaatgctccatgtcttttgtatgttacaatctaggtttctcggtggtggtagacgtgatggtagtgctattagtggtaacgatattgacaataataaaaca

SEQ ID NO: 62759 - DNA, 42 bp, Homo sapiens
  chr2:12297694-12297736
  hypo
attacaggcatgagccactgcgcctggggtttattcagagtt

SEQ ID NO: 62760 - DNA, 31 bp, Homo sapiens
  chr2:12415511-12415542
  hypo
gcgagactccgtctgggaaaaaaaaaaaaaa

SEQ ID NO: 62761 - DNA, 39 bp, Homo sapiens
  chr2:12631199-12631238
  hypo
tcaaaaacactcaaactcgcaggaacagagcagaatggt

SEQ ID NO: 62762 - DNA, 30 bp, Homo sapiens; identical to SEQ ID NO: 15909
  chr2:12694623-12694653
  hypo

SEQ ID NO: 62763 - DNA, 279 bp, Homo sapiens; identical to SEQ ID NO: 37153
  chr2:12858219-12858498
  hypo

SEQ ID NO: 62764 - DNA, 30 bp, Homo sapiens; identical to SEQ ID NO: 1331
  chr2:12897042-12897072
  hypo

SEQ ID NO: 62765 - DNA, 97 bp, Homo sapiens
  chr2:14711509-14711606
  hypo
agaggaaggacaaaacatcagcgccagatgaatctcaacatggtcagaattaagccatctacggccgggagcagtggctcacacctataatcccagc

SEQ ID NO: 62766 - DNA, 1962 bp, Homo sapiens; identical to SEQ ID NO: 37156
  chr2:14773808-14775770
  hypo

SEQ ID NO: 62767 - DNA, 43 bp, Homo sapiens
  chr2:14901340-14901383
  hypo
agggctcttgtgagaatgtggcgggttaatgtgcactgtggaa

SEQ ID NO: 62768 - DNA, 39 bp, Homo sapiens
  chr2:14961049-14961088
  hypo
ttttcttttcttttttttttccgagacggagtcttgctc

SEQ ID NO: 62769 - DNA, 38 bp, Homo sapiens; identical to SEQ ID NO: 15914
  chr2:14961327-14961365
  hypo

SEQ ID NO: 62770 - DNA, 31 bp, Homo sapiens; identical to SEQ ID NO: 15915
  chr2:15027588-15027619
  hypo

SEQ ID NO: 62771 - DNA, 43 bp, Homo sapiens
  chr2:15032648-15032691
  hypo
aatgatgtgtttatattataccgactctatggctgctatttaa

SEQ ID NO: 62772 - DNA, 88 bp, Homo sapiens
  chr2:15084088-15084176
  hypo
tatgaggatgattgctccattcgttcaaccaaataaaaaaaactactaatccctgccaggtgcggtggctcacgcctgtaatcccagc

SEQ ID NO: 62773 - DNA, 454 bp, Homo sapiens; identical to SEQ ID NO: 15916
  chr2:15307075-15307529
  hypo

SEQ ID NO: 62774 - DNA, 30 bp, Homo sapiens; identical to SEQ ID NO: 15917
  chr2:15382063-15382093
  hypo

SEQ ID NO: 62775 - DNA, 30 bp, Homo sapiens
  chr2:15427997-15428027
  hypo
cgtgtaggcatccccgcataaacatcctga

SEQ ID NO: 62776 - DNA, 84 bp, Homo sapiens
  chr2:15474599-15474683
  hypo
ccacgcctctcttctccttaagccaatttggcatcaaagtgttcacttgttctttacaggattttgacacgctggcaatattac

SEQ ID NO: 62777 - DNA, 30 bp, Homo sapiens; identical to SEQ ID NO: 15919
  chr2:15475195-15475225
  hypo

SEQ ID NO: 62778 - DNA, 31 bp, Homo sapiens
  chr2:15579676-15579707
  hypo
ggtctacagctcccagcgtgagcgatgcaga

SEQ ID NO: 62779 - DNA, 30 bp, Homo sapiens
  chr2:15703528-15703558
  hypo
cctccggggagccccgcccacattgcatgc

SEQ ID NO: 62780 - DNA, 30 bp, Homo sapiens
  chr2:15782568-15782598
  hypo
ccttgttcccggtcccgggccccggaggct

SEQ ID NO: 62781 - DNA, 101 bp, Homo sapiens
  chr2:15783081-15783182
  hypo
caacgtctttctgcccgtcccccgcctcccgactctcacctccttggaggcttacggggctctgtataagtttcccacaaaaaatccgtgctgctgggtgg

SEQ ID NO: 62782 - DNA, 31 bp, Homo sapiens
  chr2:15792394-15792425
  hypo
gattgttgagaactctcgcagagggagacca

SEQ ID NO: 62783 - DNA, 43 bp, Homo sapiens
  chr2:15830328-15830371
  hypo
agagtgaccagcctgggctggcgcagaggtgactcatgcctgt

SEQ ID NO: 62784 - DNA, 31 bp, Homo sapiens; identical to SEQ ID NO: 15920
  chr2:15910903-15910934
  hypo

SEQ ID NO: 62785 - DNA, 30 bp, Homo sapiens
  chr2:15950517-15950547
  hypo
agacagagcaagacgcgaagtctgccccta

SEQ ID NO: 62786 - DNA, 30 bp, Homo sapiens
  chr2:15950930-15950960
  hypo
ctcagaaactcaggtcggtcctcagcaggg

SEQ ID NO: 62787 - DNA, 156 bp, Homo sapiens
  chr2:15982988-15983144
  hypo
cttgtgaagccacagggcaggcgtgccaccacactgaccctgcagaggccggggacaaagcagtgcggggccgcactgctgctgaggccggccccagcaaacctgattatggggcctctgccacggtctgcccgcgtctttcagagagagcagtct

SEQ ID NO: 62788 - DNA, 232 bp, Homo sapiens; identical to SEQ ID NO: 37159
  chr2:16079904-16080136
  hypo

SEQ ID NO: 62789 - DNA, 38 bp, Homo sapiens; identical to SEQ ID NO: 1335
  chr2:16080353-16080391
  hypo

SEQ ID NO: 62790 - DNA, 169 bp, Homo sapiens; identical to SEQ ID NO: 37161
  chr2:16080605-16080774
  hypo

SEQ ID NO: 62791 - DNA, 824 bp, Homo sapiens; identical to SEQ ID NO: 1337
  chr2:16081809-16082633
  hypo

SEQ ID NO: 62792 - DNA, 43 bp, Homo sapiens
  chr2:16105581-16105624
  hypo
gaggtgggtagaggctattcccgttttgggacaggctggtgct

SEQ ID NO: 62793 - DNA, 31 bp, Homo sapiens
  chr2:16121785-16121816
  hypo
ccttcttttcctcacccgtatctcccatgaa

SEQ ID NO: 62794 - DNA, 347 bp, Homo sapiens
  chr2:16124557-16124904
  hypo
tccccgtctccatggcgacgggagcagctgctctgttctgggccttggctgggctgtgcggggcggcctgcccgcctgtctgcctgcccgcccgcctgcccggccgtgggagctgccagcgccttgccctcccgctgcccacaggccctgccaggctgggcgcaagaaagcgtgtttactaacaccatccacacggctccctgggcatggtggctctgcccagaagatgtcaggccgagggcaccgggaggtgggcctggagccaggctgtctgcagcccggagagacagtcccggccggctgctgccctggcctgccagtctctgggcgagcgcaggcactggggg

SEQ ID NO: 62795 - DNA, 43 bp, Homo sapiens; identical to SEQ ID NO: 15925
  chr2:16274078-16274121
  hypo

SEQ ID NO: 62796 - DNA, 31 bp, Homo sapiens
  chr2:16396900-16396931
  hypo
tgctggtttgaatttccgattttctctgttg

SEQ ID NO: 62797 - DNA, 31 bp, Homo sapiens
  chr2:16705037-16705068
  hypo
cttctacaagggaggccgttggctgctttcc

SEQ ID NO: 62798 - DNA, 103 bp, Homo sapiens
  chr2:16826646-16826749
  hypo
agcttccttatataataaaaacgaagcggatatgcaccttatatagccgctgtggagtttaaatgagctcctgcaatgacacggctagtgcagtatctgatat

SEQ ID NO: 62799 - DNA, 40 bp, Homo sapiens
  chr2:17090480-17090520
  hypo
aaggctgggtgcagtggctcacgcctgtaatctcagcact

SEQ ID NO: 62800 - DNA, 30 bp, Homo sapiens
  chr2:17464171-17464201
  hypo
ctaggcaatggatggcgtgtgtgtttgagt

SEQ ID NO: 62801 - DNA, 580 bp, Homo sapiens; identical to SEQ ID NO: 37168
  chr2:17719857-17720437
  hypo

SEQ ID NO: 62802 - DNA, 30 bp, Homo sapiens; identical to SEQ ID NO: 15927
  chr2:17830609-17830639
  hypo

SEQ ID NO: 62803 - DNA, 285 bp, Homo sapiens
  chr2:18112740-18113025
  hypo
ctggagaagtttgacacactgcgatttggtcagctccggaagaaaatctggattagaatggagaatccagcgtactgcctgtccgctaagcttatcgctatctcctccttgagcgtggtgctggcctccatcgtggccatgtgcgttcacagcatgtcggagttccagaatgaggatggagaagtggatgatccggtgctggaaggagtggagatcgcgtgcattgcctggttcaccggggagcttgccgtccggctggctgccgctccttgtcaaaagaaattc

SEQ ID NO: 62804 - DNA, 30 bp, Homo sapiens; identical to SEQ ID NO: 15928
  chr2:19249122-19249152
  hypo

SEQ ID NO: 62805 - DNA, 31 bp, Homo sapiens
  chr2:19605841-19605872
  hypo
atcaagggaaagcaatcgtatataacggagt

SEQ ID NO: 62806 - DNA, 64 bp, Homo sapiens
  chr2:20001577-20001641
  hypo
ctgagctgccttagtttctcccgaggtcgttcacctaggggacgccaaaagcaaggatgtttca

SEQ ID NO: 62807 - DNA, 31 bp, Homo sapiens
  chr2:20047967-20047998
  hypo
aatggggggttacctgcgattggcgcctgaa

SEQ ID NO: 62808 - DNA, 69 bp, Homo sapiens; identical to SEQ ID NO: 1350
  chr2:20101401-20101470
  hypo

SEQ ID NO: 62809 - DNA, 170 bp, Homo sapiens
  chr2:20111756-20111926
  hypo
gattgagtcatctggctcaagcggccactctggtcctttttgtaacccgactattaggggaaagcgtatgtgacagaatgtgagtcaggacataaaaacattacaaaacccaggattcaggtgttgcggtctttccactccactggcacgttacactaacagtgttaatc

SEQ ID NO: 62810 - DNA, 31 bp, Homo sapiens; identical to SEQ ID NO: 15931
  chr2:20247560-20247591
  hypo

SEQ ID NO: 62811 - DNA, 40 bp, Homo sapiens
  chr2:20253273-20253313
  hypo
ataagatcaggggagccgggcgcggtggctcacgcctgta

SEQ ID NO: 62812 - DNA, 41 bp, Homo sapiens; identical to SEQ ID NO: 1353
  chr2:20424155-20424196
  hypo

SEQ ID NO: 62813 - DNA, 30 bp, Homo sapiens
  chr2:20432766-20432796
  hypo
atagtgttatgtcagcgctcatacctgtgt

SEQ ID NO: 62814 - DNA, 138 bp, Homo sapiens
  chr2:20456197-20456335
  hypo
atgtatgttgaaacaacgtagtgatgctgaacttgctgtatttaaactgtcttcactgtgtaaatcatccgctaatatttatcgggcggtaactaacatgactaattcagaattacacacttccgccttacttagtac

SEQ ID NO: 62815 - DNA, 30 bp, Homo sapiens; identical to SEQ ID NO: 15934
  chr2:20494232-20494262
  hypo

SEQ ID NO: 62816 - DNA, 82 bp, Homo sapiens
  chr2:20521040-20521122
  hypo
tgtctcaaaaaaagaaaaaagaaaaagaaaaaacgcaaattgtttacctgggctgggaagcgggggggaggggagtctgtaa

SEQ ID NO: 62817 - DNA, 30 bp, Homo sapiens
  chr2:20529400-20529430
  hypo
gtctcagagcagtggcgagttgtttccact

SEQ ID NO: 62818 - DNA, 277 bp, Homo sapiens
  chr2:20574693-20574970
  hypo
tctagatggtgagacaagaaccggatgaaaagacagtcatttggcagcgaggagcaagcgacgggcctcatcctcactctcgcccggcttgtcctgggccctcctgcggccctaggaattgcctgagggacaaacaaagtggacaaagtcgctgacagacctgagttactgccttggtcctggtgaccctgctccaggcagtccatctctgtctgcgatccattgatcctggcgccactcctggtgcttcattatcgcccagaggggcctctggagt

SEQ ID NO: 62819 - DNA, 164 bp, Homo sapiens; identical to SEQ ID NO: 15936
  chr2:20594842-20595006
  hypo

SEQ ID NO: 62820 - DNA, 33 bp, Homo sapiens; identical to SEQ ID NO: 15937
  chr2:20642225-20642258
  hypo

SEQ ID NO: 62821 - DNA, 21 bp, Homo sapiens
  chr2:20642620-20642641
  hypo
ccaccgcgcccggcggaaata

SEQ ID NO: 62822 - DNA, 361 bp, Homo sapiens; identical to SEQ ID NO: 1356
  chr2:20646412-20646773
  hypo

SEQ ID NO: 62823 - DNA, 278 bp, Homo sapiens; identical to SEQ ID NO: 37202
  chr2:20646843-20647121
  hypo

SEQ ID NO: 62824 - DNA, 140 bp, Homo sapiens; identical to SEQ ID NO: 15940
  chr2:20666558-20666698
  hypo

SEQ ID NO: 62825 - DNA, 534 bp, Homo sapiens
  chr2:20841041-20841575
  hypo
tgtgccaggtacgcccgcctgctgcccctctgcctgtctcccagcctcaggctccagtccttaacacgcctggccgatagcagattcaataaaaacatcttagtggcccagaggaaagatgcaataacggtgccattctggacactgtcacaggtccagttaacaagatttgatacagggacccctgcccagcctgcacgtgatcagggccactgtgttcattcccagctttctgcatatcaggagggtgatctcaccggctggcaggtcatcttcctgcaacaccgtgaatcatctgttctcagcaccaacctcattctcccgtgaaccagtgtggccttcggcgggccagccaatgcaagcagtggagacagatatttccaaggcttgttctctgccctgcgtcaggcaggacctctctgcacgcaggcacccgagtcaagcaggccaggactcttgctgtcatcagaaggcagccttgagcaccatctgactcagagagggcagcactcagcttcccgtggggccagcggc

SEQ ID NO: 62826 - DNA, 1755 bp, Homo sapiens; identical to SEQ ID NO: 37206
  chr2:20865708-20867463
  hypo

SEQ ID NO: 62827 - DNA, 30 bp, Homo sapiens
  chr2:20894655-20894685
  hypo
cttgtctctttctcacgtgagactgcactg

SEQ ID NO: 62828 - DNA, 163 bp, Homo sapiens
  chr2:20965391-20965554
  hypo
tcattgggctgcattcagtggcggatgggctgggctgagatgggctggaagacccgagaaggtttcactcaggcctggtgcctcatgatcctcctacgtagctagcttgggcttctctcagcctcgtggtctcagggcagtcggctttcttacacagcagctg

SEQ ID NO: 62829 - DNA, 865 bp, Homo sapiens; identical to SEQ ID NO: 1360
  chr2:21022198-21023063
  hypo

SEQ ID NO: 62830 - DNA, 102 bp, Homo sapiens
  chr2:21079878-21079980
  hypo
ggggacccaatcctttccacccgggaacctgtctgcctcctgccatcaatacgccctccatggtgcccaggctgttcctgcggaggggtgcctacaggccca

SEQ ID NO: 62831 - DNA, 131 bp, Homo sapiens
  chr2:21346723-21346854
  hypo
agcgccaggcgggacgctttgcgcagctgcaggcctcccccgccgcattcggccttcaagcccgcacatgctccctggggcccctgcgggattacgagggggtgggaacagggcccgagtctcccgccatc

SEQ ID NO: 62832 - DNA, 30 bp, Homo sapiens; identical to SEQ ID NO: 37209
  chr2:21595656-21595686
  hypo

SEQ ID NO: 62833 - DNA, 31 bp, Homo sapiens; identical to SEQ ID NO: 15944
  chr2:22237527-22237558
  hypo

SEQ ID NO: 62834 - DNA, 30 bp, Homo sapiens
  chr2:23093738-23093768
  hypo
ttttcagaacatgatcggctatgtaaagtg

SEQ ID NO: 62835 - DNA, 409 bp, Homo sapiens
  chr2:23546893-23547302
  hypo
gggacccagatctgggacagtcgaggtggccaccagtcaccaggcgttctcaggattctctttcagtttgagaggccacccttatttggataaacatgcgtaccgaattcaagaggcactaataccacggtgcgatgaagtgaaaaggcaaacacgcggagtgccagatctcccaacacaaacatggtcccaagcctggcgcacctggattgggcttgggatttttaagccaacaaatggggtgggagacagggaaagagagggccgggaagaaaaaccacaggctcccagaatccaaaggaaagtggcatcctcacccgatgagcagggtctggcacagggctgagcacatgacagccagtaagtctctgctgaaggatgcctgaaatctgcgcggttctaccaccga

SEQ ID NO: 62836 - DNA, 73 bp, Homo sapiens
  chr2:23573444-23573517
  hypo
actgtcagagcttccagcctccgggtaaccatggtaatcggcagcattaaccgcagcagtgacaggagcctca

SEQ ID NO: 62837 - DNA, 30 bp, Homo sapiens; identical to SEQ ID NO: 15946
  chr2:23607167-23607197
  hypo

SEQ ID NO: 62838 - DNA, 31 bp, Homo sapiens; identical to SEQ ID NO: 15947
  chr2:23725076-23725107
  hypo

SEQ ID NO: 62839 - DNA, 137 bp, Homo sapiens
  chr2:23746910-23747047
  hypo
catgccttcctcttccgaaggccttccccatctagggttttttctccccatgacacctcagtgtcgtaggtagcggagatgcaagtgttcccatttctcggaaaaggaagccgatgctggagcgggggatgacttgc

SEQ ID NO: 62840 - DNA, 30 bp, Homo sapiens
  chr2:23747315-23747345
  hypo
gatgttcatggctcacgggtgggcggctcg

SEQ ID NO: 62841 - DNA, 31 bp, Homo sapiens
  chr2:23767027-23767058
  hypo
agtccaggatcttgcccgtctgtggggagag

SEQ ID NO: 62842 - DNA, 356 bp, Homo sapiens; identical to SEQ ID NO: 15948
  chr2:23785003-23785359
  hypo

SEQ ID NO: 62843 - DNA, 215 bp, Homo sapiens; identical to SEQ ID NO: 15949
  chr2:23793021-23793236
  hypo

SEQ ID NO: 62844 - DNA, 176 bp, Homo sapiens
  chr2:23841356-23841532
  hypo
aggggtttctcctgaccgcctttgagttgggacattggtcttttgctgcctttggactggaactgaaacatccgctcttcttgggtctcaagcctgcaggcttttggactggaactataccagttcccgctcctgggtctccagcttgctaactgcagatcgcgggacttctcggc

SEQ ID NO: 62845 - DNA, 211 bp, Homo sapiens
  chr2:23842952-23843163
  hypo
tgaggataagatggagcgagcctcggtgagggggcccagtggacacacagaggccaggcttaggctgatgtgtggagattggacgcagcaaaccacatgagggtgctggcagagcatgaagtgccagcccaggggtggtgagagggggcaccaggaggccagcggggcccatcagggagttggcactcgatcccttcgacaatgggattgg

SEQ ID NO: 62846 - DNA, 30 bp, Homo sapiens
  chr2:23853217-23853247
  hypo
ctactggccacagccggggaggctggggag

SEQ ID NO: 62847 - DNA, 36 bp, Homo sapiens
  chr2:23863677-23863713
  hypo
ggggcgatgcaggcctcgtaccgtggtctatgtgac

SEQ ID NO: 62848 - DNA, 66 bp, Homo sapiens
  chr2:23865087-23865153
  hypo
ctggacgcaggtgtctcgttcccctctgtgacctagcacccagtgcagggccggggatggtcagtg

SEQ ID NO: 62849 - DNA, 31 bp, Homo sapiens
  chr2:23881925-23881956
  hypo
gactttagaacacccccgctgctgaccgatt

SEQ ID NO: 62850 - DNA, 140 bp, Homo sapiens; identical to SEQ ID NO: 15951
  chr2:23893203-23893343
  hypo

SEQ ID NO: 62851 - DNA, 31 bp, Homo sapiens
  chr2:23901107-23901138
  hypo
ccagtccccattccctcgtgccacttgccgc

SEQ ID NO: 62852 - DNA, 31 bp, Homo sapiens
  chr2:23906650-23906681
  hypo
tgcttgcttgctttcccgaaaagtccccaca

SEQ ID NO: 62853 - DNA, 30 bp, Homo sapiens; identical to SEQ ID NO: 15952
  chr2:23913079-23913109
  hypo

SEQ ID NO: 62854 - DNA, 30 bp, Homo sapiens
  chr2:23914341-23914371
  hypo
tctgttcttttgggcgtctctggtcagact

SEQ ID NO: 62855 - DNA, 31 bp, Homo sapiens
  chr2:23918783-23918814
  hypo
gagtgtgtcccaagggcgcccatccatgtcc

SEQ ID NO: 62856 - DNA, 31 bp, Homo sapiens
  chr2:23925991-23926022
  hypo
cttgtgacctctgccccgcacaaggtccatc

SEQ ID NO: 62857 - DNA, 31 bp, Homo sapiens; identical to SEQ ID NO: 15953
  chr2:24016852-24016883
  hypo

SEQ ID NO: 62858 - DNA, 30 bp, Homo sapiens; identical to SEQ ID NO: 15954
  chr2:24049917-24049947
  hypo

SEQ ID NO: 62859 - DNA, 175 bp, Homo sapiens
  chr2:24060294-24060469
  hypo
tctgcacccaggcccccgcaagagcacagggaggcccaggtccacagccacaacttgggcggctgcagctgcacccagggagctcccatcccaccgactcaaaaggggtgggattcccacttgtccccagtttccaaaagctccgtggaatgtgcagccccggctacacctcccc

SEQ ID NO: 62860 - DNA, 99 bp, Homo sapiens
  chr2:24160943-24161042
  hypo
ttgttatgtggcgcacgactataaatgcaaaaatattcatgcttaaggatttgaagactttatatataaagtgagtcatcgcaccagtattgttaagat
